United States Patent Application Publication US 2017/0009304 A1 - sequence listing, part 35

SEQ ID NO: 733912 - DNA, 50 bp, Homo sapiens
gcatgtgacaatggattgaatgtgagaggctgcagcgctggtggaggagg

SEQ ID NO: 733913 - DNA, 51 bp, Homo sapiens
aaggattccaagtaactcttatttgcatccatggggtccctcacttcatcc

SEQ ID NO: 733914 - DNA, 100 bp, Homo sapiens
tccggggtgggcaagacctgcctgctgtgccgcttcaccgacaacgagttccactcctcgcacatctccaccatcggtcctgatggggagaatagctggt

SEQ ID NO: 733915 - DNA, 51 bp, Homo sapiens
catgcatcgtcccctggactctctcaatgtgagtgcatctccatccatgtg

SEQ ID NO: 733916 - DNA, 83 bp, Homo sapiens
cgacagctgctcctggctacatagctccagcttctcttttaaaaggactaaaacatgctaacatagtgctacttcatgacatc

SEQ ID NO: 733917 - DNA, 98 bp, Homo sapiens
tgaaaagccttaggatattgctgttgtcccaggacagaaaccatagaaccatggagtctggcagtaccgccgccagtgaggaggcacgcagccttcga

SEQ ID NO: 733918 - DNA, 99 bp, Homo sapiens
cagcggctgaggaggggccccagcagcccccgaaggccctatcaggacatggagtatgaaagacggctctgctgccatgaaggtgaagattaagtgctg

SEQ ID NO: 733919 - DNA, 52 bp, Homo sapiens
ggaagagaagagggtggctaatgattaagaacttaaagcagcagtattacac

SEQ ID NO: 733920 - DNA, 100 bp, Homo sapiens
gcatggcgacagcctcggaaatggcaccaacttgattggaggaagcgacggaccagaggccagtccctagatgacactgagctccggctgttgggacgga

SEQ ID NO: 733921 - DNA, 100 bp, Homo sapiens
cagcgcgggccagagcgcagcgccgagcgcggcccgggcgccatcgagccttggcggcggacgtgcaggggagtacatcaagacctggcggccacgctac

SEQ ID NO: 733922 - DNA, 50 bp, Homo sapiens
tccttatgcagagtggccgacttgtcggatgcctcctccctgtagtgatt

SEQ ID NO: 733923 - DNA, 74 bp, Homo sapiens
atttttcaaagccatagttggtaaaaacttacctgatgaagaggcacaacttcctgaatggaccatgactccca

SEQ ID NO: 733924 - DNA, 100 bp, Homo sapiens; identical to SEQ ID NO: 247983

SEQ ID NO: 733925 - DNA, 83 bp, Homo sapiens
ggtggaggacgaggggctccgggtcttccagagcgtgaagatcaagatcggagcatcagatccatgctgctgctgactcggag

SEQ ID NO: 733926 - DNA, 75 bp, Homo sapiens
caggagcccggcaccccccgccgacaaggagggtgatgtgtccaatctagatcccaacttctcatttgaaggcac

SEQ ID NO: 733927 - DNA, 98 bp, Homo sapiens
gaatgagaaggtcatgtgtggctacatcagtgaagataccaggagtttccctacgtataccctggtggttcaagctgctgaccttcaaggtgaggggt

SEQ ID NO: 733928 - DNA, 76 bp, Homo sapiens
ccaactaatccaatgctgtttcatcttgttcgagacgtcaaacaggcggctgagccagaggccaactgcagaggaa

SEQ ID NO: 733929 - DNA, 75 bp, Homo sapiens
tttgtatagagatgtgatgttggagaactacagaaacctggtctccctagaaaggagaagatgagtatgccaacg

SEQ ID NO: 733930 - DNA, 90 bp, Homo sapiens
cgaacctctattgtggacaaaataagaaatgatttttgtaataaacagagtgacaggttcgttccaccagtcataaaccagatgaaatct

SEQ ID NO: 733931 - DNA, 75 bp, Homo sapiens
ctggacgccgcgatcgtggggcccgcgaggcgggcagccggggcgtccaggctcttgtcaggatggtgaagctgt

SEQ ID NO: 733932 - DNA, 83 bp, Homo sapiens
gggttacaagcagcaagtgcgcggttggggccactgcgaggccgttttagggccccgtggttatgaatgtgcttcagtttcat

SEQ ID NO: 733933 - DNA, 101 bp, Homo sapiens
gcgagcaggcgaggaatcgccgtggcgtcttggtgttctccacgctggttcgcagggacaatgactcattcttcccaggacactggttcttgtggcattca

SEQ ID NO: 733934 - DNA, 100 bp, Homo sapiens
ggctgggagcgtgctttccacgacggtgacacgcttccctggattgggagaattgacatctcaccaagtaccctgaggaagcatacccgtttagcagggg

SEQ ID NO: 733935 - DNA, 100 bp, Homo sapiens
ggaaagattgcaaggtgaataaagaagtggagcgtgtcctgaaggagttccaccaggccgggaagcccatcggacgttggacctctcgaacaaccagctg

SEQ ID NO: 733936 - DNA, 50 bp, Homo sapiens
caacaccacaataatccacagccaaggtatgatctcgtgaaaccttgaga

SEQ ID NO: 733937 - DNA, 99 bp, Homo sapiens
ggagcatgaatggagcaaaatggcggatcatgtgcagtaattcgccaaaatgacgaacacaaagggaaagaggagaggcacccgatatatgttctctag

SEQ ID NO: 733938 - DNA, 100 bp, Homo sapiens
aatccaccatcaatatatctggagagccacccagagttccctcactgaagatctgagcatgacccgggacgaggcactgccggactctcattctgcacag

SEQ ID NO: 733939 - DNA, 100 bp, Homo sapiens
gctcgggagtcgggggcggtgggacagtgcggctactcttgatcctctccggctgcttggtctacggcacagaaatggcacctcgaaaggggaaggaaaa

SEQ ID NO: 733940 - DNA, 98 bp, Homo sapiens
cgcgcgctgcccacgattcgcttctgaggtcgaagaattccatccactgacgccaacctgccatctggcggtaagggcttcaaactccgaagacagcc

SEQ ID NO: 733941 - DNA, 126 bp, Homo sapiens
cgttcttccgctggctcagccgcaagtacccgtccatcatagtcaactgcgtggaagagaaggaccctaataggagtattcataccagcagcagcagcagcagcagcagtagcagcagcagcagca

SEQ ID NO: 733942 - DNA, 96 bp, Homo sapiens
ttggaaatggctgcaggttcagactctctctccagatcggattcaaccgcacatcatgacagatgttccggctacatttacccaggctgagtgtaa

SEQ ID NO: 733943 - DNA, 83 bp, Homo sapiens
accccgccggcttcaactgcaaaggtaccgaggagaaggcattgtatatgggacactagaggaggtgtgggactgtgtgaagc

SEQ ID NO: 733944 - DNA, 87 bp, Homo sapiens
cggtaatgctggtggtctgcatcaccaccggatcaacttcgacaaatatttccatcttgctgctgcaaaaggacacgtggaatgcct

SEQ ID NO: 733945 - DNA, 100 bp, Homo sapiens
aggcaagactggcacccagcacagcagtgtggacaacagtgagtatatgcggaatggagacttcttacccaccaggctgcaggcccagcaggatgctgtc

SEQ ID NO: 733946 - DNA, 76 bp, Homo sapiens
ccgagtttgtaatgtgactagacggccagccagtcatcaaacaagtgtatgctgacttgtaaagtgaagaagccag

SEQ ID NO: 733947 - DNA, 82 bp, Homo sapiens
gagacggagccacagcatttggtgactagggggaagccagggctttgttcgcgggggtcacagctctcatggctgcagctag

SEQ ID NO: 733948 - DNA, 100 bp, Homo sapiens
aggaaatgtgccagtgatattttccaggcccgatgagagaaagggaaagttaaggatgctggagcagaacaatggatttctctttctctttcatgcaagg

SEQ ID NO: 733949 - DNA, 80 bp, Homo sapiens
tcaaagagaaaaggcaacatcctgtcacaggccatgctctggcaaaaacgctctggaagaagacatagaaaaccatgcaa

SEQ ID NO: 733950 - DNA, 51 bp, Homo sapiens
ccaggagaacctggcagatcttttgagaagtccccacgagaagaagaagaa

SEQ ID NO: 733951 - DNA, 83 bp, Homo sapiens
ctctgctctgcctccggggacaagaaactagagcaaataaccgttttgaaatttattcatgtgattgaacggcgtgctcttcc

SEQ ID NO: 733952 - DNA, 101 bp, Homo sapiens
ggcttgatttatttcaagagcatatgtttgaagtattggaacgagcaagaaggatgaatcgccaccccacgtcatgctgcagcgccgcagagatcatggct

SEQ ID NO: 733953 - DNA, 90 bp, Homo sapiens
gatgaaaattgagctgtccatgcagccatggaacccgggttacagcagtgagggggccacggctcaagacagagtcttgctctgtcaccc

SEQ ID NO: 733954 - DNA, 82 bp, Homo sapiens
tgcctctgaggaacacgccgcaggcggctatgagaggttttcctccgagtacccagaattctgttctaaaaccaaggccctg

SEQ ID NO: 733955 - DNA, 75 bp, Homo sapiens
gctgaagtctcacatcagaggtgtcaaggtggaattctactaagtatcagtcggccctacaagacaaagcccacc

SEQ ID NO: 733956 - DNA, 98 bp, Homo sapiens
taccactgtaatgtgcagactccaagtactgtaagattgatgttaaaggcatggtgttcaccccacttcatcagcgtacataagttatctcttctttt

SEQ ID NO: 733957 - DNA, 50 bp, Homo sapiens
tcaggagccgccgccgccatatcaggttctaaatggcttctaagaagttg

SEQ ID NO: 733958 - DNA, 82 bp, Homo sapiens
ggagtcttccatcaatcatatctcacagcatttaaatcaaacggtattgagatggattgggttatgaaacataatggtccaa

SEQ ID NO: 733959 - DNA, 100 bp, Homo sapiens
gaaggaaacaaaaccaaaggccgaagtacaagatctaaggctcttgtctggcctggtccagatccctgtgagcatgtaccagactgtggtgaccagcctc

SEQ ID NO: 733960 - DNA, 75 bp, Homo sapiens
agaagtctccctcaggatcagaccgtagcccttccggaaacctccatggtgacagagctgaatgaacctctctcc

SEQ ID NO: 733961 - DNA, 80 bp, Homo sapiens
tggtctccattatttgagatgagttacatcttggagtgtttctgttcactgtaaaaagaaacacaagcgagaggaggagg

SEQ ID NO: 733962 - DNA, 75 bp, Homo sapiens
tcactgtcctggtacaaggatgaggagactccaattccagggtttcagaaccgcatcgcagcatctttcctgaaa

SEQ ID NO: 733963 - DNA, 97 bp, Homo sapiens
gaaacgctcagcctcactgtagatgccaagacagagactgcggtcttcaaaaggagctgctctcgtttgaggatgtggcgatgtacttcaccagaga

SEQ ID NO: 733964 - DNA, 99 bp, Homo sapiens
ctgcctcagcctctcgagtagctgggattacaggctccaagcttgatatagaagactatcatatgaaccagaaagggtaactgaaaccaaagaaatgac

SEQ ID NO: 733965 - DNA, 90 bp, Homo sapiens
tcagtgcgaagaagctgcagccgcacctggccaagggtaccaaaaactgtggaagagttatgtgaaacttcgccacctcctagcaaatag

SEQ ID NO: 733966 - DNA, 100 bp, Homo sapiens
gtcacacacggtcctaagagctgggcaccaggaagcgaaggctgctgcaagctttcttcctggtggcagatgacatcatggattcatcccttacccgccg

SEQ ID NO: 733967 - DNA, 75 bp, Homo sapiens
cttgatcctcctgccttagcctcccaagcagctggtattacaggaccctgatgctcccataagacagaaaatgcc

SEQ ID NO: 733968 - DNA, 75 bp, Homo sapiens
gttcccagtgctcctgggatgtttataactggagcaaatcttaaaccacattttggatgacattgaattttttat

SEQ ID NO: 733969 - DNA, 74 bp, Homo sapiens
ttatcgatattatgagagcagagcatgatcctcttaaggatgcctataagaaaatcttagaaaccacaatgact

SEQ ID NO: 733970 - DNA, 100 bp, Homo sapiens
cttttgccctggtgggattatttatactgcattggaacaaaaactgaaaaaattgacggaagatttgagttgtcagcgacaaaatgcagaaagtgccaga

SEQ ID NO: 733971 - DNA, 88 bp, Homo sapiens
gctccgagcgagcgagcggcgcccagcccagcgcctcggccgaacccctccgcagcagatgcttgtttgctactgatgggtgtgagca

SEQ ID NO: 733972 - DNA, 75 bp, Homo sapiens
ggaggtggttgtgcaggatggcgacggcggcctacgagcagctgaagctggagccttttcataagctgctggccc

SEQ ID NO: 733973 - DNA, 100 bp, Homo sapiens
taacaaaatgaaaaaattgactactgatgggaagttaattgccagagcattgagaagttcagctgttgtagaggtgaaaactgacttttgtcagactgta

SEQ ID NO: 733974 - DNA, 98 bp, Homo sapiens
ggatgggggcctcgggcgccccgcagccccccaacatcctgctcctgctcatggacgacgaagctcttcgtgggcggtcttgactggagcacgaccca

SEQ ID NO: 733975 - DNA, 101 bp, Homo sapiens
cacctgtctggagcaaggaaaagatccctggaatatgaagggacacagtacggtagtcaaacccccagatgcccagcctacagagtctgagaaggaaattt

SEQ ID NO: 733976 - DNA, 80 bp, Homo sapiens
tcagataagcttgacattacagccaagatggtgctgtcccagagacaacgagatgaacttgttccttgcctgtatctccc

SEQ ID NO: 733977 - DNA, 93 bp, Homo sapiens
gggcctgcagcgggagctggacggcgagcgcgagcggcgcgagaaaagtctctggtaagaagagtgaaagcaaagaagccaagaagtctgaag

SEQ ID NO: 733978 - DNA, 74 bp, Homo sapiens
cggcctagccgaagcctcctctgtggcgctcagcaactgcgatgggctggtcaaaatgcagatcttcgtgaaaa

SEQ ID NO: 733979 - DNA, 100 bp, Homo sapiens
gaaacgtgcatggatgaagcacagattgctgctgtatgcagagaggtcgttccaggggtagaggaggcatgaaggatgaccgtcgggacagatactctgc

SEQ ID NO: 733980 - DNA, 90 bp, Homo sapiens
cgggagcggcgccgagaggccgtgcgggacgcgggcgccaggaccggccgaacgcagagaccctctttcccagctgcccgctcctcagca

SEQ ID NO: 733981 - DNA, 50 bp, Homo sapiens
tacacaggaactttaaatcttgacagaatcctaatgtacctggctagctg

SEQ ID NO: 733982 - DNA, 100 bp, Homo sapiens
ctcggaaaccccgcctcttacagtcacgaggtcatacttacctggttgcttgcgcatctagtaatgttggatcatattctggatgttttgaataccaagt

SEQ ID NO: 733983 - DNA, 51 bp, Homo sapiens
tgtacctgttaccactttcaaaagtgcaacattagaggaaatcaatcagca

SEQ ID NO: 733984 - DNA, 100 bp, Homo sapiens
caagtctgccctggtgcaccggtacctgacgggcacatatgtccaggaggagtctccggaaggtattatacctgaagaaccttagccctcgggtgactga

SEQ ID NO: 733985 - DNA, 100 bp, Homo sapiens
tgggccagagcacctgtgccctgttcctcagggcagctgtgcggagggtagtggcagccatgaaccggatggaccagaagaagcacgagaagttttcaaa

SEQ ID NO: 733986 - DNA, 75 bp, Homo sapiens
gggagatccaagagattcagtatcactcgctcccttgatgatcttgaggcatctccttggaaacaatgccatctt

SEQ ID NO: 733987 - DNA, 96 bp, Homo sapiens
gaacgcttcctgcgacgactggagttccatgccagcaagatcctggctgcagctctgaccgaatgtcaccggaaatccagtgcccaaggcaagcct

SEQ ID NO: 733988 - DNA, 100 bp, Homo sapiens
ggtcagatgaacaatccttccactaatggcgtgaatggccatttaccaggagatgcacttgcagcaggaagattgccagacagggtcttgctctgttgcc

SEQ ID NO: 733989 - DNA, 71 bp, Homo sapiens
ctcgctgctcggtgcgaggcggcggagagcgaggcctggtggcatggaatattcacatgggagagccgcat

SEQ ID NO: 733990 - DNA, 100 bp, Homo sapiens
agcacatgttcatccactcggatcaatgtccgagttaccaccatggatgcagagctggagtttgcaatccagccaaatacaactggaaaacagctttttg

SEQ ID NO: 733991 - DNA, 100 bp, Homo sapiens
tttgcagcggcggcagcagcaccaggctctgcagcggcaacccccagcggcttaagccatggctgcggcgagggaactccccaggccaccgggttctttg

SEQ ID NO: 733992 - DNA, 76 bp, Homo sapiens
tgaccgagaccgcggccgggaccgaggaaactatgttccaacttcctgtcaacaatcttggcagtttaagaaaagc

SEQ ID NO: 733993 - DNA, 75 bp, Homo sapiens
aaggaccagtacctgcccaggaaactggcaatcttgctgccaatgatctctccccgtcccgaatagccagactac

SEQ ID NO: 733994 - DNA, 100 bp, Homo sapiens
gtgctccggggaggtcacctgacgaggagaatgcccaggaaaaccatgggctggctgtgcccaccccctcggttccagatgattttgcagacaaagaagt

SEQ ID NO: 733995 - DNA, 50 bp, Homo sapiens
aaggaacctgaagtttttagcaaggaagaggtggctggatccaaacaaac

SEQ ID NO: 733996 - DNA, 75 bp, Homo sapiens
cgcgggcgagctgcggctcggacgccagcggacacgcgggcgagccggagtcagagtggtggctacagtgaccgg

SEQ ID NO: 733997 - DNA, 100 bp, Homo sapiens
ggaatcctactcagaatgtgagaattgtcgagaacggtcaagaaagagtagaagttgaagaagatggccagttaaagtccttaacaataaatggtaagga

SEQ ID NO: 733998 - DNA, 73 bp, Homo sapiens
ccagctgaccggaccggtcatgcccgtccggaacgatggccaggccatgttatgggatctcaacgaaggcaaa

SEQ ID NO: 733999 - DNA, 80 bp, Homo sapiens
aatgggaacatgtacacctcatccctgtacgggtgcctggcctcgcttctgtcccattaggcatttcctcacatgagaat

SEQ ID NO: 734000 - DNA, 100 bp, Homo sapiens
cggacagctatgaaactcaagtcagactaactgcagatggttgctgtactttgccaacaaggtacaaacccgtagtgctgatgaaccaatgacaacattt

SEQ ID NO: 734001 - DNA, 98 bp, Homo sapiens
gcagatctgaagggaaagctccagatactaggtatccgctacacacaccccatctgatctcccagtgggaacaagaggaggacctgcagacagtgaag

SEQ ID NO: 734002 - DNA, 107 bp, Homo sapiens
agtaggccgtctcgctctgggtctccaggcccgcgaccgtccgccagtcgtcccgagggcgtgatggtgggcatgggtcagaaggattcctatgtgggcgacgaggc

SEQ ID NO: 734003 - DNA, 74 bp, Homo sapiens
atcctcctggccaccgactcctacaagcctgaactctttgcttccggaatccgggattgttgctgacatagaat

SEQ ID NO: 734004 - DNA, 82 bp, Homo sapiens
ctccgaccagtctgggggcgctggcggcctgcgcagccacctcaaggttagaaatctgtgctacatggtgacaaggcgcgag

SEQ ID NO: 734005 - DNA, 100 bp, Homo sapiens
gacggtgcaggccggagcggcacctacgtcctgatcgacatggttctcaacaagatggccaaagaacccagtgacttgattgtaaaaatttacagagcgg

SEQ ID NO: 734006 - DNA, 100 bp, Homo sapiens
gttattttcagagagttctcgaagatttggaataaaggtatgtaaccactgaagtacacacacatgacatggagccgtcaacaccagatactccaaaaga

SEQ ID NO: 734007 - DNA, 74 bp, Homo sapiens
gtcaaacagatctgcgtggtcatgttggaggtggttgtgtcaaaccgattggtgacatctccatgctgtattgt

SEQ ID NO: 734008 - DNA, 79 bp, Homo sapiens
ttttgatttctttctggaagaaactttaggtggcagaaaagaatctgaagcccttgtaaagctaatggaaatatttggg

SEQ ID NO: 734009 - DNA, 74 bp, Homo sapiens
acaagttgaaaattcctaagaatccagaacttgtgccacagaactacagtgtcatggagaaactccagctgggc

SEQ ID NO: 734010 - DNA, 83 bp, Homo sapiens
ctcaggatacggtcacctgtattcgctgtggcttcaacatcaacgttcgggatctactactacgcggaccagatctacctgag

SEQ ID NO: 734011 - DNA, 74 bp, Homo sapiens
agacaagagcattctccttatctcatctgcacaggaagcaggtctaaggggtccagattttatggaaatgagct

SEQ ID NO: 734012 - DNA, 83 bp, Homo sapiens
tccccgaggaggaagacgaatcgttaaacatctgaaagggtcaggtactccaaagattcaggtttactcacgtcatccagcag

SEQ ID NO: 734013 - DNA, 87 bp, Homo sapiens
ctggtcttgctcggccgatgaagtgcagaggtttttttctggaagtactagccggacatcatgagtggctgtcgggtattcatcggg

SEQ ID NO: 734014 - DNA, 95 bp, Homo sapiens
ctgatgtgacacagaactcagagccaagggctgaaccaactcagaatgcattgccattttcacatagtttaatagaaaatggtcagcttgaaatt

SEQ ID NO: 734015 - DNA, 96 bp, Homo sapiens
ggacagcgtggacgccgtgtacgagcgcaccagcgaccacaagatcgtcttctttaaagccctactgccaataaagggaaaataagagatgctcat

SEQ ID NO: 734016 - DNA, 75 bp, Homo sapiens
gattccaagtaactcttatttggtgttgccacatctgcaaacttcctgggagagtaatggggattcgagtgcttc

SEQ ID NO: 734017 - DNA, 75 bp, Homo sapiens
ttgaaaatggacgagtaatcgcctgctttgattcattgaaagaatccttcaactgctttctaccaagcgttccat

SEQ ID NO: 734018 - DNA, 100 bp, Homo sapiens
tcggtggccgtgccgctcgacctcctggtcagcacttaccggctgccccagatcgcgcgcctggacaacgggctatcaggaaggataacgtatactccag

SEQ ID NO: 734019 - DNA, 51 bp, Homo sapiens
cccagtcctcggtgcggcgcggccaggtaccaggatcatctatgaccggaa

SEQ ID NO: 734020 - DNA, 101 bp, Homo sapiens
aaccgcgaagaaggagcgccccgggccaccgcgcaaccaagtgttgcctggtgagatgacgtccggttgtttgccttcgtgcgcttcaccaccggggatgc

SEQ ID NO: 734021 - DNA, 50 bp, Homo sapiens
ccaggcggccagccagctggaggtctttcctgcagctgcgcaactggacg

SEQ ID NO: 734022 - DNA, 83 bp, Homo sapiens
taaacgccaataatatggagacactaatcgaatgtcaatcagagggtgcctttagccgtctggacccaactggaacatttgag

SEQ ID NO: 734023 - DNA, 101 bp, Homo sapiens
tgcgccgcggctacgtgcgcgtccagtggtacccggagggcgtcaagcagcatgtgaaggagaccaagcctcccaaagtgaaatgcctgaccaagatctgg

SEQ ID NO: 734024 - DNA, 73 bp, Homo sapiens
atgaccaagcgcctctactacctctggatgtgaaaactacatctcagacccaactatcttatggagggcttat

SEQ ID NO: 734025 - DNA, 82 bp, Homo sapiens
ggaggagcagctcacctgagagacggagccccggctcgcccgtgtgcagaggttttgggatttgagattgacgcggtgaact

SEQ ID NO: 734026 - DNA, 100 bp, Homo sapiens
tccatcaggaccccagatgtctgacagccctgtgtgacaccaagataagtaacggtcctgagaacattatctgtagctgtatctccccatgtggaagttg

SEQ ID NO: 734027 - DNA, 100 bp, Homo sapiens
tcgcagccctgaagttgcctcttctggtgtcaaagcttttggacattcctgggctttcttcacagaagtcagtgccgtgggtacccattttaaaatccct

SEQ ID NO: 734028 - DNA, 98 bp, Homo sapiens
tggtggtggagtgtagagatatagttggcaacctcactgagttagaatcagagggtgtgggccgaagatatgctcatgtggtgttgaggaaagcagac

SEQ ID NO: 734029 - DNA, 100 bp, Homo sapiens
agaaagaatatcagacaatgcgagagagtcagctgcaacaggaagacccaatggatagatacaagagtgatcagcagctggactgtgccttggacctaat

SEQ ID NO: 734030 - DNA, 100 bp, Homo sapiens
cacaaggtgaagactgtctgcagcaaggtatgccttacactttcttgtacaaagtggaatttcctactgtatcatgatcatcataggagtggagaacatg

SEQ ID NO: 734031 - DNA, 100 bp, Homo sapiens
cctggatctgcgatctgtttgtgttatgccccgtggtgccctgcttgtcaaaatcttcaaccggaatgggaaagttttgctgaatggggagaagatcttg

SEQ ID NO: 734032 - DNA, 102 bp, Homo sapiens
tcagtcaggtggggccggtgaagcagtgcttcgtggtgactgaaaaaggcattgaatgccccagaggagcccgaaacctcccaggcttggtgcaggaaggag

SEQ ID NO: 734033 - DNA, 75 bp, Homo sapiens
ctcactctgttaaagctggtctgttctaactgagtgccggtggtggtgtgcacattgagccccggtatagacagt

SEQ ID NO: 734034 - DNA, 100 bp, Homo sapiens
gcggaggacaaggccaagagggccaagggcaaaggccgagtggaggccatagtggagtttgactaccaggcccagcacgatgatgagctgacgatcagcg

SEQ ID NO: 734035 - DNA, 100 bp, Homo sapiens
ttggaagtgaaacttctttgattatccatcgaggagaatccaactgccagatgagaacattggacagtgggatcggaacctttccactcccagactcggg

SEQ ID NO: 734036 - DNA, 51 bp, Homo sapiens
taaatccctggctactagaactgaccaggctccactatcctggccgagcgg

SEQ ID NO: 734037 - DNA, 89 bp, Homo sapiens
gttccgagcggcggctccggggcagctccggcgggcggagtaccaggctcaagtggaagaaatgaggttgatgatgaatcagttggaag

SEQ ID NO: 734038 - DNA, 74 bp, Homo sapiens
atgtgatccactttgcctgggaagagaagctctttctcctggctgatgaggtgatctgtgaaaatggttcgcta

SEQ ID NO: 734039 - DNA, 100 bp, Homo sapiens
ttcactgtctggatcattggaggaggcacgacacccatgttgtcatggcttaacatcagtttcatcgcaaaccagaaaaggttagaaatcatcaacgaag

SEQ ID NO: 734040 - DNA, 83 bp, Homo sapiens
acacaatctattctgctgattcacaattatggagactgtccctagggtggtcccaaccatgtgatgtctggagcataggatgc

SEQ ID NO: 734041 - DNA, 75 bp, Homo sapiens
ttagaactcgcgtttccacttcagagatctgatggatctgtggatgctgaacgcagtattgttacagacttggtc

SEQ ID NO: 734042 - DNA, 76 bp, Homo sapiens
gggaagcccccattcactagaagcactgagagatgcggccccctcgcaggtgtgacaaaattaggcaagaacgaga

SEQ ID NO: 734043 - DNA, 75 bp, Homo sapiens
taaatttacctggaattagatcaacaacaatatgcacaggttttggcccaacagcagaaagcagcactgtcttcc

SEQ ID NO: 734044 - DNA, 75 bp, Homo sapiens
atgggaagtccttattattggccctccagatacactttacacccccccaggcagcagcagcagttttcatctctg

SEQ ID NO: 734045 - DNA, 83 bp, Homo sapiens
gtcggatattgaatttgagttggagcagctccccgagtcagcctatatgcaccagctcttgggcctcaacctcctcttcctgc

SEQ ID NO: 734046 - DNA, 73 bp, Homo sapiens
caaacaagtgaaatacttcatacattacagtggttggaataaaaaattgggaaaatgaggtacgttagtgttc

SEQ ID NO: 734047 - DNA, 100 bp, Homo sapiens
tcactttgaccacaacatcagccctactattgggtgaattcatcattggccgagttatcaaagccatgaataacagctggcatccggagtgcttccgctg

SEQ ID NO: 734048 - DNA, 75 bp, Homo sapiens
gagccgccgccgctgtccggagccccacaggtttctagagaggaaggatctccccagctgtcttcagcaaggccg

SEQ ID NO: 734049 - DNA, 100 bp, Homo sapiens
aaggttataaatacgaacgcatcgatggtggaatcactgggaacatgcggcaagaggccattgaccgcttcaatgactctgtttgctggctacacggaca

SEQ ID NO: 734050 - DNA, 82 bp, Homo sapiens
aaggatatcgacgtcgtgatccagaagtccagagctgaggactgcctgtttgcaggtaccccctgtaccggctgggtggccc

SEQ ID NO: 734051 - DNA, 128 bp, Homo sapiens
gcaagatggagccaggaggagagcccacaggtgctaaagagagcagtaccctgatggagtcccttgcagtgtactaatggtcacttgatgtgcgctggctgttttatccacctactagcagatgcccg

SEQ ID NO: 734052 - DNA, 100 bp, Homo sapiens
caggctaaaccgaagtgaccatgggatcttccactctcggaccagtctccagaaactgagcaccaagctacaacagatgaggatgaggaagggaaattac

SEQ ID NO: 734053 - DNA, 80 bp, Homo sapiens
accgagccggagctgctcgacgaccaagaggcgaagagaattcagtttgcctgttctgtatgcaagttccgtagctttga

SEQ ID NO: 734054 - DNA, 75 bp, Homo sapiens
acagacagctggcaagaggcagcctgggggccacagctgcttcagttatgaagacagtatggagtttccagacca

SEQ ID NO: 734055 - DNA, 101 bp, Homo sapiens
caagcaggttttaaatcaagatttaacattccaacacataaaaattatttatccaacagctcctcccaggagagcacagaatggggattcaacacctcggc

SEQ ID NO: 734056 - DNA, 82 bp, Homo sapiens
agtgctgcctggtgcagaggatcctggaggcctgggaagccaacgaccacacgcagcagctatccatgatgctgatgctggc

SEQ ID NO: 734057 - DNA, 80 bp, Homo sapiens
agtggacctacctgataaataccctttcaaatctccatctataggattgacatgtacgtggaggggacactggatctgct

SEQ ID NO: 734058 - DNA, 83 bp, Homo sapiens
agcaaataaccgttttgaaattcaatacgtttggtttaatattggcagtgtggacacctttgaacggaatctggaaactttac

SEQ ID NO: 734059 - DNA, 100 bp, Homo sapiens
atgaaacgcttacttatttgaaccaagatcagggagcagagaaacatgaaggcacaggtcagtcctctgggatcactgatcaagagaaggagttatccac

SEQ ID NO: 734060 - DNA, 82 bp, Homo sapiens
tgctggtatttcgaaggactctatccaacctattatatgtgaaatgacaatggatgctctgttggctcgattgaaacttctg

SEQ ID NO: 734061 - DNA, 58 bp, Homo sapiens
ctgccatggagcccagcagcaagcattggggctttccagctctcacagaaccttcagc

SEQ ID NO: 734062 - DNA, 90 bp, Homo sapiens
caaggagtatgaaatgctgaggatagaatttgagcagacccttgctgccaatgaacaagcagaaagcacagctgagtacaagctaactgg

SEQ ID NO: 734063 - DNA, 98 bp, Homo sapiens
ccaaagtcagtaaaaaggagctcaactccaaccacgacggggccgacgagacctcaggtaagaatgattgatgttggctgatattggagtgctcattc

SEQ ID NO: 734064 - DNA, 100 bp, Homo sapiens
ctcaagatggcgtgcttgttggagaccccaatccgcatgagcgtcctttcgccagagcctaagcctggagacctgattgagatttttcgccctttctaca

SEQ ID NO: 734065 - DNA, 76 bp, Homo sapiens
gggtccctgaagagggaagacacgcggaaacagatgactgtccaagtgcctccaaagtgtacaaagcatcagattc

SEQ ID NO: 734066 - DNA, 96 bp, Homo sapiens
ctttttatcagttgcaacaggactgtgacctgagctgtcagatcaccattcccaaaggtggtttgtgatgaaaatggttccaagggctatggattt

SEQ ID NO: 734067 - DNA, 76 bp, Homo sapiens
tggccattcagcagtcttacacaacagcacccaccctggagccatggtccacgccttcctcattcacaccttgagg

SEQ ID NO: 734068 - DNA, 101 bp, Homo sapiens
ggggaggttacgcagcaaaccatccagaagtaagactttgaccccgacgcaggcttcagtgattgccgcggatcagaagcctgagcactttggctcgagac

SEQ ID NO: 734069 - DNA, 82 bp, Homo sapiens
ttggaaggtgcatctgcagtacaggatatgaagaaattgagggttcttgccatggcgtcgaccagaagattatgatattcat

SEQ ID NO: 734070 - DNA, 101 bp, Homo sapiens
gtgacggtggcgccgcccggggcgaggcagggccagcagcaggcgggaggttcttagactctgtgagtaaagacagcttcatcttcccagttcatcatggc

SEQ ID NO: 734071 - DNA, 96 bp, Homo sapiens
ggtggcgggcgcagctgctgtgacagataaagtaagcatattgtcaaccttcctcgctcctttcaagcacctgagtcctggcatcacaaacacgga

SEQ ID NO: 734072 - DNA, 100 bp, Homo sapiens
gctgtagacatttctttgtggtttatctaaaaaccaaagagtgatcagcagctggactgtgccttggacctaatgaggcgcctgcctccccagcaaatcg

SEQ ID NO: 734073 - DNA, 96 bp, Homo sapiens
ttggtctgatcatacaagttatggcaacagaactggcccactcccttcgatgctcaggtgctggagaatctggtaaaagcaccattgtgaagcaga

SEQ ID NO: 734074 - DNA, 100 bp, Homo sapiens
acccgagagcgtggagcgggctgggccaggtacaccaggggttggaaaaaccacactaggcaaagaacttgcgtcaaaatcaggactgaaatacattaat

SEQ ID NO: 734075 - DNA, 82 bp, Homo sapiens
ttggctgtttatgtttcaatggataacacagtggtcattgaagatatcaggactgctgaccttcgggtacctggtgctgctg

SEQ ID NO: 734076 - DNA, 106 bp, Homo sapiens
cacccctacacgttcccgggtggcagtggcactgtctttgcccgaaatcctgccagaaacctgtagacaaatatatcgagtatgatcctgttatcatcttgattaa

SEQ ID NO: 734077 - DNA, 82 bp, Homo sapiens
caggctgcccagatggtggctcccggagtccagagctgcggtgcaaccctgggcagtttgcgtgtcgcagcggcaccatcca

SEQ ID NO: 734078 - DNA, 82 bp, Homo sapiens
cgcggggaccatggcggagccgcctcggcgtctgcttctgcgctttgcctgggagaggccctggtggcctcgttcctggcgc

SEQ ID NO: 734079 - DNA, 76 bp, Homo sapiens
cttgcttgcctgtgcgcgcgtgcgcggacatggcctcaaacggtttacccaaggtccagcctagcccctaggcacc

SEQ ID NO: 734080 - DNA, 100 bp, Homo sapiens
gtggactgcggccagctcccgccctggtccttcgcccccaagactgcgactctaaacggactcatgtactttgtcagattgtggcccagaagaaggtgac

SEQ ID NO: 734081 - DNA, 100 bp, Homo sapiens
acgtatggatatccgaggagccacctaaagtgatgtcttggttcgtgtccccactgctttctggaattatgtctggaattttattcttcctggttcgtgc

SEQ ID NO: 734082 - DNA, 75 bp, Homo sapiens
ctggaaagtcagcatgattttcgaaccccggagttttctgaagatgatgagaaactgaaaaagaggaaggagcga

SEQ ID NO: 734083 - DNA, 75 bp, Homo sapiens
acagcagctacagcagctgcgagacagtggcgagaagggtatttgaagtataccatacaactgttttgaaaatcc

SEQ ID NO: 734084 - DNA, 100 bp, Homo sapiens
agagggcagagccgtgcatggggctgctccccaggacctgagcaggaacctggagttttcaggttgcttatggaaccacagagaacagtcccgtgacatt

SEQ ID NO: 734085 - DNA, 100 bp, Homo sapiens
gcaggcagcaactgaggcagcggcaggctcaggtgcagccgctgggctcatcgttggggtgatcctgaggtatggtacccctgctaccagtggccgtgac

SEQ ID NO: 734086 - DNA, 107 bp, Homo sapiens
gtcgcatctccgacacgggctctgcgggcctcatgctcgtcgagttcttcgccccctggttatggaaacaaaggacatgctttacatcgtcactgaatttgctaaaa

SEQ ID NO: 734087 - DNA, 100 bp, Homo sapiens
tggatcccattcacctgaggcacccgaagaagagaccatccatatttccagaattccaaccaggagtgccatggaaaggtatccaaaacattgaccctga

SEQ ID NO: 734088 - DNA, 90 bp, Homo sapiens
ctccagccatttgtgaacctggaggcttgacattcgccagcgcagggccccacaagagtgctggagaatctggtaaaagcaccattgtga

SEQ ID NO: 734089 - DNA, 89 bp, Homo sapiens
cttagcgcccgggcgtcggggcggtaaaaggccggcagaagggaggcacttgagtgatgggtcgttcccctatgactctgtcccttggc

SEQ ID NO: 734090 - DNA, 80 bp, Homo sapiens
tagccaacagagcagcagctacgggcagcagagtgccacacctccctggatgatccaagatgaagaatacattgctggga

SEQ ID NO: 734091 - DNA, 75 bp, Homo sapiens
aacagggttcctggggcatcgacgatctccatatttcattgcaaggtactgggctgctgggggatcccaagtgag

SEQ ID NO: 734092 - DNA, 100 bp, Homo sapiens
ctttcctcgtggaatttgaagattctacagataaatcaggtcaatggccagcaaggaggggggtccgagccggcggcggcggcggcagtggtggcagcgg

SEQ ID NO: 734093 - DNA, 100 bp, Homo sapiens
accaattcagagaggagatgtgacaatagaccgcagacacagggcccatcaccctaagactggatacacgtctgtttaactacgcaaaaggtaatgctgg

SEQ ID NO: 734094 - DNA, 75 bp, Homo sapiens
cttcgcagtctggaaagctttaggagttcacagtgtgcacttagaactacctcccagctccaacatagtgcaaac

SEQ ID NO: 734095 - DNA, 100 bp, Homo sapiens
gagacagattgggagtccattttgcagatctgcgacctgatccgccaaggggacacacaggccagctttgcccccgcctgcctctcccatgagatcatca

SEQ ID NO: 734096 - DNA, 80 bp, Homo sapiens
agctttcacgaaggcaccgacgtcatcatgctgaccaccaatcagatccgtaagaagtccattggaatattaagcccagg

SEQ ID NO: 734097 - DNA, 97 bp, Homo sapiens
cacggagagcacgagagacccgagttcatcgcctacccccatctccgcatcaggaccaaggtcctatggcagcgtatacaaagctattcataaagag

SEQ ID NO: 734098 - DNA, 96 bp, Homo sapiens
ttcaaaacctgtctcaagagaagaccaatgttcatataaatggtggcagaaataccagaaggttcttgatcaatatgaacgagaaggatttaactt

SEQ ID NO: 734099 - DNA, 100 bp, Homo sapiens
ccgagctcaccaactgcgtgcccggcgtgctggaccgccgcgactccgccgcgctgcgcacgcccaggcacacattctggcagttccgccatgagaaccc

SEQ ID NO: 734100 - DNA, 87 bp, Homo sapiens
ggtggaggggctgcggagacagagccctccggccagcggggagatgttggtcccattccaagatactcctgtggaagttgaacagaa

SEQ ID NO: 734101 - DNA, 75 bp, Homo sapiens
cggcgtgctgcgcctccgcggctgccctgcgccaggcagcggaggaggagaaagagatggacctcccggactcgg

SEQ ID NO: 734102 - DNA, 99 bp, Homo sapiens
ctggagtctgcgaaggccgggacccggttccccggcccacagtgggggtgtgcaaacccgagagaactggctcgccctcccctacctgcggaagagtca

SEQ ID NO: 734103 - DNA, 76 bp, Homo sapiens
caaggaagctgtacatgcagctcatcccgcagcagctgctggtacgtgccctggaggaggccaatgctgacctgga

SEQ ID NO: 734104 - DNA, 100 bp, Homo sapiens
ccaggtgtaagcgcagaaagcaggcgaacccgcggcgcaataacgcaaaagcacctggaaattgaaagaactaccaaatggctgaaaatgctgaaaggat

SEQ ID NO: 734105 - DNA, 97 bp, Homo sapiens
atgctggagaagtccccttatgaccaggaactcaacagaggcaattattatcccgactgcaaatcgacccagtaatggcagaaactctgcagatgag

SEQ ID NO: 734106 - DNA, 83 bp, Homo sapiens
actctgaactcaagtcaccgtggagctccgccgccccgaaactttcaccgcgagcgggtgacagcagggacatgtctcgggag

SEQ ID NO: 734107 - DNA, 100 bp, Homo sapiens
gatctgacagatgccagcgtagctgaatccagtaccaaaaacgtcaacaacagttttacgctgccgggccgcaagtacagccctgggtacaacaccgagg

SEQ ID NO: 734108 - DNA, 100 bp, Homo sapiens
cgggctgaatgtggagagggtcttccaggacggttagctccattcagaaccaaatgcagtccaagggaggttatggaggtggaatgcctgccaatgtcca

SEQ ID NO: 734109 - DNA, 75 bp, Homo sapiens
gtttaaacaaactgctattgccaagataatatcgtctactgcattatttttggctgcaaaagtggaagaacaggc

SEQ ID NO: 734110 - DNA, 95 bp, Homo sapiens
agaaaatgtcttatagtggaaagcagtctactgaggtggaagatgaaactgttttacataacattccttatatgggagatgaagttttagatcag

SEQ ID NO: 734111 - DNA, 100 bp, Homo sapiens
gtgtacacatactgcatggacacagaaatctggtgactggaatccagcttaaccccaacaaccatctacagtacgtagaaaacccggacctggatcgcgg

SEQ ID NO: 734112 - DNA, 90 bp, Homo sapiens
gaccgcgaccagacaggcggcgccatcttcgaacttagacttccggaaggactttggcgaggggatcgcttacacctgagacgaactaca

SEQ ID NO: 734113 - DNA, 98 bp, Homo sapiens
atcagataacttgtactggagagaaatcctacaagtgtgacatatctgaagagatggattaagaatgctttggattaaggattgtggagcacatttca

SEQ ID NO: 734114 - DNA, 96 bp, Homo sapiens
tcggaccggctgctgagacgaacgcttcactggggcagtctctgcatatcatggggagatagacgctgctgcctagtcaacctatttgatttcttg

SEQ ID NO: 734115 - DNA, 75 bp, Homo sapiens
cacaacccgaagcggcctgtgacctgtgaacagggctgtgggcctcatcatttctgtctcctgtttctccacttc

SEQ ID NO: 734116 - DNA, 50 bp, Homo sapiens
tgcaatctgtggatcagctacgaggtttcagcagccagggaagaggtacc

SEQ ID NO: 734117 - DNA, 100 bp, Homo sapiens
gctgtctatactcttggaaagcacatcctaagccttgttagatgacttggataaagaactaaacaactacattatgcgatgtagagaatggtatggctgg

SEQ ID NO: 734118 - DNA, 100 bp, Homo sapiens
ttgaaaattggttactgggtctcctctcaagaaatctcaagatattaaagttactgctgttaaaaagatggcagcatggggacactgaggatgattggag

SEQ ID NO: 734119 - DNA, 101 bp, Homo sapiens
cgagctgcagcaccacttccggatgtcttcggaagacatatccttcccaactcccatccctcagtgtcattctcatattcgtgaatgaagctctgtccatt

SEQ ID NO: 734120 - DNA, 83 bp, Homo sapiens
ctttgttcagctgcagcatggagagatagataaacggggtttggaaatcccttgtctccaggttgctgggattgacttcttgc

SEQ ID NO: 734121 - DNA, 100 bp, Homo sapiens
gtcaccagcaggagcagccaaccagcagcagccatcatggaggaccagttgctcttctgtgatgactgcgatcgtggctaccacatgtactgtctcaccc

SEQ ID NO: 734122 - DNA, 100 bp, Homo sapiens
gtagttagtgcacgttctgtgaagcttttggatcgtatccacaatcctggctaatagctcgtcagcttgctaaaatccatgctattcatgcacacaatgg

SEQ ID NO: 734123 - DNA, 100 bp, Homo sapiens
cgccgatattcaccaagcgcttcgctacaagggtcagtatagaccttctgatttgctgtgccctgagacatatgtttgggtacccattgagcaatgcctg

SEQ ID NO: 734124 - DNA, 102 bp, Homo sapiens
ctcaatatctgtcttcggtggactccttcggcagtccacccaccgccgccgcctcccaggttgattcttcaccacactgaaaccattaggaaaaatccttgt

SEQ ID NO: 734125 - DNA, 100 bp, Homo sapiens
cgggacaacatgctgcggggcacaggaactcgaatcatttatgacagaaagtttctgttggatcgtcgcaattctcccatggctcagaccccaccctgcc

SEQ ID NO: 734126 - DNA, 87 bp, Homo sapiens
agaggaacaagtggggacataagccttttaacaaggaactctttttacaggccaagttgctccttgagggcaggacagttcttatgg

SEQ ID NO: 734127 - DNA, 100 bp, Homo sapiens
atttcaaccacagatggcactgccaacagtgaagcctggtgttcggtacagagaattgggaaacattatccagaagcatgcccaagcaaatgggttttca

SEQ ID NO: 734128 - DNA, 100 bp, Homo sapiens
ctaatttgatggagaaggttcgaggcctacagaacctagcctatcagctggggctggatgagtgaggccagatgctccagtgcctgatggcgaaagtgag

SEQ ID NO: 734129 - DNA, 100 bp, Homo sapiens
atccaggaatctgggggttcctagacggagccagacttcggaacgggtgtcctgctactcctgctggggctcctccagtgaaccctgcggcttcgaggcg

SEQ ID NO: 734130 - DNA, 74 bp, Homo sapiens
ctcagagggaaacattcactgcacagaaccggcaagcgcctccaaggtttgtcttgaagcatagctccagctgg

SEQ ID NO: 734131 - DNA, 90 bp, Homo sapiens
cagaaggcgatcaaggccaagtatccgccagtcaataggaagtacgagtgagtatggatgtgtccaacagccaaaaactcaagaaagtaa

SEQ ID NO: 734132 - DNA, 100 bp, Homo sapiens
ccccactgttacatcgtgcgccgtggaccaggagaaccaagatccaaggagaaagcttcttgctatctacctccaccatgatgaaagtgtgttaaccaac

SEQ ID NO: 734133 - DNA, 106 bp, Homo sapiens
ctgcagctcgggacttcggcctgacccagcccccatggcttcagaagagacaatgcagatcttcgtgaagactctgactggtaagaccatcaccctcgaggttgag

SEQ ID NO: 734134 - DNA, 50 bp, Homo sapiens
ttgttgttggcgactgtgcttcaagcgcttctgcagaaagccgtcattac

SEQ ID NO: 734135 - DNA, 90 bp, Homo sapiens
ggccgctggtgatctccggtagcactcgggccggcggacagtgagggcgcggcctcttctgaagagctgaaagctgcctaccggaggctc

SEQ ID NO: 734136 - DNA, 90 bp, Homo sapiens
cgacagtctgtctgttcgcgatcctgccggagccccgccgccgccggcttgatggcccactgcgtgaccttggttcagctgtccatttcc

SEQ ID NO: 734137 - DNA, 100 bp, Homo sapiens
cgggagaccgggttgggctgtgacgctgctgctggggtcagctgataggaagatgtcttcaggaaatgctaaaattgggcaccctgcccccaacttcaaa

SEQ ID NO: 734138 - DNA, 100 bp, Homo sapiens
tttggaattcagttatcaagctttagagcctggctactcacagttgaagcctgattgcagttacattacttcgttcagaaccatttcacaagtgcaagaa

SEQ ID NO: 734139 - DNA, 100 bp, Homo sapiens
ctgatgggagcaagttgactaccaccagtggagtccaggatgagaaatggatgaaaagaggctgctggatccagggttgaaggttcataaaggcctctgg

SEQ ID NO: 734140 - DNA, 81 bp, Homo sapiens
ccgctgtgggctcctggggagatggaggggccggggctgggctcgcagagtggagactgctgcacggactctggaaccatg

SEQ ID NO: 734141 - DNA, 75 bp, Homo sapiens
acattattgcgcgtggaacggctgcttttggaaggctgaaggtgatgtggccgccctcaaccgacgcatccagct

SEQ ID NO: 734142 - DNA, 90 bp, Homo sapiens
aaataaatgacgctacgcaagaaccagttaactgtacaaactacacagctcatggaacattatgatccagaaacacgatggcatcacggt

SEQ ID NO: 734143 - DNA, 100 bp, Homo sapiens
tgccggtgctcttcatcaccttcgtggtcgtctggtcctactacgcgtacgtggtggagctctgcgtgtgctgcaagaaagcgtaagattgccattcgaa

SEQ ID NO: 734144 - DNA, 82 bp, Homo sapiens
cgggtggcttacagacgctgccagcatcgccgccgccagggcagccgatgaagtgcaaccttcacatgaatgggaatgttat

SEQ ID NO: 734145 - DNA, 75 bp, Homo sapiens
aacgagtactgtgggcctggagccaagcccctcttcaggagtaagacagggtcttactttgtcacccaagctgga

SEQ ID NO: 734146 - DNA, 75 bp, Homo sapiens
tgaacatttccatatttctcctgtgaaggaaccataaatccatggctaaccttgacaaatacactgaaacattca

SEQ ID NO: 734147 - DNA, 90 bp, Homo sapiens
aaagtcatcaatgagacctggagccctgagggtagctatgacctcaactctaatgaccctgaccccatgccccacccggatgtggagaat

SEQ ID NO: 734148 - DNA, 129 bp, Homo sapiens
ggaaaagatccctggaatatgaagagacacagtatggtagccacacccccaggagagaagatgactgaggaggaggtggagaccgttctggcaggacacgaggacagcaacggctgcatcaactacgag

SEQ ID NO: 734149 - DNA, 100 bp, Homo sapiens
tccttcacccatgaggcactcacactcaagtataaactggacaaccagtttgagctggtgtttgtgaacaagattaaagtcgttgcattgaaaataacaa

SEQ ID NO: 734150 - DNA, 74 bp, Homo sapiens
cccggggagaatgaggtggagcagctggcctgcatcatggaggtgttcatgaagtctgtgaagctggagtgggt

SEQ ID NO: 734151 - DNA, 100 bp, Homo sapiens
gaacggggctcccaggacctccactaatcaccagaacaaaatgtgcaggccggatcacctcaacagtcacgtcagacaagtgcactcaacagaacggccc

SEQ ID NO: 734152 - DNA, 100 bp, Homo sapiens
ccctacccgcttcactggcaccatgatctttgtggagttcacctctgtgtttgactgccagaaagccatgcagggcctgacgggccgcaagttcgccaac

SEQ ID NO: 734153 - DNA, 100 bp, Homo sapiens
ctgcgggcggcgctgtgtccgtcgccatgacagccggcccgctggggctggaggcacgggcccatcaacgtgaaccattacgccagcaagaagagcgcag

SEQ ID NO: 734154 - DNA, 100 bp, Homo sapiens
cacaagatgaacaatgagaagcaggcagaagattgcatcacacggagagccttgaacttaggaattcttcgagatcctggatcagaaatcgaagacagac

SEQ ID NO: 734155 - DNA, 100 bp, Homo sapiens
gcaacgcgagtgggagcaccaggatctcgggctcggaacgagactgcacggccttgtttgtatgaagtccagcacatctgtggttgagcttgttatgctg

SEQ ID NO: 734156 - DNA, 83 bp, Homo sapiens
cttgaccatcttcaagcgcctccgctcggtgcccactaacaaggagctgcgtgagaccaagcgccgtcatgagacccgactgg

SEQ ID NO: 734157 - DNA, 100 bp, Homo sapiens
ttaaatcctttggcttctggtcaagttcttcaggagagaataccatgggtaccacctgaatgcattgaaaatcctaaaaatttaaatttggcaacagaca

SEQ ID NO: 734158 - DNA, 75 bp, Homo sapiens
acaatatcatgcaagtgtggcaaatggctgcggagcttgcagaatacactgccaagattgccctcctggaagagg

SEQ ID NO: 734159 - DNA, 51 bp, Homo sapiens
gtccgcggcgccaccgctcgccctccaggtgctggagaatctggtaaaagc

SEQ ID NO: 734160 - DNA, 90 bp, Homo sapiens
gaaagcagtgacggaggagcttgtaccaccgaactcccccactggaaaggattctgaaagaaatgaagtcagccctcagaaatgaagttg

SEQ ID NO: 734161 - DNA, 75 bp, Homo sapiens
tctcccttcagtcgccatcatgattatctaccgggacctcatcagccaaatgatggaagaattgcatagcctgga

SEQ ID NO: 734162 - DNA, 101 bp, Homo sapiens
taggctgggagtgtctgctgatcacttggagtgctgtcccttggaacaggaggagtaagattgaggtcttcccagagtttgctgctgcccattcaaattta

SEQ ID NO: 734163 - DNA, 100 bp, Homo sapiens
ctccggcttctgctgttgctcttctccgccgcggcactgatccccacagattctggacaatcaggaagtccaagccacaatgatcctgccaagaatcctc

SEQ ID NO: 734164 - DNA, 98 bp, Homo sapiens
cacggtcatgggtacactgcgcagcctaggtgctctggccagggccgcggggcccctggtggccgcttcagagcaaaatatgctgtgaattccatcaa

SEQ ID NO: 734165 - DNA, 87 bp, Homo sapiens
ccaggcaatgcagcgcgtctatggagcccaggttgtctgcattcaaaagagcattctattaaagctaccttaatttggcgcttattt

SEQ ID NO: 734166 - DNA, 75 bp, Homo sapiens
cagtgaatgtggaaaggagattgacagtcacaattttgtaataagtgtaaagaaagaatgaggcctgttaaagca

SEQ ID NO: 734167 - DNA, 100 bp, Homo sapiens
cagggggccagctcaggacacacagacccagctggaactcgccccgacacgtctctgctactggactgtggtgagggcacatttgggcagctgtgccgtc

SEQ ID NO: 734168 - DNA, 75 bp, Homo sapiens
ctacccacagatccttaccaacaaggaggcggaaaaggtgctgaggagtggtctaccatcacggcaacagtgcga

SEQ ID NO: 734169 - DNA, 74 bp, Homo sapiens
gcggattcgccgaggcaccgaggcactcagaggaggaaggaagcagccaccctcgccatggcctccccgcccgc

SEQ ID NO: 734170 - DNA, 75 bp, Homo sapiens
gccaagagggatccttcacccgtgtctgctgtgagccgtgagctttgaggcggtgggatgtgtcagcagaatgtc

SEQ ID NO: 734171 - DNA, 98 bp, Homo sapiens
aggggcaacagaagaagccctttgaggagcactggaggaagcacaccctgtcctatgtggacgttggcactgggaagtaatctatgccagcaattatg

SEQ ID NO: 734172 - DNA, 101 bp, Homo sapiens
ttccacacaactccagtgctaactcaacaggtactccaaagattcaggtttactcacgtcatccagcagagaatggaaagtcaaatttcctgaattgctat

SEQ ID NO: 734173 - DNA, 101 bp, Homo sapiens
aaggtgaagccacggaagataagctctccctgtccagccgcctgcagctgaccctgtaccagtacaagacgtgtcccttctgcagcaaggtccgagccttc

SEQ ID NO: 734174 - DNA, 100 bp, Homo sapiens
caaacaaggacatcttcttctctataggattcggaaggacgttggctcatccaaaatacttgagttgtattgcaatcagctgttttttcctagctgccaa

SEQ ID NO: 734175 - DNA, 75 bp, Homo sapiens
gaaacgcaggcactgcctgctctgaaaagatttcaaataccggggaaaaaagttgttccatgtagacatgactgg

SEQ ID NO: 734176 - DNA, 75 bp, Homo sapiens
atagctaagactccaggacacccctgaagccgagaaatggagaggttcacctgccccagcctcgccttgcacccg

SEQ ID NO: 734177 - DNA, 88 bp, Homo sapiens
ccggagtgggctgcagcccccagcagccgagaggggccccggccacagtgaccatggtggactggacctacagagacatctgggattt

SEQ ID NO: 734178 - DNA, 100 bp, Homo sapiens
gaagaagcaggaggctaagaaagtggtgaatcccctgtttgagaaaaggcctaagaattttggcattgtttttagtgggcatgaaaggcaaggatgaagc

SEQ ID NO: 734179 - DNA, 83 bp, Homo sapiens
cgatgacatccctttccgagtcaactggcccggcaccgagttctctctggaagtcctggctgagcaaggttggaagccctagt

SEQ ID NO: 734180 - DNA, 83 bp, Homo sapiens
cctcgccatgccggcccggcggctgctgctgctgctgacgctgctgctgcccggcctcggggacatgaacaagctgagtggag

SEQ ID NO: 734181 - DNA, 74 bp, Homo sapiens
cggagggagccgcgggatggaccgcagggcccggcgagcagccaaggaggccaaggaggcccctgcccagcccg

SEQ ID NO: 734182 - DNA, 75 bp, Homo sapiens
caggtcagcagtctccactggaaaaaaagatcttggtgctggacgtcattgctcctccttatacctctgacttcg

SEQ ID NO: 734183 - DNA, 75 bp, Homo sapiens
gccccagatagcaatgatgatgtgaaaacagaagctgtggctgtattggccatgtcaagccgctcatggttgagc

SEQ ID NO: 734184 - DNA, 100 bp, Homo sapiens
cggcgacaagatggcagcagcgtgtcggagcgtgaaggtaagtcaaatctcatggatgccatcagctttgtgctaggtgaaaaaaccagcaacctgcggg

SEQ ID NO: 734185 - DNA, 75 bp, Homo sapiens
gataccacattagagccagaaggtctagatgttgatggaatatatcgagttagtggcaatctggcaacaatacag

SEQ ID NO: 734186 - DNA, 82 bp, Homo sapiens
actctgtccttattatcggaccccgaggatcaggaaaaactatgtgttatagttttgccgctggactcttccctcccttccc

SEQ ID NO: 734187 - DNA, 98 bp, Homo sapiens
aaggagaaaatgaatgccaaatgggacacggtctatgttaacaatgaatgggcaaccagtgttggggaaggagggagctttggagaacttgctttgat

SEQ ID NO: 734188 - DNA, 98 bp, Homo sapiens
aacattcctgctctgaaagctcttcttgaaaaatgcaaagatgtagatgagagaaatgagggccatgtgaaactttctgactttggtctttgcacagg

SEQ ID NO: 734189 - DNA, 89 bp, Homo sapiens
acatttgtgggaagttgtattcatcaataatgaaatgctgactaaggaacaagaacccagtgacttgattgtaaaaatttacagagcgg

SEQ ID NO: 734190 - DNA, 75 bp, Homo sapiens
gaagagctatggtgaaacaccactgaagcattgccaagggtccccgcactcccggtgaagaacttgaatggtact

SEQ ID NO: 734191 - DNA, 101 bp, Homo sapiens
ctttgggcttcaccatctttctgacagcgctgtcccggccaggaaccagcagctaatacttgatggtcaatgggatgaagttcttcagttcattcagcctc

SEQ ID NO: 734192 - DNA, 74 bp, Homo sapiens
cctttttcgtttttcggatgatgccttcaatactacctttatttccaccatagacggagtctctctctgttgcc

SEQ ID NO: 734193 - DNA, 98 bp, Homo sapiens
ctacttcctgcagagccccccggaggaggagcccgaataccaccccgacgcctcagcccaaggtttttctatatgagtggagaagacagctgttacca

SEQ ID NO: 734194 - DNA, 100 bp, Homo sapiens
atcatggccatcaccgaccagagcctggacgaggcacaggccagattctatggaggtgaaacctatcatgaccagaaagttgcggaggcgaccaaatgat

SEQ ID NO: 734195 - DNA, 100 bp, Homo sapiens
gattgagaatttggggtggaagactaataaaggaaagaaacgaaggagagatccaggtcataactccatgcaggaagctcatcttgtgtgctgataacag

SEQ ID NO: 734196 - DNA, 75 bp, Homo sapiens
ggggcctgggcctcccggtccgcaagcagagctctcagcatggcggctcctctacgtcacttgcgtccaccaaag

SEQ ID NO: 734197 - DNA, 75 bp, Homo sapiens
cgacagcgaagctgagcgtaaagcactggatttcctggaacaaattttgacatttagccccatggatcggttaac

SEQ ID NO: 734198 - DNA, 89 bp, Homo sapiens
actggccgccatctggacacccttcgcgttgttgctcaggagctctggatggacaaggaaaaagaggaaagcatgaaagaaaccctgcg

SEQ ID NO: 734199 - DNA, 97 bp, Homo sapiens
ccaaacattcccaacctatccctaaagatgttcacgtaaacataatttcccaacatccagtcctacccttcttattaagagcatgtttacgacgttt

SEQ ID NO: 734200 - DNA, 75 bp, Homo sapiens
ggagaaacgcaagtccatgtacacgcgagattataagaagcttgggttcatttctgatgccaatgcaagttactt

SEQ ID NO: 734201 - DNA, 75 bp, Homo sapiens
tatggataccaaggaagagaagaaggaacggaaacaaagttattttgctcgtgattcgcctttgccagtctcatc

SEQ ID NO: 734202 - DNA, 130 bp, Homo sapiens
acgtcctgtttggagatgtctggctctgtagtgggcagagtaacatgcagatgactgtgttacaggcctttcgggaagacttggaatgccttattcaagaacagatgaagaaaggccacaacccaactgg

SEQ ID NO: 734203 - DNA, 80 bp, Homo sapiens
cattctgctgattggacatagacaggcttttgcatgggttgatgagtggtatggaactgtggctgcaccatctgtcttca

SEQ ID NO: 734204 - DNA, 98 bp, Homo sapiens
gctcttcagcctcagcggcagtgttctgtgtgcagtacttcctcgcgtattgctaaaggaggagttgaccacaccaaaatgagtctacatggtgctag

SEQ ID NO: 734205 - DNA, 100 bp, Homo sapiens
tgagcaactatcatgccagtaataaccaacatggagcagactctgaaaacggggacatgaattcaagtgtcgctgccaccttcatggagcactggaagcg

SEQ ID NO: 734206 - DNA, 75 bp, Homo sapiens
gctttccagacaatgccaaatggatgactgtggaatcctcatgaaagaccctgatgctcccataagacagaaaat

SEQ ID NO: 734207 - DNA, 82 bp, Homo sapiens
cagcacctagtcgtggccggaggagtctcagagctgtcagaaaggtgtcgtgaaaactacccctaaaagccaaaatgggaaa

SEQ ID NO: 734208 - DNA, 73 bp, Homo sapiens
cggccgcctctgtccctttcccggatgtgtggtgcctcttgtccagatgggagagaccgatgcgaacgtggcc

SEQ ID NO: 734209 - DNA, 75 bp, Homo sapiens
ggtttcccaacagtgatgtcacaagattgaccacattgatcacagtatgggctacgtgagttcgtggtgattgcc

SEQ ID NO: 734210 - DNA, 51 bp, Homo sapiens
gctttaaagaatacacttcaaaaccttatctgcattagctcactggtctgt

SEQ ID NO: 734211 - DNA, 85 bp, Homo sapiens
tttctagtaatcaaaaatcttgtacctgatgccgatattcaacgctttcgcgagttcctggggaaaaccccagggcaaaacgctc

SEQ ID NO: 734212 - DNA, 100 bp, Homo sapiens
agcgtgtagcggttgagcctgtgtcacatagctgaatcagagtcatctgcggtactcagacctgcgaccgcatcaagcagtccgccagcggaaccaagcg

SEQ ID NO: 734213 - DNA, 74 bp, Homo sapiens
aaagcagtgacggaggagcttgtaccaccgctcttgaatgtcgtctctcaactagccaaacggaatctgcgact

SEQ ID NO: 734214 - DNA, 90 bp, Homo sapiens
ccttagatacgcacaagccaaaacctttgggtcggatacgctaaaaatcaagcagttgcccagagctcagggtcttacctttgctttttg

SEQ ID NO: 734215 - DNA, 99 bp, Homo sapiens
cctgaacgtcaccgaggagaagtaccaggaggcgttggccaaggcctgattcggactccaccaaacactcaactccatcgaatagctccaaccccagcg

SEQ ID NO: 734216 - DNA, 101 bp, Homo sapiens
caagacaacagtgatgaggaaagctgtgaaagttctcaagtgtaaacaggaacatcgataagtagtgtaaaaacttgcacaatgaaatccgaagccaagga

SEQ ID NO: 734217 - DNA, 106 bp, Homo sapiens
cgacagcagccaggagtcatgagcgacagcggcgagcagaactacggcgagcggacaatgcagatcttcgtgaagactctgactggtaagaccatcaccctcgagg

SEQ ID NO: 734218 - DNA, 114 bp, Homo sapiens
gcgttgtcgatgccgctgaatgggctgaaggaggaggacaaagagcccctcatcgagctcttcgtcaagtttcaggtctgtgcggctgctaaagaacgacccagtcaacttgca

SEQ ID NO: 734219 - DNA, 51 bp, Homo sapiens
cactgagcccgaggcgatgctccaggaacagcgtttacattttctaaagca

SEQ ID NO: 734220 - DNA, 100 bp, Homo sapiens
tctgggaggcttaccgagagtttgaaagtgcgattgtggaagctgctcggatgccagaccagtttgaccaggcggttgtgctgaaccagctgcggtactc

SEQ ID NO: 734221 - DNA, 75 bp, Homo sapiens
aaggacgggagccgaagctcaaagtaaccagagagcacagagaaatgctggtgaaactggccaaacagaacacca

SEQ ID NO: 734222 - DNA, 100 bp, Homo sapiens
ctcctcgccagcagccgtccggagccagccaacgagcggtttggttgggatgttccagtaattctgagaaattcagaagagacccagttcagcacaagag

SEQ ID NO: 734223 - DNA, 82 bp, Homo sapiens
gcatggatatctctactcgctccaaaggaatactcccccagttgcaagaggcgcaggaccgtggaagacttcaacaaattct

SEQ ID NO: 734224 - DNA, 101 bp, Homo sapiens
caactacacttggcctttcgacgacatcatcgtcttcgcctatgcctgccaggctgctggctgttttggagtcagcggaagatcaccaaggccagggagtg

SEQ ID NO: 734225 - DNA, 80 bp, Homo sapiens
gctccctacgatgagaactggttctacacgcgagctgcaacacagtcactcctggcggcaaaccaaacaaaaccagagtc

SEQ ID NO: 734226 - DNA, 75 bp, Homo sapiens
aacagaacagattctgtgattagatgctgttcatgcaatattagcatacagtcaaagtgcagaagaacttctgag

SEQ ID NO: 734227 - DNA, 100 bp, Homo sapiens
gggcagggcgggaaggaagatccggcgcggggcacaggatccggagctggagcccccagaaatcaacgaccgggagcagaagttgcatgcccttaaggag

SEQ ID NO: 734228 - DNA, 97 bp, Homo sapiens
ggaccaaattgctgctgcctcgagcggcctctgttagaggaagaagcatccctggggctgcggagaagaggttggaaagaaccatgactgtattcag

SEQ ID NO: 734229 - DNA, 80 bp, Homo sapiens
ctcaagttgctactcgggacgctgcacctcccgcgccgcacggtggacgaggaacttgctactaccagcaccatgcccta

SEQ ID NO: 734230 - DNA, 101 bp, Homo sapiens
tgccgccagtggcgggctccgttctccctcgaagcactccccccagctccatgaatggaaatcggctccgcagcaggtggtccattatggctgacatgcaa

SEQ ID NO: 734231 - DNA, 74 bp, Homo sapiens
gctctgcaaattgttctgcttgactctgcatcgatatagccgaagggagccgatcggaaacagaagactgaccg

SEQ ID NO: 734232 - DNA, 101 bp, Homo sapiens
agactgaaggacagcggcaccgccagacggccagaaagttccgccatgagctggggcacggagctgtggattggaaacctggaagattactaccattttta

SEQ ID NO: 734233 - DNA, 100 bp, Homo sapiens
ggggcggccgggggctcagagatccaagtgcgcgccctggcgggtccggaccaaggtagatgatgagctggagatcaaggcctactatgcaggccacgtg

SEQ ID NO: 734234 - DNA, 100 bp, Homo sapiens
tgatgaagatctggcttcctttcactggagtttacttggtccagaacatccactagcctcactaaagtctttaacacctctgtgtgaagatgacaaccag

SEQ ID NO: 734235 - DNA, 83 bp, Homo sapiens
ctcttcagttcgtgtgtggagacaggggcttttatttcaagtgcctggtgaagaatgtgatgggatcactagcatgtctgcgg

SEQ ID NO: 734236 - DNA, 82 bp, Homo sapiens
agtgggaacaaaaatgagtgtgaggcgaacagccatcccgggcactatgtgaatttgggcaaaatgatgcttcaacacccag

SEQ ID NO: 734237 - DNA, 82 bp, Homo sapiens
ctgccttccggggacagccagccctcgctggaccagaccatggccgcggccttcggagaactacgatgacccgcacaaaacc

SEQ ID NO: 734238 - DNA, 100 bp, Homo sapiens
agctccaggaagcgagatgtcgaagccgccacccaaaccagtcaaaccagggacaggagagagtggcaagagtacgtttatcaagcagatgagaatcatc

SEQ ID NO: 734239 - DNA, 50 bp, Homo sapiens
tcaggctctgctcagcgcagcttggcaggatctctgctgtctcttggatc

SEQ ID NO: 734240 - DNA, 82 bp, Homo sapiens
ggcaccgaggcactcagaggaggtgaacctgagcaaggtgggcgagtattggtggaacgccatcctggagggagaagagccc

SEQ ID NO: 734241 - DNA, 113 bp, Homo sapiens
ggaggaggaagaggagaagccaaagcgagggagcattggagaaaatcagaatgagctgaaagccagtggtggcgaaatcaaaattcataaaatggagcaaaaggagaatgtgc

SEQ ID NO: 734242 - DNA, 101 bp, Homo sapiens
cgcctggaatatgaaggcttccccgtcccgtttgaacgccatgaccctgtggatgggagaattactgagaggcagtttggtggcatgctacttgcctacag

SEQ ID NO: 734243 - DNA, 98 bp, Homo sapiens
atgaaacgaagccctgaagagaagcaagagatgcttcaaactgaaggcagccagaacaccttccaccatgaccacctcagcaagttcccacttaaata

SEQ ID NO: 734244 - DNA, 82 bp, Homo sapiens
aagcgactgagtccgcgatggaggttagctttatacgtctacgaatatttactgcacgtaggagcacagaaatctgcacaga

SEQ ID NO: 734245 - DNA, 75 bp, Homo sapiens
gggctacctgcattcactgaacatcgtttatagaaccactcacgaattcttgtttggtgcccttgctgaactggt

SEQ ID NO: 734246 - DNA, 102 bp, Homo sapiens
ccgcccgccttctgttggctgctgaccctgggggcagcccagctcaacgtcgtcgcaccagggctttgttcgcgggggtcacagctctcatggctgcagcta

SEQ ID NO: 734247 - DNA, 98 bp, Homo sapiens
cggggcctgagggggcctggcggagcccgagcgcggcccggcccgcagcgtggggccccgagcgcgagacccatctattttggatagtttagatttga

SEQ ID NO: 734248 - DNA, 98 bp, Homo sapiens
atagttgacagtgggcctgcagccaaggaaggaggcctgcaaattcatgacaggattattgagctgtgatgcagatccatccgccctagcaaaatatg

SEQ ID NO: 734249 - DNA, 80 bp, Homo sapiens
taaaagcacagttttaagagagttgcaaaggtgcgctgcctcccacaagttcagctggaccctctgcccacgactctcac

SEQ ID NO: 734250 - DNA, 49 bp, Homo sapiens
cggcgccggagacgatgccgttacctagaggatcaagacataatgggag

SEQ ID NO: 734251 - DNA, 80 bp, Homo sapiens
tagaaatgaatgtttccatctcttcagagatgaaccaggtcgcaatggaagaagagatcgccgcgctggtcattgacaat

SEQ ID NO: 734252 - DNA, 96 bp, Homo sapiens
gagtaccgcatcgcccagctgtacatgatacaggccacgtgcgagcgagggtttgcagcaatggaagaaacgcaccagaagaagattgaagatctc

SEQ ID NO: 734253 - DNA, 74 bp, Homo sapiens
ggagaggggccgaaccgtgaagggctggaggccccggcggctaggatttggtgctatggagaaatttttggtag

SEQ ID NO: 734254 - DNA, 83 bp, Homo sapiens
tggtatacagctacatccaggagagaatgctgacagtcctgcaggcggttaaagaagaggggcaagatcctgatgaaattggc

SEQ ID NO: 734255 - DNA, 100 bp, Homo sapiens
aagatattttggaaactatattgatagacagctgtatcttcccaagtaccacaataatggactgagctgtgtccaatgattgaagccaggaagaatcatg

SEQ ID NO: 734256 - DNA, 156 bp, Homo sapiens
ttcctcaggtgcctgctcttccccgtgagggaagcccaggagaccaggcagctgcgctcttgacagccaggtaccagtaagtcaaggaacaccttataatcctgatggacagcccatgggaggtttcgtaatggacggtcagcaacatatgggaat

SEQ ID NO: 734257 - DNA, 75 bp, Homo sapiens
cttgtcacatgcatcaggaccagagatttttgcactgagtggccagccgcactggacagtgacgagaaatgtgag

SEQ ID NO: 734258 - DNA, 50 bp, Homo sapiens
ggactccctggagaagcagatggaaaaggcaaattgcaacttgatctgtg

SEQ ID NO: 734259 - DNA, 75 bp, Homo sapiens
ccccagatccatttacactttacagtggtctttgggaagaagcttcctgcctttgccaccatccccatccaccag

SEQ ID NO: 734260 - DNA, 50 bp, Homo sapiens
gggcgctggggcctgactcgcggatatgatttggctatcaaagaccttaa

SEQ ID NO: 734261 - DNA, 90 bp, Homo sapiens
caaaacttcaagccaaacatcaagcagaatgtgatttgcttgaagatatgagaatatcctccgaatcctaaatctagagctccaaggatg

SEQ ID NO: 734262 - DNA, 133 bp, Homo sapiens
ttagccatggtcaaccccaccgtgttcttcgacattgccgtcgacggcgagcccttgggccgcgtctcctttgaggttcagcagactgtacaggatctttttggcagagccccaagtaaagctgtcaatcctg

SEQ ID NO: 734263 - DNA, 100 bp, Homo sapiens
aacaaatggtgtgcttctatttataccaaggtacgttttgtcaattgagagtgctgaagagatacgagaatatgttactgatctcctccagggaaatgaa

SEQ ID NO: 734264 - DNA, 98 bp, Homo sapiens
tctgtctattcagaaagacctgtactatactggcaattgctggagaagattttgcaattgttgcttctgatactcgattgagtgaagggttttcaatt

SEQ ID NO: 734265 - DNA, 75 bp, Homo sapiens
gctgagctgctccagggcaaggccctcttcccgggaagcgactctacttgtttgcggccccctactactacggct

SEQ ID NO: 734266 - DNA, 101 bp, Homo sapiens
cttttgtgctgcggccgcggagcccccgaggtcaaaatgcagatcttcgtgaaaacccttaccggcaagaccatcacccttgaggtggagcccagtgacac

SEQ ID NO: 734267 - DNA, 80 bp, Homo sapiens
cccacacacaggtgaatttaaaggagcagccctggtgtcacctatcagtaaaaggcaaccggtgaccaaaaacactttca

SEQ ID NO: 734268 - DNA, 90 bp, Homo sapiens
tgtggacttgaaagaagctgcagcggaggaaggcgagacttggagtccaggtgtgagaaatttctacaaaaagacatttttgaaatcggg

SEQ ID NO: 734269 - DNA, 90 bp, Homo sapiens
gttgcgatggcgcagaaaccccgttgacaaggcactgctttttcatgacgtggtcccaggctgcacccatggcagaaggaggagggcaga

SEQ ID NO: 734270 - DNA, 50 bp, Homo sapiens
tgcctcagatactattttgaaggcagttcaattaacctccagaagatggc

SEQ ID NO: 734271 - DNA, 75 bp, Homo sapiens
aggatggctgcaagactgtcgacctaaagcctgactggggcaaggacactttgccaccatcaccttgaccttcat

SEQ ID NO: 734272 - DNA, 104 bp, Homo sapiens
ctcggagtccttggggacggagcagcgcgtcgtggggcgagcggcaggcaccatgactcctgtgaggatgcagcactccctggcaggtcagacctatgccgtgc

SEQ ID NO: 734273 - DNA, 100 bp, Homo sapiens
cacaaatgtgaacacagttttaagaattcctcctaagtgaaggtgctaaaggagaagatagaagctgagaagggtcgtgatgccttccccgtggctggac

SEQ ID NO: 734274 - DNA, 105 bp, Homo sapiens
caggaggagatgcttcagagagaggaagccgaaaacaccctgcaatctttcagacaggtatgttatgcataaaagtggataatttacatgataaatgaaaatggc

SEQ ID NO: 734275 - DNA, 100 bp, Homo sapiens
cccggttttatggtgcagagattgtctcggctcttgagtacttgcactcgcgggacgtggtataccgcgacatcaagaagtgctttggggacgagtacta

SEQ ID NO: 734276 - DNA, 90 bp, Homo sapiens
gcggaggcgaccgccatggcgttcctcaaactccgtgaccaggaatttcttcacatggctcctggagaagtgaccatcacagttcgcctc

SEQ ID NO: 734277 - DNA, 90 bp, Homo sapiens
gaaaaactcagcaaacaggactttttcaaaggctctaagcgaaagacatgaggcctcagcctgaaatgaggttgttttgaggtcatctga

SEQ ID NO: 734278 - DNA, 100 bp, Homo sapiens
ctctgctcgcggttagcccgtcagtccctgctctgtgcgcgcctccatctgggccatggatgggtaagaatgattgatgttggctgatattggagtgctc

SEQ ID NO: 734279 - DNA, 75 bp, Homo sapiens
ggaaggggtcccgaagccccctgcaggaactctacaacccaatccagagaaccatggagtctggcagtaccgccg

SEQ ID NO: 734280 - DNA, 108 bp, Homo sapiens
aagaatcaccaaaatatctggctaatgcctgcttcggaaatgagccaccagaaatggaactattgaaatttttcaggccagaaaacattacagtttcctcaaggccat

SEQ ID NO: 734281 - DNA, 98 bp, Homo sapiens
gcctgtggccgctgcacatcgtcctgtggacgcgtatcgccagcacgatcccaccgcacgttcagaagtcggcatccgtacccttccgaagagcagaa

SEQ ID NO: 734282 - DNA, 100 bp, Homo sapiens
ggaggaaatgggctttacagatgtgggcccagaaaacaagccagtcagggaaatcagtcagcttggtttacagtcgtggcttccaacatcctccctgtgc

SEQ ID NO: 734283 - DNA, 76 bp, Homo sapiens
cgtggaagaaaaagaaagatgcgctctaagaaagaagattcctctgacagtgggatcgatttgcttagtggtataa

SEQ ID NO: 734284 - DNA, 88 bp, Homo sapiens
acgagggggccaaggcttcctccgggtgccggtggtggtgtgcacattgagccccggtatagacagttcccccagctgaccagatccc

SEQ ID NO: 734285 - DNA, 75 bp, Homo sapiens
cgcagcggtacagcgcccgactgctgcaggccggctacgagcccgagagctgtttgcagacaaggtcccaaagac

SEQ ID NO: 734286 - DNA, 75 bp, Homo sapiens
aatatcccgcctcatttacagtgggaggccagaagcggactcctagaagaggggagcagcaaggatggaatgaca

SEQ ID NO: 734287 - DNA, 74 bp, Homo sapiens
agctgccctgccctggaagtaatcttatccagctccaggtcccacaggggctcttcttccccacgaaaaagatc

SEQ ID NO: 734288 - DNA, 100 bp, Homo sapiens
cctgggtcccgccgggtctgaagcctgaacaggttctaatagaagactgtatcccggtactgaagaggtacgccaaagaagggagagaatttgattatgt

SEQ ID NO: 734289 - DNA, 50 bp, Homo sapiens
gacaaactgctttcccatagaggccataaaattttgagtagaaaaatcca

SEQ ID NO: 734290 - DNA, 75 bp, Homo sapiens
cctcatcgggcttatgttcgagatgtgtcttgctgaatcagggctctcttatccctgccatcgacttacagtggg

SEQ ID NO: 734291 - DNA, 75 bp, Homo sapiens
cttggaagctcatggacaaagtggcatttgttgctatcggggactacaatggccacgtcggtctgggtgttaagt

SEQ ID NO: 734292 - DNA, 100 bp, Homo sapiens
acttagatcccgccctggagctgggtcccaggaatgtgctgctgttcctgcaggacaagagggaatctggaaaaattgcaatcaaaacatcatttctcta

SEQ ID NO: 734293 - DNA, 89 bp, Homo sapiens
ctacatggaatcacaaaatttagctgactttccccgacctgttcatcacaggatacccaactttaagcacaactaaggaacgtcaagag

SEQ ID NO: 734294 - DNA, 76 bp, Homo sapiens
agtgaccctgagcgaagccaagccgggcggcaggaatagccaggccagaagaaggaaggcctgtggtgagtgggac

SEQ ID NO: 734295 - DNA, 100 bp, Homo sapiens
ggaagtggatccttcccccgaaagcccggctttcaggttgttgaagattggaaattcatagcccaggttcttgatcggatgtttctgtggacttttcttt

SEQ ID NO: 734296 - DNA, 75 bp, Homo sapiens
acaaaagatcactctgtatttgaattttgtggaaaaaggaatactgtatgtctgagtatttgagaatgagtggca

SEQ ID NO: 734297 - DNA, 83 bp, Homo sapiens
gtgttcgagaacgaccccgagacggttcccaacaaggctacgcagaagaacccccttgactgaagcaatggaggggggtccag

SEQ ID NO: 734298 - DNA, 100 bp, Homo sapiens
cgaatctttccaaaggagatgcccggtggcttcccacacttctgactcggacgttccttccggtgtcactgaggtggtcgtgaagctctttgactctgat

SEQ ID NO: 734299 - DNA, 50 bp, Homo sapiens
ctggacccggaccggttttggcccgccgccgccatgcccttctccaacag

SEQ ID NO: 734300 - DNA, 75 bp, Homo sapiens
agcacacattgaatgggccaaggaaaaatcgagcagaaagaatgtctttcaggtgcccttcgctttatgaggcgg

SEQ ID NO: 734301 - DNA, 73 bp, Homo sapiens
gtgctccgcagggccatctggaactatatccactgcgtctttggcatcaggaacgtcaaggtcgtgggaaata

SEQ ID NO: 734302 - DNA, 75 bp, Homo sapiens
gtacgggctcccttcgccaaactcttcattttctctgtgttggagagcacaatggctgaacaagtccttcctcag

SEQ ID NO: 734303 - DNA, 51 bp, Homo sapiens
gctgagagagactgccttagtggcaagggaaagcaggcaggatgggagagt

SEQ ID NO: 734304 - DNA, 80 bp, Homo sapiens
ccgatccagcctgcggagcctgtggggcagaagacacagtctgtccagcacaaagttacttagtccccagatgtctggag

SEQ ID NO: 734305 - DNA, 82 bp, Homo sapiens
gctttaatatactaaatgcattgtagctctgagccaggggtctagagatgatctaagcaccaatggaggatttcaaagccag

SEQ ID NO: 734306 - DNA, 74 bp, Homo sapiens
gcctacctacattctcatgcattgattcatagaattcatggtttaaaatctgggaaaaccctgaaggaatttcg

SEQ ID NO: 734307 - DNA, 73 bp, Homo sapiens
cgcccgctcgtactgctgctgcacctgctgcaacttgggccccttttcaggctaagcttctatcaccatcaga

SEQ ID NO: 734308 - DNA, 80 bp, Homo sapiens
gctcaggtgtttgtccacggagaaagcctgcaggtttggcagtgtcaaccatctcatcattctctccacctgggtaccaa

SEQ ID NO: 734309 - DNA, 100 bp, Homo sapiens
ccagttggtggcgtttctctcccgataccgagatatgaatttcttgaagtcacacggccgggacaatgcaaggaaaatgtttataggaggccttagctgg

SEQ ID NO: 734310 - DNA, 90 bp, Homo sapiens
ggacaagccgacagcacctgttctatggacagtatgaaggcaaagtcaggtttgctggttggctcccgagcagacagcaggaaagaagaa

SEQ ID NO: 734311 - DNA, 80 bp, Homo sapiens
ctaaacagtggactcaacttcaaagacgttctcaaggagaaggcagacctggaactcgcacacaaagcagcatgagacag

SEQ ID NO: 734312 - DNA, 75 bp, Homo sapiens
ggggctggaagacgagagggtcaacttcatccacctgatcttagaagcactaggaggtgcagaggggactccaag

SEQ ID NO: 734313 - DNA, 96 bp, Homo sapiens
gaaaatgttaaaggctgtgctgaagaagagccgagagggaggaaagggaggcaagaaggaagcagatccagaagcatcgcaagcggttgaaggcgg

SEQ ID NO: 734314 - DNA, 100 bp, Homo sapiens
gtcatctctatggaagaaattggaccatacactttctcagatcagatcagtcacacatagacaactctctgaagtatatattaagtggcagaaacactcc

SEQ ID NO: 734315 - DNA, 98 bp, Homo sapiens
tgctcagcccacagggagcccactccttcatcaacgagaagtactgaactcctaatatcaccaattcttctaagttcctggacattgatccggaggag

SEQ ID NO: 734316 - DNA, 58 bp, Homo sapiens
cccagatgttggactcccagctcccacagagcatgaagggacgcccgcccccaacgcc

SEQ ID NO: 734317 - DNA, 100 bp, Homo sapiens
atactcaccctgcttgctttgtggctatcatcaaaatcaccaaccaaaagattcacctttggatttcatcgcttagacagagtctcgctgtgtcacccag

SEQ ID NO: 734318 - DNA, 100 bp, Homo sapiens
cattaaaattcttcagacattacgagaaatgttagagaagaaagacagctttgtggaagagatcaatgaactgagccatgttcaaatccctgttatgttg

SEQ ID NO: 734319 - DNA, 75 bp, Homo sapiens
tccacgagaccgtggagcgtggtgggaagtccagaatgacagggtccagaaactggcgagccacgagggacatgt

SEQ ID NO: 734320 - DNA, 96 bp, Homo sapiens
gatagcatcaaaaacaacattgaagaggaggaaaaagaggttggctcaggctgtacagcagtcatgacgctggcatctgcttggcttctggggagc

SEQ ID NO: 734321 - DNA, 75 bp, Homo sapiens
catccccgagcagcggtggaagctggaatcaagagagacccggccaaggcttttgtgcccaggactgttatgatt

SEQ ID NO: 734322 - DNA, 75 bp, Homo sapiens
cttgttaagagtggacaggttaagggactcccaggaatatcaggagtcggatggtcagggctgccctttctgtcg

SEQ ID NO: 734323 - DNA, 100 bp, Homo sapiens
cttggacctaccacttgaaaccattagtgagctggccaaatttgagtttcatcatggtgactatgaaaaacagtttctgcatgtactgagccgcaaggac

SEQ ID NO: 734324 - DNA, 96 bp, Homo sapiens
gaatgacagcttttgtgagaaaattttgccgtggttggacaaatcagtagatttcattgacatagggcctgattacattccaacagaggaagaaag

SEQ ID NO: 734325 - DNA, 90 bp, Homo sapiens
atgatgaccagtgtttactcctctctgagactgtctggggagctctccgagcatacatcaagagagtgatcgcacacccatccttccata

SEQ ID NO: 734326 - DNA, 90 bp, Homo sapiens
agcagatatactattgtactatggacttcatcgctttatagatatcggggctggcaaaggcaagtattatgctgttaactacccgctccg

SEQ ID NO: 734327 - DNA, 51 bp, Homo sapiens
ggtgtatgtgccggtcaagacgggctcggctgaccccgcactacatctacc

SEQ ID NO: 734328 - DNA, 50 bp, Homo sapiens
gtgttccccacggctgcgctcatgccagggtggacaagcttcatttacac

SEQ ID NO: 734329 - DNA, 83 bp, Homo sapiens
gtcgatgcctgtggctacagcgacccggaggatgagagcaaggaacttgctactaccagcaccatgccctaccaatatccagc

SEQ ID NO: 734330 - DNA, 51 bp, Homo sapiens
aagatcctggaggtggatctgaagaacgggatttttttcccaggaagccat

SEQ ID NO: 734331 - DNA, 101 bp, Homo sapiens
tgcttctcagaaatccagcctgcttcagcttcaaaacacagatgaactgggtgaacactttggaacaacggaagctacagaagccttctttgcaatgacgc

SEQ ID NO: 734332 - DNA, 75 bp, Homo sapiens
gaaaaagctgctgatgagagtgagagggttaaagcacgaattgggagctctcagcgacatcaccagtcagcagcc

SEQ ID NO: 734333 - DNA, 75 bp, Homo sapiens
ctgcagttgtgggcaccttgtatgcgccaggcgggcaccacggcaggggctgagctaccctcatggaagggagag

SEQ ID NO: 734334 - DNA, 50 bp, Homo sapiens
caagaaattactgtctcaagtgatacgcagtgtgtgaaagtaaagattta

SEQ ID NO: 734335 - DNA, 100 bp, Homo sapiens
cggggacaatgaggaggagacggagcacgccaaagggaacgagctagagcgacagtttcttgaattgctgcagttcaacatcaatgttccttccagtgtc

SEQ ID NO: 734336 - DNA, 101 bp, Homo sapiens
gttgtcaccatcgtctccgccttccagttcggagaggaagtggcagtttttgtctttgataaaaaactgattgacaagtatcaaaaatttgaaaaggatca

SEQ ID NO: 734337 - DNA, 100 bp, Homo sapiens
tcagcactcagaatgctccaggcagtgtaatctcattccatcttcattcatgactccagacagatataaagatgaagcgcagctgtataaagaagagcac

SEQ ID NO: 734338 - DNA, 74 bp, Homo sapiens
ctcgggaagagatagatcatgcagagtattacctttacaaagcctggagaaagttcttgtggaattcagtcaca

SEQ ID NO: 734339 - DNA, 98 bp, Homo sapiens
aaattgtttatcctccacaactgcctggagaacctcggagaccagcagacctgagggcactcgctttgctcctgtcagtacacactcccaaacagtta

SEQ ID NO: 734340 - DNA, 138 bp, Homo sapiens
ccgcttgtctgaagaactgcagggacttgaccaactgcagctggacaatgacgtgcttcgacaacaggaatttcagggaagagccaggtcctgtttgctgtggtgttcactgcccgatatctggacctcttcaccaac

SEQ ID NO: 734341 - DNA, 75 bp, Homo sapiens
tcgagaccagcctggacaacatggacctagatgacatagaagatgaaaatgaacagctaaagcaggaaaataaaa

SEQ ID NO: 734342 - DNA, 89 bp, Homo sapiens
agaaacctgaagttagaaaggctcaacgagaacaagctatcaggctccaccgctgaggctgcccgcatcatctaccccccagaggccca

SEQ ID NO: 734343 - DNA, 101 bp, Homo sapiens
gcccaacttccagcaggacaaggtcttttggctaccagatgaagatcgggctaatgtccaacgacgggcacctggaatgcgccagatatatggacgtcagg

SEQ ID NO: 734344 - DNA, 75 bp, Homo sapiens
ccgacttcgatgatcgtgtgtcggatgaggagaagctggcatactgtgtagtgcagtttttagaaaaggacagca

SEQ ID NO: 734345 - DNA, 100 bp, Homo sapiens
cacctcttgaaaagaagcattagtgcttcaattaatccagaagatagtactttccctgacattgcctaagatactgagccatatcgccccagcattttgc

SEQ ID NO: 734346 - DNA, 75 bp, Homo sapiens
tgcttttgtaacttttgatgatcatgatacagttgataaaattgttgtctgctgaagatatacgggatgatggga

SEQ ID NO: 734347 - DNA, 83 bp, Homo sapiens
caaagcagcgcccgtctgcttcgggcctctggaatttagcgctcgcccagctagccgcagttgcagaatgaagaagagtctgg

SEQ ID NO: 734348 - DNA, 50 bp, Homo sapiens
agtgcgccttctcctacgactctcccgtatattcaagagcaaatgaccaa

SEQ ID NO: 734349 - DNA, 51 bp, Homo sapiens
tattgcagaacagcctcagcctactgtgatagatgccaacattttcccagc

SEQ ID NO: 734350 - DNA, 75 bp, Homo sapiens
gatgttcctgctccttctacatctgcagataaagtggagaggtctctaattaacagaagatggcaaagcccagcc

SEQ ID NO: 734351 - DNA, 75 bp, Homo sapiens
aagcggccaccgactactgtcagcagctgtgccaggttgttgatcattatgaaaatcctagaaacgtggggtccc

SEQ ID NO: 734352 - DNA, 100 bp, Homo sapiens
cagctccactgccgtcaactcctgttctcctcagagcctgagtacaggggctcaggtccaggtggcaggggatatgctacccaactcaactgagcgggcc

SEQ ID NO: 734353 - DNA, 90 bp, Homo sapiens
ggagcagagatcaggccaagtttggaatcactgggcatcccgggcccaaatcctagacaaagccacagaatatatccagtatatgcgaag

SEQ ID NO: 734354 - DNA, 82 bp, Homo sapiens
ctgagcttggcgcacgggccgaccagtgtgtcccggcatggatatccggaacaacctcactaggttgcatgagctggagaat

SEQ ID NO: 734355 - DNA, 75 bp, Homo sapiens
gttaagaagtttttagatccaaacaactattccgcaaactatactggaaaaccgtcttcagatacagtccctaag

SEQ ID NO: 734356 - DNA, 100 bp, Homo sapiens
caccaagctaacccgtatccccagtgccaagaagtacaaagtgcccagcgcacccgtgatcgacctggctgagtccctggtggcagataactgtgtgacc

SEQ ID NO: 734357 - DNA, 82 bp, Homo sapiens
tctggagtttatctggagtgaggtggccggttcttggtgggatctgagcaggagccttcacgtaaatgggtccagtcatgcc

SEQ ID NO: 734358 - DNA, 75 bp, Homo sapiens
ccttacctgtcaccttggctctcccacccaatggagatggctctaatgtttttcagaagaagtgaagtcaagatg

SEQ ID NO: 734359 - DNA, 82 bp, Homo sapiens
agccatgaccgtggagttcgaggagtgcgtcaaggactccccgcgcttcaggtggctattatcatggaaaactaatttttcc

SEQ ID NO: 734360 - DNA, 98 bp, Homo sapiens
cagtgtcttgctcattcttcatgacactcctgatatgacatgcggaagcacgtggccatgaccctgctggacacagagcagtcgtatgtggagtcgct

SEQ ID NO: 734361 - DNA, 100 bp, Homo sapiens
ggaaacttgaaagttggatgctgcagacccgaatctccaatgaaaactatgttcctcacgggctgaaggtggtgcagtgtcacagccagggtggcctgcg

SEQ ID NO: 734362 - DNA, 100 bp, Homo sapiens
ccaggtcatggatgaattcctctacaacctcagctcagatgacttcaatgacaacatctggttttgtagcctggatgtgtctgctagtagccgaatggtg

SEQ ID NO: 734363 - DNA, 75 bp, Homo sapiens
atgggaaccagtctttcaaaatgctccttcctcagagaagcttcctgttatgtaccttatggattctattgtgaa

SEQ ID NO: 734364 - DNA, 51 bp, Homo sapiens
cctctcctgaccctgaagaactgtgacaaagccacagacccaagcatgtcg

SEQ ID NO: 734365 - DNA, 50 bp, Homo sapiens
aaactgtagtaagagcattacatggattgctcgctgtaagcagctcatct

SEQ ID NO: 734366 - DNA, 82 bp, Homo sapiens
tccccggcgcgaagaggctggactcggattcgttgcctgaggtggtgatgatgtccagcaactctgtgaagcaggagaagag

SEQ ID NO: 734367 - DNA, 90 bp, Homo sapiens
ccagcaaataaaaagaatcgattacctataggtcgttccaggggtagaggaggcatgaaggatgaccgtcgggacagatactctgcgggc

SEQ ID NO: 734368 - DNA, 74 bp, Homo sapiens
gaagataggatcaagatggccatgtggcaggggattaaagcctgtggtttccacagaagcaccacctatcatat

SEQ ID NO: 734369 - DNA, 97 bp, Homo sapiens
gactaagaaattcagcaaccaggagacctgagcgcttcgaccatcactgcccctgggtggggaattgtgttggaaagaggaactaccgctacttcta

SEQ ID NO: 734370 - DNA, 83 bp, Homo sapiens
aatttcctcgaaaacgcctgtaactcggctgaaggtgctggccacagggctcagtgccctgtactcatcactgcctcgaaaga

SEQ ID NO: 734371 - DNA, 82 bp, Homo sapiens
ctaccagctgcggcggccggaggaccggcctgccggcccccagaacaagattagaagcccaggacccaggaaggagacacag

SEQ ID NO: 734372 - DNA, 80 bp, Homo sapiens
agaccctggagcctcagttggaagcagccgatccagcctgcggagcctgtggggcagagaaaccctaaagcaggcagcag

SEQ ID NO: 734373 - DNA, 86 bp, Homo sapiens
tgaatcagctgcacagtccttagcggtggcattacctttgcagaccaacctcatttccaccatctacatggcagcctccattggca

SEQ ID NO: 734374 - DNA, 75 bp, Homo sapiens
caagaagatcatcattaaggacggaggcacgctgagcttcagtcattgtctattcctggaacttaccaagagaag

SEQ ID NO: 734375 - DNA, 75 bp, Homo sapiens
gtttaaggcagcgctttggagggggccagagtcagggggcgctggccggcaggctgcggagcttctccatgcagg

SEQ ID NO: 734376 - DNA, 75 bp, Homo sapiens
cgaggagagacagaagaagctggaggccggcaaagccaagaaggatgccctgcagtggtctcgccatccagctac

SEQ ID NO: 734377 - DNA, 88 bp, Homo sapiens
tggcagtcggtcatccacctgctgcagatggggcaggtgtggagcatcaagatggtgctcatgtggaccagtggtgacgccttcaaga

SEQ ID NO: 734378 - DNA, 100 bp, Homo sapiens
gcggccgcggagtcttcggcgagacctaccgggccctgtctgtgccggccgtgagctgcggcaggacggctggagccggaagaattaacctcgagtctgc

SEQ ID NO: 734379 - DNA, 100 bp, Homo sapiens
agacgtgcggatcctgctggtgggagaaccactattcctgatcagagaactccagttgcttcaacacacagtatcagtagtgcagccaccccagatcgaa

SEQ ID NO: 734380 - DNA, 74 bp, Homo sapiens
acctagtcgtggccggaggagtctcagagctgtcagaaagtgagtgtgtccgcttgaaaccaactgacatacag

SEQ ID NO: 734381 - DNA, 75 bp, Homo sapiens
cgtcacatgacagcagatccgcggaagggcagaatgggactccaagcctgaccaagattggagctggccgcctca

SEQ ID NO: 734382 - DNA, 100 bp, Homo sapiens
gcgcgagtggagctctgaagaagctctgagcggagttgtgttcttccccagagagctggcttaccagagcaccgatggacttggatacctgagatatctg

SEQ ID NO: 734383 - DNA, 90 bp, Homo sapiens
agtcacttctttacttggtgcaggaaggcagtctttgctacgtacagcaaaaggaggtgaaacagcagaaatgcctgacatgtatccccc

SEQ ID NO: 734384 - DNA, 98 bp, Homo sapiens
agcagggaaagagagcgccaggtgcttagcagtaccttctccaggcaaattccgttcccctgcagcaccatctcctttggctcttcggcaaccagtga

SEQ ID NO: 734385 - DNA, 75 bp, Homo sapiens
cgaagcagccattttcacttccacggagcaggtggaatgaatcttacttgttgaatatcttctggttactagttg

SEQ ID NO: 734386 - DNA, 100 bp, Homo sapiens
tgacagcgaagactccgaaacagatgccactgccgccaggagccctgtaacatcagccatcgtcaaccccaccgtgttcttcaacatcaccgttgacggc

SEQ ID NO: 734387 - DNA, 48 bp, Homo sapiens
ctggcctggaggctatccagctgcatattgggtacttccagaagtatg

SEQ ID NO: 734388 - DNA, 75 bp, Homo sapiens
atggcctataaaatgcttcaagtagtcctgtgctcaacattgcttatcggtgccttagctggaccaattattgtg

SEQ ID NO: 734389 - DNA, 100 bp, Homo sapiens
cttggtttggacatactacatggatcaggagtccttcaataatgttaaacagtggctgcaggaaatagatcgttatgccagtgaaaatgtcaacaaattg

SEQ ID NO: 734390 - DNA, 97 bp, Homo sapiens
ggaatatgtttttgaattggatgttcccgggaaagtggaagatgttgtggagacgttgcttcagactttgagaatcactacaagaaaaactccttgt

SEQ ID NO: 734391 - DNA, 75 bp, Homo sapiens
ctcagaccgtaccttgcaacaaggtatggaacgccgtggactccgggcactgcctgcagacctactccctgcaca

SEQ ID NO: 734392 - DNA, 75 bp, Homo sapiens
ctctgagggcactggcctagttcccgacttgtttctcaggtgctggagaatctggtaaaagcaccattgtgaagc

SEQ ID NO: 734393 - DNA, 87 bp, Homo sapiens
gaaaaggaacgagcagtgatggctgaaaaggatgctttagaaaaacacgatcagctcttagacagcgcaatggcggcggccgcggcg

SEQ ID NO: 734394 - DNA, 100 bp, Homo sapiens
ccaaggcaattgatcccaagttgtcgacgaccgacagggtggtgaaaggatatttctttaatgggaaaaatgtacctcaaaacatcacctatgcaagcag

SEQ ID NO: 734395 - DNA, 90 bp, Homo sapiens
ggtcataatcgctgaagatgttgatggagaagctctaagtacactcgtcttgaatagccctcatgatgtattggctacacttctgaacaa

SEQ ID NO: 734396 - DNA, 76 bp, Homo sapiens
cagatcttcaacaagaggacccaggagaaattcgccctcaaaccaaatttgtatcctactgtggggcttcaaacac

SEQ ID NO: 734397 - DNA, 100 bp, Homo sapiens
tgaaggccgagggcttcgtggatgccctgcaccgggtccggcaggtgacagaccatgccaccactgccctgctccactatcagctgccccagatgccgga

SEQ ID NO: 734398 - DNA, 98 bp, Homo sapiens
tgaagttcacgactactagaaggggaggggagtggaaaggctctcagtgaaaaaggaccgtgtttcttcgcctcgcctccctggtggtcctgctcttc

SEQ ID NO: 734399 - DNA, 118 bp, Homo sapiens
ccgactactttgcctccttggatttcctccagggagaatgtgacctaatttatgacaaatacgtagagctcagagccctgaggatgatgacaggaaggtccgaaggagagaaaaaaac

SEQ ID NO: 734400 - DNA, 100 bp, Homo sapiens
tttctgactgtgaaggagttcttggacctcgagcagagtgggactcttctggaagtcggcacctatgaaggtccagaatggctacaacagtccctgatgg

SEQ ID NO: 734401 - DNA, 88 bp, Homo sapiens
agatgagccgatcagggaaccaggtgtctgaatacatttcaaatactttcttagaaagacgagaatccaggacttgaatcgtatcttc

SEQ ID NO: 734402 - DNA, 82 bp, Homo sapiens
ggcaacttcggggagctccgcctagatttggtcgtattgggcgcctggtcaccagggctgcttttaactctggtaaagtgga

SEQ ID NO: 734403 - DNA, 100 bp, Homo sapiens
gcagaaccaggcgctgccctccggacacagcaagcagacgcagtacgtgctggatgtgcagttgcagtttgacagtccagagtgggagaggactccaggc

SEQ ID NO: 734404 - DNA, 82 bp, Homo sapiens
cagcagtagaatcacttgggttcattctattcagcaactttttacagatgtggcaactggagaaatgtccagggaattagct

SEQ ID NO: 734405 - DNA, 100 bp, Homo sapiens
aaaggagaactataattctaggaagtggtcacaaaggaaaagctactattagaattggaaataagatatgtggaacggagttatgtatcaaaacccactt

SEQ ID NO: 734406 - DNA, 86 bp, Homo sapiens
tgagtagaaatatgaagagctcacccaagtggatgtgaattctggggagacattgccaaggaattttactggaagactccatgccc

SEQ ID NO: 734407 - DNA, 90 bp, Homo sapiens
cacaaggtgatagacttcgggccttgaaaagcagaagacaatccaaaacaaacgctattcctctcacggatcgcttacacctgagacgaa

SEQ ID NO: 734408 - DNA, 100 bp, Homo sapiens
gagctccccagctggtggctggagcgaccccttgttctttggtggcgctgggaaagcaggcaggatgggagagtcgccgatagaaccacctcttccctgc

SEQ ID NO: 734409 - DNA, 100 bp, Homo sapiens
gcaaggccagcaggccatgtcactggccatcctccgtgtcatccggttgctccaagtacagcccagtatggaattaccgggagcgctgatgttcttttct

SEQ ID NO: 734410 - DNA, 90 bp, Homo sapiens
accagatcatccatgtgagtgaccatgcagcaaaagaaggagggtcctctcagtgattaagtgaatatcacctctgccaggcaattaacc

SEQ ID NO: 734411 - DNA, 97 bp, Homo sapiens
ttttctctcagctgcaacaacttcaatgcagtctttagtcgcatttctaccaggatcgacgagaacgtgctaggagcccagctggacgttgaggccg

SEQ ID NO: 734412 - DNA, 100 bp, Homo sapiens
gtgcggcatgtgcccagcctcatcctggaaaccaagggcatcgcgatctgccttctggagactgcgccgtcctcccgggagagccagaaagaggacatgg

SEQ ID NO: 734413 - DNA, 60 bp, Homo sapiens
cacactgccaaccggccagaggacgagtgtggtggagcttctggtgatgaaggccctttc

SEQ ID NO: 734414 - DNA, 100 bp, Homo sapiens
ttcgtagacattgtctcccaagacaacttcctcaccagcaccttacagactatgtcagagagtcacaatgaccttgcacaataacagtacaacctcgcct

SEQ ID NO: 734415 - DNA, 100 bp, Homo sapiens
gacacatgctaacaggatctacaggatgatcaaacttggtctgggctaagtcctatcagccatggaaacaccattgctctcttcttccggtcactgttgc

SEQ ID NO: 734416 - DNA, 100 bp, Homo sapiens
caccaggactacagtaaggctgaaatcattgaagtgcttggagtgcagaactgaaagaggttccaatgattcttgttggtaataagtgtgacttggaaga

SEQ ID NO: 734417 - DNA, 50 bp, Homo sapiens
cggggcggtgctgaactttaagctccagaagatacctgaaattcctgcag

SEQ ID NO: 734418 - DNA, 100 bp, Homo sapiens
ggaacgcgggcgcctgaaggagttgttgtctcggcagcgcccgcggagacgtgaagaggttgaaacagttcctcaggctacagtgaagactggattacag

SEQ ID NO: 734419 - DNA, 75 bp, Homo sapiens
gtgaaaccaagaaagaagcccaggagctgtcccagaattcagctataaagcagatgaccactgagcagtttacag

SEQ ID NO: 734420 - DNA, 50 bp, Homo sapiens
agaagaagaagtgttagaccagggtaatttgcattgtatatagatgatcg

SEQ ID NO: 734421 - DNA, 75 bp, Homo sapiens
cgacgcggacctgcggactagcgaacccggaggtgcccccttgtttctctcccatcctcacttcctcaacgctga

SEQ ID NO: 734422 - DNA, 100 bp, Homo sapiens
agacactgactggcagagtcctggtccacattggccaactgtattcaactgacaagctgatcattgagaatcgagacatgcccaggacctagcaagccgg

SEQ ID NO: 734423 - DNA, 100 bp, Homo sapiens
cccccatcattgggagaaatccccactcctccaagaaccaacccccaaattggctgggacaggaatggcggcgctagatagtaaggcatcagggaagatg

SEQ ID NO: 734424 - DNA, 76 bp, Homo sapiens
ctcacaaataaacatggtgcttggggagcagtttctcatagccaatttaattcaggagatgaattctgatgaccca

SEQ ID NO: 734425 - DNA, 88 bp, Homo sapiens
ggctcctcggctggtggcaagtattgctgtgggtgctgggacttcccgtccgcggcgtggaggtttgcctgagaatacagatcaaccc

SEQ ID NO: 734426 - DNA, 90 bp, Homo sapiens
gagctgaagactgattacaagaatcctatagaccagtgtaataccctgaatcccagctccactggttcaacagcctctcctccagtttcg

SEQ ID NO: 734427 - DNA, 90 bp, Homo sapiens
gggtgacccacgcggaggccgtcaagatggagtttcactcttgctgccaaggctggagtgcaatggtgcgatctcggctcactgcaacct

SEQ ID NO: 734428 - DNA, 98 bp, Homo sapiens
agacacaatttatcattgaataagtgttttaagaaagtggacaaagagaggagtcaggatttgtataagtccttgaaaacactatctgcagaactggt

SEQ ID NO: 734429 - DNA, 75 bp, Homo sapiens
ggaacatcacttgcattacgtgcacagacgtcagaaggtgcttcctggaggggcctgccccactgttcctgtgct

SEQ ID NO: 734430 - DNA, 75 bp, Homo sapiens
ccgcgggatacgcctcagcgcggtactgggcctaatcgctacgtgcctctttggctatgatgcctatgtcacctt

SEQ ID NO: 734431 - DNA, 50 bp, Homo sapiens
ctcctgagtggctgggactacaggctttcatctgagtggcacagtaactg

SEQ ID NO: 734432 - DNA, 100 bp, Homo sapiens
gaccgcgcccgccgggcacacaagaatggtcactgaaggtgtggtccctgccatgctatctgctctgctcagcgactgaaggtgcccgcatcccagctct

SEQ ID NO: 734433 - DNA, 83 bp, Homo sapiens
catgttcacgcacgggatccagagcgccgcgcacttcgtcatgttcttcgcgccctgcacatgattaagtaccggtacatccc

SEQ ID NO: 734434 - DNA, 100 bp, Homo sapiens
gtcagccgatgcaccgagtccagcccaggaaaatggagaggtacggacattgctgcaggagaagaggttgccatcaagcttgaatgtgtcaaaaccaaac

SEQ ID NO: 734435 - DNA, 75 bp, Homo sapiens
ctctttcaatgacaaaaagtttgtcattaaacccatcgacaagaaggcacctattcaattagcagagcctcacag

SEQ ID NO: 734436 - DNA, 82 bp, Homo sapiens
cagcactgccaaactggactactccaagacacaacatttgcctgcaacaaggacagcggccagtggcactactttgatgaca

SEQ ID NO: 734437 - DNA, 75 bp, Homo sapiens
agaacaatcagtgatgaagatgaatcggctaaactgtgaaaatgcagtcctcaaagagaatttgaaagtgaaaac

SEQ ID NO: 734438 - DNA, 136 bp, Homo sapiens
tggaaggatttattcggaagtgacttgcttttttgaccatgttactcatagagtccgactataccacatacaggctgatgttctaatcatgtcagataaagatgatattgagactccactgctaactgaagcagcc

SEQ ID NO: 734439 - DNA, 99 bp, Homo sapiens
ctggccaagtccaagtgtcctcgattaagagttgatgctatgaaactgggagtaaaggaaatgaagaaggcatacaagcaagtgaagatcgaccagatt

SEQ ID NO: 734440 - DNA, 100 bp, Homo sapiens
ggcacaggaccagactcaagacacacaactcataacagttgatgaaaaattggactgttctgatggctacatgtgcaaaatacactttcaaattaagaat

SEQ ID NO: 734441 - DNA, 90 bp, Homo sapiens
agaaaacccactggggacagaagcctctaaagctccagaaacatgacaaggaggactttcctgcctcttggagatcagaggaggaaatgg

SEQ ID NO: 734442 - DNA, 142 bp, Homo sapiens
tcttttgctgtagatccccagatcacctcgctcgacgtgttgcagcacatcctcatccgagcctttgatttgagtggcaccactgccggaactgtggccacatcttctgcaacacctgctccagcaacgagctggccctgcc

SEQ ID NO: 734443 - DNA, 49 bp, Homo sapiens
cgggaatgtcgacgaggagctgagttatgccatcggcaccgtactggat

SEQ ID NO: 734444 - DNA, 96 bp, Homo sapiens
tgaccagtctgatgagcgcaactgcagaatagaatctgaggcaagtctctctaagttgtcaccaacctctcagaaaggcacttcctcaagttcttc

SEQ ID NO: 734445 - DNA, 80 bp, Homo sapiens
agctttggatttgcatggagttttgtggaggtggttctttacaggatatttatcacgatccaaacgatcaaagatgttgc

SEQ ID NO: 734446 - DNA, 98 bp, Homo sapiens
cagcccctgagctgggcgagaggtgccaagggagcttctgtcccgaggaccaggggatgcgaagggccctctttggattccagtacgatgcatcagac

SEQ ID NO: 734447 - DNA, 98 bp, Homo sapiens
cttcagaaacagtgctgaagcctttaaatgcagcatctgcgatgtgaggaaaggcacctccaccaggtactccaaagattcaggtttactcacgtcat

SEQ ID NO: 734448 - DNA, 97 bp, Homo sapiens
agccaaagattggttttccagagacaacagaagaggagctagaccttagctggatctccaaaatacaagtgaatcacccggcagttctgaggcgtgc

SEQ ID NO: 734449 - DNA, 90 bp, Homo sapiens
caaagcaacaggtgaagatttccttaaaattgctggtggtgacccatcactacatggagatgtttggtcgtggctggaattcttcctcac

SEQ ID NO: 734450 - DNA, 99 bp, Homo sapiens
ctggagaccaccagcttctttgactcagatgaggatgactccaccagcaggctgtgggtgagcgtggaggatgctcagatgcacaccgtcaccatctgg

SEQ ID NO: 734451 - DNA, 83 bp, Homo sapiens
ctttgttcagctgcagcatggagagatagataaacgggtgtgagttcttgatacgaatgaaaggccaagagtttgttgatgag

SEQ ID NO: 734452 - DNA, 123 bp, Homo sapiens
cgaaaatctgggctaagtgctggcaagagcgatgtctactacttcaggtaccagctggaggatgagtctgcgcatttggatgaaatgccactaatgatgtctgaagaaggctttgagaatgag

SEQ ID NO: 734453 - DNA, 76 bp, Homo sapiens
ttgtgacccagagcttcctaaaacttcatcctttgccgcatcagatatccatctctcctcgaacaacaaattcttt

SEQ ID NO: 734454 - DNA, 100 bp, Homo sapiens
aacttcctcaagtcgcccaaagaggaagtggcttttaggaagaagaggctgtgcattaaatttattccacgggattcaacggaagctgcgatttgtgaca

SEQ ID NO: 734455 - DNA, 50 bp, Homo sapiens
caaagcttctccctcagtatttagaccagtcatcagtgagttctgcctca

SEQ ID NO: 734456 - DNA, 75 bp, Homo sapiens
agccactaagagggatgaacaggcctgcgtggaaattgaatgagatttctcttgttttcagcagccactgtaaag

SEQ ID NO: 734457 - DNA, 100 bp, Homo sapiens
cctgggcaagctccagagcctgccggaaggctccctcggtcgcgagtatctccgtttcctggatgtgaacaaccaccgggaggaactgggccattctaac

SEQ ID NO: 734458 - DNA, 100 bp, Homo sapiens
ctcgcctcctccagctgttgttgctgctgatacttcagttatttgagtaaagtgggagataaaatgagatttgatttggcccttgctgctacagaagcca

SEQ ID NO: 734459 - DNA, 119 bp, Homo sapiens
cttgaaacacatctaattgcacttaaacttgaagaacttattttagaagacacttctctctcaccggtgggtgtttgtgtgggaaaagggctaccaggaaactgactccgtggtcagct

SEQ ID NO: 734460 - DNA, 82 bp, Homo sapiens
attgacgccatgtcgggttattcgagtgaccgagaccgcggccgggaccgaggagtctgtagaagaggcgacaccagggctt

SEQ ID NO: 734461 - DNA, 75 bp, Homo sapiens
cttcgatgtgcgagactttggaaaggaagatgatccctatgatcttgaagatgtttctgcacagaaatgagggaa

SEQ ID NO: 734462 - DNA, 50 bp, Homo sapiens
gcaggtggccctaaggttggagcttttctgggagaagaggctacaaggac

SEQ ID NO: 734463 - DNA, 82 bp, Homo sapiens
cggcggcgctccgagagctccaggagaagcaggctctgatggagcagcagagacggtgctggagaatctggtaaaagcacca

SEQ ID NO: 734464 - DNA, 100 bp, Homo sapiens
tgttttgaagcacctacactggcaacattagatccacctcatacaggaatcccagtcagaagttccagcctgccactgttctctgatgccatgccagcac

SEQ ID NO: 734465 - DNA, 82 bp, Homo sapiens
ctacaagtgaaggttttaaaggcagcagatctcttagcggcagatttctcagataaagagaggcctgtccagtctttgaaaa

SEQ ID NO: 734466 - DNA, 98 bp, Homo sapiens
taattcttcacattccttcttagaagacttgactggtcttacattgctgcatcaagaaacccaagctgctgaggacatggatttgattgacatacttt

SEQ ID NO: 734467 - DNA, 75 bp, Homo sapiens
gaagaattcatgctcatccggtagacccaaatgatttgtacattgtagaacccctcaagttttctccagaaaaga

SEQ ID NO: 734468 - DNA, 75 bp, Homo sapiens
cagacgcagccgtagacaccagctccgaaatcaccaccaaggactcacaccacccggcaagaactgctcactacg

SEQ ID NO: 734469 - DNA, 75 bp, Homo sapiens
gccttctgggcaagaaactgggcatccctcgaggcgtacaaagtggcatggcagagagaaatgctaattttgaag

SEQ ID NO: 734470 - DNA, 75 bp, Homo sapiens
acattgtagaattgcaaataatcctggaaaagtacttggcagatgtgctgaggaagtgaagagccctggagaaga

SEQ ID NO: 734471 - DNA, 75 bp, Homo sapiens
aaagagcagatgccaaatctggctgctcccggcagatcggcttctcctttgtacgacccaagctctgtgccttct

SEQ ID NO: 734472 - DNA, 75 bp, Homo sapiens
tcaacacaccctccagacccccgtccagtgaattctattcatcaagatcctcgatagtgtcctgcaccacctggt

SEQ ID NO: 734473 - DNA, 90 bp, Homo sapiens
gactattaagaccatgttggaagaataatccagaatggctactctgatctatgttgataaggaaaatggagaaccaggcacccgtgtggt

SEQ ID NO: 734474 - DNA, 90 bp, Homo sapiens
agccaaagaaacaagccgtggaataggtgtatcaagtaatggtgcaaagcctgaagaactggataatttctgtaaccccatcatttacaa

SEQ ID NO: 734475 - DNA, 100 bp, Homo sapiens
ctctggcctctgaaacactaccactgctggcgctgaccttcatcacagacaacagcctggtggcagcggaaatcatccacaaagggcacgtggtcacaga

SEQ ID NO: 734476 - DNA, 100 bp, Homo sapiens
agaaattctgcagaagttcctggatgaggcccaaagcaagaaaattactaaagaggagtttgccaatgaatttctgcaacagtatcaaagtgctctattt

SEQ ID NO: 734477 - DNA, 82 bp, Homo sapiens
gcggaacgaaagtgaacaggagccgctcttaggcgacacacctggaagcaggacccagtggcctttgaggatgtggctgtga

SEQ ID NO: 734478 - DNA, 100 bp, Homo sapiens
acgacgctctgcaggtgctgggcttgcttttcagcctggcccggggctccgaggtgggcaactctcaggcaggcaggatgacgcaaaacacggtgattgt

SEQ ID NO: 734479 - DNA, 87 bp, Homo sapiens
tgaaaccacagacatgactgagtcctccatgaagagccagcactccttgcccgaggacagagatggcgagcgcccggattggggatg

SEQ ID NO: 734480 - DNA, 100 bp, Homo sapiens
cggagatcatgagcatgatctggaagcggctcaatgaccatggcaagaactggcgtcacgtttacaaggtgttggcagagtggaagacaaagtgtgagga

SEQ ID NO: 734481 - DNA, 75 bp, Homo sapiens
agcattaaacccaagaacattgtggagaagattgactttgacaagattgtggacggcaacgcaaagatgaccctg

SEQ ID NO: 734482 - DNA, 101 bp, Homo sapiens
ttccggatcgggggcaagcggaaggtgatgcccaagatggaccagctctaagcgaaagacatgaggcctcagcctgaaatgaggttgttttgaggtcatct

SEQ ID NO: 734483 - DNA, 100 bp, Homo sapiens
acctacagccccgacgaacatttctgggtgacactcaacaggattcccggccttggatggtatactgtaaattcagcatatggagataccattatcatac

SEQ ID NO: 734484 - DNA, 100 bp, Homo sapiens
gagaagcagtgaaggagtgcagaggcatcacctgaaagagtgaacctctgtatgtgcctgtgaaattccatgatcttccaagtgaaaaacctgagagcac

SEQ ID NO: 734485 - DNA, 75 bp, Homo sapiens
ccctggagtgacctactcgcccgtcagtggttataataagttcattgactggctattcagcatcatggaaagccc

SEQ ID NO: 734486 - DNA, 50 bp, Homo sapiens
tgaggactgtgcagcagagtttggacatgggaaagcggaaccaccaaaag

SEQ ID NO: 734487 - DNA, 120 bp, Homo sapiens
acagttcctaccttatgagctcggttttcttatgcttataagagtggaacagatcacccggaagttcaggctgaattctgaaggcaaacttgagcagacggtctccatggcaaccacgac

SEQ ID NO: 734488 - DNA, 75 bp, Homo sapiens
tctttctggcctggaggctatccagcatcttagcaaagcaatgtctcaagatggtgcttctcagttccaagaagt

SEQ ID NO: 734489 - DNA, 75 bp, Homo sapiens
atactaatattttcagttcaaccaaaatctcttgtacggtgaactgtcacccctacaactcagcttgcaaccagc

SEQ ID NO: 734490 - DNA, 89 bp, Homo sapiens
ccgccgccggagtcgttgtcgccggagcctggagccgtgaacccagccgcgccaggactccagaagacctttccagattcgtggttgag

SEQ ID NO: 734491 - DNA, 101 bp, Homo sapiens
tttgcaccactggatgttgtttactgcctctgctgcgagaagttctggagaagcagccagtgctaagccagaccgaggcccgcgacttagtagaacgctgc

SEQ ID NO: 734492 - DNA, 75 bp, Homo sapiens
cagaagaaagaagaggagaaggagcagtccgtgctcaagtttacccaaggtccagcctagcccctaggcaccatg

SEQ ID NO: 734493 - DNA, 82 bp, Homo sapiens
ctgcgggaaatcgggctgaagcgactgagtccgcgatggagcatttaaatcaaacggtattgagatggattgggttatgaaa

SEQ ID NO: 734494 - DNA, 98 bp, Homo sapiens
tacttcagcaatagcaactaatggatttgtaagaggagattactgacagccctgtcctaggagcacaacgtccgagaaatgctcagcttgactgctcc

SEQ ID NO: 734495 - DNA, 100 bp, Homo sapiens
gcggagaccctcgaagtgcgcaaacttgacactcaccctgaccgcgtcatcacgtagacataaccaagaaacttcacccaaatcaagctggcctggattc

SEQ ID NO: 734496 - DNA, 100 bp, Homo sapiens
gttggattctcttatcaaggctaccatagctgggggtgtcactgcttcaaccacctgtgagaaattagaaaaagccaggaatgagttacaaacagtgtat

SEQ ID NO: 734497 - DNA, 74 bp, Homo sapiens
agcggcacaacttcagtctattcatgaaaatgtaaagttacattacttcgttcagaaccatttcacaagtgcaa

SEQ ID NO: 734498 - DNA, 90 bp, Homo sapiens
ccagtacactgacaaacacggagaagagcaagctataccagagaatcagatagcaagccctccctcagaggccaagggagcagaagagcc

SEQ ID NO: 734499 - DNA, 78 bp, Homo sapiens
agagatcctggacctatgaatatccagtttgagccatcggatctaagatccaaaaggatttgaactcagaggatcaaa

SEQ ID NO: 734500 - DNA, 82 bp, Homo sapiens
accagaacaccccgagatgagaggagaagagcccagcacaacgaagcaattctgtggtgttcttggtcacacatttatggag

SEQ ID NO: 734501 - DNA, 146 bp, Homo sapiens
catcatcttgctctggcggacgctcaagtacctgtggaccgtgtgctgccactgcgggggcaagacgaaggagttagaaatggagtcaatatatcttcaaaagcaccttggggcctgtttaactcaaggtcttgcagaagtggcaa

SEQ ID NO: 734502 - DNA, 50 bp, Homo sapiens
gcgatgatgccacattacctgtgccatgctatgtgtttgatgaagagttg

SEQ ID NO: 734503 - DNA, 101 bp, Homo sapiens
tgacactgaccaccaggccaacttaacatcagcagatatcctgtctcagatgaagagggatgcttgaagatggaaagaaatttgattcctcccgggacaga

SEQ ID NO: 734504 - DNA, 100 bp, Homo sapiens
gaaaatcatggaagttgattactcagtctctaaaaagctaagatttgataatgggctgcattaaaagtaaagaaaacaaaagtccagccattaaatacag

SEQ ID NO: 734505 - DNA, 82 bp, Homo sapiens
agctggacagacaccacaagagcgagtggaagaagtccttagtggcaaggttcttggagtgtcaatgttttaataccagtac

SEQ ID NO: 734506 - DNA, 75 bp, Homo sapiens
tacagccaagatggtgctgtcccagagacaacgagatgaacttgctctacggaaacgtattcgagaggacagaaa

SEQ ID NO: 734507 - DNA, 82 bp, Homo sapiens
tttacatccacaatggcactgaggagaaggaggaggagatgagttggaagattctggatgaaattgaagaacataacatcaa

SEQ ID NO: 734508 - DNA, 83 bp, Homo sapiens
gggaattcagcctcagtgatgtccatgagacctagaggatcaagacataatgggagcatttttagacaagccaaagatggaaa

SEQ ID NO: 734509 - DNA, 96 bp, Homo sapiens
tctgtatcttcatggtgcggctcatcttcgagaggggggacacagcgattgccacgcgccattggaatgtccctggccaaggagctcatattctct

SEQ ID NO: 734510 - DNA, 100 bp, Homo sapiens
gccgggcggagagaactcagcgaggattctgagctgttgcagggtgtgatggagaacaaagctatgtacctacacaccgtcagcgactgtgacaccagct

SEQ ID NO: 734511 - DNA, 82 bp, Homo sapiens
atgccctgaagaagtgtgagcatgacccccatgtgctcctggccgtggccaaatgaagatctccttcaacgacaaaagcctg

SEQ ID NO: 734512 - DNA, 49 bp, Homo sapiens
gggaggtggaacgggccgaactgcagggttttttgattaactcaaaacc

SEQ ID NO: 734513 - DNA, 100 bp, Homo sapiens
agccgaccttgagctccaggagttcgtctcttacgtctgcggaagtgcagctgcctcagttcttagcgcagaaactagacacaatgtgcgacgaagacga

SEQ ID NO: 734514 - DNA, 101 bp, Homo sapiens
ggaatttctgcaactacaggacagccctgcgcggggcggcccaccgctccctgacggcccacagcagccgagagaagctgcgttcctttgcctgcaacagg

SEQ ID NO: 734515 - DNA, 123 bp, Homo sapiens
tatgagtgaaaatgctgttcgccaaaatggacagctggtcagaaatgattctctcatggcctgtatgagaagaaaaagacctcaagaaagcaacgaaaggaacgcaagaacagaatgaagaaa

SEQ ID NO: 734516 - DNA, 101 bp, Homo sapiens
ccgcggtctacgaagaccaagtgggcaagtttgattggtgaatgaaaactttgccattgatttgatagcagagcagcccgtgagcgaggtggagactcggg

SEQ ID NO: 734517 - DNA, 82 bp, Homo sapiens
tggctgctgaaggatgaacggagaggaagaattctttgatgccgtcacagaaaggatcttgttcgagtagaagccacagtca

SEQ ID NO: 734518 - DNA, 100 bp, Homo sapiens
gccctgggcctctaggtcctggcgccccgcccccactgctgtttctcaataagcaaaaagacaccattcgcttttcacccaagatgatttgatgtcttat

SEQ ID NO: 734519 - DNA, 96 bp, Homo sapiens
atgaaagcagccatcagtgagacggaagatatgccaatgtttattggctctaccagtgcacctggacagggaggaatcctggctcagcgggagttt

SEQ ID NO: 734520 - DNA, 101 bp, Homo sapiens
gaaagagccactgaacagttacagcgagctgcttactatcaggtcccggctggccgacttccatgccaattgtcgagcctcctaccagacggtcaccagct

SEQ ID NO: 734521 - DNA, 80 bp, Homo sapiens
aggagcagctcacctgagagacggagccccggctcgcccgtgtgcagagacctgcctagagctggaacgttacctccaga

SEQ ID NO: 734522 - DNA, 100 bp, Homo sapiens
ctggtgcctggaggagctgtggtggttctttctggccctcaccgaggcctctatgggaagggagaaaccagcagaaactgagaggagaagatgactacaa

SEQ ID NO: 734523 - DNA, 100 bp, Homo sapiens
gtcgagccggaggaagccaccagctgaagaaatcaggggagaaacccctgcttggtggaagcctgatggaatatgcaatcttgtctgccattgctgccat

SEQ ID NO: 734524 - DNA, 74 bp, Homo sapiens
tactgaaggagcaggaaaaccggaagggcctgatagccgccatctgtgcagggggcagtacccaaaggaaacgc

SEQ ID NO: 734525 - DNA, 50 bp, Homo sapiens
ctgcaccggaaatgtgcctaccagatgtatgtccctgggaagctgcatga

SEQ ID NO: 734526 - DNA, 90 bp, Homo sapiens
cttcagtggaccactctgcaatgaccgtgcaaatgtcaattgtcaagccttggacaaagctacacccttgttcattgctgctcaagaggg

SEQ ID NO: 734527 - DNA, 100 bp, Homo sapiens
agacaggaaaataattaaatattcttaccgaggccaccagcccctcgggttccaagatgcagctactggagacagagttctcacacaccgtgggcgagct

SEQ ID NO: 734528 - DNA, 100 bp, Homo sapiens
ttttgtgtccaggcataagaaatttgacggtgactctgacatcattagaagcatgccagaacagactggtgaaaagtaaaccttttcacctacaaaattt

SEQ ID NO: 734529 - DNA, 90 bp, Homo sapiens
caatacgctcagttatatgagggtcctccaagccaggccatgtgggctttaggggataagattgcatcttccatagtggctcaaactgca

SEQ ID NO: 734530 - DNA, 113 bp, Homo sapiens
tggaaaatgagaacaaaaatttaaagaaagatttgaagcactacaaacaagcagctgaggttcaggataagtttgaggtgctgaattacacaagcattcctatctttctcccg

SEQ ID NO: 734531 - DNA, 87 bp, Homo sapiens
ccgagtctccgccgctgcgggcccgctccgacgcggaagaaatccccggcttcctgactgatgaagagtgtcggctcatcatccatc

SEQ ID NO: 734532 - DNA, 82 bp, Homo sapiens
ggaagatccatttcaactggctgcccccttctggcaagccaatggggtacagggtgtcaccacagtgatggcagtggaggac

SEQ ID NO: 734533 - DNA, 97 bp, Homo sapiens
ccagcaccagcaagcggcattggctgcgacaatgcctgtggaagacaagtcagaccccccagaggggtctgaggaagccgcagagccccggatggac

SEQ ID NO: 734534 - DNA, 113 bp, Homo sapiens
tgctgaacgacttttaactttcattgtcttttccgcccgcttcgatcgcctcgcgccggctgctctttccgggaagctcttcgtgggcggtcttgactggagcacgacccaag

SEQ ID NO: 734535 - DNA, 83 bp, Homo sapiens
cttcatcaaaaatagtgatagctttgataagtcctatggcagcgtatacaaagctattcataaagagaccggccagattgttg

SEQ ID NO: 734536 - DNA, 76 bp, Homo sapiens
ccggcgccggcctcgcctcctcgcagcagcgccatgatcgacgacatcgcggatggcgccgtgaagcccccaccca

SEQ ID NO: 734537 - DNA, 74 bp, Homo sapiens
gggcagtcccgggagaacctgcggcggccggagcgagttactggaggtgaactgtttgaagacatagtggcaag

SEQ ID NO: 734538 - DNA, 99 bp, Homo sapiens
gggcctgggagcacaatgctgagcgttcttgggtgtctctggggagtccctgggccagaccttcctccagactccagcccacctcttcggagcagctct

SEQ ID NO: 734539 - DNA, 73 bp, Homo sapiens
accttttccacagggaattgagttgtcgttgaagaaagttggaaaagattctactgtcttactaatctgcatc

SEQ ID NO: 734540 - DNA, 100 bp, Homo sapiens
gctgggcgacggcgccttcggcaaggtttacaagataacgaaggaggcccaacttcattcaataaggagcctgacggatttatcccagacggtagaacaa

SEQ ID NO: 734541 - DNA, 75 bp, Homo sapiens
cgcgccgccaccgtctgaactaggatgtcccgacatgaaggtcgctgaaaattttgttccccctctgttggatgc

SEQ ID NO: 734542 - DNA, 71 bp, Homo sapiens
gctgtaccagtacacggcccacgttgccaggtgctggagaatctggtaaaagcaccattgtgaagcagatg

SEQ ID NO: 734543 - DNA, 100 bp, Homo sapiens
ggcgtttgttgcagctacctgcacttctagatgtacctggtgacctttagccccctgatggacacgcaggatgaccctcaggccataatcatctgggaca

SEQ ID NO: 734544 - DNA, 98 bp, Homo sapiens
ccgtccagaagcctgtaggaaagcggaagcggcctggcaggggaaggatcgagatgaagatgacgccaacagactcggggagaaggtgatcctgcggg

SEQ ID NO: 734545 - DNA, 50 bp, Homo sapiens
acgctgatgaacttgtacttcacgcaggttacattagttatacactctgg

SEQ ID NO: 734546 - DNA, 94 bp, Homo sapiens
gtccgccgctcaccccgcggccgcaccttcccgccttctcaggtccggcctctttggcctacccccgttggctccgctgccccaggtcgatgag

SEQ ID NO: 734547 - DNA, 100 bp, Homo sapiens
gccaagggctccacacaccaagaccaaggtgcagcggaactgctgcctgacgctctgcaacttcagcatccccgaggagctggaattccagtaccgccgg

SEQ ID NO: 734548 - DNA, 75 bp, Homo sapiens
ctggttgccttggtaggcaataaaacttcacggaggcaagagggtaatggagtgcctaaaaaaagctctaaaaat

SEQ ID NO: 734549 - DNA, 71 bp, Homo sapiens
tgacctgaaggctgtcaagtatgtggagtgttctgcacttacacagctcagagcccgggcgctgtggaaga

SEQ ID NO: 734550 - DNA, 97 bp, Homo sapiens
gtgcagattccaacaacttggagaacaaggatcttgctgcctttgacaaatcccatgatcaagctgtccgaacctaccaagagcacaaagcaagcat

SEQ ID NO: 734551 - DNA, 96 bp, Homo sapiens
cgcgagtacgccggggacatcttcgccgaagtcatgactggcattgctcgggtaccacttgctggagctgctggaggccctggggttggtagggca

SEQ ID NO: 734552 - DNA, 50 bp, Homo sapiens
ttgcccttatcagtaacacctgagtaacaaatgtggcaattattttggat

SEQ ID NO: 734553 - DNA, 81 bp, Homo sapiens
gggaaagagcctgtgcttcctgagccagtgcggggcctggcatggagttacaggaggttccagtggcatcgggaagtgcat

SEQ ID NO: 734554 - DNA, 75 bp, Homo sapiens
aggcacagggcgtcggacctgcacgagctgtctgctggctggaggcgtgatcctgggtgtggccctgtggctccg

SEQ ID NO: 734555 - DNA, 100 bp, Homo sapiens
gacggcagcaaccgcagcagcagccttcagtgagatggaagattttcgaggtatagcagaagaatcatttccaagctttctcaccaattcattatttggt

SEQ ID NO: 734556 - DNA, 75 bp, Homo sapiens
gcaagaccagtccatttggggaaatccttcggatggtgaactcattagaagtgaagaagacctcagtgtggaaga

SEQ ID NO: 734557 - DNA, 74 bp, Homo sapiens
aacccaacctagtgggtgtaatacatcatgaactgcagggaatgtctgatcacagatacggggatggtggctct

SEQ ID NO: 734558 - DNA, 74 bp, Homo sapiens
cggagcagtagccgccgtgggagggagccatgaagcattacgaggatctatcttgggatcccatggctttcttt

SEQ ID NO: 734559 - DNA, 96 bp, Homo sapiens
gcggggcgacgctggctgcagggacccggtgacagcgtgagaggaactaccactgctggaatgaagcatggatgacaaggcctgaccttcctgttg

SEQ ID NO: 734560 - DNA, 98 bp, Homo sapiens
atgatgcccttcgaaaaatgatcaactattgaccatataggtgaccaagaatatggcccaggtgaccaaagccctggacaaggccctgagcaccatgg

SEQ ID NO: 734561 - DNA, 90 bp, Homo sapiens
ggctctgctgaccttgtgccttgaacccttaggagaaatcttgagagtggacagcaattgtgaagatcgccagagagttctgtgtttcat

SEQ ID NO: 734562 - DNA, 100 bp, Homo sapiens
agaagtcacatctggtttgatttctgatgacattatcaacatgagaaatgatctgtaccaggaacttagtgatttggcccgtgaccctccagcacaatgt

SEQ ID NO: 734563 - DNA, 95 bp, Homo sapiens
taccgcgggacggtgtttgccatggaccccaggaatggttacatggagccccactacccccttgccagcatccagccatgggggatatgaaaacc

SEQ ID NO: 734564 - DNA, 101 bp, Homo sapiens
gctccaaccaaaaccgtgaatggtgtctggaggagtgagagccggcaggggtcgggccccggctcagtggtcccaggcagctcgggtgtcggaacccccag

SEQ ID NO: 734565 - DNA, 83 bp, Homo sapiens
cactaattgccaacaacaatggtatgtgacgcattcccagactcttcagccaactgagcatcagcttcttcacagcaattggg

SEQ ID NO: 734566 - DNA, 82 bp, Homo sapiens
agaaacaagaagaagagaaccctgcggaggagaccggcgaggagaagcagctctgagacagtgcttcgatgactttgcagac

SEQ ID NO: 734567 - DNA, 50 bp, Homo sapiens
cccggctccctaggcgtcccatctcgaccatgaacccgtcctgacccagg

SEQ ID NO: 734568 - DNA, 99 bp, Homo sapiens
ggaagatgaggacagcatggatgggctggagacaacagaaacagaaacgattgtggaaacagagatgggcttttgccatgttgcacagactggttttga

SEQ ID NO: 734569 - DNA, 74 bp, Homo sapiens
aatttacagaaaaagaaaaagaagaaaaaagaaaccagcatcatcatggttcctgcacttggccatcatccatg

SEQ ID NO: 734570 - DNA, 73 bp, Homo sapiens
gcggagccaggccagcggaagatcgtcatgcataaggaggaatttggctacaatgcagagacacagaaactac

SEQ ID NO: 734571 - DNA, 74 bp, Homo sapiens
cttgtggcaaacacaaacgcgttctgatcttcccttcctacatgagttctctgtggcccatgaccttcggcctg

SEQ ID NO: 734572 - DNA, 75 bp, Homo sapiens
cgcgctgagggcgcccagctggacctgaaggagaagaaggagaaggtggaggagaaggcaagccggaaagagcga

SEQ ID NO: 734573 - DNA, 75 bp, Homo sapiens
ttgtttgtggatcgctgtgatcgtcacttgagcactgcagtttcctcctgaaggctggctccggctctccctcaa

SEQ ID NO: 734574 - DNA, 95 bp, Homo sapiens
tgatatcaccaaactggaggatgcctatgtattccctggggatggcgcatcacacaccaaagtggaatgcagtagccctctgggcctgggatatt

SEQ ID NO: 734575 - DNA, 75 bp, Homo sapiens
ggcgctgctggcgctctggctgtgctgcgcgacccccgcgcatgggagcatcgagtacagctgtccggcctccaa

SEQ ID NO: 734576 - DNA, 88 bp, Homo sapiens
ttgcacaagctctccagacaaagtcaatgtaaatgacatcatcctgattgctctcaattatggcttggaaagaattatgagtgaggag

SEQ ID NO: 734577 - DNA, 50 bp, Homo sapiens
acccaggagagcaaggcccagaaagaggagtttcaattactgaaaattac

SEQ ID NO: 734578 - DNA, 100 bp, Homo sapiens
tggtgggctcagccggtcgagctgcgcgggaggatcagttcgacagcttagacaagcatacacaatggggaattgacttcttggaaagatatgccaaatt

SEQ ID NO: 734579 - DNA, 110 bp, Homo sapiens
tagccagtgtgcagctccctaatgatgatgctcagtttgatgcgtcacactacgacagtgagaaaggagtcaacgttggtgaggactgtccagtattcgatggcctgttt

SEQ ID NO: 734580 - DNA, 100 bp, Homo sapiens
atgacaaaccctttctatgtactgcgcctggatgtggccaggggcaagctctgtgtgattgattggaagacatcagagaaaccaaagccttttattcaaa

SEQ ID NO: 734581 - DNA, 101 bp, Homo sapiens
actcgactcggcaccgctgtgcaccatggcccgggccctgtgccgcctcccgcggcgcggcctctggctgctcctggagactctgacctgtttttgttgga

SEQ ID NO: 734582 - DNA, 83 bp, Homo sapiens
atgaacatccgcacctacctggtcatcgacccccggcaagagtgagccatggagctacgtgtggggaacaagtaccgcctggg

SEQ ID NO: 734583 - DNA, 75 bp, Homo sapiens
gttattgctgaaggagacctgggtattgtggagaagattgttcagattccattctgtggggaaattgactgtgag

SEQ ID NO: 734584 - DNA, 100 bp, Homo sapiens
ccaagggtctggcagaagcttcctccgagactgggcatttcatcctccctggaggttgaagccatccttgtcaatatatttggtggtatcgtcaactgtg

SEQ ID NO: 734585 - DNA, 74 bp, Homo sapiens
gcctcctagcggcgcggcgctcgctcctacgcaatcagaaacggagactgttcatctgtttatcccagctctat

SEQ ID NO: 734586 - DNA, 100 bp, Homo sapiens
agacctcagaagacctcctgtcctatgaggccctccccatggctttaggcgtcctgcctctgcggctctgccccctgcatcctgtgcagctgctgccccg

SEQ ID NO: 734587 - DNA, 99 bp, Homo sapiens
ggaaagacatggagattctcttaaaaagataggtgatcttcagctttgcaaactggatgaactagattgcttgatcaaaggaattttatacattgactc

SEQ ID NO: 734588 - DNA, 75 bp, Homo sapiens
gccaagctcatctctgagacccggaggaggttcgaagctgagtatgtgacagctgatttagaagaaagttttaat

SEQ ID NO: 734589 - DNA, 100 bp, Homo sapiens
gcaggcgcgagccgccagaggaagctggaggcgctgatccgagaccctcgctcccccatcaacgtggagagcttgctggccaagatgctgaattatcagg

SEQ ID NO: 734590 - DNA, 96 bp, Homo sapiens
tgcccaactaatatttggaattttcgtatacgtggattccagaggggtgacagcaaaacgtaccagaggtttgaaaaggcatttctcctagctgtt

SEQ ID NO: 734591 - DNA, 100 bp, Homo sapiens
aggcgtttagagaaaatggcagacgatattgatattgaagcaatgcttgaggctccttacaagaaggccaaaatcctgagcatgatggaagacaataagc

SEQ ID NO: 734592 - DNA, 102 bp, Homo sapiens
cggaaccggagccggttgcgggcagtggacgcggttctgccgagagccggcagaggtggaggagacactgaagcgactgcagagccagaagggagtgcaggg

SEQ ID NO: 734593 - DNA, 100 bp, Homo sapiens
cattccacggaacaccagtgcatgcaggaattcatggacaagaagctgccaggcataataggaagaatttgcaccatcctgggattgtaaacctggaatg

SEQ ID NO: 734594 - DNA, 102 bp, Homo sapiens
tggcgcagcatgattttgttcctgcttggctaaatttctcaacaccacagtcagctaaggagcttgaaatcgtcattggagatgaacacatttcttttacaa

SEQ ID NO: 734595 - DNA, 90 bp, Homo sapiens
gcccacctggtgactctggagctgcacagcgagggcaccaccgtcctgctcttccagttcgggatgctggtggaggccattgtcttgcca

SEQ ID NO: 734596 - DNA, 83 bp, Homo sapiens
ctgggttctggactttgggcgtcccattgccatggtcccagccctacctgtcctgatgcctgaccagcaggatgcaagcccag

SEQ ID NO: 734597 - DNA, 76 bp, Homo sapiens
aaacctatcgattacacagttctggatgatgtgggccatggtgtcaaggtgtggtcactcacctgtctaccactcc

SEQ ID NO: 734598 - DNA, 90 bp, Homo sapiens
gactgatgactcctgaaggaaaaccctggaggttcagctttagcttgaggtttcaggtccagaaacactcaagagctttctattttgaac

SEQ ID NO: 734599 - DNA, 100 bp, Homo sapiens
cttatagcccttgaagtcaaccatctcacacctttccaaaggacgcgaccataactctaaaaggtgtggatgaagcaaccatcattgacattctaactaa

SEQ ID NO: 734600 - DNA, 75 bp, Homo sapiens
tgcaggcacagcccgagaaaccgcagcactacacgaaagaactggcgggggcacacagaaccaataagccatgtg

SEQ ID NO: 734601 - DNA, 82 bp, Homo sapiens
tcatggcggatggccccaggtgtaagcgcagaaagcaggcgaacccgcggcgcaataacgcaaattgtggctactaatttgc

SEQ ID NO: 734602 - DNA, 82 bp, Homo sapiens
aagattactatgctagagtggaaggccgagagatcatttctaatttggcaaaggctgccccctcggtcactctgttcccgcc

SEQ ID NO: 734603 - DNA, 100 bp, Homo sapiens
gtggttttggatcctggagtacctgtctggtacctggtacccggcacactgtgagttcctggacatcaagggctgtgttttagagcactttgctgcaagg

SEQ ID NO: 734604 - DNA, 51 bp, Homo sapiens
ccaccaacttcagagatttgtccaaggagtacaagatcctcagcatgagag

SEQ ID NO: 734605 - DNA, 74 bp, Homo sapiens
cagaacaaagcattgccagaaaacgttaagattgctgctgcagaaaacaatggaaatgaatcaggtgtaagaga

SEQ ID NO: 734606 - DNA, 74 bp, Homo sapiens
ccccaccaccgccctcaccatgtgcgacttcatgatagcatatcagaagagggctttcactacttggtgtttga

SEQ ID NO: 734607 - DNA, 100 bp, Homo sapiens
ctggaagctgcattgcccttggtcctgggcctgcctgccccctggggaacacagatgtcagtccttttgcccctggggttagttctcgaactgatatcca

SEQ ID NO: 734608 - DNA, 100 bp, Homo sapiens
aggagtaaagaatggctgttgaacatccacaaggcacctgcaagctgctggagccagttctgcttctcggcaaggagcgatttgctggtgtagacatccg

SEQ ID NO: 734609 - DNA, 100 bp, Homo sapiens
aaattttaaaaaattttccaaaagagagatgcttgcccagtttcgacaaagaaaagctcagtcggatgggcagagtccttccaagaagcagaaaaaaaag

SEQ ID NO: 734610 - DNA, 98 bp, Homo sapiens
tgacaatcgagcaaggaaacctggtttttcagtactaccagctctccaatactggtcaagacaccatttctcaaatggaagaaagattaggaaatacg

SEQ ID NO: 734611 - DNA, 83 bp, Homo sapiens
tggaaactggatcctgctactcttcgttttcctttgaaaggccttttgccatatgataaggacttgaattttatggatacatt

SEQ ID NO: 734612 - DNA, 99 bp, Homo sapiens
ggcagatggcttatgaaccacagtagagatggtttcagcatgttggccagtctggtctcagactcctgacctcaagtgatccacccacctcggcctccc

SEQ ID NO: 734613 - DNA, 90 bp, Homo sapiens
accctcagaggcaaagaaagctcatcacagctcacgatcctgattgagtcaatgctttgcattctcagtcctctgcataaagctgagaga

SEQ ID NO: 734614 - DNA, 82 bp, Homo sapiens
agtaccaacacaaagtggccaggaaaattctaaaggactgagcagggggaggaacatttaagctgatggaagtggaagtgga

SEQ ID NO: 734615 - DNA, 100 bp, Homo sapiens
cctttgatcgtcttcctcttcagccatccagatatggatcagaaactttcgaagttggtagaagagctcacaacttcaggagaaccccgactaaatcctg

SEQ ID NO: 734616 - DNA, 90 bp, Homo sapiens
ctggtcgaatgaggcacctaaaaattgtataccgcagattcaggacaagcaggaggacatgaagactattttggagggcatagatccggc

SEQ ID NO: 734617 - DNA, 51 bp, Homo sapiens
cttgtggcgcgcccgcggagaggccgggccttgaaaagatcttttgaggtc

SEQ ID NO: 734618 - DNA, 80 bp, Homo sapiens
gtctccagtagtagctgcagtgactgtagtggtcccaatcgaggccattatattgcaatagttaagagtcatgatttttg

SEQ ID NO: 734619 - DNA, 100 bp, Homo sapiens
ctcatcacccatctggagcaaggaaaaaaaccttcgactatgcagagacatgagatggtagccaacccctcaggatgtcagtgggggaggacccgcacgt

SEQ ID NO: 734620 - DNA, 90 bp, Homo sapiens
ccggagaggagcctcggccccgtacccagacatttcaacctacgaatgaagagggacacttcccttttcagtgatgaatttaaagtagaa

SEQ ID NO: 734621 - DNA, 100 bp, Homo sapiens
ccgggcctcaaaatggccacacgcgtacccccgtagcggaaaaacgtggcccgaggcagccgggatgacagctctccccaggaatcctgctgcctgctga

SEQ ID NO: 734622 - DNA, 83 bp, Homo sapiens
ctggaaatacagaaccacagtttatcatcccttcctacaatgcagatcttcgtgaagactctgactggtaagaccatcaccct

SEQ ID NO: 734623 - DNA, 108 bp, Homo sapiens
gaagatctgggacttagcaggcaagagctgggctacagtggctttaatgagataggccgaagaacagttgagaattgttgaagaacaaagaaagattcatgaggaaag

SEQ ID NO: 734624 - DNA, 99 bp, Homo sapiens
ggcggggccgccggggccgccatggagcccgactcggtgattgaggacaagaccatcgagctcatgtacttcctcctgtgctggttccaagacacagcg

SEQ ID NO: 734625 - DNA, 100 bp, Homo sapiens
cagctatccagaatttctgtgagcaggtgaacactgaccccaatggtatctgaacacagtcattccttacgagaagaaagcctctcctccctcagtggaa

SEQ ID NO: 734626 - DNA, 100 bp, Homo sapiens
agggaggagaccggcacccagacaggtggcgacggcagaggaagcttagaagcaaagttaagagactcatcagattctgagctgctgcgggatattttgc

SEQ ID NO: 734627 - DNA, 98 bp, Homo sapiens
cacctggacttggcttccctcaagtctatccgagagtttgcagcaaagatcattgaagcgtgtccggagcggtgactggaaggggtacacaggcaaga

SEQ ID NO: 734628 - DNA, 98 bp, Homo sapiens
tgactaccaccagtggagtccaggatgaggtgtaccttgaaagacttttaacatacgcagagatagatatctgtccggccaactggaagcggattgtt

SEQ ID NO: 734629 - DNA, 83 bp, Homo sapiens
atcttccaagtccaaggatgtgaaattgagacacgccggttgtgaaacctactgaagtgagcggcggcgccaggattcctggg

SEQ ID NO: 734630 - DNA, 83 bp, Homo sapiens
gtcgagtatctggtgaagtggaaaggatggcccccaaaaattctctggtggttgagatcccgccatttcggaatcagaggata

SEQ ID NO: 734631 - DNA, 100 bp, Homo sapiens
aatagcagattctaatcaaaatatgcagtctcttttaccagcatgtcaaatcaacagtgccttgacatctttccacactgctttggaacttgcagtagac

SEQ ID NO: 734632 - DNA, 76 bp, Homo sapiens
cggcgcagaagaaacccgcggcgaccacagccaaagcgggcctcactgaaaactgaagctaatttggaagttttga

SEQ ID NO: 734633 - DNA, 100 bp, Homo sapiens
gttccccaacggctccccgtcgtcctggtgctgcagcgacaggtgatttggcttctgcacagttaggaggagcaccaaaccgatgggaggttttgtcagc

SEQ ID NO: 734634 - DNA, 75 bp, Homo sapiens
ccttcgcgcaggagatctcgattgacttaattcagtgcacaaatgagatgaatgtgaacatcccacagttggcag

SEQ ID NO: 734635 - DNA, 75 bp, Homo sapiens
aggaagtctgggggccgagaccacacaggccaagtataaggagcgagggacggtcttggctgaggaccagctagc

SEQ ID NO: 734636 - DNA, 110 bp, Homo sapiens
gaagcatttttcccccatctaaagatccagtcgtgctccagtttgcagagggcaaggggctggttgcaggtggtgctgggaggatggagtagagacggggtttcaccgtg

SEQ ID NO: 734637 - DNA, 101 bp, Homo sapiens
tgtggccatctcctcgctgggcatgatcgaggccacagcccaggtcacagtgaaaggtgttcctgcatgaagccaccgtgcgcctgatggcaggagccagc

SEQ ID NO: 734638 - DNA, 75 bp, Homo sapiens
ttgtggaaagttccaaactgtctgatgctggcgccgtgccgtccctgcagtgacaccgaggtgctcctagccgtc

SEQ ID NO: 734639 - DNA, 110 bp, Homo sapiens
gtacagcaatctcctcctccactgccactacagggaagtgcatcacatgtcagacttaattcagtgcacaaatgagatgaatgtgaacatcccacagttggcagacagtt

SEQ ID NO: 734640 - DNA, 100 bp, Homo sapiens
ggggacaagaaactagagcaaataaccgttttgaaattagatggtttcgagcaagattacaagaaaagagatttattcagaaatatcatagcatcaaaaa

SEQ ID NO: 734641 - DNA, 123 bp, Homo sapiens
gcgcggagtcccgcggagtctcgggccccggagacgggcgaggagcacggcagcagccaggtgctggagaatctggtaaaagcaccattgtgaagcagatgaggatcctgcatgttaatgggt

SEQ ID NO: 734642 - DNA, 50 bp, Homo sapiens
cagtaggatactgaaactgacattatttgcgggcaatccaatggcagtcc

SEQ ID NO: 734643 - DNA, 98 bp, Homo sapiens
tcctgagcaagaaattaaaacactggaagaagatgaagaggaactttttaaaatgtgtgggcccatcgctggatggatctgtcagaacacggctttgg

SEQ ID NO: 734644 - DNA, 100 bp, Homo sapiens
gcagacatcatcctaccaggccttgcagcgggtgctcgtcagcctagagaagccgatgcttcagagcagacactccttagatggctccaaacttacagag

SEQ ID NO: 734645 - DNA, 100 bp, Homo sapiens
tcggcgccgcggccgctgcggacggacgctcgcctgccggctgaggagcctgtgtgaaatgcagcaaaggggtgtttggggctggccaggcctgtcaggc

SEQ ID NO: 734646 - DNA, 98 bp, Homo sapiens
aagcgctttaagtgtgaccagtgtgattacgcttgtagacagaaccaattcaggcattggaaaccctaattgttgatctcgtgagctgcgggaaggag

SEQ ID NO: 734647 - DNA, 75 bp, Homo sapiens
attccatcatggatgagctcaaagtgtttgaaagttctgctttatcaacctatcctatggtaagacctgcaggcc

SEQ ID NO: 734648 - DNA, 82 bp, Homo sapiens
tcagctccatccaggccaccactgcggcgggctctgggagccagggagtaacgaagagatcaaagagttcgccgcgggctac

SEQ ID NO: 734649 - DNA, 51 bp, Homo sapiens
ctgccatgtccgggagaagacaccctccagaatacccatcatatagcccct

SEQ ID NO: 734650 - DNA, 75 bp, Homo sapiens
ggaaacaccatggctgcggcggcccagctctctctgacacagatgtgtcttgctgaatcagggctctcttatccc

SEQ ID NO: 734651 - DNA, 100 bp, Homo sapiens
ctacacgttaattaacgtgccaatggattcagaaccaccatctgaaattagcttaaaaaatgatctagttggaaatctacatttctgaaggaacccactc

SEQ ID NO: 734652 - DNA, 75 bp, Homo sapiens
gttctgatgttccactgaaatcacaatggaaagtcttgacttgactgagacaaagcatggaggacacaagaatgg

SEQ ID NO: 734653 - DNA, 74 bp, Homo sapiens
gcgcaccatgtcatcgtcaccgtgcccttaggttatgatgtgattgctcaagcccaatctgggactgggaaaac

SEQ ID NO: 734654 - DNA, 99 bp, Homo sapiens
gcaaagaatggaaatgagaaagaagttaaggagtatgcccaagttttccgtgaacatgccaacaaattgattgagcaactttcatcctttgaaacgtgt

SEQ ID NO: 734655 - DNA, 50 bp, Homo sapiens
gccgttagtagattctatagacttgaacttacgatttccaacggccccaa

SEQ ID NO: 734656 - DNA, 98 bp, Homo sapiens
gaagagtgtcgtctcctagaaatctagcactggagaaacattttggaattacagatgcaaagtataatggaaaagaaaatgaaaaccaagagaaatat

SEQ ID NO: 734657 - DNA, 100 bp, Homo sapiens
atttcaattaaaagacttggagaagattgctcccaaagagaaaggcattacgattgagccgttgccgaacgtggtggagctgtggcaggcagaagaaggg

SEQ ID NO: 734658 - DNA, 83 bp, Homo sapiens
gtctccaatacagaagaatgaaggctgcaatcacatgcagtgtgctaagatgtgctcatcttttgctacgggacccagacaat

SEQ ID NO: 734659 - DNA, 100 bp, Homo sapiens
tggagcctgaggtgcggagtttcgtgagtttttactgactcgaggaggagaaagtgcaggccatgccacttcctctcaggagcctagtggatgctcagat

SEQ ID NO: 734660 - DNA, 99 bp, Homo sapiens
tcgccgcaagcaaggcaaaccccagcacttaagcaaacgggaattctcgcgtcagggaagtcaaagatgcatccctgagttcttcctagcaggcaagca

SEQ ID NO: 734661 - DNA, 85 bp, Homo sapiens
ctctggtgggaaagacagcctgtgggacatggagaagggctgtcacttcctgcacatcttggcctgtgctcgcctgagcatccgc

SEQ ID NO: 734662 - DNA, 90 bp, Homo sapiens
aactagggagcgtctccggctgcacagcgctcagaagcctggctacagataagggaccaaaatgactgactcaaaatatttcaccacgac

SEQ ID NO: 734663 - DNA, 78 bp, Homo sapiens
gaatcccctgtttgagaaaaggcctaagaattttggcattgaatggactgctgaattatgaagtatttcagacccagt

SEQ ID NO: 734664 - DNA, 80 bp, Homo sapiens
gaatcacccgggtcgctgttcctgagcctgggtctggctttcatctacgaccagactgaggacatcagggatgttcttag

SEQ ID NO: 734665 - DNA, 83 bp, Homo sapiens
cttcttccaaaatcctcggattctctacttctgctgactcacagaaaacactggacttccccggaagctacttgaaaaacatg

SEQ ID NO: 734666 - DNA, 100 bp, Homo sapiens
cctgcccagacggctcacctgtgcgggatggaacaaaagagttcgaaatttgagcaacccagccaagaagttcaagattgaagccaatgctgggcaactg

SEQ ID NO: 734667 - DNA, 96 bp, Homo sapiens
tgaaacgagcgcagccaagttgaagaggaaatattggtggaagaattgcaagatggcgggtgaaaaagttgagaagccagatactaaagagaagaa

SEQ ID NO: 734668 - DNA, 120 bp, Homo sapiens
gctggacgtgggatccacacagctcagaacagttggatcttgctcagtctctgtcagaggaagatcccttggatttacaaaaggtgcaggtatgagcaggtctgaagactaacattttgt

SEQ ID NO: 734669 - DNA, 100 bp, Homo sapiens
ccatcatcacccaggtgaccaaccccaaggaggacgagggccggttgccgggcgcgggcgagaaaggagcctcacagtctactcagagaaaaataaaaga

SEQ ID NO: 734670 - DNA, 76 bp, Homo sapiens
gacattctcaaagactggtgctatgaagctgcactgaacccctactatgggttccaggccttcagcatcgcgctgt

SEQ ID NO: 734671 - DNA, 100 bp, Homo sapiens
tcttatttagttctggggagcgcctcgtcgacatgagtgatgtggaggaaaacaacttcgagggcagagggatggtggatccaggagagaagattagtgc

SEQ ID NO: 734672 - DNA, 98 bp, Homo sapiens
gaagatcctggaggtggatctgaagaacggatgctgagctttttataccaccaaagatcaacagaagaacccagtggaagctgagcctgctagactga

SEQ ID NO: 734673 - DNA, 75 bp, Homo sapiens
aatgggccaggtcacctctgggccagcagtgggcagattggaagcaggtcctggggaccaaggtggacgcggagc

SEQ ID NO: 734674 - DNA, 100 bp, Homo sapiens
gttgaatgtaatttttacaaaatttgatgaagtccagaaatctggaaacatgatacaatctgcaaatgacttgtgcaccatggacaattttgctgaggga

SEQ ID NO: 734675 - DNA, 73 bp, Homo sapiens
cgttctcacctcgcgggatggcagctgctgatttgtcccatgagccttcacgaagtcagtaaaagtgatctcg

SEQ ID NO: 734676 - DNA, 100 bp, Homo sapiens
gcccaggaagcttcatggctgggcaccaggccctgactaccagggatttagtgctggcagcatctgcggcttcaacagaagttagtatccttgctcgaca

SEQ ID NO: 734677 - DNA, 48 bp, Homo sapiens
tttgaagattctacagataaatcagacactcttgcactcctgtaatga

SEQ ID NO: 734678 - DNA, 101 bp, Homo sapiens
aagactctgggactcttggtgccaacagagttactctgcctgtgttgcctactgcttcatcaccatcccctccctggcgggcatcttcacacgtctcaatc

SEQ ID NO: 734679 - DNA, 75 bp, Homo sapiens
ttttgaaagctgcctgcggcaaagcccctttgatgccaagaatccgttcctggctgcagtcaccaccaaccggaa

SEQ ID NO: 734680 - DNA, 75 bp, Homo sapiens
agctaccggggggactcatgccagagcccgcggttcccttcaaaaagcggctgcaagatctggaggtgcgggaga

SEQ ID NO: 734681 - DNA, 82 bp, Homo sapiens
gactggacttacgaggagcagtttaagcagccacaacacatgcgtgtatcttgcttgggctatcttccctgctctgccacgc

SEQ ID NO: 734682 - DNA, 51 bp, Homo sapiens
gccaggatgttgaaaatctccactcctcttttgacttggactatgactttc

SEQ ID NO: 734683 - DNA, 143 bp, Homo sapiens
cttggatcttggaggtggtgtaaaggaagctcaagtatatcaagcattcaaattgctcacagctgatcctaaggaatcctatgaggatggttgtgaggattatcctactctatcagaatatgttcaggattttttgaatcatc

SEQ ID NO: 734684 - DNA, 100 bp, Homo sapiens
ttttagggtcctttatatagaagggagagtaggttgtgggactggaaaatatcttaaagtgaacagccaggtacataccgtgggctgtgactactgtggg

SEQ ID NO: 734685 - DNA, 97 bp, Homo sapiens
gatgtgaagcggggcagagccgggggagcccagcccagccagcctccagatggaagtttactgttctgattttcatgctgaaagagcagcgagagag

SEQ ID NO: 734686 - DNA, 83 bp, Homo sapiens
cgtggacatgcgcacctcacacagaggccacaagaggaagctgaatgaagaggacgccgccagcgagtccagcagggagtcca

SEQ ID NO: 734687 - DNA, 74 bp, Homo sapiens
tccgtatattatggctccagggctgttacatgcctacccgatctccttaggtgatgcacagtccaactacctgc

SEQ ID NO: 734688 - DNA, 51 bp, Homo sapiens
ctttcctctaaagtcaaactgatgcttttactgactctgctatcagtgcta

SEQ ID NO: 734689 - DNA, 98 bp, Homo sapiens
ccgaggcgaggaggagcgctggcgttcacttcttcaactgagatggacatgatataatctccattgagtcaaagaatggcatctagtcctgagcttcc

SEQ ID NO: 734690 - DNA, 83 bp, Homo sapiens
ccctgatttcctgcttctccttttcatgagtgttcctgtggtctctgcacctcctttctgcatttgcctggtggcctgattta

SEQ ID NO: 734691 - DNA, 82 bp, Homo sapiens
gttaaccaggaaaccttcggccgccgctcccgccgcctacccgaccgacaatgcagatcttcgtgaagactctgactggtaa

SEQ ID NO: 734692 - DNA, 98 bp, Homo sapiens
cctggtctacctgatccgtctggccgccggccacctggtccagctgcccgcaggggtgctgaaactgatgtaaatgtggtcatgcttcaggaatccca

SEQ ID NO: 734693 - DNA, 75 bp, Homo sapiens
aaccagacgatgagacagagttgcgaccgcgcggcagagtgactcctctttcttcccagagtgtggtgattcacc

SEQ ID NO: 734694 - DNA, 100 bp, Homo sapiens
gtgctttgtgatcgaaaccctgaccggatcccataaacactgtcgaaacttttcagcattacctaagaagcaaaggctcaattttggctgcttcattctt

SEQ ID NO: 734695 - DNA, 111 bp, Homo sapiens
gggactccaaagtgaaagtggcggtgcggatacgacccatgaaccggcgaggattttttatcaagcagaaatgcatcgaacaacgagaatcaagatcactgagctaaatcc

SEQ ID NO: 734696 - DNA, 98 bp, Homo sapiens
accagagaaagaagcagcgattcctcagtaaacacatctctcaccgcggagagtgatgacagacctaatgctctattaagttcacctgcaacagaaac

SEQ ID NO: 734697 - DNA, 75 bp, Homo sapiens
aaaaatagggtctggcttcttttctgaagtgttcaaggtacatcaggaacgtctctatcaagaatacaatttcag

SEQ ID NO: 734698 - DNA, 82 bp, Homo sapiens
gagagagatgcttaaaaatcaccagttactttaatgaattcatgatgttgctatcaaaagttgagaaattgtcagaagaaat

SEQ ID NO: 734699 - DNA, 143 bp, Homo sapiens
ttacttgcacccacccagccccgccgtcgccccgccgcgccgcgctccaaccgcctcctcctcctcagtaacgcgggtgggcctcatgagagatgtggagtcctcatcacggggttgcctggtgattatggaataagcagcgg

SEQ ID NO: 734700 - DNA, 90 bp, Homo sapiens
cccagcgctttgggaggccgaggatgtatgttgtgttcacagcgaaggtactcccttcagcctgtcccagaaaggaggattccaaaccga

SEQ ID NO: 734701 - DNA, 96 bp, Homo sapiens
cctgctgccaccagcatcctctgagagtccttccagtgtcctccccagcctcctgagactccgggtgattctgggggtccacttgtctgtaatggt

SEQ ID NO: 734702 - DNA, 100 bp, Homo sapiens
catctccaacatgctggatgtcaacggcctctgctgacaaacgggctcatcataatgcactggaacgaaaacgtagggaccacatcaaagacagctttca

SEQ ID NO: 734703 - DNA, 50 bp, Homo sapiens
tcacaagattgaccacattgatcacatgacaaaaatgctgagtttcttcc

SEQ ID NO: 734704 - DNA, 87 bp, Homo sapiens
gacatcacagccactgtgaccccagacctcaagcatcctgaagggagaggggagcccgagttccgctacactgctgggatccatggc

SEQ ID NO: 734705 - DNA, 100 bp, Homo sapiens
taatgctagaaaatttacagaaacactcaacaccccatgctgcattccagccaaattcccagatcctgaaggacacagccctgcagaaagtgaagcgtgg

SEQ ID NO: 734706 - DNA, 75 bp, Homo sapiens
agagaagtcgcgaaagtgggccagaggttctgcgacaccacctcgggctgatcagctgaccgaagaacagattgc

SEQ ID NO: 734707 - DNA, 90 bp, Homo sapiens
ttactttaaagatactggaggagatggtcaagaatcgctctataagatctgcaaggcataatcaccagcaacacccgggacaataatacg

SEQ ID NO: 734708 - DNA, 101 bp, Homo sapiens
aagtttagggagtccatggccagaaaacttttggggaggaagttaagtcttcagagcctactgaggatgtggagcccaaagaggctgaagatgatgataca

SEQ ID NO: 734709 - DNA, 75 bp, Homo sapiens
gcgcgctgctcctcgccctcaagttcacctgcagactctgatgccagtatggactggagatgatgggagccagtt

SEQ ID NO: 734710 - DNA, 99 bp, Homo sapiens
cttgcttcgtcccagggggatggcctctacaaggagcttgcaggtccatgtcacaaacggcgggcaagcatctgctgtacccagctggggtccctgtcg

SEQ ID NO: 734711 - DNA, 51 bp, Homo sapiens
cagacattgtttgaagattccttccaacagctctggtagctgaagaacatc

SEQ ID NO: 734712 - DNA, 83 bp, Homo sapiens
gagctcatctggaattttgccgatttcatgactaaccagtgtgttggagcgggccggagagaagtagagtgggctgcgaggag

SEQ ID NO: 734713 - DNA, 100 bp, Homo sapiens
atggagcatatccggacgaccaagtgcctacaccaactaatgttacaattgaatcctataacatgaaccctatcgtatattgggagtaccagatcatgcc

SEQ ID NO: 734714 - DNA, 100 bp, Homo sapiens
gtacgcggtgctgcgagggcagaacctggcctcagcctcaccatgtgtgtcaggagctgtttccagtccccccgtctccagtgggtgtggagaacagcct

SEQ ID NO: 734715 - DNA, 82 bp, Homo sapiens
gaaacatatttgcatacgcttccagctacgactggtcaaagatcctgaggaggatgaaggggctggccctggaggccgagag

SEQ ID NO: 734716 - DNA, 98 bp, Homo sapiens
gaaaagaagcagcaccttatctcagctccctggggataagtccaaagcctttgatttccttagtgaagatctattatcctcccagtccacaacgctga

SEQ ID NO: 734717 - DNA, 99 bp, Homo sapiens
ccggacccatgcagcttgggcccgcatcatcgcttgttcggtggtattaaagataatcaaacattatcaagaagaaggacaaggaactgaagttgttca

SEQ ID NO: 734718 - DNA, 50 bp, Homo sapiens
ttcaagcactgtgctaaagtgtttttgatgctgatgtaacagttataggt

SEQ ID NO: 734719 - DNA, 100 bp, Homo sapiens
aagcggctcaatgaccatggcaagaactggcgtcacgtttacaaggtctgtgcagacttttgcagacaaatcaaaacaagaagctctgaagaatgacctg

SEQ ID NO: 734720 - DNA, 74 bp, Homo sapiens
ctcctagtgcacaaccaccacgcactcaaacaccacctctgggacaggtttatgaaggcgagcgtgccatgaca

SEQ ID NO: 734721 - DNA, 83 bp, Homo sapiens
gggggaggcgacgctaagttgctgatcgtggcgattcttctgatgtagagcgactggaaagattcttcgactcagaagatgaa

SEQ ID NO: 734722 - DNA, 75 bp, Homo sapiens
acattcaagtgaagcaaaagcctttcatgattatagatctcgttccgcgtgtggcagtgtggtggcagcctggag

SEQ ID NO: 734723 - DNA, 90 bp, Homo sapiens
ctatcagcaggctccgggctgaagattgcttctcttctctcctccaagtcggaattgagatgggcgattggcaggaagtctgggatgaga

SEQ ID NO: 734724 - DNA, 98 bp, Homo sapiens
aggaacattgctgtggattcccaggaatcagtgtctgtccctgaagggtcattaaatcagctatgttcttcagaagaaccagaacaagaagaacttga

SEQ ID NO: 734725 - DNA, 50 bp, Homo sapiens
gcggccaatggcacggaggcctgcgtgacttagcactcaggcctgtgaat

SEQ ID NO: 734726 - DNA, 50 bp, Homo sapiens
caccaacaaagatgcctatacttgtgcaaccataccagaatttcacaaaa

SEQ ID NO: 734727 - DNA, 83 bp, Homo sapiens
aggacccaggagaaattcgccctcaaacttgcgcgatctctggcctcttcaactgcatcaccatccaccctctgaacattgcg

SEQ ID NO: 734728 - DNA, 91 bp, Homo sapiens
ctcaggctcctctgccttctgcttgggcttcagggctgcctggctgcagtgttcatccgcagggagcaggccaacaacatcctggcgaggg

SEQ ID NO: 734729 - DNA, 90 bp, Homo sapiens
gggactgccagcaacttccgggcgtttacaggcaggcaggtactccaaagattcaggtttactcacgtcatccagcagagaatggaaagt

SEQ ID NO: 734730 - DNA, 98 bp, Homo sapiens
tttcccgctggcgcgcagcctcagctaggcatccaaagcctctgggatgtgttctgactgtaaaaactctgatgttgtgaaaaaagcttacgctttgc

SEQ ID NO: 734731 - DNA, 50 bp, Homo sapiens
gcggcgagcagaactacggcgagcggggaagctgccaaagaatgtcgacg

SEQ ID NO: 734732 - DNA, 74 bp, Homo sapiens
tttgatatctggggccaagggacaatggtcaccgtctcttcaggtgaccattgtgaggtagatattttgttcta

SEQ ID NO: 734733 - DNA, 75 bp, Homo sapiens
cttttggactccctattgtatttgccagagcacatctggaggagacatcacagctttcccagatcgggaggaaaa

SEQ ID NO: 734734 - DNA, 100 bp, Homo sapiens
tttttcagccacctccactgactcctacctccaaagtttatactatcagaccttattttcctaaggatgaggatgcagaaaatgcgattgtgcatatggg

SEQ ID NO: 734735 - DNA, 75 bp, Homo sapiens
ccgcctgaagaaacctggatctttgctagaaagagaggactcaagcacagagggttcggaaaccgcgttgctgca

SEQ ID NO: 734736 - DNA, 74 bp, Homo sapiens
gaagagataggtcagctcaaacagttaatggagctgggttatgatcatagctactacttcattgcaacctttat

SEQ ID NO: 734737 - DNA, 100 bp, Homo sapiens
taacccgtgtgactttgactggaacatgacctttgacctgccatcagatgccacagtggtgctcaaccgcagctcctgtggaaaagagaacacttctgac

SEQ ID NO: 734738 - DNA, 75 bp, Homo sapiens
tattattttcaatagaaacagatatacagatgtggagaagattttcggacaagcaaacaccacgctgaagcgatg

SEQ ID NO: 734739 - DNA, 100 bp, Homo sapiens
gttcagcgtagagtcgctggagcgggcggagctgtgcgagagcctcctcacttggggacagagcagaatgggctgatatagatccggtgccgcagaatga

SEQ ID NO: 734740 - DNA, 100 bp, Homo sapiens
tctccaggctgctccagtactcaagggaacgggtaaagatgagcccagcagctacacatgtacaacttgcaaacagccattcaccagtgcatggtttctc

SEQ ID NO: 734741 - DNA, 101 bp, Homo sapiens
atatctttggcttgcagccaacaatggggcatcctgctatttgaaacaaggaaagttcaagcaagcagaaacactgtacaaagagattctcactcgtgcac

SEQ ID NO: 734742 - DNA, 74 bp, Homo sapiens
ccgcttctagaccctactgcggtctcggatattgccggctgcatcttcctcccgtgaggctggccgagctccac

SEQ ID NO: 734743 - DNA, 80 bp, Homo sapiens
caggatcggaagcctgcgtaactttctcccttgatccgggagtctttccactgggtcaaaatgcagatcttcgtgaaaac

SEQ ID NO: 734744 - DNA, 100 bp, Homo sapiens
cttgcagaagctgttcccaccatgaaggaagcgttgttgacgaccatggacatcatccacgatggatttggattcatgctggcttttggagacttggtgt

SEQ ID NO: 734745 - DNA, 50 bp, Homo sapiens
ttgtgggctggataataaacaagatggcccactgcgtgaccttggttcag

SEQ ID NO: 734746 - DNA, 100 bp, Homo sapiens
gagatccacagctaagacgccgggactccctggaaacctagaaatgctttcggaaaatgtgattgatcgaatgaaggaatcctctccatctggttcgaag

SEQ ID NO: 734747 - DNA, 100 bp, Homo sapiens
cttcaagcaccgccgggtgcgctttctgcacgagaccgggctggccatgatctatgggaaactttatggtgatgttccttttatagaagaaagacacaga

SEQ ID NO: 734748 - DNA, 75 bp, Homo sapiens
gtctccttcgacttggagtctttgtccaggacgtgttcaagaaggaagtgtatcttcatacatcaccacacctga

SEQ ID NO: 734749 - DNA, 90 bp, Homo sapiens
ggcttatcgaacagagccgggagttcaagaagaacactccagagccgcaggtggctgcgatgggacggaagccatgaatggtgccggccc

SEQ ID NO: 734750 - DNA, 100 bp, Homo sapiens
ctcgccacgcgcccggacggcctggggttgctgcccgtcagtctcgaaaggttattcaagaagcccaagcgaaagacctgctgagaagaccatttgattt

SEQ ID NO: 734751 - DNA, 82 bp, Homo sapiens
tggaggcgggcgaggcggtggtctacccgctgcaggaggcggcggcggacgggtgcagaggagtttttcttaaatgtgaaag

SEQ ID NO: 734752 - DNA, 87 bp, Homo sapiens
gatgtggaggaggaagagctcagatgaatggaccaggtagtttgtttgcttcagagaatttcctgggaatttcaagtcagcctagaa

SEQ ID NO: 734753 - DNA, 100 bp, Homo sapiens
ctgtgttctcagaagacgttctgtatttcagcttcctgctatgtgccctctttgttcctaaaggcaacaagaatgggtgaatcagcaaagggaagatatt

SEQ ID NO: 734754 - DNA, 100 bp, Homo sapiens
atacaatcttgcgtgtcctgggctctaatgtcagagaatttctacagggtgatgttataggtctggagcggggcgggggaaagaccgaggtgatggtgat

SEQ ID NO: 734755 - DNA, 50 bp, Homo sapiens
atggactccagttatgcaaaaagagaagatgcctctaatggaggagtttc

SEQ ID NO: 734756 - DNA, 98 bp, Homo sapiens
ccgagccattcaactagccaaggaaaaaaagcagagaggagcggggagcaatgcaggaagatccgttcagtgtccatcgtcctgaaactcttttcaac

SEQ ID NO: 734757 - DNA, 117 bp, Homo sapiens
tggggagctgcttctgtcctgcaactgggcagtggttgccgacatcctgctgtgttcatctgtagcttcatggtggctgcccccatcttcggctacctgggcgaccgcttcaacagg

SEQ ID NO: 734758 - DNA, 75 bp, Homo sapiens
gccaatgcccaagacattataaacgtctcgaaggccacattgcaggagatcctgccggaggtcctcaaagccgac

SEQ ID NO: 734759 - DNA, 100 bp, Homo sapiens
cggatcggatcccgcagatcggagacggggcctggaggtgcaacagctgcagcccggaaagaggtgataaggaacaagatccgagcaataggcaaaatgg

SEQ ID NO: 734760 - DNA, 100 bp, Homo sapiens
tgcagccatggccccaatcaagaacttctggaggtttatattccggaagaacctgccctccactgccctctgtcagatggactttgccgtcctgggcctc

SEQ ID NO: 734761 - DNA, 78 bp, Homo sapiens
aaatattgaaacctttacttgtgatacacagaatattacctacagatttcagtgtgacggagtctcactctgttgccc

SEQ ID NO: 734762 - DNA, 100 bp, Homo sapiens
agtcagaatgcctgcatgcagatctcatcaccatgggtgaagcgacttccagtcatttggaaaggatgggatgaaaaggaaccttggtgataattttgat

SEQ ID NO: 734763 - DNA, 80 bp, Homo sapiens
ctgccatgagcgagcgcctccgtcccagtgtctttggtgcaacactaacaaggcttgtctggactacccagttacaagcg

SEQ ID NO: 734764 - DNA, 79 bp, Homo sapiens
atgagaccccttctcccaggaggggagcacccaccaaggctccggatgtgttccccatcatatcagggtgcagacaccc

SEQ ID NO: 734765 - DNA, 90 bp, Homo sapiens
ggcggccacgcgcggcgccgctcgcgcgttccttcacctcgggcagaataactttgcagaagcccacaggttcttcacagagatcttaag

SEQ ID NO: 734766 - DNA, 76 bp, Homo sapiens
gtggtggagctgtggcaggcagaagaaggggaactcctgctgcccactcagaatgtgaaaacctttgcatcttctg

SEQ ID NO: 734767 - DNA, 100 bp, Homo sapiens
ggggaccattcccaccaggtccgggtgaaagcctactaccgcggctcctgggaagctctaggatgtgactttaagctggaaagactctcaggagctaggt

SEQ ID NO: 734768 - DNA, 100 bp, Homo sapiens
ggaggctccaagacctcatcaacaattaaggataaagtcattttgggaaccgattacccctttccactaggtgagctggaacctgggaaactaatagagt

SEQ ID NO: 734769 - DNA, 98 bp, Homo sapiens
gctgatgggcgccggcattgcccagccaccaaaaccctcaacaggggcatctctgagttcatcgtgatggctgcagacgccgagccactggagatcat

SEQ ID NO: 734770 - DNA, 100 bp, Homo sapiens
tcgaagaatgaaaccggcttgttgtcttcaattaaaaaatttattaaaggaagcacacctaaggatttttcgggattgtcaccctacgaaaggaagagac

SEQ ID NO: 734771 - DNA, 141 bp, Homo sapiens
agaaaatctccctgctccgcagcgacatcaccaagctggaggtggacgccatcgtcaacgccgcctgcctgctccaggctgagctggtaaactatgaacgagtcaaggaatattgcctcaaagtcttgaagaaggaagggg

SEQ ID NO: 734772 - DNA, 50 bp, Homo sapiens
cgaacacccgcccctctgctccaggcaccgtctgcgtcctgctgtccttc

SEQ ID NO: 734773 - DNA, 77 bp, Homo sapiens
ccgaggagtagtcgctggagtccgcgcctccctggcacaatcctggaggaagagaaggctcagcaagaagagcgcat

SEQ ID NO: 734774 - DNA, 75 bp, Homo sapiens
caccaggaaaatgtccacactggaaattgaacttagctcattaagggaagctttgtctttcgtgtcattaattga

SEQ ID NO: 734775 - DNA, 97 bp, Homo sapiens
acattagtttggataaaaagaaagcactgtggtttcctgcattgggaggaatgatcaattggaatcgtctttttcctcctttacgtcagcgacaaaa

SEQ ID NO: 734776 - DNA, 88 bp, Homo sapiens
ttcagtggacccttggagccatcctctacaggacccgctttctaccattaagctttcaccaacaatcaccagtggtttacacaacatt

SEQ ID NO: 734777 - DNA, 96 bp, Homo sapiens
cacggaagcgcggacggcgcacgacgagtactggcatgcgcacgtggacaaggaattgaatgatctggcacgggaccctccagcacagtgttcagc

SEQ ID NO: 734778 - DNA, 100 bp, Homo sapiens
atttctgattacgttgacacttaccatgctgctgcccttaggaaaaatatattcagggggaagagatgtaatagatttcacattatggcagttactaaag

SEQ ID NO: 734779 - DNA, 98 bp, Homo sapiens
atttgcctttagtgcactcttctccttcacagtaaagtggctgaaagacccaaatgggaccagtagtttgccaactggaagttctcttcttcaagaag

SEQ ID NO: 734780 - DNA, 151 bp, Homo sapiens
gtcgctggagcacaaaagagtctccgcggtggaggtctgcgttgctcttgcttttcctcgctggggtgtacggtactaggttttgacaagcttgcatcatgcgtgagtataagctagtcgttcttggctcaggaggcgttggaaagtctgc

SEQ ID NO: 734781 - DNA, 83 bp, Homo sapiens
gtataattttcctcacacacagttacttgccaagacgattgaatcttgatggcagaggtgcaattagattccctgaaacagaa

SEQ ID NO: 734782 - DNA, 101 bp, Homo sapiens
gcgtgaccgagagcgcgaatatcgtcatcgttagaaggctgaactcacgggaatcaaatggcgtaggtacaattttggagggcatggggactgtggaccca

SEQ ID NO: 734783 - DNA, 50 bp, Homo sapiens
gttcaccatcctggccccggaagattggtgctgaagacatggacggcttc

SEQ ID NO: 734784 - DNA, 51 bp, Homo sapiens
agggtcaggaacagagtcaatttcaggaaatgcactcggtgatggaaagag

SEQ ID NO: 734785 - DNA, 100 bp, Homo sapiens
tctgtgcagtggcacctgcgcgaagctggccaaagcctgcccagacggctcacctgtgcgggatggaacaaaagagctcccagctcctccagcagccgac

SEQ ID NO: 734786 - DNA, 83 bp, Homo sapiens
ggaccaggcggaggcgtcgcgggagcctttggggcaccacagagatgcgggttcagcagctggacatggagaaccaacgctca

SEQ ID NO: 734787 - DNA, 99 bp, Homo sapiens
gcgaccagagagtctggcgccagctgccggcaacggatagaggggctgtgtcatagacgtccgacgtgtctgggcatccgcttcgatcctgaaattccg

SEQ ID NO: 734788 - DNA, 100 bp, Homo sapiens
atttcacagctgattcctgggagcacatccatttcattggcaagagctccttaataagcatttatagtcagtttttggcagcaatagaatcactaaaggc

SEQ ID NO: 734789 - DNA, 74 bp, Homo sapiens
cgcagggaccccgcgcggccctggaggccaggctgtgggagaccgagtttttgaaatcatgaatcctgtttata

SEQ ID NO: 734790 - DNA, 90 bp, Homo sapiens
cagaaattctggaatacctatctgggtgtccgcaatgttgccagtgtctgtctgcagattggctacccaactgttgcatcagtaccccat

SEQ ID NO: 734791 - DNA, 145 bp, Homo sapiens
ctcagcagtcctgcgttggggtctgcgccctaggatgcactgagatggtacatcaggataactgctcgtatcagccactacttccttcattggactgcaaggtatttctgtttggaaaagtaatggagtccagtcaacttcattg

SEQ ID NO: 734792 - DNA, 75 bp, Homo sapiens
gaaggagttccaccaggccgggaagcccatcgggtctcaccaacggctttgggggtgcgaggagcgagcaggagc

SEQ ID NO: 734793 - DNA, 80 bp, Homo sapiens
gggattcgcggcccggagctcgggaccgtacctggagtagaacagaaaaattattatgtctgtgttcccttgggactcat

SEQ ID NO: 734794 - DNA, 74 bp, Homo sapiens
atggatccacgcctgatggctccacgcatttcccttcgtgacacatcatctcagagttggagcacctgacgttt

SEQ ID NO: 734795 - DNA, 83 bp, Homo sapiens
ggacaagtggcagtcggcgtgatcgcagggggatatgagactttctactcggaatatcctgagtgttgcgtggatgtaaaacc

SEQ ID NO: 734796 - DNA, 100 bp, Homo sapiens
ccagaagcgggcggcgcgggggagatggtgaaagaacttgtcctggacaacagtcggtcgaatgaaggcaaactcgaaggcctcacagatgaatttgaag

SEQ ID NO: 734797 - DNA, 50 bp, Homo sapiens
gtggacattttactggctcaagacggggaggtttactgcatcgacgcgcg

SEQ ID NO: 734798 - DNA, 96 bp, Homo sapiens
aggagatgaataagtgggttcgttgtatttgtgacatctgtgggtttaatccaacagaagaaggcctgctggtgggtacccttgatgttgtgttgg

SEQ ID NO: 734799 - DNA, 90 bp, Homo sapiens
ccgcaaagtgtctacctcggggcagatccggaccaaggactggaatgtcacgtggaataccagcaaccccgacttcaccaagtgctttca

SEQ ID NO: 734800 - DNA, 90 bp, Homo sapiens
ggccacgcagagcagcctgaggcacaatgcctatgtcgcggcgtggcggtttgaccagaagctggggctgctggctcgtgtcacgttcac

SEQ ID NO: 734801 - DNA, 76 bp, Homo sapiens
aagaaaaaggatcaagtgactgctcaggaaattttccaagacaaccgtgctggtatagaggactctaagaagtggg

SEQ ID NO: 734802 - DNA, 76 bp, Homo sapiens
gaagccatgcccctcaggctggaacttgccctgtctcctcgcagatgagtaacaacatgctgtaccccaaggaaga

SEQ ID NO: 734803 - DNA, 98 bp, Homo sapiens
tcagagaacacaggaccagtttgccatcccaaggccgaaggagtggcaaaattctattcagaagaatgcaggccttgcttttatcgaacttgtcaatg

SEQ ID NO: 734804 - DNA, 100 bp, Homo sapiens
agaacaggaacagaactgagcaggggcaggtctccaagggcaaactttgttaaaaggaagtcttacatggaggacttaaacaaaacagataaaagctgag

SEQ ID NO: 734805 - DNA, 100 bp, Homo sapiens
caccatccacgcctacaataaagggcaggagtttctgcacaggaagtcaaagtggtgccgccctacatctctcaatgtggttcgaataattacatcagag

SEQ ID NO: 734806 - DNA, 90 bp, Homo sapiens
cgctactcctggcagtgcgtcaatcagagcgtcctgtgcggtcagttgaacataccgatggtcagagtgtcctaacagactcactatggc

SEQ ID NO: 734807 - DNA, 100 bp, Homo sapiens
agaagtagaagcatcgaaagcgttggagaggtgttaccggaacggcggcgacaagggtgttcccgaactagagtggaacccttaggagaaatcttgagag

SEQ ID NO: 734808 - DNA, 90 bp, Homo sapiens
gcggaaccggatcaccgagggcatttacggcagctacagcctccgcttggcgtcccgatgctctccaccagcggccccgtacatcaccag

SEQ ID NO: 734809 - DNA, 88 bp, Homo sapiens
tcgtcctcttcttggtgctgtggctgatgcatttcatggctatcatctacacgaggctggcaggatgtacagtttttatcacaggtgc

SEQ ID NO: 734810 - DNA, 100 bp, Homo sapiens
gcgagataaatcacgagaggaagcttaaatctgtcgtttgaatttaggaccacctcgctctctatcaatatcagctcacatcattgaaaagataattttg

SEQ ID NO: 734811 - DNA, 96 bp, Homo sapiens
ggtcaggtcctcggaagctgagtccagagcgatgctgctgaagacagcatgttacaccagacagctatattccatgccttgcagacctgtgcaaag

SEQ ID NO: 734812 - DNA, 75 bp, Homo sapiens
atgctggaaaatctcaggaatctggtctcattggaacgacctgcagcaataccattgacctgccgatgtcccccc

SEQ ID NO: 734813 - DNA, 82 bp, Homo sapiens
actctcagtggtcctacctggggatattatcaaatctactactgttcatggcagtatgaagtgaaggctcctgttccttctg

SEQ ID NO: 734814 - DNA, 75 bp, Homo sapiens
gcgaaaaacgtgtggcgatgtcttagacaatcttaaaggagactgctatcagacatttcagcagtcctcactgca

SEQ ID NO: 734815 - DNA, 101 bp, Homo sapiens
tagccactttgcattgactggaaacaatggcatttacagaaagagtcaacagcagtggcaacaggtgcaatggatgagcttcatagtctggatccaagaag

SEQ ID NO: 734816 - DNA, 75 bp, Homo sapiens
ggtgggcaaactaagccgattttccggaaaaaggcatgagtacagtaccagaagttatcgttgcacggcactgtg

SEQ ID NO: 734817 - DNA, 82 bp, Homo sapiens
cccggatagcgagggcggccgcgccggctccaggccactcttcacctccaccatgagcctggacatccagagcctggacatc

SEQ ID NO: 734818 - DNA, 100 bp, Homo sapiens
cggaggaaatgacaattacctgacgatcacagggccttcgcaccccttcctgtcaggggccgaggtcctaggcctacttacaagcctccagtctcaaatt

SEQ ID NO: 734819 - DNA, 117 bp, Homo sapiens
gagggtctggctatggtggtgcaggacccgctgctctgcgatctgccgatccaggcaatggatcacttggagtcctttattgctgaatgtgatcggagaactgagctcgccaagaag

SEQ ID NO: 734820 - DNA, 85 bp, Homo sapiens
tgaagttgaatctgcaaaacttattcgggataaagtagcagcaattcccttgactgaagacgttctcataacattaggaaaagaa

SEQ ID NO: 734821 - DNA, 90 bp, Homo sapiens
ctccagccgaaggagaagggggacaccattcgcttttcacccaagatgatttgatgtcttataaaactctgatgaaccatgatggctaca

SEQ ID NO: 734822 - DNA, 74 bp, Homo sapiens
agcaagccgcacctggagaagctgaccctgggcatcacgcgcatcctagtgcaatacagttgacccttggacaa

SEQ ID NO: 734823 - DNA, 75 bp, Homo sapiens
cccggacgccgacgaaagccagcgagctcctcagcctcagagtctgtagaagaggcgacaccagggcttccaaat

SEQ ID NO: 734824 - DNA, 100 bp, Homo sapiens
ggagagaatgaagcaagtttacctaacacgtctttgcaagcaatctgcacatcgtgctgccacacgaggcttcattcgttatggctggcgctggggttgg

SEQ ID NO: 734825 - DNA, 100 bp, Homo sapiens
tgccctcaaactcctggactgaaacgatcctctcatctcagcctccaaaagtgctggcattacaggttacacgcatggggagatactctggaggaagcat

SEQ ID NO: 734826 - DNA, 98 bp, Homo sapiens
gcatatgccgtctctcccggccgcatgcggcaatttgacgacctcttccggggtgagacgggcaaggacagattatgtttgagaccttcaacaccccg

SEQ ID NO: 734827 - DNA, 86 bp, Homo sapiens
cctgcactgaaaggaaatgacggattttggtacagccaaagaccggagctttggagagatgaagtttaaacagtgtcctacagaga

SEQ ID NO: 734828 - DNA, 82 bp, Homo sapiens
tggcacgcgccaccccgatgtaccaggtcaaaatgcagatcttcgtgaaaacccttaccggcaagaccatcacccttgaggt

SEQ ID NO: 734829 - DNA, 100 bp, Homo sapiens
agccgctcttccccacctgcccggtgcccgaggaggcagccaagctcgtagcctgccactccgtgcgttcacaataaaggtgctaagaaagagaatgtaa

SEQ ID NO: 734830 - DNA, 90 bp, Homo sapiens
ggagtgtgagccgccatctgctggagcagctgtaactgcaagacctggacaaggcccagaggcagagctacacaaccatggaatccaaat

SEQ ID NO: 734831 - DNA, 98 bp, Homo sapiens
tgcaaggcagggagaccagactggttttggaggtggcccagcatttggggagtgatgtattgattggtgacatcttggtccttcttggggcttccctc

SEQ ID NO: 734832 - DNA, 75 bp, Homo sapiens
ggcttgggacaacttggattctgctgccaaacgagggattctttcatctggtcggggcagaggaattcattcaag

SEQ ID NO: 734833 - DNA, 78 bp, Homo sapiens
aacggggatgacctaaacaattatgacaggacagtcattttgtttactcattcagccctgttgcaggtcccaataaac

SEQ ID NO: 734834 - DNA, 83 bp, Homo sapiens
cctcctgtaacccagcctgtttcacttcttgattactacaatgcagctagaacgtgaaaaggctcttgaacataagaatcgaa

SEQ ID NO: 734835 - DNA, 73 bp, Homo sapiens
ctgttgccattatagagctggaattaggcaaatatggacagatcgaggagactggcagagggaaagaaagttc

SEQ ID NO: 734836 - DNA, 75 bp, Homo sapiens
ccggaacacaagctgtgaaacactaggcgaccactttatcaagttcttcgctccgtggtgtggtcactgcaaagc

SEQ ID NO: 734837 - DNA, 75 bp, Homo sapiens
agaggaagagaggaagcggagggaactgcggccagggtggtcaaggtgaagccccatgacaaggatgccaaaatg

SEQ ID NO: 734838 - DNA, 100 bp, Homo sapiens
caaatcggctgattctgcatctggaaactgccttcatcttgaaagaaaaggtttattccctgctgtcctgaatcttgcttctaatgctcttatcacgacc

SEQ ID NO: 734839 - DNA, 75 bp, Homo sapiens
cctgtttttcctgagcaaccagagaaaccacttgaccttgcacatatagtgttgcaacaaggacagtgtcagagc

SEQ ID NO: 734840 - DNA, 100 bp, Homo sapiens
taaaggatggggaacctcacttcgtggtggtccactgcacaggctacatcaaggcctggcccccagcagaatccagactccaaaatgatgcaaatcaacc

SEQ ID NO: 734841 - DNA, 90 bp, Homo sapiens
acttcgaaaagttggagataaaattctcggagatctgagctacagaagtgcaggatacttttgtggaactctatgggaacaatgcagcag

SEQ ID NO: 734842 - DNA, 88 bp, Homo sapiens
tgcgccatatccggaagctggaggaaaacgaagtaggttcagctgcagcccggaaagaaatcataagaaacaaaattcgagcaattgg

SEQ ID NO: 734843 - DNA, 82 bp, Homo sapiens
ctcggagttttgggggtgtgctttcttccggtcacccacactgtttcttttgccaccttgaactcggctctgaccgggaagt

SEQ ID NO: 734844 - DNA, 83 bp, Homo sapiens
tgataaggagggatatgttccacgtaacttgctgggactaagaagtcgctcacatcattgacatcagtgacataaagaaaaac

SEQ ID NO: 734845 - DNA, 75 bp, Homo sapiens
cttgtcacctcgaattgagcaccaatgatggagcatgtgcgaattcatccggaattagtgactggatccaaggac

SEQ ID NO: 734846 - DNA, 75 bp, Homo sapiens
tgagggtcatgtttcctgtgtgaaattgcttctgtcaaaggctgaacatgaactaaatctggcaagaaaaatgag

SEQ ID NO: 734847 - DNA, 95 bp, Homo sapiens
ggagcagatcaagaccctcaacaacaagtttgcctccttcatagacaaggtccggcctctttggcctacccccgttggctccgctgccccaggtc

SEQ ID NO: 734848 - DNA, 98 bp, Homo sapiens
tccgttcccgggtctggcctcctcacctggtacctgatcagcatcgcaacatggatggaattggaggacattatcatatgcgaaacaacgcagaaaca

SEQ ID NO: 734849 - DNA, 82 bp, Homo sapiens
cttctccactttcgccagcccgtgccgcgagcgcggcctgcaggagcgctgataaagcagtttgtgtccgacgtggcctggg

SEQ ID NO: 734850 - DNA, 100 bp, Homo sapiens
caacttaagagcgcctatgaaaataacttgatgccttacaccaattacacctttgatttcaaaagggaaatgataaagattttaccttgaatgattttgg

SEQ ID NO: 734851 - DNA, 100 bp, Homo sapiens
cagatctacgagtggatggtcaagagcgtgccctacttcaaggataagggtgacagcaacagctcggcgggctggaagctgtgatgcagatccatccgcc

SEQ ID NO: 734852 - DNA, 75 bp, Homo sapiens
gcaaaagttctgaatggcatccgtcctaccggaaacctaggaaaagctggaaacaacgtggaggtagatgagtct

SEQ ID NO: 734853 - DNA, 83 bp, Homo sapiens
ccagtgccgggggcagccacctgccagacctgactgttatcacaccggtttggtgcacctcgatttggaggaagtagggcagg

SEQ ID NO: 734854 - DNA, 75 bp, Homo sapiens
cgccgccccctccggcgtgttcatgcccccggggagggccctcctggacccgggagcggaccctggtggcggtga

SEQ ID NO: 734855 - DNA, 82 bp, Homo sapiens
tgcagtacctgcagaaggtctctggagacatcttcagcagctatcatggtgaacttacttcagattgtgcgggaccactggg

SEQ ID NO: 734856 - DNA, 75 bp, Homo sapiens
gccagcacactcctcgcgagcaaggtgtttcccattaaacactaccaggacaaaatcaggccttacatccagctg

SEQ ID NO: 734857 - DNA, 98 bp, Homo sapiens
tcgcttctccagcgctccttgctcgcaaggcgggggaggcggcggcccagccacgatgctgaaaatgtgtgtctgacatgcaagctcagtggggcaga

SEQ ID NO: 734858 - DNA, 83 bp, Homo sapiens
ctcagccttcaggactctcttccagcatggccgaagacacctattcacacataatgatgtagacatggaaacagatcactact

SEQ ID NO: 734859 - DNA, 100 bp, Homo sapiens
ctgcccttagccagccagtgttgcccttggccccctcgtcgtctgccccaggtgctggagaatctggtaaaagcaccattgtgaagcagatgaggatcct

SEQ ID NO: 734860 - DNA, 75 bp, Homo sapiens
cgtagataagacactgcaacagttgatccaaggattagttttggatcatggtgcccgtcatccagatatgaagaa

SEQ ID NO: 734861 - DNA, 50 bp, Homo sapiens
gtggatcgttgttttgaaacgcaaatgaaatctccagccatcacagccac

SEQ ID NO: 734862 - DNA, 95 bp, Homo sapiens
gagacagcgatcgagagagaccggagaggtggagagatgagcagcaccagcagtaagagggctccgaccacggcaacccagaggctgaagcagga

SEQ ID NO: 734863 - DNA, 80 bp, Homo sapiens
cagatggcggatgccctgcagtacctgcagaaggtctctggagacatcttcagcagctgtgccacgaccgtggctatctg

SEQ ID NO: 734864 - DNA, 50 bp, Homo sapiens
ttggttcccctctttgacctgaaatcaatgtggactgaacataaatcacc

SEQ ID NO: 734865 - DNA, 83 bp, Homo sapiens
acagtccgcagggatgaacctcgagttgctgggtttgctggttggctcccgagcagacagcaggaaagaagaagcccttcgtg

SEQ ID NO: 734866 - DNA, 100 bp, Homo sapiens
ggaagcacagtagagacggacctgtttaagaggcagcaggcgatgccctccacaggtatggcagataagtgggcggaaaaaccagcctttgggactcccc

SEQ ID NO: 734867 - DNA, 75 bp, Homo sapiens
aagcgaaaacatgaccgctgagcccatgaggttgatgcccagctacaggtagtaaggaaactggaagagaaggag

SEQ ID NO: 734868 - DNA, 75 bp, Homo sapiens
ggagtacctgcgctatgaagacacgcttcttctggaagaccagccaacagtggccacagatgtctttaattccaa

SEQ ID NO: 734869 - DNA, 82 bp, Homo sapiens
ctatggaattctaatttgaaccatgtttggattgaagccgcctctgtattacttaccagcaatggctgccatccggaagaaa

SEQ ID NO: 734870 - DNA, 97 bp, Homo sapiens
tttaagcccctcaccctgaggcagctggagcagcaggaagaaatactaagggtgccttttaggagaaataaagagggaaatgaggcaagttatcctt

SEQ ID NO: 734871 - DNA, 100 bp, Homo sapiens
cggcgttgatatcggtggtaacgacggcctcagcaggcggggaagatgaaaggggatggttgtgcgagctgttacgctggaaagaagatccttctccaga

SEQ ID NO: 734872 - DNA, 100 bp, Homo sapiens
tagcccagaagacagtggagggagcagggagcattgcagcagccactggctttgtcaaaaaggaccagttgggcaagctcctgggcaacgtgctggtctg

SEQ ID NO: 734873 - DNA, 83 bp, Homo sapiens
ctctacgccatgagggagaaggggattaacatcagcaataggatgaagccccacccgcccttcaggatgccagccttggcaac

SEQ ID NO: 734874 - DNA, 100 bp, Homo sapiens
ctcacccagttccaggtagacatggaggccgtcggggagacgctgtggtgtgactggggcaggaccatcagggttcaggataagtttgaggtgctgaatt

SEQ ID NO: 734875 - DNA, 100 bp, Homo sapiens
agcaagaaatgatcagtagcaccagtgtttatggggacgaacagggaggatccgtgtcctgtcttttaaaactggcatcatttccctgtgtaaagcacat

SEQ ID NO: 734876 - DNA, 90 bp, Homo sapiens
cgaaatcttgtttgagaaccccgatcagaatgccaaatgtgtttgcatgctggatctgtctcgtaactgtgtaatcaaggaactagcacc

SEQ ID NO: 734877 - DNA, 82 bp, Homo sapiens
cacatactatccgtttgttcaggaaccaccagtgacagaaattttgattcagctaaagttccatcagatgagtattgccctg

SEQ ID NO: 734878 - DNA, 90 bp, Homo sapiens
gagagattgaagcatgctctggaaatgttcccagaacattgcacgatgcctcctggtccttccaaccctcctgctaccatgaagattgca

SEQ ID NO: 734879 - DNA, 95 bp, Homo sapiens
cagcctcctgagcagctgggattacagggatcagtttcattcacggatgtgactgtggactttacccaggaggaatgggaacaactggacccctc

SEQ ID NO: 734880 - DNA, 100 bp, Homo sapiens
agcacacccctcgtgtccaggttcctcatgggcagtgctcggggtgacaaagaagatcatgacaagatgtttaagatgagtgaaaagatattactcctgt

SEQ ID NO: 734881 - DNA, 73 bp, Homo sapiens
gggtctcaggtcatggcggtcgcggggcccgcgcccggagctggcgccaggggctttgttatgcacctaaagc

SEQ ID NO: 734882 - DNA, 90 bp, Homo sapiens
attaattgatccccagctagactaggaaaaccagtagattcccagacatcgcgaagtgaatctgaaattgtgccaaaagttgctaaaatg

SEQ ID NO: 734883 - DNA, 100 bp, Homo sapiens
atgttggactcatagtcactgccagaaagcttgacccatcttatcaccgtcttctctggcactcagtatttggagtaatcagttgttaccagttgcggag

SEQ ID NO: 734884 - DNA, 75 bp, Homo sapiens
acacaggctccaaactccactaagtgaacgcaaacatgcagatctttgtgaagaccctcactggcaaaaccatca

SEQ ID NO: 734885 - DNA, 82 bp, Homo sapiens
tctgcgttttgccagtcacctctcaactgtgtgccaaaggtcagtttaggggctggtgcaaaggatgagttgcacattgttg

SEQ ID NO: 734886 - DNA, 101 bp, Homo sapiens
ccagttcgcccgtccccctgccccgttcacaatcttcatcactggtccagctgtaataccagggtacttctccgttgatgtgaataatgtggtactcattt

SEQ ID NO: 734887 - DNA, 90 bp, Homo sapiens
gaaaaaggactagaacacgttactgttgatgacttggtggctgaaatcactccaaaaggcagagcccagctcaacattggcaatgtgctc

SEQ ID NO: 734888 - DNA, 74 bp, Homo sapiens
atcctggtcagaggaagtgtgagggtctgaagattggggacacgcctctgcgacttgatatcaaaagaaagcta

SEQ ID NO: 734889 - DNA, 100 bp, Homo sapiens
gaacagcagcacctgcaagcgcccggcagcggcccgcgaggcgtctgtagaggcttctggtgaaatcgcattatgcaagactggatttcctgaagatgtt

SEQ ID NO: 734890 - DNA, 100 bp, Homo sapiens
agcagtatcgtgccgaggtgtacgagcagctggagctgcacagcctcctggatgccgagctgacgcaaacatgcagatctttgtgaagaccctcactggc

SEQ ID NO: 734891 - DNA, 100 bp, Homo sapiens
cagagaggcaaatgttcattgcacacttgagttaagcagtagtgtttgggaagaaaaacagaggagttctattaagacgctttcacttgacagggccact

SEQ ID NO: 734892 - DNA, 80 bp, Homo sapiens
gaccctggccgccccgagcggagcctggagggcagcgggtggcatgagacgtgggaacatgggccacctcacacggatcg

SEQ ID NO: 734893 - DNA, 90 bp, Homo sapiens
aaataaggacaaaagccaagaggaggacagttcgctacacagcaatgcatcgaggtatggtggatattgcccgacagacggttgaatttc

SEQ ID NO: 734894 - DNA, 82 bp, Homo sapiens
ggcttccttcgttattggagccaggcctacaccccagttactaaaccaaggagatttaactgaaagacggacatgagcgtgg

SEQ ID NO: 734895 - DNA, 74 bp, Homo sapiens
gaaggagaaacctgtggaaatgcagaaaagcttgcagaatatatttgttccatgctacagatgaagcatggcga

SEQ ID NO: 734896 - DNA, 75 bp, Homo sapiens
acctgcctcttcatgcagttctccatcgtgccagcatctacatcctcatcgctgtgggcgctgtcatgatgttcg

SEQ ID NO: 734897 - DNA, 100 bp, Homo sapiens
ctgaccacaggaattggatctactagtgcaggagtcgatagcagcagttggtgacgagatggcactcagaaacggcgttgacgtaatttaggacgtggaa

SEQ ID NO: 734898 - DNA, 75 bp, Homo sapiens
tcctgatgaagttcgagcactaatatttaagaaagaagatgttaactttcagatgattttaaaccagcatctata

SEQ ID NO: 734899 - DNA, 75 bp, Homo sapiens
gtcaccatcgtctccgccttccagttcggagaggagacgttctcttccagatggctgaagtccacaggcagatcc

SEQ ID NO: 734900 - DNA, 98 bp, Homo sapiens
aaaatggcggcggagccgaacaagaccgaaatccagactctttttaagaggcttcgcgcagttccaaccaacaagatggtcaccatggagcccgggta

SEQ ID NO: 734901 - DNA, 126 bp, Homo sapiens
gcaaaacttatgtgaccccgcggagacccttcgagaaatctcgtctcgaccaagagctgaagctgatcgagttttgcggcctccaggtggtggatccaatttttcattaggttttgatgaaccaac

SEQ ID NO: 734902 - DNA, 82 bp, Homo sapiens
cgtccagcacctacgtcccgctgccgtcgccgccgccaccatgcccaagagaaagcacagacgcagtcttcagcaaggaagt

SEQ ID NO: 734903 - DNA, 73 bp, Homo sapiens
cctgaaaaagtttttaaataccaaagacgttaaacacagtgggaatatcacttttgatgagattgtcaacatt

SEQ ID NO: 734904 - DNA, 99 bp, Homo sapiens
aagaaatccgcagaagcttattaaagttaagcctggatgtgtaaatacaactgaagtggacattaagaagtcatccagaatgagaaacccccacaaaac

SEQ ID NO: 734905 - DNA, 98 bp, Homo sapiens
gctgggcgacttgcgaggatgagagcgacgaagccaactgtccagctcacccgacgactgccacccatcaaagaagctaagcctcggttacagaagct

SEQ ID NO: 734906 - DNA, 73 bp, Homo sapiens
agacctggtggaggtgttaaatgaaacttcgggctcagaatcaggttctgaaaaaaggtgttgtggatgaaca

SEQ ID NO: 734907 - DNA, 90 bp, Homo sapiens
gcgccaaacatgaactgctgcaaccatttaatgttctctatgagaaggaggtgctccaggaaagtacctgattgacaagatctacatcca

SEQ ID NO: 734908 - DNA, 90 bp, Homo sapiens
catctttagttcgtctttcctagagaggtcagaagagatcaattctacagaaatttccagtggttctgttgaggctttatggaattcagc

SEQ ID NO: 734909 - DNA, 100 bp, Homo sapiens
tggtggcccacttttcctcctgccaggtgctggagaatctggtaaaagcaccattgtgaagcagatgaggatcctgcatgttaatgggtttaatggagag

SEQ ID NO: 734910 - DNA, 75 bp, Homo sapiens
ccatcctgcacctcgtagtggcagcctcagagagttgtgatcacatgccctcaggacttccctcattgctccatt

SEQ ID NO: 734911 - DNA, 100 bp, Homo sapiens
ctcagctcccagaggatcaccagcgtgggtcatattgaacattccagatacctatcattactcgatgctgttgataacagcaagatggctttgaactcag

SEQ ID NO: 734912 - DNA, 49 bp, Homo sapiens
tccaatggagaaaacacacttgctgaaaatatttacaatgatgaagagt

SEQ ID NO: 734913 - DNA, 100 bp, Homo sapiens
aggagattctgatgaagaagttattcaagatggaagattttcagtcaatgacttatggatttaaaatggctaacagtgtgacagatcttcgagttacagg

SEQ ID NO: 734914 - DNA, 80 bp, Homo sapiens
cgcgttcccagcccgggtccccgcgttcacagccccagcgcaggtcagcccaaggccaaccccactgtcactctgttccc

SEQ ID NO: 734915 - DNA, 74 bp, Homo sapiens
ctctgtccataatagctgacatgtgtatgcaaaagagagctcagaaatatgctcagcaagtcttgcagaaggaa

SEQ ID NO: 734916 - DNA, 74 bp, Homo sapiens
gtgattcttgtgggtggcatgactaggatgcccaagggcttccgagtggacctgccaatcaagtcggcccgcta

SEQ ID NO: 734917 - DNA, 83 bp, Homo sapiens
tcagaacttcattggcagaagttgactgagatcagaggccctgtgatgatcgtgtcagctgttaaacgtttaatgaaagaagc

SEQ ID NO: 734918 - DNA, 99 bp, Homo sapiens
agcccccgaactctgcaaagcctccagaggacataccacctccaggatcaggatgcagagggctgtgtgcaagaagtttgggttgcacgtgagtcgaat

SEQ ID NO: 734919 - DNA, 100 bp, Homo sapiens
tccagggaaaggatgacatatttttggacctgaaacagaaattctggaacacctatatggttgctaggaagaggctcaatgtttgtgttttcaccagatc

SEQ ID NO: 734920 - DNA, 98 bp, Homo sapiens
gctcagcgtctggctgctgctgctgcccgccgcccttctgctccacgaggagcacagccgggccgctgcgaaggcagcgcccggttaccacatggcca

SEQ ID NO: 734921 - DNA, 74 bp, Homo sapiens
gggcttcctcactcgtggctttccgaaggctgctgactgaaactgttgaggagcccatggaggaagaagaagca

SEQ ID NO: 734922 - DNA, 100 bp, Homo sapiens
cgggaaccgaggagtacgagctcaacggcggcctgcctccgggcacacccggctccccggacgcctcgtttgaacaggaaaatcagcgactaattggtga

SEQ ID NO: 734923 - DNA, 134 bp, Homo sapiens
gccgtggagcgcgagcaggagcgcgtcaagtcggcgggggcctggatcatccacccgtacagcgacttcagcaattcatggagatcgagccggagatgctggccatggagaccgccgtccccgtgtactttgcc

SEQ ID NO: 734924 - DNA, 83 bp, Homo sapiens
ccaggatctcgggctcggaacgagactgcacgtttggtgccctggttgtcagatgttggaaagcagtaggacggaacatactc

SEQ ID NO: 734925 - DNA, 83 bp, Homo sapiens
cagctgtgaaaaactctttggatgattctgccaaaaagggcctactctaggtgcggtacttcactatagtttataaaagatgg

SEQ ID NO: 734926 - DNA, 100 bp, Homo sapiens
attttttctcatggatgttcttcttcgagtatttgtagaagggtgaacacacagtgttcatcccctcaggaggacacagcttttgaggtaccatcttgga

SEQ ID NO: 734927 - DNA, 107 bp, Homo sapiens
gactttctggccgagaccagccagtggagctgctgaatcctgcccgcgtgaaccacatgcccagcacgggtattgttgcagcatctggcagtgagactgaggatgag

SEQ ID NO: 734928 - DNA, 100 bp, Homo sapiens
ggttgtctgttgctggaaactgcaggatgtgccttgttgaaattgagaaagcccctaagggacaagaatccttcaagaaacaggaaaaaactcctaaaac

SEQ ID NO: 734929 - DNA, 82 bp, Homo sapiens
gccatcatgaatccagctagcaaagtaattgcactgaaaggctgctagaaattgtaagctacaaaatcattggtgttcatca

SEQ ID NO: 734930 - DNA, 83 bp, Homo sapiens
ttcactgcctctggcatggatgagcagagcatcctggccagaacaagccaaggagccaagacgagagggacacacggacaaac

SEQ ID NO: 734931 - DNA, 75 bp, Homo sapiens
tcagcggaggtggcagaagcaagtacgccaaaatctgctttgaggataacctatttgtcaaagatgaaagtgacc

SEQ ID NO: 734932 - DNA, 90 bp, Homo sapiens
gcctctgatctgcaaagaaggagaaagcgtgcaggaccaaactcttacccaggatctactggagcagctgttggagcccatgacgcctgt

SEQ ID NO: 734933 - DNA, 75 bp, Homo sapiens
aacaattttgcaaggcagatccagcgccggattgtatgttccaggcctcaatgaggagtccaaacatggagccat

SEQ ID NO: 734934 - DNA, 100 bp, Homo sapiens
cggacgggaaggcgggagacgagaagcctgaaaagtcgcagcgagctggagccgccggagaaacactttgtgctactctgtggggctttggaaaagcatg

SEQ ID NO: 734935 - DNA, 83 bp, Homo sapiens
cgcgtctctctgctgcggcgcggggaccgctgtgctctcgaccacagcaccgggaagtccagtcagcggcagatggtgttcgg

SEQ ID NO: 734936 - DNA, 100 bp, Homo sapiens
gcaagtgcaaggtcaaatggacccatgaggaggagcagttgcgtgaaatggaaaacctacgcctggaaagtcagcagttaatagagaaaaactggctcct

SEQ ID NO: 734937 - DNA, 100 bp, Homo sapiens
gtcggaggagccgcgggcggcgcggcccagctcgttccagggtgtccgcaatgttgccagtgtctgtctgcagattggctacccaactgttgcatcagta

SEQ ID NO: 734938 - DNA, 101 bp, Homo sapiens
gcttcagcgtcccggcgccgtcgcgccactcctccgaacaaatcttcctattttcaagctgaaagaatctactgttagaagaagatacagtgactttgaat

SEQ ID NO: 734939 - DNA, 75 bp, Homo sapiens
ccaggtgctcatggagctggaaaaacctgtgctcatatcactgggaaaaggatggagtttcactcttgtctccca

SEQ ID NO: 734940 - DNA, 83 bp, Homo sapiens
gaacaccttcatggcccctttatagctggacaagggtgtcccccacctgaagacggcaagctgggtcctgagtgatgcccctc

SEQ ID NO: 734941 - DNA, 99 bp, Homo sapiens
ccttctctcagaaagggaatcttcagtcgcacgtgcagcgagtccactcagagaagcgcatactgtgctgcctccgtagcctcgctgaccaacatcatc

SEQ ID NO: 734942 - DNA, 90 bp, Homo sapiens
ggaccagaagtcgccgaacgttctgctgcagaacctgtgctgcaggatcctgggcaggagcgaagatttctacctggacaaggactggta

SEQ ID NO: 734943 - DNA, 83 bp, Homo sapiens
gctgttcatccaacccagcctttcattctaactagcagtgaatgctaacagaccctcgacctctcaagcagctagagtagaaa

SEQ ID NO: 734944 - DNA, 90 bp, Homo sapiens
cattccagacaccatggcccacctcatcagccctctgccctcccccacgggaaccatcagatgtcagccaggaagatgttcccctcgtaa

SEQ ID NO: 734945 - DNA, 75 bp, Homo sapiens
gtggcctggtctccattatttgagatgagttacatcttggaggaatctgaacctgtgatgttaagaaatcagtaa

SEQ ID NO: 734946 - DNA, 75 bp, Homo sapiens
gcagcctcaaagcagaagccgagaacaccagtctctaattaacagaagatggcaaagcccagccacagcagctat

SEQ ID NO: 734947 - DNA, 101 bp, Homo sapiens
ctacgtgtgcttcttgggcgtcgttgtcaccatcgtctccgccttccagttcggagaggtcctggacccaagccagaagcctctgcaaagcttccttccag

SEQ ID NO: 734948 - DNA, 100 bp, Homo sapiens
aacttcgaaccatggaccaggccctcaagtccctgatggcctcagaggaggaggggctggctgtgggcaatggactctcctcctatgagcagaatgacaa

SEQ ID NO: 734949 - DNA, 50 bp, Homo sapiens
ctccgagcatgaaggccacaaggagcttcagtttcagcgactcacccgag

SEQ ID NO: 734950 - DNA, 75 bp, Homo sapiens
cacaaatgctccttctcctggagacgcaactcaagccctgcctctttcttgtcgcagtcagtttcatcatcagat

SEQ ID NO: 734951 - DNA, 122 bp, Homo sapiens
cgagatgtctcgctccgtggccttagctgtgctcgcgctactctctctttctggcctggaggctatccagcaaccgcatgcacgagtctctcatgctcttcgactccatctgtaacaacaag

SEQ ID NO: 734952 - DNA, 82 bp, Homo sapiens
ctggagtggccttcaacccatcagcgccccaggttcagaggtccaaagaggtgacattttatggatagccatggcagggact

SEQ ID NO: 734953 - DNA, 50 bp, Homo sapiens
aaagtgctgggattacaggtgtgaggctgaggcaggtggatcacctgagg

SEQ ID NO: 734954 - DNA, 100 bp, Homo sapiens
ccgagcgagcgagcggcgcccagcccagcgcctcggccgaacccctccgcagcaggatattgtacctgtggatgcatcttatgaagtaaaagaactatat

SEQ ID NO: 734955 - DNA, 82 bp, Homo sapiens
cgaggttggtcatgaaagagattccttgcagagacagctcaacacggcacttccacaggttctgcagctgattcatgagaga

SEQ ID NO: 734956 - DNA, 104 bp, Homo sapiens
tcttcagaaagtgaacttggcattttagatctaattcaaagtgatggctgttttagtacttcaggtggaattcgtccttttcatcttcagaactggaagcagaa

SEQ ID NO: 734957 - DNA, 90 bp, Homo sapiens
tgtacctgttaccactttcaaaacccatttggaagccctttcctaatcaagacagtgactcggtggtactaagtggcacagactcagaac

SEQ ID NO: 734958 - DNA, 98 bp, Homo sapiens
tggtaatgctgtttctgcttaagttggcaagacactccaagtttggcatgaaagcaccagtaactccagatagtggttattcatcagcccacgcggag

SEQ ID NO: 734959 - DNA, 51 bp, Homo sapiens
ccctaatggaggtctccagtttcggggaacgcccttttgcttgtgactggc

SEQ ID NO: 734960 - DNA, 100 bp, Homo sapiens
ccgacagcacagacagaatccctgctaccaaaagggctattgcaagacacgaagtccgagaaattgagcagcgacatacaatggatggccctcggcaaga

SEQ ID NO: 734961 - DNA, 82 bp, Homo sapiens
aaggcggatcccgcgcgcccccgctcctgcagggaatgcagtggtgtcttttgaaagaagaggatgtcattcctcgtatcag

SEQ ID NO: 734962 - DNA, 101 bp, Homo sapiens
ttaaaaagcagtctaaacctgtgaccacccctgaagaaattgcacagcaacaaatggtcattcagaatgcttacggctattaataggaaatgcagaaccac

SEQ ID NO: 734963 - DNA, 90 bp, Homo sapiens
agttcaccttcgacctggagaaggagacgccggatgaggtggcccaagagatgtcttgataaactgcttgatgctggtctctatactgga

SEQ ID NO: 734964 - DNA, 100 bp, Homo sapiens
ggagcagacgctcaaccagcttctggtagaaatggatgggagtacctgacaggcttccacaagcggaaggtcgagcgaaagaaggcagccattgaggaga

SEQ ID NO: 734965 - DNA, 90 bp, Homo sapiens
aggatggtggaggcgagaacactgaggaggagacagaagaaattctggcagatgtgctcaaggtggaagtcttcagacagacagtggccg

SEQ ID NO: 734966 - DNA, 100 bp, Homo sapiens
ttcttcaaaggataaactacctacatagaggacatacctttggttaaaggagctgccgtcagatacttggtgcttgaaaaactgaagaaggaagacgctg

SEQ ID NO: 734967 - DNA, 74 bp, Homo sapiens
atcaacgtcctccgggaccggagtcagaaccctccgcagagtaaaggtggctggtcattgaccgcaaggtttac

SEQ ID NO: 734968 - DNA, 83 bp, Homo sapiens
tgggtgcgcggaccgggccaggctgcttgaaggtttggtgcacctcgatttggaggaagtagggcagggcccttatctggaaa

SEQ ID NO: 734969 - DNA, 100 bp, Homo sapiens
aagacctcctccactggcaaagagtcacctaaagttaggcggcactccagccccagctcgaataagattatcctggaccccatgacgttcagcgaggcca

SEQ ID NO: 734970 - DNA, 75 bp, Homo sapiens
tccggcccgaggacaccgactaccagcagggagagcccgggccacccggacagatgggaccagaaggtcctggag

SEQ ID NO: 734971 - DNA, 75 bp, Homo sapiens
ggagaatggagtcttccatcaatcatatctcacaggtgcagtgacttctatgttttgggttgatgctgaattagg

SEQ ID NO: 734972 - DNA, 80 bp, Homo sapiens
gccgatccagcctgcggagcctgtggggcagcatcatggcagaacaggatgtggaaaacgatcttttggattacgatgaa

SEQ ID NO: 734973 - DNA, 74 bp, Homo sapiens
agaaagagacattgaacagttcacatacaaggcgagtggataattccaacacaagactggcagtccaaattgaa

SEQ ID NO: 734974 - DNA, 100 bp, Homo sapiens
cctaactcaagccattggcacacagtctgtgatcaaaacagggcgactgctaatcagtcacgaggctcccttgacaggcggctttgcatcggaaatcagc

SEQ ID NO: 734975 - DNA, 50 bp, Homo sapiens
gtttcatctgtggatggagtattgcgggaactgggggctctgctcattat

SEQ ID NO: 734976 - DNA, 74 bp, Homo sapiens
gttacaatcaaggtctatgaaggcatgcccaagagaatcgtaaatgcaaaaattgcttgccttgacttcagcct

SEQ ID NO: 734977 - DNA, 50 bp, Homo sapiens
gcctcttctggaccaggaaactctccacttgtggacatcggatacccaag

SEQ ID NO: 734978 - DNA, 100 bp, Homo sapiens
tctgggtgtatatcaaacggcaagatgtccagtaatgtcccggcggatatgcccgtggccacccaggagcccgatgtgcaaggcaggtgtgagtgccagg

SEQ ID NO: 734979 - DNA, 75 bp, Homo sapiens
gcaccgccaggccggcgcgtatggaggcggtgggacgcctgcggcgcggccctgggcgctgcctatggcacagcc

SEQ ID NO: 734980 - DNA, 75 bp, Homo sapiens
acaataagagcagaggatggaacacttcagtgcattcaaggtgaaaggtgtagcagtcactcggcctacacccac

SEQ ID NO: 734981 - DNA, 74 bp, Homo sapiens
tgcgcaaaaacaacagacagccctatgctgtcagtgaattagcaggtcagaagagatcaattctacagaaattt

SEQ ID NO: 734982 - DNA, 83 bp, Homo sapiens
tgagatcgtgtatgtgggtccaatcaattgattctacacaaaggccagcgatctgtacatgagacccaggaattatttccaaa

SEQ ID NO: 734983 - DNA, 74 bp, Homo sapiens
aacattttgagaaatttcaggatacagcagaagcattagcaggttttgcggctagttggctattcaagaaacct

SEQ ID NO: 734984 - DNA, 118 bp, Homo sapiens
cagatcctagactcggtgctggtgggccctgtgccagcagggagacacatgtttgtctttcaggttggatggcaagcatgtggtgtttggcaaagtgaaagaaggcatgaatattgtg

SEQ ID NO: 734985 - DNA, 144 bp, Homo sapiens
agcgaatcgaagacctccctaccatggtcaccttgggcaattccttcctccacaaactgtgctctggtgacatattaggttctgctatgcaaaatatacaaaatctcctccagatgccatatggctgtggagaacagaacatgg

SEQ ID NO: 734986 - DNA, 100 bp, Homo sapiens
gttaattcatcttcacccgtgatgttggcctttaaatgttccagagagattcctggaagttgctcagatcacattacgggagtttttcaatgccattatc

SEQ ID NO: 734987 - DNA, 100 bp, Homo sapiens
atcaaagccatcggatggatgagcagtcacacagactttgtggacagtttgcggttgtgaagaaatgccgtgagaaaagcaccggcctccagtatgccgc

SEQ ID NO: 734988 - DNA, 98 bp, Homo sapiens
cgaagccccctgcaggaactctacaacccaatccagagttttgcggcctccaggtggtggatccaatttttcattaggttttgatgaaccaacagaac

SEQ ID NO: 734989 - DNA, 98 bp, Homo sapiens
atctgcaaaagaagagaagcagaattatacctagaagtctactaatggacagttagtcacccacctacatgttgagacaacgtgcagtccgacctcct

SEQ ID NO: 734990 - DNA, 80 bp, Homo sapiens
gtagaggtggacatggcgtgcggctttcgccgcgctattgcttgccagatcaatgtccgagttaccaccatggatgcaga

SEQ ID NO: 734991 - DNA, 75 bp, Homo sapiens
cttccaacaccagtggaagatgatcacatcccaggccttggatggtatactgtaaattcagcatatggagatacc

SEQ ID NO: 734992 - DNA, 100 bp, Homo sapiens
gccaggccagctggacgggcacaccatgagagacccctcctggttcaacgaggcatggctccagggcatctcggaagatccaggtcccaactggaagctg

SEQ ID NO: 734993 - DNA, 98 bp, Homo sapiens
cgagcgaggaggatggcggagtcggggctcctgacgggccgttgctccagggagaactgcaaatatcttcatccacccccacatttaaaaacgcagtt

SEQ ID NO: 734994 - DNA, 100 bp, Homo sapiens
cactgagtcaacagactgagcgcgtccaggcctgacagctctgcggctcgggccctgaggaaacaagtttcagccactaaggccgaagcagaaaaggatg

SEQ ID NO: 734995 - DNA, 50 bp, Homo sapiens
tacttccaagtcatcaccagaaaggttattgcagccgaaggagaaatgaa

SEQ ID NO: 734996 - DNA, 123 bp, Homo sapiens
gcgagtgcttctgaaacgtcagctgcgctcccctaggagtgctgagcccgcggaaccgcagccatggtgtatgagctcagtggagagcaccatgacgaagagtggtcagtgaagacttaccag

SEQ ID NO: 734997 - DNA, 95 bp, Homo sapiens
cctcgctgcgctcatggcgtcgcccggcccgtctggtaaacttgtccagattgaatatgctttggctgctgtagctggaggagccccgtccgtgg

SEQ ID NO: 734998 - DNA, 98 bp, Homo sapiens
aggtgtacagccttgtgcctgacaggaccgtggccgaccggcagctgttaagtgggcagaccaacatccacctcagcaaaaacttcttcctgacgaat

SEQ ID NO: 734999 - DNA, 95 bp, Homo sapiens
agctcttcagcatctacgggaggcaaacttgtaaaacctggaacagcagcatcattgtcaaaggagctagccgaattcgaaaaactctcggatca

SEQ ID NO: 735000 - DNA, 74 bp, Homo sapiens
tcactacccttcatgcatgaaagacaaagctactcagatacccagacaaatggattctaaaatttgaatagaag

SEQ ID NO: 735001 - DNA, 100 bp, Homo sapiens
tgcagctcagtctgcatatggcactcagcctgcttatccagcctatgggcagcagccagcagccactgcacctacaagggtcctaaaaaggtggggacgc

SEQ ID NO: 735002 - DNA, 80 bp, Homo sapiens
gtgcagccaccctcgctccctctgctcttcctcccttcgctcgcaccatgattttcagctgaactctcatctctcaacac

SEQ ID NO: 735003 - DNA, 100 bp, Homo sapiens
cgggcgccgggagcgagctgggagggagccgcgcgcctttgtgcgcgcgccgaggaaagggataaagtgatgcctctgattatccaaggttttaaagacg

SEQ ID NO: 735004 - DNA, 83 bp, Homo sapiens
ccatcccaaagctattctgggggcaacagaggacaaagcaggacctcataaggaaatctacccctatgtcatccaggaactta

SEQ ID NO: 735005 - DNA, 88 bp, Homo sapiens
cttcggcagtccacccaccgccgccgcctcccagaattttgatttggctgctgggctgctaccttgaaatccaagccctaaaaatgcc

SEQ ID NO: 735006 - DNA, 75 bp, Homo sapiens
aaagggtgaagcaagagaatctgaacctcgtctgtattcccacttccttccaggaaaaaccatatggcatagttg

SEQ ID NO: 735007 - DNA, 75 bp, Homo sapiens
ctgggaggccactagcagccagttccggcccgaggacaccgactaccagcagcattccacgcctacgggaaggca

SEQ ID NO: 735008 - DNA, 100 bp, Homo sapiens
accctcctgctcgatctcagagctcagacacagagcagcagtcccctacaagctctctgatgtaaaggatggagtaaatcaagcagcacctgcatttgga

SEQ ID NO: 735009 - DNA, 75 bp, Homo sapiens
caggattcagcccagtcacagagcttggtatgaaaatgaaagtcttcagaatggaaggaagtcaactgaatttcc

SEQ ID NO: 735010 - DNA, 100 bp, Homo sapiens
atcctgtagaagattcacaggtaattgtagaaggtgttggtaaatcatgcttattgctacagtttacagacaagaggtttcagccagtgcatgaccttac

SEQ ID NO: 735011 - DNA, 74 bp, Homo sapiens
tgaagctcaccgacagtgccctgagggccttcgagagctaccgcgccagacagctatcaagcccagagagagac

SEQ ID NO: 735012 - DNA, 74 bp, Homo sapiens
gaacaatcattagttcagtgcagtgtctgacttgtgacaggatcctgtttgaccaaactcagagatcaattaag

SEQ ID NO: 735013 - DNA, 83 bp, Homo sapiens
aaatggccgctgtgtggttgcaacggagataaattcccggaaccgcgattcggcgtgtcaggccatctgagtgaggatccccg

SEQ ID NO: 735014 - DNA, 100 bp, Homo sapiens
gtcccgtgttaaaagaaaacaaggcgattccgcagtccccccgttccctggaggtcctgtggaatggtcttatatccagatggccaggctcagatgattc

SEQ ID NO: 735015 - DNA, 87 bp, Homo sapiens
gcctgtgaaccagattttcatgatggctttttacttgaagtacacagagaaagcttgggccgactcgcgggccgctgcacccaccgc

SEQ ID NO: 735016 - DNA, 75 bp, Homo sapiens
cttggttaaaacctgacacttttaacagtggagttggatcacaggattgattttgaactcagagaaggccttgtg

SEQ ID NO: 735017 - DNA, 100 bp, Homo sapiens
gggaaacgctgtttgaagcggcatgagtctgagattcttccattcccgaatccagagaggaacttcgtccttccagaagagatcattcaggaggtccgag

SEQ ID NO: 735018 - DNA, 100 bp, Homo sapiens
gcggagccctcatccctaacggtgaaaggctctgattgtactttctccacaagcttcagcatggcagtatctctcaccacttgttttggtccaagggcag

SEQ ID NO: 735019 - DNA, 74 bp, Homo sapiens
ttaagtattactaattggtgatactagatcaatgaaggggatcatcgtcttgctcttcttttatctcagtttgt

SEQ ID NO: 735020 - DNA, 75 bp, Homo sapiens
cagggaatactttgagaggttggagaaggaaatccccatgaactttgtggatccgaaagagtacgacatccctgg

SEQ ID NO: 735021 - DNA, 90 bp, Homo sapiens
ttacaggtgtgggtccacagagcacgaaataaccaagtgtaaggctaaagtagacccggctcttgagttcctatcagactgagattgggc

SEQ ID NO: 735022 - DNA, 100 bp, Homo sapiens
gatgtcccctccagcgccacagtcaaggacacgaggtcaccatctccagcacacttgaatgattcagtggtggctggtggcggggccattgagatggaac

SEQ ID NO: 735023 - DNA, 100 bp, Homo sapiens
ctgaactacatcatgcccgttcagtacgaagggagacagagcatctgcgtggttgactacagacaaaaagctgctgcagcaggtagaattcccacaaact

SEQ ID NO: 735024 - DNA, 89 bp, Homo sapiens
cttgaattgggaggggggcagctggagcctcaggcggcagcgcttctagcactcctgtaggaggcctgctgatggcatttcagaagtac

SEQ ID NO: 735025 - DNA, 97 bp, Homo sapiens
aactagtgtaggaaaacggctcaacccaccgctgccgaaatgaagtataagaacactcctatgccaccttcaccagctgtacaagtgcagggccagc

SEQ ID NO: 735026 - DNA, 96 bp, Homo sapiens
gaaacagaactgaaacaactggaaactgttttggatgatcttgaccccgagtgcctgatcaactttctagcgggagaacgatcatggaggtggtgc

SEQ ID NO: 735027 - DNA, 83 bp, Homo sapiens
ccgcgagcgcggcctgcaggaggcggcgcggcccatgggctatttcgagctgcagctgagcgcgctgcggaacgtgaacgggg

SEQ ID NO: 735028 - DNA, 75 bp, Homo sapiens
ctggtcactagcggactcttcttcgccttcgatgttcggctaatgaatgagttcactaatatgccagtacctcca

SEQ ID NO: 735029 - DNA, 82 bp, Homo sapiens
ggcagagcagggcggcggcgactcgatcttcgtgaagactctgactggtaagaccatcaccctcgaggttgagcccagtgac

SEQ ID NO: 735030 - DNA, 100 bp, Homo sapiens
acatgtatttaaccaagttccaacaaaagaatgctgccgcaggtgacatctgttcccgagctgttcctgactgcagtgaagctcacccatgatgacacag

SEQ ID NO: 735031 - DNA, 83 bp, Homo sapiens
gggggctttcgcccgggtcctcctagaaattccccccgaagaagactcccccacatctggcaaaatgatgcttcaacacccag

SEQ ID NO: 735032 - DNA, 75 bp, Homo sapiens
gtgattccagcaaatgctggtttaggaacgtcaaggtcgtgggaaataaaaggcagttctacacagactgcagca

SEQ ID NO: 735033 - DNA, 100 bp, Homo sapiens
ctgcgatcccgggtcatctccagatgctagggttatgggaattgtcttagaagaaagaaggcaagccaccattttacccacgtaaatatatgaatatatt

SEQ ID NO: 735034 - DNA, 75 bp, Homo sapiens
agatggatattgaaatggacagtggagatgaagcctaagaatatgatcagatgaagattatggaagagattcggg

SEQ ID NO: 735035 - DNA, 50 bp, Homo sapiens
ggagtccaagcttgtgctctttgcaaacggggattcagcgtccgatcctt

SEQ ID NO: 735036 - DNA, 75 bp, Homo sapiens
ccacttcttgccccagaaagccccagacggaaagagctacttgctgaacctagtcaccgacttggacttctcgcc

SEQ ID NO: 735037 - DNA, 101 bp, Homo sapiens
gcctgcagcgctcccacccccggcggcggcacgatgccctttgacttcaggagcgttctcccggggaagtacttggaagagatcgccacacagatgcgcac

SEQ ID NO: 735038 - DNA, 50 bp, Homo sapiens
cggggcgacctcggtggcccgcaggttgtttgatgtgtgcacagtgtcac

SEQ ID NO: 735039 - DNA, 100 bp, Homo sapiens
cttgataaaaagagatgtggggggattctcgacctgctaacagaactggaccttttcggttcaaaagctgtctaagaatgaagtgctcatggtgaacata

SEQ ID NO: 735040 - DNA, 76 bp, Homo sapiens
gagcccagcgtggaggtcacatacctcaagaagcagggtgtccgcaatgttgccagtgtctgtctgcagattggct

SEQ ID NO: 735041 - DNA, 98 bp, Homo sapiens
tcaagtgtagactctcgccaaagccgctctgggcaagaaaacaatggactgctcttcctggagacctcagccctggactctaccaatgttgagctagc

SEQ ID NO: 735042 - DNA, 100 bp, Homo sapiens
tgtcccgggcctgaggctgatccagcaggaggatataaaaaagaaggagccatattgtaggggtctagacagtttcaaagtgaaacagaagttcttcgct

SEQ ID NO: 735043 - DNA, 98 bp, Homo sapiens
gtggaaaggctctcagtgaaaaagataccatgtttgtgtggaagtgccccgtgtttgctatgccgatgctgtcctagtggaaacaactccactgtaac

SEQ ID NO: 735044 - DNA, 96 bp, Homo sapiens
atcaaatacttcatatttggcttcaatgtcatattttggcctgctcttgaggttcacagatgatacctttgatccagaacttgcagcaacaatagg

SEQ ID NO: 735045 - DNA, 75 bp, Homo sapiens
ggcagtacaagcttacgtctctgctcttcagtacaatcctgtggtgaaaactattggcttgagggaagtttggtt

SEQ ID NO: 735046 - DNA, 90 bp, Homo sapiens
cggcgctctcctggctcccttctgccccagctccgtctcggcggcggcggcttctagggacctattaaaagagttcccacagcccaaaaa

SEQ ID NO: 735047 - DNA, 75 bp, Homo sapiens
tgaaggggaagaggcccaccctggagtaaccctcactggagaatccagagagtctcgctctgttgcccaggctgg

SEQ ID NO: 735048 - DNA, 82 bp, Homo sapiens
gtgctggccacttgcttgggatcctttatcctggtcatcttctatttccaaaatgccttcaattaagttgcagagttctgat

SEQ ID NO: 735049 - DNA, 97 bp, Homo sapiens
cacgagatgccgcctcacatctacgccatcgcagacacggcctaccggagcatgcttcaaggacttaaagagagatctacttcagagccagcagtcc

SEQ ID NO: 735050 - DNA, 100 bp, Homo sapiens
gatgtcaggtcgggaaccatccttggaaatcctgccgcggacttctctgcacagcatccctgtgacagatgcctttgaagatgagaaacccccaaagaag

SEQ ID NO: 735051 - DNA, 90 bp, Homo sapiens
ttgtggctttgctaaaggacagaaatctttggaattaagagaaaaacaagctgaaaaggaagaaaagcagaaaacaaagaaaatagaaac

SEQ ID NO: 735052 - DNA, 99 bp, Homo sapiens
cggcccctatgaggggcagatctccacccaggacaaatcagctggcttcttctcctggctgatggactgccatggtggcataagtggcaccatttacga

SEQ ID NO: 735053 - DNA, 88 bp, Homo sapiens
ctaccggaaggccatcgccaaggttttctgtctcaactggtctctgacaagcctctgactgaatgtatccgtgctggccactatgcag

SEQ ID NO: 735054 - DNA, 98 bp, Homo sapiens
gaacatccgcgtggttcgttgtggcggcagcgagttgaactttaggagagctgtgttctctgcagattctaagtttgcctgaatccatcattgcagct

SEQ ID NO: 735055 - DNA, 100 bp, Homo sapiens
agtggtggctatgaacccagaggtcgtggaggtggccgtggaggcagaggtggcatgggaattctccactttaccaatacttacaggatctgggacacac

SEQ ID NO: 735056 - DNA, 51 bp, Homo sapiens
accaggaggccaggggtgtcgccatggttcctgattatgtcactgtaataa

SEQ ID NO: 735057 - DNA, 117 bp, Homo sapiens
tgagaaaaccaaacagggtgtggcagaagcagcaggaaagacaaaagagggtgttctctatgtagattgtcctgggtcacataatgccagctgagcgtaaaaagccagcaagtatgg

SEQ ID NO: 735058 - DNA, 90 bp, Homo sapiens
gacggattcatttagagctgcggaacaggacgccctctgatgtgagcgtcctgaccaccctggagcgtaggttcaacctgcagagcgctg

SEQ ID NO: 735059 - DNA, 82 bp, Homo sapiens
gctcaagatctcagagaaggaggaggtgaccacgcgcgagtaccatggggcgcaagttggaccctacgaaggagaagcgggg

SEQ ID NO: 735060 - DNA, 97 bp, Homo sapiens
aaagacacaaattcctgagaattgggaacatgctaaatacaaatggtatcttaaggtgtcatggagaaactccagctgggcccagagattctgcagc

SEQ ID NO: 735061 - DNA, 100 bp, Homo sapiens
agcctgtacctgttttatacttgcttttgcttcagcgttctgtggttgtcaacagaggcattcgacttacagcagtgtgcggccagccagcagaggggtg

SEQ ID NO: 735062 - DNA, 74 bp, Homo sapiens
gacagcatgcctcaccaagtcacatgacaagcacttcttgccagccctggtcatgcagtggccatggagaatgt

SEQ ID NO: 735063 - DNA, 74 bp, Homo sapiens
gaatacattcctgattacctgccacccattgtgtcttctcaagaagggagtaactattcccagtcagaggcgct

SEQ ID NO: 735064 - DNA, 80 bp, Homo sapiens
aggagccgcctcaggtgtggacaggaccgctcaggaagtggcagcgaagaagactgagccccgacattccagtctcgacc

SEQ ID NO: 735065 - DNA, 75 bp, Homo sapiens
gttggagttggaatttgtgcaatgtttagccaacccaaattaccttaattgccaagatgctgaattatcagggac

SEQ ID NO: 735066 - DNA, 83 bp, Homo sapiens
gctgagtggttgtgtggtcgcgtctcggaaaccggtagcgcttgcagcatgatgtccagctcgccgctgtccaagaaacgtcg

SEQ ID NO: 735067 - DNA, 76 bp, Homo sapiens
tgccctgcagtacctgcagaaggtctctggagacatcttcagcagctgaagacctaactgcagcatgtctgtattt

SEQ ID NO: 735068 - DNA, 100 bp, Homo sapiens
taggcggcggcggaagatggtgccgggggtcgctggctctgctgctgccgccggcgaaggaggaggcgttgccggaaggacagaataacgggctcccaga

SEQ ID NO: 735069 - DNA, 100 bp, Homo sapiens
ccggcctctcggcctctgccggagaaacagaactcaagacatggctgcccagtgtgtcacaaaggtggcgctgaatgtttcctgtgccaatcttttggat

SEQ ID NO: 735070 - DNA, 74 bp, Homo sapiens
ccaacgtggaggagctgtgggtggaaggtatctgcccaaactggaacttatgctgtagacatttctttgtggtt

SEQ ID NO: 735071 - DNA, 100 bp, Homo sapiens
ggattaggaggaattcttttagaagacatagaagaagcactgcccaattcccagaaagctgtcaagaataatccagaatggctactctgatctatgttga

SEQ ID NO: 735072 - DNA, 75 bp, Homo sapiens
ggaagaaatagtaggagaatcaaatgataaactgcgaggacagagccactgggacttctgcacggacctggccgt

SEQ ID NO: 735073 - DNA, 75 bp, Homo sapiens
ggccagtctggagacagtcaaggtgatctgtgaaaatggttcgctattcacttgacccggagaaccccacgaaat

SEQ ID NO: 735074 - DNA, 97 bp, Homo sapiens
gtcctcctcacggtcctcctggctgtgctcatatacacctggtacctttgtgcatcgactcctccaattttgctgtgattgaagctgggttaaagtg

SEQ ID NO: 735075 - DNA, 149 bp, Homo sapiens
ggatatgcaagcgagaagaagggactggacattcccaacatgctcactcccttaatctgtccgtctagaggtttggcttctacaaaccaagagaaaagaaaccttgtttattccctgtgaaaatgagaagatttctaaacagctccacc

SEQ ID NO: 735076 - DNA, 50 bp, Homo sapiens
cgcaagatggcagccaccacgggctcggggcagagcatcaaccccaagtt

SEQ ID NO: 735077 - DNA, 83 bp, Homo sapiens
cctggaccttggacattcagacttcagaatggaattacatgaatgacagtcttcgaaccaatgtgtttgttcgatttcaacca

SEQ ID NO: 735078 - DNA, 90 bp, Homo sapiens
atagagatgtgatgttggagaactacagaaacctggtctccctagtattggctggagttggcgatgactcagcagatcaaggctggaaga

SEQ ID NO: 735079 - DNA, 76 bp, Homo sapiens
caactccttcaagcatataagtggtcaaacaaggtctgtgcagacttttgcagacaaatcaaaacaagaagctctg

SEQ ID NO: 735080 - DNA, 90 bp, Homo sapiens
ggagcggtggcgacgagaagacgttcttgggtgtctctggggagtccctgggccagaccttcctccagactccagcccacctcttcggag

SEQ ID NO: 735081 - DNA, 75 bp, Homo sapiens
cgccaagctcctgctagacaccttattgcaaacatcctagatagccatgcagctacattgaaccggaaatctgaa

SEQ ID NO: 735082 - DNA, 83 bp, Homo sapiens
caggctcattatccattttcgagacattcggagccccagactctggtaaatgctctgcttcctcctgcctggatacttctaat

SEQ ID NO: 735083 - DNA, 87 bp, Homo sapiens
ctgagcagtcagaaggcaaagaacagaagatcctccttgattgtgaataagtggaatacagctctcattggccttatgacatacttt

SEQ ID NO: 735084 - DNA, 100 bp, Homo sapiens
cctcgaagtgcgcaaacttgacactcaccctgaccggttgctggagaccgttctcggctatatcagtgcagttgcacagtccatggaaaggaacgcagac

SEQ ID NO: 735085 - DNA, 75 bp, Homo sapiens
gctgcgctaccggaatgtcatccagcgagtgattagcttcctgcctgacacagctcacttcaagaagtgcacaat

SEQ ID NO: 735086 - DNA, 82 bp, Homo sapiens
gatcttcttcactgcctctggcatggatgaggttggccttggggaggcactattagaggctgaaactattgaagaacaagaa

SEQ ID NO: 735087 - DNA, 74 bp, Homo sapiens
gatcgctgtgatcgtcacttgtttgcgtgtgaacttggacatgggcaaagcggtgtatggatggatgatgatga

SEQ ID NO: 735088 - DNA, 82 bp, Homo sapiens
ttataggaacctggtctccctggaacccttaggagaaatcttgagagtggacagcaattgtgaagatcgccagagagttctg

SEQ ID NO: 735089 - DNA, 90 bp, Homo sapiens
attatttcagaaactggaatcccaacaagccctttgaccaaggtccaaaagccgtagaagcttatggtaaaaaatttgaggtaaaaactg

SEQ ID NO: 735090 - DNA, 100 bp, Homo sapiens
agtcaagagctttctctccaaaatccccagtgtcgtcacagttggtgcttcccgtgctgctgttgatgctggctttgttcccaatgacatgcaagttgga

SEQ ID NO: 735091 - DNA, 100 bp, Homo sapiens
gcaacagttgtcctcaattgcgtaggaccagctatcaatatgacggctgaagaaacagtgaatgtaaaagaggttgaaatcattaagctaattttggact

SEQ ID NO: 735092 - DNA, 76 bp, Homo sapiens
ccagtttgaaacacttcagcagcttgtacaacattactcaggctatgaccagggccagagcactcagatctcagtc

SEQ ID NO: 735093 - DNA, 75 bp, Homo sapiens
atgctgccaagctcttggccaaggccataggaaaaggatacagagtagagtttcatgaacctgaaacttggtgga

SEQ ID NO: 735094 - DNA, 100 bp, Homo sapiens
cagaggggcctcccggtgtcctcgggatatcgccaatgtgatgcagaggctgcaagactcctgctttgaacttgctgtgggagaagtgttgcagtgacaa

SEQ ID NO: 735095 - DNA, 106 bp, Homo sapiens
agaggcaccgggatcgtgaccgagaccgtgaccgagagcgtgaccgagagcgcgaatatcgtcatcgttagaaggactaacttcttcagtgcttagagtgtgagaa

SEQ ID NO: 735096 - DNA, 75 bp, Homo sapiens
gccatcttcgaacttagacttccggaaggactttggcgagggctgctctttggcgtaaattgcaatcgattaggg

SEQ ID NO: 735097 - DNA, 50 bp, Homo sapiens
aagagcaggaagtcattacatggggttgccctgctgtcagacgtctatcc

SEQ ID NO: 735098 - DNA, 98 bp, Homo sapiens
tctgcactacacgaggagagttggttttcggtgaacctatgggtcgtggaacaaaagttatcctacacctgaaagaagaccaaactgagtacttggag

SEQ ID NO: 735099 - DNA, 82 bp, Homo sapiens
gcggtttttattaaggctgttcatgtgaaaggtggagatacactacgccttgacacacttatagaatggtggagagaaaaga

SEQ ID NO: 735100 - DNA, 131 bp, Homo sapiens
cttaaccttcaaccatctggggaaaaggcaaaaatcccatctaccgcaactctcagttcgagagtaaagaaaggcctaaagaatgtatttgacgaagcaatattggctgccctggagcctccagaaccgaa

SEQ ID NO: 735101 - DNA, 73 bp, Homo sapiens
cgtgatcgtgcccaaagaggagggcgtcatcagcgtctccgaggacaggaacagatgttgttattgtaaagaa

SEQ ID NO: 735102 - DNA, 87 bp, Homo sapiens
cggagcccggctcccgcaccatggaggaggacgacagctacggctctggctccgctactgcatcgtgtgcttctgtccaagaggcag

SEQ ID NO: 735103 - DNA, 101 bp, Homo sapiens
cgggaggaaggaacgaggcaaggagctaaagcagcgtgcgttcagccctgggaaaaatggctacaaacttcctagcacatgagaagatctggttcgacaag

SEQ ID NO: 735104 - DNA, 100 bp, Homo sapiens
ttccacgcccgaccttcccaggggcgccgggggtgacagagctgaatgaacctctctccaatgaagatcgaaatctcctctctgtggcctacaagaatgt

SEQ ID NO: 735105 - DNA, 50 bp, Homo sapiens
gtcctcatgtggggggtaaaccactcgatgcaaataatacggcactccga

SEQ ID NO: 735106 - DNA, 95 bp, Homo sapiens
ggcacgagcggaggctgctgagaagctgcagcgagcccagcttcatggcggctgaagagatgcattggcctgtccctatgaaggccattggtgcc

SEQ ID NO: 735107 - DNA, 51 bp, Homo sapiens
ccgccatctgcctgggagtgcgctgagaagatggtataaactggtccatca

SEQ ID NO: 735108 - DNA, 100 bp, Homo sapiens
cctggctgccgtgaataggcagcctaaagatgaagaagatgactttatgtgtaagaaggcggcctctaaatcaaaagagaatggaagatctacaaatagt

SEQ ID NO: 735109 - DNA, 88 bp, Homo sapiens
tgcacttggaggcttcaaagagacaatcaagataggatccgaggttcaggttaatttcacctaccagtttttgaaaaagaagttctat

SEQ ID NO: 735110 - DNA, 100 bp, Homo sapiens
agggccgcctgctcgttcctgacagaatctgggagtgtccactcgccttccaccagcatggcaacgtcttcacagtaccgccagctgctcagtgactacg

SEQ ID NO: 735111 - DNA, 82 bp, Homo sapiens
gggcagcgtgggtgagcggcgcagcggcggcagcggagagcgagagaggggagcaggaaacccttttccaaagagaaatgaa

SEQ ID NO: 735112 - DNA, 100 bp, Homo sapiens
tcctaacatccaggccgtgcttctgcctaagaagaccgagagtcaccacaaggccaagggcaagtgatttgacagacctcgggactcaacaataaaccag

SEQ ID NO: 735113 - DNA, 73 bp, Homo sapiens
atttatcattgaataagtgttttaagaaagtggacaaagagaggagtcagctgcatcttcctcccgtgaggct

SEQ ID NO: 735114 - DNA, 100 bp, Homo sapiens
caggacgagaggatgcggagcccgcagaacctccacagtcaagaggacggctcttgtcaggatggtgaagctgttcatcggaaacctgccccgggaggct

SEQ ID NO: 735115 - DNA, 100 bp, Homo sapiens
gcagtcaactcaaatgcaagtccaagaggaggaggaggcggaggtccaagcggaaaggaagatgaagtcctcagtacattctgaagaagatgattttgtt

SEQ ID NO: 735116 - DNA, 96 bp, Homo sapiens
tgtaaaatcttactcacagaacctcctatgaacccaaccaaaaacagagagaagattgtagagtctgaaccaatcagagtccttgtgactggagca

SEQ ID NO: 735117 - DNA, 145 bp, Homo sapiens
gattcaggagcagactgaggaactggagctgaagagagagaagacagaaaggctgctctgtcagatgattcccccagccatgagaccccagatcctgctgctcctggccctgctgaccctaggcctggctgcacaacaccaagac

SEQ ID NO: 735118 - DNA, 75 bp, Homo sapiens
ttggcctcccaaagtgccgggattacagggcactgcacttggctgtgattcatcagcatgaacccttcctggatt

SEQ ID NO: 735119 - DNA, 100 bp, Homo sapiens
tgggattattccccacaaagggagtgggaaaaggagctgcatcatttacaagagcagaagaccgtggcaaggaggtgtacagccctgactttcatagcct

SEQ ID NO: 735120 - DNA, 82 bp, Homo sapiens
gcccaagtcggcccattccccgtttgcctcggaagtgagcagctactcttacaggcgtgatggtgggcatgggtcagaagga

SEQ ID NO: 735121 - DNA, 100 bp, Homo sapiens
ccatgcgcagcgacagtggcagccagtgccccttgctgtggaggatgtatttgaactttctgggtgcagaagctggatacctaccaggagtacaaggagg

SEQ ID NO: 735122 - DNA, 48 bp, Homo sapiens
gaggacatcgtcaccaagcttctgggaaatgtttcaacgtgcgcaagc

SEQ ID NO: 735123 - DNA, 75 bp, Homo sapiens
cagtcatcacgtttgtggagattggaggtgcagaatttcacgtgtcactgctttcgattgcacagctatttgact

SEQ ID NO: 735124 - DNA, 74 bp, Homo sapiens
cttaaggacaccacgccagtgctttcctgccttccttccgagagtctaacgtgaagacattttgctccaagaat

SEQ ID NO: 735125 - DNA, 101 bp, Homo sapiens
ggggccgctgcgctcctggcccgcgaggcgtgacactgtctcggctacagacccagagggcagcaaggagcgcttccactggcagagccacaacgtgaagc

SEQ ID NO: 735126 - DNA, 100 bp, Homo sapiens
cttgaaagagagaataaccgttgtaacatcagtcacagcataaaggggccaggggtcaagctttctgcaggctctgctgccctgaggtgccatgccggag

SEQ ID NO: 735127 - DNA, 100 bp, Homo sapiens
ttctttatccaagttgccacactgtttcttttgattggggcatttagcccatttacattcaagaactctcttgatagagcccaagcagccaagaataaag

SEQ ID NO: 735128 - DNA, 75 bp, Homo sapiens
cctggccctggccctgatcatcctgctgggcttcgtccagatcgggaaggttgcagagtgggcaggatcttaaga

SEQ ID NO: 735129 - DNA, 75 bp, Homo sapiens
gggaaatcggcgccatccttcagaatgcaggtcgatggccaggtggtcttcataaactatactgccttgtgatgc

SEQ ID NO: 735130 - DNA, 100 bp, Homo sapiens
ggactgtttgtctttgttctctgcctcttgtattctagggatgtgtcttggtgagctagtcattaacccccaccagcagcacatggatgcattctattgg

SEQ ID NO: 735131 - DNA, 98 bp, Homo sapiens
gggcggcgcgctgcccgaggggagcaaggacagatcccatggactggagccccagcaatgtgcagaagtggctcctgtggacagagcaccaataccgg

SEQ ID NO: 735132 - DNA, 98 bp, Homo sapiens
tgtaacacaaaacggcactcacgtggcatcagtccccactgcggtccacggccaggtgaacaatgctttaccaacagggacgcttatgtcaactgggc

SEQ ID NO: 735133 - DNA, 83 bp, Homo sapiens
tgtcgcgccgctgctggttgctgtccctgggagtgcatccgccccaacccttttccccctcgtctcctgtgagaattccccgt

SEQ ID NO: 735134 - DNA, 106 bp, Homo sapiens
cggctcacgctgagagggacacgcagtgacgagcggccgaagcagctttgcggcgccatgtcagaaccggctggggatgtccgtcagaacccatgcggcagcaagg

SEQ ID NO: 735135 - DNA, 147 bp, Homo sapiens
ctagtacttgctctcattcttctagatgtcatcacaatggatcccaaagacaattgttcaaaagatgcaaatggtcattgctagaatcgtggatggaagcagattcactgagttcaaagccttttatggagacacattagttacagg

SEQ ID NO: 735136 - DNA, 96 bp, Homo sapiens
ggagttcctccgcaccctgcccggcttcctcatcgtggccgagatcaacatcgtagctgtgggagctgggttctgcgacggcctccgctgtggaga

SEQ ID NO: 735137 - DNA, 100 bp, Homo sapiens
cctttggatgtagcaaggaagaaattgttcagttcttctcaggtcttttgccaactcctattactcagcaagccagtttgacatctctggcacagggaac

SEQ ID NO: 735138 - DNA, 99 bp, Homo sapiens
tctgaggtgaagacagatcatgggactgataaattggcttctccagggaaagtgaccgaggcagtgaaagaggccattgacgcagggtaccggcacttc

SEQ ID NO: 735139 - DNA, 73 bp, Homo sapiens
gttgctggttcttatttttggtgggcttcaaggaagaggcttctgtaatgtatcccaatcctgatcccttaga

SEQ ID NO: 735140 - DNA, 75 bp, Homo sapiens
ggtgctgtcagcgcggccgtcggagacatgggagacccggggtcggaggatccactccaagatgcacacggagac

SEQ ID NO: 735141 - DNA, 83 bp, Homo sapiens
aggcaacgacgttccatctgtggaaggacctaccaaccagaagcctttgggtctgaagtgtctgtgagacctcacagaagagc

SEQ ID NO: 735142 - DNA, 98 bp, Homo sapiens
ggaggaagaaagccaaggaggaatggctattcaagtggacaagttcaactttgagagtttcccggagtcccctggggagaaggggcaatttgcaaacc

SEQ ID NO: 735143 - DNA, 90 bp, Homo sapiens
cgcagggcgatcaaatggtcccggctgctgcagggcgggggcgtccccaggagccggacaggttctgggccggagaaggggcgacgttcg

SEQ ID NO: 735144 - DNA, 100 bp, Homo sapiens
gctttcaaggatatgctgtattcagctcaggaccaggcaccttctgtggaaggactggggttttaaggggtgtggcaggaggttttggactcgatgagtt

SEQ ID NO: 735145 - DNA, 96 bp, Homo sapiens
agttggcagcatatggaggaatatttctgtggagctgagggctgatgggttctgacggataatttccaagccagatgggaatttcttagccatagg

SEQ ID NO: 735146 - DNA, 96 bp, Homo sapiens
gagtgcggcagtaccgcctccttcccagccgcgcggcttcctccagacctctcggcgcggtcatatttgatcagaaattggatgaaccttcgggat

SEQ ID NO: 735147 - DNA, 114 bp, Homo sapiens
gctgagaacggccaacaggctctttggagagaaaacttgtcagttcctctcacaaaatcaccaggacagccaatacaagtggtttatgtaccatcccatctctatcacatggtg

SEQ ID NO: 735148 - DNA, 90 bp, Homo sapiens
tgctgagctccccactggctttggctggggacacccgactgtctccagaacgctatagctatggcacctccagctcttcaaagaggacag

SEQ ID NO: 735149 - DNA, 74 bp, Homo sapiens
tcctgagagccagccctgacgtgaactcattttatctgccacgacccagaagagtttgctctccaaagctcggg

SEQ ID NO: 735150 - DNA, 82 bp, Homo sapiens
tttcacgctgcctcggcggcccggcccggctcgacgccaatggtgtgctggagaagagaaacgagttggcacacgcacagtg

SEQ ID NO: 735151 - DNA, 100 bp, Homo sapiens
cagtcaagtatgtcccaaacgtctgaagcgttgttgacgaccatggacatcatccacgatggatttggattcatgctggcttttggagacttggtgtggg

SEQ ID NO: 735152 - DNA, 75 bp, Homo sapiens
cctgtggcaggagagacaacaaagcgctattatcctaagcatggaggagcaggacttggagcgaaggttcgagct

SEQ ID NO: 735153 - DNA, 88 bp, Homo sapiens
aggaggcagtagccaaacacccagatgccatggacaatattaccaggcagaaccaattctacgatacccaagtcatcaaacaagaaaa

SEQ ID NO: 735154 - DNA, 104 bp, Homo sapiens
ccgggagggagagccgagcagccccggctctgggctacggactatgggcgaatagctctgaccacccggcgaagacaaatttacatgtattggagaccagacca

SEQ ID NO: 735155 - DNA, 89 bp, Homo sapiens
gtcttccaggccatcaagggtttccgcaatgcccctgttagatggacagagacgtatgtgcgttggtctcctaagggcacctacctggc

SEQ ID NO: 735156 - DNA, 90 bp, Homo sapiens
aagaccttgaacaagtctcgagagtggaaacaactctcacaggttaatgagcatcaattacctgggcagcgtgtaccccagccgggccgt

SEQ ID NO: 735157 - DNA, 98 bp, Homo sapiens
aaactgcaccggaaatgtgcctaccagaggcaagaatctgcatcaaagagccctggaagcaatcatggctcaactgtgatgcctttagaacatgaagt

SEQ ID NO: 735158 - DNA, 90 bp, Homo sapiens
cgagaagcataatgacattgtggacagtgacagcgatgctgaggatcgaggaacgttgtctgacgcaaacatgcagatctttgtgaagac

SEQ ID NO: 735159 - DNA, 51 bp, Homo sapiens
ggtcaggaagcagaatattccttatatgatgaggaaacgagattgactaca

SEQ ID NO: 735160 - DNA, 51 bp, Homo sapiens
ggagaaggaagaggtgtttgaaaagatgccttcaattaagttgcagagttc

SEQ ID NO: 735161 - DNA, 75 bp, Homo sapiens
gccatttcgcctttatcgtggtggagtccaccctggctgtggaacagattatcagtctggtcaatcagatctgcg

SEQ ID NO: 735162 - DNA, 100 bp, Homo sapiens
agagcagatggcctggagattcatgacaaaatcatggaggatgaagagtgtgtgcgccttgataaagagagattggctgcccgtttggagggtcacaaag

SEQ ID NO: 735163 - DNA, 50 bp, Homo sapiens
gaccaggcaccttctgtggaagatagggccagatttgagtgtgtgaattt

SEQ ID NO: 735164 - DNA, 100 bp, Homo sapiens
tcagctactgaacactcaaagctgaggagtgcctggaaaccttggctgctacaaggatcatggaaacccacctcctctaactggcaccagtaaaacgtcc

SEQ ID NO: 735165 - DNA, 100 bp, Homo sapiens
gtccgtgtcaccgccggaacctggcgcaggtgaaaggtgtagcagtcactcggcctacacccacagcatcgaccttgtgaacccagcgacctgactgcct

SEQ ID NO: 735166 - DNA, 100 bp, Homo sapiens
aaagggactgctaagaagataccaccaggtgttacctcattttgaaagtcttgggaaacaggaaaaaattcctaacaaaatgtcagcttttcgaaatcat

SEQ ID NO: 735167 - DNA, 75 bp, Homo sapiens
atcgaggacttcatccagtttgctacggtctacggggcagagcagcgtgagtgcatctccatccacgttggccag

SEQ ID NO: 735168 - DNA, 100 bp, Homo sapiens
gcggccctgcaggcgatgtcgccgaaaccgggctgcaggcggtttactatcaatgtgagcacggacatgcggcatcatcgagtgagactggtgttccaag

SEQ ID NO: 735169 - DNA, 75 bp, Homo sapiens
ctctttttaagggctgggagaactcaggaagcctgtctttatcgaagacaaactgaacttcaagacaaaagtgaa

SEQ ID NO: 735170 - DNA, 80 bp, Homo sapiens
cgtctgcggaagtgcagctgcctcagttcttagcgcagctctacgaactcgacggggaccccaagaggaaggaattcctg

SEQ ID NO: 735171 - DNA, 50 bp, Homo sapiens
cggtcatcccgaaaggccggccccagcatcctgaggttagcattacactt

SEQ ID NO: 735172 - DNA, 90 bp, Homo sapiens
gctgaatcacacgccgccatccgggaggcccagggaaggtgtgttccagagaacaagccttcagacatttgctatattgacgctgagctg

SEQ ID NO: 735173 - DNA, 90 bp, Homo sapiens
cccaccccagaagaggatggcaaaggtggctaaggacctcaacccaggagttaaaaagatttggaagtcaaaccagaaacttcaggctct

SEQ ID NO: 735174 - DNA, 100 bp, Homo sapiens
ctgaggccctggagggagagaaggctccagcaggagaagacagacacggtccgctgcatcaagtcctgccgccccaacgatgtcacatgcgtgttcgacc

SEQ ID NO: 735175 - DNA, 74 bp, Homo sapiens
ccaccgaacagcatgccttcgtctccgcattgcttaactggagcaactgagattgaaaactgtaactatgcagt

SEQ ID NO: 735176 - DNA, 138 bp, Homo sapiens
cggctgcagcgctctcgtcttctgcggctctcggtgccctctccttttcgtttccggaaacatggagactgacaaactggaagatgagaaatctgggctgcagcgagagattgaggagctgcagaagcagaaggagcg

SEQ ID NO: 735177 - DNA, 100 bp, Homo sapiens
cccgtggaaagtacaggtcctgacagctggttcatgggacggctccagacattgcaggcaaggacatggcgaatcccacagccctcctgctcagtgccgt

SEQ ID NO: 735178 - DNA, 100 bp, Homo sapiens
ggaaatgtcgggggcctcatcagaaatgttacacacggagtatcaaactctgctgccaagttcgatcctttggtacagaagacagaccgacagatcgtcc

SEQ ID NO: 735179 - DNA, 98 bp, Homo sapiens
ccaggagcaccgccgaggactccagcacaccgagggtgtcccgacccaggctaagcttgagcatggctgagcaggagcccacagccgagcagctggcc

SEQ ID NO: 735180 - DNA, 98 bp, Homo sapiens
tgttttgcttcgagatggctgcggggatgtatttggaacattatctggacaggaaaagactactttgtgtgtatccattctggagagattgctccaag

SEQ ID NO: 735181 - DNA, 75 bp, Homo sapiens
ctgcttgcttgtccggcgcaccaggacagctttcctgcccgctttggaggagtccactttgtcaaccagccctgg

SEQ ID NO: 735182 - DNA, 75 bp, Homo sapiens
caaagacttcatgatccaaggaggtgacccaacagggacagggcaagaggattatgacagattacgaccgctgag

SEQ ID NO: 735183 - DNA, 74 bp, Homo sapiens
cttggctagtgcaagccttgtttattttcctcaccactgaatctacagggggtcctgatgacaacttaattgaa

SEQ ID NO: 735184 - DNA, 100 bp, Homo sapiens
cgaggtgtcggcgcgggagcagcacttccacagccaagtgcgggagtccacgtgaaaaaacagggttccaggaacttgctgaagaccacacagacccaca

SEQ ID NO: 735185 - DNA, 75 bp, Homo sapiens
ggaacagaagcggaacagccacagcagcctcccaaggagtctgcaagttgatatctaacagtgatacgccttcac

SEQ ID NO: 735186 - DNA, 100 bp, Homo sapiens
cgggccctctgcgacctggggccctgggtgaagtgctccgtcgcccttgcctccaggagattacctggggcaattgatgttatcggtcagactataacta

SEQ ID NO: 735187 - DNA, 100 bp, Homo sapiens
accagaaaaacttcctgaaagcttaatgcccaaactgattgatttggaagattcagcaggtggtatcacggaaaacttgacagaacgatagcagaagaac

SEQ ID NO: 735188 - DNA, 80 bp, Homo sapiens
tgcagccgcgaggaggcgcgggaggtgttcgagaacgaccccgagacgatcacttaggaaaatggctgttggtatgatcc

SEQ ID NO: 735189 - DNA, 100 bp, Homo sapiens
tgcccatcaacctctcttctgtatcttgggcgaacaggctctccgtgtgaaatggtcccatctcagactgccctgggtagacctagactggctcatagac

SEQ ID NO: 735190 - DNA, 100 bp, Homo sapiens
gaatgtgactttggagccagcctgctaggggctgaattctgactcagccatttactaactgtgtgaccttagggaccgcctgactcacaatgacatcgtg

SEQ ID NO: 735191 - DNA, 95 bp, Homo sapiens
caactttccaagtctggggatggccaggtcagtttaggggctggtgcaaaggatgagttgcacattgttgaagcagaggcaatgaattacgaagg

SEQ ID NO: 735192 - DNA, 82 bp, Homo sapiens
gcttccccatcatcgccagctgcacactcttggggctctacctctttttcaaaacataaccagtgcggtgcaatccaagcga

SEQ ID NO: 735193 - DNA, 75 bp, Homo sapiens
ctcagattgaggaaacaatggaagaggtggctcgtaagttggtgatcattgaaggagacttggaacgcacagagg

SEQ ID NO: 735194 - DNA, 98 bp, Homo sapiens
cggagactttggggcctaactaggtaagttcggggagacttcaggccagggcagtctcctgtcttctcttggaaaccacagcagcccatgcacacaga

SEQ ID NO: 735195 - DNA, 80 bp, Homo sapiens
cggagaaggatgacaccggagtttgacgaagaggtggtttttgagaacgcgtatcacaatgtgactgcagagcagctctt

SEQ ID NO: 735196 - DNA, 100 bp, Homo sapiens
gagcatctgccagatctgtggcttcaatcaggctgaggagagcacaggtgctgtttcaggtactgggaatatggcaaaagaacaaagcaaatgaaaatcc

SEQ ID NO: 735197 - DNA, 75 bp, Homo sapiens
gagccccttcctgagaagatcccaggaatggccttgatgaagatgacaggcatggccggggtcagctctttcagc

SEQ ID NO: 735198 - DNA, 96 bp, Homo sapiens
ctggaggcttagccagccccgcggagagcatgttacaccagacagctatattccatgccttgcagacctgtgcaaagcactatgggaagttatgct

SEQ ID NO: 735199 - DNA, 99 bp, Homo sapiens
ccgagaatgggaattctcttcactagaatatggagactgttcaatcaccaggacaggtgatttggcttctgcacagttaggaggagcaccaaaccgatg

SEQ ID NO: 735200 - DNA, 75 bp, Homo sapiens
atattcacagttcataaactttcctatttatgtatggagcagcaaggaaaatgtttcaacgtgcgcaagagttgc

SEQ ID NO: 735201 - DNA, 50 bp, Homo sapiens
gctggactggcaggcccgagggcgagaacactatggctatgcatcctcca

SEQ ID NO: 735202 - DNA, 88 bp, Homo sapiens
tccgtttcctggatgtgaacactcccaagacagctgggctgcgaccaatggaaacaaaggacattccagtagtgcaccagctcctcac

SEQ ID NO: 735203 - DNA, 76 bp, Homo sapiens
gtttgagtgcatcttctcaacaaccctaggaggaatgatgagaagacagcagctgattacaagattttaggtggtt

SEQ ID NO: 735204 - DNA, 82 bp, Homo sapiens
cgagggctgagttgtccgcgaggccccgcgctcaagccgccttctcctgccggtacctgaagcacaccctggaccagtacgt

SEQ ID NO: 735205 - DNA, 100 bp, Homo sapiens
ccgtgcgagaacagctattccacgagaggatccgcgagtgtattgatgcactgcgcaactctggtggcgatgggctggggcagatgtccttggagttcta

SEQ ID NO: 735206 - DNA, 75 bp, Homo sapiens
gaagacagagggttttcttttgagaggagctctacggtgactttgaagacttggaaacaggggacgtgcacaagg

SEQ ID NO: 735207 - DNA, 101 bp, Homo sapiens
gggggagcctcagcaggattgctgtgtgaaaaccgagctgctgggagaaggctgcgggcctctcgggtgcttcttgtcggcttgaaaggacttggggctga

SEQ ID NO: 735208 - DNA, 98 bp, Homo sapiens
gatttttagaactccacatttgagcaactagaagccatttgtgtcaaggtaacgtctggagaaacaaaaggtcaggaaaggccaatgctcctaccgac

SEQ ID NO: 735209 - DNA, 100 bp, Homo sapiens
agagactccttgggggtcgagcacataacggggttcgggtgtctcgtgtgtgaacatcacagctacagagggccggagctggagatgtggtctctgggag

SEQ ID NO: 735210 - DNA, 83 bp, Homo sapiens
ctgatggtaggaggcagtagttccccgcttcccttccgcgggagggagagttaggtgtccctggccagtgtccttccacctgt

SEQ ID NO: 735211 - DNA, 100 bp, Homo sapiens
tctagcacatcacctacactaccacggccacactcaccactccatggccacacagacattcttcttttggccgatgaaaaatttgacttcgatctttcat

SEQ ID NO: 735212 - DNA, 96 bp, Homo sapiens
ggctggtgtactccagcaacttccagtttggtgaggattcatcaacctccagtatgatgtctgtgaactttgatgttcaatcaaatcagagtgata

SEQ ID NO: 735213 - DNA, 90 bp, Homo sapiens
tggaaatacaaattatgattggaaggaactggaaaaggagtattttctgcattgcgtgctgttcctcaaaaagaaggattccttggattg

SEQ ID NO: 735214 - DNA, 100 bp, Homo sapiens
aaaataaactgacaataccaccggtggtcctagcgcacaatactaatcagacagcaccagttgcccttgaagcagaaaacagaggtgaaatgaaactagc

SEQ ID NO: 735215 - DNA, 96 bp, Homo sapiens
tcaccaccccggatggagaagatggaatttcatctacgtcttccacacacttggcaatttctaaaccgggatgacattggcatcatcctcatcaac

SEQ ID NO: 735216 - DNA, 83 bp, Homo sapiens
cagacaccgcctacaggagtatgatgcaaggtgcaaggaatatgtagagataattccactatcaaagactgtatatacatttt

SEQ ID NO: 735217 - DNA, 75 bp, Homo sapiens
agcccaggcataaaatcatctccatattctcaggcacagagaaagggaagcagctcgagagtgtcgtagaaagaa

SEQ ID NO: 735218 - DNA, 98 bp, Homo sapiens
ctgaaaattgtttcgtagcagagaacagctctttgcatccggagagtggacaagaaagtgtcattctattagaagaccatcccatagcaccagtgtca

SEQ ID NO: 735219 - DNA, 101 bp, Homo sapiens
cggcaaacactgctaaatttactaattgtacctgttgcattgttaaaccccatgctgtcagtgaagttaagatccttctattctacgtaatattttatggc

SEQ ID NO: 735220 - DNA, 100 bp, Homo sapiens
ccatgactactacgtggccctggctgtactgaacaccatcctcagcacaggcctctcctgctactccagacctgcagccagttacctactgcgagccggc

SEQ ID NO: 735221 - DNA, 100 bp, Homo sapiens
gatatcaggtggctggttataagtcttttggaggacgaacaactggagagtcttgcttcgttgcccaggctggagtgcagtgatgcaatctcggctccct

SEQ ID NO: 735222 - DNA, 100 bp, Homo sapiens
ggatgctgacactgacaactatactcatgatgttttcatgaatgttttttggaacgaagtggatgatgttcctcgctgtgggcatctacgccctctttgt

SEQ ID NO: 735223 - DNA, 80 bp, Homo sapiens
caggagcacggatgccccccggagccgcgggctggcagctggaggtcacagcagatctggcagagcggcggcgcatccgc

SEQ ID NO: 735224 - DNA, 75 bp, Homo sapiens
agggaaccctggtcaccgtctcctcaggcaatagccctctggaacaagacaattcatgtgagataagaaagaaga

SEQ ID NO: 735225 - DNA, 76 bp, Homo sapiens
ttcgacctggagctgggccaggccgtggagtgacaaaggagagcatgcttccagctggagctgagtccaagcacac

SEQ ID NO: 735226 - DNA, 74 bp, Homo sapiens
gggaaccctggtcaccgtctcctcagaatggcaggaccctgagttgatgagagacgtggaagcagccacagggc

SEQ ID NO: 735227 - DNA, 50 bp, Homo sapiens
gcaagaggttcctgggctctggaggtggcaagtgcaggcagctgtcccgg

SEQ ID NO: 735228 - DNA, 100 bp, Homo sapiens
ccaggctgcacaggtgctgtctcgatcgtcactgaagagggaaaaagttggattgttaaaagaagttatgaagattttcgggtacttgataaacatcttc

SEQ ID NO: 735229 - DNA, 87 bp, Homo sapiens
aaatgaatcagattatttggccttatggaactggtgaggtgaacagggatattgtgtcaggcctgaaatacgttcagcacacctaca

SEQ ID NO: 735230 - DNA, 73 bp, Homo sapiens
tcagccccccctccaacagaatcaggagtctactcttcatcttgtgttgagacttcgtggtggtgctaagaaa

SEQ ID NO: 735231 - DNA, 83 bp, Homo sapiens
gaggaaggaacgaggcaaggagctaaagcagcgtgcgttcagccctggggaagcgttgttgacgaccatggacatcatccacg

SEQ ID NO: 735232 - DNA, 50 bp, Homo sapiens
tcctcgagcagaacggggagaagggaagaaggagaaagggccaacccctg

SEQ ID NO: 735233 - DNA, 51 bp, Homo sapiens
ggatgtgaaaactctgttactgaaggtgtgagttcttgatacgaatgaaag

SEQ ID NO: 735234 - DNA, 83 bp, Homo sapiens
ctgcgtcctcatcgggcttatgttcgagggttcccttctggagaagagtcaccgggtttggttctgtttcccctttctgctcg

SEQ ID NO: 735235 - DNA, 50 bp, Homo sapiens
ctcctctatgctggacatcaaatttccagcatcttcatgatacagttaag

SEQ ID NO: 735236 - DNA, 74 bp, Homo sapiens
aacctccctcctctgtcagtcatggagcaaaagcaatggctgccatccggaagaaactggtgattgttggtgat

SEQ ID NO: 735237 - DNA, 100 bp, Homo sapiens
tcgaccattccaaaaaaatcggaacagattatggcctttgcaagcaaatgagtactcctctcctaaagaaagattacgttgatgaaaaagaacatcctgc

SEQ ID NO: 735238 - DNA, 100 bp, Homo sapiens
gagggcattggtgcccgtcagcagcagccatcagtggcctatgtacataccacgccgggtctgccttcaggctgggaagaaagaaaagatgctaaggggc

SEQ ID NO: 735239 - DNA, 75 bp, Homo sapiens
cccaacgacatcgatggcctggagaaggccattgcaaaccaaccctgggctcagaaacttatgtttaacagtcca

SEQ ID NO: 735240 - DNA, 75 bp, Homo sapiens
aagccttgggtttctttcttaaaggactgatttttagaactccacatttgagatccaaaggggctattctgaaca

SEQ ID NO: 735241 - DNA, 148 bp, Homo sapiens
gacctggttgctgctgggcgccttggaaccagcgtcagaaagaccctgctcctctgttctccgcagcctgatgggttccaggaagaagccctggccagacagccccggagatcaagcatctcctcctggggatgcccctcccttggaa

SEQ ID NO: 735242 - DNA, 75 bp, Homo sapiens
acattcaaaaactatattaaaaggaactggagaattgcatttgatgaagcaattgctgaattggatacgctgaat

SEQ ID NO: 735243 - DNA, 100 bp, Homo sapiens
tttgacgggctcctcaccgttgtcctgctgtgtactaatggtcacttgatgtgcgctggctgttttatccacctactagcagatgcccggctgaaggagg

SEQ ID NO: 735244 - DNA, 100 bp, Homo sapiens
ctcaccatcctcaacgaccggggcgtcggcatgctcacccgcctctacaacatcaagaaggtggataaatatttgaaagaaattcttcaagatttggtta

SEQ ID NO: 735245 - DNA, 99 bp, Homo sapiens
cttcacttccatcaaatggattcatcccaaaggtaatgcccatcgcttctggagggagaaaggaggatttgttggtattgaggaaaacggtgaaatcct

SEQ ID NO: 735246 - DNA, 74 bp, Homo sapiens
cctgaagagggaagacacgcggaaacagacaaatttacatgtattggagaccagaccagaagcccttctgaatt

SEQ ID NO: 735247 - DNA, 75 bp, Homo sapiens
acactcaagctgttgaaaatgagcagctgtcctcatgtctctccagcagtgaaactggaacgccaagctgaagaa

SEQ ID NO: 735248 - DNA, 100 bp, Homo sapiens
aaaaaggagagcatcttggacttgtccaagtacatcgacaagacgatccgggtaaagttccagggaggccgcgaagatgttttactgtgcctggctaact

SEQ ID NO: 735249 - DNA, 100 bp, Homo sapiens
agaaatcagaaaaacatttgggaggtgtctagcccagtggaccttctgaagtgtgatttggaaggaatcatgccaaatgttaccatcagcttgagtctcc

SEQ ID NO: 735250 - DNA, 88 bp, Homo sapiens
ccgcccgaccccgtcccgaccctggccgccccgagcggagcctggagtttaagctatgaagaaggacatccctcacactctgaaacag

SEQ ID NO: 735251 - DNA, 100 bp, Homo sapiens
tccaggccctgcctgccctgtgcctctgcgtgctggtcctggcctgcattgggggaaggacattccccaagaagggccaaacgtgtgtggtgcactacac

SEQ ID NO: 735252 - DNA, 95 bp, Homo sapiens
agaaaattgaaggctccaaatccttagctcagagctggaggatgaaggatcgggtactctttcggtaagtgagatgcatttagagaaagctctgc

SEQ ID NO: 735253 - DNA, 90 bp, Homo sapiens
tgaatttgcctgtatactctcgttctgcgacttataaaggaccagacaaatcaaattagtggttttgtgtcctgaatgacagctcatcta

SEQ ID NO: 735254 - DNA, 83 bp, Homo sapiens
tgcagctcaacttctaccagttcctcggggtgcagcagtgctgctcctgcctctggcacctgccgcagcccaggattcgactc

SEQ ID NO: 735255 - DNA, 97 bp, Homo sapiens
agcatagctattcctgttgatggtgatgaagacaggtgaaaggtgtagcagtcactcggcctacacccacagcatcgaccttgtgaacccagcgacc

SEQ ID NO: 735256 - DNA, 100 bp, Homo sapiens
tcgaggccgctttggcgccaaatcctgaggtgctcttacagcctgttccaagtgtggcttaatccgtctccaccaccagatctttctccgtggattcctc

SEQ ID NO: 735257 - DNA, 100 bp, Homo sapiens
acgctgatgaaataattcagtgtgacaattgtggcattacagtccatgaagcatgccatgatgatgtagttaagattgtgaatctagcttgcaaatataa

SEQ ID NO: 735258 - DNA, 74 bp, Homo sapiens
tttggatgtagatacgttagccagtttacttactgtccagactaccctcaagtttacatacagtgaaaaatacc

SEQ ID NO: 735259 - DNA, 100 bp, Homo sapiens
agaaagtgaaatcagaggagatgtaactatcggtcacggtctagatcacattctcgatccagaggaaggcgatactctcgctcacgcagcaggagcaggg

SEQ ID NO: 735260 - DNA, 100 bp, Homo sapiens
aaaataattgaaaaagatcttcaccaaagagtagctgcaatgtgaatggcaggatatgaagcaagtaagaggtgtcatcaatcttacagaagaagtgctg

SEQ ID NO: 735261 - DNA, 82 bp, Homo sapiens
tgctgatcgcctgggtggttgttggcgtgtccctgcagcgaaggatcctgatcaggatcctcatgaccagccaaagagaaga

SEQ ID NO: 735262 - DNA, 101 bp, Homo sapiens
aagacaaggaaaaggacaaggggaaatggaaggggcctccagggtctgcagacaaggcaggacaccccaaagtcttgtactaagtcttctaaaagctccac

SEQ ID NO: 735263 - DNA, 100 bp, Homo sapiens
gcagaacccgggagtaggagactcagaatcgaatctcttctccctccccttcttgatcgaagaggttcctggtgagctcatgcaggaagacctggcaacg

SEQ ID NO: 735264 - DNA, 100 bp, Homo sapiens
ggagaagggaggcagcctggtggtgggggacttcgagatcgcagccaagtacgatgaagttcgcactggcacctaccgccagctcttccaccctgagcaa

SEQ ID NO: 735265 - DNA, 107 bp, Homo sapiens
gagcctcagttggaagcagccgatccagcctgcggagcctgtggggcagttggaatcgaagcctcttaaaatggcagatgacttggacttcgagacaggagatgcag

SEQ ID NO: 735266 - DNA, 100 bp, Homo sapiens
agcgccttcgcgcgctcgcggaaccccgtggcttccccgacgcagcccagcggcacggagaaaggacaatggcgtctcttggccacatcttggttttctg

SEQ ID NO: 735267 - DNA, 99 bp, Homo sapiens
gccggaagcagaagctgggaaaattgaggagagtcctttcagtgtcgagacaatgcagatcttcgtgaagactctgactggtaagaccatcaccctcga

SEQ ID NO: 735268 - DNA, 75 bp, Homo sapiens
atcgagaccgcttaccgcatctggctggagccctgcattcgcggcgtgtgcagctctctatcaatatcagctcac

SEQ ID NO: 735269 - DNA, 100 bp, Homo sapiens
tgactgtacaaaggataataaactagttgagaagcagaacccagctgaaggactggtgatccatgctctagggcaatcatggcatcctgagcattttgtc

SEQ ID NO: 735270 - DNA, 112 bp, Homo sapiens
tgccacctgcaaggcagctgccgtccttgggatggcgcctccggcatggcggcggccgaggggcccggctacctcgtgtctccccaggcggagaagcaccggcgggcccgca

SEQ ID NO: 735271 - DNA, 60 bp, Homo sapiens
ctccggccgcctggctccccatactagtcgccgggctgtaatccccttgcacaaaccggc

SEQ ID NO: 735272 - DNA, 100 bp, Homo sapiens
gacgctgctgggtccgctgagcggggcgacccgagtgctgcttttgacacaaaaacggggttacgtgtggcagtgaagaagctctccagaccatttcagt

SEQ ID NO: 735273 - DNA, 95 bp, Homo sapiens
tggttgccggaagttgagcggcgatctcattcgtcggttcggatccaagccagttctgtggtcagcaaggctcccctctgggcaggccccctggt

SEQ ID NO: 735274 - DNA, 100 bp, Homo sapiens
tatgaggcaagctactcctttgaaaaagagtaaccaacgagtagacctttacaagtggaaagacggcagtggggaagttggcacaaccttacaaggccac

SEQ ID NO: 735275 - DNA, 100 bp, Homo sapiens
atttgatcctggggagtctgattcagatgacaactgtacagatgtcactgcttgggtgatggttgcagttttccaactcgccttgtggggatggatccag

SEQ ID NO: 735276 - DNA, 83 bp, Homo sapiens
attacagcagatcaagaaatccagctcaactgttcttgaagactaattagttacactggatatgctgctgttctttactttgg

SEQ ID NO: 735277 - DNA, 100 bp, Homo sapiens
aattgctcactggaaggatcataggtggcactcatgtctcactgccccactcagtcggtcctgaccgccagcctgtcgtacatggtggggatgatcgcca

SEQ ID NO: 735278 - DNA, 90 bp, Homo sapiens
gagggaaaatgaagaaggaacgatctcgtaagaaggattcatagccggatcgagctgggagatgtgacaccacacaatattaaacagttg

SEQ ID NO: 735279 - DNA, 100 bp, Homo sapiens
gcggtcatgtctcgctacacgaggccccccaacacctccctgttcatcaggaacgtcgcggacgccaccagcacgagtacacgagacaggattgagaaag

SEQ ID NO: 735280 - DNA, 140 bp, Homo sapiens
caggagtgttcgtgtcctctatggcgctgtcaataaagaacggcagtttgaatcggtgctgaacaggatcgagatgaccacagccacccctctgggggataccaccttcttctcactgaacatgaccaccaggggagaag

SEQ ID NO: 735281 - DNA, 50 bp, Homo sapiens
gtcttagcaaggctgtcatcacatagacccaaatgatttgtacattgtag

SEQ ID NO: 735282 - DNA, 87 bp, Homo sapiens
atttctataagaagacccccaaagaagacaaggaggctgcagagactgcaagtctggaagaacagctgcaaggatggggagaagtga

SEQ ID NO: 735283 - DNA, 74 bp, Homo sapiens
gaaatatttgatggtatacaaccaaaaaactggcgatggaatatgagaggagccctctggaaagaaaaggacag

SEQ ID NO: 735284 - DNA, 75 bp, Homo sapiens
ccaaaagtccattatgaaactggtatacactgaatatcctcgaagaaattggtggtggccagaaggtcaatgatg

SEQ ID NO: 735285 - DNA, 75 bp, Homo sapiens
agtgaagcaagttcacaaagaagtattaaactgtgaccccttatccctctggacagaatgcaggtccaaccacgc

SEQ ID NO: 735286 - DNA, 78 bp, Homo sapiens
gggagaccctgtgcccctaaatcgcggtccactgcgcgcgtcaggttaccataccacggtcttcggtgtgttcagtga

SEQ ID NO: 735287 - DNA, 100 bp, Homo sapiens
ctatattcttgtgtattctgttacatcaatcaaaaggattggcacagctgcactggccgttcaggttgtgggcagtaactggcccaagccccactacact

SEQ ID NO: 735288 - DNA, 101 bp, Homo sapiens
gtcggtcctgcagttcttttgtccccgggtagagaggaatggaaagcccaattcattaaaacagaaaggaagaagctcctgaactacaaggctcggctggt

SEQ ID NO: 735289 - DNA, 100 bp, Homo sapiens
attgactactgccacaattccgttagagatgtttatgattacttccgagctgtcctgcagcgtgatgaaagaagtgaacgagcttttaagctaacccggg

SEQ ID NO: 735290 - DNA, 50 bp, Homo sapiens
aagcagcgtgcgttcagccctggggtgtggccgacgacgatgccctcgct

SEQ ID NO: 735291 - DNA, 100 bp, Homo sapiens
cttggtcaccaaggaacagcaccggcaactcaaatctctgcaagagaaagtctccaagaaggagggttcattccatgatctgctccgtagagaaccaatg

SEQ ID NO: 735292 - DNA, 75 bp, Homo sapiens
aatatgctatgccaagctcagccccgaagtgcttcagatgtagaggaatttcttcacatggctcctggagaagtg

SEQ ID NO: 735293 - DNA, 100 bp, Homo sapiens
ccaagcacgtggtgaagggaaagcaggtgaccaaggaagaaaggcacattgttaaacctctctatgatagatacaggcttgtaaaacaaatgctgacaag

SEQ ID NO: 735294 - DNA, 100 bp, Homo sapiens
gtctgacatggaggatgatttcatgtgcgatgatgaggaggactacgacctggaagctctggaggaatatgtgaaaaaagtaaactctattcagatggta

SEQ ID NO: 735295 - DNA, 50 bp, Homo sapiens
tttggacagtgaaaaggcccttaaaaagccaaaacctattgatgtacaag

SEQ ID NO: 735296 - DNA, 50 bp, Homo sapiens
gtcaatcagagcgtcctgtgcgagcctggcagagagcaggtgtgtgatac

SEQ ID NO: 735297 - DNA, 57 bp, Homo sapiens
gatagaacccaactaggcgcaatttacgacatgaacagagaagtggtgaagactgac

SEQ ID NO: 735298 - DNA, 83 bp, Homo sapiens
tgtgaaaaacctgaagaagggacaatgcagatcttcgtgaagactctgactggtaagaccatcaccctcgaggttgagcccag

SEQ ID NO: 735299 - DNA, 82 bp, Homo sapiens
gcagatggcggatgccctgcagtacctgcagaaggtctctggagacatcttcagcaggatcagtttgacaacttagaaaaac

SEQ ID NO: 735300 - DNA, 100 bp, Homo sapiens
ccggtccgcccgtcggtctgcagcgcggctgagggctgacagatgaagagattgatatggccttccagcagtcgggcactgctgccgatgagccttcgtc

SEQ ID NO: 735301 - DNA, 75 bp, Homo sapiens
aacgtcttgcaacagtggccgcacgcataggttgtttttgagcacgttcactctcgcagtgtcagctggggctgt

SEQ ID NO: 735302 - DNA, 100 bp, Homo sapiens
aggactgactggggttctgagactccctgtcccggaccgcaggagtcagagtattcatcgaaaagaaagcacagctaacacttttaggaacagaaatgga

SEQ ID NO: 735303 - DNA, 100 bp, Homo sapiens
ccagcagattgtcctgtaatcgctattgacagctttaggcatatgtatgtgtttggagacttcaaagatgtattgaaaaatgccagctgtgggacaagga

SEQ ID NO: 735304 - DNA, 101 bp, Homo sapiens
aggaccatctacgagagcaaaatgattgaatacgatcctgaaagaagattaggcactcacctgccttgggatgagcagtggctgattgaatcactttctga

SEQ ID NO: 735305 - DNA, 98 bp, Homo sapiens
tacagtgcagtcttatcgaaggatgtgcatgaaggacagcctcttctcaatggaggaacagcacagcatgctgggctctggatttaaagctgagcgct

SEQ ID NO: 735306 - DNA, 50 bp, Homo sapiens
agacggtaacccgtgtgactttgactggcaatcatcctcttccagtggta

SEQ ID NO: 735307 - DNA, 98 bp, Homo sapiens
actacagtaaggctgaaatcattgaagtgcttggagtgcagaactgaaagagggcagctcagttctggcaccaaaccaaatccccaggtctactcgag

SEQ ID NO: 735308 - DNA, 100 bp, Homo sapiens
cgggagatgcggccgcttcgtcctctgcagtcaagacgctgggcgcgtcgaggactgggctggagcattggatttgctaaaggagcttaagaatattcct

SEQ ID NO: 735309 - DNA, 100 bp, Homo sapiens
gccctacgcccactgccacttgactggatgtatcttgtctacaccatcatgtttctgggtattccagttttctcatgggagcatcaagaggattttcgag

SEQ ID NO: 735310 - DNA, 98 bp, Homo sapiens
tccaggaggatggttctgtggtcgatgtgtctgagtctgtggaatgcaagtctgccgatgaagatgtcattaagtatgctgcaaaagagcaccagcag

SEQ ID NO: 735311 - DNA, 75 bp, Homo sapiens
tcgacaccctcgacttcttactgtccagcatcctttagaagaatccaggtgtaattacttcaagcctccaggatg

SEQ ID NO: 735312 - DNA, 50 bp, Homo sapiens
caggtgccctgcggacacgtgtgaaaagcatggcccagcacgtacataac

SEQ ID NO: 735313 - DNA, 74 bp, Homo sapiens
catcgctctcggcctcggcctcggcctccgacacgagagcccgagcccagcacattgtgccctgtactatatct

SEQ ID NO: 735314 - DNA, 75 bp, Homo sapiens
ccattggcaagctacaataatggggccagttcctccccgggcagaagaaatcaccattccagctgatgtcacccc

SEQ ID NO: 735315 - DNA, 100 bp, Homo sapiens
gtcaacgtcttgaaaggagtgcttatagaatgagaccatggcgagcccagggaaagacaattatcgaatgaagagctataagaacaatgctctaaaccct

SEQ ID NO: 735316 - DNA, 75 bp, Homo sapiens
ctcctcgccagcagccgtccggagccagccaacgagcgatctgaattctacaaacacattgtgctttctggaggg

SEQ ID NO: 735317 - DNA, 75 bp, Homo sapiens
cggcgactggacttacgaggagcagtttaagcagccggcacagtcttcactaccgtagaagaccttggctccaag

SEQ ID NO: 735318 - DNA, 98 bp, Homo sapiens
gttctctaggccttttagaaaacatgatgtcaagccctccaacatcctagtcaactcccgtggggagatcaagctctgtgactttggggtcagcgggc

SEQ ID NO: 735319 - DNA, 100 bp, Homo sapiens
cggggaggcagcgcgggatcccagcctcaggcgtgcgcggacggtgtgcgggtattactcagcacagaaattcaggagacacagacaagttcttccacga

SEQ ID NO: 735320 - DNA, 100 bp, Homo sapiens
gctacaaccagaaactctacccgtgtaatgttcaagctcagaaatgccttatgtggatcgtcagaatcgcatttgtggttttctagacattgaagaaaat

SEQ ID NO: 735321 - DNA, 100 bp, Homo sapiens
ccccgaagggaagaagctgccacgcaccttctgccagctgatcctggaccccatcttcaaggtgtataagctcctttatgcttcccgtctggcagattat

SEQ ID NO: 735322 - DNA, 75 bp, Homo sapiens
gaaatgggaatgtacacgataattaaagagtaaagttgtgctcaacggtgagcagaagtggcctatatcgctccc

SEQ ID NO: 735323 - DNA, 74 bp, Homo sapiens
tggaggtgtacgtggccatctgcaggaaaacgggccttactatacatcatatcccccatcaccagatttgtgac

SEQ ID NO: 735324 - DNA, 98 bp, Homo sapiens
tatggtcctgtaattgcacgtaaataacgtttcctgcacgctctcctcttcagctggaaagcgctccctgatcctcggttcaatgcagaagttgacca

SEQ ID NO: 735325 - DNA, 51 bp, Homo sapiens
ttcattggcgtttgagtcagcaaagaggctgaggggatctggcggtggagc

SEQ ID NO: 735326 - DNA, 75 bp, Homo sapiens
cacccaatggacagcatgcctcaccaagtcacatgacaagcagtctctgacattgacagagcctggacgttggag

SEQ ID NO: 735327 - DNA, 100 bp, Homo sapiens
caagaagggaggcagaggactccctagggtgggctggaacctatgggttggatggcaagcatgtggtgtttggcaaagtgaaagaaggcatgaatattgt

SEQ ID NO: 735328 - DNA, 90 bp, Homo sapiens
tctcatcttgggaatctgcgtcagaagtcactcgcagtcccgtcagcccaggtgaatccgccatactacatcccgctggttgagctggtc

SEQ ID NO: 735329 - DNA, 51 bp, Homo sapiens
ttgttgctgcctaccaggagaggaacgaggcatttcatccttcatgaagcc

SEQ ID NO: 735330 - DNA, 50 bp, Homo sapiens
ctctcacaagattctgtcataaggagctggcaaacagccctgactgtccc

SEQ ID NO: 735331 - DNA, 75 bp, Homo sapiens
agagcagttcccaggatctgcataaagatgattcgaaaaggtgtgttcaaagatcagcattttgatcaaaatctc

SEQ ID NO: 735332 - DNA, 101 bp, Homo sapiens
ggcggcgctgccgcctgaagtgcgggcgcagctggcggagctggagctggagctctcggagggttttgcactgattgcaaaaataaagtcctccgagcata

SEQ ID NO: 735333 - DNA, 82 bp, Homo sapiens
ccaagatctgtgctgaccacaggaattggatctactagtgcaggctccatctactctttgaagcttctgcccagcttgcatt

SEQ ID NO: 735334 - DNA, 76 bp, Homo sapiens
gaagggaagactccaggccatcacagggctcccacaggatcagaggctggggccaactggaaccattggcagctgc

SEQ ID NO: 735335 - DNA, 100 bp, Homo sapiens
cgtcaccgccgcccccccagacaagatggacaccgcggaggaagtgacctgaaaaaaatgtctggatttctagagggcttgagatgctcagaatgcattg

SEQ ID NO: 735336 - DNA, 82 bp, Homo sapiens
cttgcagctgcctacaaattcaagagtgaccagggatggtgagatcaacctacccaaagactactgcagcactgacttggat

SEQ ID NO: 735337 - DNA, 88 bp, Homo sapiens
aacagaatttcgtgaacagccttttatctccaagcggaaagaaagcggtccggaggcagcagtgtccacctttcagacccagttgcac

SEQ ID NO: 735338 - DNA, 100 bp, Homo sapiens
cggcagtggcggcgcgtaggaggcggtactctctgaagatggcagaagctcaccaagctgtggcctttcagttcacggtcactccggacgggattgacct

SEQ ID NO: 735339 - DNA, 100 bp, Homo sapiens
cgggaccgccgccgccgccgccaccatgaacccgagcaacttcccgagaagagaagaacctccaaggctttctggaacagcccaaggagaagtgggtgga

SEQ ID NO: 735340 - DNA, 82 bp, Homo sapiens
ctcaaggacaacctcggcctgagacaccggaggaccggctgtctgcttttctgtggagactgcgggttgcagacaccagcag

SEQ ID NO: 735341 - DNA, 119 bp, Homo sapiens
cgaccctcccgcagcctgcctttccttccccctcggaaaatggttcccactgccgggcgagacaatgcagatcttcgtgaagactctgactggtaagaccatcaccctcgaggttgagc

SEQ ID NO: 735342 - DNA, 110 bp, Homo sapiens
caatgtgctctttgcccctattatggagaaaggtgttccctagataacagtcttcactcctatgctgatttttctggtgccactgaagttattttggaagcagaattaag

SEQ ID NO: 735343 - DNA, 90 bp, Homo sapiens
gaaagatgccaccttctataacagaacagatcttgctgacgtcttgactgtgaacccggactcaccggcgtcggaccctacggttttcca

SEQ ID NO: 735344 - DNA, 83 bp, Homo sapiens
ctgcccggtgcccgaggaggcagccaagctcatggcctgccactgcgtgccacatggattaattgatgtatgttgagtttatg

SEQ ID NO: 735345 - DNA, 82 bp, Homo sapiens
tgatcctttgcagaaatgactacattagggctgaagaagatgcagagcagcctgaagctggtggactgtatcatcgaggtcc

SEQ ID NO: 735346 - DNA, 51 bp, Homo sapiens
gcctccaaaagtgctggcattacagctccttccgcttccagccgttcgagt

SEQ ID NO: 735347 - DNA, 82 bp, Homo sapiens
cgaaaccgtggacatgttccacatcctcacgaagcaggtccagaagcccttcctcagaccgttccgatgaagttaaattccg

SEQ ID NO: 735348 - DNA, 97 bp, Homo sapiens
agttagagagatatgcatatccagaggcctccagtttggttggcagagtggtgaccagctgaccaattggacggggctctttaatgtcacggatgat

SEQ ID NO: 735349 - DNA, 82 bp, Homo sapiens
ttaacccaggagaagcatttacaataagaagagaagatggacagtttcagtgcattacagatattgatgatgttaagaagtt

SEQ ID NO: 735350 - DNA, 100 bp, Homo sapiens
aggccgccgccgcctctccttgctgcagccatggaaaaaagcttgtggtgaaggggggcaaaaaaaagaagcaagttctgaagttcactcttgattgcac

SEQ ID NO: 735351 - DNA, 100 bp, Homo sapiens
ctcaggtttatttgtacaaatagcacaggagggcggcctccttctgagctcctgtcccctgctacacctattatcccagctgcctagattcagggaaagt

SEQ ID NO: 735352 - DNA, 100 bp, Homo sapiens
cggggcgaggaactacggttcgggccgagaccagcatctcagacatgtcgaaaaagatgttttgatccctaaaataatgagagaaaaggccaaagagagg

SEQ ID NO: 735353 - DNA, 96 bp, Homo sapiens
atggaatccaagggggccagttcctgccgtctgctcttctgcctcttgatctccgccaccgtcttcaggccagaatgtcgagtggtaaagtccact

SEQ ID NO: 735354 - DNA, 73 bp, Homo sapiens
ggagcctcacagctgtattcatgtggcttttccagaagcctgttaaaagcaaggtctccccacaagcaacttc

SEQ ID NO: 735355 - DNA, 75 bp, Homo sapiens
gttctggatgctagagtgagtgtgcccacctgcgtaagggggcagagacagcaatatttgctgtgctcacaagcg

SEQ ID NO: 735356 - DNA, 82 bp, Homo sapiens
gacgtcttgcctgtgtcccacttgttcgcggcctataggagccttcacgtaaatgggtccagtcatgcctcccagtaagaag

SEQ ID NO: 735357 - DNA, 75 bp, Homo sapiens
caattaaacactgcattgtgttgctgcagattgccaaatgattcgcctttgccagtctcatctcgtgtctgcttt

SEQ ID NO: 735358 - DNA, 99 bp, Homo sapiens
ggcgccgagaggccgtgcgggacgcgggcgccaggaccggccgaacgcagagagttgcatgctgagaatttgaaaaatgaagatgatgtagacactgga

SEQ ID NO: 735359 - DNA, 75 bp, Homo sapiens
cagctctcggcgcacggcccaggtgattgatatgcccgagcacaaccctggcaatttgggaggaacaatgagact

SEQ ID NO: 735360 - DNA, 100 bp, Homo sapiens
ggagcctcatctctctcctcaccctgctgtgactccaccacagggaccgcagatgttcatggactgcagcccacaggccctgcccatcgcatcagaggac

SEQ ID NO: 735361 - DNA, 75 bp, Homo sapiens
caagtcaattaccatcctttaccagggtgtatgcaacagcgttattgcaacaggctaacgaaaacagacaaaatt

SEQ ID NO: 735362 - DNA, 75 bp, Homo sapiens
ccaggaactcacagagtggattccgtttcatgatcaacatgggagactcccacgtggacaccagctccaccgtgt

SEQ ID NO: 735363 - DNA, 100 bp, Homo sapiens
tcacagtcaagttctacccgcctgatcctgcccagctgacagaagacatcacaagaacctctaaaatgcagacctccagctctagatctgtgcacctgag

SEQ ID NO: 735364 - DNA, 75 bp, Homo sapiens
tgactgaagaggaggtgcagatggcactttccaaagtggatgcctccggggagaatgccagctgatgaagaccga

SEQ ID NO: 735365 - DNA, 100 bp, Homo sapiens
tggagtcaagatggaggagtacgcgcgagagccttgggtgaggtggctttgaccccgggttgcccggccagcacgaccgaggaggtggctggacagctgg

SEQ ID NO: 735366 - DNA, 100 bp, Homo sapiens
ggttccacttccagcaacagctcctgcagcagtaccgagtgccccggggaagccattccccaccccccagtttgcagacctgacagacgctgctgcccgc

SEQ ID NO: 735367 - DNA, 75 bp, Homo sapiens
caacagccccttcgtcccaacattttgaaagcgaagcagaagccgtagaatcagcggcgagcctgttgaaagaac

SEQ ID NO: 735368 - DNA, 75 bp, Homo sapiens
actgaatcatgattttcaagcacttgctctggagggaagagcgatgggagaggttttgagagtattttagaaggg

SEQ ID NO: 735369 - DNA, 75 bp, Homo sapiens
gggctcagaatagcaccattgctgatatgatcgcttgctggagacctgctctattgcccttgtgggcaaatacac

SEQ ID NO: 735370 - DNA, 75 bp, Homo sapiens
gggctgcctcgccgcgtctcgccacgccattcgttcctggttaactcggaaacacatccagaggctgcatgcagc

SEQ ID NO: 735371 - DNA, 75 bp, Homo sapiens
gctgagagcatcccatatttaaagaaaaatcctcagatcatgtatctagaacaggagttagaaagcctgaaagct

SEQ ID NO: 735372 - DNA, 52 bp, Homo sapiens
cggtgacctccgtgcccagcagcagcaggagtacttgattcttcagaaaacc

SEQ ID NO: 735373 - DNA, 121 bp, Homo sapiens
ccggctccggcttctgctgttgctcttctccgccgcggcactgatccccacaggtatccgttacagcactgatgtgagtgtagatgaagtaaaagctttggcttctctgatgacatacaag

SEQ ID NO: 735374 - DNA, 99 bp, Homo sapiens
gctgcagatgctggtgttacctctcattgtctccagcctggtcacagatgtggaagatgtcaagtttgtgatcaactatgactatccaaacagctcaga

SEQ ID NO: 735375 - DNA, 75 bp, Homo sapiens
ctctcaaagtgctgggattacagctcctattaaggaaccaaaaaagttgatgcccaaaacatccctccccacagt

SEQ ID NO: 735376 - DNA, 95 bp, Homo sapiens
ccaagactgcctttctatttattttacctcagtataacattagcgtgcctacagcaggtgcagcggaactgctgcctgacgctctgcaacttcag

SEQ ID NO: 735377 - DNA, 100 bp, Homo sapiens
gtcaataaatggacaagaggatttccgatgttgatgaactccagaaggaaagaaaacagagtgctgtggctgaaagtttagaagagaagaatatggctaa

SEQ ID NO: 735378 - DNA, 75 bp, Homo sapiens
ccctctccacccctcgcctgctcatcaacaaggagaaagctggccaggaatcagagatcattgatttcttcctgg

SEQ ID NO: 735379 - DNA, 101 bp, Homo sapiens
caaaaacactatcccagggagtgcaagcttagagcgtctggccaagaatcagaggaagtgggcacacattctggcagttccgccatgagaacccccagacc

SEQ ID NO: 735380 - DNA, 100 bp, Homo sapiens
agctttgtggctgccgtcatcaccatcaccttcaatccgctctactggaatgtggtccagcctgatgagtgaagaggctaagcgaggagcacccaaccct

SEQ ID NO: 735381 - DNA, 83 bp, Homo sapiens
catcacagttgccctctgcacgggagcgcaggaggaacaaatggaaaggactagacattccaataggagctctgaacccaaaa

SEQ ID NO: 735382 - DNA, 75 bp, Homo sapiens
caagaagaatctagacagacaggcctttctagcgttgacagaaggctacgttggggccctgcacgagaatagaca

SEQ ID NO: 735383 - DNA, 75 bp, Homo sapiens
ggagggtagacctgtgggcacggacgcacgccactttttctctgctgatccagatatgaagatcaatgatgcaga

SEQ ID NO: 735384 - DNA, 99 bp, Homo sapiens
atgcatggcatcagaaaccctgatttgagccagacgtccaaagtgaaacctccgggtggacattcccctcagcttatcaagcaaccggttgtctcaccc

SEQ ID NO: 735385 - DNA, 100 bp, Homo sapiens
ttcagttcgccgatgggaaacccggagaccaaatccttggatgcatcatctgcagacatcagaaaagcatatcgtaagctttcactaactttacatccag

SEQ ID NO: 735386 - DNA, 75 bp, Homo sapiens
tgtcgctctttgtataacaccaagcagatgctgcctgcagaggttccctacttcagcaaagcgtggcagcgtgtg

SEQ ID NO: 735387 - DNA, 51 bp, Homo sapiens
ggagcaagtccgatggagaggctaagcgcgtcttggctgcccacaagataa

SEQ ID NO: 735388 - DNA, 101 bp, Homo sapiens
tccttgtcctccctctgcacaagaataactgaagtgaagtgatggactccgatttggagagtagtaagacgtgaaaggaatacacttgtgtttaagcacca

SEQ ID NO: 735389 - DNA, 100 bp, Homo sapiens
cggtgcgactgcgcagctcctcggcgcttcctcggtggcttccccgggtcgagcaaacaggttctaggcgcccacgaggtcccctcgaggaacatctttt

SEQ ID NO: 735390 - DNA, 83 bp, Homo sapiens
tgtgtgttaagtcatttgttaccaaacggagtcttcaagaacatatgagtattcacacagattcaattagcagagcctcacag

SEQ ID NO: 735391 - DNA, 76 bp, Homo sapiens
gatgttttaaaaaaactagaaatgtgttcagaaattaaaggtccacagaaggagtcacgtgaactggaaatttcag

SEQ ID NO: 735392 - DNA, 82 bp, Homo sapiens
ccgcctctccttgctgcagccatggagtgcgcgcggagccatggttatcatgtcggagttcagcgcggaccccgcgggccag

SEQ ID NO: 735393 - DNA, 90 bp, Homo sapiens
cgaagaggctggactcggattcgttgcctgagggtcctgatgaagaagctgttgtggatcttggcaaaactagctcaactgtgaacacca

SEQ ID NO: 735394 - DNA, 90 bp, Homo sapiens
cggtcatggagggagcaggagctggatccggcttccggaagtctccaaaaaaagttggtgatgacattgccaaggcaacgggtgactgga

SEQ ID NO: 735395 - DNA, 100 bp, Homo sapiens
tccagctgccctatcacctgccagctcatcacaaagagctgtggagtccaagtgtgactgccaagaggaatccagcaaagccaaaaagcccaagcatgta

SEQ ID NO: 735396 - DNA, 83 bp, Homo sapiens
caggaactcgactcagacgtggataaagataatcccgttacagaatgtctgaaggggacagtgtgggagaatccgtccatggg

SEQ ID NO: 735397 - DNA, 97 bp, Homo sapiens
tccggagttcctgggaccaagtgttcgccgccttctggcagcggtacccgaatccctataggagcgcctggaccatgctgctgagcgcctactggca

SEQ ID NO: 735398 - DNA, 109 bp, Homo sapiens
agcaatgctgtgtgctgctttgtatccaaatgtagtgcagctgctggagccagttctgcttctcggcaaggagcgatttgctggtgtagacatccgtgtccgtgtaaag

SEQ ID NO: 735399 - DNA, 50 bp, Homo sapiens
atcaaaggaccggacaaagaggagccatgaagtcggggggcacgcagctg

SEQ ID NO: 735400 - DNA, 75 bp, Homo sapiens
atttcccaagagcagcggaaaatgatccagtcacagctctatgtgcgccgtgtattcatcacagacgacttccat

SEQ ID NO: 735401 - DNA, 98 bp, Homo sapiens
ttcagtcactggtttgcagagtccagcaaacggggattcagcgtccgatcctttggaacagggactcacgtgaagcttccaggaccagctcccgacaa

SEQ ID NO: 735402 - DNA, 75 bp, Homo sapiens
tggtgaagtcggccagcctgagcaagcggaggacctacgccggcctgggtggattttcaagacacgaatgctcgg

SEQ ID NO: 735403 - DNA, 77 bp, Homo sapiens
ggtgatttctgcatttccatctgaggttcagttggaacattggaagaaggcattcaagaagaaagaaatgttaagga

SEQ ID NO: 735404 - DNA, 90 bp, Homo sapiens
cacttgagccacgtgcatgaaccaaacccacttcgttcaagacaggtgtttaagcgtgagacgtggtcttgtaacacagtggttaagaat

SEQ ID NO: 735405 - DNA, 119 bp, Homo sapiens
aaccgtgggagccgtcacagtgacacacaaacaacttacagacttccacaagcaagtcactagatgatgattattccccaccttctaagagacaaagaccaacgagccaccacagccac

SEQ ID NO: 735406 - DNA, 90 bp, Homo sapiens
cggctgactgcgactcgggagctccgggagcggcccgcgcagaaactcagccacctgtgacaaatttgagtgtctctgttgaaaacctct

SEQ ID NO: 735407 - DNA, 96 bp, Homo sapiens
tttgtgtgcaatgccccgggctgtggacagatttatgtgatcagtttggctgaaccccgtctgcccctgcagctggatgatgctgttcggcctgag

SEQ ID NO: 735408 - DNA, 51 bp, Homo sapiens
tgaagagggaagacacgcggaaacaggtttgttgataagccggggcccttc

SEQ ID NO: 735409 - DNA, 75 bp, Homo sapiens
tggaaggaggcgccctcaccgacatcgtcacccacaccaggcttgccgagggaccgagcttgatgatggcatcca

SEQ ID NO: 735410 - DNA, 100 bp, Homo sapiens
ccggcctggtcctggccccggagctgttgctggacccctggcagggatcccatgacagattctgttgtcacgtctccttacagagtttgagcggtgctga

SEQ ID NO: 735411 - DNA, 75 bp, Homo sapiens
ctgcagtcccacatcgaaggctgggaggagcgagaacccgagcagcgccatgagcaacactaccgtcgtccccag

SEQ ID NO: 735412 - DNA, 95 bp, Homo sapiens
gaatggagggctccgggcccaagtttgaggagaatctcacaaactatgatctctgcagcatttttcttggaacctctacgctcttggtttgggtt

SEQ ID NO: 735413 - DNA, 82 bp, Homo sapiens
atgagacagagttgcgaccgcgcggcagttgacatttggtcagttgggtgcatcatgggagaaatgatcaaaggtggtgttt

SEQ ID NO: 735414 - DNA, 116 bp, Homo sapiens
cccagcttgtgccctacatcatcgacctgcagtccatgcaccagtttcgccaggacacaggaggagagggcagtgagagataggaatctcctccaggttcatgaccataatcagcc

SEQ ID NO: 735415 - DNA, 100 bp, Homo sapiens
acgtcgtcatcgacttgtacaccgaagaacggccgcgtggttactgaagctaaaggagatgtttaactccaagtttggatctattcccaagttttatgtt

SEQ ID NO: 735416 - DNA, 100 bp, Homo sapiens
aaagtagaaaaacactatctcttctatgacggagaatccgtttcaggaaagtgtggtttattgacaatcatttacaatgccgaagagtgctgtagtgagc

SEQ ID NO: 735417 - DNA, 90 bp, Homo sapiens
cgagacatacaagtccaacctcaagatagcggagctgaagctgcgggaggcccccagccccaaacttgaagggtcaaagtgcaaagggca

SEQ ID NO: 735418 - DNA, 100 bp, Homo sapiens
tgagctacagagactgaagaggactcaggagcaaatcagtaattgcttagatgagtacgaagatgatgaagcagggcagaaagagcggaaacgagaagat

SEQ ID NO: 735419 - DNA, 100 bp, Homo sapiens
ttactaaccacgaccatcaaatccgtgtcggagtccttacagtactatggactacaaattttggaaaatgtgataaaaacaaggtggaagattcttccaa

SEQ ID NO: 735420 - DNA, 113 bp, Homo sapiens
cccaccttctttcttcagccgaggccgccgccgcctctccttgctgcagccatggagtgagaagccctaccactgcaactgggacggctgcggctggaagtttgcgcgctcag

SEQ ID NO: 735421 - DNA, 88 bp, Homo sapiens
caggagcgatggccgggatcctggagcactcggtcatgtacccggtggactcggtgaaggaaactaaatatattttgccaactttgga

SEQ ID NO: 735422 - DNA, 75 bp, Homo sapiens
gagatgactccttgtagctgatacttggcaaagatgtcactgagagaaaggcctaaagaatgtatttgacgaagc

SEQ ID NO: 735423 - DNA, 96 bp, Homo sapiens
ctactcctgcccagcgtggtggggcagcagaagctccagagcccagacttgcaggcgccccagcgggatcccagagaaggatctgcacagtgttat

SEQ ID NO: 735424 - DNA, 75 bp, Homo sapiens
tcctgggctcgagcgatcctcccacctcagtctcctgagtagctatgactacggactacacttgctgctttgaag

SEQ ID NO: 735425 - DNA, 75 bp, Homo sapiens
actcaagagcaatcagtaccatctgattcacaagtgaggctgctgccccagtttcatggatgctggcagaagact

SEQ ID NO: 735426 - DNA, 75 bp, Homo sapiens
aaagaatgccacagaatcaggggaggcatgcttcaggtgtggtgcttatttccctggcactatgtgcagatgccg

SEQ ID NO: 735427 - DNA, 100 bp, Homo sapiens
ggtaacatacatggaggcatcagcaaagattaggatgaatgtagatcaagctttccatgaacttgtccgggttatcaggaggacattcctgctcttgaaa

SEQ ID NO: 735428 - DNA, 82 bp, Homo sapiens
caagttcctgacagcctggaacaacgtcaagtacgagaccgagcggcttctgacccccaaccccgggtatgggacccaggcg

SEQ ID NO: 735429 - DNA, 86 bp, Homo sapiens
aggtctggacactgaaaccaccgtggaagtcgcctggtgtgaactgcagccttcttctggtcatgacagaagggaaaaccttaatt

SEQ ID NO: 735430 - DNA, 97 bp, Homo sapiens
agattctccggggacccttccgtatctgcctaggcattttgctgtctcctcctaatacggtacagcaatcatttgaaactccaagggccaaagctca

SEQ ID NO: 735431 - DNA, 98 bp, Homo sapiens
gatttttatattcccaggactattttatcttaaacttagcagagaggattttctgtcatggaaaaagcttggggcagcttggatcttaaaagcaagag

SEQ ID NO: 735432 - DNA, 82 bp, Homo sapiens
ccttttcgtttccggaaacatgcttgctatggcatcgttcaggtgccaacgggaccctggttctgccggaaatgtgaatctc

SEQ ID NO: 735433 - DNA, 90 bp, Homo sapiens
ccgagacattctggatggcagaggtggcatctctggtaggccgccttttgcagcagttagcaatgactggctctgaagagggagatcccc

SEQ ID NO: 735434 - DNA, 101 bp, Homo sapiens
tggatacccagtactacaatggcaagatccacgcgaaactcgaactatctaccagtttcattacaagaattggccagaccatgatgtaccttcatctatag

SEQ ID NO: 735435 - DNA, 99 bp, Homo sapiens
caaggagtcacggatcggattcctcagctacgaggaggcgctgaggagagtatccatatattcctgcacatattacaaagcctaaggaacataagaagt

SEQ ID NO: 735436 - DNA, 75 bp, Homo sapiens
ggactgcttcccaagctcactgcactcctagatttgtcccatcagatgaaaagaagaaacaaggttgtcaacgag

SEQ ID NO: 735437 - DNA, 75 bp, Homo sapiens
tggccagcgctgctggcgggcgttagggagtctactcttcatcttgtgttgagacttcgtggtggtgctaagaaa

SEQ ID NO: 735438 - DNA, 75 bp, Homo sapiens
tcccgagtagctgggactatagaatacagtcgctttgaatcgaagatacatgacttacgagaacaaatgatgaac

SEQ ID NO: 735439 - DNA, 103 bp, Homo sapiens
ccagctctgcgccgatctatgcacgcagatgctggagaagtccccttatgaccagcgcaaatctgtccaaggctgcctggggagcattggagaagaatggcac

SEQ ID NO: 735440 - DNA, 118 bp, Homo sapiens
gtctgcgttgctcttgcttttcctcgctggggtgtacggtccgtaaaagccctgggctcagccagagcagggcagaggatgacgggatgaccagctgcagagaggagtactctactga

SEQ ID NO: 735441 - DNA, 97 bp, Homo sapiens
gggcagacctagcaaattgcgtcagagcaatcctgaattttgtcccgagaaggatgatgactttgagttcactggcagccacctgacagtaaggaat

SEQ ID NO: 735442 - DNA, 101 bp, Homo sapiens
gtgaaactctatgacattgagcaacagcagataaggaacgccctggaaaacatcaggtacaaatgatgcaaaatgtgcacctggctccagagacagatgaa

SEQ ID NO: 735443 - DNA, 100 bp, Homo sapiens
ccagacgaagacagtccctggatcaccgacagcacagacagaatccctgctaccataattcgccaaaatgacgaacacaaagggaaagaggagaggcacc

SEQ ID NO: 735444 - DNA, 96 bp, Homo sapiens
ccgccgtccccgggaaaacgttcgtcaacatcacggcaggggtgtggggaagaacgaggaactgcgtctttatcaccatctcttcaacaactatga

SEQ ID NO: 735445 - DNA, 98 bp, Homo sapiens
ccccaacgccccggagccgccggccgctagcgtcagcgccagccagatcatctctgaaagtggtgaaggcagcagcccaggtcttgaatacattatgg

SEQ ID NO: 735446 - DNA, 75 bp, Homo sapiens
ttgtacagcgccggtcaacatcgcggtcatcaagtactggctgaaatctctttaatgatggagggaagcaggcag

SEQ ID NO: 735447 - DNA, 100 bp, Homo sapiens
tctggtccctgctcttccacttcaaggagacaacggccacacactgtggggtggtaaattcactccagcagcaacctcaggctgcatccccttcagtacc

SEQ ID NO: 735448 - DNA, 83 bp, Homo sapiens
ccgcgcggagcgccccttcgcgtcccctgcaccatgagctggggcaccgagctctgggtgagcgagtgctgtgctttcatggg

SEQ ID NO: 735449 - DNA, 98 bp, Homo sapiens
ctgctcgccgtccccgccatgctgtctctagactttttggacgatgtgcggcggatgaacaagcggcagattctactctgctactcaagtagtggtca

SEQ ID NO: 735450 - DNA, 100 bp, Homo sapiens
cagaggcttgaagtgtggggagaacttggtgagcaccggcagcaccagtgtgtgaggggagcaggcagcggtcctagccagttccttgatcctgccagac

SEQ ID NO: 735451 - DNA, 100 bp, Homo sapiens
ggaggccttccagctgtttgaccgaacaggttctcatgaacagcgagaagaagtgtgaagttctgtgcagccagtccaacaagccagtgaccctgacagt

SEQ ID NO: 735452 - DNA, 82 bp, Homo sapiens
ttcaaagtccttgagctaagaacacagtcagatggcagttggaattgatcacaccttttcagttgtacttcaatcctgaatt

SEQ ID NO: 735453 - DNA, 51 bp, Homo sapiens
actatattaaacatcccctacagaacagtatgacttctctttggaaaagaa

SEQ ID NO: 735454 - DNA, 100 bp, Homo sapiens
ggaatgcctgtcgaggtggtgtggcggcttatttggcctccccaggacggactggagcatcagtagtgcctgagttcatcaaaggacagatgctcaagac

SEQ ID NO: 735455 - DNA, 75 bp, Homo sapiens
tccgagtctccgccgctgcgggcccgctccgacgcggaaggtgtcagttgtacccgaggcgttctcagcagcagc

SEQ ID NO: 735456 - DNA, 50 bp, Homo sapiens
aggaggccctgctggtttctgtgcggcatgttacaccagacagctatatt

SEQ ID NO: 735457 - DNA, 82 bp, Homo sapiens
gtggtggtcggatttcaccacaagaagggctgccaggttttgggatttgagattgacgcggtgaactctgtccagttttcaa

SEQ ID NO: 735458 - DNA, 90 bp, Homo sapiens
gttatcaacttaaaagatgccacctctaagaatgaaacagtgattcagagtgcatataaaagcctcatacaacacttggaagaaataagg

SEQ ID NO: 735459 - DNA, 100 bp, Homo sapiens
atctgcgaagtggttgagaagcctgtacctgttttatacttgcttttgcttcagcgttctgtggttgtcaacagattgcagtccccctcctgaagagtcc

SEQ ID NO: 735460 - DNA, 101 bp, Homo sapiens
gtctcatcttcttcaagataacttgccaaaatctgacacttcctccatggcccatctatcgccggcatcctctcaagtggttacctgttcaagaatcaagc

SEQ ID NO: 735461 - DNA, 90 bp, Homo sapiens
gcacttcaatttggaactgtctaaggccatggttttcatggatgtaaggatgcccaagacctataaaaggcatcaccaagcccagtggac

SEQ ID NO: 735462 - DNA, 50 bp, Homo sapiens
aaactacagccaccacacacaaggacaatgtgttgaacatcattaaccag

SEQ ID NO: 735463 - DNA, 83 bp, Homo sapiens
cagtgactgctattgaaccaccaaaagtccattatgaaactgaataccctctaccatctgctttggtcagggtgccgctcgag

SEQ ID NO: 735464 - DNA, 83 bp, Homo sapiens
cccagaccctggagcctcagttggaagcagccgatccagcctgcggagcctgtggggcagatggctgtatgggcgaaaaagat

SEQ ID NO: 735465 - DNA, 100 bp, Homo sapiens
cttagggaagctgagctaaggaaacagagggtgaggaattttaaattggaacaagagcaagaaaaaaacaaaatcttgtcagaagcactggagacgctgg

SEQ ID NO: 735466 - DNA, 104 bp, Homo sapiens
cgaacaagacatgctgcctgccctgtgcttgtgggctgcaagtgggagtttgtcctctcacttctggagaagatgcagacacaggagatcctgaggatactgcg

SEQ ID NO: 735467 - DNA, 98 bp, Homo sapiens
ggcaaccgagggacccgcgtccagactgaggctgatgtgaatccaaaggcctatccccttgccgatgcccacctcaccaagaagctactggacctcgt

SEQ ID NO: 735468 - DNA, 75 bp, Homo sapiens
ggtcaggaggatgcaagtcctgacagattcagcaacactctgattgggcagaaagtggcccatgctctggcagag

SEQ ID NO: 735469 - DNA, 83 bp, Homo sapiens
agaagctgctgcgctgctcgcgttgacaatgcagatcttcgtgaagactctgactggtaagaccatcaccctcgaggttgagc

SEQ ID NO: 735470 - DNA, 89 bp, Homo sapiens
tttctttctcgctgatcgcctaacttctactgacgaagcttggaagttgcagaaggatctaagcctttcccacgttatggttataaacc

SEQ ID NO: 735471 - DNA, 50 bp, Homo sapiens
cagagaccttgtcatcgaggccctgcgggaccctatgtactcggaactgg

SEQ ID NO: 735472 - DNA, 100 bp, Homo sapiens
tctcatttggaagacagtgaatcagcagcattactttgctgtgaatgtgaagaatcagaaatctttactgattccaatgctctgggaaccacccttctac

SEQ ID NO: 735473 - DNA, 100 bp, Homo sapiens
gaggaggggccccagcagcccccgaaggccctatcaggacatggagtatgaaagacgcaaaccagtccagctacgggggcccagccagccagcagctgag

SEQ ID NO: 735474 - DNA, 100 bp, Homo sapiens
ttcgcatcaacacggggggcaggaaggcatggaagaggagatggttcgtgttacgcagtggccgtttaactggagatccagatgttttggaatattacaa

SEQ ID NO: 735475 - DNA, 96 bp, Homo sapiens
atgaattggagaccattccaaatctgggaccagtctcggcaaatattacacttctctccttgcagcctgcttctgcaaagtggtacgatcgaaggg

SEQ ID NO: 735476 - DNA, 100 bp, Homo sapiens
cccaggaagccagagccacacacaccatcatggtcctggtccagccctgctgggagttttctgccacacagatttgcggaagaacctgaccgtggacgag

SEQ ID NO: 735477 - DNA, 50 bp, Homo sapiens
ttacctacgttggcggccccagaaggtgaaaggtgtagcagtcactcggc

SEQ ID NO: 735478 - DNA, 90 bp, Homo sapiens
tacctctggccccgagatcagaatgccgggccatcgatgcacccctcggagctaatagcggagatgagaaacagtgggtttgcactgaaa

SEQ ID NO: 735479 - DNA, 100 bp, Homo sapiens
cttttcctcttctgaacatgcacccccagcagccaccagcagaaaccagcctggacaccaagtctgtgtcagaaggccacctcaagaggaacatcgtggt

SEQ ID NO: 735480 - DNA, 83 bp, Homo sapiens
agagaacacaagaagtgctttaagaggccaaatttgagtttcatcatggtgactatgaaaaacagtttctgcatgtactgagc

SEQ ID NO: 735481 - DNA, 83 bp, Homo sapiens
cttcgatgtatctaaacttggcaccaagtatggagctagagttaatgccaaagacagcaaatggttgacacctttacacagag

SEQ ID NO: 735482 - DNA, 75 bp, Homo sapiens
gaggctcagcggctcccaggtgcgggagagagaacagtccacaggaagaggttgaactaaagaagttgaaacatt

SEQ ID NO: 735483 - DNA, 116 bp, Homo sapiens
cgagctcgatccgctgctcgcacgggagccagctgggtgcaaatggttatgagccttagagtttctgaactccaagtactgttgggctacgccgggagaaacaagcacggacgcaa

SEQ ID NO: 735484 - DNA, 82 bp, Homo sapiens
cccgggcggattccagccccgagcgggacagcgcggcggggagcgacgagttgatgaaaagcccagaaccttgatgacagat

SEQ ID NO: 735485 - DNA, 111 bp, Homo sapiens
atgtgctattctatacttggaccgtttttccccaaagagacgttggaacttgccaggaatccagcaatgatgcaggagatgatgaggaaccaggaccgagctttgagcaac

SEQ ID NO: 735486 - DNA, 90 bp, Homo sapiens
aggatgcaccttcccctgccttggaaaggggcaagattcttgccaagagaattaatgtgcgtattgagcacattaagcactctaagagcc

SEQ ID NO: 735487 - DNA, 100 bp, Homo sapiens
agatcttcacagcacagttcctgggaaggtggagccaccagcctctccttggctccgtccatgccacatcggtagcagcctcaagagtggagcaggcact

SEQ ID NO: 735488 - DNA, 98 bp, Homo sapiens
tcgcgggagcctttggggcaccacagagatgcggactgctcactagaagctcagcccaaatatgttagaggtgggaagcgttacggacgaaggtcctt

SEQ ID NO: 735489 - DNA, 97 bp, Homo sapiens
aaagctgggcctgcgtgagattcgcatccacttatgtcagcgctcgcccggcagccagggcgtcaggtgagagaacgccgagccgtcgccgcagcct

SEQ ID NO: 735490 - DNA, 71 bp, Homo sapiens
ggactccggagccgcacaaaccagggctcgccatgaagccaggtgaccaaaagccagccccactgtgagtt

SEQ ID NO: 735491 - DNA, 100 bp, Homo sapiens
aaataagaacaaagtgacaccactgcagagtgaacagagtatctgtcaggcaagagctgctgtgatggtttatgatgatgccaataagaagtgggtgcca

SEQ ID NO: 735492 - DNA, 50 bp, Homo sapiens
cagtgatttacaatagagcaagatacagccccaagagcccctcgctacag

SEQ ID NO: 735493 - DNA, 75 bp, Homo sapiens
attggccctccagatacactttaatgtgagaagggtgttatgtctctagtgaatgtcaggaactgtattcgcttc

SEQ ID NO: 735494 - DNA, 100 bp, Homo sapiens
cagaactaaagaaagctttaaaagaaaaagaaaacagattattattgcaacaaaggagtcagtggatcggtggggaaaatgctgcttaccctgggccctg

SEQ ID NO: 735495 - DNA, 129 bp, Homo sapiens
agacaggatggtaacgaagccgtcggaggattcttctctcagattgggcagctgtacatggtgcaccatctttggggttggatggcaagcatgtggtgtttggcaaagtgaaagaaggcatgaatattg

SEQ ID NO: 735496 - DNA, 96 bp, Homo sapiens
cggctagcaagttcaccagcatccctgcagccttctggtataccatcgtcaccatgacaacactaggaaatcatagcccactaatgagttttggag

SEQ ID NO: 735497 - DNA, 83 bp, Homo sapiens
cgcatacattcaccaggtgacggtacagaaagcgtcaaatcatgtttccagaacatggagatctgcaagcgtcgggtgaatat

SEQ ID NO: 735498 - DNA, 99 bp, Homo sapiens
gggactggaaccatctcagaagccatgcccctcaggctggaacttgccctgtctcctcgcagatgagtcagagcaccataacatggtgtgggaagtgaa

SEQ ID NO: 735499 - DNA, 82 bp, Homo sapiens
ttgggaagacaaacgacgctctgaaatttggctcccagatggtgggcagtggtggtgctggctgcgttcccctccctagggg

SEQ ID NO: 735500 - DNA, 75 bp, Homo sapiens
cttacgtctgcggaagtgcagctgcctcagttcttagcgcaggttcttacaggagttgcaggagaagatgcagag

SEQ ID NO: 735501 - DNA, 74 bp, Homo sapiens
ctgcatggaaaacccaattactcagcaggctgctggcaaaggggacgtcccaacgaagagaccacctgtccttc

SEQ ID NO: 735502 - DNA, 90 bp, Homo sapiens
ggaaattgaagttgatggcttcctcttccccaagaactttgtgatggacgcctctgaccccacccagctctctgcatcctgtgtgcagct

SEQ ID NO: 735503 - DNA, 98 bp, Homo sapiens
cagcatgaaggacatgcgcaaagttctgagaacattacagcagatcaagaaatccagctcaagctttcaacagacctcacatctttcttcttatgaaa

SEQ ID NO: 735504 - DNA, 101 bp, Homo sapiens
taatcatagactttcgacattggagtgcttcattaccacgagataggcaatacgaaagatggagtcttgctctcttgcccaggctggaagtgcaatggtgt

SEQ ID NO: 735505 - DNA, 80 bp, Homo sapiens
ccaaatggataaatgctcgattttcaaaggctgatcagttgatgttcgctttgcattttgttcgaggcatgcatcctgaa

SEQ ID NO: 735506 - DNA, 75 bp, Homo sapiens
tccggatcaatccagatggcagccagtcagtggtggagggagaagcagaatttgcccgcatcatgagcattgtgg

SEQ ID NO: 735507 - DNA, 80 bp, Homo sapiens
ccgtccgccgccaccacccactccggacacagcctcccgcgacgatgcccctcaacgttagcttcaccaacaggaactat

SEQ ID NO: 735508 - DNA, 76 bp, Homo sapiens
actgatatctcaaaaggtgatctggacaaaggaacaggtatctcagggcaccatgccggtggaaaggatgcgcatg

SEQ ID NO: 735509 - DNA, 75 bp, Homo sapiens
ggcgagcctctcagccggccgggatggctaccacggccgagctcttcgagatctaagctggaaccagaaccaaat

SEQ ID NO: 735510 - DNA, 100 bp, Homo sapiens
tcactcggctggtgctgagccccgacgcccctgacagggccacgcacctgatcgccgcgcgagctgaacactatggctatgcatcctccaacgtcagccc

SEQ ID NO: 735511 - DNA, 75 bp, Homo sapiens
cctaccattaagatttttggatccaacaaaaacagaccagaagattaccaaggaaaatgtttcaacgtgcgcaag

SEQ ID NO: 735512 - DNA, 51 bp, Homo sapiens
ggacctgggcggaggccgccaagacgaggagaattctgcctaagccaactc

SEQ ID NO: 735513 - DNA, 80 bp, Homo sapiens
cggggacgctgctgcagcacctgcgccagttccatgccattgcagtgtcaactaggcctcagttacttttcagtttgccc

SEQ ID NO: 735514 - DNA, 97 bp, Homo sapiens
gggaccgagcctgggaggccggccggtgccagcacctttcggcttctgagacggcggcagcagcggcattcaggcatctagtatgattgaagaatta

SEQ ID NO: 735515 - DNA, 50 bp, Homo sapiens
cgtctctttgagtatggccaggaattcaattcgtcataatctgtccctac

SEQ ID NO: 735516 - DNA, 83 bp, Homo sapiens
ctcagttggaagcagccgatccagcctgcggagcctgtggggcaggttcctgctccagcgtggctcctggactggcgccagat

SEQ ID NO: 735517 - DNA, 101 bp, Homo sapiens
gcagtgagcaccttttggcccaatgaatatcagatcggacagctggcttttaaaggaatgaagagactcaatagaatccagtcaatagtgtttgagactgc

SEQ ID NO: 735518 - DNA, 98 bp, Homo sapiens
gtctggtttgatcacaagacgggcaagaaatacaggtatcaggatgaagatacacctcctcaagagcatatttccccacaaatcacaaatgaagtgat

SEQ ID NO: 735519 - DNA, 100 bp, Homo sapiens
cctaaacagtggactcaacttcaaagacgttctcaaggagaaggcagacctgggaattttggagagtaaaaggctgaaccttgttaaagagaaaaccatt

SEQ ID NO: 735520 - DNA, 83 bp, Homo sapiens
ctcggctcctgtcgtccgttctctcaggctcccgttcaggttggaagtactccatgacacacactcggagaaagtcccttccc

SEQ ID NO: 735521 - DNA, 90 bp, Homo sapiens
ctaccccactcctgggccgtccctgaagccattcattctactattcatctgttgaagctgggcagccctccaccacacaaagaagcccgc

SEQ ID NO: 735522 - DNA, 100 bp, Homo sapiens
ctggaaaagaccctcttcagacttgaacaagattgcttccaagtatgatcatcaggcagaagaagatcttcgcaattggatagaagaggtgacaggcatg

SEQ ID NO: 735523 - DNA, 98 bp, Homo sapiens
ccagaacatgatgtttctggtatcagtgacccctttttgcagatgtcatatcatagagagatttagtgaaagtcgccagccagatagtactgtgaatg

SEQ ID NO: 735524 - DNA, 75 bp, Homo sapiens
aagttgcgaaggatccccaacggggaggccaacgtgaagaagctgctctttggcgtaaattgcaatcgattaggg

SEQ ID NO: 735525 - DNA, 101 bp, Homo sapiens
gtcggactcccgcggcgggaggagcctgttcccctgaggagcaatttacagcaatgagggatttatacatgaaaaatggacaaggatttgcattagtttat

SEQ ID NO: 735526 - DNA, 98 bp, Homo sapiens
cacaatggacatccggacaaagagtcaaggtggggagccaacatacaatgtggctgtcggcagagctggtagaggtgctggagaatctggtaaaagca

SEQ ID NO: 735527 - DNA, 100 bp, Homo sapiens
ctctcgggaagagatagatcatgcagagtattacctttacaaagctaccatagaggaggcatactccaggtcaatgacaaaactagcaaaatctgcaagc

SEQ ID NO: 735528 - DNA, 82 bp, Homo sapiens
ggcatggcacattacaacttcaagaaaattacggtggtgccgtccgccaaggaatgtatcctgtcaggtataatgtcagtga

SEQ ID NO: 735529 - DNA, 96 bp, Homo sapiens
atttgtatagagatgtgatgttggagaactacagaaacctggtctccctagtcaccaggagactaaagtccatcaaaaacatccagaaaattacca

SEQ ID NO: 735530 - DNA, 73 bp, Homo sapiens
ggtatgctatacctccggagcatggaaaacgacttgaaagactagctcaaggggcccagaagacacctgcttt

SEQ ID NO: 735531 - DNA, 100 bp, Homo sapiens
cttctcctggttaatcaagaattctctatttctgctccgtcatccatgccactcaaatgatgtgcttgcttttggaacattggtcagtacttccaatacc

SEQ ID NO: 735532 - DNA, 75 bp, Homo sapiens
ccgcgctccaaccgcctcctcctcctcagtaacgcgggtgtcagctgtgatgcatgtttaaaaggaaattttcga

SEQ ID NO: 735533 - DNA, 100 bp, Homo sapiens
caccaccggaaccagtgccagtactgccgtctcaagaagtgcttccgggtgggcatgaggaaggagggtctaccccgagccccggagcgagagcgagtgc

SEQ ID NO: 735534 - DNA, 98 bp, Homo sapiens
cccacctcagccttccaagtagctgggactacagacatgcgccagcacgcctggtacatcaggaacgtctctatcaagaatacaatttcagcaaggct

SEQ ID NO: 735535 - DNA, 82 bp, Homo sapiens
ggcaaggtgatccagcaaggtcggcagagcaaggggcttacgcagaaggacctggccacgaagaaagccccgcccccacctc

SEQ ID NO: 735536 - DNA, 89 bp, Homo sapiens
gtgagaagaagattaaattgcttactggtaaacgcgttcaactggcggaagacctcagtttatttcacagagcagtgtacattcttgtc

SEQ ID NO: 735537 - DNA, 51 bp, Homo sapiens
gttcgcggctctaacggggctttctacaagcaaccctgatctccggagaac

SEQ ID NO: 735538 - DNA, 73 bp, Homo sapiens
aatcatcacctccaaatactggtcccacgagtgatgacagacctaatgctctattaagttcacctgcaacaga

SEQ ID NO: 735539 - DNA, 90 bp, Homo sapiens
aaaggtctgaaggtgtcgggacctcttcatctgagagcactcatccagaaggccctgaggaagacatatgtagagtgtgtcggtcagaag

SEQ ID NO: 735540 - DNA, 75 bp, Homo sapiens
cacctcctctgatctacgaaagtcatgttacccaacaccggagcctcccctcccggaagtagaattttttacggt

SEQ ID NO: 735541 - DNA, 98 bp, Homo sapiens
agggtttttaatgaccacaacaagcaagcatgcagcttactgcttgaaagctgcaagctttcttcctggtggcagatgacatcatggattcatccctt

SEQ ID NO: 735542 - DNA, 99 bp, Homo sapiens
ccctgtttgagaaaaggcctaagaattttggcattggtagacgttacatccaagaggaaataatccaggcaaggaagcacaagctgatcaagatgtgta

SEQ ID NO: 735543 - DNA, 100 bp, Homo sapiens
cgagcctgggaggccggccggtgccagcacctttcggcttctgagacggcggcagcagcggcattcagggccaattcctgtccccccagcagcatggcat

SEQ ID NO: 735544 - DNA, 75 bp, Homo sapiens
tccagttctacctcagttcgattttatccacatgatgtgagaatggatcttggagaatgtctgaaagtccatgac

SEQ ID NO: 735545 - DNA, 74 bp, Homo sapiens
tctacctggatgaaaactacaaatcccaggagcacttcacggtctcctctgagcctccggcctccataagaccc

SEQ ID NO: 735546 - DNA, 83 bp, Homo sapiens
attctctcccaggccacaagacatttcctgctcggaaccttgtttactaattggctttgttcgcgggggtcacagctctcatg

SEQ ID NO: 735547 - DNA, 50 bp, Homo sapiens
gcagaatacagagatatggaatcagaaggacagaataacgggctcccaga

SEQ ID NO: 735548 - DNA, 100 bp, Homo sapiens
tcaaggatccttcaaataacttcaggggtcacctctgtccagtcagccagtcttaatcaccgtccagcggcagctaccacaggccatcaagcctgtcacc

SEQ ID NO: 735549 - DNA, 98 bp, Homo sapiens
tttagggtcctttatatagaagggagaacatgcagagcagttctttgaaactattctcaagttttgaacagaaagccatgctgttaaagcgccaggct

SEQ ID NO: 735550 - DNA, 100 bp, Homo sapiens
cggcgtccgcgcctaacggcgctgggctagtgctaggccacttcatagcttcggggatggtcaatcaggggaacccagtgcacctaagctcgaagggcag

SEQ ID NO: 735551 - DNA, 100 bp, Homo sapiens
gtggtaatcctgacgaaattgaaattacctccgagggaaacaagaaaacatcaaagaggtctagcaaagaaatggtggagtcaatgaagaaagtagcagg

SEQ ID NO: 735552 - DNA, 51 bp, Homo sapiens
gcggactctccccgcgatgatgccgtttggcttcatcaaacaagaatagga

SEQ ID NO: 735553 - DNA, 83 bp, Homo sapiens
cagcaatccaaaagagtctcaaggatccttcaaataacttcaggaattatatccagatcgagagacagaagattctgaaaggg

SEQ ID NO: 735554 - DNA, 96 bp, Homo sapiens
cctggctcggagcagcagcctctgagaataccctctaccatctgctttggtcagggtgccgctcgaggatttaaaagcaacaagaagaaaaccaaa

SEQ ID NO: 735555 - DNA, 82 bp, Homo sapiens
ccttgcgctgctctaatggtccggacttccgtgtaaaaatggctacaaacttcctagcacatgagaagatctggttcgacaa

SEQ ID NO: 735556 - DNA, 100 bp, Homo sapiens
ccagtgactgtgaggatcgcccctcctgacagaagattttcacgttctgcgatgaggagatgttaaagtaacccatcttgcaggacgacattgaagattg

SEQ ID NO: 735557 - DNA, 100 bp, Homo sapiens
ggcttcatgaagatggcgccagaacgaagaccctactaggcaaggcccagaataaagagaccagtgttttagctgctgcaaaagtgattgacactaaatc

SEQ ID NO: 735558 - DNA, 75 bp, Homo sapiens
atcattactcctccaacaccaatcatcccagacgacgccccgaccagtgcgcccagcgcccctcccagcacaccc

SEQ ID NO: 735559 - DNA, 82 bp, Homo sapiens
ccccgggcacctagagacggatggtcgcacgcatgattgtcggcatctcacagattgacgagatgcctgaggctgccgtgaa

SEQ ID NO: 735560 - DNA, 82 bp, Homo sapiens
agggggctcccgggtcatcagccactacgccgggcaggatgccacgacctgcctagagctggaacgttacctccagagcgag

SEQ ID NO: 735561 - DNA, 100 bp, Homo sapiens
aatccttgggtttgaagatgatgttgtgattgagtttatattcaaccagctggaagtgaaggacactttcttcatgagcaacaaaccccaaagatacaaa

SEQ ID NO: 735562 - DNA, 100 bp, Homo sapiens
taatgtcctcccctggatccccagtcatactgcagatgtgcaaccctagagaaggcaagcaggcaaatcctgatcctaactgttgtcttggagtatttgg

SEQ ID NO: 735563 - DNA, 82 bp, Homo sapiens
gtgaggctgcaacacgaggctgccgttcagcacccgtcgagcgaagctcttcgtgggcggtcttgactggagcacgacccaa

SEQ ID NO: 735564 - DNA, 99 bp, Homo sapiens
gacaagttctggaggagatgaaagctttgtatgaacaaaaccagtctgatgtcttcacagttgactgcaggcattcagctttctctggcatcatctggc

SEQ ID NO: 735565 - DNA, 98 bp, Homo sapiens
gagctgagagtcgggaacaggtaccggctgggccggaagatcggcagcggctccttcggagacatctatctcgggcgccctgcgtccggcagaggagg

SEQ ID NO: 735566 - DNA, 98 bp, Homo sapiens
cggacctgcggggctaagctggcacgtcacttccgactagtggagtttttagccttttaacattcaaggattaggtgaagactgatgagaagagtctg

SEQ ID NO: 735567 - DNA, 82 bp, Homo sapiens
agccgatccagcctgcggagcctgtggggcaggttctcccccatgggcgtcgatcacatgagcgggctctctggcgtcaacg

SEQ ID NO: 735568 - DNA, 83 bp, Homo sapiens
ctggtcttgggttcagcttggcaggaggagcagatctagaaaacaaggtgattacgacaatgcagatcttcgtgaagactctg

SEQ ID NO: 735569 - DNA, 100 bp, Homo sapiens
ttctcctcagggaagttttctggaagacacaacaggggagcagttcctcacttatcgctatgatgaccagaatgtacatggcaagtcaaagcaaacgatc

SEQ ID NO: 735570 - DNA, 80 bp, Homo sapiens
ctacagtacacacacgcccgcctccacaggattccagtggaatgacactggtgatgcttgccgccgccggagggcaggac

SEQ ID NO: 735571 - DNA, 96 bp, Homo sapiens
gagtgtctcctgatacccggatgtgaggcgatccgctggcgctagtctgaccctccgccaggcaaaaggaagcctcccggcgtgtggcctgccaac

SEQ ID NO: 735572 - DNA, 101 bp, Homo sapiens
ctggggaaaagggaagtgaaaagagatctgttttcaggtaaagtgttgagagaggagaaccagtgcattgctcctgtggtttccagccgcgtgagtccagg

SEQ ID NO: 735573 - DNA, 75 bp, Homo sapiens
aagaactgggagaaatcagggagaggcgaattgtgctggagaatctggtaaaagcaccattgtgaagcagatgag

SEQ ID NO: 735574 - DNA, 83 bp, Homo sapiens
cctcaacacgtccctaacttgtggaaacatgccctgaactgtcacagaatgaaaccagcgctcttcagcgtcctgtgtgagat

SEQ ID NO: 735575 - DNA, 107 bp, Homo sapiens
aaaaagttcaaaataaagcagcatcacttattcaggaaaatatgagagccacacccgtgttcacacaggtgagaagccctttgagtgtgatatttgtcaccagcgct

SEQ ID NO: 735576 - DNA, 74 bp, Homo sapiens
acattgtctcccaagacaacttcctcaccagcaccttacagagactaaggtgtcagtatgttcttcaagctgct

SEQ ID NO: 735577 - DNA, 100 bp, Homo sapiens
aagacatcaaccaattaatcataaatacactctgtttgttgcatattctaaggacccagacataggcttggtggcccgtctcttgtctttcctggtttat

SEQ ID NO: 735578 - DNA, 100 bp, Homo sapiens
ggttgccatagtgtctcgaaggagtagaagcacatcccagcttagtcaaacagattggccatctgcaagcttcccttctccgtggagagcaggaagacag

SEQ ID NO: 735579 - DNA, 98 bp, Homo sapiens
aaagcttgatgacattgaagagtttgagaacattcgaaaggacctggagcccagatggcagttacacagaggagcagagtcaggagagtgagatgaag

SEQ ID NO: 735580 - DNA, 50 bp, Homo sapiens
cagctttagcttgaggtttcaggtgcacaggtttcatattccagaaggtt

SEQ ID NO: 735581 - DNA, 98 bp, Homo sapiens
atcgcttaccctccgggggtaaaagagatcaccgacaagatcaccacggacgagatgatcaaacgcctgaagaatgcagtaatagtggccttgtcttc

SEQ ID NO: 735582 - DNA, 100 bp, Homo sapiens
tttgaaatcattatcagtggtcacagaagtctctaccaatggtgcttcagaagtttcatactttcagcaagcccttgtgattcgaaatggtgagaaaatg

SEQ ID NO: 735583 - DNA, 83 bp, Homo sapiens
ctgttctcgggctgtttggcggagacagcctggagctgttgcccaaagaattggaagtcatttagttccaactgctactttat

SEQ ID NO: 735584 - DNA, 51 bp, Homo sapiens
catggaaacacttaagaataaactgtgcagaagaccacgtggccttaaacc

SEQ ID NO: 735585 - DNA, 100 bp, Homo sapiens
aaaaacagctgaggagatcaaaccggagcagggtgagaagctgccccctgacttcatgccaaagctcgtcaagaatctcctaggcgagatgcctctgtgg

SEQ ID NO: 735586 - DNA, 97 bp, Homo sapiens
aagaagcaacaacttcttagagcagcaacaggaaaggaatatgtgtgtcttctgatcaaaatcatttccgaggagaaattgaggaaaccatcactga

SEQ ID NO: 735587 - DNA, 50 bp, Homo sapiens
tgcaaatcgctgggaacaagtctccgccgcatgcaagagatgattgcaag

SEQ ID NO: 735588 - DNA, 82 bp, Homo sapiens
cattaatgcaactaccattacactaaggcgcagttgtgtagcagttgagtaatgctggttagctgttaaggtggcgtgttgc

SEQ ID NO: 735589 - DNA, 80 bp, Homo sapiens
gaaacccactgaagacgtctgcgtgagaatagagaccaccgagcagccattgtttgatgtcctgtgactgagaaaccagg

SEQ ID NO: 735590 - DNA, 100 bp, Homo sapiens
ccaaagaacttattgtaggggagatttttgttagggtgtataatgaagttcctactttccaactggagtgtcgagttatagcagtgctggattgggagct

SEQ ID NO: 735591 - DNA, 74 bp, Homo sapiens
cccaagcttaacttttccaatgtggaatcctgggccttcattgggggagaggcccgaggaaggagtggctgggg

SEQ ID NO: 735592 - DNA, 100 bp, Homo sapiens
gccaagtatccgccagtcaataggaagtacgagttgaccaaagacttgaccactcaaagtccagctccccagaacactgctcgacatggacaccggtgtg

SEQ ID NO: 735593 - DNA, 90 bp, Homo sapiens
aaatacacagatgaaaaagagacggagggttctaagccaacaaaaactcctaccagcaacatttcatttgttgcatttccagtttccaat

SEQ ID NO: 735594 - DNA, 83 bp, Homo sapiens
ccaagaagtggaagaagaccaagacccatcatgccccaggtgctgggtaggccaggtttcagcatcgcagacaagaagcgcag

SEQ ID NO: 735595 - DNA, 99 bp, Homo sapiens
gtggtataaaatggcggatttcgaagagttgaggcatggcggacaccgacctgttcatggaatgtgaggaggaggagttggagccatggcagaaaatca

SEQ ID NO: 735596 - DNA, 75 bp, Homo sapiens
ggacagcccatcgtgtgaactatagagtttgtggacagatttatattgcgccatcatgaccgggtcctataacaa

SEQ ID NO: 735597 - DNA, 100 bp, Homo sapiens
agatatgaccatgtatttgtggcttaaactcttggcatttggctttgcctttctggacacagaagtatttgtgacagttaaagccttccatctgaagtat

SEQ ID NO: 735598 - DNA, 100 bp, Homo sapiens
tggagcctcagttggaagcagccgatccagcctgcggagcctgtggggcaggccgtgcagcatcgaagacaggaggaactggagcctcattggccggccc

SEQ ID NO: 735599 - DNA, 75 bp, Homo sapiens
gaaaaataggctgccagcaaacagtcttccgcaggaaggagatgtggagtacgagagggcctccaaagtggacca

SEQ ID NO: 735600 - DNA, 97 bp, Homo sapiens
cctagaaaggttggagctgccgccgcctgcagtcggtgaccgcgcgactcggcgcccgcccgcggtgtcatggagaaactccagctgggcccagaga

SEQ ID NO: 735601 - DNA, 100 bp, Homo sapiens
actcaaaagtggggggcaggaaagtatctctcagaagatagaagtgtgcaagaagtactacagaagcatttcaatatcagcaaaaacctgcggtcattac

SEQ ID NO: 735602 - DNA, 83 bp, Homo sapiens
ggaacaggcgccttcaaaagcccacttggcgatgggttacagtaagagcctctgcagagatgtgggcagctggtcaggatggc

SEQ ID NO: 735603 - DNA, 104 bp, Homo sapiens
ctggtgtaccaggcgaagctggccgagcaggctgagcgatacgacgtttggtgccctggttgtcagatgttggaaagcagtaggacggaacatactcttcgtgg

SEQ ID NO: 735604 - DNA, 90 bp, Homo sapiens
gagcttcccaccgaagatgaacagggttcctggggcatcgacgatctccatatttcattgcaagggcagcagaagaagcctttgtaaatg

SEQ ID NO: 735605 - DNA, 75 bp, Homo sapiens
atccaggcgaactcggcctatcgctaccctccgaagtccgtgcctggatcaaagtggaacagctgaagccatatc

SEQ ID NO: 735606 - DNA, 83 bp, Homo sapiens
agcgacggtagcagcagcatggccgcgatctatgggggtgtagaggggtttggtgcacctcgatttggaggaagtagggcagg

SEQ ID NO: 735607 - DNA, 100 bp, Homo sapiens
cgcagctggatgggatcatttcggacttcgaagccggcacagtcttcactaccgtagaagaccttggctccaagatactcctcacctgctccttgaatga

SEQ ID NO: 735608 - DNA, 100 bp, Homo sapiens
gccacaagagcttgatgaggctgttctcagttacagcaagctgctgaagtttctcagctgcggggagcaagggtaatcactcctgaagatcttctgtttt

SEQ ID NO: 735609 - DNA, 74 bp, Homo sapiens
ccaccgctgccctcagctccgagtccagggcgagatacacatttggaggagacgtaatccagcattggaacttc

SEQ ID NO: 735610 - DNA, 75 bp, Homo sapiens
aacaccattaaggaatggcttgccaagaatcaccatgagggtaattcctctcctgcaattacttttggatggaag

SEQ ID NO: 735611 - DNA, 120 bp, Homo sapiens
ggcgtcttctgggcctgtggagtttcttggacaggggccgcggggctccaggacggcgcccttagcgacaccatgatggagtgtttcaagaacaccaaccatttctttggcaggagcaag

SEQ ID NO: 735612 - DNA, 82 bp, Homo sapiens
tgcgccaagacatgcttattttacaggcatacttctccgccttcccaccacccggattcatagtgtgaattcctgcccggcc

SEQ ID NO: 735613 - DNA, 75 bp, Homo sapiens
ggcgctacactagagcagagtacgagtctgaggcggagggagtaatggctgttttggagtcagcggaagatcacc

SEQ ID NO: 735614 - DNA, 100 bp, Homo sapiens
atcgtctgctggtgcatcgggacgtgtgccaccatgttctcctctgaggaagagagaagggcacagttacctaagtatcaacgtaatcttcctcggccag

SEQ ID NO: 735615 - DNA, 73 bp, Homo sapiens
gatgtgacgctggagaacctggcacttatgtcctccctggggcaagtgtccagagaatggctgggatgaaagt

SEQ ID NO: 735616 - DNA, 82 bp, Homo sapiens
gaagatctagaaaggagagttgcatcagcaagtttgcaagtgaagcttccatgcctatggctgttctaaaattgggccaaat

SEQ ID NO: 735617 - DNA, 98 bp, Homo sapiens
tttgacagactcacacttttggccctgtttgatagatatcccgacaagggctttgatgataattattgccgcaatcccgatggccagccgaggccatg

SEQ ID NO: 735618 - DNA, 76 bp, Homo sapiens
tgcgcctccgggttcctgctagcagcggacggcaagcgctgtgaagacatcgacgagtgcgccctgcccaccgggg

SEQ ID NO: 735619 - DNA, 100 bp, Homo sapiens
cgaaagcgttggagaggtgttaccggaacggcggcgacaagggtgttcccgaactagagtggtttgaaggcatgcataagaatgaagccataagccaaca

SEQ ID NO: 735620 - DNA, 100 bp, Homo sapiens
aggccagtcgcctccaggccaagagggatccttcacccgtgtctggcccagtgacgagcaccatccggaagtgaaggctgatgggtacgtggacaacctc

SEQ ID NO: 735621 - DNA, 100 bp, Homo sapiens
agtgctcgcagttctgcaccactggcatggatggcggcatgagtatctgggatgtgaagacatatctgaagagatggattaagaatgctttggattaagg

SEQ ID NO: 735622 - DNA, 98 bp, Homo sapiens
gaggagcgagctgagcgcctccagcgagaagttgagggagaaaggcgggcccgggaacagatggagtcggataactgttcaggaggagatgatgactg

SEQ ID NO: 735623 - DNA, 100 bp, Homo sapiens
gcctgtgcgcctctgctgagtccgtgtgaaggcaaagaagaatgctgctccattcagaagtgaagtctgctttgggaaagagggcctttggaaacttctt

SEQ ID NO: 735624 - DNA, 98 bp, Homo sapiens
aaaagacagtgttctgctttcatggagttcacagaagagtcgaggaggcaacaattggcattgactttttatcaaaaactatgtacttggaggatcga

SEQ ID NO: 735625 - DNA, 89 bp, Homo sapiens
gccaagtaccaggcagctgtgtccaaacaaagcagctcaaccaactatacagtggcacgcactacccttcttcctggcctcctgaagac

SEQ ID NO: 735626 - DNA, 98 bp, Homo sapiens
gacgcaaaccccgagacccatgcctttgtcacgtccccagagaacatacaacctcctcttcagtgtcaaaaaagccacggttagaccagattcctgcc

SEQ ID NO: 735627 - DNA, 82 bp, Homo sapiens
aacggggcgagcctggaggattgtcactccaacctcttttcgctgatatacatcaggggatgtgagagtgtgggacacccgc

SEQ ID NO: 735628 - DNA, 98 bp, Homo sapiens
gagaggagaacgaacatcttctggacctttgtccagtggactaaagaggatggacatagaacttccacctctgctgtccctaacctgtttgttccatt

SEQ ID NO: 735629 - DNA, 83 bp, Homo sapiens
cccggggtctatggaagtaatggaaggacccctcaacctgcaaattgtggctactaatttgccccctgaagatcaagatggct

SEQ ID NO: 735630 - DNA, 101 bp, Homo sapiens
gccgtcgcccaggagtcatcggacgccagaatctgagtgtgaacatggctacgcctcttcattcccgtccatgccgagcccccgactgcagcattcaaagc

SEQ ID NO: 735631 - DNA, 75 bp, Homo sapiens
agaaactcagccactggttgccttggtaggcaataaaattttgctacttgagaagatagaacatgatgacatctg

SEQ ID NO: 735632 - DNA, 75 bp, Homo sapiens
agacatccattgggatacaattgtgattacagtggcgagatcttgaacaactgctgcgtcatggagtaccaccaa

SEQ ID NO: 735633 - DNA, 100 bp, Homo sapiens
aggagatacattaaatgcaatagcccttcagtactgttgtacggtaaaaggtccaggagttgggctgcttggaatttccaaagggggtgagctctgcctt

SEQ ID NO: 735634 - DNA, 98 bp, Homo sapiens
tctgaggcattcagctctgcggcacatgatcagcttcctcctaggggccagtcggcaaaacaatcaggccatcgaggagggcacgctggaggagatcg

SEQ ID NO: 735635 - DNA, 82 bp, Homo sapiens
caagttccgatcagaggtgaaaccaacagccagtgatatgctatacatggttttaaaatcaaagatgggaaaatcggagaaa

SEQ ID NO: 735636 - DNA, 82 bp, Homo sapiens
ggaaatcgtgcacatccaggctggtcagtgtggcaaccagatcggtgccaagtgtggacgaatgtggaacctcgctctgtgg

SEQ ID NO: 735637 - DNA, 99 bp, Homo sapiens
gccagcggtccagagctgatgcaggactggctggacaatggcccagaacaagctattcaacaagatcctcaaagccctgcagtctgaccggcttgcccg

SEQ ID NO: 735638 - DNA, 90 bp, Homo sapiens
aaccacctggatttccatctggatgttgctgtgatcagtctgaaatacagttatttcacagttgaggattttgggcagatccataacagc

SEQ ID NO: 735639 - DNA, 100 bp, Homo sapiens
gcagtcaattaacataaataggctgcttggagaaaatgatggggaaacaagagctttggttggatggcaagcatgtggtgtttggcaaagtgaaagaagg

SEQ ID NO: 735640 - DNA, 100 bp, Homo sapiens
agaaccctgggaggggaattccagcaccgcagcaaccactccagaaactttccctccttcagtgatcggagggtatggttggcatggaattgaatttcat

SEQ ID NO: 735641 - DNA, 100 bp, Homo sapiens
cgcgtggccacagcggcgcctcctgccctttagccgccgctggcccaacggtttccccagcagtagcctctgcgaccagcctcctctattggcccaggaa

SEQ ID NO: 735642 - DNA, 100 bp, Homo sapiens
cggtactggtcaaggaccaagcacctccactattccaggtcagcccaaggccaaccccactgtcactctgttcccgccctcctctgaggagctccaagcc

SEQ ID NO: 735643 - DNA, 73 bp, Homo sapiens
gtgacctgcttttcggttccgggtcttggccccgtccttacctcacaggaatccagaaccctggctgaaattg

SEQ ID NO: 735644 - DNA, 100 bp, Homo sapiens
cccaacctagtgggtgtaatacatcatgaactgcaggaacacttaaggagttccgtgatcgaccgaaaggacttaataatcaaaaggattaagcccaaac

SEQ ID NO: 735645 - DNA, 100 bp, Homo sapiens
cagagattgagaatgtccatggatttgtttctcattctcatatttcaccaataaagctactatggcctgaccgtctggtttcctgacatgatccgccatc

SEQ ID NO: 735646 - DNA, 51 bp, Homo sapiens
agaacctcatcgctgcgacgaaaagaaaatggcaaatgcacgacagcggcc

SEQ ID NO: 735647 - DNA, 78 bp, Homo sapiens
acagggacacctggttccagctgcagcacgtggacgctgactcggaagtgcaggccaagactaaggggctgcagagcg

SEQ ID NO: 735648 - DNA, 98 bp, Homo sapiens
tagaacagaaaaatgaagatggaacatggccaaggggtccttctactcctaaggatagctgggagtatggccaccctgctccacgatgcggtaatgaa

SEQ ID NO: 735649 - DNA, 90 bp, Homo sapiens
cagaattctagtggggcacgctctgcataatgacctaaagatctacgcagaccccaccaagaggctggagctgtacttccggcccaagga

SEQ ID NO: 735650 - DNA, 74 bp, Homo sapiens
tcgaagcctggatgaaatagatctctcggctctgaggatcttcaagcactccacatgttgcctcagacagttga

SEQ ID NO: 735651 - DNA, 100 bp, Homo sapiens
gagagaagacgatctgcacttcgcattttggcattgacatttaattttagggtcctttatatagaagggagagtaggtagctacagcaagctgggtagca

SEQ ID NO: 735652 - DNA, 74 bp, Homo sapiens
gaggaagaaaaagggccagtgtctcccaggttgggctggtgtacatgtttaacctcatcgtgggcacgggcgca

SEQ ID NO: 735653 - DNA, 82 bp, Homo sapiens
atcgattttaccttggataccctgctttgggtattcccatctgtcgacaacacttaatttggaataacatggaacttgaaaa

SEQ ID NO: 735654 - DNA, 101 bp, Homo sapiens
ctctgcatttgtgtcagacttcactgcaaaacagcctagcatgtgcattgctaagggacctggacaggatatgtttgacagcacacaaattataggacggg

SEQ ID NO: 735655 - DNA, 76 bp, Homo sapiens
atcctgcatagccttcacagagagtccagttgccaagcaaacggatgtttcagaagacagcaatgatgatatggat

SEQ ID NO: 735656 - DNA, 120 bp, Homo sapiens
gttggtccgaagtttgaaccggacagaagcgctggtcggcgtctggcgattatggcatcgtcaaagcattgtggtgtcttttttactgctgcttgctgtgcttatagctacgtattatgt

SEQ ID NO: 735657 - DNA, 74 bp, Homo sapiens
tcttgagtttattccttcagaccagcaggtaattatccatatcatagattttgacgatgaaaacaacattataa

SEQ ID NO: 735658 - DNA, 105 bp, Homo sapiens
tgcaggttgaagaactgagctctatctggtcttgccatctctaagctggacctggtgacctttttggagggaaagaaagagccctggactgtgaagagtgaggag

SEQ ID NO: 735659 - DNA, 100 bp, Homo sapiens
ctcctaacaacctgtctcttggaagacctccgtgtggatggccgtggctgtgaggactaccgatgtgtcgaagtggaaactgatgtggtgtccaacacta

SEQ ID NO: 735660 - DNA, 83 bp, Homo sapiens
gtctgcgagccaggattcccgcatccgcagtgtcatgcagaagtacctggaggaccggggcgaggtgacctttgagaagatct

SEQ ID NO: 735661 - DNA, 101 bp, Homo sapiens
cggagctgctgcagtccttcgcgccctcctcgccctccccaccgacatcatgctccagttcctgggatggaagcttcctggcgccaggtggccggtggccg

SEQ ID NO: 735662 - DNA, 75 bp, Homo sapiens
actgagaacatctttagctccatgggtgatgctgacagcggtggcctacccgagcgcagtgtgtccttgacagga

SEQ ID NO: 735663 - DNA, 90 bp, Homo sapiens
gtcgtcttggttacgtttgtcctcaagaggtggcccccatgctacagcagtttataagaccctggtcgttccaggggtagaggaggcatg

SEQ ID NO: 735664 - DNA, 82 bp, Homo sapiens
ccagcgagatccgggccgtgaacgaaagcagtgacggaggagcttgtaccaccgtgagaaagatcagtctaaagaaaaggag

SEQ ID NO: 735665 - DNA, 90 bp, Homo sapiens
gtgagcgcgaggaggcggaggctgcggcggggcggacggtcgcgcggcggcaggcacagccctggactttgtctcacaagatgaaatgtt

SEQ ID NO: 735666 - DNA, 50 bp, Homo sapiens
ctgactttcagctatggaatcgggagtgcatccgccccaacccttttccc

SEQ ID NO: 735667 - DNA, 100 bp, Homo sapiens
gagaatcctgggtttagccattgaggagatgttaaacatgtctaagaaaacagtttcttgttttgtgaacttcaccagactacagcagatcacaaatatt

SEQ ID NO: 735668 - DNA, 111 bp, Homo sapiens
cgcctggacctgcacatttgtgatgatagccagtcccgagagccaggggcagaggcctggcctccaggggtttgtcttaaatatgtcgggggagaccaatttggacatgtg

SEQ ID NO: 735669 - DNA, 100 bp, Homo sapiens
tgaagagaactcttttaaatatttgataaaactactcacccagaagagagaagggcacagttacctaagtatcaacgtaatcttcctcggccaggacagg

SEQ ID NO: 735670 - DNA, 74 bp, Homo sapiens
gagggagaacaccatctcgccaccgcagctacgaacggagcaggaatgatgatgtctcagtataaactttctca

SEQ ID NO: 735671 - DNA, 83 bp, Homo sapiens
ctcggcgcgactcgcttctttcggttctacctgggagaatccaccgccatccgccaccatggcaaacctgcccttgctgcagc

SEQ ID NO: 735672 - DNA, 100 bp, Homo sapiens
agtggtcctctggtcttccctgaccccgcggccggacgacccaagcccgctgagcaggatgagggtaaatgagctggatggtatcccgttgatcctggac

SEQ ID NO: 735673 - DNA, 90 bp, Homo sapiens
gctgtggctctggtagaacacttgcagagggaatctggtcaaacatggaatggggttctctcaagtagtgctgccagtagtaccatcaca

SEQ ID NO: 735674 - DNA, 75 bp, Homo sapiens
ctgtggcatgtatgacttctcagggcagtttgctttccatggagaagcagtgcgtctatccagacaattacccat

SEQ ID NO: 735675 - DNA, 105 bp, Homo sapiens
ctcagtttgtaaaaacatggcggatccagaattctgacacagccgccagcccaaacagcagcggcatgggcagcgccagcccgggtctgagcagcgtatccccca

SEQ ID NO: 735676 - DNA, 98 bp, Homo sapiens
aggaggagagtgctgcttcaggaggagcagcctatacaaagaggtgctgggtaggccaggtttcagcatcgcagacaagaagcgcaggacaggctgca

SEQ ID NO: 735677 - DNA, 74 bp, Homo sapiens
gacagtcctcgtcagcactgactttcagctatggaatcgcaagatggaaagttgccttttgttcctccggagga

SEQ ID NO: 735678 - DNA, 50 bp, Homo sapiens
ctgccgacctccgggagcagcgcaggactgttgggaaagatcctgatggc

SEQ ID NO: 735679 - DNA, 97 bp, Homo sapiens
gtgatgtgacgctggagaacctggcacttatgtcctccctggatgttccatttaagcagacctcttccatagctgtagctggagcggtaattggagc

SEQ ID NO: 735680 - DNA, 75 bp, Homo sapiens
gggggatggggcagaggacgaggagtggaccatgctcgacagctgaccaaggccatgatgcgaaaggccacggcc

SEQ ID NO: 735681 - DNA, 83 bp, Homo sapiens
tgtcgcctgtgctgtgacccgcactggtcgtgggagtcacctgaaaggcaagaaatggggatttgggagcagcttgtcttaca

SEQ ID NO: 735682 - DNA, 95 bp, Homo sapiens
ggccgtggaagcggccaccgactactgtcagcagctgtgccaggcccaggctgcaagcacaaaggaagtttgctcagtctcagccgaatagtccc

SEQ ID NO: 735683 - DNA, 80 bp, Homo sapiens
ctgactgattagcattcacaccaggtgcatgtgagggaaccctggcttgttcaacctgtcacctcatctttgaagatcac

SEQ ID NO: 735684 - DNA, 100 bp, Homo sapiens
cggcctgggctgctgactgcgcacttggaatagtagcaggcggcggcggcggaacgccaggcagctccatcaagtatgatggtgaaggatgaatatgtgc

SEQ ID NO: 735685 - DNA, 75 bp, Homo sapiens
agaaactacaaggcaaatgcagtcaaccaggagccaggaggaactctctcccagtccgcctttgttgaatccatc

SEQ ID NO: 735686 - DNA, 96 bp, Homo sapiens
gtgggcagcattggcgaccagcgcttcacgaatacggcaggagaatgatatggttgattcagcgcctcagtgggaagctgtattaaggagacaaaa

SEQ ID NO: 735687 - DNA, 100 bp, Homo sapiens
cggaggcagaggtggaggcgctttgaaaggatcagattttattaagacctctactggaaaagaaacagtaaatgccaccttcccggtagctatagtaatg

SEQ ID NO: 735688 - DNA, 90 bp, Homo sapiens
ccagccctcagtgccccggccagaggcgggaaggggctctagagcttcgattgctggactcgctgaagagagactacgcaggaaagcccc

SEQ ID NO: 735689 - DNA, 100 bp, Homo sapiens
tcccagatctacctgacgggcctgcgagggttgaagattgtgaagcaatagcctaagcaattgaaacacagagcaccagctctgaggaactcgtcccaag

SEQ ID NO: 735690 - DNA, 100 bp, Homo sapiens
ggcgcactgggaggtggaacgggccgaactgcaggcagttgcagtggtgcagaatggctgacctcagtcttgcagatgcattaacagaaccatctccaga

SEQ ID NO: 735691 - DNA, 96 bp, Homo sapiens
aaaaatctggtgaaattgccggcaagagggagttaaggacattccaggcagaggcaaggtgatgtgttccacctcactgtccccagtaaattcacc

SEQ ID NO: 735692 - DNA, 88 bp, Homo sapiens
ggtgcagagcctggagagcatgccccggccccctgagcagttgcctgtgtccctggagtgttacacagtgcctcctgaagacaacctg

SEQ ID NO: 735693 - DNA, 101 bp, Homo sapiens
gctccgagccggagaggaggcttgacagtgtagatgggcctgggggcccccgtcgggattggaaagccaagcatgtgagttgcatgctgagaatttgaaaa

SEQ ID NO: 735694 - DNA, 74 bp, Homo sapiens
agtacgataccgaagcgggctgtgtgccccttctccacccagagtgtgctggaattgatgttcgtctgtgtgat

SEQ ID NO: 735695 - DNA, 83 bp, Homo sapiens
tggacagtggagatgaagcctaagaatatgatcagcagcccctgtcaaagggaacaggaagcagtccacggagggtgacgccc

SEQ ID NO: 735696 - DNA, 90 bp, Homo sapiens
aagggaggctccaagacctcatcaacaattaaggtgctgaaaccaagaacctacagttactggttccaaaaactgagatatgtgaggaag

SEQ ID NO: 735697 - DNA, 82 bp, Homo sapiens
aggacggcgtacggagtgtggtgcagagcagagcgggcggaggaccccgggcgcgggcgcggacggcacgcggggcatgaac

SEQ ID NO: 735698 - DNA, 100 bp, Homo sapiens
tgatgatgaagaaacggtacagagatgggcttcaaaccctgggagccctctggcacaaatggaagaagaaagaagggagcaagtagctaaaattaagaag

SEQ ID NO: 735699 - DNA, 102 bp, Homo sapiens
gctctccaaaaaatgcagtgccccctgtgatccattcacctaatgatcatgtggtctatgagaaagaaccagccacagtacacgaacctggggctcctgaac

SEQ ID NO: 735700 - DNA, 100 bp, Homo sapiens
ttacagcagctgacatatggaaatgtcagtccaatacagacctcagcttccccattatttcgaggaaggaagtggggacccatcgtgaagatggcgtggc

SEQ ID NO: 735701 - DNA, 73 bp, Homo sapiens
gggaagtgcttggggatggagtgcctccaaaggttgctgaggctgtgtggtttggctgtgatgttggaaaaca

SEQ ID NO: 735702 - DNA, 104 bp, Homo sapiens
aacaggattccatggtagctgggatgttagggctcaggctgtatcgcatccattgaatactgtgaccgaggacatgtacaccaacgggtctcctgccccaggta

SEQ ID NO: 735703 - DNA, 100 bp, Homo sapiens
gagacagatgcgaggcggcggtcagacttcccaagtaagaagcggaagaggagccgctggaaccaagacacaatggaacagaagacagtgattccaggaa

SEQ ID NO: 735704 - DNA, 98 bp, Homo sapiens
atatctgtggccactatccccggcacatcgtgttcctggagtatgagagttctgagaaggagaaagacacgaatcatctgctgcagtttgctttagag

SEQ ID NO: 735705 - DNA, 97 bp, Homo sapiens
ttctacgacgtggccagacatggcattctgcaggtggcaggtttacaaagatgagcaggtggtggtgataaaggataaatacccaaaggcccgttac

SEQ ID NO: 735706 - DNA, 100 bp, Homo sapiens
gcctggacggctcgggcgctggagtttgaaattggcacaatggaagaagctggaatttgtgggctaggggtgaaagcagatatgttgtgtaactctcaat

SEQ ID NO: 735707 - DNA, 96 bp, Homo sapiens
tattctcagagtaaaagttgtttctggaattgatctcgccaaaaaggacatctttggagccaggtcgatggccaggtggtcttcataaactatact

SEQ ID NO: 735708 - DNA, 99 bp, Homo sapiens
cagggccggttcgtgcggaaccgccatggccgagccggcttcggttccagttacagccatcccttgtcataacttttgaactgtatttggaaaaatact

SEQ ID NO: 735709 - DNA, 74 bp, Homo sapiens
ccatggagggtcaaagaaactcctggttgagctcaaagttattttacattctcttacccggctctacaaattac

SEQ ID NO: 735710 - DNA, 83 bp, Homo sapiens
gtggatttgagccgccgcattttttaaccctagatctcgcactggacaagacactgtttccaatcctacttatatgaaccaga

SEQ ID NO: 735711 - DNA, 98 bp, Homo sapiens
ggaaggcttcaaaggctgtcgcaaggaggaaggcaatttcttgcaaccaccaccgaggccccgaaaagcactggtcgtcagggagctcctccccttgg

SEQ ID NO: 735712 - DNA, 100 bp, Homo sapiens
cccgggctgcgctgggcgctgccgctgctgctgctgctgctgcgcctgggccaggtaggtgatgctctgatgctgctgcctcttatgaattgacgacagg

SEQ ID NO: 735713 - DNA, 97 bp, Homo sapiens
agacaaagacccagtgaacaaatccgggggcaaggccaaaaagaaggaacttgctactaccagcaccatgccctaccaatatccagcactgaccccg

SEQ ID NO: 735714 - DNA, 96 bp, Homo sapiens
gcagatgtgaataaaactgaccatagccagagaacagccctccatcttgcagcccagaaggtggatctcgagccagaggggaaagtatttgtggta

SEQ ID NO: 735715 - DNA, 90 bp, Homo sapiens
tcttgttcctcctgtcccaaaagaccatcctgctctcaactacaacatcgtttcaggatttggagcaagaggtggtggtggccttccccc

SEQ ID NO: 735716 - DNA, 75 bp, Homo sapiens
gttatttaggaggattcgatggcaattttttgtggaacagaattggagcagttcctccgtgtcacaaagcagtac

SEQ ID NO: 735717 - DNA, 80 bp, Homo sapiens
ggacccaccaacatccgcatccgatgccatttagttgctgtggttggctgataaatatttgtcgaagaaagaaagagctg

SEQ ID NO: 735718 - DNA, 100 bp, Homo sapiens
tgggtgccgttaatcccctcctctcccaagctgagagcagccacacagggaaaccatctgccgtgtgactggtgggatgaaggtaaaggcagaccgagat

SEQ ID NO: 735719 - DNA, 87 bp, Homo sapiens
gatcctgattatattaatcagtatgtcatatggatggaacatgaatctgaaggtggaagaacacctttgatgaaagctgcaagagct

SEQ ID NO: 735720 - DNA, 88 bp, Homo sapiens
ttcgtctatgtggcgcccggcatagtggttccccctggaagtcctgggcccattactcgacatgggtcttacgacagtttagcttctg

SEQ ID NO: 735721 - DNA, 100 bp, Homo sapiens
cgaagaagaaaggattcgttacagccagagattgtgcatacattcccttgaataattacttggtgtttaatgatgtagatgggctgtatacatacacatt

SEQ ID NO: 735722 - DNA, 100 bp, Homo sapiens
ggggcggaggcggaggcagaggtggaggcgctttgaaaggcttcctggcaacactagaacaaaaattggcttcataacatttgacagtacaatccatttc

SEQ ID NO: 735723 - DNA, 96 bp, Homo sapiens
aagaaatccgtgaaagcaatcaacagctctgggctgggtggctttctagaagatgaccatagaggaccttccagattttccattagaaggaaatcc

SEQ ID NO: 735724 - DNA, 100 bp, Homo sapiens
atgatgcctaattccatctacttcggcctggactcaagaggcagggcacaggcagctcaggacaaaaggagtttgccctgaccaacccagagaagagcag

SEQ ID NO: 735725 - DNA, 101 bp, Homo sapiens
caaagatagagaggtttgagttttatgaacgggctaagaaggcttttgctgttgtggcaacggggacaaggactgccatccaccatggtgaagctgggctg

SEQ ID NO: 735726 - DNA, 101 bp, Homo sapiens
ctcggatacgatagaaaatgtaaaggccaagatccaggataaggaagtgcagtgtgccctgaaccgccctgccttctttgctgagaggctctactatgcta

SEQ ID NO: 735727 - DNA, 74 bp, Homo sapiens
ggatctgaagtacaaaatattttccaggttttcaaatggaacattttgatgcatcacttagtacctatttcaag

SEQ ID NO: 735728 - DNA, 51 bp, Homo sapiens
ggggttttctgcacttctacactcaggaatggaacattactaaactttcaa

SEQ ID NO: 735729 - DNA, 75 bp, Homo sapiens
actccgaggagataccagtcggtagaggaataatccagaatggctactctgatctatgttgataaggaaaatgga

SEQ ID NO: 735730 - DNA, 82 bp, Homo sapiens
gcacctacctcaaaggccgcttgttgggcaagatgacagtcatgtccctttccagggacctcaaggacgactttcacagtga

SEQ ID NO: 735731 - DNA, 99 bp, Homo sapiens
ttgcaagaaataatctcatgggcgatgacatattctgttattatttcaaacttttccagaattttaccttcaatgatgacttcagtcccagcagtacca

SEQ ID NO: 735732 - DNA, 83 bp, Homo sapiens
ctttcttcgccgtgctggccgcggcccgcctcagcatctggtacagccgactttaccaacagggacgcttatgtcaactgggc

SEQ ID NO: 735733 - DNA, 101 bp, Homo sapiens
gtctactggatcaaggacagacagctcaccaaccgtgacagcaccatactggaacttcaaaaagttctgaaaacatgttgatacaaaagttttgcagtact

SEQ ID NO: 735734 - DNA, 74 bp, Homo sapiens
gctcctggaggcctgtcgtctggaggaggagacacttaccctttacccagccacgccgcaatgaagagcttctt

SEQ ID NO: 735735 - DNA, 100 bp, Homo sapiens
cctgtgtcccgcgggaacccgcattggcagcgggagccgtccggaggacctgggacaccgcggaagtcgggaaatgatcctggctctgcagagagaacag

SEQ ID NO: 735736 - DNA, 75 bp, Homo sapiens
cgcaagtcgagaggaaactgttgtgcctcttcatattggcgatcctgttgtgtcaaaatgcagatcttcgtgaaa

SEQ ID NO: 735737 - DNA, 101 bp, Homo sapiens
agtaaattgaaaatattggggccatttagtaacttctttgcaagacaatgcagatcttcgtgaagactctgactggtaagaccatcaccctcgaggttgag

SEQ ID NO: 735738 - DNA, 82 bp, Homo sapiens
tccagagcaagcatggagcaacaggatcagagcatgaaggaaggggagaatggggtactaagagaaaagcacgaagctgtgg

SEQ ID NO: 735739 - DNA, 100 bp, Homo sapiens
ggtgaagaccgtgttggtgacgaccaacttggcccctcacggtctcgtttcctctcagtccatccacccttcatggggccagagccctctctccagaatc

SEQ ID NO: 735740 - DNA, 74 bp, Homo sapiens
aaagaggagaggcacccgatatatgttctctaggccttttagaaaacatggcattgttcacagtgatcttaaac

SEQ ID NO: 735741 - DNA, 74 bp, Homo sapiens
gggagaccttcctagcacagcggcagactgtgagctgcttgtccccatcctgcggccgtcctggggacacagag

SEQ ID NO: 735742 - DNA, 90 bp, Homo sapiens
gagaaggagaaccaccagctcagcaagaaggtttcctgggagaaggtggcttaaggctgagacacttatgccctgggccagccactggat

SEQ ID NO: 735743 - DNA, 50 bp, Homo sapiens
ggaccatttatgacattgcttggtggtgactctcaaaaggaaataggatc

SEQ ID NO: 735744 - DNA, 123 bp, Homo sapiens
cgacaggactttgggtctgggtgagccttctcgtggcggcggggaccgtccagcccagcgattctcagtcagtgggtaaacctcacaagtgcaactactgtggacgaagctacaagcagcgca

SEQ ID NO: 735745 - DNA, 85 bp, Homo sapiens
caccaagaaattactgtctcaagtgatacggcaatggtggcttgctatccgggaaatggaacaggttatgttcgccacgtggaca

SEQ ID NO: 735746 - DNA, 78 bp, Homo sapiens
gatttcaacatgcctctgacaatctctagttttgcagtgttgatgtgggtatttacctatgttggtgccttgtttaat

SEQ ID NO: 735747 - DNA, 51 bp, Homo sapiens
ccaattacaatgacagatacgatgagattttaccaaatgttgcaagaactc

SEQ ID NO: 735748 - DNA, 100 bp, Homo sapiens
ctcatgaagacatatactgtgaacacactacagaccctcacaagtcagttactgaaaagggaacacctgattgagaatgaagtgtcaatactgcgccgag

SEQ ID NO: 735749 - DNA, 100 bp, Homo sapiens
aatggaaaatgcagtgggattggagataacccaggcagagaagacagactgctgctttggacctgttggtaatgatggcctgagctaaacatctaactag

SEQ ID NO: 735750 - DNA, 100 bp, Homo sapiens
agaatctgcagtgcctgcgcgagcgaggtgaacttcacggtagaccagatccgcgccatcatggacaagaaggccaacatccgcaacatgtctgtcatcg

SEQ ID NO: 735751 - DNA, 75 bp, Homo sapiens
agagcctgaaaaacaagattctcctcctccaaaaccaccaaggacccgcagtgtgttctaggtcagtggcttcaa

SEQ ID NO: 735752 - DNA, 101 bp, Homo sapiens
cccgggtctcgggcatcccctcccggcgccactggccggtgccctacaagttatacattggctcttcaaagacgttcacctcatcagagaaatccctgact

SEQ ID NO: 735753 - DNA, 90 bp, Homo sapiens
tccgactcgctacgcgggtcttgcgagatatctggccgcctctgccgcagctggaggatgaccgagtgggagacagcagcaccagcggtg

SEQ ID NO: 735754 - DNA, 100 bp, Homo sapiens
cggcgagcgcggtcgagatcgccatgcctacccgagtcagaaataccatcagaggaggggtactgtgactttaatagtaggccaaatgagaactcttatt

SEQ ID NO: 735755 - DNA, 75 bp, Homo sapiens
cgactggacttacgaggagcagtttaagcagaaactatgttccaacttcctgtcaacaatcttggcagtttaaga

SEQ ID NO: 735756 - DNA, 51 bp, Homo sapiens
atgttatctggtggatgttatagtactatactggcaattgctggagaagat

SEQ ID NO: 735757 - DNA, 75 bp, Homo sapiens
caggaactggaatgtgttcaagtcttggcagagccagcctctggaattgctttggcactcgttagatgaatggct

SEQ ID NO: 735758 - DNA, 75 bp, Homo sapiens
ggcaatcgggattactgttctggttatcttcatcatcatcatcatcggacaatctctatgggaagcagaaggcaa

SEQ ID NO: 735759 - DNA, 90 bp, Homo sapiens
gtgatcttcccgcctagcctcccaaaatgttggaattacagaaatcttcttcctattactcatgtgtgtatagaagaaggagaaaagccc

SEQ ID NO: 735760 - DNA, 88 bp, Homo sapiens
gaatgtagcaactatattagcaacatttgtcaattgtcttcacaatagtcttcaacaagtgaaaccaatccgtaatctaaatggacat

SEQ ID NO: 735761 - DNA, 100 bp, Homo sapiens
cgaacagcccgcctcgcctccaggagcatgaattgtaatagagaaatacactttcgggaaatggcctctaaatcctggctgaattttttaaccttcctct

SEQ ID NO: 735762 - DNA, 98 bp, Homo sapiens
accccgataccgtgtaccagatgttttggtggctgatccaccaatagcccggctggccctgcataactcccgtttcctgagtctctgctctgagctgg

SEQ ID NO: 735763 - DNA, 96 bp, Homo sapiens
gtttgggtgcagacgttgttgcttgggcgcttctccgctgcgtgtaggtgaagggggcttcctgaccgagcggaagccctgaccaggcatggagta

SEQ ID NO: 735764 - DNA, 75 bp, Homo sapiens
ggcagattcctccgggcagcaggagtgcctggtgaagaatgtgatgggatcactagcatgtctgcggagagcggc

SEQ ID NO: 735765 - DNA, 100 bp, Homo sapiens
ttgatgaattgcaagtttgtgccccatagctgcacaggcggcaaagatctgcaacaacatgctgttagctattagtatgattggaactgctgaagctatg

SEQ ID NO: 735766 - DNA, 101 bp, Homo sapiens
ctacgagctggctttaatcctgaaagccatgcagcgggccctgatccttcaccagctaggccgctacagtctggcggagaagatcctccgggacgcggtgc

SEQ ID NO: 735767 - DNA, 98 bp, Homo sapiens
gcgtgtgtgagcgcgccggaccaagcgggcccagaagcgggtcaaaatgcagatcttcgtgaaaacccttaccggcaagaccatcacccttgaggtgg

SEQ ID NO: 735768 - DNA, 75 bp, Homo sapiens
gaaagataggcggccatggtccaaccttgaagagctaaagttgcagacaagatccagctcatcaataatatgctg

SEQ ID NO: 735769 - DNA, 100 bp, Homo sapiens
gacagctgcgaccaggacgtcagccagcactgcacagacagctgcgaccagagactggagagtgttgcggagataggaacatgggagagaaacaatctgg

SEQ ID NO: 735770 - DNA, 96 bp, Homo sapiens
cgggtcgccgagtgactcagccccgcaggctcgaaactgcgggcgcatgagttggtgtacatgggttttgatgcactcgtggccgaagctgcgctg

SEQ ID NO: 735771 - DNA, 100 bp, Homo sapiens
agggttgccttttcgtgcaactgaaaatgacattgctaataagtgacacagccctagaggaggcagtagcagaggtgctagaccatcgacccatcgagcc

SEQ ID NO: 735772 - DNA, 75 bp, Homo sapiens
ggactttgggcgtcccattgccatggacttacacatattattgaaactcgaaaagtccttgatttaaggataaat

SEQ ID NO: 735773 - DNA, 74 bp, Homo sapiens
aaggacaaggacagaatcaccagcactggctgaagagaaaatacggtacatgtccccatggaggatatggcttg

SEQ ID NO: 735774 - DNA, 98 bp, Homo sapiens
ctccactttcgccagcccgtgccgcgagcgcggcctgcaggagctcctgtccaaatatgacccccagaaggaggcagagctccgcacctggatcgagg

SEQ ID NO: 735775 - DNA, 96 bp, Homo sapiens
ctgccgccgccgcctcgggtcgtggagccaggagcgacgtcaccgccatggcaggcatcaaagggcaagtgtccagagaatggctgggatgaaagt

SEQ ID NO: 735776 - DNA, 50 bp, Homo sapiens
agagaaatcaccaccttctacagattattcagagctgggagagcttcccc

SEQ ID NO: 735777 - DNA, 75 bp, Homo sapiens
attgctggctcagaggctctatgcaggttccactgtcaagccaaaatgaagtttaatccctttgtgacttccgac

SEQ ID NO: 735778 - DNA, 75 bp, Homo sapiens
gattgagaatgtccatggatttgtttctcattctcatatttcaccaataaagcctagtatcagaaggccaggcga

SEQ ID NO: 735779 - DNA, 50 bp, Homo sapiens
gtggatgatgccaaagttttattaggaggatagtgaatgatacctacaga

SEQ ID NO: 735780 - DNA, 100 bp, Homo sapiens
tcctcctgggctggggctcgctgctcatcatgctcaagtcagagggcttttactcctacctgtgtaccgagccaggacttgggaccctggaggactgacg

SEQ ID NO: 735781 - DNA, 83 bp, Homo sapiens
ccgaggcaccgaggcactcagaggagccccactgcaggccccaccatggcgccgttcctgcgcatcgccttcaactcctatga

SEQ ID NO: 735782 - DNA, 100 bp, Homo sapiens
agacacctcgcagtcaacaagacccggcaggaccaggactccccgcacagtctgaccgacttgcgaatcaccagggtgaaaggaaagcaagccaggatgg

SEQ ID NO: 735783 - DNA, 75 bp, Homo sapiens
tgcgtggccgcgcgaccgacggccgcctcacctgcccgctgtgccagagatgagacgtatcttgacatcttccgc

SEQ ID NO: 735784 - DNA, 100 bp, Homo sapiens
gagaccccctgggcaggctgaaagatggcggcggcgtctgtctctgcggcttctggttctcacttgtcgttaatagctgaatgccaacaactaaaggaag

SEQ ID NO: 735785 - DNA, 75 bp, Homo sapiens
gcatataaagattcccaacttattgtttcatcagctaagtaacacgtacacagacctctcggccggaatctccag

SEQ ID NO: 735786 - DNA, 73 bp, Homo sapiens
gcagacgcagtggtggccctggagcagtatgccagcaagggtgtgggccgaagatatgctcatgtggtgttga

SEQ ID NO: 735787 - DNA, 82 bp, Homo sapiens
cggacaacggctgcggcgacaatttttttgacaagtatgcgcccaagctggacagcccctacttccgacattccagcgtgag

SEQ ID NO: 735788 - DNA, 50 bp, Homo sapiens
cctcctcagaaaggctggtggcatcaggttatcctacgcggagagccagg

SEQ ID NO: 735789 - DNA, 100 bp, Homo sapiens
cgcaggcaccttcctcagtcgcgccgtgcagaaagggctattgcaagacacgaagtccgagaaattgagcagcgacatacaatggatggccctcggcaag

SEQ ID NO: 735790 - DNA, 100 bp, Homo sapiens
tcaagaaactgaagcaaaagatcagcgaggagcagcagcagctccagcaggcgctggctcctgctcaggtttctgagtcccttcaacatgatcctgggag

SEQ ID NO: 735791 - DNA, 76 bp, Homo sapiens
gttggaccttccggagcttctcagaagacagagggttttcttttgaggatcagatgtggccgcccagcagttgtgc

SEQ ID NO: 735792 - DNA, 74 bp, Homo sapiens
gctgcaagagaaggcactcaagtttatgggcttgctctcaattttgcgcaagttgaaaagtgcaccagaccagg

SEQ ID NO: 735793 - DNA, 96 bp, Homo sapiens
tgggcaggaagaacccatcgggcagctacacatcttgaaagagaagctcttcctgtgagatgattttcagactgcccaactattggcacttgtatt

SEQ ID NO: 735794 - DNA, 100 bp, Homo sapiens
tgtttgagagtgggaacatgacgcaggtgcaggtgtctcttctcgccctggcggggaagcccgagcgggaagaagttccgcagcaagccgcagctggcgc

SEQ ID NO: 735795 - DNA, 100 bp, Homo sapiens
gaggcctgcaaattcatgacaggattattgagcttgctcacttccgacagagaaaaacaaaaggtgacagttcgcattcggagaaaaagacggcgaagag

SEQ ID NO: 735796 - DNA, 90 bp, Homo sapiens
cagattcgcagtggtcgcttcttctccttgacgcaaacatgcagatctttgtgaagaccctcactggcaaaaccatcacccttgaggtcg

SEQ ID NO: 735797 - DNA, 98 bp, Homo sapiens
ccactgcgaaatctacccctgcccagtctacagctcagcaaatccacagcattaggcaacattccagcacagggccaccgcccctcctcctggccccc

SEQ ID NO: 735798 - DNA, 82 bp, Homo sapiens
gcctggaacaggtcaagaagcttaaggagagatggggctccaacggtcagcccaaggccaaccccactgtcactctgttccc

SEQ ID NO: 735799 - DNA, 100 bp, Homo sapiens
gaggagagtaaaaagaacttcctggagaaactgaagcgggacgttgaggttagaaccatcagagagccttgaggaaaaccagcggaacctccttcagatg

SEQ ID NO: 735800 - DNA, 90 bp, Homo sapiens
cctttgtaaaattgacagagaggggaaaccccgtaaagtggttggttgcagttgtgtagtagttaagttgtgtgacttcattgagacaca

SEQ ID NO: 735801 - DNA, 75 bp, Homo sapiens
cgacgcgcccggcccggagcccccagcgcagcggccgcgattagaaatgatatttgccaaatttgatgaagtgca

SEQ ID NO: 735802 - DNA, 76 bp, Homo sapiens
gattacagagaaaaaaccaacaccttcctgtgcagtcctgttggaatttgtagagttggctttgtgggacacagct

SEQ ID NO: 735803 - DNA, 100 bp, Homo sapiens
cccatggcttcctggacgagcccctggtgggtgctgatagggatggtcttcatgcactctcccctcccgcagatctttataaacaacgagtggcagaact

SEQ ID NO: 735804 - DNA, 74 bp, Homo sapiens
ctagggacaaacctatcacatttactcagcttcttggacacttaatgattgttggcaagaaatgtgctgctgat

SEQ ID NO: 735805 - DNA, 50 bp, Homo sapiens
attcagcctcagtgatgtccatgaggaagcaagatttccagatgtagcaa

SEQ ID NO: 735806 - DNA, 97 bp, Homo sapiens
aatgcacgatatgaagagcctggttacagtttcgactcctctctgcaagtgaataggcccagaaaggacccagccgccgcctccatctctgacggag

SEQ ID NO: 735807 - DNA, 100 bp, Homo sapiens
ccagtctttaaatattcgaacaactcagcttgcaaaagcccagggccatatatctcagactaatctggtagcttctggtgctaatgaatctgaaatctac

SEQ ID NO: 735808 - DNA, 97 bp, Homo sapiens
atctgggtgcccgtggaccacaggccctcgttgcccagatgtttatggctacaaatgatttgatgacggaactgcagaaagattccatcaagttgga

SEQ ID NO: 735809 - DNA, 75 bp, Homo sapiens
ggcacttcccggcacatctccgtggcctacgacacggtccgctgggagttcggcacctgccagccgctgtcagac

SEQ ID NO: 735810 - DNA, 90 bp, Homo sapiens
cggtccgacagagtcctccgtgtcctcccccgcatgacccccttgcaatggctgccatccggaagaaactggtgattgttggtgatggag

SEQ ID NO: 735811 - DNA, 98 bp, Homo sapiens
ttgaggactttgtctctgatgagctgagaaacaaagccacccagccaatgaagatgaagcgttctgtcagccaccctggttcttgcagttcagagagg

SEQ ID NO: 735812 - DNA, 100 bp, Homo sapiens
cctgcataccatccgcgaccgagtctggcagatccagtcttgctcagctctcacaggagagggcgttcagtccgggaccatgtctggagaactaccacca

SEQ ID NO: 735813 - DNA, 50 bp, Homo sapiens
ggcagtcgcgaagcagcaaccatgggagaagaaatgggtgaccgttggtg

SEQ ID NO: 735814 - DNA, 102 bp, Homo sapiens
ctgaaagaagtggatgatgtgcttggtggagcagctgcctgggagaatgttgactctactgcaggcactaacataaatagtgactctccagttggaaaaaag

SEQ ID NO: 735815 - DNA, 100 bp, Homo sapiens
tttaagaattaaaagatgatgagaaataaggacaaaagccaagaggaggacagttcgctacacagcaatgcatcgagcttggtgatccagctatttttcc

SEQ ID NO: 735816 - DNA, 97 bp, Homo sapiens
gggggctcagagatccaagtgcgcgccctggcgggtccggaccaaggggtacaggctcgggagaagcagcctgcagagcccccagcccctctgcgga

SEQ ID NO: 735817 - DNA, 100 bp, Homo sapiens
gtgcgagaactgcgcagacctggtggaggtgttaaatgaaagcaaccagataaactggtggtagtttggaccagaagaagccgaaggaagtcttctaagg

SEQ ID NO: 735818 - DNA, 100 bp, Homo sapiens
aaaaatgtactctgacctgaatcctgaattttccttgatggtcaaaagattaagattgtctccagctttaagaccacgacatcgagagctgcctgccagc

SEQ ID NO: 735819 - DNA, 75 bp, Homo sapiens
aattaagcactttgatgatttaagaaatcttgaatggtagctgagtggaggttgtctcgaggtgttgaagaacag

SEQ ID NO: 735820 - DNA, 75 bp, Homo sapiens
tcggcgggggagcgactcatggagctgccgtaaggactcacggcagctgtgttctgatttcgtactactgctggg

SEQ ID NO: 735821 - DNA, 51 bp, Homo sapiens
aagtgcagaggtttttttctgttctcctgtgcctcctgttggctctctttg

SEQ ID NO: 735822 - DNA, 95 bp, Homo sapiens
attgtgaagaagaatttcgatctccgccctggggtcattgtcaggttagtccgttcattgatgacaacaccagaaggaagttcctcatttatgca

SEQ ID NO: 735823 - DNA, 100 bp, Homo sapiens
cagagagctattattccctgtattaaaggtgtgttccagagaacaagccttcagacatttgctatattgacgctgagctgtcaggggactcaggcttatg

SEQ ID NO: 735824 - DNA, 75 bp, Homo sapiens
gggattcccagccatggcagattcctccgggcagcagggaatatgatgaaccaatcttgaaacacctgcaggata

SEQ ID NO: 735825 - DNA, 82 bp, Homo sapiens
gaatgggaccagcccgagcggagctttggttggaaggaccagcgcaacaaacggggattcagcgtccgatcctttggaacag

SEQ ID NO: 735826 - DNA, 96 bp, Homo sapiens
cgcccatcgcggtctcggccttctatgtcggttataagcacatgtccttggccctgaataggactggcagaagcattgtgtactcctgtgagtggc

SEQ ID NO: 735827 - DNA, 78 bp, Homo sapiens
ctcctgggacgtgccacagatcccatcagaggcaccccagacacagtacgaggaacagcaaattcaggaaaaagtggc

SEQ ID NO: 735828 - DNA, 90 bp, Homo sapiens
ctctaacttggctgatgcaactgcgagaaaaggctgctctgcgtagattggctggggtctgccctgaaggcctccaggactctgactttc

SEQ ID NO: 735829 - DNA, 100 bp, Homo sapiens
cttgccttgagtcagtgcgccgctctccagcccgcttgaacggacacaactcagatgggaagttcatcgcccgggcacagcggatagagtacgactgtga

SEQ ID NO: 735830 - DNA, 112 bp, Homo sapiens
gtccacccagaaggtgctggacccgaagaaggacgtgctgacccgcctgaagcacctgcgggcgctgctggccaaaagaatgcaatggtgtaaagattccagttgatgccag

SEQ ID NO: 735831 - DNA, 100 bp, Homo sapiens
accttcaggagtcggccgggagaggcactcgtgtgacgcgctgaatcgctgggggggcaacaacgccggccacacggtggtggtggatgggaaagagtac

SEQ ID NO: 735832 - DNA, 100 bp, Homo sapiens
ttcccaagagcagcggaaaatgatccagtcacagggagagtcccgtattctcagagtaaaagttgtttctggaattgatctcgccaaaaaggacatcttt

SEQ ID NO: 735833 - DNA, 100 bp, Homo sapiens
gctcccaagaagtccgagacacgcggtgaaatgacaatggatgctctgttggctcgattgaaacttctgaatccagatgaccttagagaagaaatcgtca

SEQ ID NO: 735834 - DNA, 75 bp, Homo sapiens
cagcctcccgagtggctggaactacagataactgataccgtgcttccagaagatttttctaacagtgtttgcaag

SEQ ID NO: 735835 - DNA, 100 bp, Homo sapiens
gccaactttccaagtctggggatggccagcaccgaacaagatttgtgatgaaatggagcctggaacaaactcttttcgggtagaatttcctgatttttcc

SEQ ID NO: 735836 - DNA, 75 bp, Homo sapiens
gctgagggagcgttgacagggaagcagccggatgcctcctgacaaggtgatccgggcgggccccgcaggaatttt

SEQ ID NO: 735837 - DNA, 75 bp, Homo sapiens
ccgagagatgaggccggagcccaccaagttctgggaaagctgcaagcgtttgctcaccacggccgctccctgcca

SEQ ID NO: 735838 - DNA, 72 bp, Homo sapiens
gccaatcacattttgcacaagggcagtcaccatgaaaggattcactggcaaaatttgctggcagaaaactga

SEQ ID NO: 735839 - DNA, 95 bp, Homo sapiens
ttctggaagcgcagcaacagcaagctcccgggcagttgagaaaccaaggcagtatcatgagcaggaagaaacacctgagatgatggcagcccgca

SEQ ID NO: 735840 - DNA, 96 bp, Homo sapiens
agcagactcactaacttatgatccaagccctataccaagtcctgttttggggcgaaagccaaatgctagtcagtctttgcttgtatggtgtaaaga

SEQ ID NO: 735841 - DNA, 90 bp, Homo sapiens
ctggcacaacggctgggagaggaaacttgatgcttctgggccaccatttgccagggcctcgctcgaggttatcctgaatacatgtctaac

SEQ ID NO: 735842 - DNA, 75 bp, Homo sapiens
catggggagcctcagcggtctgcgcctggcagcaggggtgttgggctcttcattggtgtggatctgatcaaagat

SEQ ID NO: 735843 - DNA, 87 bp, Homo sapiens
acaacaatgaagaggtaattcacttgaacaactttcactgccatcggggacaaggtatagacacgtgtggccgtttacgctgtagga

SEQ ID NO: 735844 - DNA, 100 bp, Homo sapiens
taaccccaaaattgagtcctacgctgctgtgaatcacatatcccaactgtcagaggagcagttcgatcctttggtacagaagacagaccgacagatcgtc

SEQ ID NO: 735845 - DNA, 95 bp, Homo sapiens
gaagcccataaataaacaaggagataaatcaaaggaaaataccagaaagatttttagtggccccaaacggatggagtctcactctgtcgcccagg

SEQ ID NO: 735846 - DNA, 98 bp, Homo sapiens
gcggcgctggagagggggcgctgagctgttgggagtgcagcagctgccccgagccccgtgcttggcaacattccccccaacgatgggatgccgggagg

SEQ ID NO: 735847 - DNA, 83 bp, Homo sapiens
gtaggaatagcacataaattctttggagctgaaaatagcgtgaacttgaagatggaaatcatattatgtagaatacttgggtg

SEQ ID NO: 735848 - DNA, 101 bp, Homo sapiens
aagatgcaaaagccttcttgtggaatagtatacagaagatgaagctaggaaaataggagtggttggctgggtgaagaataccagcaaaggcaccgtgacag

SEQ ID NO: 735849 - DNA, 82 bp, Homo sapiens
gcggagccgtgtgcgccgggagcgcggaacagcttgtccacccgccggccggaccagctcaccatggatgatgatatcgccg

SEQ ID NO: 735850 - DNA, 76 bp, Homo sapiens
gtggttccaatgagacagggcacaccaaactccatctgtattaaaggtggaagaaggtccatatctttttctgtgg

SEQ ID NO: 735851 - DNA, 90 bp, Homo sapiens
tctcagctggtgttcgtgattgggatcaaccagacggaaaacccgcccgtggaccgggagcccgtggaccgggagccggtggtgtgccac

SEQ ID NO: 735852 - DNA, 96 bp, Homo sapiens
tttgctagctgctaaaaccacctttgtcaccagaatgaatgaagtgcttcagatttaaataggtgtcaagaagaattgtaagcagattgaatctgc

SEQ ID NO: 735853 - DNA, 100 bp, Homo sapiens
cagcagcccgccagccgccgggagaaaccaatagagccatggcgactccctctgctgccttcgaggcccttatgaatggtgtgacaagctgggatgtacc

SEQ ID NO: 735854 - DNA, 100 bp, Homo sapiens
ccatggccttcgtcgggggtttggtgggcggcccaccgggactcgccgttgcccgtctggtaaacttgtccagattgaatatgctttggctgctgtagct

SEQ ID NO: 735855 - DNA, 100 bp, Homo sapiens
gacatttaattttagggtcctttatatagaagggagagtagggagatgcacttatttacatggaaccagagaaacaagtgatgtccaggtcgtcagatga

SEQ ID NO: 735856 - DNA, 74 bp, Homo sapiens
cagatcctttgacaccttcagaatcgactcaagagttacatgcatcagaaaactttagaaactgttcctttgga

SEQ ID NO: 735857 - DNA, 75 bp, Homo sapiens
ggtctcgcattaaggctctggcagaccgagacatgggtgcccggcaccgcgcccgagcccactccattcagatca

SEQ ID NO: 735858 - DNA, 75 bp, Homo sapiens
gagaaattgctgaagaactcgcaagctcctacgaaagaaagctcatcgaggtcaaaatgcagatcttcgtgaaaa

SEQ ID NO: 735859 - DNA, 50 bp, Homo sapiens
tgcatatgttctccaagaaccacctaaagttactaaaccaaggagattta

SEQ ID NO: 735860 - DNA, 50 bp, Homo sapiens
ggaatcatcgtcgtgaacacagaaggcagttgcagtggtgcagaatggct

SEQ ID NO: 735861 - DNA, 50 bp, Homo sapiens
cagcaacagctcggcgggctggaaggaatgtttacccttgcggaagttgc

SEQ ID NO: 735862 - DNA, 100 bp, Homo sapiens
atcatcaacaagataaatatgaaggacctggtggaacaagatcactcaaggtgaaggataatctactaataccagcactttgaatgaaaatttgtttctc

SEQ ID NO: 735863 - DNA, 100 bp, Homo sapiens
agtcagaagtccgtgagcagatcaatgccaaggtggctgagtggcgcgaggagggcaaggcggagatcatccctggagcttcagcaaccaggagggattg

SEQ ID NO: 735864 - DNA, 83 bp, Homo sapiens
cggagatggaaacaggaaagcctgttgttttgtcgtcccagtttctatttttgaggccgggtgcagtggctcactcctgtaat

SEQ ID NO: 735865 - DNA, 83 bp, Homo sapiens
cggcgagcggacggctgcatttacggggtctcccggagggccagagtcgatgttctcgtccgtggcgcacctggcgcgggcga

SEQ ID NO: 735866 - DNA, 74 bp, Homo sapiens
ccatcctcgctcccacctgtcagccttctaccccatgagaaagaccaggtgagtggtgtcattgagcaaacacg

SEQ ID NO: 735867 - DNA, 82 bp, Homo sapiens
ggttacaaacttttaccggctttcaacactaccagtggccttccttatccaagaaagacctatttggagactgcttcctgtc

SEQ ID NO: 735868 - DNA, 110 bp, Homo sapiens
cttttgcataagaaaggcttttctctccagtcattctgcttgctgatcaagaacacttaacagcttcaggctttcctgggttaaagcacgaattgggagctctcagcgac

SEQ ID NO: 735869 - DNA, 74 bp, Homo sapiens
aggcctccgcttctccggcctccctgctcttaccgggaggcaccaccttccatggtcaataatgaacaacgcca

SEQ ID NO: 735870 - DNA, 100 bp, Homo sapiens
gtccctcccagttttagatgatcaggtgaaagacaacttgagtggttaaattactgtcatgcaaagcgactagatggttcagctgattgcacctttagaa

SEQ ID NO: 735871 - DNA, 82 bp, Homo sapiens
ggtggcctttccactggagttgcttcacttagctctacaatcaacccatgtggttgttattgatgccttcagattgatcaat

SEQ ID NO: 735872 - DNA, 75 bp, Homo sapiens
tcttctaatactcctcctctaacatgtcagcgttattgtaatgcaagacgactgggtttggattcagaagaggat

SEQ ID NO: 735873 - DNA, 75 bp, Homo sapiens
ccttaaccgagatcaacctgtctgatggcgagcggctgcagctgcaggatgaggaagacgacagcctgtgtcgca

SEQ ID NO: 735874 - DNA, 98 bp, Homo sapiens
gggagcccctgctcctgcctcccccgtcccaccactgaggctgttgggccaggccagtcatgctagaacctggcagagaggctgatgacatcgtgaac

SEQ ID NO: 735875 - DNA, 76 bp, Homo sapiens
agtcatgtacagaacatgatcaagggtgttacactgttgtggtcagaaatgagaagacatgaaatgttgagggagg

SEQ ID NO: 735876 - DNA, 123 bp, Homo sapiens
atgaagagcccaaaacctattacgaactcaaaagtcaaccgctgaagagcagctgcttttctaacccaaactgtatgtcttgatgacactacagtaaagtttgaaatatgggatacagctggt

SEQ ID NO: 735877 - DNA, 82 bp, Homo sapiens
cgccacagttcctaccttatgagctcggttttcttatgcttataagagtggaacagatatggctcgtggacagcagaaaatt

SEQ ID NO: 735878 - DNA, 100 bp, Homo sapiens
atcggcagcctgggtatgatggcaaaagaaacatgtacacagcacatccactaccaattggacgggataggtacttccaggcgcgactggccggggccgg

SEQ ID NO: 735879 - DNA, 100 bp, Homo sapiens
cacagaaaagaacaccttcatagaacgaacaatcaggtaaactgtcttgagccccaccctcacctgcctgtgctggcaaccagtggcctagaccatgatg

SEQ ID NO: 735880 - DNA, 51 bp, Homo sapiens
gacttttgaagaagtggtcaagcctactttggggataaaggattatttggt

SEQ ID NO: 735881 - DNA, 82 bp, Homo sapiens
cagagaaagaagtgataggagggctctgtaggccctgtttgtgctcttcgtcctggcctacatccacatcgtcttctcccgc

SEQ ID NO: 735882 - DNA, 100 bp, Homo sapiens
aggaaatgggaccaaccttgatgaatatgtggctttggtggatggggtattcttgaaccaggtcatgctccaaatcgcttcagcatggaagggatctcaa

SEQ ID NO: 735883 - DNA, 83 bp, Homo sapiens
ctgcaaaccacccaagtctgcaatcttaccagggaggccaagcgaccacccaaagaagctgcaagagaaatagtgtggttaga

SEQ ID NO: 735884 - DNA, 74 bp, Homo sapiens
ccagccaccagcgtggctgtccgcagagggacctgctgtgccatcaacaagacctggaatcatttttctgataa

SEQ ID NO: 735885 - DNA, 100 bp, Homo sapiens
gtagagtttgcagcaaaacctcctgcacgaaaggctctggaaagatgtggtgatggggcattcttgctaacaacgctgtcatcaaccggccattcaatga

SEQ ID NO: 735886 - DNA, 99 bp, Homo sapiens
atctgtcttcggtggactccttcggcagtccacccaccgccgccgcctcccaggatgataatgaagataattcaaatgatgggacccagccatccaaaa

SEQ ID NO: 735887 - DNA, 100 bp, Homo sapiens
cgccgacggctgctcaaacatcagggtcgccgccctggagaggcaggtgtttgacttcctgggctaccagtgggcgcccatcctggccaactttgtccac

SEQ ID NO: 735888 - DNA, 101 bp, Homo sapiens
cgtctacaatggagtcgagtctagaattcacacagagccacctaggtcgaaatgagaaggggcagctgggacatggtgacaccaagagagtagaagcccct

SEQ ID NO: 735889 - DNA, 75 bp, Homo sapiens
gaagttctcccacagccgcgtggagatcatggtcaaggcatgaagaccccgtttggaaaggcagctgcagggcag

SEQ ID NO: 735890 - DNA, 100 bp, Homo sapiens
caggacttcgagtctctggcagacctgacggaccaccgggcccaccgctgtcctggagtgttgttaataacagtactggtagtggaagggattgccgtgg

SEQ ID NO: 735891 - DNA, 100 bp, Homo sapiens
gggcgccctccccgccaaggcccgtgcgagttgaaaatgacccacatttcatcatttatctaccaaaaagccaaaagaacatttgtttcaatattgactc

SEQ ID NO: 735892 - DNA, 51 bp, Homo sapiens
tactactaactttgaaatggaataagctcattgctatggacagtgctatca

SEQ ID NO: 735893 - DNA, 100 bp, Homo sapiens
gaaaatggagatattgggaaagaaagatatagagacaacgactatgtccaattttcatgctcaggtcctccaaaagctggggaaagctgatgagacaaaa

SEQ ID NO: 735894 - DNA, 100 bp, Homo sapiens
caagctctgtctgggttctgctgtcaatggtgttgtccagtcagaagagatcaattctacagaaatttccagtggttctgttgaggctttatggaattca

SEQ ID NO: 735895 - DNA, 101 bp, Homo sapiens
aagtatccaatagggatattgtagaaactgtctttaacctgatgtacgaacaagtccgaaagagtttagaaatgtgcagcattcagagggacattgaatac

SEQ ID NO: 735896 - DNA, 102 bp, Homo sapiens
acaggctgagtggaaatgtcctgtcctatacattccagcctaccgtatgtgaacgggagctgtgtgtgtttgcttttcaaaccctgggagtaatgaatgaag

SEQ ID NO: 735897 - DNA, 88 bp, Homo sapiens
gagacgtcagaacgtggcttatgagtacctttgtcatttggaagaagcgaagagacccaacatgagtgaagtttcctgcaagaaacgg

SEQ ID NO: 735898 - DNA, 83 bp, Homo sapiens
gtcggcgtgggcgtttgaggaagctgggtcatcatcagatttgaaatatttaaagtggatacaaaactatttcagcaatgcag

SEQ ID NO: 735899 - DNA, 75 bp, Homo sapiens
tcgtagtctacactttctgaattttccagctgtgtcagcgtgttatgatgccgtcccgtaccaacctggctactg

SEQ ID NO: 735900 - DNA, 98 bp, Homo sapiens
atggaggatccttaccaaatgtgagccagctgcggagcagtgcgtcagagtttcagctgcggataaccgtctggtccttgtgcacaaaatccgtgtct

SEQ ID NO: 735901 - DNA, 87 bp, Homo sapiens
tcatttccttcgtacccacagtgcttcatgagaggagcccagtttcctccaattgcagcacaagaccttccttttgttctaaaggct

SEQ ID NO: 735902 - DNA, 101 bp, Homo sapiens
agcagcaactgtgggactttttgactacaattctcaacaacagatttgagagggaagatctgatctcctagaattagagttggtacagaaaccatttcagc

SEQ ID NO: 735903 - DNA, 82 bp, Homo sapiens
ttctgctggaggttcagaagcacctagacctgtccaatgtggctgggtgtttcccattaaacactaccaggacaaaatcagg

SEQ ID NO: 735904 - DNA, 75 bp, Homo sapiens
tctttgacacacagcagttcttgtcaggccagaagcggactcctagaagaggggagcagcaaggatggaatgaca

SEQ ID NO: 735905 - DNA, 99 bp, Homo sapiens
cgtcatcttgggccccgaggacctgcgcgcgcgcacccagctgcggaacgagtttatcgccccgtgctgatcccattccaatatgtagcttctgtttgg

SEQ ID NO: 735906 - DNA, 90 bp, Homo sapiens
atgaagggacacagtacggtagtcaaacccccagcctactttggggataaaggattatttggtcttctggatttggaggcaatcagcgga

SEQ ID NO: 735907 - DNA, 99 bp, Homo sapiens
tgaaccgcaagatggtggaagtggtggctttccgggcctttgacgagtggtgggacaagaaggagcggatggccaagtagagacgggtttcaccatgtt

SEQ ID NO: 735908 - DNA, 74 bp, Homo sapiens
ctcagaggcttgctactctctgcttccctagacaacactattaaactgaccagcttgttggggagttcctggaa

SEQ ID NO: 735909 - DNA, 75 bp, Homo sapiens
agggtggctttggatcagattattcacgaagctctagaaaggaagctgccacttttgctagagagcaaggctttg

SEQ ID NO: 735910 - DNA, 83 bp, Homo sapiens
gcagcaccgcagccttgggcctcgcgccggctatggccgtgccctggggctgagccctcaggaatagccaggccagaagaagg

SEQ ID NO: 735911 - DNA, 101 bp, Homo sapiens
gccgtggctcaagcaggacaatcgcactttataccacctgcgattactcttcgttccagagcccagcatgaatggatacgcggaatttccgcccagcccca

SEQ ID NO: 735912 - DNA, 90 bp, Homo sapiens
ctcgcccacctctacccggcagcgggggcagtcagagcggagccaagatgcgaatggggaccctgatgctcccataagacagaaaatgcc

SEQ ID NO: 735913 - DNA, 82 bp, Homo sapiens
tgtcccagctcggcccgcgggggagccccgggagccgcacggaaaatgtttataggaggccttagctgggacactacaaaga

SEQ ID NO: 735914 - DNA, 120 bp, Homo sapiens
tgtccctctagctttgaactacaaagtggaggggaagtttgtctggattttcctgtagaactgagggcaggaactcaacagaggcaattattatcccgactgcaaatcgacccagtaatg

SEQ ID NO: 735915 - DNA, 100 bp, Homo sapiens
gtgcagtcttatcgaaggatgtgcatgaaggacagcctcttctcaatggtgtcatggagaaactccagctgggcccagagattctgcagcgggaaaatcc

SEQ ID NO: 735916 - DNA, 82 bp, Homo sapiens
ccctgccgtcatgtctaagtcagaggagccttcacgtaaatgggtccagtcatgcctcccagtaagaagccagaaagctcag

SEQ ID NO: 735917 - DNA, 89 bp, Homo sapiens
ctccagagagacgtgaaacatgtgaacactcaagtgaagcaaaagccttccatgattacctgggatctagcaattgggaggcagcagac

SEQ ID NO: 735918 - DNA, 83 bp, Homo sapiens
cgcggcgccgccacaagttgcgctgctcgcgacgagataacgaaggaggcccaacttcattcaataaggagcctgacggattt

SEQ ID NO: 735919 - DNA, 99 bp, Homo sapiens
cgcatgcagaaaatgaacaacgaagtggtggacaagtgcaagagaagcctgagccagtgccgctggagagccgctcctgcgtcctcatccgccgcgacc

SEQ ID NO: 735920 - DNA, 83 bp, Homo sapiens
ctgaacggaatatctgcagcaagtattcgcatgtgcagtctttgccaacaaaaaaaattaccaagaaacctattccagatgag

SEQ ID NO: 735921 - DNA, 83 bp, Homo sapiens
aaagctgttgaaattgttacttcaacttctgctgacttaattcagtgcacaaatgagatgaatgtgaacatcccacagttggc

SEQ ID NO: 735922 - DNA, 90 bp, Homo sapiens
ctccgtacctggacctgctgaatcatagcccacatgtccaggacggaagctcctgttttcttgtcagccgccagctgagggccattcgca

SEQ ID NO: 735923 - DNA, 75 bp, Homo sapiens
tgatggtggcagcaacaaggagggaaaaaagagcaggtggaaaaggaaagctgctgaaatgggttgcggattgaa

SEQ ID NO: 735924 - DNA, 97 bp, Homo sapiens
gagggggtggcagtgagcggcggcagaggctacggggctcggtttggctgactggggagtcggcaggcggcaggttctgtcatatgttgaagaatcc

SEQ ID NO: 735925 - DNA, 83 bp, Homo sapiens
ctgaacagatttcctgcccggggccctcatggacggttggatcagggccgaagaatatgagttggaagtaaagagggtgcaag

SEQ ID NO: 735926 - DNA, 100 bp, Homo sapiens
ggaatatcctgcagaagaaaatggatttcgttatatcccctttagaatatatcagaactttgcagaaaacaccatgaatgaactccttggctggtatggc

SEQ ID NO: 735927 - DNA, 100 bp, Homo sapiens
ttcatcagagagcattttactactgagctgcaaagatcagcttgaacgggtctttttacgacttggccatgctgaaacagatgaacaattacagaatatt

SEQ ID NO: 735928 - DNA, 82 bp, Homo sapiens
atgaagctactaaccagagccggctctttctcgtgtctccagaacgctatagctatggcacctccagctcttcaaagaggac

SEQ ID NO: 735929 - DNA, 78 bp, Homo sapiens
ccaagcccgctgagcaggatgaggaacaccttccaccatgaccacctcagcaagttcccacttaaataaaggcatcaa

SEQ ID NO: 735930 - DNA, 99 bp, Homo sapiens
gcccagaagaggccgcacacgccctggagctccgcaagggggagctgcgctcggcggacctgcccgcgatcgccatggacagccagaagcagttcagcg

SEQ ID NO: 735931 - DNA, 90 bp, Homo sapiens
gccagcaagcggaagctgcccttcaccgcgggcgccaatggggagcagaaggactcggacacaggacccgtgcatctcttccgactctcg

SEQ ID NO: 735932 - DNA, 51 bp, Homo sapiens
cagcagaccttggtgatgtgctacagaattcgacaccaaattttggaactt

SEQ ID NO: 735933 - DNA, 75 bp, Homo sapiens
ccacaataaaagagacctctacttagctcagcaattcttacctttgacaacactgcagctgaaggaggagttgct

SEQ ID NO: 735934 - DNA, 116 bp, Homo sapiens
gccagtgggctggggactcacggccgggacactcagggcaggtactccaaagattcaggtttactcacgtcatccagcagagaatggaaagtcaaatttcctgaattgctatgtgt

SEQ ID NO: 735935 - DNA, 100 bp, Homo sapiens
gtttcatattgcatcacatcgggggacacataaagctaggtcgtcccactgttccgtgtatcacttggataagggtgagaaggactggcagaaatacgag

SEQ ID NO: 735936 - DNA, 99 bp, Homo sapiens
aggaaattgaaggaatttccccgtaccgcagcccccgggcacgacctctcggacacggtgcaggcagatattgcggtggtggagatgagcgatgccttc

SEQ ID NO: 735937 - DNA, 83 bp, Homo sapiens
ggttttttgtggcttccttcgttattggagccaggcctacaccccagaaaaatggctacaaacttcctagcacatgagaagat

SEQ ID NO: 735938 - DNA, 100 bp, Homo sapiens
taagcgatgaaatccaaaggtgaatcttttggttggtgattttgatgatagccacaaagcaagcagggtaaaataccatgaagattttgaaaaaacaaag

SEQ ID NO: 735939 - DNA, 100 bp, Homo sapiens
atcctctgctgcatagtttcggtcatctaaaggaggttttaaacagtataacaggtatccgttacagcactgatgtgagtgtagatgaagtaaaagcttt

SEQ ID NO: 735940 - DNA, 99 bp, Homo sapiens
gaccaccccggacggcccctgtccccgctggcgggcttccctgtcgccgttcgctgcgctgccgggacttaaaatctccaaatcagagagatgaaattg

SEQ ID NO: 735941 - DNA, 94 bp, Homo sapiens
cattcagccccaccgacggaattgcagttgaagactgatattttaaggccgaattaagaaagtggtttccatctacggaagcagcattgatgtg

SEQ ID NO: 735942 - DNA, 100 bp, Homo sapiens
gctcagccaatcactcctggcccctcgattccaggtgccccacagatgatcacggaagccttggcccaaggtgggatgcacataagagcccggttcccgc

SEQ ID NO: 735943 - DNA, 90 bp, Homo sapiens
acagaatttatatagagatgtgatgttggagaactacagaaacctcgtctccctggagcttgtggacaaatgtataggatcaagaattca

SEQ ID NO: 735944 - DNA, 110 bp, Homo sapiens
cagcagcagctccagcaggcgctggctcctgctcaggtgtcatggagaaactccagctgggcccagagattctgcagcgggaaaatccaaggcttatttatgccaggctg

SEQ ID NO: 735945 - DNA, 101 bp, Homo sapiens
aacctattcagtccagcaggattcggacagcaagcatgtggatgtacatctagttcaactaaagccagagactgctgctactttgaaacgtacgatagagg

SEQ ID NO: 735946 - DNA, 100 bp, Homo sapiens
gcgagaaagaggaggaggcgagaaactcccaccgacccacagagtgtgaagagtgccagtgctggcagcatggggtctgcatgggattactggaagaaaa

SEQ ID NO: 735947 - DNA, 100 bp, Homo sapiens
tcagttcccacgccaaaccagaccccatggcctgctcagcctcagcgcttattgcaggagtgaccaggacactacctcctagaagtaatgcccacagaaa

SEQ ID NO: 735948 - DNA, 74 bp, Homo sapiens
gccacactctttaggataacatccaatgccatgatcaacctgctgctgttcttgaagggtttttcagagtcgga

SEQ ID NO: 735949 - DNA, 85 bp, Homo sapiens
caagaagaagaagttgcgaaggatccccaacggggaggccaacgtgaagaagttatcaatactctggctgaccatcatcatcgtg

SEQ ID NO: 735950 - DNA, 82 bp, Homo sapiens
agagattcagccaaaccccccatcctctgggatgcttgcttcctgcctgacacagctcacttcaagaagtgcacaatgtcag

SEQ ID NO: 735951 - DNA, 101 bp, Homo sapiens
aggttagacttgtttcttatatgtgatgccattccagcactggactcatggaggctgagcatttattcaggttttgcacactagggaccaagaagccctcg

SEQ ID NO: 735952 - DNA, 100 bp, Homo sapiens
aaagaagagttaaatgccctcaagtcgacaggggatgggaccctagaaacccgcgctgaccgcagcaagaagcttttcaggcactacaccgtgggctcct

SEQ ID NO: 735953 - DNA, 74 bp, Homo sapiens
tgcaatccatctgtcatgcttgctgcaggttgttgaagattggaaattcatagcccaggttcttgatcggatgt

SEQ ID NO: 735954 - DNA, 102 bp, Homo sapiens
ctgcagatctgggacacagcggggcaggagcgcttccgcaccatcacctccacatgcttctgatgagcagaattcacagtcctcgatggaacattcgatgaa

SEQ ID NO: 735955 - DNA, 100 bp, Homo sapiens
acagtcgtgggtgcccagctgggtggatgtgactccagtcagcagagcagaagccaggagaggttttggtcttgaggagaaggcagagcccccccaggct

SEQ ID NO: 735956 - DNA, 50 bp, Homo sapiens
cggacctaggtcgcggcgacatgcctccactgagcttcagcaagtcatcc

SEQ ID NO: 735957 - DNA, 100 bp, Homo sapiens
tatgcatctggtctctttttggagctacagtggacaggcatttgtgacagacactcttgcactcctgtaatgagcctggcactgtgatgaaacacttttc

SEQ ID NO: 735958 - DNA, 75 bp, Homo sapiens
tttattcctgaagatgacccattatttccacctattgaggggcagtacccaaaggaaacgctacgaaagaataca

SEQ ID NO: 735959 - DNA, 78 bp, Homo sapiens
gctggtgcccggccccggactgcgggaggttccccaatacaactcatgagggtttcaatgtcaccctccacaccaccc

SEQ ID NO: 735960 - DNA, 80 bp, Homo sapiens
tgtgcctccaggttatatctcacaggattactacagcatcccatttcccacacccactactccgctgactgggagggatg

SEQ ID NO: 735961 - DNA, 75 bp, Homo sapiens
tgggaccttctccctgcctggacccctactattgcaacaagcttattgcaggagtgaccaggacactacctccta

SEQ ID NO: 735962 - DNA, 83 bp, Homo sapiens
agttctagtagcacacactctgcacctcgaaggctgacaagtcatctgggaaccaaggatcagtttgacaacttagaaaaaca

SEQ ID NO: 735963 - DNA, 75 bp, Homo sapiens
cggcactggctgaagagctctttgagaaagggtgtccgcaatgttgccagtgtctgtctgcagattggctaccca

SEQ ID NO: 735964 - DNA, 90 bp, Homo sapiens
cgaccagttcgttatattagaaaacctattgactatacaattctagatgatattggacatggagtaaagtatacaattggaccgtggatg

SEQ ID NO: 735965 - DNA, 101 bp, Homo sapiens
aagcttcgagggcgaacgctttactatgccaaaacggcaaaggggcaccaccacgaggcgatttgtgggccataccaaggatgtgctgagtgtggccttct

SEQ ID NO: 735966 - DNA, 83 bp, Homo sapiens
aacgcctcccggctctcgtcagcctcccgccggccgtctccttaacaccgaacacctttggtgccctggttgtcagatgttgg

SEQ ID NO: 735967 - DNA, 99 bp, Homo sapiens
ggcttctgcagctccagaaaagcttttacctgatatccccatcagaatttgaacgcttctccctaagtgcccggaacatcacagagccgctctgctctc

SEQ ID NO: 735968 - DNA, 125 bp, Homo sapiens
ctcggagttggcattcatcattttctaatcatcagcatttacatgacagaaatcacctatgtttacagcgacagaacaagttgaaatcatcgcagaaggataaagttcgtcagtttatgatcttc

SEQ ID NO: 735969 - DNA, 90 bp, Homo sapiens
cccgcgtgggcaccctgcaggtggtcagacatgtcatcaactcagctggcccgcgatgctcccagcccggtgagacctgcctgaatggcg

SEQ ID NO: 735970 - DNA, 100 bp, Homo sapiens
gaaggaactttgggtcctgaatcttctgggagctgaggaaccagatatcttgaaaagctgccagaaagattggctggtggacagaaggcactgcagcctg

SEQ ID NO: 735971 - DNA, 116 bp, Homo sapiens
tgctggccccgggtggcgcctccctgcgactcctggaccaccgggcgctggtctgctcccagccgaggctgggaggcggcagaatgcagccagaggagggcacaggctggctgctg

SEQ ID NO: 735972 - DNA, 83 bp, Homo sapiens
aaatattattgcaatctatgagaaagccattctggcaggggctcaggtatttcatgacactgaaacagacagggtaataattg

SEQ ID NO: 735973 - DNA, 75 bp, Homo sapiens
tacaaatcatggagccgctggggtcccttttgcctcagatactattttgaagatgtgaacgagtgtgaaacacta

SEQ ID NO: 735974 - DNA, 100 bp, Homo sapiens
ggccagccgccgagggggcgcggcccaggacggcggctaggccgtagtgcagcctctccggagtcctcaggacaggcgacactaacaggtgaagatctcg

SEQ ID NO: 735975 - DNA, 75 bp, Homo sapiens
tgaatagttctactccttctacaggtactccaaagattcaggtttactcacgtcatccagcagagaatggaaagt

SEQ ID NO: 735976 - DNA, 90 bp, Homo sapiens
ctacgagctgtttctcatctttatactcttccagggctgaagaagatgcagagcagcctgaagctggtggactgtatcatcgaggtccac

SEQ ID NO: 735977 - DNA, 78 bp, Homo sapiens
gaatctgtaaagaacaaatatgaatgtgaaattcaagcttctcgccagcattgtgagcttgacctcagagatgatgtg

SEQ ID NO: 735978 - DNA, 100 bp, Homo sapiens
caagatggccgggctgccccgcaggatcatcaagggccaattcctgtccccccagcagcatggcatcgtgtgctgaaccctctgagccctctgccccact

SEQ ID NO: 735979 - DNA, 83 bp, Homo sapiens
atttcagcctgcacggatggtcttgaaacacaaatggtttttgagtttcagattgccaaaagacaaaacgggtaccacaagga

SEQ ID NO: 735980 - DNA, 100 bp, Homo sapiens
agaacatcaagattatcagcaaaatcgagaatcatgagggggttcggaggtttgaagatgccgcatttggattggatgaattccaaattctgcttgcttg

SEQ ID NO: 735981 - DNA, 141 bp, Homo sapiens
gatgctacatggttacaacaaccggacccagcatgtgaaccaaggccaagtcttccagatgacctttagggactggtttggctgaaagacaaagaagcaacacattgtaaactttgtgaaaaggaattctcactctctaag

SEQ ID NO: 735982 - DNA, 82 bp, Homo sapiens
taaagaaagtgcctacatgttgttttatcggaaatcccagttgcagagaccccctgaagttctttatagctccaagctctac

SEQ ID NO: 735983 - DNA, 100 bp, Homo sapiens
atcgcagctactaattttcatgatgctcttagctccaataattcatgagaaactccagaaaatcttgccaaacttctgaccaggatgtatttaaaatcag

SEQ ID NO: 735984 - DNA, 100 bp, Homo sapiens
gtgcggatttctgctatgatgacagatgccgacaaaaggatcaaggtggcgaagcccgtggtggagatggatggtgatgagatgacccgtattatctggc

SEQ ID NO: 735985 - DNA, 75 bp, Homo sapiens
cccgccagctgctccggagatacggggagttgctgagtcagcccagaccggaaggagtggcagagatcatttgcc

SEQ ID NO: 735986 - DNA, 100 bp, Homo sapiens
tcttttcaatgctgcgaaagctgccaaaagtgacatgcagctggactgtccacttgttaaaaaattaaatccacccttgctcttccgtcggggagtattg

SEQ ID NO: 735987 - DNA, 80 bp, Homo sapiens
ggcgaatatcttcccttacaagggttatatatggaattatggtaccctccctcaggatcgcaacaatgcaaggcaaattc

SEQ ID NO: 735988 - DNA, 76 bp, Homo sapiens
ggcaaccaccccgtctgagaacctattacctgccagcctgtctgtttccctccagctagaaggtcttcagtttcca

SEQ ID NO: 735989 - DNA, 75 bp, Homo sapiens
cgcgtctctctgctgcggcgcggggaccgctgtgctctcgcttgcttggctcaggaacaacagaagagaataaag

SEQ ID NO: 735990 - DNA, 101 bp, Homo sapiens
caaattgtcgccattaagaaagttcttgggtgtctctggggagtccctgggccagaccttcctccagactccagcccacctcttcggagcagctctgctga

SEQ ID NO: 735991 - DNA, 100 bp, Homo sapiens
ggtgtggcggagcgcgcggtgcatggtcagccatgtcatctgagcctcccccaccaccacagccccccacccatcaagcttcagtcgggctgctggacac

SEQ ID NO: 735992 - DNA, 90 bp, Homo sapiens
aggtcacagtggacgaggtgttggcggaagacctttccagctcacccccagggccttatggtcaagaaatgtatgcgtttcgatctgagg

SEQ ID NO: 735993 - DNA, 100 bp, Homo sapiens
gttgaaatgtcttcagcgtgaagatcccagtttgaaagtgaggctagatcctgactctggacaaggttggattgagattgttggatgtgctgatcgttcc

SEQ ID NO: 735994 - DNA, 82 bp, Homo sapiens
gtcgacatgttccaggtcccggatagcgagggcggccgcgccggctccagaaagtttcctacactactgaggtttaggggca

SEQ ID NO: 735995 - DNA, 75 bp, Homo sapiens
aagatgctatgtgagatcttgaaagtgggcgagttgcatacagatccacgggttttagaaaaacaagaattacag

SEQ ID NO: 735996 - DNA, 98 bp, Homo sapiens
ctttctctgctgcaacacccctactgttctccgtgtattggcttttctgggcagcaggctggagcattggatttgctaaaggagcttaagaatattcc

SEQ ID NO: 735997 - DNA, 100 bp, Homo sapiens
ttgtttaatgactttggtgccctcaacatctctcagagacgaaagatgctattaactgagtacttggatatgaaaaatactcgtacggcctctgaaccat

SEQ ID NO: 735998 - DNA, 100 bp, Homo sapiens
ctgaggcgacggccgcggctgcacagatggatgagttacatatatctatgatccagtggatggtaaacttgctgattttaatgatacccaactttactga

SEQ ID NO: 735999 - DNA, 100 bp, Homo sapiens
gccgccgccgccgccgccgcccctgttgcgatggcgcagaaaccccgttgacaaggcactgctttttcatgacgctctaagcgaaagacatgaggcctca

SEQ ID NO: 736000 - DNA, 87 bp, Homo sapiens
gctgtttatatgaagtagcctaccagttccaaaagctgagacaagatcttgaaatggtactgtccactaaggagtcaaagaatgaaa

SEQ ID NO: 736001 - DNA, 100 bp, Homo sapiens
caactttctgggcgttcatgatcctggccagcctgctcatcgcctactgcaaggaattacggaggttgagctggtccggaatccctaagccagtgcgtcc

SEQ ID NO: 736002 - DNA, 50 bp, Homo sapiens
tgaaaggcttcaaagctagcagtgagaaagatcagtctaaagaaaaggag

SEQ ID NO: 736003 - DNA, 100 bp, Homo sapiens
aagggagatagtgcagagactgaaggtgttggggcgatgtttcctgactgtggtgcaagtccatttccagtttttgactcatgcgttacagaaggtccag

SEQ ID NO: 736004 - DNA, 100 bp, Homo sapiens
aaaaaagcatatgaaagaattcaaggttttgagtcggttcaggtcacccaatttcggcatgaactcaacagaatccaactcttctgcctctgttagacca

SEQ ID NO: 736005 - DNA, 83 bp, Homo sapiens
ggaattgctactgctgcctctgtcactcctggtgaccagcattcaaggtccagtgcgaggcattgacttccataagcagcagc

SEQ ID NO: 736006 - DNA, 90 bp, Homo sapiens
tgtaggcttggagcagaatcaccaagcatcgccagcaccaggtgaaattgatcttcaaattctctccaaagttcaggctcaatacccagg

SEQ ID NO: 736007 - DNA, 103 bp, Homo sapiens
ccccaaagacgctaaacgtgccctactctgccccgggggagagacaatgcagatcttcgtgaagactctgactggtaagaccatcaccctcgaggttgagccc

SEQ ID NO: 736008 - DNA, 85 bp, Homo sapiens
agggaaaatagaacctacgctgaaattttgggggcaggttctcttgctaggctggtggaggaagtgaaggagctgtgtgatggcc

SEQ ID NO: 736009 - DNA, 75 bp, Homo sapiens
gagaggacgcgggcgaggaagaccagccccggggccccggttttgaacgaagaatgtgatcagaactggtacaag

SEQ ID NO: 736010 - DNA, 82 bp, Homo sapiens
cttggactgagtcctgcaggacacaggtttgtcaaagatcagatggtttccttaagctgataagcaacttcaacaaagtctc

SEQ ID NO: 736011 - DNA, 83 bp, Homo sapiens
taattccttttcgaccttcaatccagttccaaggactccacgggaagaatggttgagaccggtgatgagaaaagagaagcaag

SEQ ID NO: 736012 - DNA, 100 bp, Homo sapiens
caacgactgcgtctccatcaaccgggccgtgccccagatgcccaccgggatggagaaggaggaggaatcgaccccctggttgtggaatacgaggcattgc

SEQ ID NO: 736013 - DNA, 50 bp, Homo sapiens
attctgacagtgaggttgacaaaaaggactatgagagtaaattgcaggcc

SEQ ID NO: 736014 - DNA, 82 bp, Homo sapiens
gaagctcaccgagacggcgatccgggcgctcgagacttaccagagccacaaggtatcatgatattagctggtttgacatcaa

SEQ ID NO: 736015 - DNA, 51 bp, Homo sapiens
aaaagtagctgtcattggtggtggcttgacctaatctgggagcctgcaagt

SEQ ID NO: 736016 - DNA, 96 bp, Homo sapiens
tctcgacctgctaacagaactggaccttttcgattctgaaaaagagttccacgtcctcccttatcgagtctttgttccccttcctggatccactgt

SEQ ID NO: 736017 - DNA, 88 bp, Homo sapiens
aaagacaggcatttggatcagctcctcctttgtgccttttatatcatggcaaagggcactccacagaaggatgttattatcaagtcag

SEQ ID NO: 736018 - DNA, 96 bp, Homo sapiens
atgatgcctgtcactgggggcaccattaacatgatggagtacctgttgcagggtgaaatgacaatggatgctctgttggctcgattgaaacttctg

SEQ ID NO: 736019 - DNA, 88 bp, Homo sapiens
cccgttcttgcctcaggccagtcgcctccaggccaagagggatccttcacccgtgtctgcctctgcctgtgagtttctggatattgta

SEQ ID NO: 736020 - DNA, 100 bp, Homo sapiens
attttctgatcagaccaattggagagaagttgccaacatctggaggctgttctgctttggagttaaagttctcaaaagtctatggtcctgtgttcaccgt

SEQ ID NO: 736021 - DNA, 100 bp, Homo sapiens
gaagatccaaaggaaggaggagctaccaccaaagagtcagatggagatggacacatggatcatttactgccaggctgtgaagataaaaattgccaaaaga

SEQ ID NO: 736022 - DNA, 98 bp, Homo sapiens
ttcctctccagctcagccgcgtaggcttattgtgtaacagaacctggagcaggctctgatgtagctggtataaagaccaaagcagaaaagaaaggaga

SEQ ID NO: 736023 - DNA, 78 bp, Homo sapiens
aaccagtacttctggagtgtatgtcactcaagactgcttgcaactgattgcagacagtgaaacaccaactatacaaaa

SEQ ID NO: 736024 - DNA, 82 bp, Homo sapiens
cctctctcctgatacagcaggcgctcaccatgttccctggagccgaggtgctcggtggagtcatggcagtgccctttgtgga

SEQ ID NO: 736025 - DNA, 83 bp, Homo sapiens
agtcctaccatgtcagccttcccagtagctgggaccacaggaactttgtgaaggaagccgaggagatcagctccaaccgccgg

SEQ ID NO: 736026 - DNA, 75 bp, Homo sapiens
tgccccgagggtctcctccagtagacggtacagcgaaggcagagagttcagggatccctgagatgttcatactct

SEQ ID NO: 736027 - DNA, 134 bp, Homo sapiens
agcgcgagtacagctgcaccgtgcggctgctggacgacagcgagtacacctgcaccatccagagtactattaatcccgtagatgcaatatatcaacctagtcctttggaacctgtgatcagcacaatgccttcc

SEQ ID NO: 736028 - DNA, 100 bp, Homo sapiens
ccgaacgatgtgcgagaactgcgcagacctggtggaggtgttaaatgaaagcccagaccacactgaccacaaatgacattgtcattagcaagctgaccca

SEQ ID NO: 736029 - DNA, 100 bp, Homo sapiens
acgatgccgaacgtgctgctgccgcccaaggagagcaacctcttcaaacgcatcttggcagtagcaggtttgttggcagatgctcgttctttagcagaca

SEQ ID NO: 736030 - DNA, 82 bp, Homo sapiens
gctcgtcgccgttcgccacccaaggtaagtaaggaggtctctgtaccatggctcgtacaaagcagactgcccgcaaatcgac

SEQ ID NO: 736031 - DNA, 100 bp, Homo sapiens
aagtccctgtgagaccattagcagccctagttccaccctggaaagcaaggacagtggaattatagagcaacaagatatggatttggatatagaatttgat

SEQ ID NO: 736032 - DNA, 50 bp, Homo sapiens
gcggattcgatcattcacatcgttcatccagagcagcttcctccgaggcc

SEQ ID NO: 736033 - DNA, 100 bp, Homo sapiens
attcctgagtagcattacctacagctggtatgacaggcctccgaccagggagaccttccatcctcctccacctgttccacccagaggacgctgattccac

SEQ ID NO: 736034 - DNA, 76 bp, Homo sapiens
ccagggagtgcaagcttagagcgtctggccaagaatcagaggaagtggcaaaaaatcccagaagtgggatgaaatg

SEQ ID NO: 736035 - DNA, 100 bp, Homo sapiens
cctattacccggaatctggatgggaccgcctccgggagctgtttggcaaagaactggttcaggcagaccctgctgaagaagcccaagaagaggcccaact

SEQ ID NO: 736036 - DNA, 101 bp, Homo sapiens
cctttctatcactgtttggtagcagagattcttccagcgcccgggaagctactgggctgccatgatggcggaggagctgaagaaggagcaggacaccagcg

SEQ ID NO: 736037 - DNA, 98 bp, Homo sapiens
ctttccagcccgtttgtgaatcagcgcaagtcatttcccttatttaaccgatgtgtccctcaaacacctgagtgctactccctatttgcatctgtttt

SEQ ID NO: 736038 - DNA, 100 bp, Homo sapiens
gggcaacctccctgaagcccaggagaagaatcttcccatcgacggtcagtgcgcacgttgtaatcagctgaggccatgtcaggagacggagccacggagc

SEQ ID NO: 736039 - DNA, 129 bp, Homo sapiens
ccgacggcccgcccctcaaggacaacctcggcctgagacaccggaggaccggacctgcctagagctggaacgttacctccagagcgagccctgctatgtttcagcctcagaaatcaaatttgacagcca

SEQ ID NO: 736040 - DNA, 100 bp, Homo sapiens
cttgtgggtggcatgactaggatgcccaagtgtttggtgtataaaacagaccaagctcaagatgtaaagaagattgagaaattccacagtcaactaatgc

SEQ ID NO: 736041 - DNA, 98 bp, Homo sapiens
gaaccactgcctctgggctcaacagaacacaggggatatggaggcacagcaagttaatgaagcagaatcagcaagagaacagttacaggatctgcatg

SEQ ID NO: 736042 - DNA, 51 bp, Homo sapiens
accaggagaggagggaactgcggagcgggactgagcacggaaggcatctac

SEQ ID NO: 736043 - DNA, 90 bp, Homo sapiens
atttgcagtactttgctgtgaccaacaacaatcttcatgattgtatccaaaaaaccttgaatgaatggagttcccaaatcaacccagatt

SEQ ID NO: 736044 - DNA, 75 bp, Homo sapiens
aaggattccaagtaactcttatttgctccagtcagcccggtcaagcatgacagcaactcaaactcggcaaacttc

SEQ ID NO: 736045 - DNA, 95 bp, Homo sapiens
cacagaaacgtgaggatcaagaagccggactacaaggtcgcctacgtgcagctggtacatccagacactgaaggaccacaggccccggatggtgt

SEQ ID NO: 736046 - DNA, 74 bp, Homo sapiens
ctccggcgtgttcatgcccccggggaagcggggagaggtggtgagagatgacccctgttgaggatttcattggt

SEQ ID NO: 736047 - DNA, 101 bp, Homo sapiens
agcattaaacccaagaacattgtggagaagattgactttgacaaggccaagaagatgaccacctttgagtatctcattaataaccgcaaagaagagagttc

SEQ ID NO: 736048 - DNA, 50 bp, Homo sapiens
ttgcctcagatactattttgaagatgttcagcctgttgcctatgaagagc

SEQ ID NO: 736049 - DNA, 101 bp, Homo sapiens
caattcttgaatgacatccgagcgaaagagaaagagttctctgtggacattgactcggagctggtggaggagctgccggccgaaatcgagctgtggctggt

SEQ ID NO: 736050 - DNA, 90 bp, Homo sapiens
gttgccggctcccctctcaggacaacccagatgtgcaacaaagtgcgatgctcaaactggaggattataaggatcgcctgaaaagtggag

SEQ ID NO: 736051 - DNA, 50 bp, Homo sapiens
tgctcccatccctgcagcatgaacaaggctgatcacttgattgaaaaact

SEQ ID NO: 736052 - DNA, 100 bp, Homo sapiens
tggttttatgcagaactgcgatttccaaatcgatagttttagagcctatctattggaattcctcgaactccaagttgcccgaagctcagcagagagtcgg

SEQ ID NO: 736053 - DNA, 50 bp, Homo sapiens
tccagatcctccaaagacagatctgaactgataaatttcaaacggaagag

SEQ ID NO: 736054 - DNA, 98 bp, Homo sapiens
gcgggtggaggttcgagcgctgttctcgctccggagccgctgcacatttcgcttcctgcctgacacagctcacttcaagaagtgcacaatgtcagaac

SEQ ID NO: 736055 - DNA, 75 bp, Homo sapiens
gtacgttgcaatctgtggatcagctacgagactgactggagctctcccgtgtcagctcgtagcacagaaggtgaa

SEQ ID NO: 736056 - DNA, 75 bp, Homo sapiens
gggctcttccccagaactacaggggctctggccatcttcgtggcactcaaggagttgcccctggtcctgtaattg

SEQ ID NO: 736057 - DNA, 107 bp, Homo sapiens
cttggagcggcttttgtctacttggctgacctcctgatgcctcacttgcctggagcattggtaagcgtcacactgccaaagtgagagctgctggagaactcataatc

SEQ ID NO: 736058 - DNA, 101 bp, Homo sapiens
ttgtgcaaaattaaaacgactcctgaagggctattcctcagtatgctattccttgtcactccagctccaatgtggtggtggagcccagtgggcttcttgag

SEQ ID NO: 736059 - DNA, 98 bp, Homo sapiens
gtccaaagcagtcgtaagaagaggtcccaatcccccactctttccgccctaatggaggtctccagtttcgagtttccaggatggcttctgcatcaact

SEQ ID NO: 736060 - DNA, 100 bp, Homo sapiens
cagaaattctccagtgagcacaaaaatcttagccggacaccttcacagatcataagggccttattggaaggagaaagtaatccagagatagtgatctggg

SEQ ID NO: 736061 - DNA, 100 bp, Homo sapiens
gcaagcatcaccttggcctggaggagcccaagaagctgcgaccaccccctgccaggatctgtgacttcctccgcggagccacagtccatagaatcctcgg

SEQ ID NO: 736062 - DNA, 75 bp, Homo sapiens
aaagcagcatagagaatgagatagccgtcctgagaaaaataatccagaatggctactctgatctatgttgataag

SEQ ID NO: 736063 - DNA, 100 bp, Homo sapiens
ttgggactcattggaaattgtacagtgacatcttctgggatttagtctggctgcagatcaaattacgaagctgtataatctcttcctgaaaattgatgct

SEQ ID NO: 736064 - DNA, 82 bp, Homo sapiens
gcaagcccacccagtgactttgggaggcttcagttttccgagacctgcctagagctggaacgttacctccagagcgagccct

SEQ ID NO: 736065 - DNA, 90 bp, Homo sapiens
caaagactttctggagagcatccgcaaacattcagacaaaattggagagactgccatgaagcaagcacagatagatcattatctaggact

SEQ ID NO: 736066 - DNA, 75 bp, Homo sapiens
attgaatctggtgttatcaacttaaaagatgccacctctaaggttgatgaagctgtagctgtactacaagcccac

SEQ ID NO: 736067 - DNA, 100 bp, Homo sapiens
cttggcatactcgctggtttgtgctcaagggggatcagctctattatttcaaagatgaagatgaaaccaagcccttgggccggtgcataaacttctcccg

SEQ ID NO: 736068 - DNA, 100 bp, Homo sapiens
ttttgggagcctgcaagttgttgctccgcttgttggactgctgctgcaaaacttttctatattgtggacattaagccagccaacatggaggagctcacgg

SEQ ID NO: 736069 - DNA, 90 bp, Homo sapiens
gccgccacattccagttccgcacgcgctgggattcggagcttcagcgggaaggagatgcaagatgagaaactgcgggacgagacagagca

SEQ ID NO: 736070 - DNA, 100 bp, Homo sapiens
ggttctaccccgcggcggccggggaccctgccagcctggacttcgcgcagtgcctggggtactacggctacagcaaggtttcagtgtagctcagaagcca

SEQ ID NO: 736071 - DNA, 87 bp, Homo sapiens
ctcaacttcggtgcctctctccagcagactgcggttaatttggagtggcccctggagtcagtttcctacaccatccgaggccccacc

SEQ ID NO: 736072 - DNA, 75 bp, Homo sapiens
tttactgggataattatccaaataaattgcaagcattctatccaaatggttttactgcaatcacagcaaccaacc

SEQ ID NO: 736073 - DNA, 99 bp, Homo sapiens
cttttcctttccccagaccttgagctgaacagggcaaacctggtggacctgcagaagaagctggaggagctggaacttgacgagcagcagaagaagcgg

SEQ ID NO: 736074 - DNA, 100 bp, Homo sapiens
gtttgtgaaacagagaaagataggcggccatggtccaaccttgaagaccccagagggtataagtgaagaacagagatctcaggagttggctgcaatggaa

SEQ ID NO: 736075 - DNA, 147 bp, Homo sapiens
tggctgcccacgggggctccgcggcgtcctcggcgctgaaggggttaattcaacagttcaccaccattaccgagtctccgggaccattatggcagtcaagtggacgggtgggcattcttctcctgtcctctgcctgaatgcaagtaa

SEQ ID NO: 736076 - DNA, 98 bp, Homo sapiens
atcattccaagtgtttgtctgatgagttcaggcttagagacagcagtagtccctggcagtgcccagtttgcaggattgtctccagctttaagaccacg

SEQ ID NO: 736077 - DNA, 100 bp, Homo sapiens
cgggtctctgggtctctgacccccatccggccctcatggctttgtgtctggagctcttgaagcaatgtgaaaggaaagcaagccaggatggatatttacg

SEQ ID NO: 736078 - DNA, 88 bp, Homo sapiens
gctccctacccatccgccaggagccctcttccttcagaacacccagtgcatcccagaaggcttggagagctactacgcggagcaagac

SEQ ID NO: 736079 - DNA, 50 bp, Homo sapiens
atcagttggctttagcaattggcaaatgtgcaataccaacatgtctgtac

SEQ ID NO: 736080 - DNA, 100 bp, Homo sapiens
ggcccacctgcgccggcacacgggtgagaagcccttcgcctgcacctggccaggctgcggctggagacggagtctggctctgtcaccctgtctggagtgc

SEQ ID NO: 736081 - DNA, 90 bp, Homo sapiens
ggcctctggtgccaaatacattgtcttaacttccaaacatcatgaagatcttgtgcctcaagcagccattgagtatggcaggatcctgac

SEQ ID NO: 736082 - DNA, 75 bp, Homo sapiens
gtttgttccctgacaactttgtaagactgagatctgtatctgtggacctgaatgttgatccctcgcttcagattg

SEQ ID NO: 736083 - DNA, 95 bp, Homo sapiens
atccacagcaagctcccttatataaggccaatgatgaggccaatcagagtgatacaagtgtctccttgtcagaacccaagagcaaaagcagcctt

SEQ ID NO: 736084 - DNA, 95 bp, Homo sapiens
cctggaccaggaggaggttttcaggaccaaaattgtggaaaagtcactctggaaactactttgcttcgcactttttcatgggaggagagaaattc

SEQ ID NO: 736085 - DNA, 109 bp, Homo sapiens
caactactctccattcccacacctacctcatcccctggcagtcattctgctttgtgtctctatgaatttcacagctaaatgagccgtcagactgctacagcattaccta

SEQ ID NO: 736086 - DNA, 83 bp, Homo sapiens
gaacaagagaagacctcagatgtgaagtccattaaaggtttttcacgactgaaaacaacatagcaaaataagccaagatgtct

SEQ ID NO: 736087 - DNA, 98 bp, Homo sapiens
ccgcggcggcgcgggtgctccgggccgaggccgcggaatgtatcctgtcaggtataatgtcagtgaatggcaagaaagttcttcatatggatcgaaac

SEQ ID NO: 736088 - DNA, 74 bp, Homo sapiens
gaacatcaagtgctcatgaagacagtatgtggaaccccagggtactgcggaatttcagggaagagccaggtcct

SEQ ID NO: 736089 - DNA, 149 bp, Homo sapiens
agcctttgaagctcataaacaaaaggaagccacacaactaggagagtgtccccatccggtgagactttgcagacgcttcctgcctgacacagctcacttcaagaagtgcacaatgtcagaacgtggaattaagtgggcttgtgaatatt

SEQ ID NO: 736090 - DNA, 134 bp, Homo sapiens
ctgaatttatcctgagcaggcagagagcagaagatattcacagacatgcggaatttgagagagtggagaaagcctcagagtttgcagtgtcaaatgcattttttactagaaattcagatttacctagaagtccc

SEQ ID NO: 736091 - DNA, 100 bp, Homo sapiens
ccgtgatctccagcgccggcctcctcagtgcgaagaagctgcagccgcacctggccaagggtggggtggaatggctgcaaataaaggataatgatttctc

SEQ ID NO: 736092 - DNA, 100 bp, Homo sapiens
gctggagacctagcacccagaagatgagaccgcaattcgagaatcaaagggccgggagcgatgctccttcttcacatcgtagaaacatggcatatagggc

SEQ ID NO: 736093 - DNA, 100 bp, Homo sapiens
tgtaaacacggctgtgctcagggctcgcgggtgaccgaaaggatcatgaactagtgacctggaaagggaacatttacggatgagaagtcaaaagcttccc

SEQ ID NO: 736094 - DNA, 100 bp, Homo sapiens
cgcaagatgaaatttgctctgctaaaaggctccttcagtgagcaaggcatcaacgagtttctcaggcctttccgttccgaacgtccacggcgccctggcc

SEQ ID NO: 736095 - DNA, 100 bp, Homo sapiens
tcatatatgagggaaaatcaacaaacttttgagtctcatttggaagctcctgaagacaagtcatttggcagttcattgatggagagtgaagtaaacctgg

SEQ ID NO: 736096 - DNA, 50 bp, Homo sapiens
cttcgatcctgagaccaattccgacggtggccagcatcgaaatgttcagc

SEQ ID NO: 736097 - DNA, 89 bp, Homo sapiens
tgcgggtcgcaaagggaagccgagtgctcctgcggctcccagactgcaaccagttttgattacgaagatgcaggctaccagactgcaga

SEQ ID NO: 736098 - DNA, 89 bp, Homo sapiens
ttctccgcggcgctccgggcccgggcggctggcctcaccgcccactggattccgaagaggctcaatctgtaaatccttctagtgttgat

SEQ ID NO: 736099 - DNA, 90 bp, Homo sapiens
ccaccgactcttgtatcatgagcattggatttgatcacatggaaagctctgggtgtgcggcagtaccatgtggcctcagtcctgtgccaa

SEQ ID NO: 736100 - DNA, 88 bp, Homo sapiens
taccgcagcaacatggctgacatgctttataatttgcgaggattaaatccaccacacagggtgaaatctatctccatgacaacattca

SEQ ID NO: 736101 - DNA, 75 bp, Homo sapiens
taaaagaggagcagcatggcatttcagtcactggtttgcagagtccagttatggctgcagcttcgattgccaata

SEQ ID NO: 736102 - DNA, 90 bp, Homo sapiens
tgattctgaagagggtctggaggagccttctcaagaacagaggtcctgatgaagttgtagggccagaaggaatggaaaaattttgtgaag

SEQ ID NO: 736103 - DNA, 100 bp, Homo sapiens
gatggtgccacaggaggctgtgcgggccccgctccgcttcgaatggaacccttaggagaaatcttgagagtggacagcaattgtgaagatcgccagagag

SEQ ID NO: 736104 - DNA, 98 bp, Homo sapiens
aagatagtaacggacaaagagcccgaccgagtgctctggtctggggtctctctgtgaaacacaatcctcagaaagtgggtaaagaccatacgttggag

SEQ ID NO: 736105 - DNA, 105 bp, Homo sapiens
ctggagctctgcgcgctgctgggcgccccccgggacagtctccgaagtctcgagcaggttcagcagctggacatggagaaccaacgctcatcacctctgtcgttc

SEQ ID NO: 736106 - DNA, 82 bp, Homo sapiens
gaagaccgcgcgcagggcctgcagcgggagctggacggcgagcgcgagcggcgcgagaaaatgccttcaattaagttgcaga

SEQ ID NO: 736107 - DNA, 90 bp, Homo sapiens
gtgggcttttcacagtgggctttactgtgttgagatatgtcttctccgactactatgaagaagcctgaaaagccattgttcagctctgca

SEQ ID NO: 736108 - DNA, 100 bp, Homo sapiens
tggaggccccccatgactgggatttagaggagatgtcatgggaacagacatgtcttggagaggtgcaccctgggatctgtccaggatcagaaactcttgg

SEQ ID NO: 736109 - DNA, 75 bp, Homo sapiens
ctcccccagactctgttggatcagaaggtcaagacagcctctggagatcctgtgttgctacttgtcatgtttctt

SEQ ID NO: 736110 - DNA, 100 bp, Homo sapiens
tgcaaggggaagtctggaaaacaacgccttaccaagtggctgctgaaattagggcatttgatgtagaactactgtacatagcacagttctttaaaattcc

SEQ ID NO: 736111 - DNA, 73 bp, Homo sapiens
cgcgcaccgttggcgctggacgcttcctccttggaagcgcctctccctcagggttttggccaaattgggcgag

SEQ ID NO: 736112 - DNA, 80 bp, Homo sapiens
tcaaacatccatatcataagtggaattttggagatattcaaagaaaatatatcgctatcgtctcctatgagcaacgccag

SEQ ID NO: 736113 - DNA, 75 bp, Homo sapiens
gatgacttgttcagcttcatgcagaagcgaggagggccctcctggacccgggagcggaccctggtggcggtgaag

SEQ ID NO: 736114 - DNA, 100 bp, Homo sapiens
cctattggatatggagcctttggtgttgtctgcagcgtcaccctttacaccagaaagctggcgggcactatggggaaaaaacaaaacaagaagaaagtgg

SEQ ID NO: 736115 - DNA, 100 bp, Homo sapiens
aaacaagccgtggaataggtgtatcaagtaatggtgcaaagcctgaaaaacttctgcagcatccagaactgagtaatagtcaacttctggcagactttct

SEQ ID NO: 736116 - DNA, 90 bp, Homo sapiens
gtttgacccagttcctgtcaagcaagaggccatggaccctgtctcagtgctccccagttaaagatctcagatgaccggctgactgtggtt

SEQ ID NO: 736117 - DNA, 100 bp, Homo sapiens
cgtcgccgtcgccctcccagaatgttccaatgacaggatttacacagagagcaactattgatccagaactgaatgaaatacacgtcttatctggactcag

SEQ ID NO: 736118 - DNA, 100 bp, Homo sapiens
agcaaacgtctacactgtacatgctttttattacaagactacggagcataggaggaaaattcatcatctgctcaacagacagtcagctaaaactgtggaa

SEQ ID NO: 736119 - DNA, 74 bp, Homo sapiens
caccgatgatgtgcagatcaatgacatttccctgcaggggcaagattcttgccaagagaattaatgtgcgtatt

SEQ ID NO: 736120 - DNA, 83 bp, Homo sapiens
gatggaggagggggatcccagcaaagggagaaacaaaggcagcgctgccctcgggggagcattggccctggcggaacgcagca

SEQ ID NO: 736121 - DNA, 100 bp, Homo sapiens
gagccacccgcccgcccaaggtctctcgcgggcgggagaacggaaaactcccaacttcctgatttgtcccatcagatgaaaagaagaaacaaggttgtca

SEQ ID NO: 736122 - DNA, 59 bp, Homo sapiens
gcggatgttggtggttctccttcaggttcagtggcagtggatcaggcacagattttaca

SEQ ID NO: 736123 - DNA, 83 bp, Homo sapiens
cggggaagtaatggtatccggccaattgagattcggagttaaaacagtttggtgccctggttgtcagatgttggaaagcagta

SEQ ID NO: 736124 - DNA, 100 bp, Homo sapiens
gtttggtctactattgcatttagaagctggtgttggtggcgctggccgtcggcggctggagctctacctccctgcagcggccactgttcctggccgtgcg

SEQ ID NO: 736125 - DNA, 83 bp, Homo sapiens
cggaacaccctggaagccgagaaatggtgccaacatcgcctctggtgaggaagtcgccatcaagctggagtgtgtgaagacaa

SEQ ID NO: 736126 - DNA, 107 bp, Homo sapiens
aggatggatggccttggatgaatttttagtgaaaaatgatccctgccgagagagtacacactagatgtgtacagactctcctccgtggtcacacagcacgattccaa

SEQ ID NO: 736127 - DNA, 100 bp, Homo sapiens
cctgggtctacgataacgcgcttttgctcctcctgaagtgtctttggtccaacgttgttccagttttcataccttggtcctgaccctgtccataagctgc

SEQ ID NO: 736128 - DNA, 83 bp, Homo sapiens
gaatgagatagccgtcctgagaaactctactgagatgaagaaagaaaaagaatacctgctcagctccagagacacgtaaaggg

SEQ ID NO: 736129 - DNA, 82 bp, Homo sapiens
cttgccctcatcctggttctggaatcctcagttcaagagtgaagacatttccacctggacacctgaccatgtgcctgccctg

SEQ ID NO: 736130 - DNA, 100 bp, Homo sapiens
gcagactggtgacttcacttttgagtgcaactgccttccaggacatagttgacggcaaggaaaaagaaggacaagaacttggaactgcggattgctctgt

SEQ ID NO: 736131 - DNA, 75 bp, Homo sapiens
cgcagccggggcccccgccgccgccggagcgatttcagagacaactgtctgaaccctgccaccccttccctcctc

SEQ ID NO: 736132 - DNA, 75 bp, Homo sapiens
ggccttctgatgaatactttaaaggagaaggcagagcccccccaggctatgaatgccctgatgcggttgaaccag

SEQ ID NO: 736133 - DNA, 75 bp, Homo sapiens
ccggggccgctgccgttgaggaggagacggaggagaccgacgttgttagtccaaggccattggtttgctagatgt

SEQ ID NO: 736134 - DNA, 100 bp, Homo sapiens
ccggccggtgccagcacctttcggcttctgagacggcggcagcagcggcattcaggtgtcccgacccaggctaagcttgagcatggctgagcaggagccc

SEQ ID NO: 736135 - DNA, 100 bp, Homo sapiens
cctctgggggtcctctctgagtcaaatccagtgtggatcaatcttcctgtcctacaactgacaaaggatcccctaaagacccctggaaggctggaccatg

SEQ ID NO: 736136 - DNA, 100 bp, Homo sapiens
cagcaacgtgcggtgggaccacgagagcaaactctataaaacaggtcgggagatgcaggagaggatcatggacctgcttgtggtggtggagaacgaagat

SEQ ID NO: 736137 - DNA, 100 bp, Homo sapiens
ggaacatggagatcattgtggagacagtagctggaaccctgaccccaggtgctcctggagagaccccaggtgatctggtgccagctggtggaacagtggg

SEQ ID NO: 736138 - DNA, 100 bp, Homo sapiens
gcatttttgggaaaagacagagtaagaagactcccgagtcctattttgtaacggattatgatccaaccattgaagattcttacacaaagcagtgtgtgat

SEQ ID NO: 736139 - DNA, 90 bp, Homo sapiens
tctggggagcgcctcgtcgacatgagtgatgtggaggaaaacaacttcgagggcagacttcgagagctgtgcccaggagtgaacaaccag

SEQ ID NO: 736140 - DNA, 82 bp, Homo sapiens
gaaaggcttcactacccttatcccggagagctgacaatgatgaatctcaccaagacaatgcaaactccagtgaacattcccg

SEQ ID NO: 736141 - DNA, 76 bp, Homo sapiens
cagtggtgtttttctcaggtgaaaggagcagtagatgatgatgtagcagaagatacagtttatgtaacttgatgga

SEQ ID NO: 736142 - DNA, 90 bp, Homo sapiens
ggccgtcctcctcacggtcctcctggctgtgctcatatacacctgacagtgctgaacccaggggaggtgcttcccacagccttcgaggcc

SEQ ID NO: 736143 - DNA, 90 bp, Homo sapiens
accgtgggcagccagggtcggtgaagttttgtgcaccgagggcggcctgagcctctggatcttcacttgggcatgttcctgcccaccttg

SEQ ID NO: 736144 - DNA, 100 bp, Homo sapiens
ctggattcatatccttcgaaaacgacgaccagcatctcagacatgtcgaaaaagatgttttgatccctaaaataatgagagaaaaggccaaagagaggtg

SEQ ID NO: 736145 - DNA, 101 bp, Homo sapiens
cgcaggaaatgggaattctacttgtgtggatggactagaggcttttaccagatttcttaaaactgaattcagtgaagaaaatattgaattttggatagcct

SEQ ID NO: 736146 - DNA, 83 bp, Homo sapiens
catgtctgcgagccaggattcccggtgatgtgtccaatctagatcccaacttctcatttgaaggcaccaaactggatgtgggg

SEQ ID NO: 736147 - DNA, 90 bp, Homo sapiens
cccagaatctttaggtaaatgagttgtattccctgaatgactataaaccacccatttcgaaagcgaaaatgacccaaattactaaggcag

SEQ ID NO: 736148 - DNA, 75 bp, Homo sapiens
tcacccagcccccaaggattctgggggaggcctcagattgatctccgagatgaccccaaaactttagcaagactg

SEQ ID NO: 736149 - DNA, 82 bp, Homo sapiens
cccaggtgtaagcgcagaaagcaggcgaacccgcggcgcaataacggttcacgcaaagaatctgctccacaagttttgcttc

SEQ ID NO: 736150 - DNA, 98 bp, Homo sapiens
gcgaggctgcgggaccccaggatgggggacaggaggctgcggggcctcagacccaacatgagtgaagtttcctgcaagaaacgggacgactatttgga

SEQ ID NO: 736151 - DNA, 122 bp, Homo sapiens
tcaagttgccggtggaattggcccaggatgacagctggagaatggagtcaggcctgtataattcagtagacagctggatgattgttcccaacattaaacagaaccattacacagtgcatgga

SEQ ID NO: 736152 - DNA, 90 bp, Homo sapiens
gcccgagggcggcgcaaggcctgaggcccagcacaggtgaccattgtgaggtagatattttgttctaattttccagatgaggaagctgag

SEQ ID NO: 736153 - DNA, 100 bp, Homo sapiens
cgctgagacagtgcgtgtggacagcaagcagcgatattattccattgagaggttaggaaagaccacagcaagattctttcattcgtctcctcctagcctg

SEQ ID NO: 736154 - DNA, 80 bp, Homo sapiens
aggaaataggatttaaccgctctctgcctcccagcatacagtgaagttgttctctgaagttcctcatctgccttaagtct

SEQ ID NO: 736155 - DNA, 96 bp, Homo sapiens
cttgtacctgatgccgatattcaacgctttcggccccctggaaaaaggacaagtgaaaaatgaggcgcttagagaattgagagtggagctcagcaa

SEQ ID NO: 736156 - DNA, 80 bp, Homo sapiens
agctttcctgaggacctgctggagagtgacagttcttcctgtccaagatccggtcccacgtggctacttgttccaaatac

SEQ ID NO: 736157 - DNA, 75 bp, Homo sapiens
ggaaaatgtcctcagtgcaagagcaacacgtttccacagattacagtacctatagccaagctgcagcgcagcagg

SEQ ID NO: 736158 - DNA, 82 bp, Homo sapiens
ccaagaaggaagtcatcatgggccggcctggaacaggctgaaggtgatgtggccgccctcaaccgacgcatccagctcgttg

SEQ ID NO: 736159 - DNA, 100 bp, Homo sapiens
ggaaagagatccacaaggaagcagcctcccagccctgaagtcctcgccctccaagaaggggcgcggcggagccttgctagctgtgaaaccgctggggccc

SEQ ID NO: 736160 - DNA, 75 bp, Homo sapiens
agatggcagcatacctcctggtcagaggcattccattgtttcccggcttatcctgagtatttaattacttaccag

SEQ ID NO: 736161 - DNA, 90 bp, Homo sapiens
cgcgcacttcgtcatgttcttcgcgccctggatgataatgaagataattcaaatgatgggacccagccatccaaaaggaggcgaatgggc

SEQ ID NO: 736162 - DNA, 100 bp, Homo sapiens
cggcggctccagcgtcctaagaggaaacctcgacctgtctcccagttggttgcacagcaggttactcagcagtttgtgcctcctacacagtcaaagaaag

SEQ ID NO: 736163 - DNA, 82 bp, Homo sapiens
aaagtaaaggagagcaatatatggaagaaactcagctttgaggttattggagtgatgagtaaagaatacataccaaagggca

SEQ ID NO: 736164 - DNA, 75 bp, Homo sapiens
cggcgctgcggatccagggggtcggctgccaggtacagattggtgctgaagacatggacggcttccaggcagaca

SEQ ID NO: 736165 - DNA, 100 bp, Homo sapiens
aaatagttcctcttgataaataaacaattaacaaatactttggacatatcagcagcgtcgccagcaggagaatatgcagcgccagagccgaggagaaccc

SEQ ID NO: 736166 - DNA, 97 bp, Homo sapiens
cctgggactgcaccgcaccgagggcgagctccagcaaagtgtgggatgctgtctcaggagatgaattgatgaccctggctcataaacacattgtcaa

SEQ ID NO: 736167 - DNA, 100 bp, Homo sapiens
ggccacctgggcggtgaacaatggcatcgacaccaccgaggcctccagaggaagaagtccaagttccgcttgtccaagatctggtcaccaaaaagcaaaa

SEQ ID NO: 736168 - DNA, 75 bp, Homo sapiens
gagcggccagttaaacctgtcgggtagaaacctcagtgaagaagttggtgagatggcaaagcagtatatagagaa

SEQ ID NO: 736169 - DNA, 115 bp, Homo sapiens
gacggcagtgctgaggcggaacaggccgggcaccaaggcgcagaaaaattctgtaggccgttggaaggaagctaccataccaggccacttaaactcctacaccatcaaaggcctg

SEQ ID NO: 736170 - DNA, 50 bp, Homo sapiens
tctattctctcggcctgtcagcaaaatgcctgaggaaacccagacccaag

SEQ ID NO: 736171 - DNA, 75 bp, Homo sapiens
tgagcagaggacccggcgggcggcctcgcgggtcagggaaccagcggggaaactgaggctcggggtggagcgcag

SEQ ID NO: 736172 - DNA, 75 bp, Homo sapiens
aagaggctgtgcttcggcgctccggctcctcagagagcctcggctagataacgaaggaggcccaacttcattcaa

SEQ ID NO: 736173 - DNA, 83 bp, Homo sapiens
ggcgcttcgccccgggccccccagcatgaagaccccggcggacacaggtgctggagaatctggtaaaagcaccattgtgaagc

SEQ ID NO: 736174 - DNA, 100 bp, Homo sapiens
tcattgaagtgttcttcgttccctcagcaatatgattctttggagtttaacccttctgccaatccagaggcaagcacaatattccagaggaactctcaaa

SEQ ID NO: 736175 - DNA, 101 bp, Homo sapiens
ttcaccactgggttcagccgcatgagcgagcggcagctggctctctggaatccggtggatcatccatgccatggagtatgaacttcagatccgtggcggag

SEQ ID NO: 736176 - DNA, 100 bp, Homo sapiens
acagaaaatctctgtcagaactggtatgggctacgtgagttcgtggtgattgcccctgctgcacacagtgacgctgttctcagcgaatctaagtgcaacc

SEQ ID NO: 736177 - DNA, 90 bp, Homo sapiens
tactccttcactctaccctaaggactttccttatcccagttgattgtgcagaatacactgcctgtcgcttgtcttctattcaccatggct

SEQ ID NO: 736178 - DNA, 76 bp, Homo sapiens
aaacgaacagctctctgtaatgcgatactcaccagattttaccaaatgttgcaagaactctggagttcttatggta

SEQ ID NO: 736179 - DNA, 100 bp, Homo sapiens
ggaacgcggcgaccgccaagaaaggcagcgaggtggagagcgttaaacacagtgggaatatcacttttgatgagattgtcaacattgctcgacagatgcg

SEQ ID NO: 736180 - DNA, 98 bp, Homo sapiens
gttgcttcccgtccgtgtcgcggccctgcggttggcggcctcctcgtggagcggagcaagggttatgaagacagtatggagtttccagaccatagtag

SEQ ID NO: 736181 - DNA, 96 bp, Homo sapiens
caagcagttcagaagagccaaggaataaacatgcaatgaacccaaaaggaacagaaactgttcatacttggtgcgctgtggactcttgtgataatt

SEQ ID NO: 736182 - DNA, 74 bp, Homo sapiens
gctgtcgtggcagtccatcaaggggacccacctcaccatcacccaggacctatgaggaccagcacagcagtgag

SEQ ID NO: 736183 - DNA, 86 bp, Homo sapiens
gtccgagcccaaggcaattgatcccaagttgtcgacgaccgacagggtggtgaaaggtttggtgcacctcgatttggaggaagtag

SEQ ID NO: 736184 - DNA, 112 bp, Homo sapiens
tggcgaacggggcgagcctggaggattgtcactccaacctcttttcgctgggtgaggatccacgacctccgcagtggtaacatcgccctgtcgctctccgcccatcagctca

SEQ ID NO: 736185 - DNA, 100 bp, Homo sapiens
cgcagccaggccgggggcgcctgcgactgcggggacagcaacgtgatgcgggagagcgggacagttcgtgtttggttaaagagagacagtggacagtatt

SEQ ID NO: 736186 - DNA, 87 bp, Homo sapiens
cacttccgcgagcccatccgtctcaagactgtgaaaccagatatttggatttgacctgcattttggaatttatctacacttaaaatg

SEQ ID NO: 736187 - DNA, 50 bp, Homo sapiens
cgggaagatggcggctgggttcaaggttctgagcaaggttcaaccagtca

SEQ ID NO: 736188 - DNA, 104 bp, Homo sapiens
ccagtgcggcatcacctcctccaagaccgtgctggtctttctcaacctcatcttctgggtgaccttggagaaggtgctgggaattacagtgtctggaggcagag

SEQ ID NO: 736189 - DNA, 74 bp, Homo sapiens
ctggaatcacccgggtcgctgttcctgagatgcctgaggaaacccagacccaagaccaaccgatggaggaggag

SEQ ID NO: 736190 - DNA, 100 bp, Homo sapiens
ctcctgttgtgtccgaccgagagtcctggtgactttgaacatgctggtgccgctagccaagctgtcctgcctggaaaccttccttccttccagatgtgtg

SEQ ID NO: 736191 - DNA, 80 bp, Homo sapiens
acaatctattctgctgattcacaattatggagactgttcaacgaaacggaatattccaatgctctttgtccggggagatg

SEQ ID NO: 736192 - DNA, 100 bp, Homo sapiens
aataaaggcccagtgtctgttggtgtagatgcgcgtcatccttctttcttcctctacagaagtgacatccctttaaaagtagttggaatgttcccaagta

SEQ ID NO: 736193 - DNA, 100 bp, Homo sapiens
gttattctcgttcaagttaatccaggtgagactttcacaataagagcagaggatggaacacttcagtgcattcaaggctgaagtcatcgatgtgagttat

SEQ ID NO: 736194 - DNA, 100 bp, Homo sapiens
tgatgtggtcctggagttccagtggaggaagcagaaggaagtttgcctatctggggcgcctggctcacgaggttggctggaagtaccaggcagtgacagc

SEQ ID NO: 736195 - DNA, 82 bp, Homo sapiens
aaagatctgaaagaaatggcataatcttaaaacttgcaggaacgaatgcaggaatttgggaactgagctgtgcaagtgctga

SEQ ID NO: 736196 - DNA, 80 bp, Homo sapiens
gctgcggcaacagcggggccgtacctaggtgctgatatggaagaatttcatggcaggactttgcacgatgacgacagctg

SEQ ID NO: 736197 - DNA, 100 bp, Homo sapiens
cttgacaaccgaaccatcgtcatcacctctcatccaggtgtcggtggtattgaagcagaagctgtcatgctgggtcagccaatcagtatggtgcttcctc

SEQ ID NO: 736198 - DNA, 75 bp, Homo sapiens
cacccccaccagctgtagctgaacgtctggatggtggagaagagcagcccatatgttgtaaagtactatggcagt

SEQ ID NO: 736199 - DNA, 74 bp, Homo sapiens
gccacaatgggacatgtgcaagatggatgacatccagctctgcaaggacatcatggacttgaagcaggagctgc

SEQ ID NO: 736200 - DNA, 100 bp, Homo sapiens
aagagactgagtccagagcagaggaatctatacaaagaagtgatgctggagaattacaggaatcttctctcattgggttttgcagccactcttgatgatg

SEQ ID NO: 736201 - DNA, 101 bp, Homo sapiens
aaagcccaggcataaaatcatctccatattctcaggcacagagaaaggtgtgggaaatgctactgcctgtgtcttacatgatgttatctacgtcattggtg

SEQ ID NO: 736202 - DNA, 90 bp, Homo sapiens
ctcgggcctccacacgggcctccgaagagctgccgcgacgcccggcccgcagggcagctccgggaagcagtttgttcgctatataaacat

SEQ ID NO: 736203 - DNA, 98 bp, Homo sapiens
tgtgagcgaggactccatcttcctgcacctggagcatgtgcaaggtgcaaaatttccaatcaaatggacagctcctgaagctgcactgtatggtcggt

SEQ ID NO: 736204 - DNA, 76 bp, Homo sapiens
agccctgtcatctcccccaggtcagggcctttctacttacaaggaactttgttctctggcaagtgatcttagccag

SEQ ID NO: 736205 - DNA, 111 bp, Homo sapiens
cccgctccgcgccgagggctggaggatgcgttccctggggtccgggtccagtggtttacgtcttggatcttgcagatagactgatctcaaaagcctgtccatttgctgcag

SEQ ID NO: 736206 - DNA, 75 bp, Homo sapiens
actgtcaccgagccgctgcggccaggctgctctttggcgtaaattgcaatcgattagggatcgtttctcagaatc

SEQ ID NO: 736207 - DNA, 75 bp, Homo sapiens
ggtttgtggcagcctgctcgtcacttgcctcccgggagtcgctgtggcaaaagtgataatatgcagcatgcatac

SEQ ID NO: 736208 - DNA, 100 bp, Homo sapiens
gatgaagttaaagcacgactacagaaatatagcaccaaacccggaagtatctggagtccatctttcaccatcttctcctgagattgtactggaccgtgac

SEQ ID NO: 736209 - DNA, 90 bp, Homo sapiens
taggaatctatgatgctgatggtgatggagattttgatgtggatgatgccaaagttttattagccgtgttgaaatccttgtctcctgtag

SEQ ID NO: 736210 - DNA, 75 bp, Homo sapiens
cttcaacaagaggacccaggagaaattcgccctcaaaatgacgtccggttgtttgccttcgtgcgcttcaccacc

SEQ ID NO: 736211 - DNA, 75 bp, Homo sapiens
cccccgcgtccctgcgaccgccgcggcgaagatggaagatgagaatgtgcctactgctcctgatcctccaagtca

SEQ ID NO: 736212 - DNA, 74 bp, Homo sapiens
cggaacatctggaggctgggaaatgacagtaaggattgtatcctggagccgctttccctgccagaaagtccagg

SEQ ID NO: 736213 - DNA, 100 bp, Homo sapiens
gaagagggaggtgttgaaaagaaggtgggcagatggaaaaggacccctggcagctgcgttctcttccagtgaagtaaaagctttaattcgtgccttgttt

SEQ ID NO: 736214 - DNA, 90 bp, Homo sapiens
ctcgggaccaaggatcacgtcatgactccgatcctgaaggacacagccctgcagaaagtgaagcgtggccagagctgcctggagccctgc

SEQ ID NO: 736215 - DNA, 98 bp, Homo sapiens
caaaaagaagctaacccctttcaccattcaggcccgtctgcctgtaaaatggatggcccccgaaagcctgtttgaaggcatctacaccattaagagtg

SEQ ID NO: 736216 - DNA, 82 bp, Homo sapiens
ccctccgcctcctctctcctctcccagttccgcagtccttcctggcaaacaggagcaggccgggctctcgccatgggtcact

SEQ ID NO: 736217 - DNA, 85 bp, Homo sapiens
aggacagccatcagagaatgtgtgtttctgcatagaaacagatttcttgaaacacaaagatggtgcagacccaggccctgctttg

SEQ ID NO: 736218 - DNA, 51 bp, Homo sapiens
ttctgcgcttctcagtaactacgaggtgccgacgccaccgccgagcccatg

SEQ ID NO: 736219 - DNA, 100 bp, Homo sapiens
gctgacaaagaccaagccaacgatggtctttcctctgcattgctgatcttgtacttggattcagcaaggaaccttccggcctcccagtagcattggatgc

SEQ ID NO: 736220 - DNA, 98 bp, Homo sapiens
aatttttctgtggatcatgacagtgctcctgatatgctgcaggctgctagtcattatcgccaaaatagaaactctttgtatagaagagaagaatcact

SEQ ID NO: 736221 - DNA, 100 bp, Homo sapiens
ttgggagatttccagccttccaagctctactgtgacttcagagacactgccaagcagccttagccctagtgtagagcatttaaatcaaacggtattgaga

SEQ ID NO: 736222 - DNA, 51 bp, Homo sapiens
tgtagacatggcggccatcaggatttcaggaaaccttactgtgccttggat

SEQ ID NO: 736223 - DNA, 90 bp, Homo sapiens
ggccggacgcacctctgtttgggggtcctcaggtgcagattcactttataggaacagcttcagcttcagtgatgaaaaactgaattctcc

SEQ ID NO: 736224 - DNA, 100 bp, Homo sapiens
cttcaagtaccaggtcctggcgatcagcaccaagaacccactgcaggagtccatagaggccactgtattctattgaagaacatgtctaacagtaacacta

SEQ ID NO: 736225 - DNA, 100 bp, Homo sapiens
gcagcttttccggcctgacaacttcatctttggtcccgcaggctcccgatggcgagattacggcgccctggccatcatcatggcaggcattgcatttggc

SEQ ID NO: 736226 - DNA, 100 bp, Homo sapiens
ccggcgccggcccagcagctgcagccgcagcctgtggctgtgcagggccccgagccggcccgggtcgagggcttcataaacttcacttaccaaatacttc

SEQ ID NO: 736227 - DNA, 100 bp, Homo sapiens
tgagtacctgaaccggcacctgcacacctggatccaggataacggaggctggtttcttcactagttgaagaaggagaaaaacagaacaaacgttttaggc

SEQ ID NO: 736228 - DNA, 99 bp, Homo sapiens
caactgccctgctcttcatcccaggtgaccttgggaaaggtgttgaaagtgatcgtcgtcatgcggagcctgttcattgatcgaacaatagtaaaggga

SEQ ID NO: 736229 - DNA, 82 bp, Homo sapiens
caaaaccctgcagaacggctgcctaatttacagcaaccatgagatgtatggtctgctggctgtgtgttggctgagctgttac

SEQ ID NO: 736230 - DNA, 87 bp, Homo sapiens
gaagaggaaaactctaccggtgcaggagtacgagagggcctccaaagtggaccagtttgtgacgcgcttcctgctgcgggagacggt

SEQ ID NO: 736231 - DNA, 75 bp, Homo sapiens
gataagcaactggattttttaactgaagatagtgcctttcagccctaccagactatctgttatagtccctgggtc

SEQ ID NO: 736232 - DNA, 74 bp, Homo sapiens
ttgcagatttcaatatataccaggacagctgggaagtggtggaaggactgaggggggagatgaattacacccag

SEQ ID NO: 736233 - DNA, 80 bp, Homo sapiens
gagcaatggtctttgctgtgccttctctactgatggcagtgttttagctgctggatataatgaagatctggaacttgaag

SEQ ID NO: 736234 - DNA, 102 bp, Homo sapiens
gggacgtccggcttcggagcgggagtgttcgttgtgccagcgactaaaaagaggaaataatgcaaaaggtgtcccaaggctcctgaccagtgaacaaagatt

SEQ ID NO: 736235 - DNA, 75 bp, Homo sapiens
tttccccaagtagtccgatggctgcggctgcgccgaggcgccctactcaggaaagtaatggaccagtgaaggtgt

SEQ ID NO: 736236 - DNA, 82 bp, Homo sapiens
agcccgccagcatgccccagtccaaaggaaggtgctcgggtcttcggggcactgggtcccatcggtccctcctcacctgggc

SEQ ID NO: 736237 - DNA, 100 bp, Homo sapiens
ctcagaacactgctctgtgggaactgcatgctctgcgggtcctcagttacatgggtctacaaaatctcaaagcggaggcagaccagtctctcgaaccagg

SEQ ID NO: 736238 - DNA, 100 bp, Homo sapiens
gaaggaaagaatgaagaggccctgcaagctggaccagctattccttctgttgtggcgtatccgaaaaggagtcagaccagcactgcagatagtgacctca

SEQ ID NO: 736239 - DNA, 98 bp, Homo sapiens
ggtgatgctctgacattcactactacatttactctttctcggtccgagatggagaagtgggttgaggacatccagatggccattgacctggcggagaa

SEQ ID NO: 736240 - DNA, 90 bp, Homo sapiens
gaggaatgttccctgacaatttcgttaaggcctatggcatgtctgcgttacctttaaatctgataaaaggcactagaagcgctgcttatg

SEQ ID NO: 736241 - DNA, 82 bp, Homo sapiens
cagtctcggcacagctgacttctacactgagcatggcgtcaaggcagcaatcagcatctttggcatggttgggggaccgctg

SEQ ID NO: 736242 - DNA, 98 bp, Homo sapiens
cagcaacatggcactgggcaagttccgggccgcgctgcgagactacgagacgagtgaacctctgtatgtgcctgtgaaattccatgatcttccaagtg

SEQ ID NO: 736243 - DNA, 99 bp, Homo sapiens
cgacatcatcgtctttgccttctcctgcaagcaggcaggaacagcatatgccatatatgagctggctgtggcttcatttcccaagaagcaggagtgact

SEQ ID NO: 736244 - DNA, 98 bp, Homo sapiens
gtggccagcgcgcagaggcgggcgcggaggcggctagaaggtgaccgcggatcccagcttcctgcagccagagctccaaacgagaatggaagccgctg

SEQ ID NO: 736245 - DNA, 51 bp, Homo sapiens
atccaacagcagttctcagacctcaaggtggatggaagtgatccgcagtgc

SEQ ID NO: 736246 - DNA, 75 bp, Homo sapiens
tttgaaacttgtttctaaaatccagttactggaccattatcagaattgcaaatagcctatgtatgcagagaaacc

SEQ ID NO: 736247 - DNA, 90 bp, Homo sapiens
gttgtatcgaggctataaaagcacagttttaagagaggtccccttcccctgagcccatctacaatagcgaggggaagcggcttaacaccc

SEQ ID NO: 736248 - DNA, 100 bp, Homo sapiens
cagagacagaagcagatggattcgtccttttaggatctaaaacacgaagctgagaggatcaacaacataaatatactcgtgtgcacaccaggtcggcttc

SEQ ID NO: 736249 - DNA, 100 bp, Homo sapiens
tttccgtcccccaccaagtccggatgctcactccaaagtctcagcaggctggtgcagacatctccatgattgggcagtttggtgttggcttttattctgc

SEQ ID NO: 736250 - DNA, 89 bp, Homo sapiens
ctagtgaataaagccaagagagaccttggagtaattcgtcgacagattgagaggatccagaatccagatctctggaatagctaccaggc

SEQ ID NO: 736251 - DNA, 75 bp, Homo sapiens
gcctctaggaagcgctagacacatttggggactcgcttcattatagaagccatggaggcagcagggcactcaatc

SEQ ID NO: 736252 - DNA, 88 bp, Homo sapiens
gccggccggctgcgaagacgcggtgggccgcccctccggtattatacctgaagaaccttagccctcgggtgactgaaagagatcttgt

SEQ ID NO: 736253 - DNA, 108 bp, Homo sapiens
tcctcaatggggaaacccaaattgtagctgacgaagcattttgcaacgcagttcggagttattatgagcacttctcagaacttctggatgagttttcccagaacgtct

SEQ ID NO: 736254 - DNA, 51 bp, Homo sapiens
ccatggaccaggagcaaagtttgcagatgagtttggtgctttggaaagtgt

SEQ ID NO: 736255 - DNA, 100 bp, Homo sapiens
ggctatggacaaattcccagggcctcccacccactggctttttggacatgccctcgagtctcctgacatcgacaaccaccatgcactcattgaatataac

SEQ ID NO: 736256 - DNA, 80 bp, Homo sapiens
catcttctggacccaactgtggaatatgtgaaggccaaagaggtgctgaaaaaatatttggagtccaaggaggatgtggc

SEQ ID NO: 736257 - DNA, 80 bp, Homo sapiens
tggaaccaacccagccgaccccccagatgcatcactgtaagcgataccgctcccctgaaccagacccgtacctgagctac

SEQ ID NO: 736258 - DNA, 80 bp, Homo sapiens
acttcccgtccgcggcgtggaggaaatgactgctgtccatgcaggcaacataaacttcaagtgggatcctaaaagtctag

SEQ ID NO: 736259 - DNA, 75 bp, Homo sapiens
ctttcatcaaacttagtgatcctggcattagtattacagttttgccaaaggacaaaatgtagacaaccaatttcc

SEQ ID NO: 736260 - DNA, 75 bp, Homo sapiens
ggcagaaaaagttggcatcctccatcttggcatgaagtcatcaatatcaacctgaaaaataagcctgagtggttc

SEQ ID NO: 736261 - DNA, 77 bp, Homo sapiens
ttccggagttgccatgaaatatggaaacgactcctcggccgagctgagtgaggaggcaggtggaagtcatcataaag

SEQ ID NO: 736262 - DNA, 51 bp, Homo sapiens
catccagtggcagacactgaaaataactgggacgatgccggagtgtgaagg

SEQ ID NO: 736263 - DNA, 75 bp, Homo sapiens
caagttgcatgttgactttaggatctgccacagcaaaagtggggaaatcaacccagtgaaggtgagcaacctggt

SEQ ID NO: 736264 - DNA, 75 bp, Homo sapiens
gcctagtttgcatatgagtgctgctgcagcttcccgagacatcaccttggtttctagagaggaaggatctcccca

SEQ ID NO: 736265 - DNA, 50 bp, Homo sapiens
cgccaccatgcccaagagaaagccagatctcggtgctcagcggcggcaag

SEQ ID NO: 736266 - DNA, 82 bp, Homo sapiens
ataagagactggacgctgtgaggctttatcctgtggataaacgcagagtgaacgagtttggggagtcctacgaggagaaggc

SEQ ID NO: 736267 - DNA, 83 bp, Homo sapiens
gctgcattctctttgagtactaccggggcttcacactcttccagaaagttcaggagccctggaaaggagaaggaataagacgg

SEQ ID NO: 736268 - DNA, 98 bp, Homo sapiens
cgccgcccgggcatgcgaagccgtccctccccgggctctgacgcccgctctgcggcttcggtgtttgaacaggccacagtccaggagcgcttacattc

SEQ ID NO: 736269 - DNA, 99 bp, Homo sapiens
tttattaaaggaagcacacctaagagggctctgaactcctacttcgagcctccggtggaggagagcgccttggaacgccgacctgaaaccatctctgag

SEQ ID NO: 736270 - DNA, 100 bp, Homo sapiens
cggagaagcaggagccctactcggcaggtgagcatgggtttatgcgtcttaggcattattgtgatggcgagcaccaattctctgatgtggaccttcttta

SEQ ID NO: 736271 - DNA, 74 bp, Homo sapiens
gccccacccgcatgctctttgtcactccccggcggcagcacgaaagtaccattgccctataaggactgccaggc

SEQ ID NO: 736272 - DNA, 75 bp, Homo sapiens
ggcatcagggaggctttcagccggagaagcgagtttcagctgaaaaatctggtccttcatcagaactaggaaagc

SEQ ID NO: 736273 - DNA, 75 bp, Homo sapiens
tataggaacctggtctccctggatgtgagaagggtgttatgtctctagtgaatgtcaggaactgtattcgcttct

SEQ ID NO: 736274 - DNA, 100 bp, Homo sapiens
gccctgtcagtagctcctcagattgttatggctgcagcttcgattgccaatattgtaaaaagttctcttggtccagttggcttggataaaatgttggtgg

SEQ ID NO: 736275 - DNA, 82 bp, Homo sapiens
ctttttcgttgcagccactgaagatcctggtgtcgccatgggccgccgccccgcccgttgttggaagcctccttagctgcag

SEQ ID NO: 736276 - DNA, 100 bp, Homo sapiens
ctgacccatgttgtcaacagcgtgatgcagccgcagaggatctttgacaggcagtactacgagatgctttacaacacagctgacgagctcctgaacctgg

SEQ ID NO: 736277 - DNA, 82 bp, Homo sapiens
gaggatctggtgtaccaggcgaagctggccgagcaggctgagcgatacgacgtgggcgacagatgcgaaagaaacgagttcc

SEQ ID NO: 736278 - DNA, 75 bp, Homo sapiens
atcagctccaggcctgggaaagtgaaggtggccagcatcgaaatgttcagccttttagtgatgaagatgcatcaa

SEQ ID NO: 736279 - DNA, 100 bp, Homo sapiens
cagagacactgccaagcagccttagccctagtgtagagggtggctttgtccactatggtgaagtgaccaatgactttgtcatgctgaaaggctgtgtggt

SEQ ID NO: 736280 - DNA, 75 bp, Homo sapiens
ctgccgccgttgcctccgccgccaagagtgagcgagcggacccgcgatgggtactccaaagattcaggtttactc

SEQ ID NO: 736281 - DNA, 75 bp, Homo sapiens
ccactgtgacttgcagtcatcatccattaccacaaaattagtactgccaaatctgtcgaaagggagataatgaag

SEQ ID NO: 736282 - DNA, 75 bp, Homo sapiens
tagcaattgactcagttcatcagctacattatgtacacaggtatgtgacgcattcccagactcttcagccaactg

SEQ ID NO: 736283 - DNA, 75 bp, Homo sapiens
aataagctatatactttggttacctatgtacctgttaccactttcaaaaaataaggaagaagtgatggctgtgag

SEQ ID NO: 736284 - DNA, 90 bp, Homo sapiens
tgatgattctactccttgcatatcagttgttgcacttccacaggtggaatttaatgtatcagaagcatttgtacctctcaccaccccgag

SEQ ID NO: 736285 - DNA, 75 bp, Homo sapiens
accttatttccatagtgggcatttgcctgggcgtcggcctactcgagactctgtttgctggctacacggacaacc

SEQ ID NO: 736286 - DNA, 100 bp, Homo sapiens
gtttgccaagtgaaaaagagcgatacctctcaagtcaaagcagcaggaagataccacaatcagaccctccggttgcgagttataaggactcagcatcatg

SEQ ID NO: 736287 - DNA, 82 bp, Homo sapiens
gtggtctctggagctgtggttgctgctgtgatatggaggaagaagagctcaggtgtgggcccatcgctggatggatctgtca

SEQ ID NO: 736288 - DNA, 75 bp, Homo sapiens
cccggtttggcactgctcctgctggccgcctggacggctcgggcgctggaggtctcctctgagcctccggcctcc

SEQ ID NO: 736289 - DNA, 90 bp, Homo sapiens
cttgatgatgatgagtgtcctttacaaatcttcagggaatggccaagtgacaaagctttagcgtcacctccctcactgggcagcatgggg

SEQ ID NO: 736290 - DNA, 90 bp, Homo sapiens
ggaacccaccagaaggaaccaattccggacacataacaagcagcagtgaggacaccaaagatgttctcagtgcagctgagtcttggtgag

SEQ ID NO: 736291 - DNA, 74 bp, Homo sapiens
tttccatgctctccatcacctatcacagcagcatccgctctctggaggttcaagggcagcaggaaagacgagat

SEQ ID NO: 736292 - DNA, 101 bp, Homo sapiens
gactcctgaggagaagtctgccgttactgccctgtggggcaaggtgaacgtggatgaagttggtggtcaaaatgcagatcttcgtgaaaacccttaccggc

SEQ ID NO: 736293 - DNA, 91 bp, Homo sapiens
cgaggtggagcagaccccacaaggattccggtctactttgagggcccccagcttgctctataaggatttcagtcataatcggttgtctaac

SEQ ID NO: 736294 - DNA, 82 bp, Homo sapiens
agtctcagcttcaggtgaagaaggcagctctcactcaggcaaagggcatatcgatgcatttacttcaaaactttttctactg

SEQ ID NO: 736295 - DNA, 82 bp, Homo sapiens
ctcgctctcgcggcctagctttacccgcccgcctgctcggcgaccagggcagttgggtgagaagcagcttccatcttcaacc

SEQ ID NO: 736296 - DNA, 90 bp, Homo sapiens
gcggcgacatgcagcagctgaaccagctgggcgcgcagggattgtcaatgaggcagatcagattccgatttgacgggcaaccaatcaatg

SEQ ID NO: 736297 - DNA, 50 bp, Homo sapiens
cgtgcgcggacatggcctcaaacggctcttgtcaggatggtgaagctgtt

SEQ ID NO: 736298 - DNA, 98 bp, Homo sapiens
gaggaatgttcatggcgctcacctggcaaacccacctcctggctcttggctgtgtttgctgatggtcgccaaagttggagttagtatgttcaacagac

SEQ ID NO: 736299 - DNA, 74 bp, Homo sapiens
ggacggactgtcaaggagttctgccagcaggaggtcgttatgttaaagtctgggacatgttaaaaggaggacaa

SEQ ID NO: 736300 - DNA, 90 bp, Homo sapiens
gaccactgaggatgtggagaaggccacagggaaatcctcattgacgattcaatttgttgaaggccaatttgtggactcctacgatccaac

SEQ ID NO: 736301 - DNA, 80 bp, Homo sapiens
ggaagacgcggggaagaggaggcggaaaaggacgcaaagttctccggcgaggctggtgtgtgacagctctgtgctgctgt

SEQ ID NO: 736302 - DNA, 100 bp, Homo sapiens
aattttccttgacctttaggtgcttttatattcatctcaaaaacaaaattctgaactcaggacttggcaagaaatattctgctgtacgtagagatggctc

SEQ ID NO: 736303 - DNA, 96 bp, Homo sapiens
ctgtcaccgccatggctgccccgtgtttgctgcggcaaggacgagccggggcgctgaagttgccctcaaattggctgtagccacacggatataaga

SEQ ID NO: 736304 - DNA, 83 bp, Homo sapiens
ctctgcgaggccatctgccccgcccagagatcccaggcccacaaatcaacgcatcaataagcacgtcaacaatgatgtgaacc

SEQ ID NO: 736305 - DNA, 102 bp, Homo sapiens
tggagagcctgcaggacggcgcggcagagtccccgtacgcctacagtaacggtgcgagaccaagtgtagcaatggcacttacggcgaggactgcgccttcgt

SEQ ID NO: 736306 - DNA, 82 bp, Homo sapiens
ttcctgtatatcggaatcatcaccatctgtgtatgtgtgattgaggacagtcattttgtttactcattcagccctgttgcag

SEQ ID NO: 736307 - DNA, 100 bp, Homo sapiens
ccgcgggagctgcccggcagggcggagcctcccctcgcagctatttgtcgtagatgtccagacaagccagatcaccaagatccccattctgaaagaccgg

SEQ ID NO: 736308 - DNA, 82 bp, Homo sapiens
ttccccctgggaacctcagtgctctgttaccaggtcatcgtgatgtcaggtcatgagaccatccgagtgctggaagtcggag

SEQ ID NO: 736309 - DNA, 98 bp, Homo sapiens
tctgaaggaaatggaaacaccgttgtcagcacttggaatacaagatggttgccgggtcatgttaattgggaaaaaggataaggagcacaagtgtcctt

SEQ ID NO: 736310 - DNA, 97 bp, Homo sapiens
agagtcaggtgaaggctgatggatttcagaaactgttggagtttatatacacaggaactttaaatcttgacagatttgaggcttaagcaacttcttc

SEQ ID NO: 736311 - DNA, 90 bp, Homo sapiens
ggcgctttgagaactgagcgcatgtggagttcggaggaaaagggctcaggactcagtggcatttgaggatgtggctataaacttcacctg

SEQ ID NO: 736312 - DNA, 75 bp, Homo sapiens
gcttatcagaattgctagagatacaacttcttacagacacaacaattcttcaggctggcctgctgtctgccttgg

SEQ ID NO: 736313 - DNA, 75 bp, Homo sapiens
cataaaaaatgtggagcccaagcaggaactgaagagcggattcaccaagcacaagcagctgcagctaaagccaga

SEQ ID NO: 736314 - DNA, 82 bp, Homo sapiens
gaatgaatccttctagagacgtccacggagccttcacgtaaatgggtccagtcatgcctcccagtaagaagccagaaagctc

SEQ ID NO: 736315 - DNA, 127 bp, Homo sapiens
gcgaggagaacagcaacgatattgccctggtccacctctccagtcccctgcccctcacagctatgatagtagtggagcttccaaagatgaaattaaggagagatttgctcagaccatggagtttgtg

SEQ ID NO: 736316 - DNA, 75 bp, Homo sapiens
agaagaagccctactgcaacgcgtttaagaattgtttaagctgcatcaatggagcacatacagggagcttggaag

SEQ ID NO: 736317 - DNA, 87 bp, Homo sapiens
gatgtgcggggtgcgccggcagaggatccagtgttcaccatcctggccccggaaggtgaaaggtgtagcagtcactcggcctacacc

SEQ ID NO: 736318 - DNA, 75 bp, Homo sapiens
tccccgctcagctcctggggctcctgctactctggctccgaggtgccaaattccccatcaagtggacggctccag

SEQ ID NO: 736319 - DNA, 98 bp, Homo sapiens
ttcgttgggggtgaaaaaggtgtctgtgcagctgactgtaaaacccaaagtgtttgaagaacctgaagatcccagtaacaggtcatttttttccgaaa

SEQ ID NO: 736320 - DNA, 89 bp, Homo sapiens
aaaccctgtggtgaccaatcggatagaggaaggagagagacctgaccgtggtctgcaagaagaatctggacagtaccactgtggccgtg

SEQ ID NO: 736321 - DNA, 90 bp, Homo sapiens
caatttatcattgaataagtgttttaagaaagtggacaaagagaggagtcaggtcttgttgcagtaggagaaagagcacaaaagaggtct

SEQ ID NO: 736322 - DNA, 90 bp, Homo sapiens
ataccctggggctgagaggaatcttctggagtactcttattttgaaaagatacctcttccaaatgcatgatgaagatgttctcatcaaca

SEQ ID NO: 736323 - DNA, 100 bp, Homo sapiens
cgtggggcttccgcctcgtgggcggcaaggacttcgagcagcctctcgccatttcccgggtgaaagaacttgtcctggacaacagtcggtcgaatgaagg

SEQ ID NO: 736324 - DNA, 93 bp, Homo sapiens
ctgctcccttcgccttcgccctttccacctcgcggcagttcggtgacttaagagattaaaattaatttggttgctgttggttctgaacaaata

SEQ ID NO: 736325 - DNA, 98 bp, Homo sapiens
tcaaaacagcagcgcgggcaaccggggaccccggccactggagcaggtcacctgttacaagggcacagcccagcgcctgcagagcctgggaacggaga

SEQ ID NO: 736326 - DNA, 100 bp, Homo sapiens
tgacattcaaccgtacccgccaagctgtcatcacaaaagagttgattgaaattatctctggtgctgcagctctagacaagaaagatttgctgatagatca

SEQ ID NO: 736327 - DNA, 95 bp, Homo sapiens
attatcaagcagggatgtttactgaagcaggttttgtgatctctaacccagacctggtcacctgtctggagcaaataaaagagccctgcaatttg

SEQ ID NO: 736328 - DNA, 82 bp, Homo sapiens
aaaacctatcgttagagtcttcctgcccaacaaacagaggacagtgggaaatcctcattgacgattcaatttgttgaaggcc

SEQ ID NO: 736329 - DNA, 112 bp, Homo sapiens
caaacagctatggtgatgattagagacatactaatgtacatgaaactgccagaggcatgcagcattggtgatggaaagccctttgtcatgaatctgcaggatctgtatatgg

SEQ ID NO: 736330 - DNA, 50 bp, Homo sapiens
acctcatcggggcggtgattgccgggtctttactcacctggagacctgtg

SEQ ID NO: 736331 - DNA, 100 bp, Homo sapiens
gcctgaacgacaggatcgtggagagagatttccagtggacggacaacaccgggctgagcgacaccacaggcaagctgggctttgaggaattcaagtactt

SEQ ID NO: 736332 - DNA, 83 bp, Homo sapiens
gaggtcggctgctgcgggaaatacttcctgtttggcttcaacattgtcttctgggcggaagcccggctcgctgcaaaacgggc

SEQ ID NO: 736333 - DNA, 100 bp, Homo sapiens
tcactttctgaaatggaacctcaggatcttgagctagaggccagccctccagatctctatattgaaagatttaatatagctcttggacaatatatgggag

SEQ ID NO: 736334 - DNA, 83 bp, Homo sapiens
tgaatcaatgtgctgagctgctggagaaattggaaaagctatttctcaacgatgacgggtctaagccgacacccacgatggag

SEQ ID NO: 736335 - DNA, 100 bp, Homo sapiens
ttcaacaccaacaagaatgaggagcaggacatcttcatttacagagcaacttgatgaaggtacacccaatagagaggacccagccatttctggcaatgag

SEQ ID NO: 736336 - DNA, 88 bp, Homo sapiens
accacccgcacggcgcagtgccggaacactgtggcggccatcgaggagatcctggccaacgtcttcctctacctgtgcgccatcgctg

SEQ ID NO: 736337 - DNA, 100 bp, Homo sapiens
tgattagcttcgcagtctggaaagctttaggagttcacagtatgctgatggaaagttaagcgtgaaatttggggtcctcttccgtgatgataaatgtgcc

SEQ ID NO: 736338 - DNA, 121 bp, Homo sapiens
gaaaaccctgctgatgtcagtgttatatcctccaggaatactggccagtgcccaccagaagtatgtccgacaagcctggcagaaggcagacatcaatacaaaatgggcagccacacgatgg

SEQ ID NO: 736339 - DNA, 98 bp, Homo sapiens
atctgttctgccctggctgcctcagccctaccagcactggtcatgtctaaagtggcaaatccaactgaccagaaggaaggaggaagcttattggtggc

SEQ ID NO: 736340 - DNA, 95 bp, Homo sapiens
aatgtgagcttcaagtatacaaaagatggggtagcccgactcctacagccctctgtgatttggattggaaatgctgagaagaatttctataagaa

SEQ ID NO: 736341 - DNA, 100 bp, Homo sapiens
ctcggtggcgggcatggaggcttcgcgctgccggctcagtcccagcggcgacaggtccaacgagcgctcctccaagcggagccttggagggcacggccgg

SEQ ID NO: 736342 - DNA, 100 bp, Homo sapiens
gaggatgatgcggaaattaaccccaaggttgactatagtcaatggggccaatggagccaagtgtatggaaacccacaacagtatggacagtatatggcaa

SEQ ID NO: 736343 - DNA, 100 bp, Homo sapiens
ttctttaagaaaatcagataacttgtactggagagaaatcctacaagtgtgactgcttccccacaacaaagagaaatgatggatcaggcagctgctcaat

SEQ ID NO: 736344 - DNA, 75 bp, Homo sapiens
actgcgctgctggggcctgggctttggctcttgcatacaggcccgggtcctttttgtgctgattgtgctgagcca

SEQ ID NO: 736345 - DNA, 75 bp, Homo sapiens
cctgctggtcagcactgcggctgtgttctaagaacggaagcatctgggctggatggaatttagcatcaagcagag

SEQ ID NO: 736346 - DNA, 75 bp, Homo sapiens
aaatcaccagttactttaatgaaggaggaaggaagagacttgagctgttgtgtagcttctcttgttcaagtgatg

SEQ ID NO: 736347 - DNA, 128 bp, Homo sapiens
aaaagacaggtgagacttcgagagccctgtcatcttctaaacagagcagcagcagcagagatgataacatgtttcaggttaacatgtttgttgaaggattccacgatgccatcctcctctacgtcttg

SEQ ID NO: 736348 - DNA, 100 bp, Homo sapiens
gagcatattaatgaaaagtgccataaactgaaaaaccaaacatgagggtagcaggaggcggcgacggcggcggcggggggagaggaagagaaagaagcgt

SEQ ID NO: 736349 - DNA, 51 bp, Homo sapiens
gcgtgcctttgggtgataagggaggcaaccagaaggatgaatgatattctg

SEQ ID NO: 736350 - DNA, 98 bp, Homo sapiens
gctaacaattgctggaatgacctttacaacttttgatcttggtgggcacgagcaaggtatcactaccattaaagttaacattcgtaatgccaattccc

SEQ ID NO: 736351 - DNA, 83 bp, Homo sapiens
ggagcgagctgggagggagccgcgcgcctttgtgcgcgcgccgagatggacaagaggaaagacccttcttccgttgatatcaa

SEQ ID NO: 736352 - DNA, 88 bp, Homo sapiens
gcgaacgcggagagcacgccatgaaggcctcgggcacgcccgagcgggaagaagttccgcagcaagccgcagctggcgcgctacctgg

SEQ ID NO: 736353 - DNA, 75 bp, Homo sapiens
tctgggtgcatactattatagaaaatttttctaccagaaggtggctttgaagcgtatgttgaatttcaatgtgcc

SEQ ID NO: 736354 - DNA, 51 bp, Homo sapiens
gaggtggagttctgtgtggaagtgagggtcgctgtctgcccattgatagag

SEQ ID NO: 736355 - DNA, 73 bp, Homo sapiens
cgagaacatcgtagcgaacacggtgctactcaaggcccgggaagatgaggagcgggaaggcctcctgcaccct

SEQ ID NO: 736356 - DNA, 51 bp, Homo sapiens
gttacatttttgcactgcctggtaacaagatgatgtcagaagtgggatcca

SEQ ID NO: 736357 - DNA, 78 bp, Homo sapiens
aagaagccaaagagaaaggtacctgggttcaactaaagcgccaggaaatcatcgagttccccatcctaaagctaaatg

SEQ ID NO: 736358 - DNA, 100 bp, Homo sapiens
ctcctttaagacggtctacaaaggtctggacactgaaaccaccgtggaagtcgcctggtgtgaactgcaggtgatgttctgcaccctgaacacccacaaa

SEQ ID NO: 736359 - DNA, 100 bp, Homo sapiens
cttcggaatgcactacaacaggaaaatcatattatagatggagtaaaggcagagtggcatgattccgactggatactctcagtgccagccaaattacctg

SEQ ID NO: 736360 - DNA, 122 bp, Homo sapiens
tgttctcataataattcagatggagaatatatggctggacagctagctgcttatggctataaaattacagctggtgctcaagaccgaatcggctgggcttttggcctaggattagaaaggct

SEQ ID NO: 736361 - DNA, 146 bp, Homo sapiens
aaaaaggagagcatcttggacttgtccaagtacatcgacaagacgatccgggtaaagttccagggaggccgcgaaggtggtgatctttgtgaagtctgtgcagcggtgcattgccttggcccagctactagtggagcagaacttcc

SEQ ID NO: 736362 - DNA, 88 bp, Homo sapiens
cagccagccctgcgcctcgcgccgtcgcgcatgcgtcctggacaatgcagatcttcgtgaagactctgactggtaagaccatcaccct

SEQ ID NO: 736363 - DNA, 83 bp, Homo sapiens
gtgtcacccggcaactcagaaacatcaggtccaagatctcatcctggccttgggtgtcctggcccaaagccggccggtgtcca

SEQ ID NO: 736364 - DNA, 76 bp, Homo sapiens
atggacctccagatttccttactggtagcctttccagtaaatatatgactcagggaaaagcctcagcgaagaggac

SEQ ID NO: 736365 - DNA, 75 bp, Homo sapiens
acaggacgttggggcggcctggctccctcaggtataaaggaccattgttagaagagcaagcccttacaaaggcgg

SEQ ID NO: 736366 - DNA, 74 bp, Homo sapiens
ggagccggccgcgcgggccgggaggggacggccgccggagccgcgaggccaattttctttttaaaagcggaagg

SEQ ID NO: 736367 - DNA, 50 bp, Homo sapiens
ttcatgcacaaatttttatgtggagtgtaaacaggaacatcgataagtag

SEQ ID NO: 736368 - DNA, 83 bp, Homo sapiens
cgggtggagtgtaggtcatatcgccgcggatgaaacgaggaggaagagatagtgaccgtaattcatcagaagaaggaactgca

SEQ ID NO: 736369 - DNA, 73 bp, Homo sapiens
gcgctcatctgctggagcccgtattctaccttgtaaatactgttatttgtatatactgtaaatgatgacatcg

SEQ ID NO: 736370 - DNA, 97 bp, Homo sapiens
gccaggacgagaggatgcggagcccgcagaacctccacagtcaagaggacgaatttcagaaactgtggaggagtgtcactgtagattccatggacga

SEQ ID NO: 736371 - DNA, 98 bp, Homo sapiens
ctgggactaagccaagggattcaggtgtggtgccggtgggaactgaggaagcgcccaaggggatggcctttacccttgaagaaaggctgcagcttgga

SEQ ID NO: 736372 - DNA, 82 bp, Homo sapiens
cccgttacaatcactagtgttgcaggtgtgatgaatgcagactctgctaccattttggctgtttggatcctcctttgaaaaa

SEQ ID NO: 736373 - DNA, 75 bp, Homo sapiens
tctctcagtttgcacaagggaggcgacagagacagcagcagggcaagaggcctgggacaactcattagagctaag

SEQ ID NO: 736374 - DNA, 83 bp, Homo sapiens
ttctgcaaggctatcatttcacagctgattcctgggagcacatccatttcattggcaaggcagaagctcctcctggggtagag

SEQ ID NO: 736375 - DNA, 100 bp, Homo sapiens
cacatgcagatgagaagtccttagtgagaaagatcagtctaaagaaaaggagaagaaagtgaaaaaaacaattccttcctgggctaccctttctgccagc

SEQ ID NO: 736376 - DNA, 90 bp, Homo sapiens
cggaagcggcggagtagagcggagcctggcgggcgtgggaacccaggccccgccgaggcggccagggcatcttttatgaccaaaactgtg

SEQ ID NO: 736377 - DNA, 83 bp, Homo sapiens
gaacttggttccccctccctcagcttccgccccaaaagatctgactgcagccatgagcagcaatgagtgcttcaagtgtggac

SEQ ID NO: 736378 - DNA, 100 bp, Homo sapiens
ctcggcccagcttcgacaactgctttgcctcaaactcagctttctaccagcagacagtttggctgtagcagcaattcctgaaggtctccccattgtggtc

SEQ ID NO: 736379 - DNA, 75 bp, Homo sapiens
ggattacataaaccagtcacccaagtgcattgcctttggaaacgagagttaatgttctcctcagaggtggaagaa

SEQ ID NO: 736380 - DNA, 98 bp, Homo sapiens
atccttggagaaacacaggaggaggaggatgagattcttccaaggaaagactatgagtccgggaccatgtctggagaactaccaccaaacattaacat

SEQ ID NO: 736381 - DNA, 75 bp, Homo sapiens
cacatgagcatgaagataaaagtcctgaaacagttttgcagtcgagccttgcaaaggaccatcgcatgaaactta

SEQ ID NO: 736382 - DNA, 100 bp, Homo sapiens
ggccttttgacaactccaatgttgactgtgtctgtaaccctcgagacctttcaagatctgtccttgccaattcctggcaaggaagaccttgctaagctgc

SEQ ID NO: 736383 - DNA, 83 bp, Homo sapiens
gaagaagtatcagaaagcagggctgtattctgacgtttacaaaactacagagtgctggagaatctggtaaaagcaccattgtg

SEQ ID NO: 736384 - DNA, 82 bp, Homo sapiens
aacccagacagaggggagcacagagaaagagaatgatgaagagaaaggcccggagactcctgtttgcaaggtttcaccagag

SEQ ID NO: 736385 - DNA, 100 bp, Homo sapiens
gccaccgggaccggcgtgggagcgacgccagcgcctcaacaggtactgggcctaatcgctacgtgcctctttggctatgatgcctatgtcaccttccccg

SEQ ID NO: 736386 - DNA, 51 bp, Homo sapiens
ggcaacacggtgcaccggaccctgccagaattccctgatcacagctgtctc

SEQ ID NO: 736387 - DNA, 75 bp, Homo sapiens
gctaatggtggagccaaaatgctattgccctgtcttcatcaacatttaatcaaattcaaggaagccttctcccta

SEQ ID NO: 736388 - DNA, 106 bp, Homo sapiens
acagtgaaaccctttgccatcgacatatttcctgtcaccaacaaagatttcagggctcgtgcaatccgcttcagacaggatggtaacgaagccgtcggaggattct

SEQ ID NO: 736389 - DNA, 134 bp, Homo sapiens
gccgaagtaatagtggactggagaccattggatgatgcattagattcctctagtattctctatgctagaaagtcataccctaatgatcccagcaagataatgtcctgtcttctaagatgtgcatcaagcctggt

SEQ ID NO: 736390 - DNA, 89 bp, Homo sapiens
ggccaccgggcctccagctctgcttcggggtggcaccaagcccaccgtgaagggctggctgaccaagcctcctgctcttcatggatgaa

SEQ ID NO: 736391 - DNA, 75 bp, Homo sapiens
cttcgacctggagctgggccaggccgtggaggctgtttataccttaacttctctttaccgacaatatacaagttt

SEQ ID NO: 736392 - DNA, 82 bp, Homo sapiens
gagcgggagttcgaagagttggatactcagcgtcgctggcagccgctgtacttgttcaaatctgaacatcaatgatgtacta

SEQ ID NO: 736393 - DNA, 90 bp, Homo sapiens
gaagctccccacatgctggtggtgtactctgctaatggagagatgtttaaactgagagatcagggagcagagaaacatgaaggcacaggt

SEQ ID NO: 736394 - DNA, 83 bp, Homo sapiens
ctggggccagggaaccctggtcaccgtctcctcaggccaagactaaggggctgcagagcggggtggacattggcgtcaagtac

SEQ ID NO: 736395 - DNA, 83 bp, Homo sapiens
cacgaggcggcgggctggagacatggaccgcggcgagcaagggcgaagctgtgctcaggcccgggctggacgcagagccagag

SEQ ID NO: 736396 - DNA, 99 bp, Homo sapiens
cgaagctattgtgggcatggaatccacaagctttttcatacagctcccaatgtaccccactatgctataccttccactggaagaatctcaaacagcgct

SEQ ID NO: 736397 - DNA, 100 bp, Homo sapiens
cggcaccaactattcgcggagctggaatgactggcaacccagatgaagccaaggaggagttcctggatctgcttgatgtgttgctgccccatgcccagac

SEQ ID NO: 736398 - DNA, 75 bp, Homo sapiens
aggggacttctccatctctgtcagatgacagtcatgtccctttccagggacctcaaggacgactttcacagtgac

SEQ ID NO: 736399 - DNA, 78 bp, Homo sapiens
ttgaccgctccaagtcctatgagctcatccggaagattgaggcctacatggaagatgttccagtggatttgatcgtca

SEQ ID NO: 736400 - DNA, 50 bp, Homo sapiens
cctacctccagtcccagttaaaaagatgaaggatttgggggcagagcact

SEQ ID NO: 736401 - DNA, 76 bp, Homo sapiens
ccctcgcgacgcgcccggcccggagcccccagcgcagcggccgcgaatgctgagatgtataaactgtcttcagagc

SEQ ID NO: 736402 - DNA, 90 bp, Homo sapiens
atgagggacaacctgtttgaaataataacaagctccaggaccttctacgtacagttctgaatgcagtgatggggaatggtctgcttcttt

SEQ ID NO: 736403 - DNA, 96 bp, Homo sapiens
caaaggcgcaagtcgagaggaaactgttgtgcctcttcatattggcgatcctgttgtctgagatctgtatctgtggacctgaatgttgatccctcg

SEQ ID NO: 736404 - DNA, 90 bp, Homo sapiens
ctataaaccacccatttcgaaagcgaaaatgacccaaattactaaggcagccatcaaagctattaaggaaactgatgactatagatattt

SEQ ID NO: 736405 - DNA, 75 bp, Homo sapiens
gggccttttgggcagcttttccggcctgacaacttcatctttggtgaaagtgggagatacattggatcttctcat

SEQ ID NO: 736406 - DNA, 98 bp, Homo sapiens
aagaacgatgcccccctccacgagatcaacgaactggcctatgatctggatgtggatgatgcgcctggaaacagtcagcaggcaactccgaaggacaa

SEQ ID NO: 736407 - DNA, 50 bp, Homo sapiens
ccggggctcgcggggggtgcgcagggcagtgcaccgtccaggtgaggtta

SEQ ID NO: 736408 - DNA, 82 bp, Homo sapiens
atgagttagtcgcagacatggacaccaaacatttcctgccgctcgcaaattgtggctactaatttgccccctgaagatcaag

SEQ ID NO: 736409 - DNA, 71 bp, Homo sapiens
tgttattgcaagcaccaacccagatttgttcccgacaaggagttttctggttcagaccgtagacagagagg

SEQ ID NO: 736410 - DNA, 82 bp, Homo sapiens
ggaaggaacgaggcaaggagctaaagcagcgtgcgttcagccctgggttacgaaaagcggctgtactgaggacagcggtgga

SEQ ID NO: 736411 - DNA, 73 bp, Homo sapiens
gccgctcatgtgactctcctgacatccttagtagaagagacaaagcatggaggacacaagaatgggaggaaag

SEQ ID NO: 736412 - DNA, 75 bp, Homo sapiens
agaaggaataaccttcatcaagttttatgctccatggacaatataaggcttcaagattgctcagcactatgtgaa

SEQ ID NO: 736413 - DNA, 75 bp, Homo sapiens
cctcctacgtttacctgtccatgttattgccttgtctgtcaagatccgcagttatgaagaacacttggagaaaca

SEQ ID NO: 736414 - DNA, 97 bp, Homo sapiens
gccaccgcctcagcgggagaggagtctccaccaggactgaccgctgccgcccagcacgtccagcctccttttagaggactcagaagaagaagaaggt

SEQ ID NO: 736415 - DNA, 50 bp, Homo sapiens
ccatatatacagtgacctggcgaaaaattctgtaggccgttggaaggaag

SEQ ID NO: 736416 - DNA, 87 bp, Homo sapiens
ggccccgcggggagcgcccccggcgcgatgcccttcaggaaagggggatatgagactttctactcggaatatcctgagtgttgcgtg

SEQ ID NO: 736417 - DNA, 82 bp, Homo sapiens
tcagcttgtcacgtcacagattgacgcacagcggaggcctgcacagaggtgagaagccctaccactgcaactgggacggctg

SEQ ID NO: 736418 - DNA, 100 bp, Homo sapiens
ccaccatctccatcacccaccaacaacaccacaataatccacagccaagaacaactctgctcatggtgattacatgcaaaataacgagagcagcttaata

SEQ ID NO: 736419 - DNA, 100 bp, Homo sapiens
aggctcgcgggcggcgggcccgggaaatcagggatcctcttatgcagtggcttgggaaacatgtggactccgagggagaaataaaatccggccagctctc

SEQ ID NO: 736420 - DNA, 75 bp, Homo sapiens
ggtcaaatgcactgtccagacggagatccgggaaactactaaagttcctggggaagcaaagtagaatttcataag

SEQ ID NO: 736421 - DNA, 82 bp, Homo sapiens
ccaaaagttggacagcggtttaaccgcatcgggctaccaccaaaggtgggagatgccatcccagcagtggaggtgtttgaag

SEQ ID NO: 736422 - DNA, 82 bp, Homo sapiens
cccgggatgggaaaggcgacctgggggagccgcccccgacacggcccacggccctgggctgcatcttgtacctgctgtgctt

SEQ ID NO: 736423 - DNA, 82 bp, Homo sapiens
cttacacggcctctgatttcatagaagtgggaatgtaagacggacttagatattgcatacaaatttggaaaaactgtggtga

SEQ ID NO: 736424 - DNA, 82 bp, Homo sapiens
agtagattaattatcagtatatgtgaaatcatgtccactgatcaaggctaaggtgcagaagatgaatttgcgttctgtgagc

SEQ ID NO: 736425 - DNA, 90 bp, Homo sapiens
gcagaccacagttacatgtatggagaatggctggtctcctactcccagatgcatccgtgtcagttatgatgtgattgctcaagcccaatc

SEQ ID NO: 736426 - DNA, 132 bp, Homo sapiens
cagacccactgatacgctgggactcgtacgagaacctcagtgcagatggagaagttagagatgtttatgattacttccgagctgtcctgcagcgtgatgaaagaagtgaacgagcttttaagctaacccggg

SEQ ID NO: 736427 - DNA, 90 bp, Homo sapiens
cgacaagatggcggacggggagctgaacgtggacagcctcatcacccggctgctggaggccccgactatctgagatcggccaagatgact

SEQ ID NO: 736428 - DNA, 145 bp, Homo sapiens
gacaaacaagattgagattagcatggactgtatccgcatgcaggactcggacctgagtgaccccatgtgggaaagtgggggctcagcaagaactgattaccgagccattcaactagccaaggaaaaaaagcagagaggagcgggg

SEQ ID NO: 736429 - DNA, 100 bp, Homo sapiens
atggaatgtgcgagaacacgggcaaagcgaaggctggagctaggagaaagcggtcatcagtacctctcagatggtttaaaaacccccaagggcaaaggaa

SEQ ID NO: 736430 - DNA, 74 bp, Homo sapiens
tttgaggtcactttccagcagtccagcacggccaagtcagccacctggacggaatggaagttggatacactttg

SEQ ID NO: 736431 - DNA, 82 bp, Homo sapiens
ccatcctgccgtccttctccactttcgccagcccgtgccgcgagcgcggcctgcaggaggtagtgaagcgcgcagtggcgag

SEQ ID NO: 736432 - DNA, 80 bp, Homo sapiens
tatactttggttacctatgtacctgttaccactttcaaaaaatgttcatgaagaagtcttacaagaatatcagaagataa

SEQ ID NO: 736433 - DNA, 101 bp, Homo sapiens
accaaagacatggaagaaaccaaaagatcggacccgaaccactgaagagatgttagaggcagaattggaggctcgcttctcatatgtgcggatgaaatatc

SEQ ID NO: 736434 - DNA, 112 bp, Homo sapiens
tgggcaggcggagcagggccttggaccccgcggcgcccctcggcctcggagcaacgagcgcagcgccgcctacagacctggtacctggatttttgcccgagatgattcctac

SEQ ID NO: 736435 - DNA, 83 bp, Homo sapiens
cgggagctggacggcgagcgcgagcggcgcgagaaagtcaagtctggcaccatctttgacaacttcctcatcaccaacgatga

SEQ ID NO: 736436 - DNA, 90 bp, Homo sapiens
gtgggtgaagataggatcaagatggccatgtggcaggaatagcctaacatggcagaccagagacagcgctcactgtctacctctggggag

SEQ ID NO: 736437 - DNA, 74 bp, Homo sapiens
gttgaccaactggtggaacccctggacccctgtaaaagagcccaacagtgaaaatgtagatatcagcagtggag

SEQ ID NO: 736438 - DNA, 80 bp, Homo sapiens
acatatatgcgaatctataagaaaggtgatattgtagacatcaaggattccaaagcctatttccatcttctcaatcaaat

SEQ ID NO: 736439 - DNA, 97 bp, Homo sapiens
tttgccatccgagggatgctgaaaacctttgggcttcatggagtcgtcttagatgttgattcatctcggccacctgtgaccacctccaatgccatcc

SEQ ID NO: 736440 - DNA, 98 bp, Homo sapiens
tactggggataacattcatgcagaacatcagagcgtttcccaaagtgtattctgcggaactagcacctactgtgttctcaacaccgtgccacctatag

SEQ ID NO: 736441 - DNA, 82 bp, Homo sapiens
cagagagggcctcgggaagagatgcgaggatgacaaggttgtttttcaccattcagaacattgcctgaagcaggtccaccat

SEQ ID NO: 736442 - DNA, 51 bp, Homo sapiens
cagccacgcatctgaccttgttggtggtgttcccactgatgaagagcaggc

SEQ ID NO: 736443 - DNA, 100 bp, Homo sapiens
ctccacaatgggacactgagctttgtggaagcatttggcggcataccaccctgcactgtgagtgatcctgccatgaagcagtttctgctgtacttggatg

SEQ ID NO: 736444 - DNA, 136 bp, Homo sapiens
aggcgcggcggcgcggctgccggctgccctgtgaatgggaagttacgcgaagtccacccagcgtttctgagtcctgctgccggccacagagatggcatcgctgctgtcgctgcaggaggagaaccagctgctgcag

SEQ ID NO: 736445 - DNA, 99 bp, Homo sapiens
ccaaagcagtcgtaagaagaggtcccaatcccccactctttccgccctaatggaggtctccagtttcgggcagagcggcttgggtaaatccaccttaat

SEQ ID NO: 736446 - DNA, 95 bp, Homo sapiens
agaagcatgggttaaaatagaaaatctagccaaagccaatccccaggaagtaacagctagcagtcgccactatgttgacaggctatttgaccctg

SEQ ID NO: 736447 - DNA, 76 bp, Homo sapiens
gctgccgccgctctgaggagttaaagatgctattaactgagtacttggatatgaaaaatactcgtacggcctctga

SEQ ID NO: 736448 - DNA, 75 bp, Homo sapiens
catctgaagaagttcatcgccaaaaaactcaacctttcatcctttaacgagtccatccagcccacagctaacctg

SEQ ID NO: 736449 - DNA, 100 bp, Homo sapiens
cttgcagaaaaattggtgtacctcagggaagacttcctgtcccaaaggaagtgaaccgcaagaagaacgatgagacaaacgctgcctccctgactccact

SEQ ID NO: 736450 - DNA, 75 bp, Homo sapiens
gatgtaccctcgcccttcaaccatcgaccaggtacaacgcgtaccgcacaccaacgtttccacagtttcggacgc

SEQ ID NO: 736451 - DNA, 75 bp, Homo sapiens
tcacgtatacaaaggaaactcagactccagttatggctcaacccaaagaaggtgcttttgaagatgatgatatca

SEQ ID NO: 736452 - DNA, 141 bp, Homo sapiens
tagctaatcatccagacatttttaacccagataatcctaaagtaacccaagccatacaaagcttctgtttggagaagctgccactgcagagccccgccatggaagacacgccgttggtgatatcgaagcagaagacggagg

SEQ ID NO: 736453 - DNA, 75 bp, Homo sapiens
cttgcctgtgtcccacttgttcgcggcctatagatctgccttctggagactgcgccgtcctcccgggagagccag

SEQ ID NO: 736454 - DNA, 73 bp, Homo sapiens
aaactctatatccaaaatatgaggagaatgaagtttctagattagaagacataatgcagcatttaaaatcaaa

SEQ ID NO: 736455 - DNA, 100 bp, Homo sapiens
cagcgattggagagtctgagtgcagccaccacctttgagcctcttgagcctgtgaaggacactgacattcagacgttaaccctctgggcgaagcattgat

SEQ ID NO: 736456 - DNA, 96 bp, Homo sapiens
agagcttcttactggatttcttcatggtgtccattttatttagcaagaccaaccctggaatggtccccagccatggattcagtcccagatcttatt

SEQ ID NO: 736457 - DNA, 75 bp, Homo sapiens
ctggaaggagactggatgatagaatttgaaactgatgaaagttgtaagaagcaccttggaagagtgttatctatt

SEQ ID NO: 736458 - DNA, 83 bp, Homo sapiens
ccttgatgaaggttgcggcccaaaacttgattcagaacactaacatcgacaatggacagagaccagtatgatgtctgtgccat

SEQ ID NO: 736459 - DNA, 90 bp, Homo sapiens
cgcgcctggcggctacatggagagtgtcaggtgctggagaatctggtaaaagcaccattgtgaagcagatgaggatcctgcatgttaatg

SEQ ID NO: 736460 - DNA, 100 bp, Homo sapiens
caggattgtggccaagcatgaggaggttccagaagtttcagttcagtatgaagaaaaatttcagaaccatcacaaactgagaaactggtagtctgggtag

SEQ ID NO: 736461 - DNA, 75 bp, Homo sapiens
ggaagtgcagctgcctcagttcttagcgcagttgggccatatggtgctcttcccagtctggttcctgtacagtct

SEQ ID NO: 736462 - DNA, 101 bp, Homo sapiens
cggcgggacagagcgcctgcgaccccagtcggtgctccggggaggtcacctgacgaggagggggggccctcagcctcttggccttgaacgggctgttcatc

SEQ ID NO: 736463 - DNA, 100 bp, Homo sapiens
gaataatctgcttccatcccgccagtttgggagccctctggcacaaatggaagaagaaagaagggagcaagtagctaaaattaagaagatggagatggag

SEQ ID NO: 736464 - DNA, 77 bp, Homo sapiens
ccgagtcccagaaggcggcgatcctgggctgcgggcaaggcggttcctcaagccaggacctacgcacctgttgtgag

SEQ ID NO: 736465 - DNA, 147 bp, Homo sapiens
tcaggatatctttggtaggcatcatgttctgtttacttgaaccagtgagaagatggccgagcaagcaaggataagttgcatacatagagacgtgaagccagaaaatatcctcatcacgaaacattccgtgattaagctttgtgactt

SEQ ID NO: 736466 - DNA, 76 bp, Homo sapiens
gaaacggtccagaactggattgaattacttagtggtgactctcctattccatctgtttcttcgggatcatcttcac

SEQ ID NO: 736467 - DNA, 100 bp, Homo sapiens
caaacaagcttcattgttttcagctaacagtaaccccagaaaggcctaaagaatgtatttgacgaagcaatattggctgccctggagcctccagaaccga

SEQ ID NO: 736468 - DNA, 98 bp, Homo sapiens
cggagcccttgggtgaaattgttaggcgtggagagggagtgatgtcttccagactcggtgctgtacccgccgataacaaagccattgacctttgccga

SEQ ID NO: 736469 - DNA, 97 bp, Homo sapiens
gatccacctggtggggccttcagactgcaccctgcacggctttgtgcacggaggttcatgcagcatcccaagaactttggcctgatcgcatcattcc

SEQ ID NO: 736470 - DNA, 98 bp, Homo sapiens
gtagcacagatttatgtaatgtcaactttactgagaattttccacctcctgacacaacaccactcaggcggcgactggcggcgcgatggacctgaccg

SEQ ID NO: 736471 - DNA, 82 bp, Homo sapiens
ggccagggaaccctggtcaccgtctcctcaggccgctgtgcccccatgaagagcatctccagcagcctcaaggagaccatga

SEQ ID NO: 736472 - DNA, 51 bp, Homo sapiens
gccaggactatgtgccagccagccagcagttggtagcaagaccttccagta

SEQ ID NO: 736473 - DNA, 83 bp, Homo sapiens
cagcggaagcggcgcggcggtcggagaagtggcctaaaacttcggcgttgggtctccaaagcggcgtctgacctcatgagcta

SEQ ID NO: 736474 - DNA, 88 bp, Homo sapiens
agggctttccttctttcctacgggttttaaaaagttgcagaaagaagaaaggaaagggaaagaaaagtgttcagaaatctttatatgg

SEQ ID NO: 736475 - DNA, 99 bp, Homo sapiens
caaataccaggctaccatggtctacaagactctcttcgctctttgcatcttaactgcaggttttaaaatcaaagatgggaaaatcggagaaaattgccc

SEQ ID NO: 736476 - DNA, 100 bp, Homo sapiens
tgtgatctctcatctggaacgaggcgaggagccatggagcatgcagagggaagtccccagagggccctgtccagatccttcctgggcatcagtaaatagg

SEQ ID NO: 736477 - DNA, 90 bp, Homo sapiens
ccgaggaccaggccggcgcagccatgatctcacattcttgaaggtggcattgaagagcactaagatcggaagatgagtgagcttgaccag

SEQ ID NO: 736478 - DNA, 90 bp, Homo sapiens
ctgttggaaagcggctgcgtagacaacgtcctgcaagtcggtccaacgagcgctcctccaagcggagccttggagggcacggccggcacc

SEQ ID NO: 736479 - DNA, 100 bp, Homo sapiens
gatgactcagatatactcaactccacagcagctgatgaggtgacagctcatctggcagctgcaggccttggatggtatactgtaaattcagcatatggag

SEQ ID NO: 736480 - DNA, 74 bp, Homo sapiens
aagctccctgcggggaagaacgtgctactgctggattccattggccgtgacatccccaaaatgcttgaattatt

SEQ ID NO: 736481 - DNA, 83 bp, Homo sapiens
ggccgcgacgctatggcgcactggagtaccctgttcctggcaggataagaagcatgtagactgggtcaaagcttatttaagta

SEQ ID NO: 736482 - DNA, 75 bp, Homo sapiens
cccgccgacccgcgccctgctccctctcagcacctgggcggacggcttaagcaggtaaagcagtcactgtgaaga

SEQ ID NO: 736483 - DNA, 100 bp, Homo sapiens
tttcggtccccgccgaagtcaccgtgatcctgttagatatcgaaggtaccacaaccccgattgctttcgtgaaggtcctcagaatggttggaatgaccct

SEQ ID NO: 736484 - DNA, 75 bp, Homo sapiens
tggtcctggaggatatgttgctgctattaaagctgcccagttaggcttcaagaggatagtgctgatttggacagc

SEQ ID NO: 736485 - DNA, 100 bp, Homo sapiens
atgattgatcagaacagagatggcttcatcgacaaggaagatttgcatgatatgcttgcttctctagcatttaaatcaaacggtattgagatggattggg

SEQ ID NO: 736486 - DNA, 98 bp, Homo sapiens
tggggaaggccgtgtgcgccggctccgcggaagatgccggaccaagccctacagcagatgctggacagggtttggacagaggagccaaaggccaaatt

SEQ ID NO: 736487 - DNA, 100 bp, Homo sapiens
gccctgagggctcgcggccccagtggcgcggccgcgatgcgctccatggcatctggaggtggcaattttggaggtagccccggttatggaggaggaagag

SEQ ID NO: 736488 - DNA, 80 bp, Homo sapiens
agcccccaaggattctgggggaggcctcaggtgtccctggccagtgtccttccacctgtccacaagcatggggaacatct

SEQ ID NO: 736489 - DNA, 100 bp, Homo sapiens
tcaatattctcacaaataaacatggtgcttggggagcagtttctcataggatgattatgtacttgaagtgaggcactttcagtgtcctaaatggccaaat

SEQ ID NO: 736490 - DNA, 126 bp, Homo sapiens
cggcgcgccggcgtcggaggggcgacctgcgggggctgggcttcggcggaacccgagcggggcctaccggtctcggcgcggaagatggccggcggcgtggacggccccatcgggatcccgttcccc

SEQ ID NO: 736491 - DNA, 83 bp, Homo sapiens
ctccgaggagataccagtcggtagaggccgcttacaaacacgcagatggcaagaagattgatggcaggagggtccttgtggac

SEQ ID NO: 736492 - DNA, 83 bp, Homo sapiens
ctgcggcgagtcctgagcggccaggacgacgaggagcagggcctgactgcgcagttacagaatgtctgaaggggacagtgtgg

SEQ ID NO: 736493 - DNA, 100 bp, Homo sapiens
acgaagagctctcctccttcttcctcaactatctcgctgacacgcaggatgcctaaatcaaaggaacttgtttcttcaagctcttctggcagtgattctg

SEQ ID NO: 736494 - DNA, 82 bp, Homo sapiens
atggaacacttcagtgcattcaaggacacttggtggggttcccacacaagctcctccacctcttgaagcaacttcatcatca

SEQ ID NO: 736495 - DNA, 73 bp, Homo sapiens
aaacattcgtctcggaaaccccgcctcttacagtcacgagagctgggtggacgagaagacgccctggacgact

SEQ ID NO: 736496 - DNA, 90 bp, Homo sapiens
ctcatgcccacacaaattattcctggcacaggcaattattacagtttacgttctcagcatgagaaagcagccttatatttccagagagcc

SEQ ID NO: 736497 - DNA, 100 bp, Homo sapiens
ggaatgaacatgtatttaaccaagttccaacaaaagaatgctgccgcaggttcgagaacttgtcttggacaattgcaaatcaaatgatggaaaaattgag

SEQ ID NO: 736498 - DNA, 100 bp, Homo sapiens
tttcctcatcatcaaggatcaggaccgcaagtcccgtcttatgggacttgaggccctcaagctgagatctgtatctgtggacctgaatgttgatccctcg

SEQ ID NO: 736499 - DNA, 100 bp, Homo sapiens
atgaactgggcaaggcttctgccaaggcagtttggagcatgtgaacaccttgagccttgatgagttccagtatgtggtatattatgcagagcattcagag

SEQ ID NO: 736500 - DNA, 100 bp, Homo sapiens
tcttatccccggcctgtgatcccaccagtatcaactcctggacaacccaatgcagtgatgttgtgactgtgacagactcactggggtttgtacatgctgg

SEQ ID NO: 736501 - DNA, 100 bp, Homo sapiens
gacaacccagatgtgcaacaaagtgcgatgggcacctggacgatgacggattaccgcacgggttctgcacagtcacctactcctccacagacagatttga

SEQ ID NO: 736502 - DNA, 100 bp, Homo sapiens
cagtgtctcgttccctgggggacggtagcagaccgacatccttctgggcctacaggaggtttttacagaaatggaggagaagtatggggaagtagaggag

SEQ ID NO: 736503 - DNA, 118 bp, Homo sapiens
ggagcgcaacactcgcttggttggggagatcggcgcttggccgatcactgtgtccactactatgatcttcgtaacactaaacagccaatcatggtattcaaaggacaccgtaaagcag

SEQ ID NO: 736504 - DNA, 100 bp, Homo sapiens
cacaaatacagtttcctggtgggatgtgcctcaatctcagatgtcatagctcagttcttcaggagagaataccatgggtaccacctgaatgcattgaaaa

SEQ ID NO: 736505 - DNA, 103 bp, Homo sapiens
ttgttttacagtctgttccacatgatcattgtaataagaaggtgacaaagtacaatttgaagaatttgcaaaagtagtaaggaatatgcgtgatgctgccagg

SEQ ID NO: 736506 - DNA, 100 bp, Homo sapiens
acatgatgaaagcgttcgacctcatcgtggaccgacccgtgaccctcgtgagagatggcttcgtgcccctgggcaccctcctgcagttgccccagttccg

SEQ ID NO: 736507 - DNA, 100 bp, Homo sapiens
cgatatgcattgacaggacagaaatggcagcacaagcacatcacttacaggttggcgtgcagtggtgtgatctcagctcattgcaacctctgcctcccgg

SEQ ID NO: 736508 - DNA, 100 bp, Homo sapiens
tcctaatgtcaagctatcctcctgcctcggcctcccatgctgttgggattacagacataggaagaatcgtgagacagccagtgaacttttgatgaggttg

SEQ ID NO: 736509 - DNA, 90 bp, Homo sapiens
gttgaaggcagccctgcacgaccagctgaaccgcctcaagacatatctgaagagatggattaagaatgctttggattaaggattgtggag

SEQ ID NO: 736510 - DNA, 100 bp, Homo sapiens
gtgggggagatggagaagaagaggaggaggcactgcctgagcagtcagaaggcaaagaacagaagatcctccttgagtgttgcggagataggaacatggg

SEQ ID NO: 736511 - DNA, 74 bp, Homo sapiens
ctcaaacgatacctcagcagcagagttaccaacaggccgcagctatgatgagaaggtggatgtgttctcctttg

SEQ ID NO: 736512 - DNA, 74 bp, Homo sapiens
actgccaccacggtcgcctgccacagggactgctgagatgtcctctattcttgaagagcgtattcttggagctg

SEQ ID NO: 736513 - DNA, 100 bp, Homo sapiens
cagaagaagatcagtgagctcttcaccctggagggcaggagacagtggcattttgtcagcacttgggaacttcctggcccagatgattgagaagaagcgg

SEQ ID NO: 736514 - DNA, 82 bp, Homo sapiens
caaaggcaagagtaacagcagcgccgtcccgtccgacagccaggcccgggagaagtgaaagaaaatggcccgaaccaagcag

SEQ ID NO: 736515 - DNA, 100 bp, Homo sapiens
acattctccatggccagtgaggaagtcttgaagaatagagccataaagaaagcaaagcgcagaaatgttggatttgaactgtggatggaaaagcaccact

SEQ ID NO: 736516 - DNA, 122 bp, Homo sapiens
tctggccggccttggtgcggcgagccgagcgaggcagctctgagccgcgcgcttcctgcctgacacagctcacttcaagaagtgcacaatgtcagaacgtggaattaagtgggcttgtgaat

SEQ ID NO: 736517 - DNA, 76 bp, Homo sapiens
cgcaactccagccagctcactgtccacctgcgatcccacacggggccgcgatgggcctcttggaacattggtgtgt

SEQ ID NO: 736518 - DNA, 98 bp, Homo sapiens
agagcttcctgagagccatcctcgcagagttccgtcgatcaggactggaggaagccacgtttcaacaggtatgccttgcaatagctcattattcccag

SEQ ID NO: 736519 - DNA, 100 bp, Homo sapiens
tgcagccgagatgccgggggagcggggccttccacaccccctccgtgggtgtgtgggaccagttactctccacaagaaaattcacacaaccacagtgctc

SEQ ID NO: 736520 - DNA, 75 bp, Homo sapiens
catgtcaagcgaagccttgaaaaagctgccctgagacggtgtcccgccgaaaggaatactcccccagttgcaaga

SEQ ID NO: 736521 - DNA, 100 bp, Homo sapiens
atttatcgatatctttttaggggtttcccattaatcaaaacacgtgatatatgtaatcagttgcaggctactgcagcactggggtgtcagttgttggtcc

SEQ ID NO: 736522 - DNA, 90 bp, Homo sapiens
agtttgtcctgtcctggatcagtttctttgtcatgtagccaagactggagaaacaattgatgtcttggcattgcccattttcaagcagga

SEQ ID NO: 736523 - DNA, 100 bp, Homo sapiens
cccagaccctctcctttccctttgagaccgtgaagagaaagatgcaggggatgccaagggagcagagatgcctgcagcccgtgggagcaagtcctggcct

SEQ ID NO: 736524 - DNA, 142 bp, Homo sapiens
cgagcgctcgcccactgcagattcctttcccgtgcagacatggcctctggcaccaccaccaccgccgtgaagaaaacggtccggatgtaccccttccagattcacagcatcgctctctccacctttgcctcgctcattggcc

SEQ ID NO: 736525 - DNA, 50 bp, Homo sapiens
attttctactgtccctgcgcgagggggaaatttgcagtggtgagaaaatg

SEQ ID NO: 736526 - DNA, 118 bp, Homo sapiens
cgagctcgatccgctgctcgcacgggagccagctgggtggacccagatgatgtggtaccagttggccaaagaagagcctggtgttggtgcatgtgctttggactagcatttatgcttg

SEQ ID NO: 736527 - DNA, 100 bp, Homo sapiens
gtccgtgctgatgctgacggccgcgccatcttcagaatggaggatgagcagctgaaggtatggttccgaccggcgtttagccgagctctctgattaccgc

SEQ ID NO: 736528 - DNA, 73 bp, Homo sapiens
cacctctgctgctgtgtggtgcgaggctgtgagcaggcgcagacggggaagcggagccaacatgccagtggcc

SEQ ID NO: 736529 - DNA, 101 bp, Homo sapiens
gtggagatcaagcgcagcgatgccaacatcccatgcaccatcgtggagactggctggatgccctgtgctctatcagggcatgtcagaccaacagaggggca

SEQ ID NO: 736530 - DNA, 83 bp, Homo sapiens
ccaagatcgagcccagcgtcaacttcctcaagtcgcccaaagactgggccagtgccattcgcgtcgcagctctggactgcatg

SEQ ID NO: 736531 - DNA, 80 bp, Homo sapiens
accctgaccgatgggaccctggtgctggagaatctggtaaaagcaccattgtgaagcagatgaggatcctgcatgttaat

SEQ ID NO: 736532 - DNA, 100 bp, Homo sapiens
tgctgctggttagtgtgctctgagggagggtccgagccagccgctgttttgccggaggagcccctcaggccgtgtggcctttggcctcaggccggctggg

SEQ ID NO: 736533 - DNA, 75 bp, Homo sapiens
gcaacgtgttggaccttccggagcttctcagaagacagagggttttcttttgagtactatactggcaattgctgg

SEQ ID NO: 736534 - DNA, 82 bp, Homo sapiens
gcgagtggcggagcggcgggacctcggcggactcgccatggaggaggaggtttttagaacttcagccataaaaatgggcaga

SEQ ID NO: 736535 - DNA, 100 bp, Homo sapiens
ccggcgttcttccgctggctcagccgcaagtacccgtccatcatagtcaactgcgtggaagagaagcatgctacaagtgaaaactgatgagaaactgaat

SEQ ID NO: 736536 - DNA, 82 bp, Homo sapiens
ttttggggggaaactaggtcgatggtcggcggcgcccggatgggcagctgagaggctgggaggcggcagaatgcagccagag

SEQ ID NO: 736537 - DNA, 100 bp, Homo sapiens
gaatctttgctgcagctcttcaggtccatcaatgacatgatgagcagcatgtcagaccagaccgtccgggtgaagccaatcctgaggcaaaagaaacatt

SEQ ID NO: 736538 - DNA, 80 bp, Homo sapiens
cttcctcatccctctgctggtctggatcaccacacttcccaaaattgacagaatcactgagcttcagctcaaacttgaga

SEQ ID NO: 736539 - DNA, 90 bp, Homo sapiens
ctgcccaacaaacagaggacagtgatgccagcacgagccgccgcttcacgccgccttccaccgcgctgagcccaggcaagatgagcgagg

SEQ ID NO: 736540 - DNA, 100 bp, Homo sapiens
taaatcgtgaatgtgtagaatcaaggataattaaggcttcagcacatgtttgttcacaacagtgttctggacatggagtgctaaccggatagtattagaa

SEQ ID NO: 736541 - DNA, 75 bp, Homo sapiens
atgaatgctgttctgaatttgatgtggaagatgtgaaatttgtcatcaattatgactaccctaactcctcagagg

SEQ ID NO: 736542 - DNA, 97 bp, Homo sapiens
gtcgacctgacttcttttgagcagttggcactacccgtcttgaggaatggcggcgactggcggcgcgatggacctgaccgggctcctgctggacgaa

SEQ ID NO: 736543 - DNA, 75 bp, Homo sapiens
tggagacagtgtgaccagtcctgagaacatggctccaggaaagggctctggtggcgggacaggcttcattgggac

SEQ ID NO: 736544 - DNA, 100 bp, Homo sapiens
tggatcccggcggccgcgtgcagggcacccgctggcgccacggccaggacactctggattaatcgaattacagctgctagccaggaacatggactgaagt

SEQ ID NO: 736545 - DNA, 83 bp, Homo sapiens
cgagaacggtgcttctatggcaggatatgtgaaactggaacgccaagctgaagaagaacgaatacggaagcacaaagcagctg

SEQ ID NO: 736546 - DNA, 74 bp, Homo sapiens
ttttttaaaatcaaaagtaacaagagaacagcaagtgcaccaaacttagtggaggccatagtggagtttgacta

SEQ ID NO: 736547 - DNA, 83 bp, Homo sapiens
caagtctgatgagaagctgttcctcgttctcttttttgataataagagaagttgcaagagtgagccatggagctacgtgtggg

SEQ ID NO: 736548 - DNA, 90 bp, Homo sapiens
ggcgttgctggtgcgagtccttctatgaaacccacgtagtcgaacaccgtgatgcttctcctgcagggcgtgtgatgaggaggcgagctt

SEQ ID NO: 736549 - DNA, 75 bp, Homo sapiens
gaatgcctatgaccggcgtcgagaatttcaactgtggatgattcaacagccacacaaagcagcaacattttttgg

SEQ ID NO: 736550 - DNA, 98 bp, Homo sapiens
ccccgtcgcgccccccactctgaactcaagtcaccgtggagctccgccgccccgaaactttcaccgcgagcggaacctctgtattactggcaacagac

SEQ ID NO: 736551 - DNA, 75 bp, Homo sapiens
accatgacctttaacaaccagctgaccactgtccacaaccagagggaatctggaaaaattgcaatcaaaacatca

SEQ ID NO: 736552 - DNA, 98 bp, Homo sapiens
aagggaagtcatttctactggacttcatgcttagatacatgtataacaaggttcgccatcggtggtgtgaactcattgttaagcacaagttcacgaaa

SEQ ID NO: 736553 - DNA, 90 bp, Homo sapiens
ctgctggaaggagactggatgatagaattgtgccatgtttcagaacagagtaagacccctggtaaagaagaactgaagatattatacaga

SEQ ID NO: 736554 - DNA, 100 bp, Homo sapiens
gtcctctcgcacgtggagagcggaagaagagtgtagttgagagctcggccccaggagccaataacctgcagagttgagtccacgctccatgagaatgctg

SEQ ID NO: 736555 - DNA, 95 bp, Homo sapiens
tgaaagaattccgagagaacgagcacctcctcgaagtcatcccagtgatttgcagatttacagaatggctgcacattaatggaaagagaagcata

SEQ ID NO: 736556 - DNA, 74 bp, Homo sapiens
catttagcgcatcatgtgatccggatgtccggtctgtgctacgacagcaaaatgttccaggtgcatcaggtgct

SEQ ID NO: 736557 - DNA, 101 bp, Homo sapiens
tctaacatcacctgcttcatccttgtttaatgactttggtgccctcaacatctctcagagacgaaaggataccatacttgcagagctccttcagatacata

SEQ ID NO: 736558 - DNA, 100 bp, Homo sapiens
ttccttcaacactgtagcagagatcactgggagcaaatatccagaacaggggttctgaaggaacattaaatgactgcaagataatatctgtagatgaaat

SEQ ID NO: 736559 - DNA, 75 bp, Homo sapiens
acggattcatttagagctgcggaacaggacgccctctgatcttgccttgcgccatggactggcagccagacgagc

SEQ ID NO: 736560 - DNA, 100 bp, Homo sapiens
tctcgccccggccgcggccgggtcctcagagctacagagacttctgaagtggagagtctgcgacctcctcggttcttcaatgaagatggagttatcagac

SEQ ID NO: 736561 - DNA, 88 bp, Homo sapiens
gcgacaagtggaggcgccgctctagcggccgggactctgaactatggcgtgggctcgggatgagtttgaaggcctcttcaagcagcca

SEQ ID NO: 736562 - DNA, 100 bp, Homo sapiens
gtgaatgctgctaaaaacaagactggggctgctcccatcattgatgtggtgcgatcgagctacattcatgggagcagccaggctcagtttgtggcagaat

SEQ ID NO: 736563 - DNA, 83 bp, Homo sapiens
ctctagttttatactgaagcctatgcaacgggtaacaagatacccactgatcattaaaaatggggatatgagactttctactc

SEQ ID NO: 736564 - DNA, 87 bp, Homo sapiens
gcgccgccggcgctgctcgcgctcctcacctgctccctggatcataaggcctatgggttttctgccccaaaagaccaacaagtagtc

SEQ ID NO: 736565 - DNA, 99 bp, Homo sapiens
tacatacatgaagagtggcttcaggactgtattcttgccatgagaaaaagaatgtgataagttattcaacttatgaaattcaagttacatgtgaattct

SEQ ID NO: 736566 - DNA, 83 bp, Homo sapiens
ctaccttgccgcagccaccactgccgtctatgaggccatgactgcagatctgccgacaccccaggccatcgagccccaggcca

SEQ ID NO: 736567 - DNA, 83 bp, Homo sapiens
gtacgtgtacatcatttacggcatgtacttctgcatgaacatctccagccaggcctcccgcgacgatgcccctcaacgttagc

SEQ ID NO: 736568 - DNA, 75 bp, Homo sapiens
gttttctctgccatgttgctattgcaggacggaatgatgaggagtctgatgaggaagctgtgaagaaaaccaaca

SEQ ID NO: 736569 - DNA, 51 bp, Homo sapiens
aaatagtgatagctttgataaaactggttagatcctgctaaagaaataaag

SEQ ID NO: 736570 - DNA, 98 bp, Homo sapiens
agcagcgtgcgttcagccctgggaggcattcgacttacagcagtgtgcggccagccagcagaggggtgactcaacgcttggaccttcctgaccttccc

SEQ ID NO: 736571 - DNA, 74 bp, Homo sapiens
cggcaagaggcagaagagttggaggggtactgcattcaactcaaggttgcccccaagtttcctggcagtgtgtg

SEQ ID NO: 736572 - DNA, 97 bp, Homo sapiens
gactcccttctggaccaagacgactcctacgttcccatttggccggcgcttgccttgtgacatctactggcatggagtttcatttcacgacaatgac

SEQ ID NO: 736573 - DNA, 100 bp, Homo sapiens
aaaatatggtgtgaaggttggcctgacaaattatgctgcagcatattgtactggcctgctgctggcccgcaggaacatggttggtgcgggagaggtggat

SEQ ID NO: 736574 - DNA, 100 bp, Homo sapiens
agccacctgaacactgcaattcctgggtttccatcattccttccagcctgaattcttccatctctatgacaacaagcccattttagctttctggagaata

SEQ ID NO: 736575 - DNA, 105 bp, Homo sapiens
ggagcctggagcgcgagtacagctgcaccgtgcggctgctggacgacagcgagtacacctgcaccatccagccatgcctgatggagctctggacacagctgtctg

SEQ ID NO: 736576 - DNA, 112 bp, Homo sapiens
cagtgatgaactggaaaggactggaattgatttgggaacaactggtcgtcttcagttaatggcaagacttgcagagggcctgggcggatgatgtggagcggtttcagaaaat

SEQ ID NO: 736577 - DNA, 100 bp, Homo sapiens
tctttacagtaatttcaacagaagagtgagagatggaacccgaagaagaaaggattcgttacagccagagattgatgtcatgggaacagacatgtcttgg

SEQ ID NO: 736578 - DNA, 100 bp, Homo sapiens
ccaacagccagggccaggcgcagacctttctccaagaggaggatcagtgaagtggagcccaaatactatgcagatggggaggacgcctatgccatgaagc

SEQ ID NO: 736579 - DNA, 100 bp, Homo sapiens
tgcaccacccccggagcccccctcaacacggaccgcgcccgccgggcacacaagaatggtcactgccacctggttcttagtcccccacctccgcacacgg

SEQ ID NO: 736580 - DNA, 50 bp, Homo sapiens
ttcacggctccatcgctgttagtctgtgtatgatgaccaaccaaatgcgc

SEQ ID NO: 736581 - DNA, 75 bp, Homo sapiens
ggaaacgcttgtagggtttcaccagctttgactctcccggatcttgcagagcagtttgcccctcctgacattgcc

SEQ ID NO: 736582 - DNA, 87 bp, Homo sapiens
ttaaacagccaaaacagttcattcatattcagcattattcagagctgggagagcttcccccacgatctcctttagaaccagtttgtg

SEQ ID NO: 736583 - DNA, 100 bp, Homo sapiens
tctaccagatcaacgtcctccgggaccggagtcagaaccctccgcagagtaaagatatgtcttgtcgttcaagacttgcaacactaaacgagaaattgac

SEQ ID NO: 736584 - DNA, 100 bp, Homo sapiens
gattcttgtgaggaaaacatggtggtgccttcaagggatggaaaattcaggtggagccgccaccaaaatgcagattttcgtgaaaacccttacggggaag

SEQ ID NO: 736585 - DNA, 83 bp, Homo sapiens
caagcctatgtcgtgaggctttggcagaaattaagaaggaaatatctccattgctgtagagatcttaaaagtgttggaaaaaa

SEQ ID NO: 736586 - DNA, 83 bp, Homo sapiens
caggcccgcactcgacagccaccgccgcccccaacgtccatgcctgatgcctccggagccagcgtggtggccatagacaacaa

SEQ ID NO: 736587 - DNA, 83 bp, Homo sapiens
tctctgggaggacccgggcgtccttggcagcccagctggtgtggacactgccagcggctgcagccgacttggaatgacctggg

SEQ ID NO: 736588 - DNA, 82 bp, Homo sapiens
cttcttctctgatcagtgcccagaacaaggaaacaggtcagacatatttccaacatttgggtcaaaaccttgtccaacaaga

SEQ ID NO: 736589 - DNA, 97 bp, Homo sapiens
gaaaccgaacgcggcgctgtggctttcagcttggcaggtttcccccaagaaagagcagctgagtccttgcatcttgtggcagctggtgtgcccagca

SEQ ID NO: 736590 - DNA, 102 bp, Homo sapiens
ggagcagtagctctgctaattgggccaaatgctcctttaatttttgaacgaggtgccgtgagcgatgtggagatgcaggaacactatgatgagttttttgag

SEQ ID NO: 736591 - DNA, 110 bp, Homo sapiens
aggctcggcggcgggcggcagcatgtcggtggcggggctgaagaagcagttctacaaggcgagccaggacggcggctccctggaccaggtgctgaaagaggccaagagga

SEQ ID NO: 736592 - DNA, 100 bp, Homo sapiens
tttcaacgaaggagctgctaggcttacagcaggctgaggagagactgaagagagactgcattgacaggctaaaaaggatcagacactcctctaatttaca

SEQ ID NO: 736593 - DNA, 73 bp, Homo sapiens
agcagtgctatctaaagaaggagttgaatgtgagggtctcccttgatctgagaatggctacctctcgatatga

SEQ ID NO: 736594 - DNA, 98 bp, Homo sapiens
gacttgggaggctccgttgcctgctcccggagggagacgcgctgccgaggagaacccagcggactatctgttatagtccctgggtcaagacaacaatt

SEQ ID NO: 736595 - DNA, 83 bp, Homo sapiens
gcaataccaggatagctgttgtttcagagaaaggtctgagagtcactggagctaccagaagcatcatggggccctggggagag

SEQ ID NO: 736596 - DNA, 75 bp, Homo sapiens
gacgacctacgcacacgagaacatgcctggcatggcctatctgcacgcgcagcactacatccaccgagacctagc

SEQ ID NO: 736597 - DNA, 75 bp, Homo sapiens
ccgttacgtggtggacctgtacctcaacacccccgacaagatggtttgtttgaagagactgtaccagagggccag

SEQ ID NO: 736598 - DNA, 100 bp, Homo sapiens
tggaggggaatagactccatctatccatatgaggagggtgtgaagacagagaatgaccacatcaacctgaaggtggccgggcaggacggctccgtggtgc

SEQ ID NO: 736599 - DNA, 97 bp, Homo sapiens
gtcttaggaaaaagaaagtgatgctgtgaagccaaagaatcagggatagaatatgtaacggtgactccagagggattccggtaccggggccagatct

SEQ ID NO: 736600 - DNA, 50 bp, Homo sapiens
ctcagaccagtctctgcaagagtcagcccaaggccaaccccactgtcact

SEQ ID NO: 736601 - DNA, 96 bp, Homo sapiens
tggagacttagagaatccattggactcttctgctggcgtctttctgaatgctgatggggacttggtgtgctctggaactgaacccgcagtatcttc

SEQ ID NO: 736602 - DNA, 75 bp, Homo sapiens
gatgtcatcacaatggatcccaaagacaattgttcaaaagatgcaaatggaagccaaattggcagagaatgcttg

SEQ ID NO: 736603 - DNA, 75 bp, Homo sapiens
atactatccgtttgttcaggaaccaccagtgacagaactctgctaacaccagatagtggaaagaaaccatgtgct

SEQ ID NO: 736604 - DNA, 76 bp, Homo sapiens
cgacacccctggtggatggcgaggatgagagtttctcttcagcaacgggtagcagaattggaaaaaattaatgcag

SEQ ID NO: 736605 - DNA, 75 bp, Homo sapiens
cttacaagaaacagttctctcaatacataaagaacagcgtaactccagacatgatattacaccaccatattgcct

SEQ ID NO: 736606 - DNA, 82 bp, Homo sapiens
ctctatctcgcttttcccctggccttctgtatcttcatggtgcggctcatcttcgagaggttaaacccatccagagtaatgg

SEQ ID NO: 736607 - DNA, 100 bp, Homo sapiens
gcgtcaccgaccgctactttcggatccaggaggtgctgaagcacgccaggaaacttgaagggtcaaagtgcaaagggcagcttttgatttttggggcaac

SEQ ID NO: 736608 - DNA, 83 bp, Homo sapiens
ccccgatctacggggctgacatcagcggctctttgtatgatgacgagtacgaccccagcaaagcgacctttgtgaaggtggtg

SEQ ID NO: 736609 - DNA, 82 bp, Homo sapiens
attcactcactttgcaatggaagtactgccaaatctgtcgaaagggagataatgaagaactgcttcttctttgtgatggctg

SEQ ID NO: 736610 - DNA, 107 bp, Homo sapiens
atatctgtcttcggtggactccttcggcagtccacccaccgccgccgcctcccaggatgatcggctgaatgtaacagaggaactaacgtccaacgacaagacgagga

SEQ ID NO: 736611 - DNA, 101 bp, Homo sapiens
cactatttgaaacttttatctcatctggcttggcgcctgaggttctcccattagaataactgaagtgaagtgatggactccgatttggagagtagtaagac

SEQ ID NO: 736612 - DNA, 74 bp, Homo sapiens
tattggtgggccagcaatcctcagacgcctcacttaggacaaatattaacctggctgcagagccaaaagtgaac

SEQ ID NO: 736613 - DNA, 134 bp, Homo sapiens
catgaatcagtctctctccctgctctacaacgtgcctgcagtggccgaggagattcaggatgaagttgaacactgatatttgcatttaatggggaacaaaagatgaagaaggaaaaggaatatattcactaagg

SEQ ID NO: 736614 - DNA, 100 bp, Homo sapiens
tcagtgtgcaaaaagggattggaacagactgaaaaaccacccttctctgagaacacagaatgttcttggtgagaagggccggcggattcgggaactgact

SEQ ID NO: 736615 - DNA, 80 bp, Homo sapiens
ggtcaccaagtacaccagctcgaaaaatacactttcgggaaatggcctctaaatcctggctgaattttttaaccttcctc

SEQ ID NO: 736616 - DNA, 115 bp, Homo sapiens
aacaaggctgtcactattaaatatgactttcatgaaatatgtggattccaatctctgttgcttcatcccaggaaagttaagtgggcagaccaacatccacctcagcaaaaacttc

SEQ ID NO: 736617 - DNA, 75 bp, Homo sapiens
attgcacggaggagctctttgacttcttgcatgcgagggaccattgccaagtgctctcagaagaggagattgacg

SEQ ID NO: 736618 - DNA, 80 bp, Homo sapiens
ttattttttctcatggatgttcttcttcgagtatttgtagaaggagagacaagagagacacctccaacttcgacaaagag

SEQ ID NO: 736619 - DNA, 100 bp, Homo sapiens
gcgacgttattctgatctcaccaccctggtggcctttccctccagctctgtctatcctaccaaggcctttgaggggagggactgcacctgagtacagcac

SEQ ID NO: 736620 - DNA, 76 bp, Homo sapiens
tcacttgttccctccaagacaactgaatggtaaaatgtcggttccaggaccttaccaggcggccactgggccttcc

SEQ ID NO: 736621 - DNA, 50 bp, Homo sapiens
tgagttcgccgctggtggctccgggagctggtcaggctcaccatcgagaa

SEQ ID NO: 736622 - DNA, 90 bp, Homo sapiens
aagaaacaaaagacaactctgcttttccagaaactgtgccaggatcacggtggctttcttcctccagaagaaataaaagaaagatttgac

SEQ ID NO: 736623 - DNA, 75 bp, Homo sapiens
tagtggtggacctgtttgtgcgcacagtgctggtctgcctgacatgcttggatgcaaaataaagttccaattcct

SEQ ID NO: 736624 - DNA, 100 bp, Homo sapiens
cttaaaccttcttccagtatagatgagattgctgcagcaaaaccaactccaccaaaaagccaggtaacattaacaaaagaattccctgtatcatctggat

SEQ ID NO: 736625 - DNA, 50 bp, Homo sapiens
caccaatggtgtgggccggaaaggtcccaggtgtgacaccttcagcaggt

SEQ ID NO: 736626 - DNA, 101 bp, Homo sapiens
atgaaggggtctagatgtaaatgtcagtggaaaggagagctaccatcactaagcctcccagtgcaacgtcagcttaaagaagcagaggagccgcagcatcc

SEQ ID NO: 736627 - DNA, 120 bp, Homo sapiens
acattttatactcaccaagaactgtggtgtaaagcgcctgtaaaaccaggtactagcaaaggccagacgtcttactcaacaacttccctgccaccacctccaccatcccatccggccagc

SEQ ID NO: 736628 - DNA, 100 bp, Homo sapiens
agtaaaaggtgaagccaagaacagcattactgattcccaaatggatgatgttgaagttgtttatacaattgagtctcgctctgttgcccgggctggagtg

SEQ ID NO: 736629 - DNA, 98 bp, Homo sapiens
cggggcgctcatgctgctgcagctgggaatgcagagagcaaccaatgtcacctaccaagcccatcatgtcagcaggaacaagagaggtcaggtggtgg

SEQ ID NO: 736630 - DNA, 96 bp, Homo sapiens
ctttgaattcagccagtggtcacagctggatgtttgcgacatcccagagagcttccagacaccagccacaacgggaccactgccttcagctcctcg

SEQ ID NO: 736631 - DNA, 75 bp, Homo sapiens
gcgcggcttccggatccttggtctgcggcagaagtcaattcatctggaaagactatctctgagtcagacttaaac

SEQ ID NO: 736632 - DNA, 126 bp, Homo sapiens
ccaaagtgaaggctcagactgctccaaacaaggatgtgcagagggagatcgctgaccttggagaggaggaacaaggtgctgaaccacttcagcatcatgcagcagcggcggctcaaggatcaggac

SEQ ID NO: 736633 - DNA, 100 bp, Homo sapiens
tacttttgaaggtgcaagatactatataaaaaacaaaggatggagtatggcccaagaccagctgatactccccctgctccatcacctcctccaacaccag

SEQ ID NO: 736634 - DNA, 75 bp, Homo sapiens
taggaacaaatatcaatggaaacccatatgttaccgagctgatacccagacataccagccttataacaaagactg

SEQ ID NO: 736635 - DNA, 100 bp, Homo sapiens
agaagcctcccttccagtcagggtacaagttgtgcaaagtgaggaagattactgtgggagtgaagggaatccctcacctggtgactcatgatgctcgaac

SEQ ID NO: 736636 - DNA, 90 bp, Homo sapiens
agtgaccagaggagggacacggatcaagtcttccataccagggaccaggccaaaaccagactgccactgcccctacttgggccccactgt

SEQ ID NO: 736637 - DNA, 90 bp, Homo sapiens
atctgagtcatgatgtatatggtgctggagaatctggtaaaagcaccattgtgaagcagatgaggatcctgcatgttaatgggtttaatg

SEQ ID NO: 736638 - DNA, 98 bp, Homo sapiens
tttgaagagagcttgataactgtgttctatgtggatccagcattacaactgataagggatagctgggagtatggccaccctgctccacgatgcggtaa

SEQ ID NO: 736639 - DNA, 75 bp, Homo sapiens
tcaccgaggagaagtaccaggaggcgttggccaagggtgctcttacagcctgttccaagtgtggcttaatccgtc

SEQ ID NO: 736640 - DNA, 100 bp, Homo sapiens
cccgtgcctgtcttcagatcttcacagcacagttcctgggaaggtggagccaccagcctctccctgcctcctgacaaggtgatccgggcgggccccgcag

SEQ ID NO: 736641 - DNA, 50 bp, Homo sapiens
aggagcttctgaattgccaattgtgaagtcataaggacgaggctccggga

SEQ ID NO: 736642 - DNA, 83 bp, Homo sapiens
cgctgctccaggaagccaggatgtaccacctttctggcaatgagattgaagataaaactttccaagtccttggtaatctttac

SEQ ID NO: 736643 - DNA, 100 bp, Homo sapiens
gaactagtccagcttcgagcacaaggtggtgttcccactgatgaagagcaggcgactgggttggagagggagatcatgctggctgcaaagaagggactgg

SEQ ID NO: 736644 - DNA, 102 bp, Homo sapiens
ttaaaagatccaaaaaatgagacttctagcaaagattatttgccttatgttatgggctatttgtgtagcagaagtttctgcagaaaaatgtgggccccctcc

SEQ ID NO: 736645 - DNA, 75 bp, Homo sapiens
tgaaaatactggagctcataacccctactccacagctgtgagtacctcagagatagaatctcactatgttgacca

SEQ ID NO: 736646 - DNA, 78 bp, Homo sapiens
agacgcggtggagccgccggagtctgagaaggttctcccatgggcaggtggtctctctggatgagctgcgccccttcc

SEQ ID NO: 736647 - DNA, 73 bp, Homo sapiens
aggattccaagtaactcttatttggtcaaggtttctcaggtgattacagtgaatatttcggactacaagtaga

SEQ ID NO: 736648 - DNA, 80 bp, Homo sapiens
agaacttttggaactagtgccggcggctctccaccccccagtgcttagatgagtacgaagatgatgaagcagggcagaaa

SEQ ID NO: 736649 - DNA, 100 bp, Homo sapiens
aatcggcttagggcagttgttttcagagacataattcgccttttacaagtccacctctcagagaagaaataatggcaaataacttttccttggagagtca

SEQ ID NO: 736650 - DNA, 88 bp, Homo sapiens
cagtcgctccgagcggccgcgagcagagccgcccagccctgccagctgcgccgggacggttcttcccaggagactctgccggcctttt

SEQ ID NO: 736651 - DNA, 75 bp, Homo sapiens
gggagactggagtcgaaggccgtgaggtatttttctaagggaaatgaggcaagttatcctttggaaatgtgctca

SEQ ID NO: 736652 - DNA, 100 bp, Homo sapiens
ctcaaagtaggattcaagaactggaggaaaaggtcgcctctttgctgcaccaggtgtcctggagacagtgtactaatggtcacttgatgtgcgctggctg

SEQ ID NO: 736653 - DNA, 82 bp, Homo sapiens
gccagtatctgatgaaggtaagagcccaagaagatgaaaggattgttcttgttgacaacaaatgtaagtgtgcccggattac

SEQ ID NO: 736654 - DNA, 82 bp, Homo sapiens
tgccgctcctaagcctgcacagccgcggcggcagcagcagtgagaggtgaaaacttttggcccgtttggaagcggcagccag

SEQ ID NO: 736655 - DNA, 90 bp, Homo sapiens
tagctcagagactttttggggcctctttagaaaagacagagccgctaccctggaggaggggaacccaacagacgaggtccccagtacccc

SEQ ID NO: 736656 - DNA, 82 bp, Homo sapiens
cagccgctgctgctcgccgagctcccggagctgggtgggggtgccccacgctgaaagagagatgagtgaccgaggaggtggc

SEQ ID NO: 736657 - DNA, 101 bp, Homo sapiens
tttgcatccaaccgaggcaactgtgtcatcaggaaggtgggagtcaatcattttgacaagtctcctgaaaggaacagctagcaggaactgaaacctttttc

SEQ ID NO: 736658 - DNA, 100 bp, Homo sapiens
gggactttctgcagtgcctctgagaacttacgcagatcagccgaggaaatcctcattgacgattcaatttgttgaaggccaatttgtggactcctacgat

SEQ ID NO: 736659 - DNA, 74 bp, Homo sapiens
ggcgaggccctcatgtaccacacggtttgcctgcaatgagatttcattctctacatttaaaggacatcctttct

SEQ ID NO: 736660 - DNA, 100 bp, Homo sapiens
agtttagggagtccatggccagaaaacttttgggcatccacccaacccaccagtatcaccaggaaaaactgtaaatgatgtcaacagcaataataacatg

SEQ ID NO: 736661 - DNA, 100 bp, Homo sapiens
agtccagagctgaggactgcctgtttgcaggctgctgccttggttcacatttatcttgatggctctgtgctggtcactcacggtggaattgaaatggggc

SEQ ID NO: 736662 - DNA, 75 bp, Homo sapiens
ccagtggaagcagcaccatcggggagacaagcaagaagaaggagagacgaccatcttgcaactagaaaaagattt

SEQ ID NO: 736663 - DNA, 100 bp, Homo sapiens
tgccctgcagcccgagcccatcaaggtgtacggacagggtaagcttgatgattaccaggaacgaatgaacaaaggggaaaggcttaatcaagatcagctg

SEQ ID NO: 736664 - DNA, 82 bp, Homo sapiens
cttaagacggtgaggtcagcttcacattctcaggaactctccttctttggtttcagctgtgagttcaacatggaggcaaatc

SEQ ID NO: 736665 - DNA, 100 bp, Homo sapiens
ctgggtgcgtggggctgcctcgccgcgtctcgccacgacagtcttgcactgtttcctaggctggagtgcagtggcacaatcacagctcactgcagccttg

SEQ ID NO: 736666 - DNA, 80 bp, Homo sapiens
gagggatgaacaggcctgcgtggaaattgaatgagattagttactgaaagctctcgaaattacggttacaatccttctcc

SEQ ID NO: 736667 - DNA, 100 bp, Homo sapiens
gggaaatcgtgcacatccaggctggtcagtgtggcaaccagatcggtgccaaggcatttattaatacagcaaaagaaatttatgaaaaaattcaagaagg

SEQ ID NO: 736668 - DNA, 99 bp, Homo sapiens
ccgccccgagcctccgccgctgcgtctgcctgctgctcgccgcgatcctggacctggcgcgcggtccctgtgcgttttattgcgacctgccggtgggaa

SEQ ID NO: 736669 - DNA, 80 bp, Homo sapiens
ggagggtagacctgtgggcacggacgcacgccactttttctctgctgatccaggtgtgccgggagcagtttgtccgcttg

SEQ ID NO: 736670 - DNA, 82 bp, Homo sapiens
ccgccgcctcgggtcgtggagccaggagcgacgtcaccgccatggcaggcatcaaagttgatattcactgatggactccaaa

SEQ ID NO: 736671 - DNA, 82 bp, Homo sapiens
gagcgatcaacacgctgaacggcttgaggctccagtcaaaaaccattaagacttcccaagtaagaagcggaagaggagccgc

SEQ ID NO: 736672 - DNA, 96 bp, Homo sapiens
aaggatcatggtcatcaaagccaaagggtgctggaaatgtaaacaagaatagactgttcattcctgatggcttttagtctatactaacatattgtt

SEQ ID NO: 736673 - DNA, 75 bp, Homo sapiens
ctcatccccagctctgcagtctccagggctcacaggcagaaggaattttccttgtcttggatgagacttttgact

SEQ ID NO: 736674 - DNA, 90 bp, Homo sapiens
cccagattcctggcagccacccaacgtttacttggagaccaggatgttgagaaagagaaggaaacccacagttacctcagcaaagaggag

SEQ ID NO: 736675 - DNA, 100 bp, Homo sapiens
gaccccagtcggtgctccggggaggtcacctgacgaggaggtatctaccttagatggagttttagaagtccgaaatgaacatttttggaccctaggtttt

SEQ ID NO: 736676 - DNA, 100 bp, Homo sapiens
gcgcgtggtgggggaactgctggggaaggcgattggcatcgatctctccatcccttccgaggcccgacttcggtacatgtcccagagcaagcacacggag

SEQ ID NO: 736677 - DNA, 75 bp, Homo sapiens
tgcgtttggggctttcgacatgacaggtcactagaggagaactgtgtttatgaaactgtagttttgcctttggat

SEQ ID NO: 736678 - DNA, 98 bp, Homo sapiens
gcggtttgaacgagacgaagacggaaccggagccggttgcgggcagtggacgcggttctgccgagagccggtgggcaccatgtccttgaagcttcagg

SEQ ID NO: 736679 - DNA, 128 bp, Homo sapiens
aaagattctttgtagcagacactgcaaatgaagctctcgaggctgctaagagactaagccatttcataattctgaatcatgtctgataacggagaactggaagataagcctccagcacctcctgtgcg

SEQ ID NO: 736680 - DNA, 100 bp, Homo sapiens
tgtgcccacctgcgtaagggggcagagacagactctgtttgctggctacacggacaacctggtgcgagtgtggcaggtgaccattggcacacgctagaag

SEQ ID NO: 736681 - DNA, 99 bp, Homo sapiens
aaacgagagagttctcggggtgggggtgtccatggatgaagcaccgaacaaactggagcccgcaaggttagctcccagcgatgccagatgggatcagca

SEQ ID NO: 736682 - DNA, 100 bp, Homo sapiens
atgagggtccctgaagaagctcttaaggttcagattcagaacaagaaagtggacatctctaaggtctcctccaagtgtgggtctaaggctaacatcaagc

SEQ ID NO: 736683 - DNA, 90 bp, Homo sapiens
ccaagttgaaaatggacgagtaatcgcctgctttgattcattgaaaatcaccggggaacccttgatccgtcgatcagatgataatgaaaa

SEQ ID NO: 736684 - DNA, 88 bp, Homo sapiens
cgccagccactcgcccctggcctcgcgggccgtgtctccggcatcatgtgtggtttggaaacgatgtgcagcacttcaaggtgctccg

SEQ ID NO: 736685 - DNA, 100 bp, Homo sapiens
ttatctccaacaatgagcaactgcccatgctgggccggcgccctggggccccggagagatgacacctttgaggccctgtgcatcgagccgttttccagcc

SEQ ID NO: 736686 - DNA, 82 bp, Homo sapiens
tcctggcacagcggatgtttgtgatgctgccctgtggtggggttgggccagctgaggtgggtgtcctggttggcaaagaccg

SEQ ID NO: 736687 - DNA, 98 bp, Homo sapiens
tgcgagtggggaagctgctaacccgacccggattggcgctgaggtggcccgtggggcaggggttcaactagatatagcttcacaatctctggatcaag

SEQ ID NO: 736688 - DNA, 100 bp, Homo sapiens
cctgggccgcggttcggccgcgccggccggtggacccccaaaagtacaagggcatatttaacggattctcagttacacttaaagaggatggtgttcgtgg

SEQ ID NO: 736689 - DNA, 83 bp, Homo sapiens
tcacccgctgccgggcaccgaggaccagctcaatgacaggattttttatcaagcagaaatgcatcgaacaacgagaatcaaga

SEQ ID NO: 736690 - DNA, 101 bp, Homo sapiens
aagaggactgggaccgggacctgctcctggacccggcctgggagaagcagcagagaaagctattgacctgttgtattggcgggacatcaagcagacgggca

SEQ ID NO: 736691 - DNA, 90 bp, Homo sapiens
gacggacgtcctcccacgtaccatttagaaggttacctaaccaaactcctgcaaaaccacaccacctatgcctgtgatggggactatttg

SEQ ID NO: 736692 - DNA, 82 bp, Homo sapiens
gaaacacctcaggacacggcctacaacaccaagagggtggatgtgaacactgaccggaagatcagtgccaaggagatgcagc

SEQ ID NO: 736693 - DNA, 75 bp, Homo sapiens
ccgcctacaggagtatgatgcaaggatttgtacacacagatatgacgaaagacttgaaagaagaacatttaaaga

SEQ ID NO: 736694 - DNA, 95 bp, Homo sapiens
tttgctaaggaaaatataatggatgatgatgaggctgaacaagctccaaacacttgtgaatgtcatgtttgtaagcaggaagcttctggactgac

SEQ ID NO: 736695 - DNA, 98 bp, Homo sapiens
ttggaatcagataagcaaaggaaacaattgacagaagagctccagaatgtgaaacaaatctggaaacagttgccacatctaaaggcagtcgtgatata

SEQ ID NO: 736696 - DNA, 100 bp, Homo sapiens
tagaagacccagaggacactaaccaagaatttggaggttttggttcagttagtggaaaaattgaaatagaaatcaagatcaaccatgaaggagaagtaaa

SEQ ID NO: 736697 - DNA, 90 bp, Homo sapiens
gaggaggaggataccaagagagaggtgcccaaggaagatggagttggtgatgtgcaacatttcgatgtcatttgtcagagtgaaccgctg

SEQ ID NO: 736698 - DNA, 100 bp, Homo sapiens
cggcgccggcaaggggacccagtgcgcccgcatcgtcgaggtggacatggaagcgttcctcacactgactgacggtgacttgaaggagctgggaattaag

SEQ ID NO: 736699 - DNA, 82 bp, Homo sapiens
atcgcctgtggctttgacatcaacaagactttcatattctctgacctggactacatgggagacgagttgtactgctgtcaca

SEQ ID NO: 736700 - DNA, 74 bp, Homo sapiens
agtcttcaagagcccacggacaccacctcaacggttttgctgttactgctcagtgtagtcacaccttgaataag

SEQ ID NO: 736701 - DNA, 98 bp, Homo sapiens
aatcgaatatctcatggcctacagggactttctgcagtgcctctgagaacttacgcagatcagccgatgattcagtgtgagcctctatcagcaccaga

SEQ ID NO: 736702 - DNA, 90 bp, Homo sapiens
ctctctccttggcctctcctgggatcggcccaaggccagttctccgcagacactcctagaatatgcagagaaatggaaaacttcagaaga

SEQ ID NO: 736703 - DNA, 100 bp, Homo sapiens
cttgaaattaccaactgctttcctttccctcagcacacagaggatgatgctgactttgatgaaggttactataacaacagtaccaaggtggctgtgaaaa

SEQ ID NO: 736704 - DNA, 100 bp, Homo sapiens
ccgaaaagcaagaaatcaaataacacagttggaatccttgaacgacaccgtaactatccgcactagaaagttcatgaccaaccgactacttcagaggaaa

SEQ ID NO: 736705 - DNA, 100 bp, Homo sapiens
tttgagagttatgaggcgcttccccagcacaaactgacctgcttcagaacatcgggtcagaagttgagatttccactatcgagaaacaacggaaggagct

SEQ ID NO: 736706 - DNA, 90 bp, Homo sapiens
caggaccctaacgacaggcgcctccggcccatttacggggagacggggtttcgccatgtttgccaggctggtcctgaatgcctgacctca

SEQ ID NO: 736707 - DNA, 75 bp, Homo sapiens
tcgccttggaggaagaatataagctgtctgtccccagaccccagagcacgtccggcaccaccatgactgggctgt

SEQ ID NO: 736708 - DNA, 100 bp, Homo sapiens
gatgagcagcagcggaaagctctggaagccaaggcagctgccttcgagaagcaggtcctgcagctgcagcttagcagtgtctgcaaaaacgaatcttttc

SEQ ID NO: 736709 - DNA, 75 bp, Homo sapiens
gcagaggatggcgcttttagatacttccagtcttccgatgttgtgatcgcaggctcggggaccagttctacaagg

SEQ ID NO: 736710 - DNA, 90 bp, Homo sapiens
ggtcgagcacataacggggttcgggtgtctcgtgtgtgaacatcacagattcacaatgacatcctttcaagaagtcccattgcagacttc

SEQ ID NO: 736711 - DNA, 100 bp, Homo sapiens
gagaaagaggaggggaggaggaggaggattcagggaataggagctggggagcccttctgcgccacagatggcccactgcgtgaccttggttcagctgtcc

SEQ ID NO: 736712 - DNA, 100 bp, Homo sapiens
cttgatcttcgctgtggcatggcggacgaggggaagtcgtacagcgacctggagtggaagatcatttatgttggctcggctgagagtgaggaatttgatc

SEQ ID NO: 736713 - DNA, 90 bp, Homo sapiens
cagactacagatcgggcactttctgtgtctaggcaatttgaatcaacccatagaagtgacagcgctgtattcatttgaaggacagcagcc

SEQ ID NO: 736714 - DNA, 100 bp, Homo sapiens
gggagctcatcttcgtggggcgtgaggagtgtgagctcatgctacaggacgtggcccagtggaacatcgggagcctccggaccatcctggacatggtgga

SEQ ID NO: 736715 - DNA, 51 bp, Homo sapiens
ctgggcaaggggacgtctgcagctgagccagccctccagatctctatattg

SEQ ID NO: 736716 - DNA, 113 bp, Homo sapiens
ggagaattggagatggggaccgccctggacatcaagattaaaagagcgaataaagtttatcacgccgggattgtctaaagccccaggaaaaatggtggaaaattcaccgtcgc

SEQ ID NO: 736717 - DNA, 50 bp, Homo sapiens
cctgcttcgtgatgggcacaaggatctagtttgaagcactaagaagaata

SEQ ID NO: 736718 - DNA, 76 bp, Homo sapiens
caaagctggattagaacatctggtaacaccatgttgttgagagtgttacctgctgtgtatgaaaagcagcctcagc

SEQ ID NO: 736719 - DNA, 83 bp, Homo sapiens
tcctggtcatcttctatttccaaaacagttaaatctcacacagaaacagatgagaaacaaacagagagccgcaccatcacccc

SEQ ID NO: 736720 - DNA, 75 bp, Homo sapiens
agcccccaaaagcagctattcaggggcggccacactggcggaagaggaatattgaaggcaaacagtacctcagca

SEQ ID NO: 736721 - DNA, 96 bp, Homo sapiens
aaaacttcaagccaaacatcaagcagaatgtgatttgcttgaagatatgaggtctgccatcatggatgttctcgcagaagcaaatggcacctttgc

SEQ ID NO: 736722 - DNA, 100 bp, Homo sapiens
gcggctgcgctgttcgtgctgctgggattcgcgctgctgggcacccacggagcctccggggctggaatggtcctcgtccgaagtgagaatgggcagttgt

SEQ ID NO: 736723 - DNA, 75 bp, Homo sapiens
tctccttgcagctgcttagacgctggatttttttcgggtagtggaaaaccaggtgtggacactgccagcggctgc

SEQ ID NO: 736724 - DNA, 82 bp, Homo sapiens
tcctcagtgcaatgctgaatacctaatagtttttccaaaattggactcttcaggcagctgaattgattgactcagagtttcg

SEQ ID NO: 736725 - DNA, 90 bp, Homo sapiens
cgagagacctgcgtacattcggggtgccagaaggaaagcatagctctatgatggaccacggcagatgggacgctactgtggagtagacct

SEQ ID NO: 736726 - DNA, 75 bp, Homo sapiens
aggacacctaccagatcatgaaggtggaggatgccccttggtgtggccactgcaaggctctggcccctgagtatg

SEQ ID NO: 736727 - DNA, 83 bp, Homo sapiens
ctgctttccactcggctcctgtcgtccgttctctcaggctcccgttcaggttttgagcaaaattttggactgtgaagcaaggc

SEQ ID NO: 736728 - DNA, 90 bp, Homo sapiens
gtgcaacaaccactggttctccaggaaccgaaaaggcgaggagtatagtacggcaaaaaactgtcgaggaagctcaccagtgtgggaagg

SEQ ID NO: 736729 - DNA, 82 bp, Homo sapiens
agcaaggagtcatatatccttcatatgatccatcttagtgaagaattaggatacagaatcaccatgatcgattacttctgct

SEQ ID NO: 736730 - DNA, 89 bp, Homo sapiens
caaatatcatgagagcatggctcttccagcatctcacagtcactttcatgaattcaaaggcaatttaccagtgatttctgggtgctggg

SEQ ID NO: 736731 - DNA, 100 bp, Homo sapiens
aatctaagggacactgtgttcctgaaaaatgatatgacaactgtacgactacaatggggagatatacttatgccattgcttaaaaaatacaaactaaaca

SEQ ID NO: 736732 - DNA, 75 bp, Homo sapiens
atacacttacatctctagataacagtctgcactttcacccgtttcaggatcgccccaggacattcgacatgcact

SEQ ID NO: 736733 - DNA, 75 bp, Homo sapiens
aaaacggagagcttggactttcacctgattgttaaaggaacagcatatgccatatatgagctggctgtggcttca

SEQ ID NO: 736734 - DNA, 75 bp, Homo sapiens
ccaagtggcggggactactggtgcctgcgctgaaaaaggtgtacgtgagcaatagtgcaaaatacagtgaacttg

SEQ ID NO: 736735 - DNA, 100 bp, Homo sapiens
ccagaagtagcatggaaatggagggcatcttcaaccacaaaggaaatgtgagttcttctcccagatcttctgatttagtcaaattagcccaagagtgctg

SEQ ID NO: 736736 - DNA, 90 bp, Homo sapiens
gaaaaggcttttccagtttgcataatgttctgactaataagaagacgaccttctttggtggcaattctatctctatgattgattacctca

SEQ ID NO: 736737 - DNA, 102 bp, Homo sapiens
aaaccaccatttattcagcactcagaatgctccaggcagtgtaatctcattccatcttcattcatgactccagacagccatgtacatcttcatgtgatcagc

SEQ ID NO: 736738 - DNA, 90 bp, Homo sapiens
tgtttctgaagaaccaatttacattgtcactgaatttatgtcaaaaggtacaggtgaacaaaggcagagtaaactgtcaccccagatgca

SEQ ID NO: 736739 - DNA, 82 bp, Homo sapiens
tgcctgtccccgggggcgccatggcgaccggagcgaacgccacgccgttggctctaatggtaccaagtgacaggttggcttt

SEQ ID NO: 736740 - DNA, 96 bp, Homo sapiens
agtacatcccggtggccacggccgccgcgctgctggtcggctccagcaccctcttcttcgtgttcacctccacagcacctgttgccttcattagca

SEQ ID NO: 736741 - DNA, 75 bp, Homo sapiens
ccagccccgtgtccttcattgccacgtacagttttaacaacctgggcatccagtgtgtgaggaagaaggagattg

SEQ ID NO: 736742 - DNA, 100 bp, Homo sapiens
cggttagcggtggcaggggctgactgagagcgtctgcttgatgccagagacgcggaacaattgagcaagaacaaggtgacacatattctgtctgtccacg

SEQ ID NO: 736743 - DNA, 75 bp, Homo sapiens
ccgcgtgctggagctcttcgacccacccaagagcacgaacttccaggagccggtgcagccgctgacacagcagca

SEQ ID NO: 736744 - DNA, 90 bp, Homo sapiens
gtttgcagcggggcctcgacctccccatcatcaggacagcatcagcttgctgctggaggccgtgcggaccagaaatgaggagctcgccca

SEQ ID NO: 736745 - DNA, 83 bp, Homo sapiens
cttatctcgaaagcctatcagcatagttaaggacggctgtcctcagcgaggggccgtgcacccgctcctgagcagcgccatgg

SEQ ID NO: 736746 - DNA, 82 bp, Homo sapiens
gtggtgcaggcgctgcgccgcaacgccgagcgcaccgacatctgcctgctcaaaggacctaaagtgatccagacttctgcgg

SEQ ID NO: 736747 - DNA, 100 bp, Homo sapiens
cccgagctgacgtggcttgaattgggaggggggcagctggagcctcaggcggcagcgcttctaggaattgaatgatctggcacgggaccctccagcacag

SEQ ID NO: 736748 - DNA, 82 bp, Homo sapiens
agccgagctgggggcgcagagcgcgggaggcggcggcggcgcggagcccagcccgtgttcccaagaaaatcctcaagtgcaa

SEQ ID NO: 736749 - DNA, 73 bp, Homo sapiens
ggaggcgttcagctgcttcaagatgaagtgaacagcagagaatttcaaaggaccttgctaatatctgtaagac

SEQ ID NO: 736750 - DNA, 75 bp, Homo sapiens
gccagcccggcgccccctcccagctcccagcggacaagaaatggattctcagtcatgaagatgtcatattgggag

SEQ ID NO: 736751 - DNA, 74 bp, Homo sapiens
gcgggactgcggcggcgccggcctccggggagaaacggtgtcttctctttagggatggtgaggttggaaaaagg

SEQ ID NO: 736752 - DNA, 100 bp, Homo sapiens
caaacgagtggctgaaactgcctacaagatacatagaaagtgaattttgtagaaggagaagatgatgactttgaccagtttgataagcctggcgcggaac

SEQ ID NO: 736753 - DNA, 75 bp, Homo sapiens
cccggctggaggaatgttttaattcttcggaaataccaagtggtctctgtgacagagctgaatgaacctctctcc

SEQ ID NO: 736754 - DNA, 58 bp, Homo sapiens
cggacggcgtggagtgactatcccaccgccgcggacagcaaggccatcgtggacggga

SEQ ID NO: 736755 - DNA, 80 bp, Homo sapiens
gcagctgtaagcaaatgcttctaatgctgctgatagttcaggtcgatccagtgtttacaagggaagtgaaagccaaagtg

SEQ ID NO: 736756 - DNA, 82 bp, Homo sapiens
cacttccctgtactctcatcgctctcggcctccgacacggtacaggtttgcagattccgccagcagcacagcaagctctaca

SEQ ID NO: 736757 - DNA, 55 bp, Homo sapiens
ataggcggccatggtccaaccttgaaggtgctcttgatcagactacagaatggat

SEQ ID NO: 736758 - DNA, 90 bp, Homo sapiens
attgacctcacctcaagcacacccaatggacagcatgcctcaccaagtcacatgacaagcaacaaagaaacagccttggtataatagcac

SEQ ID NO: 736759 - DNA, 74 bp, Homo sapiens
gggaagaaaagctttggatgaaggagcttcaaacccaaagagccacagacccctttgcttctgtttttgggaat

SEQ ID NO: 736760 - DNA, 100 bp, Homo sapiens
cctcggggagagcgcgccaagaccgctgcagccgctggctgaaattttgattctgacattagcagtgtgggaatagatggctgctggcaggcagacagcc

SEQ ID NO: 736761 - DNA, 100 bp, Homo sapiens
tcatgccataccctaagggacaaggttccccacatctacttggaaatctttgggatgctcaatgttggtgagtttgtaagtgatgcccttctcgttcctg

SEQ ID NO: 736762 - DNA, 75 bp, Homo sapiens
tactcctctagtgaccgagaatcggatgtgatgctggtacaacccagagtagaatttattctgtctttcattgac

SEQ ID NO: 736763 - DNA, 100 bp, Homo sapiens
gaaaacctaaccatgaagacttgaacttaatacagcaagaaagaccatcaagtttaccatttgaccttgtctgtgtcaatgcgtggatgctggacctcac

SEQ ID NO: 736764 - DNA, 100 bp, Homo sapiens
acctttttcaggcaccttttctcccagtaatcagttcaagaagttccctcagatgacctcatatcaccggatgctattacaccgggtagctgcctatttt

SEQ ID NO: 736765 - DNA, 90 bp, Homo sapiens
tgaaaaggaaagaaaatctgtttcagctgagatcaactatggaataaggtttactcaggttttgatacttatagaggactcccttcaatt

SEQ ID NO: 736766 - DNA, 100 bp, Homo sapiens
cctctgttccctctcttcgcggagcggcgccgcgtagcttccatccgccagctgccatgagcgagcgcctccgtcccagttcagatattttggatggcag

SEQ ID NO: 736767 - DNA, 98 bp, Homo sapiens
catataaagaaaaagacaaatacaagtgaaaaaaatagactaatggattaacgtccctgtcgtgtgacattttctgattttgtacttcagctgctgat

SEQ ID NO: 736768 - DNA, 75 bp, Homo sapiens
gtgtggggcgcggatgggatccagctgttagtcgggatcatggggttgacagcagcattttccagaatcctaaaa

SEQ ID NO: 736769 - DNA, 100 bp, Homo sapiens
gcttatatctcagaagtggaagccgagactgtggggacaggaatcatggggaggatggtgggacgctcgtccctgctggtggggaatctcaagaagaagt

SEQ ID NO: 736770 - DNA, 83 bp, Homo sapiens
gatcttttcaatgctgcgaaagctgccaaaagtgacatgcaggtactggttttggattaggaattgttttctcacttaccttc

SEQ ID NO: 736771 - DNA, 75 bp, Homo sapiens
ggaacttcatcatcatctacttcacaggaattgccatttggctgacgcgccactatgtagcgggtttcgggcggg

SEQ ID NO: 736772 - DNA, 75 bp, Homo sapiens
ttacaatagtaaacagcttgaagactttttcaagtccacctggaaggccgctgtggtggaaggatgtttgactgc

SEQ ID NO: 736773 - DNA, 100 bp, Homo sapiens
gtgcaactttataagatgcgaaatggtggcagaactggtgaagccattgtagatgctgcgctgagtgctctgcgccagctcgtgaaggatcgcctcgggg

SEQ ID NO: 736774 - DNA, 100 bp, Homo sapiens
aaagcatgtatatgacaattggccaatggtggaagaagttgttccgaatgtaattgaaccttccttcggcctgggtaggatcatgtatacggtatttgaa

SEQ ID NO: 736775 - DNA, 82 bp, Homo sapiens
actgaagatagtgcctttcagccctaccaggtagcagtagctgatgtgcagtttggccccatgagatttcatcaagatcaac

SEQ ID NO: 736776 - DNA, 50 bp, Homo sapiens
cggcccgactctatcacaagaaggtggggtcccggtcagtgggccctcag

SEQ ID NO: 736777 - DNA, 100 bp, Homo sapiens
cacccctccccgacacaggcacacaccccccgacaggcacgcacacccaccccacagtgcccggctcggctgcggctcacagaacatttcctgcctgttg

SEQ ID NO: 736778 - DNA, 98 bp, Homo sapiens
cccaacacctataaagtactctcgctgaaacatgccaagggacaagtgttatttgacaaagtgtgtgaacacctcaatctcttggagaaagactactt

SEQ ID NO: 736779 - DNA, 50 bp, Homo sapiens
tgcccttatcagtaacacctgagatggaacagattaaacgtgcaaaccgc

SEQ ID NO: 736780 - DNA, 141 bp, Homo sapiens
gcttgtgctgctgctgctgctgctgctgcatgtctaccaggagaggagggaactgcggagcgggcagacagccaagtggacctggtccggcagcatttctatgaagtatccctggaatatgtcttcaaggtgcaggaagtc

SEQ ID NO: 736781 - DNA, 100 bp, Homo sapiens
ctaacttctactgacgaagcttggaagttgcagaagtgtgttctaggtcagtggcttcaaagactccagttggattcattggactgggcaacatggggaa

SEQ ID NO: 736782 - DNA, 97 bp, Homo sapiens
agaggaacatgaagatgaaagccgtgctggctcagagaagattgctagtgcaactactgctccatcgatcccttcacatttgtctcctggtttacga

SEQ ID NO: 736783 - DNA, 98 bp, Homo sapiens
gaggcagatcgacctggccttgcttcagtttgtgggtgatgtgccaaatctttggagtgttgatggagaagttacagtagctgaacagaagccgggag

SEQ ID NO: 736784 - DNA, 74 bp, Homo sapiens
tccgcagcagatcagggaccggctgctgcaggccatcgacccccagagcaacaccattactgggacttccaccc

SEQ ID NO: 736785 - DNA, 100 bp, Homo sapiens
ttacagccactgccaaggcaaccgatggagacgcagtaagcgagatgacacaggctgtcctagcagccagtcagtgtctcctgtgaagacaccctcagat

SEQ ID NO: 736786 - DNA, 75 bp, Homo sapiens
tgctactgcgaagacagctggcagatgacctcattccacctatggacttgcttgaaatgattgtcacctggattt

SEQ ID NO: 736787 - DNA, 100 bp, Homo sapiens
ctgtgcctgctgctgagcagcgccgcgggtacggtggttgaggagagcaatggttctgatgagatggagaattcagatgaaaccaaaatgtcagaagaaa

SEQ ID NO: 736788 - DNA, 100 bp, Homo sapiens
tgcgagccctagcgctgcggccccgcttcctggcggccgggtcccagcatcagaggctccttgaaatgctagatacagagaaggaactgttaaaagaaaa

SEQ ID NO: 736789 - DNA, 75 bp, Homo sapiens
ccagagacctacgtggcagctgtgaaaaaagccatttccgaaggcgagaaccgaagtttggaggtagacgagcag

SEQ ID NO: 736790 - DNA, 100 bp, Homo sapiens
gattttgctagagctgaaggctgtgataatgaggaagatcttcaaatgggcattcacaaggtacattttatattggaggaaaaggttcactgaacagccc

SEQ ID NO: 736791 - DNA, 82 bp, Homo sapiens
caggagtcatcggacgccagaatctggcgggctgcgtgcacttcccccacacggcgccctgtgaggtgcgcgtgctcatgct

SEQ ID NO: 736792 - DNA, 100 bp, Homo sapiens
taaaagacagctgagtgaggatggaagacagctaaggcgagggagcctgggaggagccctgactggtgatcgaggaaacatctcaacatcttctaaacca

SEQ ID NO: 736793 - DNA, 75 bp, Homo sapiens
atgaacttagcagcagctccactgaacagataaggtgggcctttggagtgacgctgtgggaactcatgactctgg

SEQ ID NO: 736794 - DNA, 100 bp, Homo sapiens
aggcgaagctggccgagcaggctgagcgatacgacggagagtagttatcttgatggaattagaagttttgaagtcagctgaagcagttggagtgaagatt

SEQ ID NO: 736795 - DNA, 75 bp, Homo sapiens
agcgaatcggagcaaggcgatctgtgtgcagtgggacccacctggcctgcgggcagggctgggcagcggcctgag

SEQ ID NO: 736796 - DNA, 96 bp, Homo sapiens
agtggatgaactgaatatctggatgaggacaagatctgtggggagagactgtaagggcaccagtgtcttgtcacctggactccacataggactaat

SEQ ID NO: 736797 - DNA, 98 bp, Homo sapiens
agcgggagggcgcgcggccgagcggaggcggagtcggcgccgagaacatgatgagagtccggagtgttgtcatgtgaagcctgccatccaggaacctc

SEQ ID NO: 736798 - DNA, 114 bp, Homo sapiens
gtgtaatgctagaagtcctagaagaaatttggagtgtgcgtgcgcgccgagcgacaatgcagatcttcgtgaagactctgactggtaagaccatcaccctcgaggttgagccca

SEQ ID NO: 736799 - DNA, 126 bp, Homo sapiens
aagaaaattttccttgacctttaggtgcttttatattcatctcaaaaacaaaattctgaactcaggacttggcaagatgaatgctatcaagtaagacaagtgtttgcccagaaacttcacaaaggc

SEQ ID NO: 736800 - DNA, 75 bp, Homo sapiens
ctctgctgtctgatgtggcctatagggatccttcacttagggatgaggagagagaggtccaaggtgccctacatc

SEQ ID NO: 736801 - DNA, 100 bp, Homo sapiens
cgcccttttctactttgccagcaaactggtgctcaaggtgtgggcccatcgctggatggatctgtcagaacacggctttgggctggccctgctcaacgac

SEQ ID NO: 736802 - DNA, 100 bp, Homo sapiens
ctccaacattcatcgcagctggtgggtgtacacactgctgtttaccttggcgaggcctttcaccaagtccatgggtcaacatatttcactggcacctatt

SEQ ID NO: 736803 - DNA, 82 bp, Homo sapiens
atcaggaaacttggccacagaagacctggtctacatgctagagggcttgggcattcacacgctgtgagccgtgagctttgag

SEQ ID NO: 736804 - DNA, 103 bp, Homo sapiens
aagagcagacccgtttgggttctccacgcattctagactcccgaagagttaagatcccagatgcagcttttattcaggcagcccgcagaaaacgtgaattggc

SEQ ID NO: 736805 - DNA, 100 bp, Homo sapiens
cccctataagcctcggcctccacagatggagttttaacattgaatgcggagaacactaattatgcctatcaagttccaaacttccataaatgtgaaatct

SEQ ID NO: 736806 - DNA, 50 bp, Homo sapiens
cggaaatgcccttacagcagcaggtaattctgactcgaaggacagaagag

SEQ ID NO: 736807 - DNA, 82 bp, Homo sapiens
cctgtttctactcttgcgccccctgctggtttcctgccctgtctgtcagcccttcataaacccagatgggagtccagttgtg

SEQ ID NO: 736808 - DNA, 100 bp, Homo sapiens
gccgtggagggcctcgccatgtcctgctgcccgaatatgcttttaaggctattaaccagggtggccttacatcagtagctgtcagagggaaagactgtgc

SEQ ID NO: 736809 - DNA, 82 bp, Homo sapiens
gtcacttagactaccccaggaacccgcgccgcgagggctccttccctcaggtttttagaacttcagccataaaaatgggcag

SEQ ID NO: 736810 - DNA, 90 bp, Homo sapiens
caggaccgcgacggcagcagagcagtttctctggaaacccccctggtaagtgtggaggaggcgggacactctgacccaagacgaaaggcc

SEQ ID NO: 736811 - DNA, 100 bp, Homo sapiens
ccctcatgtacgagtccgagaaggttggggtcgcctcttccgagggcacgaccataataacatccctgacttctgtgctgcacaatgacaaagaattccc

SEQ ID NO: 736812 - DNA, 74 bp, Homo sapiens
atgagctgagcttcaaggctgaaactggcgatggaatatgagaggagccctctggaaagaaaaggacagaccct

SEQ ID NO: 736813 - DNA, 75 bp, Homo sapiens
caggatattttgattggaaggactgcctgcctccaacaggaaagctgtgtgaagagacaaagggagaatgccatg

SEQ ID NO: 736814 - DNA, 98 bp, Homo sapiens
ttcacccctgcccccatggcatgcatgatccattagggaggaccgtctgcacaaaggtgtggccgacgacgatgccctcgctgaggagcgcatgcgga

SEQ ID NO: 736815 - DNA, 96 bp, Homo sapiens
gtccgcgctggaccagctcaagcagttcaccaccgtggtggccgacacgggcgacttccacggtacatccagacactgaaggaccacaggccccgg

SEQ ID NO: 736816 - DNA, 51 bp, Homo sapiens
ctatgtacctgttaccactttcaaaaggagagtcccgtattctcagagtaa

SEQ ID NO: 736817 - DNA, 101 bp, Homo sapiens
agccagctggccaggggggcccgtctgggccagccacctggtgtccggccctggccaacgtcaacattgggagcctcatctgcaatgtaggggccggtgga

SEQ ID NO: 736818 - DNA, 101 bp, Homo sapiens
ctggtatttggacaacaccccaacagagcaggcagttgcagtggtgcagaatggctgacctcagtcttgcagatgcattaacagaaccatctccagacatt

SEQ ID NO: 736819 - DNA, 100 bp, Homo sapiens
caggatgtgggcccagccctgtgccaggaggctggctggaataaaggaatggaagttggatacactttgtgacttgtacgagacactgaccattacacag

SEQ ID NO: 736820 - DNA, 82 bp, Homo sapiens
ggaactggcccggaaacaggaggacgtcgcgtggggcaggcagtggcgctgcgggccaaggccttcggcttcaacgtgctct

SEQ ID NO: 736821 - DNA, 90 bp, Homo sapiens
gacacttacaagatggacagggatgataattgggcctccaagaaaatgctggtaatttcagtcacttgctgatgacttctgatgtcccag

SEQ ID NO: 736822 - DNA, 90 bp, Homo sapiens
cgtcgaggagccggggcagggcacgatggcggactgggctcgggcctcagtgtatgggcgctgttcatcctctggtgctgaagcagccaa

SEQ ID NO: 736823 - DNA, 97 bp, Homo sapiens
cacagtatagcttctgacagtggagacactggcattggaacttcctgttctgatagcgtggaagaacacccatctcggctttctcgcaagataacat

SEQ ID NO: 736824 - DNA, 100 bp, Homo sapiens
agccaggtttgagtccaaagtaccctccttctactaccggcccacgccctccgactgccaccctgggcgctgcctatggcacagccaagagcggtaccgg

SEQ ID NO: 736825 - DNA, 97 bp, Homo sapiens
ctctgtgacctgcaggtattgggagatccacagctaagactccaggaccctctggaagcctagaaatggacaggaagatgtcacccaagcgcatagc

SEQ ID NO: 736826 - DNA, 87 bp, Homo sapiens
tcgcttggtgtcctcctggcctcagcaacctgacaattctgtcgtgtcccgcaggggaacaggaacctgataaagaatcaggagcct

SEQ ID NO: 736827 - DNA, 58 bp, Homo sapiens
caagaggctctgcaccctggatggaaagcaggtcacttttgaaatacacaaagaaaac

SEQ ID NO: 736828 - DNA, 85 bp, Homo sapiens
gggctggagcccacctgctttgagaagagcaatgacattgggggcctgtggaaattttcagtcatgaatgaaaaacttcagcact

SEQ ID NO: 736829 - DNA, 100 bp, Homo sapiens
agatgccattccctctcacccaagaggttttaaatgcacagagagcaggatacaaggcagccatagttcacaatgttgattctgatgacctcattagcat

SEQ ID NO: 736830 - DNA, 75 bp, Homo sapiens
tggtggagccaaaatgctattgccctgtcttcatcaacatttaatcatctattatcctcccagtccacaacgctg

SEQ ID NO: 736831 - DNA, 100 bp, Homo sapiens
ggcaattaagaagatgtcctatagtgggaagcagacccatgagagcactgcagtttcctcctgaaggctggctccggctctccctcaataatggcagcat

SEQ ID NO: 736832 - DNA, 73 bp, Homo sapiens
gaactgcaaactttccgagaatatggagatacaggtgaaatctgcttcctgcctgacacagctcacttcaaga

SEQ ID NO: 736833 - DNA, 75 bp, Homo sapiens
aacaagttttgtgcagattgccagtctaaaggagaaaattcagatccagttaacacaatcatttgagaaagaaga

SEQ ID NO: 736834 - DNA, 100 bp, Homo sapiens
ctcacctgccttgcatcgttccgagtcctgtactggactgcatcaggccgcgtctcctcaggaccctacagcttggggcctgggctcctctgaccatcct

SEQ ID NO: 736835 - DNA, 76 bp, Homo sapiens
gatgtcgggacaccccggaagctgggaaatgatcaatgaactgagccatgttcaaatccctgttatgttgatgcca

SEQ ID NO: 736836 - DNA, 100 bp, Homo sapiens
cggcccggcgttgaattccgggaagtgggagcttcaggctcgctccgtgcgggtgaccaagaatatggcccaggtgaccaaagccctggacaaggccctg

SEQ ID NO: 736837 - DNA, 75 bp, Homo sapiens
ctggatcctcagctccagctgcactgctcagacgaggcggcttacagggagaacacagttggcctccaccgtttc

SEQ ID NO: 736838 - DNA, 90 bp, Homo sapiens
gtttgctgcagttgctggccgagcctggcctgggccgcgtccatcacctggcactcaagcacctgccaggagaacaggcagtggcagtgt

SEQ ID NO: 736839 - DNA, 75 bp, Homo sapiens
ccagggtccctgaagagggaagacacgcggaaacagtttgatgatgtatggcctatggacccccatcctagaacc

SEQ ID NO: 736840 - DNA, 100 bp, Homo sapiens
cgacccagcccccgcccgcagcctggacgacatcgacctgtccgccctgcggctgcatcttcctcccgtgaggctggccgagctccacgctgatctgaag

SEQ ID NO: 736841 - DNA, 75 bp, Homo sapiens
actagaaattgcaccacagatatatgggttgccaccaccacctatcatgacagatggtgaagatgcggattacac

SEQ ID NO: 736842 - DNA, 111 bp, Homo sapiens
gaggcggcgcggcagcggagggacggcagtctcgcgcgtaagactttgaccccgacgcaggcttcagtgattgccgcggatcagaagcctgagcactttggctcgagacaa

SEQ ID NO: 736843 - DNA, 75 bp, Homo sapiens
actccggagacagcccaaatatcctcggaagagcgctcccaggagaaacaatgagaaagatcagtctaaagaaaa

SEQ ID NO: 736844 - DNA, 110 bp, Homo sapiens
acagaaacacctcagtgatgccattgtggaagttatcaatactctggctgaccatcatcatcgtgggactgactttggtggaagtccttggttacatgtcattattgcgt

SEQ ID NO: 736845 - DNA, 100 bp, Homo sapiens
ctccgcgtcccgctcgctgggagagaggtacctctccttttccctctccctttccctaaggttgggaatccacgtgttgaacttaccctctcagagctcc

SEQ ID NO: 736846 - DNA, 100 bp, Homo sapiens
aaaaagatatttgatattgatgaagctgaagaaggtgtaaaggtatcagacttggtgataattctgaattatgaccgtgctgtagaagcttttgcaaaag

SEQ ID NO: 736847 - DNA, 75 bp, Homo sapiens
gtggggatgaaggccgagggcttcgtggatgccctgcaccgggtccggcagatcttagcaaagcaatgtctcaag

SEQ ID NO: 736848 - DNA, 98 bp, Homo sapiens
ggaggcggcggcccagccacgatgggtgagcttgtcggccacagactgctacattgtgcatgagatctacaatggggagaatgcccaagaccagtttg

SEQ ID NO: 736849 - DNA, 100 bp, Homo sapiens
gagtgaccatgcagcaaaagaaggagggtcctctcagtgattaagtttgtggggacattcatggacaattctttgatttgatgaagctctttgaagtcgg

SEQ ID NO: 736850 - DNA, 75 bp, Homo sapiens
cctaaatatgaaagattcatcaggccaatgggaattgcaacccagtgaagaagttacctggaagtaaagactggc

SEQ ID NO: 736851 - DNA, 75 bp, Homo sapiens
ggacactagtgaacaggagcgcatgaaaagcctgaagagttgagagaaatcattgagaagacaagagagatggag

SEQ ID NO: 736852 - DNA, 100 bp, Homo sapiens
cttctctcgggctttgtccccttgctggctgcccctcaggacccctgctacgtggagaaaacctcggataaggtgaaatgacaatggatgctctgttggc

SEQ ID NO: 736853 - DNA, 82 bp, Homo sapiens
ttgccaccaaagacctgcgactttgctcaggctccccacaggtgcaggaagccgccgcccagccatggacggggaggagcag

SEQ ID NO: 736854 - DNA, 96 bp, Homo sapiens
ttcacttacgcctctcaaggagggaccaatgagaactatgttgtgcttctggactccacactccccagatcccagtatgactacatcttgcctcaa

SEQ ID NO: 736855 - DNA, 90 bp, Homo sapiens
gtttgccatcagacgcttccagtctatgccggttcctggacctgccctgggaagacgtgctgctcccacacgtcctgaaccgggtcccgc

SEQ ID NO: 736856 - DNA, 50 bp, Homo sapiens
caatcttcaggaaagtaagaggggacaatcttctgaaaacaattcctaat

SEQ ID NO: 736857 - DNA, 88 bp, Homo sapiens
ttcccgaagcaaaagtccattcagaaaagacaagagccctgtgagtgtgttgttggtggctgcaatgccagctttgcttctcagggag

SEQ ID NO: 736858 - DNA, 100 bp, Homo sapiens
cgcgaatatcgtcatcgttagaagtgggcctttggagtgacgctgtgggaactcatgactctgggccagactccctacgtggacattgaccccttcgaga

SEQ ID NO: 736859 - DNA, 75 bp, Homo sapiens
tctctcattttctttccctgcaccaactagcaggtaaatgggcaatgtgctggccacacagctatgcaagctgct

SEQ ID NO: 736860 - DNA, 100 bp, Homo sapiens
ccggctcccgcaccatggaggaggacgacagctacggcctccggtgtggctgtctctgatggtgtcatcaaggtgttcaacgacatgaaggtgcgtaagt

SEQ ID NO: 736861 - DNA, 100 bp, Homo sapiens
tagagcagcaaatttcagagaaggcctgaacttacaagaaggagaattcttattacagtttttcagttatgggacaaaaatattatatcaaaacactgaa

SEQ ID NO: 736862 - DNA, 100 bp, Homo sapiens
gaactacaagatgacggctctgacagaaggtggagttaaaagaccaaacgaaacctacaccactgatcctggatgagcaagggcgcactgtagatgcaac

SEQ ID NO: 736863 - DNA, 75 bp, Homo sapiens
catctgggggccacaaatgctccttctcctggagacgcaactcaagacacattcctgaaggcgctaaaagacgaa

SEQ ID NO: 736864 - DNA, 97 bp, Homo sapiens
gacatctgggggccacaaatgctccttctcctggagacgcaactcaagttaaaggagaaattagcattcttgaaaagggaatacagcaagacactag

SEQ ID NO: 736865 - DNA, 82 bp, Homo sapiens
agaaaggccttagtaggcctttctaagtctcctaaaggatgtggacagtcattttgtttactcattcagccctgttgcaggt

SEQ ID NO: 736866 - DNA, 90 bp, Homo sapiens
caaagcaataccaggatagctgttgtttcagagaaagctgccaatttgtggtgtctgaagaccaagactacacagctcattttgctgatc

SEQ ID NO: 736867 - DNA, 100 bp, Homo sapiens
ggaagatcgcaccgcggacgcccgctgagcttggcgcacgggccgaccaggaaaggccgagggggacggcaagatgcacatcaccctctgtgacttcatc

SEQ ID NO: 736868 - DNA, 82 bp, Homo sapiens
ggtcacctcattcatgaaggcctacagaagattgttggaccttcagatggaagtagttacattatagattactatggaacca

SEQ ID NO: 736869 - DNA, 100 bp, Homo sapiens
tgttcatgaagccggggaccctgtacgtgtacatcatttacggcatgtacttctgcatgaacatctccagccaggcttgcgcgatctctggcctcttcaa

SEQ ID NO: 736870 - DNA, 83 bp, Homo sapiens
aaagacgctaaacgtgccctactctgccccgggggagagacccgggaaaaggagaagatgaaggaagccaaggatgcccgcta

SEQ ID NO: 736871 - DNA, 96 bp, Homo sapiens
ctggcctgctgctggcccgcaggtggaatgcagtagccctctgggcctgggatattgtggttgataactgtgccatctgcaggaaccacattatgg

SEQ ID NO: 736872 - DNA, 100 bp, Homo sapiens
cacacggtgcgcgaccacctggtggggcgctggatccgcacgcagcagcactactacgacaagtgccccaaggttcctcagtggtgtgctgaatattgtc

SEQ ID NO: 736873 - DNA, 75 bp, Homo sapiens
ggagtaatggaaatgagatcacctttacttgcaggaggcaaaaccttcaactgaggacttgggggataagaagga

SEQ ID NO: 736874 - DNA, 100 bp, Homo sapiens
caaagagcccctcatcgagctcttcgtcaaggtcagtcttcactgtttccaatggaagatggattcttggatgatggccgtggggatcagcctcttcata

SEQ ID NO: 736875 - DNA, 95 bp, Homo sapiens
gttgcggccatcgccctgccggaccgcgcctcaggctcccccaggtggatctttaactcaagactagcatgaagagttgccttctggcctgccct

SEQ ID NO: 736876 - DNA, 100 bp, Homo sapiens
ctgctttcagtcctgaaaagctgaacgaggagttgatccctgaattttattatctccctgagatgtttgtcaacttcaataattataatcttggagtgat

SEQ ID NO: 736877 - DNA, 101 bp, Homo sapiens
cgacatggaacagggactcactgggggtttgtttctgcgtcacatgatcttggcctacagtaagctttctttcagccaagtgtttaaactgtacactgccc

SEQ ID NO: 736878 - DNA, 83 bp, Homo sapiens
ttcaggctccttctaaatggccaagggtgagcagggcagcatttccttctcccactgctgctgagatggcagaaattagtcga

SEQ ID NO: 736879 - DNA, 100 bp, Homo sapiens
catctggggcgtcgtgcgcaaaggcctgcagtgcgcgcgctgtctgtccccagaccccagagcacgtccggcaccaccatgactgggctgttgaagagga

SEQ ID NO: 736880 - DNA, 100 bp, Homo sapiens
gctcggcgcagctgttgcggggccatggcggggaccgcgctcaagaggctgatggccgagtacaaacgtgcagaggccaagaccgttttgcccaagaagg

SEQ ID NO: 736881 - DNA, 50 bp, Homo sapiens
caagacgagaatgtaactccgttgaagcacgtcaagcagaatgagcgcta

SEQ ID NO: 736882 - DNA, 75 bp, Homo sapiens
cacagagctgggaaaattgttgtgaacctcacaggcaggctaaacaagagagacaagagagacacctccaacttc

SEQ ID NO: 736883 - DNA, 82 bp, Homo sapiens
caaccacctcgagcggctgctggacgaagtttgctggcctagacctgaactcttcagataatcagagtggaggaagtacagc

SEQ ID NO: 736884 - DNA, 74 bp, Homo sapiens
aggccttaaggagaaagtttcagagcactgcagtttcctcctgaaggctggctccggctctccctcaataatgg

SEQ ID NO: 736885 - DNA, 100 bp, Homo sapiens
tatcaacatcagaacagatctgagcaggtctcaacaaatggcagctattacatcagacagtgacgagtcctgctgctcccttacagtgtctgacagacca

SEQ ID NO: 736886 - DNA, 99 bp, Homo sapiens
ccaaatcttcgatacgccacaagggaagcagatgtcatggtctcagatgatgataaagaaaagggagagggagctcttccaactgggaaatccaaaaag

SEQ ID NO: 736887 - DNA, 82 bp, Homo sapiens
cggagagctccagtgagtccagctcctctgacagcgaagactccgaaacaggctgaaggtgatgtggccgccctcaaccgac

SEQ ID NO: 736888 - DNA, 100 bp, Homo sapiens
taatgctgtaccgatttggtcacctgaagcctcttgtcccttcattgtcatctgcttttgaggtgcccttgctcgtgtgaatgaacagaggccagagaat

SEQ ID NO: 736889 - DNA, 90 bp, Homo sapiens
gtgaggaggaagaggaagaggcgaaggctggcggaggaggaggcctccggtgtggctgtctctgatggtgtcatcaaggtgttcaacgac

SEQ ID NO: 736890 - DNA, 97 bp, Homo sapiens
caagataatagccagctccccagaaatgaacctgcccacggtgtccgcgctcagggattctgaaagactaatggagcaacaaggagcactgctgaaa

SEQ ID NO: 736891 - DNA, 82 bp, Homo sapiens
cgacggtccctcagcccagccaccatgagcaccaagcagatcacttgcagatctgggacatgagcgatgatgagaccatctg

SEQ ID NO: 736892 - DNA, 90 bp, Homo sapiens
gcaccgcgcccatggcagagccagacctggagacctttggcgacttggcctttggcgacatcttcctccacctgctcacgggcaaccttg

SEQ ID NO: 736893 - DNA, 51 bp, Homo sapiens
ttcgctgcaacagccacagccaaccagggtgctggtatagaaatctaccct

SEQ ID NO: 736894 - DNA, 75 bp, Homo sapiens
tgccctttatgaagatattcttgagggtgaatgaaaactttgccattgatttgatagcagagcagcccgtgagcg

SEQ ID NO: 736895 - DNA, 75 bp, Homo sapiens
tgttttgcctgaatacatgatttaaacaagagatttccacagaaggatctgtctggctccattgatgacctcccc

SEQ ID NO: 736896 - DNA, 100 bp, Homo sapiens
gggaggcgcggagcgcgcgtgtggtccttgcgccgctgacttctccactggttcctgggcaccgaaaggaggaggtgcgccagtctgtaactcctgccga

SEQ ID NO: 736897 - DNA, 100 bp, Homo sapiens
tccagagcgtgaagatcaagatcggattttttatcaagcagaaatgcatcgaacaacgagaatcaagatcactgagctaaatccccacctgatgtgtgtg

SEQ ID NO: 736898 - DNA, 80 bp, Homo sapiens
cggagagctgacaatgatgaatctcagtttccacttgagcggcacagtgacagaacctgcaatacaatcggagccagaaa

SEQ ID NO: 736899 - DNA, 75 bp, Homo sapiens
cttttgcttccaaatacaagctgtatagcaagctaccgactagaaatactataatcagttggacatctagcaggg

SEQ ID NO: 736900 - DNA, 90 bp, Homo sapiens
gaaatccaattgcacctaccaaaaaaatcattgatcctcttccccccattgatcattcagaggggaaaaaagttgttccatgtagacatg

SEQ ID NO: 736901 - DNA, 75 bp, Homo sapiens
gacacctggagatgctgagctgaccagaactggaaggccggttctgacaacaaaggagattgtgacatattgctg

SEQ ID NO: 736902 - DNA, 92 bp, Homo sapiens
gttggaagcagccgatccagcctgcggagcctgtggggcaggtttacccaaggtccagcctagcccctaggcaccatgtcggacagtgatct

SEQ ID NO: 736903 - DNA, 100 bp, Homo sapiens
cgcaggcagagccgaccgcgagcgaccgagccggagccgagcgccaggtggcaagttatggtgtgaagccaagatatggtctagtgacatatgccacata

SEQ ID NO: 736904 - DNA, 100 bp, Homo sapiens
gtcggctgagggaaaagcgaggcaaggcaggcggaactgatagtgcatcagccgacccaggtaatttaaaatattcttcatccagagatagaggtggttc

SEQ ID NO: 736905 - DNA, 74 bp, Homo sapiens
aaaatctctacaccaatgaatatgtagcaatcaaactggattcactccttctccagttgcacagccacaccctt

SEQ ID NO: 736906 - DNA, 100 bp, Homo sapiens
ggtggaggagccttagtgtgtccacaaagggactcctgaaactgactgagagccagtggatttgccagcagtctgggccgttgctccagggagaactgca

SEQ ID NO: 736907 - DNA, 50 bp, Homo sapiens
ggcctgcgggcgatcgggccgaggaggaagaggacctcccctatgaggag

SEQ ID NO: 736908 - DNA, 80 bp, Homo sapiens
ccttgccccctcagctgcccactcgtgatttccagcggcctccgcgcgcgcacgtatatctctctaccgggggaattgca

SEQ ID NO: 736909 - DNA, 100 bp, Homo sapiens
ccgagtggaagctcttcatctacaacccgaccaccggagaattcctggggcgcaccgccaagagctggggagtgtgctgaaaaacaaggccaaattgaac

SEQ ID NO: 736910 - DNA, 74 bp, Homo sapiens
cagcagccggcagcagcagcggatgcaacaaggagacgcgcctttgccctggtctctcaagcgtatacttcaat

SEQ ID NO: 736911 - DNA, 75 bp, Homo sapiens
cagtgtgaatttgtgacagctgcagttgctccccgcccccgagcagccgaggtaatggatgtgaagaacagaaac

SEQ ID NO: 736912 - DNA, 73 bp, Homo sapiens
acctccagtgtcccttcttccacatgaaaaggataagcgaacacttgccaagtatttcaatccttgctatgcc

SEQ ID NO: 736913 - DNA, 103 bp, Homo sapiens
ccatacattattagtgctgctcctccagggaccgatccgtatactgcagcaggattggctgcagcagctacattagcagattcaaacgctcaagaaattaagg

SEQ ID NO: 736914 - DNA, 78 bp, Homo sapiens
aaagacaaaggcacagctggatgaatggaaagcaaagaagaaagcttctaatggggaggaagtaatggttctggagag

SEQ ID NO: 736915 - DNA, 100 bp, Homo sapiens
ggatcagattcctatcaaattccttattcgacaggctcaagggctgcagcaggagttgggaggtgtgaagatatgtgacgtgtataacgctgtcatggac

SEQ ID NO: 736916 - DNA, 74 bp, Homo sapiens
acgcggccctgctgaaagtggcgcaaatggaggccccgtgtgggccgcggcccggccctcaccatggagtccat

SEQ ID NO: 736917 - DNA, 75 bp, Homo sapiens
gaaggatccccaacggggaggccaacgtgaagaagaacttggcattagaattcctcgaccactaggacagggacc

SEQ ID NO: 736918 - DNA, 100 bp, Homo sapiens
agactaaataccagtgaacttcttggagaaattaaaggtggttgaccagattgacaccctgacctctgacctacagctggaggatgagatgactgacagc

SEQ ID NO: 736919 - DNA, 95 bp, Homo sapiens
tttgaattttcaggtggacaagagcaaggaccaagtgtggaaggtcttaatgtaccaacaaaggctactttagagtctcactctgtcccccaggc

SEQ ID NO: 736920 - DNA, 100 bp, Homo sapiens
cgaatatcaagaaatgcagtaaccagcatgtcaataaggggtcataggtggaaaagacatgtgtgcagtttcctcaagggcagagattttgtccatcttg

SEQ ID NO: 736921 - DNA, 90 bp, Homo sapiens
cggacttgtccttctacctcaccacctttggttctggctccttggcagcaatggctgtatttgaagataagtttaggccagacatggagg

SEQ ID NO: 736922 - DNA, 100 bp, Homo sapiens
tccccccaagtctcctgaagaggaaggagcggtgtcctcttaagaaaatgactctgtttgctggctacacggacaacctggtgcgagtgtggcaggtgac

SEQ ID NO: 736923 - DNA, 50 bp, Homo sapiens
agcatctcccttcatgtctgggtcatggatgacctcaaagcaacactcac

SEQ ID NO: 736924 - DNA, 73 bp, Homo sapiens
gaatgatcagcgtagtcaagtaccttctagatcttggagttgatgtgaaaacttttggcccgtttggaagcgg

SEQ ID NO: 736925 - DNA, 75 bp, Homo sapiens
ttaagcctgatctaacccctagaaacaggtttttgaatgtgagagcatcagcaattatcattcagagaaaatgga

SEQ ID NO: 736926 - DNA, 90 bp, Homo sapiens
cccacatagatggagatcatctgacactgctgaacgtctaccatgcttttaaacaaaggaaatgttttgggggatcaggtgacctccgca

SEQ ID NO: 736927 - DNA, 83 bp, Homo sapiens
ggtgccatcattttctggttctgttgatgaccctcttccagggcccagcgtgtgaggcggccgataccagggtcagatcagac

SEQ ID NO: 736928 - DNA, 75 bp, Homo sapiens
gtgacctcaccgcctcggttcgccctcagccgccccggtttgatatacgtttgatgaaagaaggtcgtatgaaag

SEQ ID NO: 736929 - DNA, 101 bp, Homo sapiens
ccgtcgccgccacacccatcagcgcggctacctgctgacacggaaccctcacctcaacaagtgtctcaatttaaaatggtgaattactcctatgatgaaga

SEQ ID NO: 736930 - DNA, 95 bp, Homo sapiens
catcgcatcctggctgccatattgcacctgatcatgtttgagaccttcaacaccccagccatgtacgttgctatccaggctgtgctatccctgta

SEQ ID NO: 736931 - DNA, 100 bp, Homo sapiens
gaggataatgggacctcggaagaagttccaatggaatgatgagatcagacaaagattattggatctgtgtcaaaagaagaggaagaggaagatgaagagg

SEQ ID NO: 736932 - DNA, 82 bp, Homo sapiens
ctctagctaaaaatgagcaagttaaaggcaagatcgacaccatgaagccagcagccagcttcgggtgtagcctattctcatc

SEQ ID NO: 736933 - DNA, 99 bp, Homo sapiens
ggtctgaagttcacgactactagaaggggaggggagtggaaaggctctcagtgaaaaaggtatgatctcgtgaaaccttgagagaaactgaatgacgaa

SEQ ID NO: 736934 - DNA, 82 bp, Homo sapiens
ggaggttcgagcgctgttctcgctccggagccgctgcacatttcgttgatattcactgatggactccaaagaatcattaact

SEQ ID NO: 736935 - DNA, 82 bp, Homo sapiens
ggaactttctgtcttgtgatccattgcctggtgatggatgaggcagaccggctgctggaacagggctgcactgacttcaccg

SEQ ID NO: 736936 - DNA, 50 bp, Homo sapiens
ccggctgccttccacctccagtgctgaaaaatggctactggacaggatcg

SEQ ID NO: 736937 - DNA, 80 bp, Homo sapiens
tggccgtgcttgccctgtcatcccacctgagaaccatgctcaccgaccctattggctctaccagtgcacctggacaggga

SEQ ID NO: 736938 - DNA, 100 bp, Homo sapiens
ggaagcaagaatttatcaaaggaaagatggatccagacaaggaatcttgcctccacaccacgagtcccatgccaaggtgatgatgtatcgtaaggagcag

SEQ ID NO: 736939 - DNA, 101 bp, Homo sapiens
actgacattgcgtttccgttgtcggcctcccactgcagcttttcctccgcaaccatgtctgacaaacccgatatggctgagatcgagaaattcgataagtc

SEQ ID NO: 736940 - DNA, 96 bp, Homo sapiens
tcgacaggaaaaaaatttgctggatattgatgcgccagtcactggtataaatgaccaaggattgtacagagttgtgggggtgagttcaaaggtcca

SEQ ID NO: 736941 - DNA, 112 bp, Homo sapiens
gatcgaccggttccaggtgcccaccgcgcactcggagatgcagccgctgttttccaagagataacttcaccaagatgtccagtgataggcaaaggtccgatgatgagagccc

SEQ ID NO: 736942 - DNA, 100 bp, Homo sapiens
atgaggcagccggcatcgtggagagtgttggagaaggggtgactacagtcaaaccagaggcagtacggcccaaaacgccacccgttgtaatcaaatctca

SEQ ID NO: 736943 - DNA, 100 bp, Homo sapiens
ggtgtgcaggggaaaccctgctgatgtcaccgaggccagaggagaaggcagagcccccccaggctatgaatgccctgatgcggttgaaccagctgaagcc

SEQ ID NO: 736944 - DNA, 100 bp, Homo sapiens
gtggagccggagctgggcgcggattcgccgaggcaccgaggcactcagaggagggatccaggtccggcacgatcaagacccaggctacatgcatcacaag

SEQ ID NO: 736945 - DNA, 95 bp, Homo sapiens
cttgatgaaggcgtggatagcctgaaggcagccattcaggtggataggcatgtagacctgctagaagttgcccaggaaactgatgggttttcagg

SEQ ID NO: 736946 - DNA, 76 bp, Homo sapiens
tttggaacctcactgaaaattggtattgttggattgccaaatgttggtgctgacaatacttgggaacctgaagaaa

SEQ ID NO: 736947 - DNA, 90 bp, Homo sapiens
tgatttttaaagcttcaaaatcctaagactcagcactgttgcggggtttgctggtgaggcccatgacccgctagttgaagcactagttac

SEQ ID NO: 736948 - DNA, 100 bp, Homo sapiens
tggagcctcagttggaagcagccgatccagcctgcggagcctgtggggcaggttggagcaaaacgtcccactcactggaggcacctgaggacgacggggg

SEQ ID NO: 736949 - DNA, 100 bp, Homo sapiens
ctccggggcagctccggcgggcgagaagagcaagttagtaccttgtaccaaaacatcaaccttgtggagccaagattaattcagccatatgaacatgtta

SEQ ID NO: 736950 - DNA, 100 bp, Homo sapiens
tacctcaaccaatcggacacctaccaggtggacggcacggacgacagaagcgactttggtgagactctggagagaattgccaagcggggtcggaaactcg

SEQ ID NO: 736951 - DNA, 100 bp, Homo sapiens
ggcctattacttcacggagctgaaggatgaccaggtcaaaaagagaggtggagaagagcgagtacttgagaaagaagaggaagaagatgatgatgaagat

SEQ ID NO: 736952 - DNA, 90 bp, Homo sapiens
gcacagctgcctgtcaccccagatgtcctcatcatcccgtcagagctgaggtacttcgtgaagtctcgtttcctctcagtccatccaccc

SEQ ID NO: 736953 - DNA, 98 bp, Homo sapiens
tcaaacccacccggcccaactcactctgaaccttagccggccgatcgaggagcagggccccctggacgtcatcatccacaagctgactgacgtcatcc

SEQ ID NO: 736954 - DNA, 100 bp, Homo sapiens
tcggcggcgggcgagtgactgcggccacgcctgaaaggcgactctcctggaaatcctcattgacgattcaatttgttgaaggccaatttgtggactccta

SEQ ID NO: 736955 - DNA, 100 bp, Homo sapiens
gtgcgaaccgaacagaataacccgcccccagcgggatgtgaaggactccgggtgaggccggccacgccccgcacgtctgaaccggacggcttttctcatt

SEQ ID NO: 736956 - DNA, 82 bp, Homo sapiens
ctggtcccggcgggtgttggagccgccattgaggaacacatgacagctggaggcaattgccagaccttctcatcttccactg

SEQ ID NO: 736957 - DNA, 98 bp, Homo sapiens
cgtgtcccatgtttttgagtatatccgttctgagacatacaaatagattggtagcttatgtcgatcttgatgaaagagcaattgatgctctcagggaa

SEQ ID NO: 736958 - DNA, 80 bp, Homo sapiens
cagaaattgagcaagcagcaagtcggctttcagatcagctactcaccctgtaatggatcttaaagcattccccaaagata

SEQ ID NO: 736959 - DNA, 50 bp, Homo sapiens
cgctaccaggaggtcaaccccgtcctcatcaccgggggcatcgtggccac

SEQ ID NO: 736960 - DNA, 98 bp, Homo sapiens
ccattgtgaggtctgcaagatggcactcaacatgaacaactacaaaggctatgaaaagaagccctattgtaatgcgagtgttcagcctgggtgttcct

SEQ ID NO: 736961 - DNA, 90 bp, Homo sapiens
gagtctcccattagaatatcagtatccacagaaggagcaaatacttcttcatgtagtcactttccacatggcatttcaagagtacgaccg

SEQ ID NO: 736962 - DNA, 100 bp, Homo sapiens
ctctgcctgtgtgagcagtctctggacaagatgaccacactccaggaatgccagtgcatcttttgcacagctgctgcacgatgtgctgatggaactgcag

SEQ ID NO: 736963 - DNA, 96 bp, Homo sapiens
ctgcttttgctcccagaagtggataggcagatttcagagagctatgccttcctaccaagagaagcggtgacacgatttctaatgagctgctcagag

SEQ ID NO: 736964 - DNA, 100 bp, Homo sapiens
gccacaagttcatgcgcttcatgatgatgcgagcagagaacttctttatccttcgaaggaagcctgtggaggagatctataaggacaggcagaaattctc

SEQ ID NO: 736965 - DNA, 87 bp, Homo sapiens
caaagggcagtcggcggagcttcgccaaggctggcgcagtcgtactgtaagattgatgttaaaggcatggtgttcaccccacttcat

SEQ ID NO: 736966 - DNA, 82 bp, Homo sapiens
ggaggaggcgaggaggagagactggagtgcatccgccccaacccttttccccctcgtctcctgtgagaattccccgtcggat

SEQ ID NO: 736967 - DNA, 98 bp, Homo sapiens
gtcgcctggaggaagccggaggcctgcgtggaggaggcgccccgcgcagctggctggcggagcatgagcgccccagcgcccgggggctggagaaggcc

SEQ ID NO: 736968 - DNA, 83 bp, Homo sapiens
cacctacatcatcttgtttgcctacatctacttctccacgcggcgtctctggccgagcctctttttgtggaaaacgacagcag

SEQ ID NO: 736969 - DNA, 99 bp, Homo sapiens
ccgccctgccggcgctggagaccatcaacctggaggagaacgagatcgtaggaatgtatcctgtcaggtataatgtcagtgaatggcaagaaagttctt

SEQ ID NO: 736970 - DNA, 49 bp, Homo sapiens
gatggatgcagctcttctgttgataggccaaaaagcaaatggatttcca

SEQ ID NO: 736971 - DNA, 99 bp, Homo sapiens
aagataatgaactaaacatagttttggaactagcagatgctggcgacctatccagaatgatcaagggccgttgctccagggagaactgcaaatatcttc

SEQ ID NO: 736972 - DNA, 100 bp, Homo sapiens
tgcagcagaagatattcaaggagatgaccgatggatgtctcaggttggaagtgtatcctcccttcttattttttctagctgttggaggtgtttaccaccc

SEQ ID NO: 736973 - DNA, 98 bp, Homo sapiens
ctctgggtgggcaacttacccgagaacgtgcgggaagagaagatcatcgagcatttcaaacgcctctgaagagccaatccattcaggatgggaaacca

SEQ ID NO: 736974 - DNA, 98 bp, Homo sapiens
ttcgacgcctccgccgccgcctgaggaggcgagctagccgggagttacaccgccaccgccagggcatcgagcgcctcaaacgaaagaaccagcccagg

SEQ ID NO: 736975 - DNA, 101 bp, Homo sapiens
ttgtcattaaacccatcgacaagaaggcacctcctccctgcccttcgctatcctgacgctggtgaacgccccgtacaagcgaggattttactgcggggatg

SEQ ID NO: 736976 - DNA, 89 bp, Homo sapiens
ggggcttgccctggtcttgctcggccgatgaagtgcagaggtttttttctgatattgttaatcctgccagtctttctcttcaagccagg

SEQ ID NO: 736977 - DNA, 128 bp, Homo sapiens
cgcagcgcggcactacagcggccccggcccggcccccgcccggccccggcgcaggcagttcagggaaagaatatggcaaagctgatgcaagatgggtttattttgatccaaccattgtgtctgtggaa

SEQ ID NO: 736978 - DNA, 96 bp, Homo sapiens
ctagaatgcatcagtgcccttgtggcgaatggggctcacgtcgactttactaatatgctgaagaacaaacagccgacgccagtgaatattcgggct

SEQ ID NO: 736979 - DNA, 90 bp, Homo sapiens
ggccttagttggccaagtactagtgaaaccatacatagacgagttccaccaggacatttggaatgtactccagagtccctctggaaggag

SEQ ID NO: 736980 - DNA, 75 bp, Homo sapiens
ccatgaacctggaggccgtgaacacctacgaaggccgctgcgcggccctgcgcatgctgctggcagatcagggcc

SEQ ID NO: 736981 - DNA, 90 bp, Homo sapiens
gaccgcacctatgtgctgcagaactccacgctgccctccatctgatatcagttttagagaatgtggcgtggagaaattctcaaggaaaga

SEQ ID NO: 736982 - DNA, 76 bp, Homo sapiens
accagtgatggtgccatttcagtaccaagcctttctgctccaggtcaagggttttcagagaaagatgctgatgagg

SEQ ID NO: 736983 - DNA, 75 bp, Homo sapiens
aggacaaggagaagatcgctgatgtggtgttgctgcagaagctgcaggtgaggaaaatagcagctgaatactatg

SEQ ID NO: 736984 - DNA, 99 bp, Homo sapiens
aagctctactgtgacttcagagacactgccaagcagccttagccctagtgtagaggttgatgataattagaagcatgctttccactgaacttcccgaca

SEQ ID NO: 736985 - DNA, 75 bp, Homo sapiens
gcggagcaggcggaggcggataagaaagccgctgaggacaagtgcaagcaggcaggtgacagcagggacatgtct

SEQ ID NO: 736986 - DNA, 100 bp, Homo sapiens
attgaaaggaaccactcattcacttctagacgacaaaatgcaaaaaaggaggccaaagactttgagaaagaattgtgccatgaaaaatggaaaactcctg

SEQ ID NO: 736987 - DNA, 98 bp, Homo sapiens
ggataatgaaacatttggatttgaaattcagcatggaaataaccagcctgcaagaactggcacactgtcgagaacaaatcctcctactcagaaaccgc

SEQ ID NO: 736988 - DNA, 95 bp, Homo sapiens
ctgcagctggagctctgcgccatggccgtgctgctcaccaaagtctgcgctcctcagaccaccggcaggtgaacagcctgatgcagaccgaggag

SEQ ID NO: 736989 - DNA, 100 bp, Homo sapiens
aaaacctgctcactgcctggaacagctctcaaagtttcctgggagtatatgttgctgcagtacgggaattttacttgtctgtttattttttcaaaaagaa

SEQ ID NO: 736990 - DNA, 82 bp, Homo sapiens
tactgacgaagcttggaagttgcagaaggtgaaaggtgtagcagtcactcggcctacacccacagcatcgaccttgtgaacc

SEQ ID NO: 736991 - DNA, 82 bp, Homo sapiens
gtggaagcaggactgcgccgcgtcttcctcaagacaaatttacatgtattggagaccagaccagaagcccttctgaattaag

SEQ ID NO: 736992 - DNA, 97 bp, Homo sapiens
gagagacacgcgggcacacccctctacctgggagccacagcgggtatgcgcctgctcaagaatgtggacccccctgtctggtacgacaccgacgtga

SEQ ID NO: 736993 - DNA, 75 bp, Homo sapiens
cacgaggctgtcatcaccgccatgcccaagaataaagatggttaacataacagacaccaagaaagggaagaggag

SEQ ID NO: 736994 - DNA, 74 bp, Homo sapiens
agctggaaaatggtctgctctgcgaatcgggggatatgagactttctactcggaatatcctgagtgttgcgtgg

SEQ ID NO: 736995 - DNA, 75 bp, Homo sapiens
gacgtgccccttagtcaccttccggtaccagctggaggatgagtctgcgcatttggatgaaatgccactaatgat

SEQ ID NO: 736996 - DNA, 74 bp, Homo sapiens
tacctatggctttattgacctcgactcccatgcgcttgaagctcaactagagaaaaaggaccaacaatttaaag

SEQ ID NO: 736997 - DNA, 90 bp, Homo sapiens
caataacccaagcaaaacttcagatgcactagaaaattatggcatgccgtttagcagaactgaagatgggaagatttatcagcgtgcatt

SEQ ID NO: 736998 - DNA, 100 bp, Homo sapiens
cgtttctggcccgcttcaaggaacgggtcggctacagggagggacccaccgtagagactaaggctaacatttccaatgatcactggccatctttggttca

SEQ ID NO: 736999 - DNA, 101 bp, Homo sapiens
gcttcctggagattctacacgccaggtggtggtgcgctcagtgtgtgcaggaacggagaataaactgagctctctctctgacctggaacagcagtaccgag

SEQ ID NO: 737000 - DNA, 75 bp, Homo sapiens
ttcattttaattttgccggaatatttcaagacaccgaaagaatgataacactttgtgtccaggattgagaaatgc

SEQ ID NO: 737001 - DNA, 100 bp, Homo sapiens
cggtgaaggtgcaggcccggcgccgccactgccgcagccaggagatggttcgggcctagcggagccgggactggagtctgctcccagttttcgagaggag

SEQ ID NO: 737002 - DNA, 100 bp, Homo sapiens
atggagaaggcagccaatgccaggaaccatgtgtgtatagaccatcgatgccagcgtgtggatctcctgggggcacaggaatgtcgaagcaaatgccatg

SEQ ID NO: 737003 - DNA, 82 bp, Homo sapiens
ggacgcaagatggcgacggcgaccatagctctcacctcctgccccccgaggtctgcagtctcctgaacccagcagccatcta

SEQ ID NO: 737004 - DNA, 90 bp, Homo sapiens
caaatggtattcaagattcaccatgtacaccacatcatctaagatgagtaacgaaagaggctttgaaaatgtagaactgggagtcatagg

SEQ ID NO: 737005 - DNA, 98 bp, Homo sapiens
aagaaataccgtgccctgaggttggacgtggggaatttctcctggggctcagagtggttaaagcacgaattgggagctctcagcgacatcaccagtca

SEQ ID NO: 737006 - DNA, 100 bp, Homo sapiens
ttagagaataccttggattgactgaggaacctgccaagagtttggctacaactgcagtttctgatgaagaattgaaaagaagagtagctgaggagctggc

SEQ ID NO: 737007 - DNA, 97 bp, Homo sapiens
caggcctgccagccgccggatgcagcaggtgattcaggattacacaacaccgcctaatgaagaactctccagggatctagtgaataaactaaaaccc

SEQ ID NO: 737008 - DNA, 100 bp, Homo sapiens
cctgcactctgcgctttgagctactgggctgtgagctgaacggtatgaaaactttcaaagacgactagcacagaaccctctcttttggaaaacataattt

SEQ ID NO: 737009 - DNA, 100 bp, Homo sapiens
ctcatcttcagtcaaaagcctgaatttcaggatctttcagacagcccacctgaggatattgaccataaggactcatatctcattacaagaagcatcatgg

SEQ ID NO: 737010 - DNA, 96 bp, Homo sapiens
ggggtgcgagaggtggtgtgcatgacactcctggaaaacagatataagcttaccaaagtcagcaacaatatgctacacagctgctttgctcaaagc

SEQ ID NO: 737011 - DNA, 75 bp, Homo sapiens
aagagaatctcaagctgctaaggaaccttcagaagtttagtctttttggagacataagtgttctacaacagcaag

SEQ ID NO: 737012 - DNA, 98 bp, Homo sapiens
tacgacgcggcgcgcgccaagatcgccgccaacctgcagtggatctgcgccaaggcctacggccgagaggtcctgctgtactagccaccaaagcagct

SEQ ID NO: 737013 - DNA, 50 bp, Homo sapiens
cgccgaatcgctcctgcagcagagaggttgacggatatattcagacgtta

SEQ ID NO: 737014 - DNA, 99 bp, Homo sapiens
agtctgccttctctccgcagaacgtggacgctaaaaccctgacttaccattttaagctttagaagaggccatggaggcacagatacagaactttggaca

SEQ ID NO: 737015 - DNA, 82 bp, Homo sapiens
gtggaacggctgcttttggaagggtcggcactcttcaccctcccgagccctgcccgtctcggccccatgcccccaccagtca

SEQ ID NO: 737016 - DNA, 82 bp, Homo sapiens
tgccccgacggggcgcgcgcgaagcgagcgagaaggcacggagtcgccgcggagcgcagactggccttatgggtttctagaa

SEQ ID NO: 737017 - DNA, 50 bp, Homo sapiens
gatcatcgagcatttcaaacggtgacttaagagattaaaattaatttggt

SEQ ID NO: 737018 - DNA, 78 bp, Homo sapiens
tcccatccttcaagttacacaacacatccacagatgcaacaagacccctttgctgatgcaagtaagggtgatgacctg

SEQ ID NO: 737019 - DNA, 74 bp, Homo sapiens
tgagccctgggacctctgaagtgaacactgcagggccatttggtatatgactgatgggatgttacttcgtgaag

SEQ ID NO: 737020 - DNA, 89 bp, Homo sapiens
gggctaaccagttagtggtgctcaacgtgtacgacatgtctggtgccatcatgacagtcctcgcagctgtctgcactaagatcccagaa

SEQ ID NO: 737021 - DNA, 140 bp, Homo sapiens
tctgtcctcaggtggcagtggttcttatagccctggagtgacctactcgcccgtcagtggttataataagcgggacgaccctgggacagtctccactggggcagatccagctgaccatccggcacagctcgcagagaaac

SEQ ID NO: 737022 - DNA, 75 bp, Homo sapiens
cagcgctgctctccgccgcagcttcagcacctcggcccagggatcatggcccaagttgcaatgtccaccctcccc

SEQ ID NO: 737023 - DNA, 82 bp, Homo sapiens
cactccgtcccccgcgggtctgctctgtgtgccatggacggatccacatgaagaccatgcccgccgccatgttcaggctcct

SEQ ID NO: 737024 - DNA, 90 bp, Homo sapiens
cagccatggagggcgatggctcagattcgccggctggagcattggatttgctaaaggagcttaagaatattcctatgaccctggaattac

SEQ ID NO: 737025 - DNA, 82 bp, Homo sapiens
aatatctgtcttcggtggactccttcggcagtccacccaccgccgccgcctcccagatcgcaccccctccctccctggcgga

SEQ ID NO: 737026 - DNA, 76 bp, Homo sapiens
agccccgctaccggactacatgtcggaggagaagctgcaggagaaaggcacctgacttggactctgaagctgctgc

SEQ ID NO: 737027 - DNA, 100 bp, Homo sapiens
ggatgtcaaccggagattgggctgcctgggccgagggactgcctccgggcctgccaggagcagatcgaagccctgctggagtcaagcctgcgccaggccc

SEQ ID NO: 737028 - DNA, 100 bp, Homo sapiens
cccggcaccccccgccgacaaggaggtaaaggcatgacttcctggcaccacagggaaaatcgggtgcaagcccagaaactatttccccaccaccacttgt

SEQ ID NO: 737029 - DNA, 122 bp, Homo sapiens
tgagccccgacgcccctgacagggccacgcacctgatcgccgcgcgagctgttgactatattgtggagtatgactatgatgctgtacatgatgatgaattaactattcgagttggagaaatc

SEQ ID NO: 737030 - DNA, 98 bp, Homo sapiens
cggcgacaaacaagtgaacttgaatttagcactcaacgagaggaacgccttagaaaagaatttgaggcttttcctctccctgcacctttgcagctgct

SEQ ID NO: 737031 - DNA, 100 bp, Homo sapiens
ggcctctggaatttagcgctcgcccagctagccgcaggagctccccacaccaagtgagaatagcatgccaccaggcctctcaactcccacagcctcgcag

SEQ ID NO: 737032 - DNA, 51 bp, Homo sapiens
aactgaggaaagaggctgcagcgaggaaagtgtgccggtccaacaaaagcc

SEQ ID NO: 737033 - DNA, 100 bp, Homo sapiens
cgtgtttgctgcggcaaggacgagccggggcgctgaagctcaaatagctataactgtaccaaagacatggaagaaaccaaaagatcggacccgaaccact

SEQ ID NO: 737034 - DNA, 99 bp, Homo sapiens
cagctccatccaggccaccactgcggcgggctctgggattccgttggtgaacctgtaaaaacaaaacaaacaaaacaaaacaaaaaagacaaaacctaa

SEQ ID NO: 737035 - DNA, 75 bp, Homo sapiens
cctccggccgcagccatgtgggacccgcgggcagctagatttagctttggagtcaaacccttctgaccatccaag

SEQ ID NO: 737036 - DNA, 100 bp, Homo sapiens
ggggcgcgcgcgaagcgagcgagaaggcacggagtcgccgcggagcgcagattattcagagctgggagagcttcccccacgatctcctttagaaccagtt

SEQ ID NO: 737037 - DNA, 82 bp, Homo sapiens
ctctccttgcagctgcttagacgctggatttttttcgggtagtggaaaaccaggcttacagcttcgccatgggctgctggcc

SEQ ID NO: 737038 - DNA, 75 bp, Homo sapiens
tctttacttggtgcaggaaggcagtctttgctacgtacagcaaaaggatgaggaagatggagagaatgcccaccc

SEQ ID NO: 737039 - DNA, 75 bp, Homo sapiens
ttccagataccatttggctttcggctgtgcaggaaacacaatttatctttgggagtttttactggcactgctcca

SEQ ID NO: 737040 - DNA, 100 bp, Homo sapiens
gttcgcctgaagaagaccgccactgccggagccatctcggagctcacggagagccgcctgaggagcggcacagacattgcagtggctgccccctacgggg

SEQ ID NO: 737041 - DNA, 100 bp, Homo sapiens
ttcgtaaacatctgggtgtatatcaaacggcaagatgtccagtaatgtcccggcggatatggacccagatgatgtggtaccagttggccaaagaagagcc

SEQ ID NO: 737042 - DNA, 100 bp, Homo sapiens
ccggcctcgcacttccggtggggagattccggcctggagctcccagggccgagggcttcgtgggacacatatgcaacatgcctatgatttttacaagcct

SEQ ID NO: 737043 - DNA, 97 bp, Homo sapiens
ccggcagacgggcgtcttctacctgacgctcgtcctcatcctggtcactagcggactcttcttcgccttcgagtgtacgaagccatcgacagcagag

SEQ ID NO: 737044 - DNA, 50 bp, Homo sapiens
ggatcccggccaccagcaattgtccggatagagattccttctgccatcag

SEQ ID NO: 737045 - DNA, 107 bp, Homo sapiens
ctggcggatccggcctgccctggcccagctcaacacctgatttcgacaatgcagatcttcgtgaagactctgactggtaagaccatcaccctcgaggttgagcccag

SEQ ID NO: 737046 - DNA, 74 bp, Homo sapiens
ccgattactgcgagaacaactacatacagcaagagcctcctgatctagcagccaagactccccctgacctttgg

SEQ ID NO: 737047 - DNA, 90 bp, Homo sapiens
gcacgcttccagaacgcctgccgcgacggccgctcggaaatctctttaaaccagaggagttacgccaggccctcatgccaaccctagaag

SEQ ID NO: 737048 - DNA, 80 bp, Homo sapiens
ctcctccctgcgacagaccttcagcttcctctcgggcatgaccggaaaggccaagtttttccactactcccaagggcaag

SEQ ID NO: 737049 - DNA, 98 bp, Homo sapiens
aagaagaaagtctagaagattcagatgttgatgctgattttaaagcaatgatgaggagtctgatgaggaagctgtgaagaaaaccaacaaatgtgtac

SEQ ID NO: 737050 - DNA, 76 bp, Homo sapiens
ggagttgctggtgttctatactggaagaggcatgccagaggtagagcaggccagctgcgggccgtccagcggctgt

SEQ ID NO: 737051 - DNA, 83 bp, Homo sapiens
tgaaacttaatccacagcaagctcccttatatgcagttgtgaaaaacttcaggacaaaaatgtttcatttaaggacttgtgct

SEQ ID NO: 737052 - DNA, 102 bp, Homo sapiens
atggatatgggagctgtggccctcagaatttaaacttaaggaaagagtgggaaagtgagggtgctggagaatctggtaaaagcaccattgtgaagcagatga

SEQ ID NO: 737053 - DNA, 98 bp, Homo sapiens
gttactgctgtgtggctgcactcactctacgtggagttgggccctgcaggaaggacggacttcaggggcagagccacctgagctgaagattcccttga

SEQ ID NO: 737054 - DNA, 87 bp, Homo sapiens
aagcagttcagaagagccaaggaataaacatgcaatgaacccaaaaggattctttcagtgacctgtatagttcctatgtaatctttt

SEQ ID NO: 737055 - DNA, 98 bp, Homo sapiens
tgaaaacaaatttctttggtacccgagatgtgtgcacagaattactccctctaataaaaccccaagggtgagatggccgccactccggcagggttcgc

SEQ ID NO: 737056 - DNA, 100 bp, Homo sapiens
gggaagcgtcgggattaggtgaaacatgtacagaagcatattcccaatctgatgagcaatatgcttgccatcttggttgccagaatcagctgccattcgc

SEQ ID NO: 737057 - DNA, 100 bp, Homo sapiens
tgaaactagtgcaaaagctggatacaatgtaaagcagcaagattccatacaatgggtttataatagcattgagagtgctcaagaagaccttcaaaaatct

SEQ ID NO: 737058 - DNA, 75 bp, Homo sapiens
ctttcctgctggtggcaaccgcctacgagacactcaaggtgctactcgtgagcagtagtcgccatccagacagat

SEQ ID NO: 737059 - DNA, 75 bp, Homo sapiens
tgattcgtatctaagactctgggacactcctgaagtcgggaaatgattgaccctcttgctggaatgacatctctt

SEQ ID NO: 737060 - DNA, 100 bp, Homo sapiens
caggaatgaaagtggcgctttctccgccccagcaggtagagcagagccggagccaggtgcaggccattggagagaaggtctccttggcccaggccaagat

SEQ ID NO: 737061 - DNA, 74 bp, Homo sapiens
gcaagatcaccgtgacatccgaggtgcctttctccaaaaggccgtcgctttcgggttctctcatcgcttcgtcg

SEQ ID NO: 737062 - DNA, 78 bp, Homo sapiens
cggaacattcttcacaagaaagcactttcatttggacccgtggatacccattgaacagatgcttgaaacctgcaagta

SEQ ID NO: 737063 - DNA, 83 bp, Homo sapiens
ctgggacttcccgtccgcggcgtggaggctttgcccgaagtttttacatacaaattctactagtcacacctggccattcagtg

SEQ ID NO: 737064 - DNA, 80 bp, Homo sapiens
gaggcggaacaggccgggcaccaaggcgcaggctgcattgcgtcagattactgataaagctcgtgaatttggagctggtc

SEQ ID NO: 737065 - DNA, 75 bp, Homo sapiens
ctgatgaagcttctgaaccatccacacatcataaagctttaccaggtggtttttcaaggatataaccaggaagga

SEQ ID NO: 737066 - DNA, 90 bp, Homo sapiens
ggagtggcctcaagatggatgaagacggcggcggcgagggtggtggcgcattgcagtgtcgagatggctatgaaccctgtgtaaatgaag

SEQ ID NO: 737067 - DNA, 98 bp, Homo sapiens
caactaccagtcttacaacgactttgtcctccgagttgatccgggtggtgaaagcgttccgtagctcgctctatgaaggcctggagaaaccagaatcc

SEQ ID NO: 737068 - DNA, 100 bp, Homo sapiens
taattaatgcagtaaaacgcttccatatttatccagaggttaatttggagtggcccctggagtcagtttcctacaccatccgaggccccacccagcacga

SEQ ID NO: 737069 - DNA, 90 bp, Homo sapiens
ctctgctgcgtcctgctgaccttcgcaaaactggatcacaagtctttcggtcggagaactggaaggtctgggcagagtcgagcagaggag

SEQ ID NO: 737070 - DNA, 51 bp, Homo sapiens
tgatggaatatgttaatgggggcgagatgatgattattccccaccttctaa

SEQ ID NO: 737071 - DNA, 75 bp, Homo sapiens; identical to SEQ ID NO: 39261

SEQ ID NO: 737072 - DNA, 75 bp, Homo sapiens
ccgggatcctggagcactcggtcatgtacccggtggactcggtgaaggggaatgagtttcagaatattccagggg

SEQ ID NO: 737073 - DNA, 98 bp, Homo sapiens
ctattcctggctgtggagtgacttttgaaattgtctccaatattccagagagagaagaagaaggaggttcctgctgtgccagaaacccttaagaaaaa

SEQ ID NO: 737074 - DNA, 76 bp, Homo sapiens
ggaggcaccaagtgcatcaaatacctgctgttcggatttaacttcatcttctggtgggacgtagctgagctgcagc

SEQ ID NO: 737075 - DNA, 152 bp, Homo sapiens
tatttgctgagaatgcagccgtgtgacagtaactgaacattggtctaaagtctttccaaaaggtcaaggttcacaaggtctgccatcatggatgttctcgcagaagcaaatggcacctttgccttaaaccttttgaaaacgctgggtaaaga

SEQ ID NO: 737076 - DNA, 75 bp, Homo sapiens
ttgtgccacattcttgcagctgcctacaaattcaagagtgaccagggatgatggaatttcactcttgttgcccag

SEQ ID NO: 737077 - DNA, 92 bp, Homo sapiens
cgaacgaccaagagggtgttcgactgctagagccgagcgaagcaacccttaggagaaatcttgagagtggacagcaattgtgaagatcgcca

SEQ ID NO: 737078 - DNA, 120 bp, Homo sapiens
gaggacattcgcaatgccatcatggccatccgccggaaccgcgtggccctgaagggcaagttgctccctgagctgctccaaccttatacagaacgtgtggaacatctgagtgaattcctg

SEQ ID NO: 737079 - DNA, 74 bp, Homo sapiens
acacgcgcagccccggcctctcggcctctgccggagaaacagcctgaactctttgcttccggaatccgggattg

SEQ ID NO: 737080 - DNA, 95 bp, Homo sapiens
ggtgcgggccgctggccaggccctgaccgcaacctggcccagaggccccagccctcaggcaaggttctccggacggagtttcactcttgttgccc

SEQ ID NO: 737081 - DNA, 75 bp, Homo sapiens
ccccggcccacagtcaacggggaggtctgggtcttcaacaagtctcagaccagtatccttcaggggttctcttac

SEQ ID NO: 737082 - DNA, 76 bp, Homo sapiens
gtggacgacgtgctttcccattttgctcagcgactgtttgatgacgtcccgcagagcattggggagtcagcaatgt

SEQ ID NO: 737083 - DNA, 83 bp, Homo sapiens
ctcctgtaacccagcctgtttcacttcttgttcaaggagcagggacaagttacaggaatgttctccaagcagcaatccaaaag

SEQ ID NO: 737084 - DNA, 100 bp, Homo sapiens
aacttcgaaacgtgataagaagcacctggatgagacatttgctacagcatcccacattaagtcaacggtggtgaaattgcctctacctttgatcacccag

SEQ ID NO: 737085 - DNA, 98 bp, Homo sapiens
tcagccaagtccccccaacactgcatggagcggatccagataagtgggcggaaaaaccagcctttgggactcccctagaagaacacctgaagaggagc

SEQ ID NO: 737086 - DNA, 100 bp, Homo sapiens
gtcggaggagtactcggtgaaatcctgtcctgaagactgtaagggcctgtcctcccaaagccaactctaaggagaggagaggaagagcagttcttggggc

SEQ ID NO: 737087 - DNA, 75 bp, Homo sapiens
ggagtcgagtctagaattcacacagagccacctagatcctgcagctccaccaaagaaaccgcctcgccctggagc

SEQ ID NO: 737088 - DNA, 117 bp, Homo sapiens
ttattttaatgtatgacattacaaatgaagaatccttcaatgcagtacaagattggtctggctctgggagaggagtggacagcagctggttgagatacatccccatctggagacagg

SEQ ID NO: 737089 - DNA, 75 bp, Homo sapiens
aacaagccgtggaataggtgtatcaagtaatggtgcaaagcctgaaatggcccactgcgtgaccttggttcagct

SEQ ID NO: 737090 - DNA, 50 bp, Homo sapiens
atcccatcctctttcgaggtgttgggccctgtttgtgctcttcgtcctgg

SEQ ID NO: 737091 - DNA, 100 bp, Homo sapiens
ggctatgaacccagaggtcgtggaggtggccgtggaggcagaggtggcatggggggaagcaaccaggggaaaatgaagatatcaccatcagtagtaactc

SEQ ID NO: 737092 - DNA, 100 bp, Homo sapiens
ggcttgtggtgcggcctcaccatacaggaacagggcagacgttagcgtgagtgatcactctcaatcccgggatgaaacaagtgaagatgctaactgtctt

SEQ ID NO: 737093 - DNA, 99 bp, Homo sapiens
ataaggacaaaagccaagaggaggacagttcgctacacagcaatgcatcgaggccaatggaagcactgttgtgaagaacttatgaaaattgagattatg

SEQ ID NO: 737094 - DNA, 90 bp, Homo sapiens
atgaactcgaaatgaagcggaaagcagatatgcgcgtcagcatactttggcgggagagtcgcggttgctgatcgtggtgcttgagtagag

SEQ ID NO: 737095 - DNA, 90 bp, Homo sapiens
agatggagaagaaatagttacctatgatcgatctttcgaagatggtttggctgccttggagatttggagatctgatgccacgatgaggac

SEQ ID NO: 737096 - DNA, 102 bp, Homo sapiens
gtagccatcaacccgagtgcagtttcgatggaaaatgaaggaaaatcctgccttgcttcgttgggcctatgcaagaacaataaatgtctatcctaatttcag

SEQ ID NO: 737097 - DNA, 74 bp, Homo sapiens
ttcaaactacgttaagatgacgacagactcagatccaagtcaacagtgctctttgcaagagaagatagcaagca

SEQ ID NO: 737098 - DNA, 50 bp, Homo sapiens
cgcgctaaggcaaagcacctggatgcatcctcattcttggctgagtggca

SEQ ID NO: 737099 - DNA, 100 bp, Homo sapiens
tttggaaaaaggctgtctctagacagcagtcttgtgggagcatgacttcggcaacttcacctatcattctgaaatgggaccccaaaagtttggaaatccg

SEQ ID NO: 737100 - DNA, 99 bp, Homo sapiens
cagaactgccccatcgatgtgcggcgcccgctgtataaggttaaaaaggccttctttgctttggtagccaacggtgtccgagcagcgccactgtgggag

SEQ ID NO: 737101 - DNA, 101 bp, Homo sapiens
gaaggaggaggacaaagagcccctcatcgagctcttcgtcaagaacaccttccaccatgaccacctcagcaagttcccacttaaataaaggcatcaagcag

SEQ ID NO: 737102 - DNA, 100 bp, Homo sapiens
gtcggtgagcgcgtttcccgcctgagcgcaactagcggcgggtcgtgggcacctccagggaaaccatctttgtatggcagcctgacttgtcaaggaattg

SEQ ID NO: 737103 - DNA, 100 bp, Homo sapiens
gagatgaaggtgaagatgctgagccggaatccggacaattatgtccgcgaaaccaagttggacttacagagaggttatctgggatacactaggaaacaag

SEQ ID NO: 737104 - DNA, 82 bp, Homo sapiens
caacatcctgtcacaggccatgctctggcaaaaacgttaacacagaaatctgcctcctgggccatgccgcttctaaggcctg

SEQ ID NO: 737105 - DNA, 100 bp, Homo sapiens
gtttctctccctctgcccccccttccccacgcaaccccagatccatttacactttacagaacagcatatgccatatatgagctggctgtggcttcatttc

SEQ ID NO: 737106 - DNA, 100 bp, Homo sapiens
tgctccatacaaataccccaggaaggcctgaacatgcattggctgcgaaaagttcagggactttgcaccctgtggggtactcagatgtccagccgcactc

SEQ ID NO: 737107 - DNA, 75 bp, Homo sapiens
agaggagcaaggctccggcactaccacgggctgcgggctgcctaggagaataaaggcagccccgttgatgactga

SEQ ID NO: 737108 - DNA, 73 bp, Homo sapiens
aaggttgatgggcgtgtagtggaaccaaagagagctgtttctagagaggatgaggaagagtccttgaatgaag

SEQ ID NO: 737109 - DNA, 89 bp, Homo sapiens
ggtcctgcgactcatgctgctggcttccaagggagatgacccagaggatgccaaggcaaaggtatgggcactaggaaaagacttcttcc

SEQ ID NO: 737110 - DNA, 100 bp, Homo sapiens
atgcaggccccaatggcagccagtttggattttcactggacttccacaaggacagccatgggaggcatagaatgtcaagctaaccaggcgtccgctactt

SEQ ID NO: 737111 - DNA, 82 bp, Homo sapiens
ctacaatgcaggactgctctcctactacacgttacttgctggacagaagaaaagctcccccttctggacatttgaatactac

SEQ ID NO: 737112 - DNA, 98 bp, Homo sapiens
gtcagaggggtgaccagagagcccaacgcctggtgctcaagactttctccgagatatcagacaccccgaagaactttctctcttaaagaaacccagag

SEQ ID NO: 737113 - DNA, 100 bp, Homo sapiens
attgaattacttcccgaagctcaacacaaagctgaagtctacacgaagcaggtctctaattaacagaagatggcaaagcccagccacagcagctatgtcc

SEQ ID NO: 737114 - DNA, 100 bp, Homo sapiens
gatttgaagctaacagagctcctccgatactacatgctcaacattgaagctgctaaggtaaagaaggcgtataggcagaaggccctctcctgccacccag

SEQ ID NO: 737115 - DNA, 134 bp, Homo sapiens
aggattggtcaccaaaaccgatcctgagaagggtgaaatagaagattatcgtttgctgacagatattttggatcactactcttggaatcaaagataaatccaaatactgcatatcagaaacaacaggcaagtag

SEQ ID NO: 737116 - DNA, 90 bp, Homo sapiens
ctaaaagcattgtttctagaacatgaggtatacccgaaatcttgtggatcaaggaaatggaaaatttaatctgatgattctctgttgggg

SEQ ID NO: 737117 - DNA, 75 bp, Homo sapiens
tgatcttggaattacctgctgcgatttttcttcacagccagtttctggagtggctgtaaggtgaagaagcatgaa

SEQ ID NO: 737118 - DNA, 82 bp, Homo sapiens
aggaaataggatttaaccgctctctgcctcccagctctgccaagccaaaggcttcatctgtgagttctgtcagaatgaggat

SEQ ID NO: 737119 - DNA, 75 bp, Homo sapiens
agatttacaaactggccaagaagggccttactccttcacagatcgttgacatgaagacaatggagactgcagaga

SEQ ID NO: 737120 - DNA, 83 bp, Homo sapiens
cttcacagcacagttcctgggaaggtggagccaccagcctctccctggtgttggagagcacaatggctgaacaagtccttcct

SEQ ID NO: 737121 - DNA, 80 bp, Homo sapiens
gcagtccattccaaagacaactataaacgagtgactgggacaagctttccagagtgttgaatcttccaccagaaaacttg

SEQ ID NO: 737122 - DNA, 83 bp, Homo sapiens
acttgtttgaaaacaggctatctagcttgataataggaccatccaaagaaagggctttatcctgtggataaacgcagagtgaa

SEQ ID NO: 737123 - DNA, 100 bp, Homo sapiens
atgacatgcatgataggttttggaagactatgtgaaagggtttggaggaaaatttggtgtgcagacagacagacaagacaaatgtgcccttggctgggat

SEQ ID NO: 737124 - DNA, 89 bp, Homo sapiens
cgcagatgttgtcaaggtggcctaccaggaggccaggggtgtcgccatggatcctttaggaaaaagacccaatcctccccctgtttctg

SEQ ID NO: 737125 - DNA, 75 bp, Homo sapiens
gttacatcgttctggatttaagaaccgctcaagaaacaaagcagctctctatcaatatcagctcacatcattgaa

SEQ ID NO: 737126 - DNA, 98 bp, Homo sapiens
cgcctgctgcactttgggttcaaggcgacagactttccttatcccagttgattgtgcagaatacactgcctgtcgcttgtcttctattcaccatggct

SEQ ID NO: 737127 - DNA, 100 bp, Homo sapiens
agccaagatccactaccggaagaagaaacagctcatggtgagggtggaactactccacaatccagccttctgcagcctggccaccaccaagaggcgtcac

SEQ ID NO: 737128 - DNA, 83 bp, Homo sapiens
gtgctggctgccgcgcggccgaggtcacgaacgagatcacgccggtgctgtcgtactcctacctggccgtgctggtgcccgtg

SEQ ID NO: 737129 - DNA, 100 bp, Homo sapiens
cactgactggatttggtactggagtgatgagtttggttcttggcaggaatatggaagacagctgagatctgtatctgtggacctgaatgttgatccctcg

SEQ ID NO: 737130 - DNA, 50 bp, Homo sapiens
atgatacagttgataaaattgttgggctttttggtggtgctggagttggc

SEQ ID NO: 737131 - DNA, 151 bp, Homo sapiens
gggcgaggagtcgcttaagtgcgaggacctcaaagtgggacaatatcctctgtggagaacacccccccatggaggcgagtgaacagcagagaatttcaaaggaccttgctaatatctgtaagacggcagctacagcaggcatcattggctg

SEQ ID NO: 737132 - DNA, 95 bp, Homo sapiens
gcttctatttggaggctggggacctctcaaagatgatgaagatgatgaagaggaagatgaagaggaagaaatcgacgtggtcactgtggagaagc

SEQ ID NO: 737133 - DNA, 100 bp, Homo sapiens
gtccattccaaagacaactataaacgagtgactgggacaagggccagctctcaatgttgcaagaaaaaatagaccatttggagcgtttgctagctgagaa

SEQ ID NO: 737134 - DNA, 49 bp, Homo sapiens
cgccatatccctgcattgagactggagatgaagactggcccatttgcag

SEQ ID NO: 737135 - DNA, 75 bp, Homo sapiens
ggcctactcgcccgccaccctgcgctgccgccgctctgaggagttaaagggagtgcatccgccccaacccttttc

SEQ ID NO: 737136 - DNA, 82 bp, Homo sapiens
ctccgccgccccgaaactttcaccgcgagcgggtgtcgtgaaaactacccctaaaagccaaaatgggaaaggaaaagactca

SEQ ID NO: 737137 - DNA, 95 bp, Homo sapiens
tcgccgctgctgggagatgggcctactcgcccgccaccctgcgctgccgccgctctgaggagttaaagataccccatgtttccccatcactcgag

SEQ ID NO: 737138 - DNA, 98 bp, Homo sapiens
agaccactataccctgattgatcaatctccagtagcagccatcttgccaaaagaagaggaacagctgccccctgggttcccttccatcgacatggggc

SEQ ID NO: 737139 - DNA, 95 bp, Homo sapiens
tctcaactaactacaattgtattggcagctagagagattccacagtggtgtgtggagtacatgcgatcattaccaggacccaagagaggagttgc

SEQ ID NO: 737140 - DNA, 100 bp, Homo sapiens
gcacgagtgcgggcagcagcagccccggggcccggagagttttttgtagcatcagatccaacagttaaaacagatcgactgtggcacgacaagtatactt

SEQ ID NO: 737141 - DNA, 100 bp, Homo sapiens
gagatatagttggcaacctcactgagttagaatcagagaattatatccagatcgagagacagaagattctgaaagggttcaatgaaatgagagtcatctt

SEQ ID NO: 737142 - DNA, 51 bp, Homo sapiens
ggatccaaaaacttaatagctttgtagagacgaggtttcaccgtgttagcc

SEQ ID NO: 737143 - DNA, 100 bp, Homo sapiens
cgaggccggacgcacctctgtttgggggtcctcagataaagccaccaatccttccaaccgccaggaggactgggaatacataattggcttctgtgatcag

SEQ ID NO: 737144 - DNA, 99 bp, Homo sapiens
tggcatatcagatatgcaagtctgtgaattatgatgttgaatttgaagtatcatcggaccgacggactgggaaacccattgctgttaaactggtgaaga

SEQ ID NO: 737145 - DNA, 104 bp, Homo sapiens
gcagcaggcgctgcgcctcgaggtgcgcgccggcccggactcggcgggcatcgccctctacagccgaggccactgtctgcagctcccgtgaagatgtccactcc

SEQ ID NO: 737146 - DNA, 101 bp, Homo sapiens
gatggccgtggccgtggggagaccgtctccctttggagtgaatcaacctggaccttatatcatgtatacaactgtagatgcaaatgggtatctgaaaaatg

SEQ ID NO: 737147 - DNA, 100 bp, Homo sapiens
cgggaagaagcctggtctccggggccgctggattctgaggaccagcagatggccagtcacgagaacccaggagcccaggtgcggcccggagcccactgaa

SEQ ID NO: 737148 - DNA, 82 bp, Homo sapiens
cttaagatccacaaaattgctgaaagaaaaagtactaccttattgaaaggatacaatgtctctttgctatatgaccttgaaa

SEQ ID NO: 737149 - DNA, 88 bp, Homo sapiens
gccggctatggccgtgccctggggctgagccctcagggactttgaacatgtcggggatcgccctcagcagactcgcccaggagaggaa

SEQ ID NO: 737150 - DNA, 50 bp, Homo sapiens
cgatgatgaggaggactacgacctggtgaaaggtgtagcagtcactcggc

SEQ ID NO: 737151 - DNA, 75 bp, Homo sapiens
cggcgccgtccgtgcccgcgggacctgacagccgggtcagagggctcttccgtgggcggcggcttcgcgggcttg

SEQ ID NO: 737152 - DNA, 75 bp, Homo sapiens
tatgctgtctgccatcaccaatgtggttcaaaacacaggcaacatgcaggttctggtgacttacggtggcgatcc

SEQ ID NO: 737153 - DNA, 83 bp, Homo sapiens
cttattgctacagatgtagcctcccgtgggctagattctgcctgatcaatgcaggagtcctgtacctctacttcagcaattac

SEQ ID NO: 737154 - DNA, 96 bp, Homo sapiens
cagccccaggctcctgtgctggtactgcacatggtgaggaatgccaaactagttggccagtctattattgcttatctccagaagaagggctatcct

SEQ ID NO: 737155 - DNA, 100 bp, Homo sapiens
caccaccttggtggagaacaagaaagctcagctggtggtgattgcacacgacgtggatcccatcgagggtatttgtggtgcagcagattcccaacagtaa

SEQ ID NO: 737156 - DNA, 100 bp, Homo sapiens
aagactttgagggactgttgtgaaggcatgattggttttgaaatacagcccacctgaggatattgaccataaggactcatatctcattacaagaagcatc

SEQ ID NO: 737157 - DNA, 108 bp, Homo sapiens
tgtgtcaaaagagcttctctccagagtagaaagggccaagaccagcttcaagtctccatggtaccagaaaacaacaacctcacagcacctgaacctcaagaagaggta

SEQ ID NO: 737158 - DNA, 73 bp, Homo sapiens
aagcttctagctgtgcaagaactgcttgacagagaggccttggaaaagaaactgctggagcgaacccgtgcca

SEQ ID NO: 737159 - DNA, 100 bp, Homo sapiens
cagcaccaccggcaaggaggacacgggcacctttgacaccgtcctgtgggccataggctcatcttggcagccaacagggatgaattctacagccgaccct

SEQ ID NO: 737160 - DNA, 100 bp, Homo sapiens
ggcagccacttcaaaatcagacctctgtggcagcattttttccagaacacaaaaggaagctgcacaagccttaatttatgctgagatggcaggatcaagc

SEQ ID NO: 737161 - DNA, 98 bp, Homo sapiens
tgagttttctggaggcattcctaagagaccatcttctcctgtgatatccaactctgtcagattcagggagttttgtatcttctcgagcccggcgagaa

SEQ ID NO: 737162 - DNA, 83 bp, Homo sapiens
gccaccgccatctaacgctgcgccctggaggcccggcgcgcggatggtgccgatggtgtggacggaaagcaagctcgcagaac

SEQ ID NO: 737163 - DNA, 50 bp, Homo sapiens
ctttttcagaaactgccttctaaagtggctgaagtgcagtggcgtgatct

SEQ ID NO: 737164 - DNA, 97 bp, Homo sapiens
catacacttacatctctagataacagtctgcactttcacccgtttcagggacaaactctgcctgggcgagtccttttcctgcgttatgtcgttcaga

SEQ ID NO: 737165 - DNA, 100 bp, Homo sapiens
gcctttcacctcccacaatgattctgaggcctccccagacatgtggaatttggttatgatattcctctcaaccctttaaatctgatccctttctatgctg

SEQ ID NO: 737166 - DNA, 75 bp, Homo sapiens
gaggaagtctgcatccacattgcacataaagttgctgctacaggagctgagagaccctaccctcactttccgtct

SEQ ID NO: 737167 - DNA, 100 bp, Homo sapiens
gggagtgttcgttgtgccagcgactaaaaagaggtcagggaagtcaaagatgcatccctgagttcttcctagcaggcaagcagccgtgcaccaatgacat

SEQ ID NO: 737168 - DNA, 82 bp, Homo sapiens
aggaacccgcgccgcgagggctccttccctcagaatggcgccattttgcggtacggaagctacacagcaacacgtataggag

SEQ ID NO: 737169 - DNA, 83 bp, Homo sapiens
gaagcagccgatccagcctgcggagcctgtggggcaggtgttcagtgtgaggtggagctgatagagtccatagaggacctgag

SEQ ID NO: 737170 - DNA, 98 bp, Homo sapiens
gaggagctggtggagattcgccctgctcctgcaaccagcacgcccgacgctgccggttcaactctgagctgttcagactgtcgggcggccggagtggg

SEQ ID NO: 737171 - DNA, 101 bp, Homo sapiens
gctggcagatattatcatagttgctgcagggtcttgatccgtcgcccaggcgggagttgcagtagcatgatcaggactcactgcagcctctatctcccagg

SEQ ID NO: 737172 - DNA, 147 bp, Homo sapiens
gaaagtccttgctgggaaatcgaagattgaggactactttccagaatttgctcgctacactactcctgaggatgttcgtctaatgattgaaaatccttacgagacccgctctgacagcttctactttgttgacaacaagctgataat

SEQ ID NO: 737173 - DNA, 50 bp, Homo sapiens
accacagaagccctccgagcccagctacttccatatttgcactaaaggag

SEQ ID NO: 737174 - DNA, 83 bp, Homo sapiens
cggcgtctctggccggccttggtgcggcgagccgagcgaggcagctctgagccgcgcggtgacttaagagattaaaattaatt

SEQ ID NO: 737175 - DNA, 80 bp, Homo sapiens
gctgcccgcgagacgaggagcgggcgcccagggcttatttcaaaacctttgtccctcagttccaggaggcagcatttgcc

SEQ ID NO: 737176 - DNA, 82 bp, Homo sapiens
ggctcatcgagatcctgtctgagaaggctggcatcattcaggacacctggcacaaggccacactggtgtgtctcataagtga

SEQ ID NO: 737177 - DNA, 100 bp, Homo sapiens
aggactgcagaaaatcaacctatcctccttcaggaccaacaaactgggagtgatttttccatgtttgaagctttgcgagatactatttattctgaagtag

SEQ ID NO: 737178 - DNA, 73 bp, Homo sapiens
aaatgaccataaatcagtatgaacctgggcaagaggctgttggaagctgcttgggagaagtgggtcctataga

SEQ ID NO: 737179 - DNA, 96 bp, Homo sapiens
tgtgccccagctttaccgcaaccaccgccaccagtccacggagggcatgagacaatgcagatcttcgtgaagactctgactggtaagaccatcacc

SEQ ID NO: 737180 - DNA, 100 bp, Homo sapiens
agggacatcctgccggactatgagctcaagctcatccaccacgacagcaagattgggggcaccaacttcgtggcacctccaacagcagcagtaccagcca

SEQ ID NO: 737181 - DNA, 75 bp, Homo sapiens
gttgcttgcttgcctgtgcgcgcgtgcgcggacatggcctcaaacgattgacgagatgcctgaggctgccgtgaa

SEQ ID NO: 737182 - DNA, 100 bp, Homo sapiens
ggttagtgtgctctgagggagggtccgagccagccgctgttttgccggaggagcccctcaggccgaatatgcactttctggttggaatttgaataacatg

SEQ ID NO: 737183 - DNA, 99 bp, Homo sapiens
tcaattcttcgacaggaaaaaaatttgctggatattgatgcgccagtcactgactctggaaaatcccaagtatgaactgatcatcgaggctcaagatat

SEQ ID NO: 737184 - DNA, 75 bp, Homo sapiens
cagaagtgagctggaaggtcttggagcgaagagctcggaccaagcgctcaggtatacactgaatatcctcgaaga

SEQ ID NO: 737185 - DNA, 96 bp, Homo sapiens
aggacaaacagtggtggtggagacgggccccacatcagctccaaggtcagggtgattaagctgtcaggtggggacttgattagagaccaaggattt

SEQ ID NO: 737186 - DNA, 102 bp, Homo sapiens
ggctcagtacatattcaccttgaagaggaagacggggcggaagaccaagatcatcgagatgtgtaaacaggaacatcgataagtagtgtaaaaacttgcaca

SEQ ID NO: 737187 - DNA, 83 bp, Homo sapiens
gtgtacaaatacccctttgaattaattatggctaaatgcactcggtgatggaaagagagccactattctgaagaacacttggc

SEQ ID NO: 737188 - DNA, 74 bp, Homo sapiens
aagaacgcgctcctccgcctgctgcccgggctgggaaagcggagggaaaggccacttccaccactgagctgccc

SEQ ID NO: 737189 - DNA, 99 bp, Homo sapiens
gaatgctgctgcagagctcggaggggcgctgtgtgtacatcacccccatggaggccctggcagagcaggatcgctacggttcctactgatccgagctct

SEQ ID NO: 737190 - DNA, 100 bp, Homo sapiens
atcctaccatgtcagccttcccagtagctggaactacaggatcagtgaggaggaggacctgcacctggggacatcgttttctgcagaaaccaaccgaagg

SEQ ID NO: 737191 - DNA, 50 bp, Homo sapiens
aggattcgttacagccagagattggtgaaatgacaatggatgctctgttg

SEQ ID NO: 737192 - DNA, 100 bp, Homo sapiens
aggattccaagtaactcttatttgccttcctaatgatggtgatgaaaaatatgagaagaccataattaaaagtggagatcagacgttttacaaattcatg

SEQ ID NO: 737193 - DNA, 100 bp, Homo sapiens
aaagatagttctcagaaagacctgctgaattttactggcacaattcctgtgatgtatcaggaccattactgggacttccacccccaccacgtgcacagcg

SEQ ID NO: 737194 - DNA, 90 bp, Homo sapiens
attccaccacctccgccagttaagaggaaaaagctacctgcttcagcctagatcctgccatgaagcggactgctgctccctggctcccac

SEQ ID NO: 737195 - DNA, 100 bp, Homo sapiens
agcaactcaactaatccagaaaattatcaacattctcacagacaagcatggagcctggggaaattctgcagtgaggctcatgctgaagattcggttatgg

SEQ ID NO: 737196 - DNA, 100 bp, Homo sapiens
gatgggcaccgcggatctggggccgtcctcaggtgcagaggccaagaccgttttgcccaagaaggagaaaatgaagctgaggcgtgagcaatggttgcag

SEQ ID NO: 737197 - DNA, 95 bp, Homo sapiens
cctcctttagtagcagcgtggtacagctgtacctcactatgggattcattacagctccctcagaggcccctgatgtctggagaattgtgagcttg

SEQ ID NO: 737198 - DNA, 75 bp, Homo sapiens
gggccggccagaagcgggcggcgcgggggagatgactgctgcacttagagctgtgggcaacattgttactggaac

SEQ ID NO: 737199 - DNA, 51 bp, Homo sapiens
gtcctcgcttgcagttcagcgaccacgttgtatcacggactgattcaccga

SEQ ID NO: 737200 - DNA, 85 bp, Homo sapiens
gagcgacaagccgctggcagccgcggatctcaccgccgctcaggatgccgacaaaaggatcaaggtggcgaagcccgtggtggag

SEQ ID NO: 737201 - DNA, 96 bp, Homo sapiens
gtccgaacaattggaggagacctggtggaaaaggttgatctcatagacaagtttgtacatccaaatggagtacgacaaggagttctcccctcgtca

SEQ ID NO: 737202 - DNA, 100 bp, Homo sapiens
ccatcagtatttcttgaataccaggaccgtatccttgatgagcttgacaaagacgatagtacccatgagtctctgtctcaagaatcagagtcggaagaag

SEQ ID NO: 737203 - DNA, 74 bp, Homo sapiens
atgagtatgcggaggacagctctgatgaggagacttcccaagtaagaagcggaagaggagccgctggaaccaag

SEQ ID NO: 737204 - DNA, 100 bp, Homo sapiens
gttggatggggtaggaaggagacacagttccatggatcagaaggcagacaagcagcttttcagatgcaaatgatggcgggtgaaaaagttgagaagccag

SEQ ID NO: 737205 - DNA, 75 bp, Homo sapiens
aggtgcttttatattcatctcaaaaacaaaattctgaactcaggacttggcaaggattagaaagttatgtggcag

SEQ ID NO: 737206 - DNA, 100 bp, Homo sapiens
atcctttgctgctctgtctgccggttcttgagccaaaccaaacaggaagcttacttttctctacctagccaatgatgtcatacagaacagcaagaggaag

SEQ ID NO: 737207 - DNA, 100 bp, Homo sapiens
tcagaccgtaccttgcaacaaggaaccaacgtccaagaggcccagaagatactcaacaacagcggactccccattacttcagccattgacctggaggatg

SEQ ID NO: 737208 - DNA, 101 bp, Homo sapiens
tgaagcgactgagtccgcgatggaggtctcggcgcggaagatggccggcggcgtggacggccccatcgggatcccgttccccgaccacagcagcgacatcc

SEQ ID NO: 737209 - DNA, 100 bp, Homo sapiens
cagcatcttggctgaccttgagtgcagctccccctataagcctcggcctccacagaacccctgaacagtgcccaagtgttgtctctttgttgtcagagag

SEQ ID NO: 737210 - DNA, 75 bp, Homo sapiens
aaccaggcaatgctggatagataccgaattcttatcacaaaggggtggcactgaatcaacaagacaagcaactca

SEQ ID NO: 737211 - DNA, 100 bp, Homo sapiens
cccctatgtgctgacggaggtagacgaactttccatgactggatcacagggaaaaaccgaccgagctcaggaagcctaatccaggtggtaaccacagaag

SEQ ID NO: 737212 - DNA, 90 bp, Homo sapiens
gcaccatgatctgtggctgggataagagaggccctgatggccgccctgctcccccaatgaaaggccagcttcgaagaaaagctgaaaggg

SEQ ID NO: 737213 - DNA, 89 bp, Homo sapiens
caagaggagagtgaagaggaagaggttgatctttgctgggaaacagctggaagatggacgcaccctgtctgactacaacatccagaaag

SEQ ID NO: 737214 - DNA, 99 bp, Homo sapiens
aatcacccaacatgctggtgtacagaaagaatgaagaagaggtctttgcatggaataatgaagtaaaacagggactttcaagtagcatctttaccaaag

SEQ ID NO: 737215 - DNA, 100 bp, Homo sapiens
aaagaaatcagtccttcctttccgacttagtcctcgggaagaagtttcagactacaaggactctgtctactagtgacgatgtcgaagacagggaaaatga

SEQ ID NO: 737216 - DNA, 74 bp, Homo sapiens
tgcccgttccccacgtcaagctcaacgtgccgtgagcgatgtggagatgcaggaacactatgatgagttttttg

SEQ ID NO: 737217 - DNA, 75 bp, Homo sapiens
ctaatagacctcctgatgctgtacttacagataccacctctcttaatcaggttgtatcagagtaagatggacggt

SEQ ID NO: 737218 - DNA, 75 bp, Homo sapiens
tggaaactctttgggaaagccactcgaaaagcactgccagtgaaagatgtagaagataaacctgaacaacaaacc

SEQ ID NO: 737219 - DNA, 100 bp, Homo sapiens
ctaatgccatcttcaaagcctttgctatgatcattgacaaactggaagaggtagacaagggcgtggtccccctggcagggacaaatggcgagactaccac

SEQ ID NO: 737220 - DNA, 95 bp, Homo sapiens
ccgtgtacgtgcctgtgcctaaagcatattttggtggtgaagctcgctgcgatgctgaggctggacggggagatgattatgatcccagagagctc

SEQ ID NO: 737221 - DNA, 83 bp, Homo sapiens
ctgggcttcatcgcttctccggaaacctccgactctcggcacctggcctccagctttcgccttatgccagcctggaccatctt

SEQ ID NO: 737222 - DNA, 90 bp, Homo sapiens
cccctcaccctgaggcagctggagcagcaggaagaaatactaagggtgccttttaggagaaataaagagatatattcgactttatgggag

SEQ ID NO: 737223 - DNA, 96 bp, Homo sapiens
accccgcacagccacaccaaaacattgatgatggcacctcagatcgcccctacagccatgctctggtggctggaattgaccgctacccccgcaaag

SEQ ID NO: 737224 - DNA, 99 bp, Homo sapiens
atggagccttgcatggactagcctacctacattctcatgcattgattcatagcttagcagtgtctgcaaaaacgaatcttttcctacaacctgttaact

SEQ ID NO: 737225 - DNA, 100 bp, Homo sapiens
tgccactcaacaattctagccaagaggtcacaaaggatctgcttgatatgattggttgcactccaggacttgcagacgaactccaagattggggcactcc

SEQ ID NO: 737226 - DNA, 89 bp, Homo sapiens
tggagcctcagttggaagcagccgatccagcctgcggagcctgtggggcaggacacattcagctaacgtattttagcaggtggagtgag

SEQ ID NO: 737227 - DNA, 85 bp, Homo sapiens
gcctgggggtcagcacggaggggactggagctggagagtgactgtagagcctcaggtaacagttgacaaatgggaacctttgttg

SEQ ID NO: 737228 - DNA, 83 bp, Homo sapiens
cgcgagcgtctgggcgggtggtagctgcagccgctccggcctccttgctgttcctgggatacgccacactcagtctggcctcg

SEQ ID NO: 737229 - DNA, 88 bp, Homo sapiens
agctcgggagtccaccatcgctctgcaagccgcaggtcatcatcagatttgaaatatttaaagtggatacaaaactatttcagcaatg

SEQ ID NO: 737230 - DNA, 100 bp, Homo sapiens
tagtgctgagacaggactgaaagagttcacctgcttccaggcgggcagggcgttgtattcatccctcgtcatgtctagtgcaaactggaaacattgggag

SEQ ID NO: 737231 - DNA, 49 bp, Homo sapiens
agtggaattttggagatattcaaaggggctggcaaggtttaattgctta

SEQ ID NO: 737232 - DNA, 75 bp, Homo sapiens
cctgcaccgccccctgggatccgcaggttccctacacggtctcctgggtcaagcacccttacccttctgaagaac

SEQ ID NO: 737233 - DNA, 100 bp, Homo sapiens
attaatggatgctccaggccataaggacttcattccaaatatgattacaggagcagcccaggtgatgcaggcccagtgtgtcaaaacagaaactgaattc

SEQ ID NO: 737234 - DNA, 50 bp, Homo sapiens
cacctcgagtcgtggtgcgtccagagaacttgaaggtgcacattcttgat

SEQ ID NO: 737235 - DNA, 50 bp, Homo sapiens
cggaaactccagcgtgtctccagccgtgaccagagtctcactgtcgccca

SEQ ID NO: 737236 - DNA, 98 bp, Homo sapiens
caccgccctggccatctaccatgtgatcatgaagagtgaagtgttgagagtcacccatgagctccaagccatgaaggacaagataaaagagaacagtg

SEQ ID NO: 737237 - DNA, 75 bp, Homo sapiens
ttcctagctcagaaagcaacgttttgagccacaactgtcacaactccaggtcaaaatgcagatcttcgtgaaaac

SEQ ID NO: 737238 - DNA, 98 bp, Homo sapiens
ctggacagtcaacacgggcaccatgaagcacttcctgaggctaaagaattacctccaaagccattgtcaagaccacagcagtcatctgcaccagtcca

SEQ ID NO: 737239 - DNA, 82 bp, Homo sapiens
cacactgaagctgggaggcaaaggctacaagctgtccccagaggactacacgctcaaggtcctgaacgaggctgtgggggcc

SEQ ID NO: 737240 - DNA, 82 bp, Homo sapiens
ccctgaggagtccccgctgcttggagctctttgttcaatgcctagccacctattcctacagacacggcagtggaaaggaaaa

SEQ ID NO: 737241 - DNA, 50 bp, Homo sapiens
ctgtggtctctgcacctcctttctgtagtaaacctattgatggcaatttt

SEQ ID NO: 737242 - DNA, 80 bp, Homo sapiens
tcgccagcccgtgccgcgagcgcggcctgcaggaggtgaagccaaaaaccttccctcttacccggggccgagcaagatga

SEQ ID NO: 737243 - DNA, 100 bp, Homo sapiens
ctctgaagatgattcagccttctgcatctggatctcttgttggaagagaaaatgagaatttacatagtacatgacgaagttaaggataaagcttttgaac

SEQ ID NO: 737244 - DNA, 87 bp, Homo sapiens
cagagagcgccctgagagaacagggtggccgcttggtccaggtaaatcaacagactgggaagatgatggttggggagcatgggaaga

SEQ ID NO: 737245 - DNA, 99 bp, Homo sapiens
aatgtgtgatcaatgctgtgtttgccaagatctttaaacacagtgggaatatcacttttgatgagattgtcaacattgctcgacagatgcggcaccgat

SEQ ID NO: 737246 - DNA, 82 bp, Homo sapiens
gagacgatcattctgcaagcaggcaacctgaatacaggaactgtggctgcaccatctgtcttcatcttcccgccatctgatg

SEQ ID NO: 737247 - DNA, 90 bp, Homo sapiens
ctgctatggtgctgagtttcctggtagagccggccgagctgaggcggtcgcggccatgaaggaccgcagctgaatgcacagctagaaggt

SEQ ID NO: 737248 - DNA, 76 bp, Homo sapiens
accagatgtacttgtgcttcctgctggccgtgctgctgcaggtggacttgaggcgccagcagatttcccaggctgt

SEQ ID NO: 737249 - DNA, 117 bp, Homo sapiens
tgcacttgcccatctgcgtgctccccctctcgcaaggggtttctgcagagggggctactgaacaggaggagcatattatttaatatctagaagtctagggccagaatttggtggtgc

SEQ ID NO: 737250 - DNA, 100 bp, Homo sapiens
gtgaaactgccagcatactcatgcatgcaacagcacattctctggtgcttgtggatgaattagcaatatgctgaggcttggaaaatcagaaccctggacc

SEQ ID NO: 737251 - DNA, 85 bp, Homo sapiens
atcaggaagtggagaagtcaagaggacactgaagatcacagactgtgtggatgaggtcaccattgtcaacattttgaccaaccgc

SEQ ID NO: 737252 - DNA, 89 bp, Homo sapiens
ccagtgcttctgtctcgactgcactttgagaagacaatgcagatcttcgtgaagactctgactggtaagaccatcaccctcgaggttga

SEQ ID NO: 737253 - DNA, 100 bp, Homo sapiens
tgcgtgtggctgtacaggccatcgcagtgtgtaaatatgttgctgtggagctgaagtcagcctttgaggaaaccggcaagaccaaggaggtgattggcac

SEQ ID NO: 737254 - DNA, 101 bp, Homo sapiens
aacagactagccactttgcattgactggaaacaatggcatttacagaaagagtcaacagcagtggcaacagctgccttcctatttcaaggaaagacgccaa

SEQ ID NO: 737255 - DNA, 82 bp, Homo sapiens
ctgcgttgccaacgtcacatcccaaaatagtggcacccctagctgttcctggaaggacctgaagaccatgaccaatttctac

SEQ ID NO: 737256 - DNA, 50 bp, Homo sapiens
ggaagccggaatacaagaacgggctggagaccagtatgatgtctgtgcca

SEQ ID NO: 737257 - DNA, 90 bp, Homo sapiens
gagtgccgccagcatgtctgacaaactgccctacaaagtcgggtctggaacagaatctgacagtgatgaatcagtaccagagcttgaaga

SEQ ID NO: 737258 - DNA, 100 bp, Homo sapiens
gtgtcggttctatgactgatgaacatgggcatcagaggccagtagctttcttggcctacagacagcaacagaagctcctgaggagccctccacccagtat

SEQ ID NO: 737259 - DNA, 100 bp, Homo sapiens
cctcatctcatcttacaggagcagactaggtcatggaaaatggaagatttgcaaaatacaaatattttacccatgtcatgatcaataagacagatatgct

SEQ ID NO: 737260 - DNA, 100 bp, Homo sapiens
caaaagggaaattcctccagggctgagtcacagggaagaaagcgatttcctccgcctcttccaaagcgaggaagcctttgacaagttgcctcagtctacg

SEQ ID NO: 737261 - DNA, 74 bp, Homo sapiens
tctgcgtccatgtgaagcatcctcataagcctcctgctcttcatggatgaagcagacgccttccttcggaagcg

SEQ ID NO: 737262 - DNA, 98 bp, Homo sapiens
cagccgtctgtggagggtgccgcggccctgcgcagctgccccatgtgccagaaggagttcgcccccagagcccctggccacaggcccaccaccaaccc

SEQ ID NO: 737263 - DNA, 90 bp, Homo sapiens
gcccggtactgcactgtgcgctgtctggggacccaccaggagaccaggtatggcgttgacggtggatgtggccgggccagcgccctgggg

SEQ ID NO: 737264 - DNA, 49 bp, Homo sapiens
ctacccgggatacggaggaggggaaccacgtgaatgttgagggggcgac

SEQ ID NO: 737265 - DNA, 75 bp, Homo sapiens
ccgagagcgcgaatatcgtcatcgttagaagatcagaggttggatttatgcaaacctgggccaaaggacagttag

SEQ ID NO: 737266 - DNA, 82 bp, Homo sapiens
ctaaacaggagcacctgctggcgctaaaagaccaagatcactccatggatgaaatgacagctgtggtgaaaattgaaaaagg

SEQ ID NO: 737267 - DNA, 80 bp, Homo sapiens
caccttcctgcgtaatggaggacactttgtgatttccattaaggtgcaggtgatggtcctaccagtgtgtctgttgaggt

SEQ ID NO: 737268 - DNA, 49 bp, Homo sapiens
ttgcacatgagattggtcacaagtgtttctgcccagttttccttcatag

SEQ ID NO: 737269 - DNA, 100 bp, Homo sapiens
cgcccctggaggctagaagctccggcgccgagagtgggcatggcgacttggtctcagccggactcggctatccgtggtcctgaaccagttatgtgtgttg

SEQ ID NO: 737270 - DNA, 90 bp, Homo sapiens
gaatttgatgttgccaacaacggctcttctcaagcttctccagggaaagtgaccgaggcagtgaaagaggccattgacgcagggtaccgg

SEQ ID NO: 737271 - DNA, 90 bp, Homo sapiens
ctggggtcccttttgcctcagatactattttgaaggaaagaccacagcaagattctttcattcgtctcctcctagcctgggggaccaggc

SEQ ID NO: 737272 - DNA, 51 bp, Homo sapiens
gtggaagcgctgctcacagtcagtgtcgaagacccttttgaggacttcttt

SEQ ID NO: 737273 - DNA, 80 bp, Homo sapiens
aactgagagttcccaattaataatgaagcagccaatgttttcagttgcaccaagcttagccaccaatgcatcagcagccg

SEQ ID NO: 737274 - DNA, 90 bp, Homo sapiens
gccgctgccgctgccgcacctccgtagctgactcggagactccatcctctgccaatggcccttcccgggagggctctaggctgccgcctg

SEQ ID NO: 737275 - DNA, 100 bp, Homo sapiens
ctcgaaagggaccgaaatggagagcaaagcaagctctattgccaagattggctcagatcctttaaaactggtacgtgatgctatggaggaaaccacggac

SEQ ID NO: 737276 - DNA, 89 bp, Homo sapiens
cccagcatgtcgggcccagacgtcgagacgccgtccgccatccagatctgccggaaaacacgtggtgcaagcacagaagctggcggacg

SEQ ID NO: 737277 - DNA, 75 bp, Homo sapiens
ctttctcgctgatcgcctaacttctactgacgaagcttggaagttgcagaaggaattacatgaatgacagtcttc

SEQ ID NO: 737278 - DNA, 75 bp, Homo sapiens
tacaagcctccatcaaatgctcaagatttaccccgaaaccaaaaggaagtgtttggattgtgagctatttcagaa

SEQ ID NO: 737279 - DNA, 97 bp, Homo sapiens
agcggtcaagagcgaggtcagcggggctgcgagcactatgacagaggatgtctcctaaagaaggacagaataacgggctcccagattcacaagcccc

SEQ ID NO: 737280 - DNA, 97 bp, Homo sapiens
tcgactacatccaccacatgggatatgtacacagtgacgacagtatgggctatcaatatccattcactctacgagttgtgcagaaagatgggaactc

SEQ ID NO: 737281 - DNA, 83 bp, Homo sapiens
caccgagacggcgatccgggcgctcgagacttaccagagccacaaggcacttccgttccggcgcccctccggtcatcaacccg

SEQ ID NO: 737282 - DNA, 75 bp, Homo sapiens
aagatggataaaaagtcctttgaaatggtgctggatgaaattagaaaggttcatgtgaaaatggcggatgaggct

SEQ ID NO: 737283 - DNA, 75 bp, Homo sapiens
ccgggctgaagccaggagactgggtgattccagcaaatgctggtttagcaaagccttctagacaagctcagtgga

SEQ ID NO: 737284 - DNA, 73 bp, Homo sapiens
cagtggatgtcgagaacggtgcttctatggcaggatatggttatatgtcaccacacccatctccattaggagc

SEQ ID NO: 737285 - DNA, 75 bp, Homo sapiens
ctgaagagcgcgccgccctctcgtcccactttccagctgccactgcagagccccgccatggaagacacgccgttg

SEQ ID NO: 737286 - DNA, 83 bp, Homo sapiens
ggatcatgtctgcgagccaggattcccggttggaagtactccatgacacacactcggagaaagtcccttcccatgctgagttc

SEQ ID NO: 737287 - DNA, 100 bp, Homo sapiens
cagccagcccctgaaactggacacgagtttcaagatcctggaccgtgtcaccatccaggaactcacagggcgcaaaccagaagaagagggtgtggaagat

SEQ ID NO: 737288 - DNA, 102 bp, Homo sapiens
gcttccccagccacatggaactgaactgtggaaggtgccatggacttgatcttgatcaattccctacctcttgtatctgatgctgaaacatctctcacctgc

SEQ ID NO: 737289 - DNA, 74 bp, Homo sapiens
ctttctggcctggaggctatccagcgaaagatgaatgggagggctgattttcgagagccgaatgcagaggttcc

SEQ ID NO: 737290 - DNA, 75 bp, Homo sapiens
gttagctttctggattatatcaatgactgcaagcacctattatgccattgctccagtcctcctggatgccctgac

SEQ ID NO: 737291 - DNA, 82 bp, Homo sapiens
ttcggccaagggaccaaggtggaaatcaaacatcacaagagacccctggagatgggaagcctccagctttaccacccaaaca

SEQ ID NO: 737292 - DNA, 96 bp, Homo sapiens
gacgtcatcatgctgaccaccaatcagatccgtaaggacctgaaggagaagaaggagaaggtggaggagaaggcaagccggaaagagcgaaagaaa

SEQ ID NO: 737293 - DNA, 106 bp, Homo sapiens
gatggcggacggcgtggaccacatagacatttacgcggatgtcggcgaagagttcaaccagctcaccatggatgatgatatcgccgcgctcgtcgtcgacaacggc

SEQ ID NO: 737294 - DNA, 75 bp, Homo sapiens
gccttttacagttggggacggcggaaagcaaggatgctttaccaatggcgatcagtgggtgaccgcggctgcgag

SEQ ID NO: 737295 - DNA, 96 bp, Homo sapiens
ctcctcggcttgcatttgtttctgctgaccgcgggccctgccctgggctggaacgaccctggtcccctcttgctgttggctgcacatcaggaaggc

SEQ ID NO: 737296 - DNA, 90 bp, Homo sapiens
tagttatgagctgcttgtagaatatgacttaccagcactcctggaccaagagctctttgatgagggccccaaggctgttgcagctcctcg

SEQ ID NO: 737297 - DNA, 98 bp, Homo sapiens
ccgcccggggctgctgcttcctggcctctggctgctgctgctggcccggccggcctcgtgcgccccaggtgctggtgaatctggtaaaagtacaattg

SEQ ID NO: 737298 - DNA, 100 bp, Homo sapiens
cagctgctgacaaaaggcatggtgatccttcgggacaagattcgcttctatgaggggtttccaggcctgaggtgcccgccctggccccaggagaatgaac

SEQ ID NO: 737299 - DNA, 75 bp, Homo sapiens
cgagctgagatccatctgcaccacggtgctggatgtgtattcatacaagcaagtaggagtgtctttgaatagaat

SEQ ID NO: 737300 - DNA, 73 bp, Homo sapiens
aagagaagtttctggtcactccccaggattatgcgcgtatttcagacaacttttaagaggtgcagaatcacca

SEQ ID NO: 737301 - DNA, 120 bp, Homo sapiens
aacctctatcggatctgctatagcccctggggccaggaattctccatctgcaactactggcatgtgcagtgtgccctgaaccgccctgccttctttgctgagaggctctactatgctatg

SEQ ID NO: 737302 - DNA, 96 bp, Homo sapiens
gtgatgggcagcccccaccacccgcccaggccagccccagcagcaacagcagcacagacaccatccagcacatgagagacagcaagcacatcgtcg

SEQ ID NO: 737303 - DNA, 100 bp, Homo sapiens
agcgcttccgcaccatcacctccacgatgcttctatggcatggttccaggatgagtaactgggtgggaatcttgagccatgggcttcgaattgccccacc

SEQ ID NO: 737304 - DNA, 100 bp, Homo sapiens
aatatgtgccgccagtgtttccgtcagtacgcgaaggatatcggtttcattaagaaccacaccttcatcaagcggtccgaggtggaagaagtggattttg

SEQ ID NO: 737305 - DNA, 80 bp, Homo sapiens
agtgaaaggaaaagttgctggagcactcctgagagccatcttcaaagatgcagagaggtgttcataaagagcaatatcag

SEQ ID NO: 737306 - DNA, 80 bp, Homo sapiens
agatgatgatgatgaagatgatgaggaggaggaagaagaggaggaggaagagcttttgcaggagccactgtccatgactt

SEQ ID NO: 737307 - DNA, 75 bp, Homo sapiens
agccagaggacccagctaagccacgttcaacttcctgacctgtcagtgctgtccccggcataggtccatctctgc

SEQ ID NO: 737308 - DNA, 100 bp, Homo sapiens
tggacaaccaggataacccttcttacattgatattgatcagttgaagctcattttaagactcgttggaaccccaggggctgagcttttgaagaaaatctc

SEQ ID NO: 737309 - DNA, 51 bp, Homo sapiens
tgaagccacacagtgtccagatacgaggattggagctggagtgagccttcc

SEQ ID NO: 737310 - DNA, 90 bp, Homo sapiens
tcgtcttccggacagactatggtcagggtccacatatagcctcagttacattagctgcttatgaatgcaattcagttaattttcccgaac

SEQ ID NO: 737311 - DNA, 90 bp, Homo sapiens
aagagaagagggtggctaatgattaaggtactccaaagattcaggtttactcacgtcatccagcagagaatggaaagtcaaatttcctga

SEQ ID NO: 737312 - DNA, 136 bp, Homo sapiens
ctttgaaatctgataagaaagtacggaccataataatcaggagtgaagtcccagggatattctgtgctggtgctggagaatctggtaaaagcaccattgtgaagcagatgaggatcctgcatgttaatgggtttaa

SEQ ID NO: 737313 - DNA, 98 bp, Homo sapiens
aggtgatgctggagaactacaggaacgtggtctccctgggtcagaatggcggcagtggagcatcgtcattcttcaggattgccctactggccctacct

SEQ ID NO: 737314 - DNA, 75 bp, Homo sapiens
ctgaggcgtttgttgcagctacctgcacttctagatgtcttcgccttgatcgtgttctcctgcatctatggtgag

SEQ ID NO: 737315 - DNA, 74 bp, Homo sapiens
cggagtacgtcgttcccgctgcgctaggggaagcgggcagctgaaccttagccggccgatcgaggagcagggcc

SEQ ID NO: 737316 - DNA, 75 bp, Homo sapiens
gcctcttcctgaagcatgtggagtatgaggtttccagccagggtatttctcaagctgccagatacgtttaccaac

SEQ ID NO: 737317 - DNA, 98 bp, Homo sapiens
caacatcacctacgccagtcgcaagcggcggaagccggtgcagaaaacgtgtgttgaggctcctggaacacggggaggagtacgtattcaccctgcct

SEQ ID NO: 737318 - DNA, 101 bp, Homo sapiens
tccccgcgccgggcctcaggctccttcctactgtccgagggccaccaggccgccgggggcctgctgcgcccggtcacaccgaggagaagactcagtgggaa

SEQ ID NO: 737319 - DNA, 128 bp, Homo sapiens
gtttctacactgtcaccgagccccagcgacacccgaggggctacacagtatataaggtcaccgcccgggatttttttcccaggaagccatcccgtcagaggggttcaagtgatgaaagttggcaaact

SEQ ID NO: 737320 - DNA, 75 bp, Homo sapiens
tgctgattcggcgcgatttgaggagctgctgctgcaggcattgatctggagaacattgtgtactacaaggacgac

SEQ ID NO: 737321 - DNA, 50 bp, Homo sapiens
gtcgacttcccatcctgagttgacatatctgaagagatggattaagaatg

SEQ ID NO: 737322 - DNA, 97 bp, Homo sapiens
gtgtcagtttggggcatctccgcggtccggcccggggccccgggatctcggctgtccttcctcccggccatttcataattctgaatcatgtctgata

SEQ ID NO: 737323 - DNA, 76 bp, Homo sapiens
gcaaaatgggttctggctggagtggctctgcttctagaagcgtaagcatccgcacttccactaatagccaagtaga

SEQ ID NO: 737324 - DNA, 86 bp, Homo sapiens
ttccttcgcagcttttagaccaaaatatgaaagacttacaggcctcgctacaaggtatgcttcagaagtgtccttctgttgatgac

SEQ ID NO: 737325 - DNA, 100 bp, Homo sapiens
ggtaccaccttatccacagccacagcggcttatttcaaaacctttgtccctcagttccaggaggcagcatttgccaatggaaagctctaggaaacaccag

SEQ ID NO: 737326 - DNA, 89 bp, Homo sapiens
tgctgcttaaggagatacatatccagcctcatcttgcatctcttgcaaatgtgaatcccgatggagcggcccgaggaaggcaagcagtc

SEQ ID NO: 737327 - DNA, 76 bp, Homo sapiens
tgaatagcaatcacagagactcggagagcatcactgatgtgttcagagcaacattgttttgttgacacaagcattt

SEQ ID NO: 737328 - DNA, 101 bp, Homo sapiens
gaacgaattcatcctttggaaactgaacaggcaggattagaatcggatctttatgcaagtatttaagtctccacacaagtgactgggtaagctcttgccgt

SEQ ID NO: 737329 - DNA, 88 bp, Homo sapiens
catcgactacaaacggaacttgccgcgtcgaggactgtcggcaatggctgccatccggaagaaactggtgattgttggtgatggagcc

SEQ ID NO: 737330 - DNA, 82 bp, Homo sapiens
tcatcccctggatgggggaccacaagatcctcatcgacagggagaggctgtcgatgctgaggcacgagagaatttgctcctg

SEQ ID NO: 737331 - DNA, 98 bp, Homo sapiens
gagcccctacttcaagtactccgtcatgatcaacaaggccacgccctacaactacccagctgacagcagatcccaggtacagagggcacgctatgagg

SEQ ID NO: 737332 - DNA, 88 bp, Homo sapiens
ccacacgggcgagaagccctacgagtgcaacatctgcaaggtccgcttcaccagagacaagaggagcagcagcggcaccgcccctcac

SEQ ID NO: 737333 - DNA, 80 bp, Homo sapiens
caaggcgaatatttaacttatatctgcctgtcagaaatggatgaaaagaggctgctggatccagggttgaaggttcataa

SEQ ID NO: 737334 - DNA, 100 bp, Homo sapiens
aacaagatggaagcaggtttaaaattttacataagaagttacctttttcaggtgttggatcccagaacaagaatgattttattcaagatgttgactagag

SEQ ID NO: 737335 - DNA, 112 bp, Homo sapiens
ataaatgctacaaatgtgtggtaaagcagggacataccttatttgttcctacagttatctggaagtattttggatgtgtatagcggtgaacaaggaatttcaccaattaaca

SEQ ID NO: 737336 - DNA, 100 bp, Homo sapiens
cgcggatggccgtaaccccgaaggaaatgaagtgcccaccgcgtgccccgattggagaggggaccttctgcaggttgtgcaagaggcctttgaaaaagag

SEQ ID NO: 737337 - DNA, 99 bp, Homo sapiens
tgatgtcacccaatggatccattcctcccattcatgtgcctccaggttatatctcacagttgtgttgcttgatacaacaactgtactgggagagctagg

SEQ ID NO: 737338 - DNA, 95 bp, Homo sapiens
accacgcccggggggacgctcttctccaccacaccgggagaaactggcgatggaatatgagaggagccctctggaaagaaaaggacagaccctgt

SEQ ID NO: 737339 - DNA, 83 bp, Homo sapiens
aaaggaaggcgtccgttggccttcgtacccgtcttgattgaggttgacatcatggacatatgtgagtccatcctggagaggaa

SEQ ID NO: 737340 - DNA, 75 bp, Homo sapiens
gccgcccgcaacgtgaaccccaagtctcccatcacagagtcttctgggaatgtctgggtcacccatgaagagatg

SEQ ID NO: 737341 - DNA, 95 bp, Homo sapiens
ggcgcccctgagccggccgagcggcgacggaccgcgagcccccaggtttccctagatgacaaataaacattccttttcctgcgtgaagatagtct

SEQ ID NO: 737342 - DNA, 90 bp, Homo sapiens
cccatcctatccagagattagttttagttgcagcatggaacaattacagaaacctgctcctccaaagccagagcccaagcctaaaaaggc

SEQ ID NO: 737343 - DNA, 96 bp, Homo sapiens
tgacggctgaaaaattcctttaaaaagccagcaagagtgagccatggagctacgtgtggggaacaagtaccgcctgggacggaagatcgggagcgg

SEQ ID NO: 737344 - DNA, 100 bp, Homo sapiens
gcagaactgagcccaggccacagtaccctattcacgctctgtgcttgtgccaagaaaggcctaaagaatgtatttgacgaagcaatattggctgccctgg

SEQ ID NO: 737345 - DNA, 100 bp, Homo sapiens
caagttgaaaattcctaagaatccagaacttgtgccacagaactacagacaaggtgcaacgctggttgatagaggagataatacatatggaggaaagtgg

SEQ ID NO: 737346 - DNA, 133 bp, Homo sapiens
tataaataacctcaccacgcccctggaatgtggacgagagtctcgggtgaaattagagaagcccagcctgactcctggagattgtgaatagctccatccagcctgagaaacaagccgggtggctgagccaggc

SEQ ID NO: 737347 - DNA, 100 bp, Homo sapiens
gggtttccggctgcagggcggtaaggatttcaacatgcctctgacaatctctagtggccggtgcataaacttctcccgagttccatctcagtaaaaggga

SEQ ID NO: 737348 - DNA, 101 bp, Homo sapiens
cgtggaggagctgtgcagccgcgaggaggcgcgggaggtgttcgagaacgaccccgagacgtggccagagcccccttcccaggcagagatttccagtacct

SEQ ID NO: 737349 - DNA, 100 bp, Homo sapiens
tggacagcaaaggctttgatgaatacatgaaggagctaggtggggagcattaagcgggaaatgaccttcacatttcagtcagaggacttaaaacgtgact

SEQ ID NO: 737350 - DNA, 75 bp, Homo sapiens
catgcgattcttattgaccttggacccctatggtgtagccgtgggtggaactgtggggcactgcctgtgcacggg

SEQ ID NO: 737351 - DNA, 74 bp, Homo sapiens
gctttcagcaaattagctttgtcaacagcattgctacatccaaggcaaggcatctttacatatgtgattatcat

SEQ ID NO: 737352 - DNA, 96 bp, Homo sapiens
cagaaaacggcgaggaagctgtggctctggttgaggatgtacagagagctcctggacaacagcacctggaatggataaaagtggcagtttttgttt

SEQ ID NO: 737353 - DNA, 136 bp, Homo sapiens
gaatgtcttacctgctgtaccaaatgttgtgtggcattaagcacctccattctgctggaattattcacaggctgcaagctttcttcctggtggcagatgacatcatggattcatcccttacccgccggggacagat

SEQ ID NO: 737354 - DNA, 100 bp, Homo sapiens
cccatgacatcacaacaataagcattcctctcttgctggtacatgatatgtcagaggtactataggatacaaccagcgaaacagaattgatactctcatg

SEQ ID NO: 737355 - DNA, 90 bp, Homo sapiens
cgcggtgggattaaaagcagcgaacctcgagaccaacgtggaggagctgtgggtggaagatgaccgcacctcgagcaggagtggggatgc

SEQ ID NO: 737356 - DNA, 83 bp, Homo sapiens
ccgtgattgcgttacaagctttgtctccttcgacttggagtctttgtccaggacgaaaattgtacaagctggagataaggacc

SEQ ID NO: 737357 - DNA, 74 bp, Homo sapiens
gctgtatgaagtgagttatcggcgatatggtgatgagcttgcaggatttgagttgaggaaaacacagacttcca

SEQ ID NO: 737358 - DNA, 75 bp, Homo sapiens
gtgacatccgaggtgcctttctccaaaagccaggcccagacatgtccgtccttgtaagttaaaagcttccatggg

SEQ ID NO: 737359 - DNA, 75 bp, Homo sapiens
cctaggatatcgggaaagcctatattggtgttttggaaggaaggatgttgtagaacacttactacagatgggtgc

SEQ ID NO: 737360 - DNA, 100 bp, Homo sapiens
ctttgtgtcatcctccacagctccagggaaggcactcaaaagtggggggcaggaaaggcccagaggcagagctacacaaccatggaatccaaattaattc

SEQ ID NO: 737361 - DNA, 88 bp, Homo sapiens
gaagaatctccggagcgaggaacagaagaagaagaaccggaagaaactgtccgagaagcccaaaatttatcgaggtgtgagagtcgga

SEQ ID NO: 737362 - DNA, 80 bp, Homo sapiens
ctcccctggctggagtgccctgcctggagggagccctcctggctgggggcaagaatccagactccaaaatgatgcaaatc

SEQ ID NO: 737363 - DNA, 83 bp, Homo sapiens
aggagattatagctctgtatgagaaggacaacacctacttaggccctcaggaaagcagagagcttgaagaaatgtctctctgt

SEQ ID NO: 737364 - DNA, 75 bp, Homo sapiens
ggcagtaccttcttcaagagaaatggagcccttctccaagctgcccatgatggggggagctttcatggactcgcc

SEQ ID NO: 737365 - DNA, 74 bp, Homo sapiens
gttctgtcgatcgtcttggaaggcccagatagctaataaccgaacacctggaagatggacccagcggtactatt

SEQ ID NO: 737366 - DNA, 100 bp, Homo sapiens
ccttctgctacatgctggcgctgctgctcactgccgcgctcatcttcttcgccatttggcacgcctgccgtcatcactgacaaagtaatgccagcttgtc

SEQ ID NO: 737367 - DNA, 96 bp, Homo sapiens
gagaatggcaccgtctgccgaggttcttccaggggacccagccccctaaccatgggagctcaggacactctccctgttgcagcagcatttacagaa

SEQ ID NO: 737368 - DNA, 115 bp, Homo sapiens
cttcattggccacctacagaaacaaaatgtcaacaaattgatggatgttttactgtgcctggctaactatagtcgagggggtgatggtcctatgtgtcgcccagtaattctgttg

SEQ ID NO: 737369 - DNA, 82 bp, Homo sapiens
cctcagtgcgaagaagctgcagccgcacctggccaagggtctatcatctcatgaagaactgctgggagacagaggcgtcctt

SEQ ID NO: 737370 - DNA, 105 bp, Homo sapiens
aggaatcgtatcgtatgtccgctatccagaacctccactctttcggcttctcacggcattcagcagcagcgttgctgtaaccgacaaagacaccttcgaattaag

SEQ ID NO: 737371 - DNA, 75 bp, Homo sapiens
caacaggcaggagaattatgggagcgcatttccccagggtccagtccaggtgcagcagcaaggagaacattctca

SEQ ID NO: 737372 - DNA, 90 bp, Homo sapiens
gactgggtgcgcctgcagggatcggaagccggttggggtgtgagaggttttctcgctctaggtagttgaattcagtgaattggacaaacc

SEQ ID NO: 737373 - DNA, 83 bp, Homo sapiens
tcccggagagtacatccccaccgtgttggtcaaagaaaaagtgatgtatgaaaaagaggcaaaacaacaagaagaaaagattg

SEQ ID NO: 737374 - DNA, 100 bp, Homo sapiens
cttacgcacttaaaataattgggcagaagagaagcagtgaaggagtgcagaggcatcacctgaaagattacaacagcagtgaattgaaaacagcctgcag

SEQ ID NO: 737375 - DNA, 75 bp, Homo sapiens
cccccagtcttgctgtccctggagcagcatcgaggcccgggagctacaagctgtcctgccagctggagcccgaaa

SEQ ID NO: 737376 - DNA, 98 bp, Homo sapiens
tctaaaaagaggcgaaaggaagcaagcagttcagaagagccaaggaataaacatgcaatgaacccaaaagggtgaaggccatggaggtggacatagag

SEQ ID NO: 737377 - DNA, 74 bp, Homo sapiens
acacacgctgctgtatctccctgtggcaggttcaagggcagcaggaaagacgagatcctgggcatcgccaacaa

SEQ ID NO: 737378 - DNA, 100 bp, Homo sapiens
tggatgtagccgactcattattgcgctgaaggagtgggtgcagaagctcatgatgaccctccggcacccgtcactgccgctgctggagctgcaggagatc

SEQ ID NO: 737379 - DNA, 75 bp, Homo sapiens
cggagtcccaatgaaacgggcagccatggccctccacagcccgcagaatttacatagtacatgacgaagttaagg

SEQ ID NO: 737380 - DNA, 50 bp, Homo sapiens
gccgctactgtgccctgctgcttcctagagatcagtgctatcttgaagta

SEQ ID NO: 737381 - DNA, 83 bp, Homo sapiens
cacgaggagcccaagaccatcactgacgagtttgagcaggtctcggcgcggaagatggccggcggcgtggacggccccatcgg

SEQ ID NO: 737382 - DNA, 100 bp, Homo sapiens
tttcaacatcatgatgctatcacaggaactgcaaaagactgggtggttgtggattatggtaccagttctgaatgcagtgatggggaatggtctgcttctt

SEQ ID NO: 737383 - DNA, 78 bp, Homo sapiens
cttccggatcgggggcaagcggaaggtgatgcccaagatggaccagaactaaaattccagatggcaaactcaatgaat

SEQ ID NO: 737384 - DNA, 75 bp, Homo sapiens
cgcgcctctcccaggacccgcctggctgcgagatatggggggccctcagcctcttggccttgaacgggctgttca

SEQ ID NO: 737385 - DNA, 50 bp, Homo sapiens
gtgaagtgctccgccgcccttgcctccagagaagaagagctgtgtcatca

SEQ ID NO: 737386 - DNA, 100 bp, Homo sapiens
ctgacattcctccatgtcctcacggctggatttctctctggaaaggattttcattcatcatgggacaaaagtggctctcaatccagcacatgcacattga

SEQ ID NO: 737387 - DNA, 100 bp, Homo sapiens
gctggtgattggagccctgcggaggctgctctttggcgtaaattgcaatcgattagggatcgtttctcagaatcaagttagaagtgagagttcagataag

SEQ ID NO: 737388 - DNA, 75 bp, Homo sapiens
aataaccgtccccgccagtcagaagttgaggtgatctgtgaaaatggttcgctattcacttgacccggagaaccc

SEQ ID NO: 737389 - DNA, 90 bp, Homo sapiens
atgattgtgaggcctccccagccatgtggagctagcaaacgaggcccctgagagctccacctagttcacaggataaaatcccacagcaga

SEQ ID NO: 737390 - DNA, 100 bp, Homo sapiens
caagaatcgctctataagatctgcaagaatcttcctcggtcacccaggatggagtgtagtggcgcgatctccactcactgcaacctctgctgccagggtt

SEQ ID NO: 737391 - DNA, 75 bp, Homo sapiens
ataaattgcaagcattctatccaaatggtcttgactccactaacggggacttctcatacggctttgaacttggac

SEQ ID NO: 737392 - DNA, 139 bp, Homo sapiens
gcttccccatgcggggtagaacctttgctgtcctgttcaccactctacctccagcacagaatttggcttatggaattgaaagatgttggccatcgtgatcagatggctgcagctagaggaatcctgcagaagaacgttc

SEQ ID NO: 737393 - DNA, 83 bp, Homo sapiens
cttcaacatggccaaggtgctggcgtccctcagatttgtcccatcagatgaaaagaagaaacaaggttgtcaacgagaaaatg

SEQ ID NO: 737394 - DNA, 96 bp, Homo sapiens
tcgtggaggtggccgtggaggcagaggtggcatgggtgagagccacgagccaaggtgggcacttgatgtcggatctcttcaacaagctggtcatga

SEQ ID NO: 737395 - DNA, 85 bp, Homo sapiens
ttaattcccactctagattctgcgcatcagagcagagtgacgatgatcctgtttgtcctggagctggagtgggtgctgagcacag

SEQ ID NO: 737396 - DNA, 74 bp, Homo sapiens
tgaccgctgccgcccagcacgtccaggctggaagcgcaattcattgaccccgaggacaactgttttcccttgcc

SEQ ID NO: 737397 - DNA, 75 bp, Homo sapiens
caatcttgaatcatgaagctactaaccagagccggctctttctcggcataagatgcacatttttctgctctggag

SEQ ID NO: 737398 - DNA, 50 bp, Homo sapiens
tgcagttctccatcgtgccagaagggaaaaggccgaggcatcagcgtgtg

SEQ ID NO: 737399 - DNA, 100 bp, Homo sapiens
attccgggagctgcacctgatgcggaattcagatcaggaaggaggtggaaagaaaaagaagaaaaagaaggacaagaaacacaaaaaggataagaagcac

SEQ ID NO: 737400 - DNA, 98 bp, Homo sapiens
tcgccgcggggctggccgccatgcacaagctgcacttcctgcacaggctgctgaatgaaaattcatatgtccctcgtgaggctggatctcaaaaagat

SEQ ID NO: 737401 - DNA, 100 bp, Homo sapiens
gtccgtgccattcccagaggagcctgagaagaggcagaggaaggcgaaacatggctggtatgtgacagggcacatctgggcctgtcctccaagtgaagga

SEQ ID NO: 737402 - DNA, 98 bp, Homo sapiens
ggtgatggaacaacaactggtcaattcagcacgttcacgtccatgttcttcccaggaaggctggagactttcacaggaatgacagcatctatgaggag

SEQ ID NO: 737403 - DNA, 84 bp, Homo sapiens
ggggtcgggagccgcccggggcagggctcgggagagcgggtactccaaagattcaggtttactcacgtcatccagcagagaatg

SEQ ID NO: 737404 - DNA, 75 bp, Homo sapiens
aacatcttccaccacagcttagaggttaagagagaagagagtcagcaacagcaagttttactcatagaagctggg

SEQ ID NO: 737405 - DNA, 83 bp, Homo sapiens
ctctgcagtccgtgaccttcaggtgcccttcaaggtcagaaaaactcggcaagccttatgccagcctggaccatcttggaggc

SEQ ID NO: 737406 - DNA, 74 bp, Homo sapiens
acttccctggtcgaacagttttttctaatggctattcaagccccccgaatccaagcccaacttcacccctctcg

SEQ ID NO: 737407 - DNA, 90 bp, Homo sapiens
aacgccgccatccagccaccattccaagacttgaaagagggctccagaaaaagtagatgcgtatctgtacaaacagatcctactgatgaa

SEQ ID NO: 737408 - DNA, 74 bp, Homo sapiens
caatacctccggatactcagtttgtaaaaacatggcggatccagaattctgagaatatgccttctgcatcctgt

SEQ ID NO: 737409 - DNA, 100 bp, Homo sapiens
attcatttttgatcaggagaaagaagacagccatcatttgaaagcattcccatggtttggcatggacatcggtggaacgctggttaaattggtgtatttc

SEQ ID NO: 737410 - DNA, 82 bp, Homo sapiens
ctcacctgcgctgtgatgcctgcagagctgtggcttaccagaggctgacccgcggctgattgagtccctctcccagatgctg

SEQ ID NO: 737411 - DNA, 75 bp, Homo sapiens
gcctcccggctctcgtcagcctcccgccggccgtctccttaacaccgaacaccggcagctgcaatgactctccgc

SEQ ID NO: 737412 - DNA, 82 bp, Homo sapiens
gggacctcaagaccgagaacctcctgctggatggcaacatggacatcaagctggcagttgaaaacaccacacactgtgagtt

SEQ ID NO: 737413 - DNA, 98 bp, Homo sapiens
ctcgcgtccggagtccccgtggccagggtgacatccagcagctgctctttgtctcggaccaccgggcagcttatgattactgtgagcactacagccct

SEQ ID NO: 737414 - DNA, 82 bp, Homo sapiens
attcacctgtccagcatccgaccaccgaggctggagggggagaacacccagggatcaagtttgtggttctagcagatcctag

SEQ ID NO: 737415 - DNA, 97 bp, Homo sapiens
ttcagtttcccagaactgcaggtgctggatttatccaggatctgcaggcccaagaccgagctcaccgcatcgggcagcagaacgaggtccgggtact

SEQ ID NO: 737416 - DNA, 75 bp, Homo sapiens
tcgcagaacgccatcaaccagctgttcaccggaacagcacaatccgccctggctgtgatgtgaatccctcctgcg

SEQ ID NO: 737417 - DNA, 96 bp, Homo sapiens
aagatattccaggaaatgctctacattatggactggatggatgaaatgaaggaagtcctggctgagcaaggttggaagccctagttctcgcattga

SEQ ID NO: 737418 - DNA, 75 bp, Homo sapiens
gggaatgactcttccagaaaccttagagcagatgcagaaagtgaaatggtggcaattttggaggtagccccggtt

SEQ ID NO: 737419 - DNA, 51 bp, Homo sapiens
ttcctcatcgtggcagctctggcaggggaaatgctgtctgtagctgagcac

SEQ ID NO: 737420 - DNA, 100 bp, Homo sapiens
gtcgggctcaggcccagcagggccatcggccatacttcctgaaaaaatggaatggatccaattacacgtcaagtaggacaacatattgaaatggaaccag

SEQ ID NO: 737421 - DNA, 82 bp, Homo sapiens
ggaaaacaagctcagggcttccactgattctacattatggttctggaggacacgtgccggcggcaggacttcaacccctgtg

SEQ ID NO: 737422 - DNA, 83 bp, Homo sapiens
aagaaacatcgagtcactttgcctggacaggaggaaccctcaagacagatcggcttgccaaaggatcagaatgttaccaaaag

SEQ ID NO: 737423 - DNA, 100 bp, Homo sapiens
cactgagtacaagattgcttttccttacttgtacaacaatcttccacaccatgtccacctcacctggtatgcatttatagagtttgcttcattcgaagac

SEQ ID NO: 737424 - DNA, 100 bp, Homo sapiens
tggacagacctcaggggaagaagctggacttcagccgtccaagggatcgactacaagaccaccaccatcctgctggacggccggcgcgtgaagctggagc

SEQ ID NO: 737425 - DNA, 51 bp, Homo sapiens
gatcttctgcactgtttacaggcacaggcctgatcttttggccagaaggag

SEQ ID NO: 737426 - DNA, 83 bp, Homo sapiens
cgtggagcggtacatcgcctcggtgcagggctccaccccgtcgcctcgacaggagggtgtgaagacagagaatgaccacatca

SEQ ID NO: 737427 - DNA, 96 bp, Homo sapiens
gctgcggacccagctcgctcctggtagcaagacccgaactgtcaccaagatcttccagaagaagaagaactcggtgacgtacagcttccgacagtc

SEQ ID NO: 737428 - DNA, 100 bp, Homo sapiens
cctagaggagcagcattcggccagagcccccttgctggattatatctacaggaaaccaaagcccaaaccccggccatccatcacaaaggcaacctgggag

SEQ ID NO: 737429 - DNA, 97 bp, Homo sapiens
agaccaggctcttgaatatcttaggacttatcttcaaaggttacttcttgctgcagattctgcgcaggatcggagctgtgggccaggctgtgtccag

SEQ ID NO: 737430 - DNA, 74 bp, Homo sapiens
cgaggccgccctcagttgctgctccgacgcggaccccagtaccaagatgttgctaaatttgcataagaagagtt

SEQ ID NO: 737431 - DNA, 75 bp, Homo sapiens
cgcggaccatgggcgacaaagggacccgctggctccagagcacacgctcatgtccttccggaaggccctcgagca

SEQ ID NO: 737432 - DNA, 75 bp, Homo sapiens
cttcgtctttgcagcgtagcccgagtcggtcagcgccggaggctggttgtggtgactcatgcccataatcccaac

SEQ ID NO: 737433 - DNA, 98 bp, Homo sapiens
aggattatcgtagcaaggtgctcttctgggacaacgcgtacgagttcaacctcagcgctctgaagtctctaattaacagaagatggcaaagcccagcc

SEQ ID NO: 737434 - DNA, 90 bp, Homo sapiens
ctagtaattgagcctcaaaatgaagatggcacatggcccaggcagaccttgcagtcaaaaacgctgtccaactgggcgtacgagtttgac

SEQ ID NO: 737435 - DNA, 75 bp, Homo sapiens
ctggttccccaacatgcctcaccctcatctatatcctttggcagctcacaggactaagagcctctggaaaggact

SEQ ID NO: 737436 - DNA, 101 bp, Homo sapiens
cggttcgctgcccggtccgcccgcggtgagaggtactaggttttgacaagcttgcatcatgcgtgagtataagctagtcgttcttggctcaggaggcgttg

SEQ ID NO: 737437 - DNA, 82 bp, Homo sapiens
gctgccctcagctccgagtccagggcgaggatgaatttcatcctttcatcgaagcacttctgccccacgtccgagcctttgc

SEQ ID NO: 737438 - DNA, 75 bp, Homo sapiens
cgctgatggccaacttcctcacacaaggccaggtcagtttgctgagaacgaaaccaatgaggtcaattttagaga

SEQ ID NO: 737439 - DNA, 90 bp, Homo sapiens
gttactaatcaatgtcattctgaccttgtgggtttcctgtgctaatggacaagactgtagactccactccactttcagttcacacaccaa

SEQ ID NO: 737440 - DNA, 75 bp, Homo sapiens
aggaactggaccagccagcagcctctaagagctcctagacggtggatattccatctattataaccaagaaactat

SEQ ID NO: 737441 - DNA, 50 bp, Homo sapiens
gtgcatttccatatggcaatgttctctcagtgaaatagaagattccctcc

SEQ ID NO: 737442 - DNA, 50 bp, Homo sapiens
cgtcaggctctaaacaaaattctgtgataccatgtgtgggaagttgttct

SEQ ID NO: 737443 - DNA, 100 bp, Homo sapiens
tcaagctggccaagcacaaagagcttgctccctacgatgagaactggttctacacgcgagctgggcaattgaaggaacagactaaaaatcgtgtcctgga

SEQ ID NO: 737444 - DNA, 99 bp, Homo sapiens
tatctcaaaaggtgatctggacaaaggaacaggtatctcaggtcacggtctagatcacattctcgatccagaggaaggcgatactctcgctcacgcagc

SEQ ID NO: 737445 - DNA, 75 bp, Homo sapiens
gaagggaggaaatagtggcaggtgacagtctgcatgtgcagttttcaggtcacagtaatgaaaggcagtaataga

SEQ ID NO: 737446 - DNA, 50 bp, Homo sapiens
cagaaaccaaaaactccattttgctttgtgagacggtttaagcggaagca

SEQ ID NO: 737447 - DNA, 100 bp, Homo sapiens
aatccctactggaggcattggccagccatttattgtaactgtgcaagatggacagcaagtattcatgggctgccctgggcaagagccagctctgtttagc

SEQ ID NO: 737448 - DNA, 75 bp, Homo sapiens
ctttggtgccctcaacatctctcagagacgaaagaatcttgcctcctggaatccttcaaatcctgaatgtctctt

SEQ ID NO: 737449 - DNA, 83 bp, Homo sapiens
cgcttgcctacccgccggcccgcgggtctacttcctcaaaggtatcgagaaccttccctgcgaacttcagaggaacttccagc

SEQ ID NO: 737450 - DNA, 98 bp, Homo sapiens
cgcgaacccctctgggatccccgccgctctgtctacaacccgagcatttcttctgaggccctgaagaagtatcaagtgggctttgacattgcggtggt

SEQ ID NO: 737451 - DNA, 74 bp, Homo sapiens
cttatccaagatcacagggaactccggggagagaccacggtgtgaacacatgaacagaagacgaaaatttcttc

SEQ ID NO: 737452 - DNA, 100 bp, Homo sapiens
tcacctgtctggagcaaataaaagagccctgcaatttgaagatacatgagacagcagccaaacccccaggtgccgtgagcgatgtggagatgcaggaaca

SEQ ID NO: 737453 - DNA, 100 bp, Homo sapiens
aggaaagcaactcatcggggaatacaaacacagacccaccagctgagggaaatgtatgaagttgccaagaaactttgttctttttgtgaaggtcttgtac

SEQ ID NO: 737454 - DNA, 90 bp, Homo sapiens
ctaggaattgcgggaggaaaatgggtagttagctatttctctgggaacttctggggtaggacgttgtctgctatctccagttccacagac

SEQ ID NO: 737455 - DNA, 93 bp, Homo sapiens
ccgcggggttagccactgctggctgcttccagtgttcgccgagagtaagactttgaccccgacgcaggcttcagtgattgccgcggatcagaa

SEQ ID NO: 737456 - DNA, 90 bp, Homo sapiens
ctgaaggggagcccaagggtgcacagcccctggctacgacggccaatgggaacgtggaggccaaagtggtgtgcttctaccggaggcggg

SEQ ID NO: 737457 - DNA, 75 bp, Homo sapiens
ttgtacttggattcagcaaggaaccttccggcctatatgaacccaatagcaatggcgagatcaaggggtccaatc

SEQ ID NO: 737458 - DNA, 73 bp, Homo sapiens
aaccagttattgaatatcaagaggaggagttgttgaagttgggatatctaaagcagaagccttagaaactctg

SEQ ID NO: 737459 - DNA, 83 bp, Homo sapiens
ctcaatatctgtcttcggtggactccttcggcagtccacccaccgccgccgcctcccaggtcttctcagtacagcatggtggc

SEQ ID NO: 737460 - DNA, 75 bp, Homo sapiens
tgcaagaaaacaagctcagggctcccactgattctacattacgcgccaaatcttaaaggcagaccacgcaaaaag

SEQ ID NO: 737461 - DNA, 88 bp, Homo sapiens
ggagctgaagaaggttctagatgctaacaagtacaagttgtgcaaagtgaggaagattactgtgggagtgaagggaatccctcacctg

SEQ ID NO: 737462 - DNA, 75 bp, Homo sapiens
gcctggtctcgaactccggacctcaggtacaggtttgcagattccgccagcagcacagcaagctctacagatgag

SEQ ID NO: 737463 - DNA, 100 bp, Homo sapiens
ctttgaagtaaatatacgctttgttggtggactactctcagcctactatctgtctggagaagagaaacatgccaaaggccaggatttgtttgatcagatt

SEQ ID NO: 737464 - DNA, 100 bp, Homo sapiens
gcagaagtggatcatagacctggccatgttaagaagagttttattggccaaaataaatcattctttggtcctttggagctggtggagaaactttgtccag

SEQ ID NO: 737465 - DNA, 49 bp, Homo sapiens
aactcattcaaggttacccagttgcttgctttgaccagatcaagttctt

SEQ ID NO: 737466 - DNA, 75 bp, Homo sapiens
cagagaaatgctggtttggtgtgtgatccctcacatccacaaatctctgattggaaagaagggacagcagaaaac

SEQ ID NO: 737467 - DNA, 100 bp, Homo sapiens
acctcactgcagaggtgctggagctggcaggtgctggagaatctggtaaaagcaccattgtgaagcagatgaggatcctgcatgttaatgggtttaatgg

SEQ ID NO: 737468 - DNA, 73 bp, Homo sapiens
ttcagtcttgcagccactcgagacatcacttctgttcgtatctggaccttcgtcgatttggatctgtgccaca

SEQ ID NO: 737469 - DNA, 90 bp, Homo sapiens
gtttgactgtgcccttcatggaaaccactgggaggacctgggctttcaggccaaacccatccaccagcatgaagaccgctgcttgaggtt

SEQ ID NO: 737470 - DNA, 82 bp, Homo sapiens
aggattccaacaacaattccgatggcaaagccgttgccaagaactcccccactggaaaggattctgaaagaaatgaagtcag

SEQ ID NO: 737471 - DNA, 82 bp, Homo sapiens
ttttttaggtaccagcatcaagatgatttatggtaataagatgtgtgcaacagcaccgatcttccggaagtcgagatcatta

SEQ ID NO: 737472 - DNA, 123 bp, Homo sapiens
gatgtcctgcgtgtcgcagagcaccgggcagatccagtgcaaagtctttgactccttgctgaatctgagcatatgccgagattttgctgtcctggaggaccacaccctggctcacagcctgca

SEQ ID NO: 737473 - DNA, 75 bp, Homo sapiens
acattgatgtacgagaaccagagcttgaagatttgactagatacgatgttggtcaaggtcagcatctcctcgacg

SEQ ID NO: 737474 - DNA, 74 bp, Homo sapiens
cgaggaaagaggaggaaaacaaaagctgctacttatggaagatacaaaggacagaatgttgctgcgggatgtaa

SEQ ID NO: 737475 - DNA, 100 bp, Homo sapiens
catcatcatcccgccccttggcctcatctacttcttcgtccaggacagtgtggcactgaaggggggccgtggcagtgcttccatggtccagaagtgcaag

SEQ ID NO: 737476 - DNA, 100 bp, Homo sapiens
aggctcatttgtgagaactaaaatagatactacggagaacttgctcaacacagaggtgcacacagccaacagcggcattacccctggctagagagtgata

SEQ ID NO: 737477 - DNA, 100 bp, Homo sapiens
gctgaggggcttgcctgaagcgagggaataaacagccattggactcttcaaacaaaaacgctgtctccatcaagtactgctttcgcaggataagtgacca

SEQ ID NO: 737478 - DNA, 74 bp, Homo sapiens
cgctggagagggggcgctgagctgttgggggggggccctcagcctcttggccttgaacgggctgttcatcttga

SEQ ID NO: 737479 - DNA, 90 bp, Homo sapiens
agctcgcgccggatgcggagcgcggtgctgccggtggagcttcagctggagaatgctggaggagaccttaaggatggccaccaccactat

SEQ ID NO: 737480 - DNA, 74 bp, Homo sapiens
ccagtccctgaaagcattaccgggttcgctaggctcacaggcaagaagttatgaaatggaatggatggggatat

SEQ ID NO: 737481 - DNA, 101 bp, Homo sapiens
gggtgaccttatgtcagaggaagtggctttcttattgcagcaaaaattcccgtaccaatgtcagtgctaggccaccattggttcaggcaatcttcagcggt

SEQ ID NO: 737482 - DNA, 83 bp, Homo sapiens
tgtccgagggcaccaaggcggtcaccaagtacaccagctcgaagtgaggtccagagatatatccagagaggagtggaagggct

SEQ ID NO: 737483 - DNA, 78 bp, Homo sapiens
gaaaatcataacaagcggttctctaccctgtaaagttgggacccctgattttagcaggatggcccaatggaatcagct

SEQ ID NO: 737484 - DNA, 100 bp, Homo sapiens
tgcctcattgagatcttggcttcccggaccaatgagcagatgcaccagctggtggcagcatacaaagatgggtggagagattcaaccagttagcgtgaaa

SEQ ID NO: 737485 - DNA, 100 bp, Homo sapiens
agtactcgggcaagaccaccttcgtcaatgtcatcgcgggccagaggtggaggctcatctcaggaagctgggcctgggctatcgtgcccgttacgtgagt

SEQ ID NO: 737486 - DNA, 96 bp, Homo sapiens
ataggtgtatcaagtaatggtgcaaagcctgaaggtcagcctgggccagtgggcccccaggggtacaatgggccaccaggattacaaggattcccg

SEQ ID NO: 737487 - DNA, 100 bp, Homo sapiens
cccctgcattgttggtattgaaagaagcgctatagaaatgaagggagtcccagccctagacagtccccgaagcgccggcgtgaacattctccggacagtg

SEQ ID NO: 737488 - DNA, 82 bp, Homo sapiens
ccacgccggaggaggcattaacgagaccgggtgaccatggccgaccgggcggcagctgagagggcttgcaaagacccgaacc

SEQ ID NO: 737489 - DNA, 114 bp, Homo sapiens
ctgttcttccgtgtctccctctgcctggcggcagtcacggccaagagttacgaggagcaggagctgctgcgcctcatctactacgggggcatccagcctgagatccgcaaggcc

SEQ ID NO: 737490 - DNA, 50 bp, Homo sapiens
catcccattacagatagaagaggacctgtatgaggctggagagaagaaat

SEQ ID NO: 737491 - DNA, 101 bp, Homo sapiens
ttctgtacaccaatggaaagtgcgtcatcctaaggaacatcgaccttgccgggattgctgtccttgccattggactatggctccgattcgactctcagacc

SEQ ID NO: 737492 - DNA, 75 bp, Homo sapiens
acagctagctgcttatggctataaaattacagtttgtgccattcagggattatattgacagaagtggaaaccaca

SEQ ID NO: 737493 - DNA, 74 bp, Homo sapiens
acgaaatcacccatggcttcgatgacaatggtggtggaggtggatacagcagtcggagaacatctggcagagac

SEQ ID NO: 737494 - DNA, 50 bp, Homo sapiens
tctaaacttctctcctaaagaagctatggcctgctgtgcagttagccaac

SEQ ID NO: 737495 - DNA, 80 bp, Homo sapiens
agatggctttaaagaatacacttcaagggatgttcgtctaaccccagaagactttgctagagctcagaagtactgcaaat

SEQ ID NO: 737496 - DNA, 100 bp, Homo sapiens
agacagatgaagatgcagaaaggaaatgttctccttatgtttggtctactattgcatttagaagctgatttcagctacagaaggcaggaatcctttggac

SEQ ID NO: 737497 - DNA, 76 bp, Homo sapiens
gcagggcaaggaaactggccacaagataaagtagccaatatttggtgcagcttcaatgtctttctgaagattaagg

SEQ ID NO: 737498 - DNA, 97 bp, Homo sapiens
gacaagtgtggattgcctattaaaatctatgggagaatgattatctttctcaaggaatagatctttctggaatagaagtgatagaaaatgatctact

SEQ ID NO: 737499 - DNA, 74 bp, Homo sapiens
ggcggcgctgctgctcgggctgctcttggagacctcccagtgccaagtgtataagcgtgtccagaattggtggg

SEQ ID NO: 737500 - DNA, 75 bp, Homo sapiens
ggcgatgggcccgtggacatgcgcacctcacacaggactcagtctcctttgaggatgtggccgtgaacttcaccc

SEQ ID NO: 737501 - DNA, 100 bp, Homo sapiens
atccccactgcggccccctggtgctggccctcagcagtcccggcctctggcagcacttgccccaaagctcaactataaggactgtgagaaggcagtgaag

SEQ ID NO: 737502 - DNA, 75 bp, Homo sapiens
gctccccagcctgtctgggatatcatgtttcaagtggctgtgccaaagctgatgaccaaacacccaggcaaacgt

SEQ ID NO: 737503 - DNA, 101 bp, Homo sapiens
ttgcggcggaagcggagaccatgttccgagcggcggctccggggcagctccggcgggcgaacaagttgaaatcatcgcagaaggataaagttcgtcagttt

SEQ ID NO: 737504 - DNA, 90 bp, Homo sapiens
cagctgttgggcttctcttcccttgaggtctctgaaccagggcacccatgcagggaaagcaggcaggatgggagagtcgccgatagaacc

SEQ ID NO: 737505 - DNA, 102 bp, Homo sapiens
cccgatcaccatgtcggctttcgacaccaaccccttcgcggacccagtggatgtaaaccccttccaggacctcagcagccatgtcgaagccccatagtgaag

SEQ ID NO: 737506 - DNA, 75 bp, Homo sapiens
catcgacctgcacttcgccaccaaaggtcttcaaggccttcctcgagaccacccggagagttaccactccttcat

SEQ ID NO: 737507 - DNA, 75 bp, Homo sapiens
tgtgaagacgcacggtgccaggaccaagtatctgatcacaaatcgggacaaaccgctgtcatttggtatttccct

SEQ ID NO: 737508 - DNA, 100 bp, Homo sapiens
gtctactctgatgtcaatcttgagggctagtttgactttggggacaccatggtccaccaggccatccacaccatcgagtactgcctgggctgcatctcca

SEQ ID NO: 737509 - DNA, 98 bp, Homo sapiens
cctgcacggacggtgttggttgggcttctttccttgctgctggaggccctgtcctgccctgactgtgtggtgcagctctccaccctcagctgccttca

SEQ ID NO: 737510 - DNA, 75 bp, Homo sapiens
gacaaggccaaagagactgcagatgccatcactaaagaaggatctcactggcatcgaatctatggatcagtgtcg

SEQ ID NO: 737511 - DNA, 50 bp, Homo sapiens
cttggagcgtccgccatgaggagaaggtatttattacagtatcaggagcc

SEQ ID NO: 737512 - DNA, 100 bp, Homo sapiens
gagcagtccctctctgtccgggcgctgcaggagatgctggctaacaccgtggagaaatcagaagggaaactccccaacttttaaatcatttgaagaaaag

SEQ ID NO: 737513 - DNA, 74 bp, Homo sapiens
gcttcccccaacccagacgaagagggtttaaagccaatttgtctctcttgaggaggcctggagagaaaacttac

SEQ ID NO: 737514 - DNA, 100 bp, Homo sapiens
gcctcctctccgccctagcgctgaggcattagacagaaagctggaagttgaaatggtaagtgaaactgtatccaagtaagcaggtaactgggcaaacttc

SEQ ID NO: 737515 - DNA, 100 bp, Homo sapiens
ggcggttgcgggggggaagtgactgggcggtgccggcgccggagacgatgccgttcaaaagctggcaggctgacagaggcggcctcaggacggaccttct

SEQ ID NO: 737516 - DNA, 83 bp, Homo sapiens
cttgctgcccaatctttgccaacaggaggtgattgtctaggagtaactgtatgtgcgctcagcaccgggtcacaaccaccgtg

SEQ ID NO: 737517 - DNA, 75 bp, Homo sapiens
tgtatctactcaagagtggaagttttcacaggaaaatggttctcctgaagaacatgcaatctatgtttgggatca

SEQ ID NO: 737518 - DNA, 100 bp, Homo sapiens
caggccctccggccgcaggcgggacccggcggggcgcaccacagagaccggcttcaatatcttcacccagcatggaaatggagcagtcaatgaatatgct

SEQ ID NO: 737519 - DNA, 100 bp, Homo sapiens
ctcctattggctccttcacattgattgacagtgaagtgtcacaacttttgacctgtgaagatatacagagtgaccctaagagtgactcgtggatctttgc

SEQ ID NO: 737520 - DNA, 100 bp, Homo sapiens
gcatccctgcaatgaagagaacccagggaagttcctttttgaagtagttccaggtctgctgagaacagacccagtccctgaggaaggagaagatgttgct

SEQ ID NO: 737521 - DNA, 83 bp, Homo sapiens
caaaatatggcaaagaaacctattctgagctggttatattctgggcactaaatgaaggcgtttctaggcaatttgattcgttc

SEQ ID NO: 737522 - DNA, 83 bp, Homo sapiens
ttctcttcctcctccaccgagtcgtgctctcgccccaacccgcgcgccagatgaggacggggacttggttgccttttccagtg

SEQ ID NO: 737523 - DNA, 101 bp, Homo sapiens
tggtgcccagccgggaactccccatcgcgttttgccagcgataatacgcctcaggaagagcctaggctggatgtcttgatcaataacgcagggatcttcca

SEQ ID NO: 737524 - DNA, 75 bp, Homo sapiens
gaatcactcagacctgaaaaacagtctgaaaccagtatccatcaatacttggtttggactggtctgaagagagcg

SEQ ID NO: 737525 - DNA, 83 bp, Homo sapiens
ggaggaaggaacgaggcaaggagctaaagcagcgtgcgttcagccctggggagacatatactgcctggactgcctggctgatg

SEQ ID NO: 737526 - DNA, 82 bp, Homo sapiens
cccgtacttgaagccctacgccgtggacttccagcgcaggtattgttgcagcatctggcagtgagactgaggatgaggacag

SEQ ID NO: 737527 - DNA, 90 bp, Homo sapiens
ttccgccggggcgagacccccagcggagctggagtttgttcagatcatcatcatcgtggtggtgatgatggtgatggtggtggtgatcac

SEQ ID NO: 737528 - DNA, 50 bp, Homo sapiens
cctggacctcaagaaaactagagaataccctctaccatctgctttggtca

SEQ ID NO: 737529 - DNA, 80 bp, Homo sapiens
ctctatcccaggaatacagctttgcattaggcaccacactgtaactcgaggcatcaccaaaggcgtgaaggaggactttc

SEQ ID NO: 737530 - DNA, 90 bp, Homo sapiens
tgcggaacggagcagtatttcaatgtggagtccagttacaacacagggatcacaacaaacacaaccgccacagaagcactatggcattac

SEQ ID NO: 737531 - DNA, 100 bp, Homo sapiens
agcaataccaccttcagtacttggcaagatttgatgctcttgtgctcagtgacatcattcagggtgatagcacactcagataagaatcgcatgacacccc

SEQ ID NO: 737532 - DNA, 96 bp, Homo sapiens
cgccgcagccgccggcgctgtggaggtgctggagaatctggtaaaagcaccattgtgaagcagatgaggatcctgcatgttaatgggtttaatgga

SEQ ID NO: 737533 - DNA, 100 bp, Homo sapiens
acctccagcctctccagagagacaagatggtgaaggaactgagcctgatgaagcacaagctccgggtggataaggcagctgctgcagcagcggcactaca

SEQ ID NO: 737534 - DNA, 100 bp, Homo sapiens
gaaaggctccatggtcttgcctccttgcaggaggttgctcaaagaagtacagtctttaaaacaaccatacctgaagaagaggaggaggaggaagaagcag

SEQ ID NO: 737535 - DNA, 51 bp, Homo sapiens
ctgcactgaaaggaaatgacggattttgtagcagaaggtcaagaaatttgt

SEQ ID NO: 737536 - DNA, 82 bp, Homo sapiens
atttgaagtgcctctggctgaagccatccccttggctgatcagccacatctgttgcagtatgtgtgtctataaaggtccatt

SEQ ID NO: 737537 - DNA, 96 bp, Homo sapiens
gggtgctgtggtctgagctagagggtgaagctggcggagcaggaggatgggcgtaccacttccgctgtcacggtaaagtccgccatcagaagactg

SEQ ID NO: 737538 - DNA, 83 bp, Homo sapiens
gagaagttgaaccagctgtgggagaaggcccagcgagtgtcgtgaaaactacccctaaaagccaaaatgggaaaggaaaagac

SEQ ID NO: 737539 - DNA, 80 bp, Homo sapiens
gcgcgactcgcttctttcggttctacctgggagaatccaccgccatccgccaccatggaacaagatcactcaaggtgaag

SEQ ID NO: 737540 - DNA, 103 bp, Homo sapiens
caggaaggaatgatcagctttgactgctttatgaccatattaatgcagatgaggcgttctttgtggtggctgctcgagcccccagaaaggtgcttggttcttc

SEQ ID NO: 737541 - DNA, 100 bp, Homo sapiens
caactatgccctgaatctcaacattgccatgcccctgcatatgatatttagatcccacctacgccccagtgaagtccttccttcgagtggataaagaaaa

SEQ ID NO: 737542 - DNA, 100 bp, Homo sapiens
gtccagcagatggcggatgccctgcagtacctgcagaaggtctctggagacatcttcagcagtgaattttgaagattgcaccggtcgacaaaggacagcc

SEQ ID NO: 737543 - DNA, 90 bp, Homo sapiens
ggagaatggctggtctcctactcccagatgcatccgtgtcacggaatggccaaagactatgacgggtcttcctagcacatcagggacaac

SEQ ID NO: 737544 - DNA, 82 bp, Homo sapiens
cccggacagagcccgtggtcgcgcagaaagaagcttccggttctgaggtcctggaggtgccatttccctctctgttgaagca

SEQ ID NO: 737545 - DNA, 75 bp, Homo sapiens
accgtccccgccagtcagaagttgagattttacgctgcagaaattgccatcggtctgttcttcttacagagtaag

SEQ ID NO: 737546 - DNA, 108 bp, Homo sapiens
acgaatagagaaaaaagggtctgacaaaaggaccaccgtcacagatgccaaagagttgaagtttgcaagtcaagctcaggtacctgacaatgatgagcagtttgtacc

SEQ ID NO: 737547 - DNA, 83 bp, Homo sapiens
tgtggtcttcatcgaagatgctattcagacactcgcctatggggacatgaaccacgagtggatcggcaacgagtggctcccca

SEQ ID NO: 737548 - DNA, 82 bp, Homo sapiens
gctggatcagtgcgagaaccaggagctcgaggtctcagcatcagaggagcccaggaggaggaccctcccgatccccagctaa

SEQ ID NO: 737549 - DNA, 100 bp, Homo sapiens
tgctgttgctcttctccgccgcggcactgatccccacagctcccagttgtgggcagagtctggttaaggtacagccttggaattattttaacattttcag

SEQ ID NO: 737550 - DNA, 74 bp, Homo sapiens
atcgagatcaatgaacctttagatgaatttacagtccattttagcttcctatctcctgaaggaaaagctcaaca

SEQ ID NO: 737551 - DNA, 100 bp, Homo sapiens
aaacggcgagaggactggaggggtgcctctgatcaaagcccccaagagagggaagaaggagaaagggccaacccctgaagaagcaatacagaaactgaag

SEQ ID NO: 737552 - DNA, 75 bp, Homo sapiens
aaagcattgatggaatgtgctttagaagttaaaaaggatcagttccatgacaagaccccttatacgattatgttt

SEQ ID NO: 737553 - DNA, 75 bp, Homo sapiens
ggtcctaagagctgggcaccaggaagcgaaggctggtaaagagaaatgtgtatgaccttacaagtatccccgttc

SEQ ID NO: 737554 - DNA, 83 bp, Homo sapiens
agcctgcagccggccctgccgccttgccaacattccactaacccccgagactcagcgggaccaggagcggcggattcggcggg

SEQ ID NO: 737555 - DNA, 75 bp, Homo sapiens
ccaaagtttttgaacacaacatgtgggaagagacttccaccttaggatagtgttgcctgaagatttacaactgaa

SEQ ID NO: 737556 - DNA, 95 bp, Homo sapiens
gcgccgggtcccgcggggaaatgtctctttctgcacattcctggcacatgagtacccagacctagtgcacaaggtgatcatgatcaatggcgggg

SEQ ID NO: 737557 - DNA, 75 bp, Homo sapiens
gatgcggaggctgcctcggcggagcagaggaaccacacgctgatcatgggagactgccagactcgggaggaggca

SEQ ID NO: 737558 - DNA, 75 bp, Homo sapiens
ggctggagacatggaccgcggcgagcaaggaatgtttaggtgtccataatgtcactaaacccgtgtcttcacttt

SEQ ID NO: 737559 - DNA, 98 bp, Homo sapiens
gcggcggcggttccagcatgaagaggagagctggcctggggggcagcatgagtccacctggaaggccgctgtggtggaaggatgtttgactgcagaga

SEQ ID NO: 737560 - DNA, 119 bp, Homo sapiens
cgcccttgatcttcgctgtggcatggcggacgaggggaagtcgtacagcgtccagaacacatattacataatggagccgggagacagactagggctggcttgatccggccacgcagtcc

SEQ ID NO: 737561 - DNA, 82 bp, Homo sapiens
ggatattatagatattcagaagaaggatgctgttaaaaggatccaaggattctgtagctacaatgttgtcaagactttttcg

SEQ ID NO: 737562 - DNA, 87 bp, Homo sapiens
tcaggagccctggaaaggagaaggaataagacggcaggaggaagagagagagaggcacttgcacctcctgcgccgccgccccccatc

SEQ ID NO: 737563 - DNA, 100 bp, Homo sapiens
tggaagttgattactcagtctctaaaaagctaagtactatactggcaattgctggagaagattttgcaattgttgcttctgatactcgattgagtgaagg

SEQ ID NO: 737564 - DNA, 75 bp, Homo sapiens
tatcaagcccattcaaacagaggcatgggtggatctccttacgtagcagccaaaataaatgaagcaaaagacttg

SEQ ID NO: 737565 - DNA, 100 bp, Homo sapiens
gtttatgataagaatgttttacaaagagatctccgtatagggaagaaccccacagacgaatacctggagggcatgatgagcgaggccccggggcccatca

SEQ ID NO: 737566 - DNA, 82 bp, Homo sapiens
aggttttcaggaccaaaattgtggaaaagtcactctggtgtggacactgccagcggctgcagccgacttggaatgacctggg

SEQ ID NO: 737567 - DNA, 100 bp, Homo sapiens
ggatcgtgaccgagaccgtgaccgagagcgtgaccgagagcgcgaatatcgtcatcgttagaagcctgctcctgcaaccagcacgcccgacgctgccggt

SEQ ID NO: 737568 - DNA, 75 bp, Homo sapiens
ataaatctcgcccaaacaggaaaggaggaggcaaaacagattcagaatctgcagaaagcaggcactcgtacagac

SEQ ID NO: 737569 - DNA, 100 bp, Homo sapiens
aacacatccatggcccttgagggagttcctgagctgctccaaaaaattctcgagtgggatgaagctctcttgactatgagtaaaggagaaaaggctcgac

SEQ ID NO: 737570 - DNA, 100 bp, Homo sapiens
accacctcagccaccctgaccactatcatcaccatggaaaaagtgacttgagcaggtgaatctggattgggaaagtcgacattaatcaactcattattcc

SEQ ID NO: 737571 - DNA, 50 bp, Homo sapiens
agatgactccttttcccacccaggcatttgatctaacagagcaaagatac

SEQ ID NO: 737572 - DNA, 75 bp, Homo sapiens
gcagctgcatgttcaagaagtggccggagagttctgcatgttgattcggcctgtcctcccaaagccaactctaag

SEQ ID NO: 737573 - DNA, 51 bp, Homo sapiens
cgccgtcatccttacggaaaaggtacaggtttgcagattccgccagcagca

SEQ ID NO: 737574 - DNA, 75 bp, Homo sapiens
ggaatttatggtcgatcgtcttcctactgtcttgttttttccctgcaacagagctgtaggtaaaacttgcctact

SEQ ID NO: 737575 - DNA, 118 bp, Homo sapiens
cttctatcatttttgttactcttcagtacaatgtcaccctcccagcaacagggccatctgaattagagatgaacatggggggacctcagtatagccaacaacaagctcctccaaatca

SEQ ID NO: 737576 - DNA, 100 bp, Homo sapiens
ctctgaggcgctatggggcggtggaggagacggcttggaaaacggagagactggggagaaatccaaaggggctattctgaacatttcatctggcagtggc

SEQ ID NO: 737577 - DNA, 82 bp, Homo sapiens
agggcctgcagcgggagctggacggcgagcgcgagcggcgcgagaaattcaaaaggtgatgacctatcaacagccattctca

SEQ ID NO: 737578 - DNA, 100 bp, Homo sapiens
ctggaaacaatggcatttacagaaagagtcaacagcagtggcaacaggccaccctgcagttctgtgtggtgaagccactcatggcggtcagcactgtggt

SEQ ID NO: 737579 - DNA, 50 bp, Homo sapiens
ggaaaatgtgatgcatgtctcagtggactctgcacttgtccaagagaaga

SEQ ID NO: 737580 - DNA, 100 bp, Homo sapiens
cggttctgcaccatcttcaggtcctactccaggggcgctcaggatgcagcagtctcggccctggctgctctatgcagtgaatattacatgaaggagccgg

SEQ ID NO: 737581 - DNA, 76 bp, Homo sapiens
gttaaacttcaggatgccttggccagtaatgttccggggctactgtgaaagggcctacaccatcctgcggcgccac

SEQ ID NO: 737582 - DNA, 76 bp, Homo sapiens
gtcctttgagacgttcatcaacaagagacccaacaagcctgcagaactgatcgtctattgtgcaagtggagacatt

SEQ ID NO: 737583 - DNA, 82 bp, Homo sapiens
cgacattcgaaggatggaagaagagacgaagagacagctggatgaactgcagcagaaggccgtggctagtgagatcttcaag

SEQ ID NO: 737584 - DNA, 74 bp, Homo sapiens
gacaagagacgatcattctgcaagcaggcaacctgaatacagaactgataaatttcaaacggaagagagtggca

SEQ ID NO: 737585 - DNA, 90 bp, Homo sapiens
ggccaaaaatgtgcatactcacagagttagagagagggatggtggtatgaacgctgccgtccgtgccgtggtgcgcatgggtatctacgt

SEQ ID NO: 737586 - DNA, 87 bp, Homo sapiens
ctgtgctcgcgctactctctctttctggcctggaggctatccagcgaatcccagtcagaagttccagcctgccactgttctctgatg

SEQ ID NO: 737587 - DNA, 75 bp, Homo sapiens
ggcgcggattcgccgaggcaccgaggcactcagaggagggagaaacaaaggcagcgctgccctcgggggagcatt

SEQ ID NO: 737588 - DNA, 90 bp, Homo sapiens
atccagaggagctcgactgggggtccaagtactatgcgtcgctgcaggagctccaggggcagtagagacgggggttcaccatgttagcca

SEQ ID NO: 737589 - DNA, 88 bp, Homo sapiens
tggcttactgaaggacatgattcagactgtcccggacccagcagctcatatcaagcctcgtcacgtgttcaatatgctaaagaagtat

SEQ ID NO: 737590 - DNA, 100 bp, Homo sapiens
gggagttcagcttttagagcaggtgtatgatcttttggaggaggaggatgaatttgatagagaggggtagaagataaggagtcttggcatgggaagcccc

SEQ ID NO: 737591 - DNA, 98 bp, Homo sapiens
gaaaacaacttgtatgtcttcacaaggatcagatgatgaacagataggtttcctgaggctcaagctctaggactggaggtgttccatgcaggcactgc

SEQ ID NO: 737592 - DNA, 100 bp, Homo sapiens
attcagtgtcatgtgaggacgtgcttcctgcttcatagataagagagaccacaccgctgttccagaccctctccatggatgatgtcctgcccctgatgcc

SEQ ID NO: 737593 - DNA, 132 bp, Homo sapiens
gggtcgggtcgcttccccgcagcatggaggacgatgcaccagtgatctacgggctggagttccaggtccagccgtccattccggtggaggcagaggcagtcctggggctctggggctcgggctttgtcaccg

SEQ ID NO: 737594 - DNA, 74 bp, Homo sapiens
cagattttaatttcagtgactgaattaaaaggtgtcaagaagctcagaatggacctgaaggagaagaaggagaa

SEQ ID NO: 737595 - DNA, 100 bp, Homo sapiens
cagagcggagacccccaggtcctgcgggcgcggatcagattttattaagacctctactggaaaagaaacagtaaatgccaccttcccggtagctatagta

SEQ ID NO: 737596 - DNA, 83 bp, Homo sapiens
cccgaggctgaagccattgctccacaggttggcaatgcaatggctgccatccggaagaaactggtgattgttggtgatggagc

SEQ ID NO: 737597 - DNA, 50 bp, Homo sapiens
cagaaacgtaaagaaatgcaattgaggttacatgttctctcgcattgagg

SEQ ID NO: 737598 - DNA, 100 bp, Homo sapiens
caacagcctggcgtccgccacgatcaggctaaatgaagatacaatccaagatgttgttcaggcagctgacctgctgctactgacggaccttaaaaccctg

SEQ ID NO: 737599 - DNA, 83 bp, Homo sapiens
ctgaagagcgacaagccgctggcagccgcggatctcaccgccgctcagggttctgtccacggtgtgtccaggaaaagaggaag

SEQ ID NO: 737600 - DNA, 75 bp, Homo sapiens
ccaggagggcgcaggagcgggactgagagcgcctggaggctcgagcggaggacctcccaggagctacactgcctg

SEQ ID NO: 737601 - DNA, 75 bp, Homo sapiens
gaggctggactctggtgactgtttgtctgagggaagtcaaaagcatgcaagcctacagaaaagcattgagaaagc

SEQ ID NO: 737602 - DNA, 74 bp, Homo sapiens
gaagaggaacagcctatgtgggcttccacggaggccaatgagtgccaggagcgccctgttgagtgtaagttctg

SEQ ID NO: 737603 - DNA, 100 bp, Homo sapiens
agcggcggaaaggataagcctcgacttagaagctaccgagttaccctaagaaagtgttgtacatcagtacacagaagagacggatgtgaagacaccaaga

SEQ ID NO: 737604 - DNA, 100 bp, Homo sapiens
ctggaggcgccactcatcacagagagtgccctggaggtggtccgcaagtactgcgaggatgagtggatgcggagattgtctccatcgacactttcaacaa

SEQ ID NO: 737605 - DNA, 100 bp, Homo sapiens
ggagctcgactgggccagcatcaacggcttctgcgagcagctcaacgaggactttgagggatgccgatggtcctgctccccttgaactacccaaccagtg

SEQ ID NO: 737606 - DNA, 73 bp, Homo sapiens
tggaaatgaacttcacaagttcctcatctgggacactgctggtcaggaacggatcgagctgggagcattagta

SEQ ID NO: 737607 - DNA, 82 bp, Homo sapiens
cccatccttattgctacagatgtagcctcccgtgggctaggtgagcgagtgctgtgctttcatgggcctcttctttatgaag

SEQ ID NO: 737608 - DNA, 100 bp, Homo sapiens
catgtgaaagcccgcttcaagaggttcggaagtgccaaggtcatccggtccctccacgggcggctgcagggtggagggtcactcaggatgtgtcaactgt

SEQ ID NO: 737609 - DNA, 75 bp, Homo sapiens
ctttgttcaggccactgcgtatgggcaggcctgtgaaaacacatcagagcgcgctgcaggtgcagcagaaggcag

SEQ ID NO: 737610 - DNA, 75 bp, Homo sapiens
ggctaagctcatcattgttactgagactctccaacatgtgccttctgaccatacaaatgaaacttccaacagtac

SEQ ID NO: 737611 - DNA, 84 bp, Homo sapiens
cggtcatctaaaggaggttttaaacagtataacagggtaaaggatttagaggataaacttcactctgtgcagctaaccaggaag

SEQ ID NO: 737612 - DNA, 82 bp, Homo sapiens
gaagtagagcacatagctgctaagataagtttaattagacacttcagaattttgatcacctaatgttgatttcagatgtaaa

SEQ ID NO: 737613 - DNA, 73 bp, Homo sapiens
aaaaatgtccttaaagcaattgagcaggctgatctactgcaggagggctcgttctcactgcttatgttcttcg

SEQ ID NO: 737614 - DNA, 100 bp, Homo sapiens
cggcgaggaatggcggtatttgtgagaggagtcggcgtttgaagaggtggaactcctagggcttttttgagagtggcctgcaggagttgttccaggcccc

SEQ ID NO: 737615 - DNA, 75 bp, Homo sapiens
ctggagtgacatgttcacgggaaggctgcggaccgagatcccaccagccctggtggagccgccaccaaaatgcag

SEQ ID NO: 737616 - DNA, 50 bp, Homo sapiens
ccgggagtttgaggaggttgtgctgtgtcagcgtgttatgatgccgtccc

SEQ ID NO: 737617 - DNA, 98 bp, Homo sapiens
aatagcacacttttactctacgcaactgttgctttttcatgcaggagagcctgtcctgcctccagtccacctgtggccttgtccagtctgtagagttg

SEQ ID NO: 737618 - DNA, 75 bp, Homo sapiens
ccgtcagcgggatcatccagcacatagtaagactttgaccccgacgcaggcttcagtgattgccgcggatcagaa

SEQ ID NO: 737619 - DNA, 96 bp, Homo sapiens
tgtggggcaccaagagcagccccggtctctcggacaccattttctgccgctggacgcaaggatcagttcgacagcttagacaagcatacacaatgg

SEQ ID NO: 737620 - DNA, 101 bp, Homo sapiens
acaagtccccagggaatgccacagcatcctccagcacctcaggtgctggagaatctggtaaaagcaccattgtgaagcagatgaggatcctgcatgttaat

SEQ ID NO: 737621 - DNA, 100 bp, Homo sapiens
gaggtggacgtgtacaacccgacgaggaacgaatgggacaagatcccgtccatgaatcaggagcagtttttgcaagaaaggatcaaagtgaacggaaaag

SEQ ID NO: 737622 - DNA, 71 bp, Homo sapiens
aagtgcgcaaacttgacactcaccctgaccggtatgtaaccactgaagtacacacacatgacatggagccg

SEQ ID NO: 737623 - DNA, 100 bp, Homo sapiens
cggacttacgtcacgcctcctggcacaggttggcataaacttggaggaggcagtggagagagcatcctggtatcacagcttcagcatggactgacgttag

SEQ ID NO: 737624 - DNA, 100 bp, Homo sapiens
tgtattaatgtctaagctgtctgtgaatgcccctgaattttacccttcaggttattcttccagttacacagaggactcagagagagtaatgataattacc

SEQ ID NO: 737625 - DNA, 98 bp, Homo sapiens
gcgtacttacacagaaactaattgagacattgaaaccctttggggtttttgaagaggaagaggaactgcagcgcagactgagagtaatcatgacacgg

SEQ ID NO: 737626 - DNA, 90 bp, Homo sapiens
cccgaaggtacgaaggcgaaatacccaaaaatatttgcaagaggaagaaaacagtccaccaagtgacagtcgtccagcatgctctgccca

SEQ ID NO: 737627 - DNA, 100 bp, Homo sapiens
aaatcattgtacagaatggaaaagtaattggtgtaaaatctgaaggagaagtcttcctggcagaattcaagaaaaccaatcaatttttcgcaataaaggc

SEQ ID NO: 737628 - DNA, 50 bp, Homo sapiens
gcagctgcctcagttcttagcgcagagtattgggaaagggtcgttgtggt

SEQ ID NO: 737629 - DNA, 75 bp, Homo sapiens
ggcgtttgggctacggttgttgttggcgactgtgcttcaagcgacgtatgaccttagcagacattgaacggattg

SEQ ID NO: 737630 - DNA, 100 bp, Homo sapiens
ggacacagtgatgaagaaagtgttagaaacagtagtggagaatcaaggtgcttttcagtgggaagaattggaagaagatatcaggaagaagttgaaagat

SEQ ID NO: 737631 - DNA, 100 bp, Homo sapiens
attttattactggcagcatgtatatcttttacaactgggcggagttaatggaagtcaaccatgatgacaaagtggtcaccaccgaacgcttcgacctttc

SEQ ID NO: 737632 - DNA, 101 bp, Homo sapiens
tgctgatccacatgagagtccactctggggagaagcccaacaagtgtacgataacgaaggaggcccaacttcattcaataaggagcctgacggatttatcc

SEQ ID NO: 737633 - DNA, 101 bp, Homo sapiens
ccgtgatcaaacactgcaaggaccccctccggctcaagtgtgtcaagcaaggacaagagcgaagccaccaggggagctctctcccaaaggccttgtcgccc

SEQ ID NO: 737634 - DNA, 100 bp, Homo sapiens
ccgcgcccgccgggcacacaagaatggtcactcactgctgatggttcttcagaactcaggaatcgtgttgcatgcattgtttctacccacctgagatggt

SEQ ID NO: 737635 - DNA, 82 bp, Homo sapiens
ccaccaaagcagctacagcagctgcagatttcacagcgtgtccagtgatttggagaatattgacacaggagttaattctaaa

SEQ ID NO: 737636 - DNA, 102 bp, Homo sapiens
gccaaaatatggtgtgaaggttggcctgacaaattatgctgcagcatattgtactggcctgctgctggcccgcagggctagacagcaacaagcagaattggc

SEQ ID NO: 737637 - DNA, 100 bp, Homo sapiens
ctggatcttcgaacttttgacacggctttggaaacgacgtcatgtgttagaaactcccatcaagactgaagcagacgttttggcagaaaaccaggttctt

SEQ ID NO: 737638 - DNA, 100 bp, Homo sapiens
acaagtggcagggcctctggaacattccgacctacaaccctcccccctcctgcacagagccctgcctgcccggccagtgggtttaccccggggctaatcc

SEQ ID NO: 737639 - DNA, 100 bp, Homo sapiens
cggcggaaaaccgaagttggaagtgtctcttagcagcgcgcggagaagaacggggagccaggtattgttgcagcatctggcagtgagactgaggatgagg

SEQ ID NO: 737640 - DNA, 76 bp, Homo sapiens
agctggtcctctggcttctgtccctgctcagtcggccaagaagccctgcccaggaggagatgttaaagtaacccat

SEQ ID NO: 737641 - DNA, 100 bp, Homo sapiens
ttttcagtccttcccccaagaccaggcgccagggcgaggttccccacgtgtgaaagtcaagaatctgattgaaagcatgcaaataaatgggtcagtgttg

SEQ ID NO: 737642 - DNA, 98 bp, Homo sapiens
ctgaagaagggctccctcgtgaagaacctgaaggacacactaggatgacatctgaactggagagcagcctaacgtctatggactggttaccacagctc

SEQ ID NO: 737643 - DNA, 97 bp, Homo sapiens
cacatctggtactttccgactgcgacgagggagtcgatttacctggagaaaggagtgcctggctgttatggaaagtggcatttattttcaactggct

SEQ ID NO: 737644 - DNA, 101 bp, Homo sapiens
agtgaggaccagctcgcaccgcgcaagacgctctatagggccaagaccagcttcaagtctccatggtaccagaaaacaacaacctcacagcacctgaacct

SEQ ID NO: 737645 - DNA, 50 bp, Homo sapiens
ggcccgtggacatgcgcacctcacacagatcttgagccagatgattgtgc

SEQ ID NO: 737646 - DNA, 83 bp, Homo sapiens
aggatatcctgacggccatcgccgccgacctgtgcaaggtgaaagcagccttcacaagagcttacaataaggaagcccacctt

SEQ ID NO: 737647 - DNA, 75 bp, Homo sapiens
gaagatacagatctggcagaaaactgtgaaggaggctcatttgacaaagctaaagaacgtgccaatggaatggag

SEQ ID NO: 737648 - DNA, 83 bp, Homo sapiens
cagctatgtcatcaacgggcgcaccaagcaggattcctggttttcaagcctgagctgatctctcggctggagcagggagaaga

SEQ ID NO: 737649 - DNA, 46 bp, Homo sapiens
accgttctcccaaggaatttccacgattacctaaaacctcgggcag

SEQ ID NO: 737650 - DNA, 98 bp, Homo sapiens
cgccacctaaggaagtcctcggcaattacgagattcttcttccctgcgttgactatttggaatgtgatctgggacagacagaatttacccctcctggt

SEQ ID NO: 737651 - DNA, 99 bp, Homo sapiens
ctcagccttcccatcactgccaaggtggccacccagataattgacgaccttgccaacctagtggagaacacagatgaaaaacttcgcaatgaaaccagg

SEQ ID NO: 737652 - DNA, 74 bp, Homo sapiens
gaaggtgtgtttcctcgccacaggtgagatgctgcaatttgtcagtaatcaagtgggagagttccctgacttgt

SEQ ID NO: 737653 - DNA, 90 bp, Homo sapiens
aattctgcagatgaacatttgattccacagctgggctatgtggcaacaattccagaaagctgagtctgatctggattacattcaatacag

SEQ ID NO: 737654 - DNA, 100 bp, Homo sapiens
ccggagctgggtctggagacgccgtggcagcctgaacggagtgtgcgacggattgggagggatttaatgtgcaaaatggcgattataccagactggctta

SEQ ID NO: 737655 - DNA, 82 bp, Homo sapiens
tcgcgcggcgctggagagagacaagatgtccgccagagctgcggccgccaagcctcgccgctcctgctatttgccaaccgcc

SEQ ID NO: 737656 - DNA, 100 bp, Homo sapiens
ccaaaatcaacacattttattcaggtaaagaacaagcacctttggagatgagtatgcatccagcggcaagcgctccactctcagtctttactaaggaatc

SEQ ID NO: 737657 - DNA, 87 bp, Homo sapiens
ttctcttgacaaccaagggcctccgtctggatttccaaggaagaatttcctctgaagcaccgaggctgaggggatctggcggtggag

SEQ ID NO: 737658 - DNA, 100 bp, Homo sapiens
gtggatgactgagtacctgaaccggcacctgcacacctggatccaggataacggaggctggtatgccgagattttgctgtcctggaggaccacaccctgg

SEQ ID NO: 737659 - DNA, 74 bp, Homo sapiens
gacagtggcggcggcgccatggcagggcttgcaggtccggcctctttggcctacccccgttggctccgctgccc

SEQ ID NO: 737660 - DNA, 82 bp, Homo sapiens
ccggaggaagctgatggtcatcttttccaattccagggtctccctccactgctgtagtaacccgggtccggggcctcggtgg

SEQ ID NO: 737661 - DNA, 98 bp, Homo sapiens
taactctcccaatcttgaggagtgatccctgtcccagcccctggaaaggggcaggaacgacaaactcaaagtccagaatgctgaccccctgaaggtgt

SEQ ID NO: 737662 - DNA, 100 bp, Homo sapiens
aggtggtgtcatggaaggctactctcattgtccacttggggggacttaggagccattgatgaaaaatacgacgtggctatatcatcctgttgtcatgcac

SEQ ID NO: 737663 - DNA, 51 bp, Homo sapiens
atggaggctgagcatttattcaggactctgtctacatcttccgggaagggg

SEQ ID NO: 737664 - DNA, 101 bp, Homo sapiens
aatgggcagaacgaattcagtgatatcattaagtccagatctgccaccaaagtccttggcactgtcaaatggttcaacgtcagaaatggatatggatttat

SEQ ID NO: 737665 - DNA, 100 bp, Homo sapiens
tccaaaccgtggctgctcgataaatcagacagaacagttaatcctcaatttaagcctgatctaacccctagaaacaggagagtgaagatggcattgaagg

SEQ ID NO: 737666 - DNA, 75 bp, Homo sapiens
ggaggctgccccaaatgaggaaggagagcttatggatggagaccaaacatccagatctggagtgccggcacaggt

SEQ ID NO: 737667 - DNA, 51 bp, Homo sapiens
cctgcatggattgggagatactgggagttgtgcagcatttgcagaacggtc

SEQ ID NO: 737668 - DNA, 83 bp, Homo sapiens
cccacaccctggccttgagggtgggagagagccagctcctcctgcagagcccccagggctgtgtggtctttgaggatgtgttt

SEQ ID NO: 737669 - DNA, 75 bp, Homo sapiens
gcaaaacacactaaagattgggcagtcactggggagaacggctacaccaagtccattgatatttggtctgtaggc

SEQ ID NO: 737670 - DNA, 80 bp, Homo sapiens
tctaggtgagtcgcggtgggtcctcgcttgcagttcagcgaccacggtcacacagcggcagtgataaagagcacagggat

SEQ ID NO: 737671 - DNA, 96 bp, Homo sapiens
tttgaagatggagagaaaattgtggtccagggagagcctggggacgacttttacatcatcacggaggaagccgagatcccccgcgaggtgatcgag

SEQ ID NO: 737672 - DNA, 74 bp, Homo sapiens
caactatatgcccaaggacgaccgcgaggcccagagagtggcattctgcatttctgtggcttccaagtcttaga

SEQ ID NO: 737673 - DNA, 75 bp, Homo sapiens
gggaacgtgagtatcaaccaaggaatcttctgcggcttgtccatagtgtgaataaaaactaaatcacatctataa

SEQ ID NO: 737674 - DNA, 50 bp, Homo sapiens
aaggaaggaatatatcctgactgattgagcgggacggtatgcgggccatc

SEQ ID NO: 737675 - DNA, 100 bp, Homo sapiens
cccccgacgccacctccgctgctgctgctgctcttcccgctgctgctcttctccaggctctgtgaattcctcagagagagaagactgtaataatggcgaa

SEQ ID NO: 737676 - DNA, 75 bp, Homo sapiens
gcccggatgagtacgataccgaagcgggctgtgtgccccttctccacccagaggaggcggttcctttggctcccg

SEQ ID NO: 737677 - DNA, 96 bp, Homo sapiens
ctgcttcgggcctctggaatttagcgctcgcccagctagccgcagcaattctgtggtgttcttggtcacacatttatggagtttctgaagggcagt

SEQ ID NO: 737678 - DNA, 100 bp, Homo sapiens
aaggttcacacggtcacagaccctcattcagaatgcttcttggacacttaatgattgttggcaagaaatgtgctgctgatctgggcctgaataagggtta

SEQ ID NO: 737679 - DNA, 98 bp, Homo sapiens
agagctgggagcagagattaaaagagttcggcgaggaactccagaatacaagacagatgatagattggtgtctacagatggatttatgctgaatttcc

SEQ ID NO: 737680 - DNA, 100 bp, Homo sapiens
tggaacttctgcccagctctccttggcccggattgcatttctacaaggcgaaagaaaaggtcaagagaacctgaagaaggacttagtaagaagaataaag

SEQ ID NO: 737681 - DNA, 100 bp, Homo sapiens
tacatcggccaacatttggccccacgggaccagcctcatgaactacctgcgcatgatggcagtggcagcaccatgatgcaaaccaagaccttctcctctt

SEQ ID NO: 737682 - DNA, 90 bp, Homo sapiens
aaacttgtcaggtctgaagaaaacatctcaatagtacacatcctaaatatgacttctgcaaagataatttcttttctgttaccacctgat

SEQ ID NO: 737683 - DNA, 100 bp, Homo sapiens
ggcattgaggactttccttacctgtttttccagctcacccactgccagcagagatggagcagatggtgctttttacccagatgaaatacaaaggccacct

SEQ ID NO: 737684 - DNA, 74 bp, Homo sapiens
tggaaatcatgtgaaatgtgtaaagatgctcttagctctttacaatattggagacatggtacatgctgcccggg

SEQ ID NO: 737685 - DNA, 83 bp, Homo sapiens
gctgcggctctcactgtgcgggctgctgctccagagggcggaggttttaaaatcaaagatgggaaaatcggagaaaattgccc

SEQ ID NO: 737686 - DNA, 100 bp, Homo sapiens
ctgtaaagttaccaaaattgctgtgctctcactttctgaaatggaacctcaggatcttgagctagaggcagttgaagatgactttgtggaaatgcggaag

SEQ ID NO: 737687 - DNA, 98 bp, Homo sapiens
ccgaggcgcaggtggcgctggcaaattgtggctactaatttgccccctgaagatcaagatggctctggggatgactctgacaacttctccggctcagg

SEQ ID NO: 737688 - DNA, 74 bp, Homo sapiens
aactacccattttcttttttggaactcatgagacgacatagctcgccttttgcaagaaaaggagttacaggaag

SEQ ID NO: 737689 - DNA, 74 bp, Homo sapiens
caatatcacagtggtattatgaggttatcaatactctggctgaccatcatcatcgtgggactgactttggtgga

SEQ ID NO: 737690 - DNA, 82 bp, Homo sapiens
cagaagtgatcgctcagctggagaacgcggctaaagttctgatgaacagtccacaggaagaggttgaactaaagaagttgaa

SEQ ID NO: 737691 - DNA, 100 bp, Homo sapiens
aaatggaagcctcccagtctgaattctgtggattttcgtctaaaaataacaagaatgggaggagaagggtaagaatgattgatgttggctgatattggag

SEQ ID NO: 737692 - DNA, 50 bp, Homo sapiens
ggtgggccttagaggagacgccgccggaaatggccagtgatgaactgagg

SEQ ID NO: 737693 - DNA, 82 bp, Homo sapiens
gtacggtccttggagtacggagcctgcagagggtcccacggtggaagcgagagaggaggcaatggctgccatccggaagaaa

SEQ ID NO: 737694 - DNA, 101 bp, Homo sapiens
tgttaccattgtgaaagaaggttgggttcagaagaggggtccttcaagggttagattacttacacagtaagtgcaagatcattcatactgacataaagccg

SEQ ID NO: 737695 - DNA, 98 bp, Homo sapiens
acctccccaactcgttgtttgcgtgcaatgttcaccagtcagtgtttgaaggagaagagagcaagttctcagcacagatattctacacctcacgcctt

SEQ ID NO: 737696 - DNA, 100 bp, Homo sapiens
gcctccgccggctaccatgtccgcccaggcgcagatgcgggccctgctggaccagctcatgggcacggctcgggacggaatcccaaactgaaaattctct

SEQ ID NO: 737697 - DNA, 92 bp, Homo sapiens
gggagcaaaaccaacgcctggctcggagcagcagcctctgagacctgcctagagctggaacgttacctccagagcgagccctgctatgtttc

SEQ ID NO: 737698 - DNA, 75 bp, Homo sapiens
aagaggatgatgtttttggtgaagaatttcgctaaggagtttgtgatcagtgatcggaaggagctggaggaagat

SEQ ID NO: 737699 - DNA, 101 bp, Homo sapiens
gtcatgctcgcttcacggaggcaatagctagccgaaaaccagaactgatggctctatttgcagtctttcagacaacattcttcttaacattgctgtccttg

SEQ ID NO: 737700 - DNA, 50 bp, Homo sapiens
gagcggcactcggcctgagcgggttgactatagtcaatggggccaatgga

SEQ ID NO: 737701 - DNA, 100 bp, Homo sapiens
cctccaagaagtgtaaccgccttgaagagctgatgaaggctggagtgtagtggcgcaatcttggatcaccacaacctccgtctcccaggttcaagcgatt

SEQ ID NO: 737702 - DNA, 100 bp, Homo sapiens
ttttttggcacccatgaaaccaacacagtcactcctggcggcaaaccaaacaaaaccagagtcatctggggaaaagtaactcgggcccatggaaacagtg

SEQ ID NO: 737703 - DNA, 86 bp, Homo sapiens
gggccgccgagctggacccggaccggttttggtaagactttgaccccgacgcaggcttcagtgattgccgcggatcagaagcctga

SEQ ID NO: 737704 - DNA, 115 bp, Homo sapiens
atctggtccttcatcagaactaggaaagcactgatttaaacatttggtcagacattttaaattgtttgaatcagcttgggtactgacaaatattgcttcaggaaattctcttcag

SEQ ID NO: 737705 - DNA, 83 bp, Homo sapiens
gtctcaatatctgtcttcggtggactccttcggcagtccacccaccgccgccgcctcccagaaataccgctaccaagatgaag

SEQ ID NO: 737706 - DNA, 87 bp, Homo sapiens
gaggatgaagctgctgctgggcatcgccttgctggcctacgtcgcctaacctaaaggcagacccagaagagctttttacaaaactag

SEQ ID NO: 737707 - DNA, 98 bp, Homo sapiens
tggtgcagctgtgaatggtgcccaggagctgagcgtcttgtagtgcctgaaggccgccatggcatcagatgaaggcaaactttttgttggagggctga

SEQ ID NO: 737708 - DNA, 82 bp, Homo sapiens
ccgagagcaacaaagcaggcgactacagccacgtgaaggaaggcccgaacaagacaggaacgtcctgtgccctggactgtgg

SEQ ID NO: 737709 - DNA, 80 bp, Homo sapiens
ccagctgcttcgggctgccgaggaccttctgggcccccacattaatgagaggaattccagggaagaaatgtggtacaatc

SEQ ID NO: 737710 - DNA, 100 bp, Homo sapiens
gttgcatccactttttggctgttctgaagagtgttactgtgaacattcatgcacaaatttttatgtggaggtagctaatccagatggcgacttccgactc

SEQ ID NO: 737711 - DNA, 100 bp, Homo sapiens
gaagctaaggcctgggttgggtaactgcctgacgttttactgatcaccattaacaaggacaccaaggtacccaatgcctgtttattcaccatcaacaaag

SEQ ID NO: 737712 - DNA, 96 bp, Homo sapiens
cccggggctctgatgtcaccgcgcggctgcgacggcccaggagcgcgtctcggcgggagcctcaggctggagtgcagtggcgggatctcggctcac

SEQ ID NO: 737713 - DNA, 100 bp, Homo sapiens
aaggatcatggcagtgtgcccattattgtacctttaattccaccacctttcataaagccaccagcaggaaacaaaccatcaggcctcccagaaagtatcc

SEQ ID NO: 737714 - DNA, 82 bp, Homo sapiens
cacagtggaaaggaaccgttctggatcagatgaggtcacccgaagacgaaaagttaccaacaggtcagacgcatttaacatg

SEQ ID NO: 737715 - DNA, 100 bp, Homo sapiens
ccagcccacgtggctgcccactttatcggtgacaagttaaacgagatgcacaccggctgcaccatgtcagcagcctggcctggctggacgagcacacgct

SEQ ID NO: 737716 - DNA, 83 bp, Homo sapiens
tcctgcagcggaggaagggccacgccggcgatggaggcggcggcggcggactggcggatacagtttatgtaacttgatggaag

SEQ ID NO: 737717 - DNA, 91 bp, Homo sapiens
ttctttcagatctgctggcgcttcgtctctcccgccatcatcttcttggaatcgaagcctcttaaaatggcagatgacttggacttcgaga

SEQ ID NO: 737718 - DNA, 74 bp, Homo sapiens
tgtggagagaaacatccgaattattgcagtcattggagaaatcgatgaagaaacagattctgcgcttgatttgg

SEQ ID NO: 737719 - DNA, 82 bp, Homo sapiens
ccctgaccactatcatcaccatggaaaaagtgacttgagcaggttactcaaatgagtcgtccagacttgattctctttctga

SEQ ID NO: 737720 - DNA, 98 bp, Homo sapiens
ctttacttggtgcaggaaggcagtctttgctacgtacagcaaaagggattatcttgaacacataacctccattggccccaggactacaggaagtccag

SEQ ID NO: 737721 - DNA, 83 bp, Homo sapiens
tattggctctagcacaagatgggacatcccctgaagtccaggtctcagccttagatccaaggacagtccaaggaagtcctaag

SEQ ID NO: 737722 - DNA, 98 bp, Homo sapiens
accttggacagcagattttggtttaatatctgattgggacaacattcagacccatttccagtcatgacaaaagatacagatattgtggatgaagccat

SEQ ID NO: 737723 - DNA, 75 bp, Homo sapiens
ctggcactgcactgggtaggaaaaagtgtgaaagaaaatgtctttatttaaagcccgtgattggtggtctactat

SEQ ID NO: 737724 - DNA, 75 bp, Homo sapiens
ggatgccctttgacctctgcttcctggtgcagagctcagatttcaaggtgctgctagctgaggaggggatagctc

SEQ ID NO: 737725 - DNA, 100 bp, Homo sapiens
agccgctgcccgcggacaagcagatcgagaccgggcccttcctcgaggcggtgtcccacctgccgcccttcttcgaatgtggaggctgtggacccacgag

SEQ ID NO: 737726 - DNA, 51 bp, Homo sapiens
cgagaaccgtcagtttgagccagatgctgtgagtaccagagtgcccactgg

SEQ ID NO: 737727 - DNA, 100 bp, Homo sapiens
aagttaattgccagagcattgagaagttcagctgttgtagagctctgagaaagtggccgaaagaaaagaaactgaattttttagctctttacccctgaag

SEQ ID NO: 737728 - DNA, 74 bp, Homo sapiens
attttgcaaaagtaaaattggcaagacatatccttacaggcagagaggctgctctttggcgtaaattgcaatcg

SEQ ID NO: 737729 - DNA, 90 bp, Homo sapiens
atggaaagtgcgtcatcctaaggaacatcgacggttaccctggataccccgatgaacaggaaatcaatgcctgaggctgacttcagctcc

SEQ ID NO: 737730 - DNA, 74 bp, Homo sapiens
ctccggacgcaaagctgtcatcgtgaaggagccatgtgttcacatgtcatgtggaccagtatttaactgtggaa

SEQ ID NO: 737731 - DNA, 100 bp, Homo sapiens
caggacagaggtcaaaggtctatcagtcccctaggttaaagagcaagtgtacaggaggattgcagcctcccgttcagtacgaagatgttcataccaatcc

SEQ ID NO: 737732 - DNA, 100 bp, Homo sapiens
gaaggaggcccagcaagtgtatggtgggaaggaggccaggacggtgtccgcaatgttgccagtgtctgtctgcagattggctacccaactgttgcatcag

SEQ ID NO: 737733 - DNA, 83 bp, Homo sapiens
ctgagtggttgtgtggtcgcgtctcggaaaccggtagcgcttgcagcatgaaacctgtttccctccaatcttgtggttgcagc

SEQ ID NO: 737734 - DNA, 90 bp, Homo sapiens
cttcacaggaattgccatttattcaagatggaaaaggtgatgtaaccattacaaatgatggtgctaccattctgaaacaaatgcaagtat

SEQ ID NO: 737735 - DNA, 74 bp, Homo sapiens
cctgaagagaacagccaggcctgcggcaggccaagttcatggagcacaaactcaagtgcacaaaggcgcgcaac

SEQ ID NO: 737736 - DNA, 78 bp, Homo sapiens
ggccaagtacttcattcgagatgagtttctgaggaaggaccagaagaagctcgagcagacagtggagcaaatgaagca

SEQ ID NO: 737737 - DNA, 106 bp, Homo sapiens
cttgaaggcagctgctgcaggtgaagagtaggcggcggggcagagagcggcctccgaggattacaattcctagaccttctgtggcatctacacagtcaacttcagg

SEQ ID NO: 737738 - DNA, 75 bp, Homo sapiens
gcggggctgaggcggccgcggggcccgagcgcaggatcatccagcagctcgtcaacggcatcatcacgcccgcca

SEQ ID NO: 737739 - DNA, 82 bp, Homo sapiens
gttcagcacacagtatgtatggattgcagtagctacagtacatactggaatgacatctttgtgttcctgttaagcacacgag

SEQ ID NO: 737740 - DNA, 80 bp, Homo sapiens
ccggggcgctcacggccacggcgctggtcaccggggtctgcctggagctagagccggtgcaggccacgcagaacaagaca

SEQ ID NO: 737741 - DNA, 100 bp, Homo sapiens
tcctgctctaagaggccatctgtgaggctcagtctcccaacacctctggtctcacttgccctggaacctctgtcagaaacttacgacagctaccatccac

SEQ ID NO: 737742 - DNA, 100 bp, Homo sapiens
agtcggctgccctggaccctgctgactggccagatggttcttacccaacgtttgatggctcatcaaactgcaatgtctctaaagagcaacagaataattg

SEQ ID NO: 737743 - DNA, 122 bp, Homo sapiens
caaggtgctgctggacgacacggtgccgctgacagcagccatcgaggcgagccagagcctgcagtcccacacgtcaggtcaattcagtgaagatatgatacccacagtgggcttcaacatga

SEQ ID NO: 737744 - DNA, 75 bp, Homo sapiens
ccatcctgcgggatgccttgaaccaggccacgagccaggtggagagcaagttgtgaccgagattcccgacgagag

SEQ ID NO: 737745 - DNA, 96 bp, Homo sapiens
gctacttctcagctttaccatccctggaggagacctggcagcagggtcactcatctaagaaagataacttggcagtcaatgcagttgctttacaag

SEQ ID NO: 737746 - DNA, 95 bp, Homo sapiens
gcacccccagtgggtgctcacagctgcccattgcctaaagaagccggctgcgtgcacttttcctacaaagcatcgtgtgagatccgcgtgcttat

SEQ ID NO: 737747 - DNA, 89 bp, Homo sapiens
tgttcgtcttctctctcctcgattgttgcgcgctcatcttcctctcggtctacttcaaatggtgatttctttgctaacatggtagtaga

SEQ ID NO: 737748 - DNA, 50 bp, Homo sapiens
gagtaaccctcactggagaatccagaggcccggaggctgtttgatgtcct

SEQ ID NO: 737749 - DNA, 80 bp, Homo sapiens
cacaaaccgctgccagaaaacctattactatggaaagagaaagaagatctccaagccccccatcggggaaagcaaccccg

SEQ ID NO: 737750 - DNA, 76 bp, Homo sapiens
ctgggttcatttaccctttggtcggaacgtatgaatctgatgaacaagaaaagagtgcctatcaagagtatgacag

SEQ ID NO: 737751 - DNA, 100 bp, Homo sapiens
aaccccgggctcggcggcggcggccaggtccctgctgaatcacacgccgccatccgggaggcccagggaagggttgtgagtcccggcccagcccctccac

SEQ ID NO: 737752 - DNA, 75 bp, Homo sapiens
gatagggagcgatctccgagcgaggcggcaagatggacgcgggatttttccgcgatcctctacaccacatactac

SEQ ID NO: 737753 - DNA, 90 bp, Homo sapiens
ctgtggctaccatgttctctcgcgcgggtgtcgctgggctgtcggcctggaccttgcagccgcaatgtgcatgcaagatatgggaaatac

SEQ ID NO: 737754 - DNA, 100 bp, Homo sapiens
aaaggcacctacggcaaagtcaagcgggccaccgagaggttttctggccgagtggtgtgttgaggctcctggaacacggggaggagtacgtattcaccct

SEQ ID NO: 737755 - DNA, 82 bp, Homo sapiens
cggtgcagttggcaagatttaaaggagcgggctgcagatgacagcaaagaggttgagagcttccagcagctgctcaatgctc

SEQ ID NO: 737756 - DNA, 50 bp, Homo sapiens
cgacgctgctggccagggtccagaaaaggtactttgtggactatcggaga

SEQ ID NO: 737757 - DNA, 82 bp, Homo sapiens
cacaagcagatctactactcggacaagtacttcgacgaacactacgagtaccgagacaagaggagcagcagcggcaccgccc

SEQ ID NO: 737758 - DNA, 75 bp, Homo sapiens
ctctctcctgatacagcaggcgctcaccatgttccctggagggctgaaatctctttaatgatggagggaagcagg

SEQ ID NO: 737759 - DNA, 100 bp, Homo sapiens
acttagatcccgccctggagctgggtcccaggaatgtgctgctgttcctgcaggacaaggaggatgaaggagaagatgactaaatagaacactgatggat

SEQ ID NO: 737760 - DNA, 98 bp, Homo sapiens
gttggccctgtgatccctcaagactggtccacggagtgtatgaccacaaacagccatcaagtggtacacctgatactgttctatgagaaccggctgaa

SEQ ID NO: 737761 - DNA, 82 bp, Homo sapiens
aaaagaccatcctgctctcaactacaacatcgtttcaggagcttactcacatagcatattggtatatcaaaatgaaatgcaa

SEQ ID NO: 737762 - DNA, 75 bp, Homo sapiens
gtccgcgtgacgctcctgcctgcgcgcggccaagccatgctcggccccaggcaagtgaaccggagcaaacgactt

SEQ ID NO: 737763 - DNA, 50 bp, Homo sapiens
cagttttttctaatggctattcaaggttcacgcaaagaatctgctccaca

SEQ ID NO: 737764 - DNA, 98 bp, Homo sapiens
ccatgccccagattcctgttgcttcagtcactcctacagcatcactatcagtggatccaaacttctacagcaaaaacttacttcttttaggaaagaca

SEQ ID NO: 737765 - DNA, 98 bp, Homo sapiens
ctttggagcaggcgctgggcgagccgtgcgatctggacgcggcgctgctgaccgacatcgaaggtgtatggaatgattcggttctcaggcaccacagg

SEQ ID NO: 737766 - DNA, 75 bp, Homo sapiens
tctactttctgtctctaggaatttcactactctagggccgttgctccagggagaactgcaaatatcttcatccac

SEQ ID NO: 737767 - DNA, 100 bp, Homo sapiens
aaggatgacatatttttggacctgaaacagaaattctggaacacctatatgatctgggcacgaaagcttctctctgtcccttggcttctgtgtggtccca

SEQ ID NO: 737768 - DNA, 100 bp, Homo sapiens
ccgagttgaagagcaaaaccaagtgaaggaaacttcactaagttcagggtgacaagggaggaagtacagagccgcagggccgtaggcagccatggcgccc

SEQ ID NO: 737769 - DNA, 101 bp, Homo sapiens
cagggggtgatcaagtacatggggccggcaggtgctggagaatctggtaaaagcaccattgtgaagcagatgaggatcctgcatgttaatgggtttaatgg

SEQ ID NO: 737770 - DNA, 100 bp, Homo sapiens
aggaagctcaagtatatcaagcattcaaattgctcacagctgatcctaagccaaatttgtatcctactgtggggcttcaaacaccaggagaagtggtcga

SEQ ID NO: 737771 - DNA, 82 bp, Homo sapiens
gcacgtagaattaagacggagttcctagtgcaaatgcaagaaagtgactgagaccgaagatgatagtgatagtgacagcgat

SEQ ID NO: 737772 - DNA, 101 bp, Homo sapiens
gatgttaaaagttacctgtttcggaatgcttttgtgctgctcacagtcaccgctgtcattgtggggtgcatctgagaaagacatcgtgcactctggcttgg

SEQ ID NO: 737773 - DNA, 100 bp, Homo sapiens
atttcaaggagcagatagtgaaatcaagtttgccaaaaccctggaagaaggagatgccaatagacaaattagcgaatacaaatttaagctttcaaaagca

SEQ ID NO: 737774 - DNA, 90 bp, Homo sapiens
tggaatcacccagcatgttgcaaggtctcctgccagtcagtctcctcctctctgttgcagggggctgttgtggttccgactataaacagt

SEQ ID NO: 737775 - DNA, 125 bp, Homo sapiens
ggggtctttaggatttgcagctccaggaagcgagatgtcgaagccgccacccaaaccagtcaaaccagactactgtcagaggatgtaggaatggacatcccctttgaagagggcgtgctgagtcc

SEQ ID NO: 737776 - DNA, 101 bp, Homo sapiens
ctggctgtaacccaaactattctgccttgcaggtcaacactggacgtatgaggatcctctccttcatcctgcacacaatcgtgcgaggattcatccactcc

SEQ ID NO: 737777 - DNA, 82 bp, Homo sapiens
agcaactgccgcacccttgaaaggaggcccctgccgtgtggacccgtaaaataaaatggagatatgcagcccctactcagtg

SEQ ID NO: 737778 - DNA, 100 bp, Homo sapiens
aacatcacatggggtgatcaagatctattgaatatcgtgttttttcataatccagcattactctactgactggcagagacaggagaggtagatgtccacg

SEQ ID NO: 737779 - DNA, 75 bp, Homo sapiens
tccggagatcccggcctcacttcgtcccactgtggttaggggtatggcgtcatcattgtgggcaacccgaaggca

SEQ ID NO: 737780 - DNA, 83 bp, Homo sapiens
cgagaagagcagagcggagggagccccagacacgattgaccctgctacgggaatggttatgaatctggctgatctcaaaaaat

SEQ ID NO: 737781 - DNA, 75 bp, Homo sapiens
gcaagcttaaagacatcatgcagaaagagtccttgtactgcttacaccaacaaccaagcggacatcgccacccag

SEQ ID NO: 737782 - DNA, 97 bp, Homo sapiens
aattgctcaatgtcttggagtttaccagctggagtcacatcagaagccgcgcagactatcaccacggctcctgatgcctcagggcctgaagcaaaag

SEQ ID NO: 737783 - DNA, 50 bp, Homo sapiens
cccattatgggtaccatcacctcggagccagagaagaagatcgtccagga

SEQ ID NO: 737784 - DNA, 83 bp, Homo sapiens
cattggcttctttgtgaaattgatccatattcctattaataacatcattgtccggcagcaaaagtggaccaagaaaccttgac

SEQ ID NO: 737785 - DNA, 108 bp, Homo sapiens
caggaggcgctgcggtattaccggaggaaggtggcccgctggaacagccaacaagtcccaaatttggaaaagctgactcatatgaaaagctggaaaaactaggggaag

SEQ ID NO: 737786 - DNA, 75 bp, Homo sapiens
tttccggctgcaccgcggcatgaatgtgcccttcaagcgcctgtctgacatcaagcctgccaacgtgttcatcac

SEQ ID NO: 737787 - DNA, 100 bp, Homo sapiens
aaatatttgccaaaatattatggcatctggtcacctcccactgcaccaaacgacagtgaccaacaccttcaggacgaacaatatccagatccagagccgg

SEQ ID NO: 737788 - DNA, 82 bp, Homo sapiens
gaggcctggatgagcacaagaggacgcacactggagaaaagccttttcagtgtgatgtgctgactgggttacttttttaaac

SEQ ID NO: 737789 - DNA, 82 bp, Homo sapiens
ctggtataccatcgtcaccatgacaacactaggcttagcagtgtctgcaaaaacgaatcttttcctacaacctgttaactga

SEQ ID NO: 737790 - DNA, 48 bp, Homo sapiens
gatctggacctggcctggcggcatctacaaatctgaaggacaaaacat

SEQ ID NO: 737791 - DNA, 82 bp, Homo sapiens
ccagaaaatcttgtggacaaatccaggggaaggtgccacacctccctggatgatccaagatgaagaatacattgctgggaac

SEQ ID NO: 737792 - DNA, 82 bp, Homo sapiens
cttcagaagaccgaagcgttcgtatctggaaggagggccctcctggacccgggagcggaccctggtggcggtgaagcccgat

SEQ ID NO: 737793 - DNA, 100 bp, Homo sapiens
agccggaaggtcaccagcctggacgagctgctggaaggctacatatcgaaatcgaattgtgagccaaaatctcagcacaagggacagaaaagcaatacat

SEQ ID NO: 737794 - DNA, 83 bp, Homo sapiens
tccatctcttcagagatgaaccaggtgtggacactgccagcggctgcagccgacttggaatgacctgggagacaaatacaaca

SEQ ID NO: 737795 - DNA, 100 bp, Homo sapiens
agcagcccgacgcaaaccaaggatctggggatcttcgcactatcccaaggtccgaggaggcgtcctccgcccggtggcccagagggaagcggggcacggc

SEQ ID NO: 737796 - DNA, 75 bp, Homo sapiens
tcatgcaaggatattcctcatatatcatttatcaggaactgttgccgttattacatcagatgggagaatgattgt

SEQ ID NO: 737797 - DNA, 75 bp, Homo sapiens
cgtttgttcaggaaccaccagtgacagagtcttctacattaagtccattgagccacagaaagtatcgacattagg

SEQ ID NO: 737798 - DNA, 90 bp, Homo sapiens
gcacctttcggcttctgagacggcggcagcagcggcattcagctttaatgaagcaccagttgagattcccagtccttctgaaaccccagc

SEQ ID NO: 737799 - DNA, 100 bp, Homo sapiens
gagtttcatgaagagcccaaaacctattacgaactcaaaagtcaaccgctgaagagcaggttcccgtgtcagtggctatgatgacacctcaagttatcac

SEQ ID NO: 737800 - DNA, 100 bp, Homo sapiens
ctggaccgagctcaccagctgtgtgccctccgtggtggacggcaagcgcgacgccaggctgagaccgtccaggaaagaccacagcaagattctttcattc

SEQ ID NO: 737801 - DNA, 83 bp, Homo sapiens
gccgcagccatgaccgtggagttcgaggagtgcgtcaaggactccccgcgcttcagagaggtggagaagagcgagtacttgag

SEQ ID NO: 737802 - DNA, 100 bp, Homo sapiens
gaatccctttggtgtggacatctgctgccggaaggggtcccgaagccccctgcaggaactctacaacccaatccaggtgtcatagagacgtcagatcgac

SEQ ID NO: 737803 - DNA, 100 bp, Homo sapiens
cccggcgcgatgcccttcaggaaagagagaaaaggaacagttccgtaagctctttattggtggcttaagctttgaaaccacagaagaaagtttgaggaac

SEQ ID NO: 737804 - DNA, 75 bp, Homo sapiens
aactctttgggtgctgctataggctcagccctcagtggatttggttcatcagctaactgccttctatgaaagcag

SEQ ID NO: 737805 - DNA, 100 bp, Homo sapiens
agtagaggagaaagctaaaaataatgccgttttactgaggatggctgacttcaggctgcggaaactgaaggcaataatgttggcttttggaaggggcaag

SEQ ID NO: 737806 - DNA, 50 bp, Homo sapiens
ggatgatccattcagcccctgcagggctcttcaaaggcctaaaagctaaa

SEQ ID NO: 737807 - DNA, 100 bp, Homo sapiens
gctgtggaaggctctggataaggaccagtacctgcccaggaaactgacaagctgtaacccttcacgtgccttaccttcactcaatactggcagctcttcc

SEQ ID NO: 737808 - DNA, 100 bp, Homo sapiens
gcgttcccctgagtgctcggaaaatggccttgtctccggtcgttcccgttcaggagcaggactctagtatgggattcctttctacctacaatacctcgcc

SEQ ID NO: 737809 - DNA, 100 bp, Homo sapiens
tctctttgcagtgaacggcattctcttcaatcatgagagtcccagaagaggtgttcctgatccaagcagaaccctgttatttgaagagcctgagaaatct

SEQ ID NO: 737810 - DNA, 85 bp, Homo sapiens
atttgaaaaatgaagatgatgtagacactggactattagagcacaaagttatcattgttgggctggataatgcagggaaaactac

SEQ ID NO: 737811 - DNA, 73 bp, Homo sapiens
ccaaatccggaagaagatgatggaaatcatgacccgagaggtgcatcctgagctctacgtggacaagtcgcgg

SEQ ID NO: 737812 - DNA, 90 bp, Homo sapiens
ctacattttcgatagagacgttttccggagggattccatcatagccctgggcgctgcctatggcacagccaagagcggtaccggcattgc

SEQ ID NO: 737813 - DNA, 73 bp, Homo sapiens
cctgaccctgatttcacagtccgagacgtcaaactcctagtggttaaacaggtgttcaaggagctggagtttc

SEQ ID NO: 737814 - DNA, 100 bp, Homo sapiens
tattagcacagcagaccttggtgatgtgctacaggatgaagatgagctggattcccacaccatggtgaagactagtgtggagagtgtgggcaccatgcgg

SEQ ID NO: 737815 - DNA, 82 bp, Homo sapiens
gataagaagcacctggatgagacatttgctacagcatcccacattaagtcaacggtgtacaagggagaagaagccacattcc

SEQ ID NO: 737816 - DNA, 83 bp, Homo sapiens
cacatttaagagagctctggacaagctggaatgcatccaagagaatccctcaacatgctggggatgaacgtagggcacttagc

SEQ ID NO: 737817 - DNA, 50 bp, Homo sapiens
ctctcacacagacttttgatggacaggagacaaatttacatgtattggag

SEQ ID NO: 737818 - DNA, 75 bp, Homo sapiens
cctggatttaggcctacacctgcaactaccccagaatatttttctcagcacttgggcgagtatgagaatgtacta

SEQ ID NO: 737819 - DNA, 100 bp, Homo sapiens
tccctttccatcaagtgtcctacgtaaaggagtattggaatgatgtgttcagggaacccgagcgtcatgttagggtgaagcagaggacctcagtgctgaa

SEQ ID NO: 737820 - DNA, 100 bp, Homo sapiens
cggtcagggtcaagtcgtgttctgatcactactgacttgttgtgcgtcagcatttatcccgtttgccaaccattgatccgaataccaggaccctgctttt

SEQ ID NO: 737821 - DNA, 93 bp, Homo sapiens
caccctcgctccctctgctcttcctcccttcgctcgcaccatgggagtgcatccgccccaacccttttccccctcgtctcctgtgagaattcc

SEQ ID NO: 737822 - DNA, 75 bp, Homo sapiens
atcaccagtatttctcctataaccagatggtggcgtctttcaggcgcttacagcttttagatggggaatatgaag

SEQ ID NO: 737823 - DNA, 115 bp, Homo sapiens
ctggaaagacaagtccttggtcaaatgatgcaaccctgcagcatgttttaatgagtgactggcaattttctggagtgtttgtgactggactttaacatttccaaaatgtggcgac

SEQ ID NO: 737824 - DNA, 100 bp, Homo sapiens
ctgcaaggacaagaaccttgccaagtacagtgccatctaccacaaaaggctatccgtggtcctgaaccagttatgtgtgttgcatgagaaaacgccagta

SEQ ID NO: 737825 - DNA, 88 bp, Homo sapiens
agcgtcccggcgccgtcgcgccactcctccgaatacactgcctctaggactgggacagatagccactgagtacctgcttcaaatcacc

SEQ ID NO: 737826 - DNA, 87 bp, Homo sapiens
agcattttgctgaagcattcaaggccaagaatgtggtaactaaggaagtggatgctacatctaaagaggccaaatccttcttcaagc

SEQ ID NO: 737827 - DNA, 82 bp, Homo sapiens
agtggaaactgcctgctgtctggggacagggagcacgtgaattgcctctgcttacgttcaggccctgtcctaaacccagccg

SEQ ID NO: 737828 - DNA, 96 bp, Homo sapiens
ttgtgaggcctccccagccatgtggaactgtgtctgcaattgaactccaaggtgcagaatggtttggaaagtagctgtattcctcagtgtggccct

SEQ ID NO: 737829 - DNA, 97 bp, Homo sapiens
tttcttggcccttgttcccccaaatgtctgactctgactctcggactgagaaacgcaagcagcccctgtcaaagggaacaggaagcagtccacggag

SEQ ID NO: 737830 - DNA, 75 bp, Homo sapiens
gagacatcgtagtgggacgaatcacagaggcggcttcaatgatccatcctaaagaggtgccccctgaggccatct

SEQ ID NO: 737831 - DNA, 100 bp, Homo sapiens
cttccaccgctgctgctttctctgcaatcctcagtttgtggtctgccagctaaaggtgaagatatattcctccaattcaggacccacacgacgggaagac

SEQ ID NO: 737832 - DNA, 75 bp, Homo sapiens
agacaactcatctcttacccacaggtttcctatcctgggagcaggagagtgtgcctatttgaatgacaaaggtgc

SEQ ID NO: 737833 - DNA, 75 bp, Homo sapiens
cgaaggtggagcaggtcctgagcctcgagccgcagcacgagctcaaattccgagcgccatcatgaccgggtccta

SEQ ID NO: 737834 - DNA, 100 bp, Homo sapiens
aagctaaccacgctggtggatgccgacgccgaggccttcaccgcctacctgctgccgcagcgggaaccgcaagagcttggtggtaggaacgccctccccg

SEQ ID NO: 737835 - DNA, 74 bp, Homo sapiens
acagtgttcagcaggtcctgttggagatgatagtgctggagaatctggtaaaagcaccattgtgaagcagatga

SEQ ID NO: 737836 - DNA, 82 bp, Homo sapiens
caagatattaaagttactgctgttaaaaaggttttgactggatcatctcgtcaaagttattcacctggctatcaggatttca

SEQ ID NO: 737837 - DNA, 99 bp, Homo sapiens
ggaccgagttccacaagaaggactgcggggacctggtggccatcggtcaaaatgcagatcttcgtgaaaacccttaccggcaagaccatcacccttgag

SEQ ID NO: 737838 - DNA, 100 bp, Homo sapiens
cttaaaaccacgtggttcgatggctgccgcggctacgctgaggctctccgctcagatagtacacatcctaaatatgacttctgcaaagataatttctttt

SEQ ID NO: 737839 - DNA, 100 bp, Homo sapiens
gggtcatccttgcccttgtcctcccctttcatccctatgtggaaaacgtttcgccgtgaggaagatgcggaaaaggctgtgattgacttgaataaccgtt

SEQ ID NO: 737840 - DNA, 86 bp, Homo sapiens
tcaacaaccgtggctcacaagatgaaagagcacgtaaaaaagagtgtcaagtggacatgcaaagcttgtggagagaagcagtcctt

SEQ ID NO: 737841 - DNA, 75 bp, Homo sapiens
agggaagatgagaagcccctggtgctggagatgctgaaggcccccacagaacacctgaactcaaatgagatgccg

SEQ ID NO: 737842 - DNA, 83 bp, Homo sapiens
gtttgacttagtggaggaggtgcagctcaacttctaccagttcctcggggtgcagcaggatccaaactactggatacaggtgc

SEQ ID NO: 737843 - DNA, 100 bp, Homo sapiens
aggcagagatggcagtgggggctcccgtggcaaaagagaaggaagtgctagcggtgaaacgggtatgcaggagattagaagccagtgggcatgagcgtgg

SEQ ID NO: 737844 - DNA, 97 bp, Homo sapiens
gaaggcagtgaagcgaagaaaaggatcccagaaagtttcagatttggactgagcaacaaatttgaatctgaattcccttcttcattaactggaaaag

SEQ ID NO: 737845 - DNA, 123 bp, Homo sapiens
cacctcggccgccctgcccagctgcctgcccccggaggtgcccacgcagctgcctggacaagtaacttcagtacgccagcacggttgagaactattgttcaacgcgaacttcacatatgaagc

SEQ ID NO: 737846 - DNA, 96 bp, Homo sapiens
aagaactcgatggtgttgtgagagatttctgcagtgaagattgctgtaaaaaatttcaggattggtactacaagttcaaacttctcatggaacatc

SEQ ID NO: 737847 - DNA, 100 bp, Homo sapiens
cagagtacgatactcaggtcaaagaggatgaaagtcctggacagacttatcacagagagagaagaaacgcaatcactatgcagccacagaatgtccaggg

SEQ ID NO: 737848 - DNA, 50 bp, Homo sapiens
ctacatgcggttagatgacagtgggattgcctccaccaggcggtgtgaag

SEQ ID NO: 737849 - DNA, 74 bp, Homo sapiens
gcgaatatcgtcatcgttagaagtgattctaccagaaaggaatgaagaacagaaccttcaggaattgagtcaca

SEQ ID NO: 737850 - DNA, 82 bp, Homo sapiens
cctggccaaaatcactcagcagatgccaaaggacagagcgggatgccaccagcttgtccaaagggaagttccaggagctcct

SEQ ID NO: 737851 - DNA, 76 bp, Homo sapiens
tcatctcatttcacaactcaaacttggaatggatttgaccaaggtccttatgtcgtcagaagatcgagaagctcag

SEQ ID NO: 737852 - DNA, 100 bp, Homo sapiens
catcttgtgatcacccaaatatagtcaagcttctagatgccttctattatgagaacaatctttggcttacacctcctttatacaacattactaagatgga

SEQ ID NO: 737853 - DNA, 100 bp, Homo sapiens
ctaaacttgatccaaagacaatgaagggtgtgtttgaccatcgaatgaagtgctggcagaaatgggaagatgctcaaattactttgctcaaaaaacgtga

SEQ ID NO: 737854 - DNA, 101 bp, Homo sapiens
tcctgtcccgctggccctctgtctgcctgtgtccctgaccatggctccctgcagtaccctttaacgggatgaattgtaaaagcaacatcagcttgaccagt

SEQ ID NO: 737855 - DNA, 82 bp, Homo sapiens
gaaaccgcctcgaaaacggagaagcaggcccgatgagagaaagggaaagttaaggatgctggagcagaacaatggatttctc

SEQ ID NO: 737856 - DNA, 96 bp, Homo sapiens
agaaccctgcggaggagaccggcgaggagaagcaggtgaagaagatccatgagaatgagaagcgcctggaggcaggagaccaccccgtggagctgc

SEQ ID NO: 737857 - DNA, 50 bp, Homo sapiens
cagcctcctgggtagctgggactacagcttcttcatattgacaaaagaag

SEQ ID NO: 737858 - DNA, 90 bp, Homo sapiens
cgagcgggtgcgtctgccgcagagtcggcacctgaaggacatggagagccgagactgtctgaagctgggcccacctgctgagggagaagt

SEQ ID NO: 737859 - DNA, 51 bp, Homo sapiens
aggatttctaagcaggaactccccagtgtgccggtccaacaaaagcccttg

SEQ ID NO: 737860 - DNA, 100 bp, Homo sapiens
ggcaagagcctcaaactcaacactgcagaagatgtgaacagctcttcatggagatggctgaccggatggcacaggatggatggcgggacatgggctacac

SEQ ID NO: 737861 - DNA, 100 bp, Homo sapiens
gggaaatgggaatgtacacgataattaaagagtaaagttgtgctcaacggttgctgaagcacatgtgcctaatttcatttttgatgagttcagaacagtg

SEQ ID NO: 737862 - DNA, 100 bp, Homo sapiens
gaacagaggcgacggctagaagaggccgattcaacagtcattgagaagtggatggatggcgtgaaagacttcttaatgaaacagcaggctgcccaaggag

SEQ ID NO: 737863 - DNA, 90 bp, Homo sapiens
gccgcggagacctacctgcggcgtcggcagctgctgctccgagatgaagatgacgccaacagactcggggagaaggtgatcctgcgggag

SEQ ID NO: 737864 - DNA, 75 bp, Homo sapiens
agatcatggggcccaagaaaaagcacctggactgttatgaagttcatggaatggaaaaaataccagaagatggac

SEQ ID NO: 737865 - DNA, 102 bp, Homo sapiens
tacgacatcctccaggcaatgagatttaccgcaagggcaccatctccttctttgagattgatggacgtaagaacaagaatgatctctgcctttcacaaagac

SEQ ID NO: 737866 - DNA, 83 bp, Homo sapiens
ctgaaccgcgcggccgaaccctccgcttccccgggcgctgcctggacaggcctgcctgcgtgctgggacatgtctggcctcca

SEQ ID NO: 737867 - DNA, 75 bp, Homo sapiens
ggaagcacgttcagtctggatacctccatgatgagccttcccagcgtccccgtcttcctagaggtttctggccag

SEQ ID NO: 737868 - DNA, 100 bp, Homo sapiens
ggtccatcctcttgctgagcacattgaaaggaactggctatctttgatctcttcctccagccctgttcctgtattgggtaatggcctttattacaaaaac

SEQ ID NO: 737869 - DNA, 96 bp, Homo sapiens
ttacataccatccgtcattaccagcatgtgttggctgttgacccagaaaaggcggcccagatgaaatcccaggatttgtacacacagatatgacga

SEQ ID NO: 737870 - DNA, 75 bp, Homo sapiens
agaaacgcaagtccatgtacacgcgagattataagaagcttgggttcattgttctggagacagcctgtatttctt

SEQ ID NO: 737871 - DNA, 75 bp, Homo sapiens
catgtaagacaacctcaccaaatacaagaaaacagtgtccaggtaactgtggagaattttttacgggtattaact

SEQ ID NO: 737872 - DNA, 130 bp, Homo sapiens
ttatcctctgtttctctgctgcaccgacctcgacgtcttgcctgtgtcccacttgttcgcggcctataggattttttatcaagcagaaatgcatcgaacaacgagaatcaagatcactgagctaaatccc

SEQ ID NO: 737873 - DNA, 90 bp, Homo sapiens
tggagatgcagtggataatagtaattgaccattacataactgaagactcccaccttcaggcaggattgggtagtacgtgtttgtaactac

SEQ ID NO: 737874 - DNA, 89 bp, Homo sapiens
cagaaaatagcagccaggaaccaagaaaacttgtgaagctgtggtctaccaatctagacaactcagtggcaagcattgaggcaaaggct

SEQ ID NO: 737875 - DNA, 83 bp, Homo sapiens
aggctctgcgggaggtggagcacctgaagagatgccagcagggggatatgagactttctactcggaatatcctgagtgttgcg

SEQ ID NO: 737876 - DNA, 98 bp, Homo sapiens
gaacatccactagcctcactaaagcggggatctgatgagcttctttcttctggcatcattaacggaccttttaccatgaatagttctactccttctac

SEQ ID NO: 737877 - DNA, 90 bp, Homo sapiens
gctatggctgctgtcacacattacctgtatctttgccagtttagctggatgctcattcagagagcagtcatgatggcctgcactccacac

SEQ ID NO: 737878 - DNA, 87 bp, Homo sapiens
aactggtcgaatgaggcacctaaaaattgtataccgcagattcagagcccaagcctttcattgatgtgagtgtcatcacaagattta

SEQ ID NO: 737879 - DNA, 98 bp, Homo sapiens
gcccagcggcttcagctgtcaggaggacgatttcctggggggcatggagtgcaccctggggcagggaaatgtttcaacgtgcgcaagcgttgcggcgg

SEQ ID NO: 737880 - DNA, 74 bp, Homo sapiens
atgctacagtcaatcaggttctggcctcccgatacggggttacaaaagcaggttggtcactggaagatgttgac

SEQ ID NO: 737881 - DNA, 90 bp, Homo sapiens
gggggagcctcagcaggattgctgtgtgaaaaccgagctgctgggagaagtcctgtgcctcctgattgctgagtgttcacctggaccttc

SEQ ID NO: 737882 - DNA, 74 bp, Homo sapiens
ggtgaccctgccgctggcgagcgccaccgcatgggtcaaaatgcagatcttcgtgaaaacccttaccggcaaga

SEQ ID NO: 737883 - DNA, 90 bp, Homo sapiens
ggctcaagcagtcctaccatgtcagccttcccagtagctgggaccacagattacagagtcacgggagacaccgttctgtgttactgctgt

SEQ ID NO: 737884 - DNA, 100 bp, Homo sapiens
cttcccaccccagacgtcaccacaggggaccctcctggaggctgagaactcccggctgcaaacacctggcggtggctccaagacttccctcagctttcag

SEQ ID NO: 737885 - DNA, 101 bp, Homo sapiens
catggcgtacgcctatctcttcaagtacatcataatcggcgacacagtggaatgcagtagccctctgggcctgggatattgtggttgataactgtgccatc

SEQ ID NO: 737886 - DNA, 90 bp, Homo sapiens
gtaaatacgaatctttccaaaggagatgcccgcagatataatttctacagtagaatttaatcattctggagaattactagcaacaggaga

SEQ ID NO: 737887 - DNA, 60 bp, Homo sapiens
ctggaaagctgaaatccttcgcccggaaattcatcaagatgaaaactttcggaagagaaa

SEQ ID NO: 737888 - DNA, 100 bp, Homo sapiens
tggaccgcgacgcctgcgacacggtgcgcgtcaaggccctcttcgccatctcctccatgccagtgacggtaacccgcaccaccatcacaaccaccacgac

SEQ ID NO: 737889 - DNA, 98 bp, Homo sapiens
caaaagtttgtgacttgaagtggatacataaccagcattctcgaaattggaggactcctttgaggccctctccctgtacctgggggagctgggcatcc

SEQ ID NO: 737890 - DNA, 125 bp, Homo sapiens
ggccatgtgaaccgcttgtaccccggggagagacgagccccgagcccggctggacgccgctgcctcagtgtgagagcattgtggaggaatacgaggatgaactcattgaattcttttcccgagag

SEQ ID NO: 737891 - DNA, 99 bp, Homo sapiens
tttctgttccgcacaggcctgctgaactgggtgctttatataggaaaccaatagagccatggcgactccctctgctgccttcgaggcccttatgaatgg

SEQ ID NO: 737892 - DNA, 100 bp, Homo sapiens
ctgcacgacacatggaaattggactaaattaccagaatgcagggggattgtcaatgaggcagatcagattccgatttgacgggcaaccaatcaatgaaac

SEQ ID NO: 737893 - DNA, 50 bp, Homo sapiens
gcgcgtgcgcggacatggcctcaaacgcttttcctccgcaaccatgtctg

SEQ ID NO: 737894 - DNA, 82 bp, Homo sapiens
ggacgttcccttcacggagaaagattttgattcagaatgaccgaagaagcatgccgaacacggagtcagaaacgagcgcttg

SEQ ID NO: 737895 - DNA, 50 bp, Homo sapiens
gggtttcccaggacctggaagtggtgcctcaatcaggaaccctgaagctg

SEQ ID NO: 737896 - DNA, 98 bp, Homo sapiens
cgatggacacagctatggaggtggtgaaattcgtgaactttttgttggtaaatggcttccaaactgcaatatatttttgccatcatggatcagtttgg

SEQ ID NO: 737897 - DNA, 100 bp, Homo sapiens
acttccctcggtctgggcttctctgaggcggcgagagatggtcaggtctggagctcgaccgggccagggccaacaggcagtggaaagacgacattcatca

SEQ ID NO: 737898 - DNA, 100 bp, Homo sapiens
tcttgagggatgcacctatggattccattgaatgggctgaagtggtgatcaatgtgaacaatattctcaagacatagggcctgattacattccaacagag

SEQ ID NO: 737899 - DNA, 100 bp, Homo sapiens
ggggctcagctcgcagcgcatccccgcgcacagcttcggaaccaaaaagaagcttcccagagccggggccaggagccccaagcgccctctagcagcaaac

SEQ ID NO: 737900 - DNA, 50 bp, Homo sapiens
cttgtatctctaattggaagcaacagtcaatgtggatgagaactaatcgc

SEQ ID NO: 737901 - DNA, 101 bp, Homo sapiens
gagattttgatgtggatgatgccaaagttttattaggtcctagcagaagatgtgactcagactgcctctgggtggggctggctggcccacagatcctgcca

SEQ ID NO: 737902 - DNA, 80 bp, Homo sapiens
ctgcccgcgggcccggccacggcggagccaagagaggtggagaagagcgagtacttgagaaagaagaggaagaagatgat

SEQ ID NO: 737903 - DNA, 154 bp, Homo sapiens
aggcggtgccgcgccacgactcctcctacggcaccttcgcgggggagttctacgacctgcgctacctgtcggaggaggatctggacgttggtggttggctatgtgttgactgtttcattcaagtggaatgcaagcactgaacgctacttgagag

SEQ ID NO: 737904 - DNA, 100 bp, Homo sapiens
tgggtattgctgcggctggtgcgtcgtcgctctaggtggtaatcactcaaggaaaaggaattatcagagtaacaatagttcctgttactgacttgatatg

SEQ ID NO: 737905 - DNA, 80 bp, Homo sapiens
ctggaaaagaaggacgtggtgggaagagcaagagggggcttcaagaagcgtgcacctcgggcactcaaagagattcggaa

SEQ ID NO: 737906 - DNA, 75 bp, Homo sapiens
agttgctgctatacaacacaattataaaatgtcagcttttaaggatgttcctcctgctgatcaagagaagctttt

SEQ ID NO: 737907 - DNA, 100 bp, Homo sapiens
ctttcctccttctcaaattgcagcaggagctttttgcttagcactgaaaattctggataatggtgaatggctgttgtctcaagagcccagcaatggcata

SEQ ID NO: 737908 - DNA, 97 bp, Homo sapiens
gctgcgccgaggcgccctactcagcagcttcttcttggcacaatcctgaactgggcagaacgtccttcccaaactcgcggaagacaaatggctcctg

SEQ ID NO: 737909 - DNA, 51 bp, Homo sapiens
gcctgtgcgccctcaacctgctttacaccatcgcttcttgacctgcacaac

SEQ ID NO: 737910 - DNA, 102 bp, Homo sapiens
ctgctgagcccgtccgtccgccgccaccacccactccggacacaggtgacttaagagattaaaattaatttggttgctgttggttctgaacaaataatgagt

SEQ ID NO: 737911 - DNA, 75 bp, Homo sapiens
gagggagtcgatttacctggagaaaggagtgcctggctgttatggaaagtcccaggctgtccaatcttcctggct

SEQ ID NO: 737912 - DNA, 100 bp, Homo sapiens
tatacacgagaaagcctggaatgcttacccctactgcagaaccgtgagaaaaaacgcaagcctgcatggaccgatcgcatcctgtggaggctgaagcggc

SEQ ID NO: 737913 - DNA, 74 bp, Homo sapiens
ctgccgtcatcaccatcaccttcaatccgctctactggaatgtggagggtgtgaagacagagaatgaccacatc

SEQ ID NO: 737914 - DNA, 101 bp, Homo sapiens
ggggtccaggaggatggttctgtggtcgatgtgtctgagtctgtggaatgcaagtctgccgatgaagatgtcattaagaatgaagtccctgaggtgaagaa

SEQ ID NO: 737915 - DNA, 73 bp, Homo sapiens
attgatgagctcaaggctggcaaaatcccaaaaccagggccaagcaatggccaatgtacatggtggactatgc

SEQ ID NO: 737916 - DNA, 100 bp, Homo sapiens
acatgcatcgtcccctggactctctcaagtcatcatcagatttgaaatatttaaagtggatacaaaactatttcagcaatgcagacaattaagtgtgttg

SEQ ID NO: 737917 - DNA, 51 bp, Homo sapiens
actcttctccttcacagtaaagtggctggctgctttgactctcccgcgaag

SEQ ID NO: 737918 - DNA, 75 bp, Homo sapiens
ggtgcggaagctgcaggcgcgcctgggcgcagagagctccgcagaggcccagagccccccaagatgaacccagtg

SEQ ID NO: 737919 - DNA, 76 bp, Homo sapiens
atttttggcctcatactctgttatagataaacaaggtgagccagccatgagagggtatcttgtggccatattcctg

SEQ ID NO: 737920 - DNA, 100 bp, Homo sapiens
ccagccccagtgaaattgaggccatgaggagtggaaccagatgcagagccaggaggatgaggtggccatcactgagcaggatttggaacttattaaagaa

SEQ ID NO: 737921 - DNA, 97 bp, Homo sapiens
tgtggaagatactaatgaaatagactgggaagatcttgctagtgccataggtgttctagaacagatcagacattttgtaatgatgcctgaaataaac

SEQ ID NO: 737922 - DNA, 109 bp, Homo sapiens
cggcgtcaggaattgatggagaaagaaaccgcaaaaccaaaaccagatcctttcaaagagtgcctggtgaagaatgtgatgggatcactagcatgtctgcggagagcgg

SEQ ID NO: 737923 - DNA, 83 bp, Homo sapiens
gctgcagccaccgcggcccccgcgggtttgtggtaaatatgccagctctagaacacatgaatcagattttacacatcttgttt

SEQ ID NO: 737924 - DNA, 80 bp, Homo sapiens
agacaagatgtccgccagagctgcggccgccaaggtgaacctgagcaaggtgggcgagtattggtggaacgccatcctgg

SEQ ID NO: 737925 - DNA, 98 bp, Homo sapiens
actctgacgtgtattcctggggtcattgaagacttcggcagtctgtccaaccttcaggtcactcagcctacagttgggatgaatttcaaaacgcctcg

SEQ ID NO: 737926 - DNA, 83 bp, Homo sapiens
caaggacctgacaagccagcagaaggtcattgaaattatgagactatcattcaaatggaagcattatagttcttcggaaccat

SEQ ID NO: 737927 - DNA, 75 bp, Homo sapiens
gagcagtatgccggaagctggttttcaggccacaaatgctttcacaggttatgaagacagtatggagtttccaga

SEQ ID NO: 737928 - DNA, 75 bp, Homo sapiens
cttcgttccaacatggacatcctgaagccaatcctgaatgcatacacagccacagctatcaacagcaccaacttc

SEQ ID NO: 737929 - DNA, 76 bp, Homo sapiens
tagtggaaagccccaggaagctgtttatggccaaaatgctacagctatgagcgtgtggatggttctgtgagaggag

SEQ ID NO: 737930 - DNA, 97 bp, Homo sapiens
tcgttgccatgaggaaagaattctccgagcacttttccagccattaactccaggctctcgagaatttgaagatgttgtaaatattctccattcttct

SEQ ID NO: 737931 - DNA, 100 bp, Homo sapiens
aaccacgttctccaatgcaatgctgtttgccctgaacatcatgaattcccaagaaggaggcctcatgcattgtgcgtcagcagcaatgtttatggtgaaa

SEQ ID NO: 737932 - DNA, 100 bp, Homo sapiens
aacactccctggaggttctgacccactccctctcagcctccgcctggtctctggcacattcaggaccccgcgagccagcggctgacgtggaacaagtccc

SEQ ID NO: 737933 - DNA, 97 bp, Homo sapiens
gcgagacctggagatggacctgtgatctgggctcaggctgcacgaagaaaaggttattaaagatagacgtcatcatctcaagacctacccaaactgt

SEQ ID NO: 737934 - DNA, 96 bp, Homo sapiens
agcagcccccagtcgctccagccataaccactgaggccacagcacagtgcataccagagccagtcttggtgctctgtgttcacctggttcatctga

SEQ ID NO: 737935 - DNA, 50 bp, Homo sapiens
acacggccattggacacatcaatagtattgaatttgaccgggattgtgac

SEQ ID NO: 737936 - DNA, 126 bp, Homo sapiens
cactgcctgcgcagctccggccgcctggctccccatactagtcgccgatacgaaaaccggtgaggtccaaacattgtggtgtgtgcaaccgctgtatagcaaaatttgatcatcattgcccatggg

SEQ ID NO: 737937 - DNA, 100 bp, Homo sapiens
aaacggggctgctggtgggccgcgtcgaagacatggaccagggctacggagcttcggaaccaaaaagaagcttcccagagccggggccaggagccccaag

SEQ ID NO: 737938 - DNA, 90 bp, Homo sapiens
ctgcgctgtgatgcctgcagagctgtggcttaccaggtagatcatgccactaatcgtacccagtttggggagaaaattcacaactttggg

SEQ ID NO: 737939 - DNA, 80 bp, Homo sapiens
ccagtctgaattctgtggattttcgtctaaaaataacaagaatgggaggagaaggatgatgataattccgaagaaggctt

SEQ ID NO: 737940 - DNA, 51 bp, Homo sapiens
ggaactggcccggaaacaggaggacgggatttgggagcagcttgtcttaca

SEQ ID NO: 737941 - DNA, 100 bp, Homo sapiens
cctgaacttccctgtgtcccgcaatgccaacctcagcaccatcaagcagggagaaacaaaggcagcgctgccctcgggggagcattggccctggcggaac

SEQ ID NO: 737942 - DNA, 75 bp, Homo sapiens
agcaattgtcaccgcagactttgttaaggatatggtggtaccaggagacgataaagtagaaagttggagtcaaac

SEQ ID NO: 737943 - DNA, 100 bp, Homo sapiens
ctcgaagaacagctgtggaaagaagttgcaaaacactggcagtgagttcctcctcctaactcaggcttccaggaaggatatcctctgcttctcagacctg

SEQ ID NO: 737944 - DNA, 102 bp, Homo sapiens
tatgcacgcagatgctggagaagtccccttatgaccaggttggcgtgcagtggtgtgatctcagctcattgcaacctctgcctcccggactcaagcaatcct

SEQ ID NO: 737945 - DNA, 79 bp, Homo sapiens
gcaagcgcagcaacaacagagagcacgtgaatgaaacagtgattcagagtgcatataaaagcctcatacaacacttgga

SEQ ID NO: 737946 - DNA, 82 bp, Homo sapiens
cgggagctggacggcgagcgcgagcggcgcgagaaaaagaggactgtcagaaggacgtagaaggcacggttttactgtgagg

SEQ ID NO: 737947 - DNA, 73 bp, Homo sapiens
tcttgtgccctagcaccccgagaaccgtcagtttgagccagatgataattcctgagaacttcagtgttttcag

SEQ ID NO: 737948 - DNA, 90 bp, Homo sapiens
caagccggagcctgccagagccaaggccaagctctccaagttcagcatccccaagcagggggagagacttgaggtttaacagaataagag

SEQ ID NO: 737949 - DNA, 82 bp, Homo sapiens
ccgcgaggaggcgcgggaggtgttcgagaacgaccccgagacgaacccagcgggtgccgcttctccacccgaggcttccacc

SEQ ID NO: 737950 - DNA, 100 bp, Homo sapiens
tgaacacaaggccttgaccagtgagattgcactgctgcagtccaggctgaagacagagggctctgatctgtgcgacagaccacataaagaagatccctaa

SEQ ID NO: 737951 - DNA, 98 bp, Homo sapiens
tgaaaacttctgagaaacttggagagtggaatgagaaagtgacccagtcagaccttgcacagccagagaacaacacatcacacacaggaaacagttgt

SEQ ID NO: 737952 - DNA, 75 bp, Homo sapiens
agatggtggccctaacacagggggaatgggagcctattgtccagcccctcagatggctcagcgacttcttctgag

SEQ ID NO: 737953 - DNA, 80 bp, Homo sapiens
cgcttctttaagggctacgggaagatcctggaggtggatctgaagaacgggtctcggcgcggaagatggccggcggcgtg

SEQ ID NO: 737954 - DNA, 100 bp, Homo sapiens
tgtcacaaccacatgattgggattgggccagtcttaaatatctacccatggaataaagagctgtatttgatcagatatgattctataacagactcttcca

SEQ ID NO: 737955 - DNA, 88 bp, Homo sapiens
tcggaccccgaggatcaggaaaaactatgaaacttgtggtggagaatgttgatgtgttaacacaaatgaggaccagctttgacaaacc

SEQ ID NO: 737956 - DNA, 90 bp, Homo sapiens
ccagcggctgaggaggggccccagcagcccccgaaggccctatcaggacatggagtatgaaagacgacattgtggatatcaagcctgcca

SEQ ID NO: 737957 - DNA, 98 bp, Homo sapiens
gtgaatccccctaaacaggagcacctgctggcgctaaaagctactctgggcagttgaaaagtagaaagtcatacatgatacctgaaaatgagtttcat

SEQ ID NO: 737958 - DNA, 83 bp, Homo sapiens
ccggctctcgtcagcctcccgccggccgtctccttaacaccgaacaccgattttttatcaagcagaaatgcatcgaacaacga

SEQ ID NO: 737959 - DNA, 90 bp, Homo sapiens
tggtgccccgcccaggaccctgacgtgggaagccatggagcagatacgggaaattggattccaagatccatcaaggagcaaagaaggggt

SEQ ID NO: 737960 - DNA, 51 bp, Homo sapiens
tgacagtcacaattttgtaataagtgtggtttattgacaatcatttacaat

SEQ ID NO: 737961 - DNA, 83 bp, Homo sapiens
cgtgtacacaggaaagggccctgacaagaggatgggactgcagttgtggctgccaggtcacgcatgaagggagcaccgtggag

SEQ ID NO: 737962 - DNA, 82 bp, Homo sapiens
ctgacgctgctgctgtgtgcggtgctgctgagcttggcctcggcgtcctcggggatggagcctatagaggtgcctcttgagg

SEQ ID NO: 737963 - DNA, 75 bp, Homo sapiens
gtttgctctgctcttccaacaccagtggaagatgatcacatcccagcagcctgaaaaggtgatggcaaagcagat

SEQ ID NO: 737964 - DNA, 100 bp, Homo sapiens
tgtgaaccatttcaagtgctcttgcccaccaggcactcgggagcaccccaagatctggctacctcgggccctgaggcagacctacatccggaaggttggg

SEQ ID NO: 737965 - DNA, 83 bp, Homo sapiens
agaggaggtgcagatggcactttccaaagtggatgcctccggggagatgtcatgtggcctgtgttttggaccgtggttcgtac

SEQ ID NO: 737966 - DNA, 75 bp, Homo sapiens
cagagtggccgcagtccgagctttgccctcgcatcctgttccaacgcggatcaaaatggtttcaatcccagaata

SEQ ID NO: 737967 - DNA, 75 bp, Homo sapiens
tgagatagccgtcctgagaaagtgtggctttgatagctggtggtgccacttcctggccttggatgagccgtacgc

SEQ ID NO: 737968 - DNA, 100 bp, Homo sapiens
caatttcaactttggctatgccaaggtgcctatgacagcatccggcatgcccatagccagtctgcagaggcagaacgtcgtgccaatacctcagccctgg

SEQ ID NO: 737969 - DNA, 100 bp, Homo sapiens
agaagtcacaagacaagggtcctaaaacaggatcagtaaagaaggaaaaagcagtaaagccagaggaaggcaagataacccctgtgacagaaggctactg

SEQ ID NO: 737970 - DNA, 82 bp, Homo sapiens
taaattcccggaaccgcgattcggcgtgtcagctgaacatctccttcccagccactggctgccagaaactcattgaagtgga

SEQ ID NO: 737971 - DNA, 100 bp, Homo sapiens
cagaaacctggcccctcagagcgatctcgagccacaaagtcagctgccacgcctcccaatgctgtggaccggccctgcctgcgactgaaggtgtacgtgc

SEQ ID NO: 737972 - DNA, 75 bp, Homo sapiens
aggccgtgattaccatgccgaagtatttcagacctgttccaagacctgcctagagctggaacgttacctccagag

SEQ ID NO: 737973 - DNA, 100 bp, Homo sapiens
cttgaagctggaaaatatactgctcgatgacaactgcaatattaaggtgcagtctttgcaagccacatttggaacttttgagtccatcttgagaagctcc

SEQ ID NO: 737974 - DNA, 83 bp, Homo sapiens
agtagagatttgctcaatgcattgaagtcagtcattaatgaccctatggtgatcttgatactgcagcagtaaaagtggaattt

SEQ ID NO: 737975 - DNA, 100 bp, Homo sapiens
ggaggtcgttgcacccagctgccctcccgggaggctgcctgcctagtgcctggtgaagaatgtgatgggatcactagcatgtctgcggagagcggccctg

SEQ ID NO: 737976 - DNA, 100 bp, Homo sapiens
ctgagaaaatacaaggagctggacatcgagcctgagggaggggaaaggcgcagggacctcctcgctgcggtggaactcgggcgccaaagagcgcatgctc

SEQ ID NO: 737977 - DNA, 101 bp, Homo sapiens
ggaatcaaagataaatccaaatactgcatatcagaaacaacagtgtgccctgctttacaccagctgtgcagggcagcgtcggctccgcatccataatctgg

SEQ ID NO: 737978 - DNA, 100 bp, Homo sapiens
gcaggggtcagtgatggagctgcttcagatggagtttcactcttgttgcccaggctggagtgcaatggcgtgacctcggctggctgcaaccttcacctcc

SEQ ID NO: 737979 - DNA, 75 bp, Homo sapiens
ggaaactctctgactttggacagagatgtggtactggatcttcctctgggctctcttctcttctctgtttgtcca

SEQ ID NO: 737980 - DNA, 118 bp, Homo sapiens
actagctgattggtgggctgttcttgatccaaaggaaaagcagaaatacacagacatggccaaggagggtccaagttttctctccgaggcccgtttttctacacgagcaacaaaaatt

SEQ ID NO: 737981 - DNA, 76 bp, Homo sapiens
aaggattccaagtaactcttatttgggtgaggacgcttgagcggaagttagaagcaaaaatgatcaaggaggaaag

SEQ ID NO: 737982 - DNA, 90 bp, Homo sapiens
gtggaacgcgggcgcctgaaggagttgttgtctcggcagcgcccgcggagacgtgaagagtgcttttttaggaccaaaggatatatttcc

SEQ ID NO: 737983 - DNA, 82 bp, Homo sapiens
ggccggcgcctcctcggagtccttggggacggagcagcgcgtcgtggggcgagcggcaggagcaggccgggctctcgccatg

SEQ ID NO: 737984 - DNA, 98 bp, Homo sapiens
ttgagtgagcaagtgaagaccaatattcaacaggcagatcttttgccagaaatgagggcatactggcctgacgtaattcactcgtttcccaatcgcag

SEQ ID NO: 737985 - DNA, 76 bp, Homo sapiens
gggcaacgtgcttgtcatgttcggcatcgtccgagaagagtttagtgactgaggccgaaaattcacagcaccaaca

SEQ ID NO: 737986 - DNA, 48 bp, Homo sapiens
atcaagtaatggtgcaaagcctgaattgcctttccccatcttcctggt

SEQ ID NO: 737987 - DNA, 98 bp, Homo sapiens
gggcggggaccggcggcgctggaggagcgaggcagctgtactaggactgggaacgggaagaagccatggatttaataaatagagaaacaatgtctgaa

SEQ ID NO: 737988 - DNA, 100 bp, Homo sapiens
attttggcattgacatttaattttagggtcctttatatagaagggagagtaggtcctccaccttctgggccccaagttggaggctgatctggagaagaag

SEQ ID NO: 737989 - DNA, 74 bp, Homo sapiens
gggcaccatctccttctttgagattgatggacgtaagaacaagagacgagttgtactgctgtcacaggaaatgg

SEQ ID NO: 737990 - DNA, 100 bp, Homo sapiens
gtggagccgccggagtctgagaaggttgaagatgaaatccactgaggagggaagtccagcaccctgtgtgccagtccagaactggcccatctgtagaccc

SEQ ID NO: 737991 - DNA, 76 bp, Homo sapiens
tgagatcaattcttggagaacacaaagaagtgtgatgaattgctcctgcgttgctaagacaagcatcatatggcac

SEQ ID NO: 737992 - DNA, 74 bp, Homo sapiens
taattgaacgattttgggatttcattgaccagctgagcatcaatacttttgagccatccaaaactctgtttgtc

SEQ ID NO: 737993 - DNA, 97 bp, Homo sapiens
cggggaccctgctggcctcgtgcggcggcgaccggagaatccgcatctggggcacggagggtgatcacgaaactcgctggcatggaggaggaagact

SEQ ID NO: 737994 - DNA, 75 bp, Homo sapiens
gggagagcaggcgtgggcaagtcaggtaaggaaacaagtgggagaagatgccaggataacgcagctggaagcgac

SEQ ID NO: 737995 - DNA, 100 bp, Homo sapiens
gaagaaaaggtgtacttgcaagaaacctcaggacttgagtaacagcaacatggttcaaaccttgtactactcagctgatcacaagctgcttgatgggaac

SEQ ID NO: 737996 - DNA, 75 bp, Homo sapiens
ggacctccaaggaagccacgtgcagacatctacaaccttcgatctcctgacgaaacctgcaaccatggtcgtgcc

SEQ ID NO: 737997 - DNA, 75 bp, Homo sapiens
cagcagccaggagtcatgagcgacagcggcgagcagaactacggcgagcgggaactgtggctgcaccatctgtct

SEQ ID NO: 737998 - DNA, 88 bp, Homo sapiens
tcaggcggagagacccgccgccaggtcagtttaggggctggtgcaaaggatgagttgcacattgttgaagcagaggcaatgaattacg

SEQ ID NO: 737999 - DNA, 100 bp, Homo sapiens
agaaccagcaggctctgtggttcaggactcccgacttgacacgatattttttgctaagcagtatcagcagcgtcgccagcaggagaatatgcagcgccag

SEQ ID NO: 738000 - DNA, 74 bp, Homo sapiens
ttggacagtctgcaccttctcttactgctggcctgactaaatgtgttaaatgggcttgccaacaatatggatga

SEQ ID NO: 738001 - DNA, 100 bp, Homo sapiens
aaattggaggaggtgcagaaggtggacagggtaaaagaaagagacttttttctaaagaattgtactaatggtcacttgatgtgcgctggctgttttatcc

SEQ ID NO: 738002 - DNA, 75 bp, Homo sapiens
ccgcgacgctatggcgcactggagtaccctgttcctggcatccaaaatgcagcacgctggctaatattggaagaa

SEQ ID NO: 738003 - DNA, 135 bp, Homo sapiens
caggaggcaattccattcctcatgttgcttagcttggcttttgctggacctgcaattacgtctccatgcagtaaacagacccagcagaacctgcccgtggtgagctcagccaagacttggctctccatgttccag

SEQ ID NO: 738004 - DNA, 75 bp, Homo sapiens
accggaccctgcagccgcagagccaagaagtatgatgcgtttttggcctcagagtctctgatcaagcagattcca

SEQ ID NO: 738005 - DNA, 75 bp, Homo sapiens
gctcttccaacaccagtggaagatgatcacatcccaggtgttgacttcaaaatcaaaactgtagagctaagagga

SEQ ID NO: 738006 - DNA, 74 bp, Homo sapiens
tggaattcccacctggatttcctgtcaaaataggtctagagagcctagtgctgacctatatcaatgctatcagc

SEQ ID NO: 738007 - DNA, 98 bp, Homo sapiens
atggacgtgcggggccctgaagcccccggcgggcgcgcgctgcgggacgcggaacttgatactaaatttgggactctttgctgcgggagtttggctgg

SEQ ID NO: 738008 - DNA, 101 bp, Homo sapiens
tggacagctagctgcttatggctataaaattacagtgccttctgctggggatgtggagaaagccagagttctgaaggaagaaggcaatgagcttgtaaaga

SEQ ID NO: 738009 - DNA, 74 bp, Homo sapiens
aggatcccttgatgccaagagttcgagaccagctggggcaacaaagctaaatttattgtgaagaaatcagaaga

SEQ ID NO: 738010 - DNA, 90 bp, Homo sapiens
tccacacgctgatatttaatgctgcacgggaccttctcatcaatgaacaccgggtggacatcttcaataaggagctactgctaatcccca

SEQ ID NO: 738011 - DNA, 80 bp, Homo sapiens
agagatcgttggttcacagggaagtcgcctggaaaaaccaatagtgtgtggtggctcacgtctgtaatcccagcactttg

SEQ ID NO: 738012 - DNA, 82 bp, Homo sapiens
cctgccgtccttctccactttcgccagcccgtgccgcgagcgcggcctgcaggagccgcagcaatggcgctgagttcctctg

SEQ ID NO: 738013 - DNA, 100 bp, Homo sapiens
aacaaggagaaccactatggacactagaagatgaaatccacagtccagcccacccagaagactgtgcagtctttgtaactgatgaagagcaaggctttgt

SEQ ID NO: 738014 - DNA, 78 bp, Homo sapiens
gacagcctcatgatcacaaacatttaatgccaacccaaattatacctggttctggacttcctcgttctgcccatcttc

SEQ ID NO: 738015 - DNA, 108 bp, Homo sapiens
gtgtatgtgcgcttcccagggatcttgagagtgaagatctcgaaggatttcatagtgcaaacttggatgaggaggcacaggctggtaccagttcactacaggtaatgt

SEQ ID NO: 738016 - DNA, 82 bp, Homo sapiens
ggtgttgcatccttggagagagctgagagctggagatcccatttaaaattctgagtgggcacgagcacgctgtgagcacctg

SEQ ID NO: 738017 - DNA, 74 bp, Homo sapiens
cttaagaaaactcagcctgagaatggttatggaggttttgatgactatggtggctataataattacggctatgg

SEQ ID NO: 738018 - DNA, 97 bp, Homo sapiens
gcaggacttgctggccaagcttcaggaggccaagcggcaacaccagtcagactgtgtggcttttgaggggactttgtgcaactgcctgtgcccgtca

SEQ ID NO: 738019 - DNA, 106 bp, Homo sapiens
taaaggagatggaagtgatgtaccatcatgggtagcctttgataaacaggttgcactgctgtgatccatcctcatctcctaaagatgcatcctgacttatctccac

SEQ ID NO: 738020 - DNA, 75 bp, Homo sapiens
cccgcttcaaccccaggggaccagaggaactcagccctgattgcggcacaagtgatccttatgtgaaatttaagc

SEQ ID NO: 738021 - DNA, 114 bp, Homo sapiens
ctcgattcagctattggaaagtttttttaatgtggttggaacaactgagattctgctcctaagtgtaggagagaacttggtgcctcttccactctggagtgaagttaatgaaag

SEQ ID NO: 738022 - DNA, 76 bp, Homo sapiens
gaaaaatgtcaaaccagaccaatgggtgaaggtggacccaagtggagagattgtggaactggcgaaaggtgcatgt

SEQ ID NO: 738023 - DNA, 51 bp, Homo sapiens
ggccgggagggcggccgcagcaggtgaaaggtgtagcagtcactcggccta

SEQ ID NO: 738024 - DNA, 82 bp, Homo sapiens
cccgggaggaaggaacgaggcaaggagctaaagcagcgtgcgttcagccctgggatccgggtcttcctccagcagctcaagg

SEQ ID NO: 738025 - DNA, 83 bp, Homo sapiens
ccgcccgtgccctcccgctcggccccgccagcagcactgtggaggccgtcctcggtatgtgaggagcagcgctgtgaggagga

SEQ ID NO: 738026 - DNA, 75 bp, Homo sapiens
catcatcgagaagcactttggtgaggacccggtcagcccaaggagcaggggtccagcagctctgcggaggcatct

SEQ ID NO: 738027 - DNA, 83 bp, Homo sapiens
tctcgctcagaggagatgcaccggctcacggaaaatgtctataagatataacacgtgggaaccggaggagaacatcctggacc

SEQ ID NO: 738028 - DNA, 50 bp, Homo sapiens
gctgaccaagatctccttccacctcaagctgtgttcaattacaaaaaaag

SEQ ID NO: 738029 - DNA, 112 bp, Homo sapiens
agagatggaacccgaagaagaaaggattcgttacagccagagattgtgcctgatgttgcacatttgccacttgagaagctgggaccctgtctccctcttgacttaagtcgtg

SEQ ID NO: 738030 - DNA, 100 bp, Homo sapiens
agagatcgggtctctggatggtggaatgctcatctatggaggagagaacgtggagcttagcctgagggtatgaaattgaaggctgtgaagtgatttgggc

SEQ ID NO: 738031 - DNA, 99 bp, Homo sapiens
gcagctccgtagcatgaggaagagtcaggggcacagagagatggagagagacctagttaggcagaagctcctcctggggtagagacagatcttattgat

SEQ ID NO: 738032 - DNA, 75 bp, Homo sapiens
agcagagtggaccaccccatgaacctcgcatggcggacaccgacctgttcatggaatgtgaggaggaggagttgg

SEQ ID NO: 738033 - DNA, 75 bp, Homo sapiens
gcagagctgaagatcaagcgcctgagaaagaagtttgcccaaaagatggtgaatgaaaactttgccattgatttg

SEQ ID NO: 738034 - DNA, 75 bp, Homo sapiens
caacgcctggctcggagcagcagcctctgagatccagagacaatggccccgatgggatggagcccgaaggcgtca

SEQ ID NO: 738035 - DNA, 82 bp, Homo sapiens
gaaggagcagttggttcaatctctgggtgcgcgcggagccatggttatcatgtcggagttcagcgcggaccccgcgggccag

SEQ ID NO: 738036 - DNA, 90 bp, Homo sapiens
gtccggcttcggagcgggagtgttcgttgtgccagcgactaaaaagagaaagatcaactgaaatcggcaaacttctgagttcctacttgc

SEQ ID NO: 738037 - DNA, 75 bp, Homo sapiens
ccagaccccacggtcatcaacaagcacataaggaaattagtggagctggcttaaaggctggggccattggttgtg

SEQ ID NO: 738038 - DNA, 101 bp, Homo sapiens
ataaaagggcccctttcgactagcctctgctgaaaggatgaacgtgaagccagagaaaatgtgaagagagagcaagatgaggcctatcgcctttcacttga

SEQ ID NO: 738039 - DNA, 82 bp, Homo sapiens
ggcaaagttttgcagatcttcaacaagaggacccaggagaaattcgccctcaaagatcgaatcatcaatttagttgttggca

SEQ ID NO: 738040 - DNA, 100 bp, Homo sapiens
cggacggtacttctgccactgctgctccgtggagatcgtcccgcgcctgccggccccttcccagctgcctgcctgccctagccagctcccaggtgaagag

SEQ ID NO: 738041 - DNA, 100 bp, Homo sapiens
gaagaccacaataaaagagacctctacttagctcagcaattcttaccttgaaggcccttttgtctacttgtctttagtaggaaacgttgcaaattccgat

SEQ ID NO: 738042 - DNA, 82 bp, Homo sapiens
ggaagagaggtccgaaacccaagcggcttctgctgcaggtagcccctgaagaagatgaaaggaaaaagaggcgacgagaaag

SEQ ID NO: 738043 - DNA, 88 bp, Homo sapiens
atttttcttccttctgtcacatcacacccaatggcctgacctctcgggacacacccagccctgtggacccagacaccgtggaggtgtt

SEQ ID NO: 738044 - DNA, 50 bp, Homo sapiens
aaaaatcaccagttactttaatgactcaaagatcctctcaagacagtatc

SEQ ID NO: 738045 - DNA, 106 bp, Homo sapiens
cttccctcggcccgcgcgcgcgaccggccggtgcgccgcggcccgcgacaatgcagatcttcgtgaagactctgactggtaagaccatcaccctcgaggttgagcc

SEQ ID NO: 738046 - DNA, 100 bp, Homo sapiens
tctacatctcagactactgtgtgtggattcagaaagtcaatgagaaagatcagtctaaagaaaaggagaagaaagtgaaaaaaacaattccttcctgggc

SEQ ID NO: 738047 - DNA, 75 bp, Homo sapiens
agaaaaatggagaaaacaagacaagcccattcattcatttgagcatagcaagatggcttaaattccttggtcctt

SEQ ID NO: 738048 - DNA, 98 bp, Homo sapiens
ccttgctaatttcaaaaactaccagtcttgcgccccaggagtcttcagtgtgtgagcctccatctcctgtccaatgacatgtgtgctagagcttactc

SEQ ID NO: 738049 - DNA, 101 bp, Homo sapiens
tttagggtcctttatatagaagggagagtagtgagctggaggatggccacactgctcttaacactcactctgttagccccatggagaagattaaacagtac

SEQ ID NO: 738050 - DNA, 75 bp, Homo sapiens
atttattcaagtcaattaccatcctttaccagggtgcaatgaagggcgtgttggtagacattgtgaatgcagcac

SEQ ID NO: 738051 - DNA, 100 bp, Homo sapiens
aggcagcgcgggatcccagcctcaggcgtgcgcggacggtgtgcggggcagcaaggagcgcttccactggcagagccacaacgtgaagcagagcggcgtg

SEQ ID NO: 738052 - DNA, 107 bp, Homo sapiens
ctcccctgaagaggcagtgaaatggggtgaatcatttgacaaactgctttcccatagaggaataagtttgtggagtttgacatgaagccagtctgtaagaagtgcta

SEQ ID NO: 738053 - DNA, 82 bp, Homo sapiens
ctgcagtgacatactgcggctgatcaaggttttaaaatcaaagatgggaaaatcggagaaaattgcccttccccatggccag

SEQ ID NO: 738054 - DNA, 100 bp, Homo sapiens
acaactccagtgctaactcaacaggtaccgggtgtctggtccgagccgtggagatggccgcccagcgccaggccgacatcatcgggaagcccagccgctt

SEQ ID NO: 738055 - DNA, 80 bp, Homo sapiens
cgttcacccgcaaagacgagatcatcaccagcctcgtgtctgccttagactccatgaacgatgccaacgggactgcaaag

SEQ ID NO: 738056 - DNA, 100 bp, Homo sapiens
agccggggccctcctgtgacctgcatgtactgggggattcgcagggaggatgtcgggacaccccggaagctgggaaatgctgtttttgcagcagtgttgc

SEQ ID NO: 738057 - DNA, 82 bp, Homo sapiens
acatgctgaggacgttcagcagcattcccgtctcacggatatgcaagggcttccgagtggacctgccaatcaagtcggcccg

SEQ ID NO: 738058 - DNA, 50 bp, Homo sapiens
tgcaagtacccgctcctccttaagatgcaagtgctgctggaccaggcggg

SEQ ID NO: 738059 - DNA, 100 bp, Homo sapiens
agataactgaggacaatggacctgcctgggcatagacttccttaaggggtcctgccagagcaagaaccatggcttactttggagaaggaaaaggacccat

SEQ ID NO: 738060 - DNA, 50 bp, Homo sapiens
ttcagaatctcaggcgggtgaggatgacacagcaagaaggccctcaccag

SEQ ID NO: 738061 - DNA, 100 bp, Homo sapiens
tgataggatcaaagacaaatggaaagttcctattgcaaatagaagagtcttccaaaccagtgaggctatcacaacagctggacaaagttgtaacaaccaa

SEQ ID NO: 738062 - DNA, 101 bp, Homo sapiens
ggcagtgccgcttcggccgaaggcccgagcgcccgaggcgtctgggatggtgtgggaccgggacactgcccatctctaagataagaacctggaaaggggac

SEQ ID NO: 738063 - DNA, 100 bp, Homo sapiens
ggatgagagctgcaccgcgcgggacaagtcgccggcggcgcccgacggagcaggtgctggagaatctggtaaaagcaccattgtgaagcagatgaggatc

SEQ ID NO: 738064 - DNA, 51 bp, Homo sapiens
cggatggtgaactcattagaagctcccacatcaggacgagaaggagccctc

SEQ ID NO: 738065 - DNA, 104 bp, Homo sapiens
cagacgaagacagtccctggatcaccgacagcacagacagaatccctgctaccaatcttactgtgccgagatcgctcacaatgtttcctccaagaaccgcaaag

SEQ ID NO: 738066 - DNA, 75 bp, Homo sapiens
ataaaaacaagtgtgtgcatctggctgttagaagaattcatgctcatccggggatcgataaagtttcactgcaga

SEQ ID NO: 738067 - DNA, 100 bp, Homo sapiens
acccaagttggttggagatgtggattttgaaggacccactgatctcagcatgaagagacaattggcgactagctcaggatcctccagcagctcaaactcc

SEQ ID NO: 738068 - DNA, 98 bp, Homo sapiens
cctgcctaaggtccagggctcgatctggccctaaccacagagtcaccttgaggagcctcctcaacaagcccaagagtgagatgaccccagaggagctg

SEQ ID NO: 738069 - DNA, 100 bp, Homo sapiens
ccgcgccgcgttcgagttctcggaggggagggggcgttagccccgcgcagccgccggcgtcgccgccatggacctaggtactgacaagtttggatttggc

SEQ ID NO: 738070 - DNA, 74 bp, Homo sapiens
cgagctctaccgcgcctggtatcgggaggtgccgaacactggggaagcaaaggcgaatgctccttgtgttatat

SEQ ID NO: 738071 - DNA, 50 bp, Homo sapiens
ctgcagcccatcttgtgtggcaacaaccgcaccatcatcaccaccatcag

SEQ ID NO: 738072 - DNA, 100 bp, Homo sapiens
tgtggttctctgtcccaggctgttccctaagaaggtctgcccaggactcagacaatgcagatcttcgtgaagactctgactggtaagaccatcaccctcg

SEQ ID NO: 738073 - DNA, 71 bp, Homo sapiens
cagccggccgggatggctaccacggccgagctcttcgagaaaagaaacatttgtttgcataggaattcatg

SEQ ID NO: 738074 - DNA, 75 bp, Homo sapiens
tcacaggccatgctctggcaaaaactcaggtcaattcagtgaagatatgatacccacagtgggcttcaacatgag

SEQ ID NO: 738075 - DNA, 75 bp, Homo sapiens
attgatgaaatttatggcattcagaacagttggatggcaagcatgtggtgtttggcaaagtgaaagaaggcatga

SEQ ID NO: 738076 - DNA, 100 bp, Homo sapiens
agagacattaagctcagcactctctaaaggagcaacagtttacagcccttccagatacagctaccaggagttcatgatcaagtgttgcccacaccaaatg

SEQ ID NO: 738077 - DNA, 74 bp, Homo sapiens
gctgaagcgactgagtccgcgatggagtgagacggtttaagcggaagcatcttactgccattgactgccagcat

SEQ ID NO: 738078 - DNA, 75 bp, Homo sapiens
gcggcggcctgtaatcccagcgaccgccagggtgagtgatgaaatggtagtggagctcattgagaagaatttgga

SEQ ID NO: 738079 - DNA, 100 bp, Homo sapiens
ctctgctgcaatagttaaagaacttggattaaacccagagaaggttgcgagttataaggactcagcatcatgtagaagcacttgtggagcatcagaatgg

SEQ ID NO: 738080 - DNA, 75 bp, Homo sapiens
ccgaaattcgccccgattaaagactgtgttgcattatcaggctgctctttggcgtaaattgcaatcgattaggga

SEQ ID NO: 738081 - DNA, 82 bp, Homo sapiens
cttcagcagaagaaacacttcctataaatctcgcccaaacaggaaagatctattaatgagatgaagcggttggaagaaatgt

SEQ ID NO: 738082 - DNA, 90 bp, Homo sapiens
atcccgtatctgctctcctgaaataattctggagtcatgcctgaaatgccagaggacatggagcagcatttcttgagacttaaagtggca

SEQ ID NO: 738083 - DNA, 104 bp, Homo sapiens
tgagagccggacgggcactgggcgactctgtgcctcgctgaggcaaccatgtccaagggacctgcagttggtattgatcttggcaccacctactcttgtgtggg

SEQ ID NO: 738084 - DNA, 75 bp, Homo sapiens
ccactgtcactctgttcccgccctcctctgaggagctccaagccaacaaggccctggaggaagcactgagcatcc

SEQ ID NO: 738085 - DNA, 100 bp, Homo sapiens
ggtgcagcttcaagcttaggaccacccaccatgcctatccagcaatacttcatgctgttgctgctgactgatggtgctgtgacggatgtggaagccacac

SEQ ID NO: 738086 - DNA, 100 bp, Homo sapiens
cctctgtacgcccgttcactgaggctagtattactagcttgaaacaagctgccctggttaaagcgcctctcattccgactttgaacacaatcgttcagta

SEQ ID NO: 738087 - DNA, 100 bp, Homo sapiens
cttatgtgcggcggcgtgatgttgggcggccacagagagattggtgtttttgtgaggcagtgagacctaaggatggaaaggcagatgtaaagtccctcat

SEQ ID NO: 738088 - DNA, 100 bp, Homo sapiens
gtgggattacaggaacgggaggtcaaatgtgttgaagatgtactgaaactcattgacataggcaacagttgcagtccaagtggtaagaagttcagaagca

SEQ ID NO: 738089 - DNA, 74 bp, Homo sapiens
ggcagaggaaaatgcaagaagactgatggagcaggcttgcaatattaaaggactctctttctgtggatgttttg

SEQ ID NO: 738090 - DNA, 100 bp, Homo sapiens
taataaatgtttatctccggatgtgacaccttgcttttgtaccattaacttcacactggaaaagtcatttgaggctcttcgtcagattgggcagaggacg

SEQ ID NO: 738091 - DNA, 75 bp, Homo sapiens
tctgaactgaagaagcttgggctcacttccacaaatcttggacgaaccttgacaggatgggtgcagcgaactttc

SEQ ID NO: 738092 - DNA, 98 bp, Homo sapiens
cgtatttcgcagattggagctgagctgtggctgccagaagatagcgaacagacagaagagatgggtgatgaagaagttttctcctggttgaagtgtgc

SEQ ID NO: 738093 - DNA, 87 bp, Homo sapiens
cgtcccgcgtagacgcagtggcctccaaggtgcagacagctgtgactatgaaggggtgtatcgcattaagttcaaggagagctttgc

SEQ ID NO: 738094 - DNA, 50 bp, Homo sapiens
gtcgccgcgtccttggctggcgtctgccgcagcgggaaccgcaagagctt

SEQ ID NO: 738095 - DNA, 103 bp, Homo sapiens
ccctctccgccccccaggaggggcgagagggagccgcagctgatgtcagagctgtaggtaaaacttgcctactgatcagttacacaaccaatgcatttcctgg

SEQ ID NO: 738096 - DNA, 80 bp, Homo sapiens
ctggaaaactggatgctgcagacactgaacgaggagccagtggtcatcatcagatttgaaatatttaaagtggatacaaa

SEQ ID NO: 738097 - DNA, 100 bp, Homo sapiens
ctcttattgctgaggcagttggaagttatgacaccatggatctcttcaggcacactacagaactaaatatgcatgccaacgcagagagccaacagcagag

SEQ ID NO: 738098 - DNA, 100 bp, Homo sapiens
agaagaatcatcatgtgcgcttggaatccaagagggacagaagatgagcctgtcggtcctggagggtatggggttccgtgtgggccaggctctaggcgag

SEQ ID NO: 738099 - DNA, 82 bp, Homo sapiens
tgtccgagggcaccaaggcggtcaccaagtacaccagctcgaaaggaatgcagtagcatggatagttgatggtgaatttgga

SEQ ID NO: 738100 - DNA, 100 bp, Homo sapiens
agaagatggaagaagacgggtccactgtgcttcccttcgccacaagaagatgggcagatcatgtttgatgtggaaatgcacaccagcagggaccatagct

SEQ ID NO: 738101 - DNA, 100 bp, Homo sapiens
ggatcagtgaaaaattgcaaacagcgagtgatgagtcgtacaaggatcccaccaacatccaggcaagcaccggaagcaccccggcggccgcggtaatgct

SEQ ID NO: 738102 - DNA, 83 bp, Homo sapiens
cgcaaccccagatccatttacactttacaactgaaagagcatattccttttgtggaactattgaatacatggcaccagatatt

SEQ ID NO: 738103 - DNA, 100 bp, Homo sapiens
acaagactgaggatagtttagaaggatgcttggattgtctgcttcaagccctggctcaaaatagtgtcatggagaaactccagctgggcccagagattct

SEQ ID NO: 738104 - DNA, 74 bp, Homo sapiens
ttttgaaaatcgggcaaatggccagtcaaagggatgtttgcacagtttatccagatctgtgcagcagcttcgaa

SEQ ID NO: 738105 - DNA, 95 bp, Homo sapiens
caaggagctaaagcagcgtgcgttcagccctggggtgggaggaggagctcgccaagcgcatgaaccttcagaccatggtggacacgctgcaggag

SEQ ID NO: 738106 - DNA, 100 bp, Homo sapiens
tttccttatcaagaaggatgcacaagatgaggaaagaactgacttcctctggtgggccaacaaagtttgaaatccatatagtggctcagttcgataatca

SEQ ID NO: 738107 - DNA, 100 bp, Homo sapiens
ctaaccggaccagagcagaagggaacagattacgtgaagctggttctcttgctgcaaatggccctaccaccttggttgataaagtttcaaatcccaaaac

SEQ ID NO: 738108 - DNA, 99 bp, Homo sapiens
cgcttgagttggtcgggggcagcggcaggacacaatgtttgcacgaggactgaagaggaaatgtgttggccacgaggaagacgtggagggagccctggc

SEQ ID NO: 738109 - DNA, 100 bp, Homo sapiens
atccataatgaagctgagcttggcgatgatgacgtttttacagtgaccaagaatatggcccaggtgaccaaagccctggacaaggccctgagcaccatgg

SEQ ID NO: 738110 - DNA, 74 bp, Homo sapiens
taaccctcactggagaatccagaggctgcaggccaacttcaccatccgggaagatgccaaccccagctcccgac

SEQ ID NO: 738111 - DNA, 100 bp, Homo sapiens
attctgcccccattgagcccctacttcaagtactccgtcatgatcaacaaggccacgccctacaactacccaggtctcaatgccaggaagcctcccgctc

SEQ ID NO: 738112 - DNA, 100 bp, Homo sapiens
atcttgcagctcgggcaaatctggagagacaaagcatggaggacacaagaatgggaggaaaggcggactctcaggaacttcattcttcacgtggtttatg

SEQ ID NO: 738113 - DNA, 90 bp, Homo sapiens
gattaaaagtggatttacgttttggaacctcgtctttttattgacggtgtcttgtgtgaaagtccaatatcagatggaaatgatgcggag

SEQ ID NO: 738114 - DNA, 99 bp, Homo sapiens
caccggccaaaggccttgcagccgccatgcaacctcctgatgcagtcagaagaagtagagaactctaagaaggagctgatgtggaggagcagctgagac

SEQ ID NO: 738115 - DNA, 74 bp, Homo sapiens
tgggtgctcctgcccgctggcccctcgcgcgtgaggatctatctcaggttgctgaaaagccaggagtcaaaatg

SEQ ID NO: 738116 - DNA, 90 bp, Homo sapiens
gtttgccaacaccgtggggctggtggttgagcgaaggcggctggagaccgagctagatgggctcaggtaccccctgtaccggctgggtgg

SEQ ID NO: 738117 - DNA, 50 bp, Homo sapiens
ccactgcgggccggcgaaagctggccaagtcctgtatctgccatgtctgt

SEQ ID NO: 738118 - DNA, 99 bp, Homo sapiens
cctgaacctggaagttgtgctttttaagctccgcaaagctgtcatggaccacgtttcagattctttcctggaaaccaatgttccacttttggtattgat

SEQ ID NO: 738119 - DNA, 75 bp, Homo sapiens
ggccatgcgctggttccagcagaagaggatcagcactgccagtggagatgggcgtcactactgctaccctcattt

SEQ ID NO: 738120 - DNA, 111 bp, Homo sapiens
atcccagcggaaaggagcgcgcctctttttggcttggggagctgcagcgttcggagcagatgtctcaagtattagatgccatgtttgaaaaattggtcaaagatggggagc

SEQ ID NO: 738121 - DNA, 96 bp, Homo sapiens
gctacctccatcgtggaagcgattgcgactgttgacagagctataaactcaacccgaacacatttgtttgacagcccaccccagccagaccagggc

SEQ ID NO: 738122 - DNA, 82 bp, Homo sapiens
gatctacgttccaattggggccgtaccatggcggagaagactcaaaagaggtgccaagtcctgccctgccaacttcttggca

SEQ ID NO: 738123 - DNA, 100 bp, Homo sapiens
gagagcccgtgcatcttcgcattgacgccaagacaggtggagttgatccggaactccaggaacctggaggagaagcggctcacttggaggcttccagatg

SEQ ID NO: 738124 - DNA, 82 bp, Homo sapiens
agcactcccacgtctacaatggagtcgagtctagaattcacacagagccacctaggccataaaattttgagtagaaaaatcc

SEQ ID NO: 738125 - DNA, 75 bp, Homo sapiens
tacttcacactatggagagggaagcagatgctgtaccgcctgtgctgggttcttcggaacagtacagaggagcga

SEQ ID NO: 738126 - DNA, 83 bp, Homo sapiens
cccggcgcttcggctccgctccctgtgcggtcatcatcagatttgaaatatttaaagtggatacaaaactatttcagcaatgc

SEQ ID NO: 738127 - DNA, 100 bp, Homo sapiens
ggacgttgcgtctgcagctgcggcgcggacaatgccgtcttctgtctcgtggggcatcctcctgctggcaggcctgtgctgcctggtccctgtctccctg

SEQ ID NO: 738128 - DNA, 87 bp, Homo sapiens
tctggggcagtatcaacggagtctccgggtgcagcgtaagtatgcacagatgaagatggaactaagccgagtaagaagacatacaaa

SEQ ID NO: 738129 - DNA, 82 bp, Homo sapiens
aagagcagacccgtttgggttctccacgcattctagactcccgaagagggcgaactttctgaccaagtatacaactacccag

SEQ ID NO: 738130 - DNA, 50 bp, Homo sapiens
gggtttgaattgtgcggtttcagattatgaagcaattgtgaagctttcgg

SEQ ID NO: 738131 - DNA, 99 bp, Homo sapiens
tcctccatccaaccatgagctggtgagtgaagatagtccaagtcctaagagacagcgcctctctcattcagtctttgattatacatcagcatcaccagc

SEQ ID NO: 738132 - DNA, 100 bp, Homo sapiens
tccaggagctgtcagcgtgtgtcttcagctggatcgaggagcactgtaagcctcagaaactaatctggattcactccctctggttgatacccactcaaaa

SEQ ID NO: 738133 - DNA, 83 bp, Homo sapiens
caggttttgggatttgagattgacgcggtgaactctgtccagttttcaaaccacacagctgcggttggatttctcacgatgtc

SEQ ID NO: 738134 - DNA, 90 bp, Homo sapiens
cagagacagaagcagatggattcgtccttttagaccctcctcatcttttccctgccttccatcctcctgtaccaattgatgccagacatc

SEQ ID NO: 738135 - DNA, 76 bp, Homo sapiens
gcactgactttcagctatggaatcggtgagccaccagctgggcagcatcatggacctcttcaccaccagcctggcc

SEQ ID NO: 738136 - DNA, 82 bp, Homo sapiens
tccctgtctcacgccatcactctgatcttcagtttagatcttggaggcatatcaactgtggttctaaatggctatgatgtag

SEQ ID NO: 738137 - DNA, 100 bp, Homo sapiens
cgcggaaatctggaaccgggatggcgacgtctacactgagtcggaggcgaaggtgtgaccatgaagctcatggatgaggtcgccgggatcgtggctgcac

SEQ ID NO: 738138 - DNA, 100 bp, Homo sapiens
tcgagaccagcctggccaatagggatttcttacaatctccagctacaacctgcttagcttgctactcagtacgtgaattaggatgcaggcaacacacctc

SEQ ID NO: 738139 - DNA, 75 bp, Homo sapiens
gcagcaggaattgggatcgtgtcgctgcgctacaaaagaccccacagctgtagagagagcaaacttgttaaacat

SEQ ID NO: 738140 - DNA, 90 bp, Homo sapiens
gcagaaaatcaaaacaagctctttatgagaatggcatctaagcccattgcagatgcaaaggctcctgagaagcgggcctcaccatccaag

SEQ ID NO: 738141 - DNA, 75 bp, Homo sapiens
aagtgaaatacaggctgaacaggacagaaaggaagagagaagggcacagttacctaagtatcaacgtaatcttcc

SEQ ID NO: 738142 - DNA, 74 bp, Homo sapiens
gtatccgccagtcaataggaagtacgagtgccactgcagaacaaattagacttgcacagatgatttcggaccat

SEQ ID NO: 738143 - DNA, 98 bp, Homo sapiens
catgttggcccagcaaatgcaactagccaatgccatgatgcctggtgccccattacaacccgtgcatctagcctgattccaactcaaacaacgataac

SEQ ID NO: 738144 - DNA, 101 bp, Homo sapiens
ttttaagctcaagcaaatgtttggtaatgcagacatgaatacatttcccaccttcaaatttgaaggtggtggagacactgccacttgctgtgccaaatgga

SEQ ID NO: 738145 - DNA, 89 bp, Homo sapiens
cgccagttactgcacggaaagcagcgtcaggagccatagtacctacagcagcactccagattgaccgactcatcagtcacggggccgac

SEQ ID NO: 738146 - DNA, 100 bp, Homo sapiens
gatgatttagttgattctctgaaggacagtcattttgtttactcattcagccctgttgcaggtcccaataaactcttcataaggttgacagaagcaccct

SEQ ID NO: 738147 - DNA, 100 bp, Homo sapiens
gcggagcttcgccaaggctggcgcagtcgatctgttacctaaagcaataaaaaatggccagaggatcagtgtccgatgaggaaatgatggagctcagaga

SEQ ID NO: 738148 - DNA, 107 bp, Homo sapiens
gagaactgtccttacgtgacctaaagctggagtattttgagattggagaattaagctgaagatgcttgtggaggaacaatgagaggatccagtggcatcatatccag

SEQ ID NO: 738149 - DNA, 98 bp, Homo sapiens
gaaagtggactatttaatagctagttggcaaacatgaattgactgggcataaagtagctgtgaagatactcaatcgacagaagattcggagccttgat

SEQ ID NO: 738150 - DNA, 100 bp, Homo sapiens
cctggccctctgcttgcttgtccggcgcaccagcactaagtcaggagattggaaaagcaaatgcttttacacaacagacacagagtgtgacctcaccgac

SEQ ID NO: 738151 - DNA, 133 bp, Homo sapiens
gggaagctatttttgtgtttgtccacgtggatatgtaacctcaacagatggctctcgatgcatcgattctctcgggcctagccgtccttggaacccgatattcgggctgggcggttccgcggcctgggcctag

SEQ ID NO: 738152 - DNA, 51 bp, Homo sapiens
cgggcactcttcatagttcctagacaaaggatcacgcagatttgcgaagcc

SEQ ID NO: 738153 - DNA, 87 bp, Homo sapiens
ggcgtggactgcggggacggggttggcgcccggcagcacgtgttcctggtttcagcattgagaactgatgtgccttcacaggaaact

SEQ ID NO: 738154 - DNA, 100 bp, Homo sapiens
gaataccagcaaaggcaccgtgacaggccaagtgcaggggccagaagacaaagtcaattccatagacacggagcttttgtacagagagagataaaaccag

SEQ ID NO: 738155 - DNA, 75 bp, Homo sapiens
ggaaaagatcagggagtactttggcgagtttggggaggaacttcggtagttatgtgacacatgaaaccaaacact

SEQ ID NO: 738156 - DNA, 82 bp, Homo sapiens
cttagagcgtctggccaagaatcagaggaagtggaacattaaccaggtggtatttgttggaaatttcttgagaattaatacg

SEQ ID NO: 738157 - DNA, 50 bp, Homo sapiens
aatcctattttttattatgttgcacggagctaccaccatctgtgacctgg

SEQ ID NO: 738158 - DNA, 85 bp, Homo sapiens
cctcgtcagcaacatgctcctagcagaagcctatggatctggaggtggatcagtacaagggaaagcgggatttggagtcactgag

SEQ ID NO: 738159 - DNA, 83 bp, Homo sapiens
actagtaccactgaacacgcagtcccagcagagtccagagcctaaggaccagactttgaaaatgattaaaattttaagtggtg

SEQ ID NO: 738160 - DNA, 82 bp, Homo sapiens
gttccatccgtctcagcgaaccccttttgaagttgaggccaagaaaggatcttgtagaggtcagtctggggcaggtaacaac

SEQ ID NO: 738161 - DNA, 75 bp, Homo sapiens
gcgtgcacttaaagctgccagcaaggatgactcaatcatcactgttttaacagcccccggtccctgagaagcggc

SEQ ID NO: 738162 - DNA, 74 bp, Homo sapiens
actatgacaggaacctggcactgtttgagttggaggattgtgctctgcaagtgtctccctccggatactacctg

SEQ ID NO: 738163 - DNA, 50 bp, Homo sapiens
tcgaagtatctcaaaaagtcgctcccgattttgagaagagggggaaaaag

SEQ ID NO: 738164 - DNA, 90 bp, Homo sapiens
ccctggctaccatggaccatcctgctggtcagcactgcggctggacatggatttgattgacatactttggaggcaagatatagatcttgg

SEQ ID NO: 738165 - DNA, 75 bp, Homo sapiens
ccgtcgtggaagcaggactgcgccgcgtcttcctcaaggcgggcaaaactgttccgatttgcctctgagaacgat

SEQ ID NO: 738166 - DNA, 100 bp, Homo sapiens
ggttttgagaacagagtgctgttttagagctggcagcagcatctcagcccaagagaaggctccaggaggccagagctctactgaagcggcggcggccccg

SEQ ID NO: 738167 - DNA, 75 bp, Homo sapiens
tgaattttactggcacaattcctgtgatgtatcaggaagctaaaccagccccagaaatatttgaaaatgaagtca

SEQ ID NO: 738168 - DNA, 144 bp, Homo sapiens
gtgctgagtgatcaagcaaggtacctgcaggacccatttgtgtccattgatctcttggagcagctggggatcatgctgagatctgtatctgtggacctgaatgttgatccctcgcttcagattgacatacctgatgcgctcagt

SEQ ID NO: 738169 - DNA, 75 bp, Homo sapiens
accccaccatcctgaggatcgaccccgagtggagcatcaacaggaagctggagaagcttcgagagaaggagcgta

SEQ ID NO: 738170 - DNA, 75 bp, Homo sapiens
ggacgctctcagctctcggcgcacggcccaggccaggtcagagcagcccaccatgggatggggagggggtggagg

SEQ ID NO: 738171 - DNA, 100 bp, Homo sapiens
gtcacctcggtaccctggaggtccaaggcccccattgaggatacctaatcagatcaaaggtccatcatcaaaacaccaaagactcaagacacagaagatg

SEQ ID NO: 738172 - DNA, 75 bp, Homo sapiens
gcggcctccagggcaggccccggctcagaccacaagggcagaaccggtgagccaccagctgggcagcatcatgga

SEQ ID NO: 738173 - DNA, 98 bp, Homo sapiens
atgtacctgttaccactttcaaaagagttcgtgcttctgaaaggctggctgaaatagacatgccatacctcctgaaatatcaacccatgatgcaaacc

SEQ ID NO: 738174 - DNA, 74 bp, Homo sapiens
gagcaaagaacactgttgttgccacaggagattcagttgtggaaattctttttgaacaagataatgaagagcaa

SEQ ID NO: 738175 - DNA, 51 bp, Homo sapiens
atgagatggtggatgaacccccaggtgaccaagaatatggcccaggtgacc

SEQ ID NO: 738176 - DNA, 100 bp, Homo sapiens
cttttgctcctggtggaacagttgttgcagcaagcgattcagtgttgatgggaaccattttcagcatcctgctggtgactgtcatccttatggcattttg

SEQ ID NO: 738177 - DNA, 90 bp, Homo sapiens
cgcggcgtgccctgcttgtcacagtgtcgtgtgggagccaatgggagatgggaagaaaatcatttccttggctgataaccatatcctgct

SEQ ID NO: 738178 - DNA, 90 bp, Homo sapiens
catctactctttcaactacaccagccagcccgaccagatgtcatttgtcagagtgaaccgctgtggtccccgagttggtgtaagaaagac

SEQ ID NO: 738179 - DNA, 90 bp, Homo sapiens
taggctatgagaggaaactccagaaaccacaggcaatcctttatcacaggatattctcaacttataccaggacccagatggaacccgaaa

SEQ ID NO: 738180 - DNA, 87 bp, Homo sapiens
aaaatgaagttaagataagaagtaatctggaatcagaaagcactacgctaaggcaaaagagttggtagtggtgcacaaaaaacaaga

SEQ ID NO: 738181 - DNA, 99 bp, Homo sapiens
aaaataaaaaaaaagccaaaaagataaaagcccggatgaacttcaggtttggcgaagctgtgaatggcaacctcgtggtgggcactctggcctggccat

SEQ ID NO: 738182 - DNA, 50 bp, Homo sapiens
aaaaaaggaggccaaagactttgacttttctggacacacacaccctgtgg

SEQ ID NO: 738183 - DNA, 83 bp, Homo sapiens
gcctattggaggaaaacacaccaaggcgcatattaaatttcctattgactacccctattcaccacctaccttcagattcttga

SEQ ID NO: 738184 - DNA, 90 bp, Homo sapiens
cggaggcagcacctcaggaaagtttcgccgtgaggaagatgcggaaaaggctgtgattgacttgaataaccgttggtttaatggacagcc

SEQ ID NO: 738185 - DNA, 100 bp, Homo sapiens
agcacttcagtcggaaagttggaacctctgacaagaccaagtactaccttcaagatgtcttcaatgaacgagacaattgtccctacgtctacaacactga

SEQ ID NO: 738186 - DNA, 82 bp, Homo sapiens
gcacctttaatttggcctccctcagatgactggtatcatgaactgatcactaaatatgggaagttggagcctttggcagaag

SEQ ID NO: 738187 - DNA, 98 bp, Homo sapiens
gtgtcccgaggaagtgcaagacccggccagaagccaaggagtcctcagtgacggtgggatccacaacatctccacatcgctgtccccacccagccagg

SEQ ID NO: 738188 - DNA, 75 bp, Homo sapiens
ggcaagctgtggatgatttcatcgagaaattggttctcttagaagcacaagatatggcagtgagagaccataacg

SEQ ID NO: 738189 - DNA, 90 bp, Homo sapiens
gaaagacctcagagtgttctcaaaatctctttccttgtggagactcaatggtttgcattattgatgatcgagaagatgtctggaagtttg

SEQ ID NO: 738190 - DNA, 100 bp, Homo sapiens
aggacatgcaggctctgcggcgggaggaggagcggcggcaggcggagcgcgagcagcctcctgacaaggtgatccgggcgggccccgcaggaattttatc

SEQ ID NO: 738191 - DNA, 75 bp, Homo sapiens
ggaagccatcagcagtgccatccagcttctagaagacccattacagaggctacggagccgagatggctctgagta

SEQ ID NO: 738192 - DNA, 100 bp, Homo sapiens
gtttaatgaaagaaatccacctgaacttataggtagttgtcctgggaacccctgcagaagaagatggtggtggcaaaattgatttaattgaagcaggggc

SEQ ID NO: 738193 - DNA, 82 bp, Homo sapiens
cttcaagtacatcataatcggcgacacaggtggtcttcaagctgacagagaagctgacggaacagaaggagtggatgaagat

SEQ ID NO: 738194 - DNA, 75 bp, Homo sapiens
cagaagcatgctaagaacaacagtcaggccaagccttctgcctgtgatgatctcaggaaacaggctcgacagctg

SEQ ID NO: 738195 - DNA, 98 bp, Homo sapiens
tgcagtggcacctgcgcgaagctggccaaagcctgcccagacggctcacctgtgcgggatggaacaaaaggcaaaacccatttatggcggttggctgc

SEQ ID NO: 738196 - DNA, 90 bp, Homo sapiens
gaggtactgtccatcaaacatcttccaccacagcttagagcagtttcgagccagaggaagaggctggggcagaggcaactactctgggaa

SEQ ID NO: 738197 - DNA, 82 bp, Homo sapiens
gcggggcccgccatggctgcgtcggagctctacacaaagatataacacgtgggaaccggaggagaacatcctggaccccagg

SEQ ID NO: 738198 - DNA, 98 bp, Homo sapiens
tcctgctcgccgtccccgccatgctgtctctagactttttggacgatgtgcggcggatgaacaagcggcagacaatgcagatcttcgtgaagactctg

SEQ ID NO: 738199 - DNA, 76 bp, Homo sapiens
gcctactgcgaccagatcttccaggacgagacgggcaagaaccgagggtctccccagacacccgagcacccacccg

SEQ ID NO: 738200 - DNA, 90 bp, Homo sapiens
cagatgttaatacacacagacctcgagaatactgggattacgagtcacatgtggtggaatggggttcctggtccagaactttacacagaa

SEQ ID NO: 738201 - DNA, 82 bp, Homo sapiens
cgaccacggagactctgactttggcctgcagtgctcagcccgccctgttcctgacggagctgaccagacttttccagaagtg

SEQ ID NO: 738202 - DNA, 129 bp, Homo sapiens
ggtgtattcccttaaaaagacggacagcccatcgtgtgaactatagagtttgtggacagatttatattggaaccaggaattaaagcagtgaacataacaaagtctgccctcgtggtgctaacttgccag

SEQ ID NO: 738203 - DNA, 83 bp, Homo sapiens
ggccgctgggagccgttattggctgccgttaaggaccgttacgtttcccgggtggttggaggcaaagtaaagaagcccggtaa

SEQ ID NO: 738204 - DNA, 75 bp, Homo sapiens
gggactacgtgggcaccttgcgcttcttgcagtcgatcctggccaatttggagcaaggcttagcagaagacggcg

SEQ ID NO: 738205 - DNA, 75 bp, Homo sapiens
cctttcaccattaagaggaaagcgatggaggagctgagcgctgatgagatttggtacacacagaggggcagcttc

SEQ ID NO: 738206 - DNA, 75 bp, Homo sapiens
cgccaacacctgcgaggagtgtgggaagcccatcggctgtgactgcaagggagtaactattcccagtcagaggcg

SEQ ID NO: 738207 - DNA, 80 bp, Homo sapiens
gtatctttaagaaattttatcttttgaaacacgttctgattaaccaagggagccctctggcacaaatggaagaagaaaga

SEQ ID NO: 738208 - DNA, 75 bp, Homo sapiens
ctgctcatccccaaggaggacggcgtgatcacggccagcgaggacaggaagctcttcgtgggcggtcttgactgg

SEQ ID NO: 738209 - DNA, 75 bp, Homo sapiens
gcacctggatgagacatttgctacagcatcccacattaagtcaacgatcttccaccacctcctgtgccgccacct

SEQ ID NO: 738210 - DNA, 75 bp, Homo sapiens
ataatatggaagaagatggaaaaaacttgtttaatgggattttgtgaaaatggaaaattatgaggcattggtagg

SEQ ID NO: 738211 - DNA, 98 bp, Homo sapiens
tgcccttcgggaaatccgaatgctcaagttgccaagtttccaggacagtgaagatgatgatgatattctgccaaatatggacaaaaatccaacaactc

SEQ ID NO: 738212 - DNA, 88 bp, Homo sapiens
tctcctgggaaacctgcctttgtcaaaatgcagatcttcgtgaaaacccttaccggcaagaccatcacccttgaggtggagcccagtg

SEQ ID NO: 738213 - DNA, 98 bp, Homo sapiens
cattgctgagccagcggagctgcttgaggactaccccaatggcacctggctgggcgacgagaacaaccccgagatgcgggtacgctgcgccatcatcc

SEQ ID NO: 738214 - DNA, 50 bp, Homo sapiens
caagaaactcaagaatttgaacacactgtccggaccctatttgtcagtgg

SEQ ID NO: 738215 - DNA, 75 bp, Homo sapiens
gtttgctctcatgaacatgcaatgagaagactgatcaatctgatggttccttcatcagcttcaggccaagttcga

SEQ ID NO: 738216 - DNA, 75 bp, Homo sapiens
ccaggccgtgtgccatgactacgacatccacttctaccccaccttccgggtgcttctgtacacgtctctccctga

SEQ ID NO: 738217 - DNA, 101 bp, Homo sapiens
gcacgagcgtaaggtccagctggtcaccgacagggatcacttcatccgaaccctcagcctcaagccgctgctcttcgattgtctaaagccccaggaaaaat

SEQ ID NO: 738218 - DNA, 98 bp, Homo sapiens
agccctctgaggcagactatgccgtagacatccggagtcctgctatttcacttcgccgacacgaggtgaccatctgcaattacgaagcatctgccaac

SEQ ID NO: 738219 - DNA, 98 bp, Homo sapiens
tggacgctggtggggactcgctctcggcttgaccgcattcttcctcccagatcgaagcaaagctgagatggatttgaaggagctgagcgagtcggtcc

SEQ ID NO: 738220 - DNA, 87 bp, Homo sapiens
gcagatgacaaaacttcaagccaaacatcaagcagaatgtgatttgcttgaagatatgagtgatgactatgactccaagaaacgcaa

SEQ ID NO: 738221 - DNA, 75 bp, Homo sapiens
cccttccgtatctgcctaggcattttgctgtctcctcctaatacgctcgccctcccctacctgcggaagagtcaa

SEQ ID NO: 738222 - DNA, 75 bp, Homo sapiens
cttttcttgacttagctaccagcgagggcggcactgctcacaggacggctacccatccgcaatggcttctacacc

SEQ ID NO: 738223 - DNA, 75 bp, Homo sapiens
agcagtaccctgatggagtcccttgcaggttccttcaatggtgccttagctgctgttcctgtccaggacctgggc

SEQ ID NO: 738224 - DNA, 82 bp, Homo sapiens
ctgactgccccgcatcaccggagcgtcccagctgcgaggagatgatcatgacgcagtcctgaggtttaatggggcacccaca

SEQ ID NO: 738225 - DNA, 50 bp, Homo sapiens
gggcggcgtgcggcctagcgtctcagattgctcgctgtaagcagctcatc

SEQ ID NO: 738226 - DNA, 83 bp, Homo sapiens
gtccgagtgcgccctgatgctggcgcagggcacggtgggcgcctacctgatcctgtttgaccaaactcagagatcaattaagg

SEQ ID NO: 738227 - DNA, 100 bp, Homo sapiens
aagctgagggcacgtgtttgcggttcagccctttgatgaccgcagcagctcatctttgggtgaaaaattgtcgggatcttctgcagtccagctacaacaa

SEQ ID NO: 738228 - DNA, 82 bp, Homo sapiens
ggcaatttgacgacctcttccggggtgagacgggcaaggacaggagaaataactttatttggactgagagctggagaatgag

SEQ ID NO: 738229 - DNA, 74 bp, Homo sapiens
tgattttttgcctttgttgattaactggacaaattcaggttgtaaagaagaaagttctaccctttctgtcaaaa

SEQ ID NO: 738230 - DNA, 100 bp, Homo sapiens
gccgcgggtcgcgccgagccgagccgagccgagcggagccggcggagcctctggaatcacccgggtcgctgttcctgagatgccatggacaatattacca

SEQ ID NO: 738231 - DNA, 100 bp, Homo sapiens
acaagacaaattagagttttcctactgacttaacttgatacttggcatatcgaaattttatgattgacacgtatcgtctaaacccccaagagtatttaac

SEQ ID NO: 738232 - DNA, 83 bp, Homo sapiens
ctcagttggaagcagccgatccagcctgcggagcctgtggggcagagtgcctggtgaagaatgtgatgggatcactagcatgt

SEQ ID NO: 738233 - DNA, 75 bp, Homo sapiens
caggaatgcagtcagtctgttgatgaaactataccattaaaaatctcaagtgacgactttgggaaactctggtta

SEQ ID NO: 738234 - DNA, 95 bp, Homo sapiens
gtcctgctgctgatggtgtgcgaaaacccgcctagtgccaagcaaccctccaagatgctagttatcaaaaaagtttccaaagaggatcctgctgc

SEQ ID NO: 738235 - DNA, 90 bp, Homo sapiens
agaaggccgccgggcccgggcatggtggtctggggcaacgcggaagggcagagcatcaaccccaagttggcgggcctgattgggcggcac

SEQ ID NO: 738236 - DNA, 50 bp, Homo sapiens
ggtctctggagacatcttcagcaggcccacccacccccatcagatccgtc

SEQ ID NO: 738237 - DNA, 110 bp, Homo sapiens
gaggcaccgggatcgtgaccgagaccgtgaccgagagcgtgaccgagagcgcgaatatcgtcatcgttagaaggcccccacagaacacctgaactcaaatgagatgccgg

SEQ ID NO: 738238 - DNA, 90 bp, Homo sapiens
tgatgaactagtagatagagccaaacaatcttttcaagaaggagctcaaaaagtgggatgagtttgaagatattttagaagagaggaggc

SEQ ID NO: 738239 - DNA, 83 bp, Homo sapiens
cgcaccgcggcttaaatgatgtattttgtgatcgcagcgatgaaaggtaagaatgattgatgttggctgatattggagtgctc

SEQ ID NO: 738240 - DNA, 146 bp, Homo sapiens
ccggtgctcttcatcaccttcgtggtcgtctggtcctactacgcgtacgtggtggagctctgcgtgtgtgaatccgccatactacatcccgctggttgagctggtcccccacccggagacggcccctacgacagtggacagaaccc

SEQ ID NO: 738241 - DNA, 100 bp, Homo sapiens
cattcacactggtttggaagttgcaatcaaaatggctctgaaccaagttgtcctatgggacaagattgttttgagaggtgataatccgaagctgctgctg

SEQ ID NO: 738242 - DNA, 75 bp, Homo sapiens
ccgttgtaacatcagtcacagcatcaattaccagctctggctgggtcgccacaacttgtttgacgacgaaaacac

SEQ ID NO: 738243 - DNA, 97 bp, Homo sapiens
ccacgatccccttccagctgcagcagccgcaccagcgccgggacgggggtggccgtgcagagataagatctcactatattgccctggctggtctcaa

SEQ ID NO: 738244 - DNA, 82 bp, Homo sapiens
ccaccgaggaaaaggaatcgtatcgtatgtccgctatccagaacctccactctttcggtgaaaacttttggcccgtttggaa

SEQ ID NO: 738245 - DNA, 101 bp, Homo sapiens
aaagtcgcagcgagctggagccgccggagggtctgacatttcaggaggtggagaacttctttactttcctaaagaacattaatgatgtggacactgcattg

SEQ ID NO: 738246 - DNA, 83 bp, Homo sapiens
acacggccagttttgaaatcgacacacaaagaatagagttgagcctgtgggacacttcggatgctgttgatggagtaatgaat

SEQ ID NO: 738247 - DNA, 100 bp, Homo sapiens
cttgcactatgctgttcttgctgatgactaccgcactgtcaaggagctgcttgatggaggcattgaacctggccacatcccaggtaccgtgaacatcccc

SEQ ID NO: 738248 - DNA, 75 bp, Homo sapiens
cttcaacacccaggagaagagcgccaggcgccgcggggcggctgcatttcaacaaggaaagatacctcctactcc

SEQ ID NO: 738249 - DNA, 75 bp, Homo sapiens
attctcttcactagaatatggagactgttcaatcaccaggtatgccagtactgaggttgatggagagcgttatat

SEQ ID NO: 738250 - DNA, 75 bp, Homo sapiens
aagaaaaggcattgaggaactcaatcaaaccagtattcttttcacacaggttttgggatttgagattgacgcggt

SEQ ID NO: 738251 - DNA, 82 bp, Homo sapiens
ctcctggccctggccctgatcatcctgctgggcttcgtccagatcgggaaggtaattcgccaaaatgacgaacacaaaggga

SEQ ID NO: 738252 - DNA, 75 bp, Homo sapiens
cagatgccctgaaggccatgaagcagtacaacggcgtccctctggatggtggtgaagaacaacctgaacccggtg

SEQ ID NO: 738253 - DNA, 75 bp, Homo sapiens
cgctggcagccgcggatctcaccgccgctcagggcagatcgggagcggtgccgagaaaaatttccttactagatg

SEQ ID NO: 738254 - DNA, 90 bp, Homo sapiens
gggtatcatttttacgggccttctggagatgcttccgaactgtgggcaaaaatggcgatgttctcagtgcagctgagtcttggtgagcag

SEQ ID NO: 738255 - DNA, 100 bp, Homo sapiens
aaaaataagaacaaagtgacaccactgcagagcgggacgaccctgggacagtctccactggggcagatccagctgaccatccggcacagctcgcagagaa

SEQ ID NO: 738256 - DNA, 127 bp, Homo sapiens
ctgcactgcatggttgctgctggatgtgttgtgttcctggcttccctctggatgctgacagaaacaagggctctgtgtgctccgggatggagcaggtgtgcagagggtgagaacccagctctgggac

SEQ ID NO: 738257 - DNA, 99 bp, Homo sapiens
ctccccacccattcctttaaatccggagggggaaaaaatcccaaggtctgcaaagaaacgaggatgcagtcaatcagatggccgttactccctttccag

SEQ ID NO: 738258 - DNA, 50 bp, Homo sapiens
cctcccgaatagctgggattacaggctggagtgtaatggcacgatctcgg

SEQ ID NO: 738259 - DNA, 90 bp, Homo sapiens
ccgatggttctcgaaggcccgcggcgccccgtgctgcagagggtcctccgcggaagggcagctgaatggactccagagcagccttaaccc

SEQ ID NO: 738260 - DNA, 48 bp, Homo sapiens
tcccaaagtgctagtattacagtatcctagaaggaaaacatcaccatg

SEQ ID NO: 738261 - DNA, 90 bp, Homo sapiens
ctccctcattaccgtcgccagcggagcgaacccgagagcgtggagcgggctgggccagggaagaaggagaaagggccaacccctgaagaa

SEQ ID NO: 738262 - DNA, 82 bp, Homo sapiens
gaccgagaccgcggccgggaccgaggagctttctccgcatgtgggactctcggcctcattatgagtggcatctttgacaatc

SEQ ID NO: 738263 - DNA, 78 bp, Homo sapiens
ttttgatgtggatgatgccaaagttttattagctgaagtgagtagtgaatatagtatggacaaggcaatggttgaatt

SEQ ID NO: 738264 - DNA, 117 bp, Homo sapiens
ctatatgaacaatccgtctggatcacggatgtaggaagtgggactggtttggctgaaagacaaagaagcaacacattgtaaactttgtgaaaaggaattctcactctctaagagaaa

SEQ ID NO: 738265 - DNA, 82 bp, Homo sapiens
gacgcaagggcggcggggagcacacggagcactgcaggcgccggaaaactgatagatttggcatatacgcctttccatgctg

SEQ ID NO: 738266 - DNA, 101 bp, Homo sapiens
gagcgggcgagaagctgccgccgaacgacaggacgttggggcggcctggctccctcagaaataatagtgtaatccttgctgatgaaatgggcctaggaaag

SEQ ID NO: 738267 - DNA, 101 bp, Homo sapiens
ccaagatcagctaccccaacatcttcttcatgattgacagcttcgaggagatgtggcaccatttattgagtttctgaaggccatacaagatggaacaatag

SEQ ID NO: 738268 - DNA, 80 bp, Homo sapiens
gaaaactctgagtgatgttcagaagtttgcagagataaatggcaattccagggccacacagatggagccagctgtattga

SEQ ID NO: 738269 - DNA, 100 bp, Homo sapiens
gcacaacgccaggcaaaagaagaggaaggaatttaatcctaatcggtggaggtcgatttgaggggttccccactgaaggacttggtccagctgtctggca

SEQ ID NO: 738270 - DNA, 90 bp, Homo sapiens
agcaacctcgccccttgcaacaaaggcagactgagcgccagagaggacgtttccaactcaaaggtaagacacctcaagaaagagcacagc

SEQ ID NO: 738271 - DNA, 98 bp, Homo sapiens
ggcagaggagctggcggagagcggcctgcgggcgatcgggccgagtgtggacaacagtgagtatatgcggaatggagacttcttacccaccaggctgc

SEQ ID NO: 738272 - DNA, 75 bp, Homo sapiens
agcatccccaccatcaacatggagaacaagaccacgtgggtgaaaggtgtagcagtcactcggcctacacccaca

SEQ ID NO: 738273 - DNA, 90 bp, Homo sapiens
cgcctttgctcggcggagacagcaggcagagagggtgttgtgctgggatgttactttgggcctgctgcactctacatttgggcagtgggg

SEQ ID NO: 738274 - DNA, 91 bp, Homo sapiens
cggggcaggggcggaggcggaggcagaggtggaggcgctttgaaagctcaccatggatgatgatatcgccgcgctcgtcgtcgacaacggc

SEQ ID NO: 738275 - DNA, 100 bp, Homo sapiens
attgcccaagctgactatggccttgaacacttgaatgaagaagaggtctttgcatggaataatgaagtaaaacagggactttcaagtagcatctttacca

SEQ ID NO: 738276 - DNA, 83 bp, Homo sapiens
ttctctgtcagctctttccccgtcagcatcccagccgtgctcacgctacccgtacagtgaggacgcccgccagggtgagcagt

SEQ ID NO: 738277 - DNA, 75 bp, Homo sapiens
cactgaaaccaccgtggaagtcgcctggtgtgaactgcaggagttcatgatcaagtgttgcccacaccaaatgct

SEQ ID NO: 738278 - DNA, 85 bp, Homo sapiens
tcaaaggagagtgggaacacgcagaagtcacgtacagggtttcagggcagaaagcaggtacaggtttgcagattccgccagcagc

SEQ ID NO: 738279 - DNA, 100 bp, Homo sapiens
acttcctgaagcagctgctctagtgaatgagaaagatcagtctaaagaaaaggagaagaaagtgaaaaaaacaattccttcctgggctaccctttctgcc

SEQ ID NO: 738280 - DNA, 100 bp, Homo sapiens
tttgatccagaagaggatgaacccacgcttgaggcctcttggcctcacatacaggcactttgtgagtgtgccctccagactccttatgacagcttaaaac

SEQ ID NO: 738281 - DNA, 75 bp, Homo sapiens
caggtgagccctggctgcgcgcgcggcccctcctccccggcgcctcccagccttgaaaagatcttttgaggtcga

SEQ ID NO: 738282 - DNA, 90 bp, Homo sapiens
cttggagtgcagaactgaaagaggaccgagatctcactcagcagacagcagcagcccgggagcctgagctcaggaggaactcttacctgg

SEQ ID NO: 738283 - DNA, 98 bp, Homo sapiens
caagccgctggcagccgcggatctcaccgccgctcaggatgagcagcaccagcagtaagagggctccgaccacggcaacccagaggctgaagcaggac

SEQ ID NO: 738284 - DNA, 51 bp, Homo sapiens
gatgtacatcaaggcatttatatgagtccaaataactgaagtgaagtgatg

SEQ ID NO: 738285 - DNA, 83 bp, Homo sapiens
gggagcaccaaccggggacttaccccgggcgggagaagtccacaccggggtcaaaatgcagatcttcgtgaaaacccttaccg

SEQ ID NO: 738286 - DNA, 75 bp, Homo sapiens
aggagaagcagctgcggaaaatgctagaaggctatggtctctgtgcagccaaagctcaataccccattgctgatt

SEQ ID NO: 738287 - DNA, 75 bp, Homo sapiens
cagctgttagccagaagcctcccttccagtcagggttccaagatgagatgggattctccaacatggaagatgatg

SEQ ID NO: 738288 - DNA, 100 bp, Homo sapiens
ccaacatggcagccttttccttagaacaccaaagattgtctctggcaaaggggtccacattcagtcgtcccagactgtggagtcgagtggtttgtacacc

SEQ ID NO: 738289 - DNA, 100 bp, Homo sapiens
ggaacgagagcgcgaagctaagagatcgagatggtgatcatggagcgtagcaagctctcagagctggccgccagcacctccgtgcaggagcagaacacca

SEQ ID NO: 738290 - DNA, 82 bp, Homo sapiens
gccgaagagcggcggcggcagcggcgatctgaagaagacacttgaatcatgggtgacgttaaaaattttctgtatgcctggt

SEQ ID NO: 738291 - DNA, 89 bp, Homo sapiens
caacatggagcctcttgcagcttacccgctaaaatgttccgggcccagagcaaagatgctttgggaaaatggaattaatggcattttag

SEQ ID NO: 738292 - DNA, 100 bp, Homo sapiens
ccggggactacagcctggcgcacgtccgcgagatggcttgctccattgtcgaccagaagtggcctggtttgctttcgaccctggctcggcgcactcggac

SEQ ID NO: 738293 - DNA, 90 bp, Homo sapiens
cgtgtccaagggggacgggatgcggggcctggcggtcttcatctcggatatccgcaactctttggtgtcatccccagcactcctctggcc

SEQ ID NO: 738294 - DNA, 100 bp, Homo sapiens
caggttccagcaaggcagaccctgacacagaagccagacctgtccagcagggaccccatacactgggtggtggagaaaataacctgaagagtcatagtcg

SEQ ID NO: 738295 - DNA, 98 bp, Homo sapiens
gccaaaacccagggctggaagatgtggcagccggccacggagcgcctgcagatgcagacaacatatgttttacagagtcttcatttgaggattccaga

SEQ ID NO: 738296 - DNA, 75 bp, Homo sapiens
ctggctgcagccctcactcttcatggtcactggtgagccctattcccagaggcaggtggtgctgaccctgtaacc

SEQ ID NO: 738297 - DNA, 51 bp, Homo sapiens
ggggatggacctccagatttccttactgggtttgaacataatctttcatgt

SEQ ID NO: 738298 - DNA, 100 bp, Homo sapiens
ctgggtaacccagatcgctactaccccgcagttcccggacatgatcctctccgcctctcgagatgttccatttaagcagacctcttccatagctgtagct

SEQ ID NO: 738299 - DNA, 82 bp, Homo sapiens
caataaccaggtgcttggcaaaatcgagcgggccattggattatatctgtccaagatgcgagtctggttttatcgaggagct

SEQ ID NO: 738300 - DNA, 100 bp, Homo sapiens
ttctatttcatcgtggtcctgcgccccctccagctgctgaggtgatgttctgcaccctgaacacccacaaagtggacatggacaagctcctggggggcca

SEQ ID NO: 738301 - DNA, 71 bp, Homo sapiens
ggtttggcttgagagaagccaaggacccgactcagaaacccaggaggagacatcacagctttcccagatcg

SEQ ID NO: 738302 - DNA, 82 bp, Homo sapiens
ccgaaggtggagaggtcggctcggaaggaaaaggtgtgttcatcctcgaggtggtgtgattcagagtgtttcttcatggaag

SEQ ID NO: 738303 - DNA, 98 bp, Homo sapiens
cctcaggagctgaagccctttgtgactgcaatctcgagctgcggttggatttctcacgatgtccagtgttatctccatgtctgcccctttcttcctgg

SEQ ID NO: 738304 - DNA, 83 bp, Homo sapiens
aaaggaagcaatcgaaagatactgctgcaatggaaaggcctctcaaggtggtaaaaccaatcccagttaaaggagatggatct

SEQ ID NO: 738305 - DNA, 74 bp, Homo sapiens
ctggaaggggccagtctggagacagtcaaggattactacagcatcccatttcccacacccactactccgctgac

SEQ ID NO: 738306 - DNA, 109 bp, Homo sapiens
acacggaggtggacaactgcagatacacttactcggagtggcacagttttactcagccccgtcttggtgaagtaaaataccatgaagattttgaaaaaacaaaggggag

SEQ ID NO: 738307 - DNA, 75 bp, Homo sapiens
taagtagcttaaagatgacaccttgcattccctatttaggtgctggagaatctggtaaaagcaccattgtgaagc

SEQ ID NO: 738308 - DNA, 83 bp, Homo sapiens
cgaagacgcggagaaaaaagttctcgacagtgggagtagctcaccgttacccaagtatgcttcatctcccaaaccaaacaaca

SEQ ID NO: 738309 - DNA, 83 bp, Homo sapiens
tccttgtggagccggagctgggcgcggattcgccgaggcaccgaggcactcagaggagccaaaacaacttcccgacaagtggc

SEQ ID NO: 738310 - DNA, 75 bp, Homo sapiens
agcttcagcatcgagctgctgttatcccaccaatggagtctactatgcaactgcatactggatgcctgctgaaaa

SEQ ID NO: 738311 - DNA, 89 bp, Homo sapiens
taagattctagggttgtacaggcccacgccagacacgacgtctggcaggaacctcggcctcagagccactgatggacaatctggaatct

SEQ ID NO: 738312 - DNA, 75 bp, Homo sapiens
ccgcctgaaggaacgcgacggcggcgcccgcaggtaagaatgattgatgttggctgatattggagtgctcattca

SEQ ID NO: 738313 - DNA, 74 bp, Homo sapiens
ccaatactggtgcccaagcctggattaaaaagtgagatggaagattttcgaggtatagcagaagaatcatttcc

SEQ ID NO: 738314 - DNA, 75 bp, Homo sapiens
gtggccaagacctctgctgcacagattgatgatcttacagcagaactggagactgcaggttcaaaatgtctacat

SEQ ID NO: 738315 - DNA, 100 bp, Homo sapiens
tgaagaccaatttttacgtctagatttccatgcccatggaaggctgctttgctggctctgcaagaaaatggactagacgcaactacagtgaaacaagagc

SEQ ID NO: 738316 - DNA, 100 bp, Homo sapiens
gttatcatgagggaattccggtcagggtcaagtcgtgttctgatcactactgacttgttggaaaaatctctcatcgaagtgtacatgcggcctctgtcca

SEQ ID NO: 738317 - DNA, 90 bp, Homo sapiens
ggctgatttagaaggaggttcaggctacggtgagccgaagcgggcgatgatgagatctcatttgaccctgatgacatcatcaccaacatc

SEQ ID NO: 738318 - DNA, 80 bp, Homo sapiens
ctcactaaaatgaaagaaaccgctgaggcttatttgggaaagaaggagctgactaaggctttggaacagaaaccagatga

SEQ ID NO: 738319 - DNA, 98 bp, Homo sapiens
cgcggggcgacgctggctgcagggacccggtgacagcgtgagaggatcctaaggcctttgtagtccttcagccactgtgggccctgcctctgcctgtt

SEQ ID NO: 738320 - DNA, 75 bp, Homo sapiens
ccactgctggggtggtggttccaatgagacagggcacaccaaactccatctgctgccaaggggccaagggatgag

SEQ ID NO: 738321 - DNA, 100 bp, Homo sapiens
tcgaggagggggaccttgaagacgacttcgaccctgcccagcacgaccagctcatgcagctctggattaatcgaattacagctgctagccaggaacatgg

SEQ ID NO: 738322 - DNA, 74 bp, Homo sapiens
agattctataagcagttaggatctggaggtgaagctcgtgtgtggagtgccacggtacaatcagacgacagatg

SEQ ID NO: 738323 - DNA, 100 bp, Homo sapiens
gctccctggccagggcagcccttcaggagctccttagtaaaggtcagaatggcggcagtggagcatcgtcattcttcaggattgccctactggccctacc

SEQ ID NO: 738324 - DNA, 83 bp, Homo sapiens
gtggatcgctgtgatcgtcacttggaggcatacacggaatacctgaggagcatccactatatctcccaggtgttactagaaga

SEQ ID NO: 738325 - DNA, 96 bp, Homo sapiens
aagaaaacagcaacacagttacatagtaaaaggaggcctaatcaccattactttaagtactgcaaaatctcagcattggctctgctgaagatggtg

SEQ ID NO: 738326 - DNA, 85 bp, Homo sapiens
ggcgactctcggcgtgcggtgatagccaagccatgggagacaagaagagccccaccagcagccattgtttgatgtcctgtgactg

SEQ ID NO: 738327 - DNA, 90 bp, Homo sapiens
aaccaaggcagatataggaacaccaagcaatttccagcatggaggagtgacggcaggaactttctgtgctctgacaacccttatgcacca

SEQ ID NO: 738328 - DNA, 100 bp, Homo sapiens
ttgtgaagatcattaatgaagtaaagcccacagagatctacaaccttggagcccagagccacgtcaaagtagagtggaacccccagctattagaggtccc

SEQ ID NO: 738329 - DNA, 85 bp, Homo sapiens
aaactcgaagaacagctgtggaaagaagttgcaaaacactggggaagaggaagaacgtctgagaaataaaattcgagctgatcat

SEQ ID NO: 738330 - DNA, 83 bp, Homo sapiens
ctgggatcccggccaccagcaattgtccgtctgaagatgatgagaaactgaaaaagaggaaggagcgatttgggattgtcaca

SEQ ID NO: 738331 - DNA, 100 bp, Homo sapiens
ggaaagttttgtgaagggtaaagatggagctgtcccctttcctccaacccaacggcttactttcaaggaagtatttgagaatgggaaacctaaagttgat

SEQ ID NO: 738332 - DNA, 100 bp, Homo sapiens
gaagctggccaaagcctgcccagacggctcacctgtgcgggatggaacaaaagaacatttccccagaggagctcaaaatggagttgccggagagacagcc

SEQ ID NO: 738333 - DNA, 100 bp, Homo sapiens
gaaaatacaaatcacacgcataatggatgaaaggaaccgacagcacttgctctgaaatttggggactgagtacaccaaatacgatagatcagtgggatac

SEQ ID NO: 738334 - DNA, 75 bp, Homo sapiens
tgccctcctggcgggcccggcggctctcactatccaggttggagtgggtggagatcatcgaaccgcgcacccgcg

SEQ ID NO: 738335 - DNA, 82 bp, Homo sapiens
gcgtgcccgcgaggagccgccgcgcgcccgcgccctccgcgcgacgccagctcctgcccctcctaaagctgaagccaaagcg

SEQ ID NO: 738336 - DNA, 80 bp, Homo sapiens
aactgaagacggaggtgcccaaggtcagaaggaagcaccacacagagatattgttattcctggactcaacagctccacag

SEQ ID NO: 738337 - DNA, 96 bp, Homo sapiens
aacgatactaagttagatggacctatattacagattctattcatgaacaatgctatttcaaagcctgagctgaagcctgtggacaaggaatcagag

SEQ ID NO: 738338 - DNA, 75 bp, Homo sapiens
ttctaatttcaccaacaactatttattgagggctagtatttgattttcatcaagcagctgatggtatccaggaac

SEQ ID NO: 738339 - DNA, 98 bp, Homo sapiens
agagacgctactggaggcggcccgcttcctggaatggcaagcgcagcaacaacagagagcacgtgataaggatgacattcggctgctgccgtcagcat

SEQ ID NO: 738340 - DNA, 100 bp, Homo sapiens
gactccacctcctggtgaagaaagcaaacagatcccaaaatggctgggcgaaaacttgctctaaaaaccattgactgggtagcttttgcagagatcatac

SEQ ID NO: 738341 - DNA, 98 bp, Homo sapiens
gcgctctcctggctcccttctgccccagctccgtctcggcggcggcggattctacaagggggttgctcctctctggatgagacagataccatacacca

SEQ ID NO: 738342 - DNA, 90 bp, Homo sapiens
agaaagcaaagcgcagaaatgttggatttgaaaccggaacatgaacattttgcagtactgcccctcttccgacatgtggacgctctttga

SEQ ID NO: 738343 - DNA, 100 bp, Homo sapiens
gtggccatcttgagtctactctgtcgctcttgtgccctagcaccccgagaaccgtcagtttgagccagatgtaaaatggcgaaactggaggaacttgaag

SEQ ID NO: 738344 - DNA, 88 bp, Homo sapiens
ctggaaattcctgacgttcattgatctgggaaaggtggcccagacagcgtgtatgtcagcttgcaagcatttagccacatccttgatg

SEQ ID NO: 738345 - DNA, 100 bp, Homo sapiens
aaccggacagagcttcctcttacactttacttgtgtgctgggacccaggctgagagcgcccagagcaacaggtggtctacatagcctgctccttcaccac

SEQ ID NO: 738346 - DNA, 100 bp, Homo sapiens
actctgcggagttagcagtcacgacctccagcacagttgtctatcaacgtctatgactacaactgccatgtggacttgatcagactgctcaggctggaag

SEQ ID NO: 738347 - DNA, 75 bp, Homo sapiens
gggcagtggacagacgaacttcagctcaatatctgcgatttccttctggttggctgtcctgcgtgggtgccaagt

SEQ ID NO: 738348 - DNA, 75 bp, Homo sapiens
cgaaaggagcaagagcaagatcaccgtgacatccgaggtgcctttctccaaaagacgcaaacatgcagatctttg

SEQ ID NO: 738349 - DNA, 51 bp, Homo sapiens
aagcatgtggtcacattacttcaggtagctatagatttcactgcctcaaac

SEQ ID NO: 738350 - DNA, 98 bp, Homo sapiens
tgccaggcgccggccggctgcgaagacgcggtgggccgcccctccggtttagacccagtgtgcctggtgggctgtgcccaggttcagagtcatgccac

SEQ ID NO: 738351 - DNA, 82 bp, Homo sapiens
gcgatcaacacgctgaacggcttgaggctccagtcaaaaaccattaaggtttggtgcacctcgatttggaggaagtagggca

SEQ ID NO: 738352 - DNA, 97 bp, Homo sapiens
cctatggcctgttatttgtctcaacaaaagaattgaagagggcagtaaagccgcggcggtcgacaagttactggctggagatgagatcgtcggcatc

SEQ ID NO: 738353 - DNA, 97 bp, Homo sapiens
aaagaagttcctcgagcgatctggacccttcacacaccctgatttcgaaccgagcactgaagccatgtattcttatactagactccttgaaagctgc

SEQ ID NO: 738354 - DNA, 104 bp, Homo sapiens
ggtgccctgttccgcgtctgtgcgaccgtccgtcccgagcgcgcagccgcggcagctcaccatggatgatgatatcgccgcgctcgtcgtcgacaacggctccg

SEQ ID NO: 738355 - DNA, 75 bp, Homo sapiens
ctgaggacagtagctctgactcggagatctataaggacaggcagaaattctcagaacaggttttcaaagtggcct

SEQ ID NO: 738356 - DNA, 98 bp, Homo sapiens
ctggaggcacttcaagttctacgctgtgaattgacgccgctgaaatacaatacagagcgcattcatgttcttagtggcatgcagccagtaaagatccc

SEQ ID NO: 738357 - DNA, 75 bp, Homo sapiens
ccaacctgaggctgccccggccgcctgcgcacccggcagcaccatgacagatgatatcatcaagttgaatcgaaa

SEQ ID NO: 738358 - DNA, 90 bp, Homo sapiens
agccaaaaattcttcctgggacacaacgacgacattatcagggtgtcaaattgagaaccaggtagatccccaccacctacagtaaaaagg

SEQ ID NO: 738359 - DNA, 75 bp, Homo sapiens
gcggggaccgcgctcaagaggctgatggccgagtacaaacgcatctatatcataaatctcaagaggacctgggag

SEQ ID NO: 738360 - DNA, 100 bp, Homo sapiens
gccgggagcacgggcgccggcatagtacaatgaggcagccagcggatcttgggctctaaattatcttggtattcagcccacaaaggaacaacaccaagcc

SEQ ID NO: 738361 - DNA, 89 bp, Homo sapiens
gagggcgggccagggccgcactccggagactcgcggttgctacgcgcaccatggctggagatgccctccaaatccttggttatggaata

SEQ ID NO: 738362 - DNA, 120 bp, Homo sapiens
ctctgccacaaaaaaatataataaggctgagtgcggagccaagcctatttgatggctttgcagatggactaggagttgctgaagctatttcatatgtggatcctcagttccttacctaca

SEQ ID NO: 738363 - DNA, 90 bp, Homo sapiens
gcataagaacatgagaactgcgactcagcatgcagaagacaaatatggtctctttagaaggccttaccaaagtagttgatccttctcagc

SEQ ID NO: 738364 - DNA, 100 bp, Homo sapiens
gtactagctgtggtgccacttctgatccgctgcctttcatccagatggtacattatatctccaccacttccctttggccatagacgaggatgcagaggaa

SEQ ID NO: 738365 - DNA, 98 bp, Homo sapiens
tttaccatctttcgcagcctagggcaacgtccaagtctccgaacagagccacacgactcccgctggctcaatggttgcccccaagtttcctggcagtg

SEQ ID NO: 738366 - DNA, 100 bp, Homo sapiens
aggggaagataaaatgactaagaggaagaagctgcggacctcagctgaatgcaatatccatacatctccttctccgggaattcaagtaaggcatgtctac

SEQ ID NO: 738367 - DNA, 100 bp, Homo sapiens
cctggtcctgaaatatagaggcctgattaaatactggtttcacactccaccaagcatcccattacagatagaagagccacaagtatatggttatgatgac

SEQ ID NO: 738368 - DNA, 100 bp, Homo sapiens
aaggagacctcattccaagttccaggattaattctgttttcggctttgtgagaaaccttaccatcaaacacgatggccagcaacgttaccaacaagacag

SEQ ID NO: 738369 - DNA, 75 bp, Homo sapiens
gaaggactggggccacgtggagctgctggaggcacagacgcagtcttcagcaaggaagtgctgggaacgccctgg

SEQ ID NO: 738370 - DNA, 75 bp, Homo sapiens
accccagtgccggggagggttctgctgcttcgaaagctggtaaggcctgagatcagcctctgtggactcggtgct

SEQ ID NO: 738371 - DNA, 90 bp, Homo sapiens
aatattgcaagaagcaggcgcagacatctccaaaacagtcatgtcacacctggatagtgttatagttttgccgctggactcttccctccc

SEQ ID NO: 738372 - DNA, 113 bp, Homo sapiens
tgcggaaaggatgttggcggtccctgtgacctgtggagacacggccagatctgccctccatggagtacgacaaggagttctcccctcgtcagcgacaccacaaagagttcaag

SEQ ID NO: 738373 - DNA, 75 bp, Homo sapiens
ttggcgttccagttgaagtttttgactctgaaggtgtgatgaatgcagactctgctaccattttggctgtttgga

SEQ ID NO: 738374 - DNA, 101 bp, Homo sapiens
gcttccttagaggatcaaaaggggctcgtggcatcctatcaagatctttaatctcatgaagtacgacagctacagccgcttcttaaagtctgacttgtttt

SEQ ID NO: 738375 - DNA, 75 bp, Homo sapiens
ccaaattcaaaaaggataaggagatcatagcagagtacgatactcaggtcaaagtgacatgaagtccgagaggag

SEQ ID NO: 738376 - DNA, 74 bp, Homo sapiens
gcagcagcagtagctatggcagtggcagaagattttaattaggtgaatcaaaaactctggttttaagcaacctc

SEQ ID NO: 738377 - DNA, 54 bp, Homo sapiens
gagctgagatccatctgcaccacggtgctgatgcagaggcctccatggctgtga

SEQ ID NO: 738378 - DNA, 88 bp, Homo sapiens
agaatctgcaggacttggtccgcggcatccgtaaccacaaggaggacgaggtgtctgacttccagcaactgctggcctgtgccagggt

SEQ ID NO: 738379 - DNA, 101 bp, Homo sapiens
atattaatagcaattaaaagaaaatagaatgtggccacttatttcactatcttcttcaaatacaaagtaagccaagatgggtgcatacaagtacatccagg

SEQ ID NO: 738380 - DNA, 100 bp, Homo sapiens
catcaagtggcatccatcataaggtcatgttccttggggaactggaagaaatattggatgtgattgaaccttcacaatttgttaaaatccaagaaccttt

SEQ ID NO: 738381 - DNA, 76 bp, Homo sapiens
caactgtagcgccaaaaaggaaggatgtcatgtggcctgtgttttggaccgtggttcgtacctatgctccttatgt

SEQ ID NO: 738382 - DNA, 83 bp, Homo sapiens
aaaacaagaccaagtcattcagaagactctaaaatagagctcaagcttgagaagagagaaccactaaagggcagagcaaagac

SEQ ID NO: 738383 - DNA, 80 bp, Homo sapiens
ctggacaaccaacggctcaagaatttcaagaacaaaggccgcgacttggagttgcagatctgatctcttctgaacacctc

SEQ ID NO: 738384 - DNA, 78 bp, Homo sapiens
ttcaggtttgctacctgatcacctcctgaagatgtaggaatgaagagcttcgaaacttgtctttgtctggccatgtgg

SEQ ID NO: 738385 - DNA, 82 bp, Homo sapiens
cctgggaactgggagacctgggtcccagtggagaggcctcaccatgtagtgtggtggacacaggcctattcatcaacatggc

SEQ ID NO: 738386 - DNA, 82 bp, Homo sapiens
ggtacctgcggccaattcggtggaacgaggacgcggactgcgaaggcaggatttcagatgcatgccaggtttccactgattg

SEQ ID NO: 738387 - DNA, 90 bp, Homo sapiens
gctgaggacacacccaggaaaagactcaggacggacaagcacagtcttcggaaggttgctggaggagccagtatgagtcagatttcagaa

SEQ ID NO: 738388 - DNA, 89 bp, Homo sapiens
gtatagcttccgttcctactaaacagatgaagtttgcagcctcaggcggctttctccaccacatgtgcacagccagagaacaacacatc

SEQ ID NO: 738389 - DNA, 51 bp, Homo sapiens
gacaggaggcagtagccaaacacccagggaagcagtttaagtgcacggtgt

SEQ ID NO: 738390 - DNA, 84 bp, Homo sapiens
catccccatcttacagatgtattaagaagcctcagtttcagtcattcagtcagtaccgctgtaagactgccaagaagtcagagg

SEQ ID NO: 738391 - DNA, 98 bp, Homo sapiens
aaccagaccaccttcataattggagaaacaccaaaaggaatccgcagagatgtgtgcacagacccaggccatgcagatactggtgcctctaacttcgt

SEQ ID NO: 738392 - DNA, 96 bp, Homo sapiens
aagagaccatggcagcctgcagctaggactttaatatggaggaggagcacctctatgccttgaggtggaaagaactggaaatgcacagcctggctt

SEQ ID NO: 738393 - DNA, 73 bp, Homo sapiens
cgggccccggctccggcccgggacggaggagccggcgctcgacacagagggaaatctaagttaatttcaaggc

SEQ ID NO: 738394 - DNA, 82 bp, Homo sapiens
cgatttaaagctgagctgcgaggaaaatggcggcgggaggtttacccaaggtccagcctagcccctaggcaccatgtcggac

SEQ ID NO: 738395 - DNA, 83 bp, Homo sapiens
ccgctaccggaaggccatcgccaagacctcctgccccccgaggtctgcagtctcctgaacccagcagccatctacgccaacaa

SEQ ID NO: 738396 - DNA, 50 bp, Homo sapiens
aagatgacaccacctttgatgagctgatgttctaatcatgtcagataaag

SEQ ID NO: 738397 - DNA, 100 bp, Homo sapiens
gtgcagaagaaaccagccgaacttcagggtttccaccgttcgttcaagatctgggcggaccccggcaaatacgccctgatgggagctgctgcccagctgg

SEQ ID NO: 738398 - DNA, 100 bp, Homo sapiens
aggaaacatggcggcggcgggtgttgtgagcgggaagcttttatgatggtcaacagcctgtgctggctatcacagatcctgacatgatcaaaacagtgct

SEQ ID NO: 738399 - DNA, 75 bp, Homo sapiens
ctgggaaggtggagccaccagcctctccttgaaggacagaataacgggctcccagattcacaagccccaccaaga

SEQ ID NO: 738400 - DNA, 99 bp, Homo sapiens
caacatggaggccgtgaagaccttcaatagcgagcataagctgtggccatgactactgaagtaggctctgtgtctgaagtgaagaaggactctagccag

SEQ ID NO: 738401 - DNA, 100 bp, Homo sapiens
cgccgggacgccaagcacttcctgccgcgggcggcgcgccgcagctgcccaggccggaccgggccgggcgcccgcagatttctccacccaggtgaactcc

SEQ ID NO: 738402 - DNA, 74 bp, Homo sapiens
tgttttgctaccgtgaccgtttaggagatgaagccttatctaaatcagtgcctgtcacagtggatgatgatgat

SEQ ID NO: 738403 - DNA, 82 bp, Homo sapiens
ccactgttcactagtctagcttcagatgaacagaccaatgatgcgagctcagagtcaatagcatccttctctaaacaggagg

SEQ ID NO: 738404 - DNA, 89 bp, Homo sapiens
ggtgtcggagcagcggctgtggcgcggcggccgcgaggtagaatggaagaatctcacttcaattctaacccgtacttctggccttctat

SEQ ID NO: 738405 - DNA, 96 bp, Homo sapiens
atcgggggatctaggcgacatggagccattgaagggaacaacacccttgatgaaaactcttctacagaaattactctcaaagaaacctgaggatcg

SEQ ID NO: 738406 - DNA, 75 bp, Homo sapiens
tcatggaaagcgaccccggggtcttcaccgagctcattaaaggattcggcaagaaaattggatgtatattttgaa

SEQ ID NO: 738407 - DNA, 101 bp, Homo sapiens
aggatccagcttccttctgaaaaggcgatcttcctgtttgtggataagacagtcccacagtccagggtaactaaggaagtggatgctacatctaaagaggc

SEQ ID NO: 738408 - DNA, 90 bp, Homo sapiens
gccgtcaacgccttcaaccaggaggttatccggtgttggctcctgctgcttactatgaccaaactggtgcccttgtagtgaatgcaggcg

SEQ ID NO: 738409 - DNA, 75 bp, Homo sapiens
ttttagtccattgactatgcagcctaatggtgtaatcctgagagattcacatggtgttgcacaagtacgttttgt

SEQ ID NO: 738410 - DNA, 76 bp, Homo sapiens
catcatcatcctgcgatcctgcaagattcagagaaaatggcacagtatctggaggaggaacgtcacatgagagaag

SEQ ID NO: 738411 - DNA, 50 bp, Homo sapiens
cttgctcgtgcactttacacacatgagagcatggtaaataccaagcccga

SEQ ID NO: 738412 - DNA, 51 bp, Homo sapiens
ggccaacttctgctacagacgactcagtccttttggaataaatcatgggat

SEQ ID NO: 738413 - DNA, 89 bp, Homo sapiens
tgtttctggccacgtgcttcaacgctctgctgcccgctgtgagggaaaagggtgtacagcaagctgtgattcctgggaaaactaaaaaa

SEQ ID NO: 738414 - DNA, 51 bp, Homo sapiens
ctcaggagcaaatcagtaattgcctccccactatcctgtggtgtgttgccc

SEQ ID NO: 738415 - DNA, 100 bp, Homo sapiens
ccgctcgtcatggcctacccgggatacggaggagggaatgatatggaacctagcaaagctgttccactgaatgcatctaagcaagatggacctatgccaa

SEQ ID NO: 738416 - DNA, 100 bp, Homo sapiens
ctaagcctcagcccgttgattcctgggtctagcttgcatgcctgacctatgaggaccagcacagcagtgaggaggaggaggaagaggaagaggaagagga

SEQ ID NO: 738417 - DNA, 82 bp, Homo sapiens
tgaagatcctggtgtcgccatgggccgccgccccgcccgttggtcctgtatggtggaagagtcggggaccctcgaatcccag

SEQ ID NO: 738418 - DNA, 83 bp, Homo sapiens
cagacggctgcccttcaagtaccagacagtcattttgtttactcattcagccctgttgcaggtcccaataaactcttcataag

SEQ ID NO: 738419 - DNA, 121 bp, Homo sapiens
ccactcaagagtcataggattagatgatccaagtcaccaagaaattactgtctcaagtgatacgaatcttgcctcctggaatccttcaaatcctgaatgtctcttacttgtggtgaaggaa

SEQ ID NO: 738420 - DNA, 50 bp, Homo sapiens
catggcggctgacagtcgggaggagaaagtgccgcagaatggaattcggc

SEQ ID NO: 738421 - DNA, 113 bp, Homo sapiens
ccgcggccatggcgtacgcctatctcttcaagtacatcataatcggcgacacagctccatctgatccactggaactccactctgtttggcagcattgatgaggctgtggggaa

SEQ ID NO: 738422 - DNA, 100 bp, Homo sapiens
gtttcgacccggtcacacaaagcttcagcatgtcatgtggtttaaacaagtctcttaagtggtgtttcctcaccgatggagaattacttccaagcagaag

SEQ ID NO: 738423 - DNA, 98 bp, Homo sapiens
gtcctggctccgaaccccgggcccgtcgggagctggcccccgaggtgatcggaattggatttgcaactcaaaaccaaaggctccccactgctgcaaga

SEQ ID NO: 738424 - DNA, 51 bp, Homo sapiens
tgtgagatctccacaaggggtacatcaggagcttcagaaatacgagcagtt

SEQ ID NO: 738425 - DNA, 75 bp, Homo sapiens
agacagaggtcatgattctgagatgattggagaccttcaagattcctgacattcagacaactgacttgtaactga

SEQ ID NO: 738426 - DNA, 75 bp, Homo sapiens
tctcggactctccaagagaacaggatagtgaatcacagctccataatgggagaagtaaagaacaaagacttaagg

SEQ ID NO: 738427 - DNA, 90 bp, Homo sapiens
gacctggccagctgccgcgactgggaggagcgccggaacgccgaggcccaggatgactgagggacgtggctgcctctgggggcaccagca

SEQ ID NO: 738428 - DNA, 98 bp, Homo sapiens
gctcatggtccccatggcatgggggcctcagggcagcctgcctggaggtgttggagcgggccggagagaagtagagtgggctgcgaggagaaggaaac

SEQ ID NO: 738429 - DNA, 100 bp, Homo sapiens
gaaaatgatattgatgaagaaactatacaacggtgttggagtcttgggcccaaagaccagctcctagaacctgcagggaagcaacggcacgttccatctc

SEQ ID NO: 738430 - DNA, 100 bp, Homo sapiens
gccagccagctggataccactgagtgacctcagtagatgccacgtgggacaggagaattctctaaaaccttccttccttccagttgtgtgtcagtagaat

SEQ ID NO: 738431 - DNA, 82 bp, Homo sapiens
gtggacattcctgatgtccccctcctggcagcccagacgtttattcagagaattcagcggggtgccaagtcgttttctgtgt

SEQ ID NO: 738432 - DNA, 50 bp, Homo sapiens
gcaaaaacattccaccattcaacaaaagtctagggacaggaagatggttg

SEQ ID NO: 738433 - DNA, 75 bp, Homo sapiens
gatggaaacagactgaccagtgacaaaaaattctgctcccctcatcaggtctctaattaacagaagatggcaaag

SEQ ID NO: 738434 - DNA, 75 bp, Homo sapiens
atgatcgataagaacgagctgaagcaggccctctcagagctcccagctcctccagcagccgacaggaggcccgtc

SEQ ID NO: 738435 - DNA, 75 bp, Homo sapiens
ggtgttttagaggataccttggtcccagagtcatcatgaagtacaaaattggacagctgtacatgatcagcaaac

SEQ ID NO: 738436 - DNA, 75 bp, Homo sapiens
tggctgcaaatgttattcctgtgcgacagggtctcactgtattgcccaggttggtctcgaactcctggcttcaag

SEQ ID NO: 738437 - DNA, 85 bp, Homo sapiens
ctgcgcccgtgggaccggtgaagttctggcgacccgggaggagtgagatgtggatgttgcttttgcacctacgggggcatctgag

SEQ ID NO: 738438 - DNA, 88 bp, Homo sapiens
caccgccgggaggaggaggaggagccgagaggagctgagcgagcgcggaagtgtcttcattggctgctctggcatggagctgatatca

SEQ ID NO: 738439 - DNA, 80 bp, Homo sapiens
ccaccagttcgcccgtccccctgccccgttcacaataaaaagcttgtggtgaaggggggcaaaaaaaagaagcaagttct

SEQ ID NO: 738440 - DNA, 74 bp, Homo sapiens
cagaaaattttggaaagagaagatgctcggctgatgagtctcaccctgttgcttaggcagatggcgcgatctcg

SEQ ID NO: 738441 - DNA, 137 bp, Homo sapiens
atagtcacagtgagaaggcgacaggaaccagctcgggggccaactctgaggagtccactgcagcaggtgctgttggcagcagcggtctgcacaaaagcaggaaaggctattgtttctcgacagtttgtggaaatgac

SEQ ID NO: 738442 - DNA, 99 bp, Homo sapiens
tctgagtggtgctcctggctgctgtccgtggctgaggggaaggtggccatccagaaggaggacttgcagaagtaccacaacagggacacctggttccag

SEQ ID NO: 738443 - DNA, 83 bp, Homo sapiens
cagagtgcagagccgcctttccagcatgcaggggctgctcagatgatatcatcaagttgaatcgaaaggaagggaagaagcag

SEQ ID NO: 738444 - DNA, 96 bp, Homo sapiens
ttcttcttctcctcctcctcctccacctcctccagggcaccctgaaaggatcaggacatgcggctgcgcttttggctcctcatttggctcctgctg

SEQ ID NO: 738445 - DNA, 73 bp, Homo sapiens
ttcacagaactggctgctgccctggatgccgaaggggaaggaaatgcactcggtgatggaaagagagccacta

SEQ ID NO: 738446 - DNA, 83 bp, Homo sapiens
ctcctggccaccgactcctacaagtttctcttcagcaacgggtagcagaattggaaaaaattaatgcagaatttttacgtgca

SEQ ID NO: 738447 - DNA, 75 bp, Homo sapiens
cagtcaagaccctccagcttgcctacaggcaggattgaacccaactaccccaaggtctgcggccaccagggcaat

SEQ ID NO: 738448 - DNA, 100 bp, Homo sapiens
cggcggtgccggagcgcgagcagagcggagacccccaggtcctgcgggcgcgaacatccagtcatggataaaaatgagctggttcagaaggccaaactgg

SEQ ID NO: 738449 - DNA, 50 bp, Homo sapiens
cagacagcgagtggcgacgatgtcacccttgcaattatggatatttaaaa

SEQ ID NO: 738450 - DNA, 90 bp, Homo sapiens
cgagggtctgctggacaacttcgtcaccttcttcattgctgaagctcgccaacccccgtggactgctggctctcaaggcggccgctagcc

SEQ ID NO: 738451 - DNA, 75 bp, Homo sapiens
ttacctgccggctatgtcggaagacgacgaggactgctatggcaatgaatcagagatcattgatttcttcctggg

SEQ ID NO: 738452 - DNA, 74 bp, Homo sapiens
ctctccagaaaatcttgtggacaaatccaggggaaggacagtcattttgtttactcattcagccctgttgcagg

SEQ ID NO: 738453 - DNA, 97 bp, Homo sapiens
agcaagggaaagagtcctgcatggtttcaagggacgtaccaggaggatggtgcccagcattttttgtcctcaagaaaatacggaagaagccctgttg

SEQ ID NO: 738454 - DNA, 99 bp, Homo sapiens
gtggcttttgtgaagcacagcacggtactggagaacacggatggtcatgcttcaccccttcctccatctgctgcacctaccactgattctacagattcc

SEQ ID NO: 738455 - DNA, 74 bp, Homo sapiens
agactcctgtcatccgctcagtgatactgaaactgcttttgaagtacaggtgaaaatgcgtggaatagactttt

SEQ ID NO: 738456 - DNA, 122 bp, Homo sapiens
cttccctgcccccttcccccacccccgactcgggcttggcgcggcggccagaggaaccccgaggtactccaaagattcaggtttactcacgtcatccagcagagaatggaaagtcaaatttc

SEQ ID NO: 738457 - DNA, 83 bp, Homo sapiens
tgcccgtcgaggtgcgcggctccaacggggccttctacaagcatctactgccgaggatgttccaagccgctgtgctgctcgtg

SEQ ID NO: 738458 - DNA, 96 bp, Homo sapiens
gatgaaacctatttttcatttttaagaaaatttgtgcacacatttcatggacagctgattctttcccaggaactgtcttgctttgttacgaggtgc

SEQ ID NO: 738459 - DNA, 98 bp, Homo sapiens
cggcctcaccttttgtacctgctacctggcttcttacctcacgaacaagtcatccgtccttggctcaggatttggagagcttgcaccaccaaaaatgg

SEQ ID NO: 738460 - DNA, 83 bp, Homo sapiens
gccagcccgtgggcgagccgcccgcccgccgagcagccatgaggattatatctgtccaagatgcgagtctggttttatcgagg

SEQ ID NO: 738461 - DNA, 75 bp, Homo sapiens
caacaagatgttgtcctgtgctggggctgacagcgagggtgggtcctgggccccaacaactactacagttttgcc

SEQ ID NO: 738462 - DNA, 100 bp, Homo sapiens
accaacaagttcatcaaggagctcattaaggacggctctctgctcattggggcgttgaggagtttgaagtttgaggaaattcaaaaaagatttggtgaag

SEQ ID NO: 738463 - DNA, 50 bp, Homo sapiens
gcggacgccggtctctgttccgcaggatgctgcagcagaaggccgtggct

SEQ ID NO: 738464 - DNA, 100 bp, Homo sapiens
gcgaagatcgccaagactcacgaagtttttcagttatgggacaaaaatattatatcaaaacactgaagctttgcaatctaaattcttttcacctcttcaa

SEQ ID NO: 738465 - DNA, 91 bp, Homo sapiens
ggctgtatgattaggccacaatcttcaatgagtaaacatattcctgtgtttgagaagtcccccctgcgggtgaagaacttcgggatctggc

SEQ ID NO: 738466 - DNA, 100 bp, Homo sapiens
gagcccccgcgcgcccggccggcccggagcaccgagctcgcggcacggtaggagtaagactttgaccccgacgcaggcttcagtgattgccgcggatcag

SEQ ID NO: 738467 - DNA, 100 bp, Homo sapiens
gagctcccagatcataatgtggctgtggaacgggtggccttggagatgctctttactggtgagcccatttctgcccaggaggccctgctccacgggctgc

SEQ ID NO: 738468 - DNA, 100 bp, Homo sapiens
tggcgtccgcgcgctgcacaatggcggctctgaagagttggctgtcgcgcagcgtaacttcattcttcaggtatgaaaatgaaagtcttcagaatggaag

SEQ ID NO: 738469 - DNA, 78 bp, Homo sapiens
tgccacccattgtgtcttctcaagaagatggatggagtggaaccctggcttccccttgagcatcgatgccaaatgcca

SEQ ID NO: 738470 - DNA, 96 bp, Homo sapiens
tgacttcacttttgagtgcaactgccttccaggccctgaagaggaaagtgaggatgactctcatctcgaaggcagggatcctgatatttggcatgt

SEQ ID NO: 738471 - DNA, 88 bp, Homo sapiens
ggccctgctggaccagctcatgggcacggctcgggacggtcttccccagggaggtcctgaactacacagctgagaacatctgtaagtg

SEQ ID NO: 738472 - DNA, 99 bp, Homo sapiens
gtaaagagaaggaggccggaactacaccagcaaaagtggatccggattggtgccaatgtctccaacttcacttttgctcctagcacgattatatttcac

SEQ ID NO: 738473 - DNA, 116 bp, Homo sapiens
tcaagatcctcaagaagaagaagttgcgaaggatccccaacggggaggccaacgtgaagaacaaacggggattcagcgtccgatcctttggaacagggactcacgtgaagcttcca

SEQ ID NO: 738474 - DNA, 96 bp, Homo sapiens
atatttctgagtgtgaaaaaaacaaaagcagcccaatttttgcattccaggaggagataattttatggagaaaagctcctgaaaaactgaggaaac

SEQ ID NO: 738475 - DNA, 100 bp, Homo sapiens
attattccaaagggtatttgagactgactgaatcaggtctggaacattattgaaatggcacagttggtggatctgaaatctgaactgacagaaacccaag

SEQ ID NO: 738476 - DNA, 100 bp, Homo sapiens
ggaggaagaattcccaagccaaagctttccaggtgtcatggagaaactccagctgggcccagagattctgcagcgggaaaatccaaggcttatttatgcc

SEQ ID NO: 738477 - DNA, 74 bp, Homo sapiens
cgcagcttccgtgtttgctgcgcccgcactgcggtcctgatgaagttgtagggccagaaggaatggaaaaattt

SEQ ID NO: 738478 - DNA, 54 bp, Homo sapiens
cccttgtctttggcagcgaaatggcctcagaacctgacccgggaacaagccgac

SEQ ID NO: 738479 - DNA, 48 bp, Homo sapiens
ctatgctgatgatgttgaaaagtacatccagcagtggtcattcgacaa

SEQ ID NO: 738480 - DNA, 101 bp, Homo sapiens
gggcggccgatcgggccggggtgcgcaagggggaccgcatcctggaggtgtctgccatcatggatgttctcgcagaagcaaatggcacctttgccttaaac

SEQ ID NO: 738481 - DNA, 100 bp, Homo sapiens
tacaagaagaccaaggaagctgttttgctccttaagaaacttaaagcctggaatgatatcaaaaaggtacttaaatcgattcagcagtgagctggagcag

SEQ ID NO: 738482 - DNA, 74 bp, Homo sapiens
gagaatctgggcgtcgctctagaggtcaaaatgcagatcttcgtgaaaacccttaccggcaagaccatcaccct

SEQ ID NO: 738483 - DNA, 112 bp, Homo sapiens
gccaccgtccagcaacttgtggacctcctgtgccgcctggagctctaccgggctgcccagatcatcctgaactgatggtgaagaagacgaagtaagtgctggagaaaaggag

SEQ ID NO: 738484 - DNA, 75 bp, Homo sapiens
aattatcgaagtgtgcctggcgctgaagcatcggaatggagtgaagcgtgacattcaggaaaacgatgaagaggc

SEQ ID NO: 738485 - DNA, 50 bp, Homo sapiens
ctatgagaagatcgtctctgggaagattccaactccacagagtgaccaga

SEQ ID NO: 738486 - DNA, 100 bp, Homo sapiens
aaaacaaagacgctggggaaacttcaccaagagcctcggcagctccagagcgacgggaaacgaaaggtgctaactgccaaagaaaggaaaactcaaattg

SEQ ID NO: 738487 - DNA, 100 bp, Homo sapiens
ctcatactctgttatagataaacaaggtcctcttcctgatggatgggaacaagccatgactcaggatggagaaatttactatataaaccataagaacaag

SEQ ID NO: 738488 - DNA, 75 bp, Homo sapiens
gcttgccctggtcttgctcggccgatgaagtgcagaggtttttttctgcctgatgccatcgttgctgacaacaat

SEQ ID NO: 738489 - DNA, 101 bp, Homo sapiens
ccaacagctcggatgcgaccctcccagaccggccgctctcccctcctctcacggcacctcccaccatgaaggaacgtcaaggtcgtgggaaataaaaggca

SEQ ID NO: 738490 - DNA, 100 bp, Homo sapiens
acagtggactcaacttcaaagacgttctcaaggagaaggcagacctgggatgaggatgggacagaagaggataacagtcgtgttgaacctgttggacatg

SEQ ID NO: 738491 - DNA, 51 bp, Homo sapiens
cgagttcttcgtgctgctcaagctgtgccacgaccgtggctatctggtgac

SEQ ID NO: 738492 - DNA, 83 bp, Homo sapiens
cgaaagacagaggtgctgctgaaggtcatggatgccaagcacaagaactgcatggaggacgactgggtttggattcagaagag

SEQ ID NO: 738493 - DNA, 101 bp, Homo sapiens
aggtacaaacccgtagtgctgatgaaccaatgacaacatttgttgtctgtaatgaatgtggaaatcgatggaagattgcagagggaatggcatacatcgag

SEQ ID NO: 738494 - DNA, 74 bp, Homo sapiens
tcagctgtgtgtccagaacgtgccatggagacgcttaacgtgttgctagaaaatgttggcgaagaactagatcc

SEQ ID NO: 738495 - DNA, 100 bp, Homo sapiens
catgaggcagccggcatcgtggagagtgttggagaaggggtgactacagtcaaaccaggatggaagagtgtagaaagtgtcccaaagttggtgtctgaat

SEQ ID NO: 738496 - DNA, 75 bp, Homo sapiens
tcttagggcatcagattggactttcaggaactggaagaggaggcaacagtatttggggcaagaagtttgaggatg

SEQ ID NO: 738497 - DNA, 101 bp, Homo sapiens
acctccggaccgagggacgcggggacaatgactcattcttcccaggacactggttcttgtggcattcaggaagatggaaagctttatgtggtggattccat

SEQ ID NO: 738498 - DNA, 50 bp, Homo sapiens
gtgctctcgccccaacccgcgcgccagctttggacatcagacagtgcagg

SEQ ID NO: 738499 - DNA, 98 bp, Homo sapiens
ccctctgtggtcccctctccccggggggctttgggattcttgtcaagctccttcaagagcctgcaagcacttaacctgctgggctttgacaaacttcc

SEQ ID NO: 738500 - DNA, 74 bp, Homo sapiens
gatttacaaactggccaagaagggccttactccttcacagatcggggatgtggagacgctggtagcggggccag

SEQ ID NO: 738501 - DNA, 82 bp, Homo sapiens
ccgtctcgctctgggtctccaggcccgcgaccgtccgccagtcgtcccgaggaggatacgaagcgttttcggcttcctgccc

SEQ ID NO: 738502 - DNA, 100 bp, Homo sapiens
ttgtgtcctgagatcaaatggcacttcattggccacctacagaaacaaaatgtcaacaaattgatggctgaatgcaatatccatacatctccttctccgg

SEQ ID NO: 738503 - DNA, 75 bp, Homo sapiens
gccgagcaggaggcgccatcatggttcctggtagagttacacagttgtgccgccagtatagcgacatgcctcctt

SEQ ID NO: 738504 - DNA, 100 bp, Homo sapiens
tagctgctaccccaagcccgggagcttctcaggtaaaataccatgaagattttgaaaaaacaaaggggagaggctttactcccgtcgtggacgatcctgt

SEQ ID NO: 738505 - DNA, 80 bp, Homo sapiens
aaaattctgaactcaggacttggcaagttttgctgttactgctcagtgtagtcacaccttgaataagaaatggaaaacct

SEQ ID NO: 738506 - DNA, 75 bp, Homo sapiens
catgcctcaccaagtcacatgacaagcagtgtgatgaatgcagactctgctaccattttggctgtttggatcctc

SEQ ID NO: 738507 - DNA, 83 bp, Homo sapiens
ttccaccgtccaagtctttgaggccacgataagcctactcaatttgaagacattgaggatgaagacctttatgatgatccact

SEQ ID NO: 738508 - DNA, 75 bp, Homo sapiens
agaagagctggagacagagaaagatttcagcagaatcagaaactatccctcttgtgatgaaagctgtctctgggt

SEQ ID NO: 738509 - DNA, 75 bp, Homo sapiens
aaagcacggggtgaaactgaccacagtgctcaccacccaccaccactgggttggggtgctggaggactgcttcac

SEQ ID NO: 738510 - DNA, 98 bp, Homo sapiens
ggcgacctcaagaagcagctccacgaaaggcagccgcggatcgccgcgctcagcgacaaacaagcggtgcgtctttctacgtgaataggattttgtgg

SEQ ID NO: 738511 - DNA, 75 bp, Homo sapiens
ggccactctgccgagcgcagagcgccgcgcgttcgcgctcaagatcaacagatggagttcgctcttgttgcccag

SEQ ID NO: 738512 - DNA, 83 bp, Homo sapiens
ccaggactgcctgagacaagccacaagctgataacaacgaacttgatgcaagtgataggtttgccaaggtcagacctctcatc

SEQ ID NO: 738513 - DNA, 50 bp, Homo sapiens
cacactgggaaacatcattaaatcgcaagtgaaccggagcaaacgacttc

SEQ ID NO: 738514 - DNA, 75 bp, Homo sapiens
gaaaaagccaaagtgggaccagggaagccctcctatgacactgaaacagatcctagtgagggattgatgaatgtt

SEQ ID NO: 738515 - DNA, 75 bp, Homo sapiens
gctattgaccatgcacaggaccttcaacaagaagctaatgaattgagcagctatgaaggaggagattttgaaaaa

SEQ ID NO: 738516 - DNA, 98 bp, Homo sapiens
cttgacctcgtggggttgggatctcaccgtcctgtttgactgacagggatcgcttacacctgagacgaactacagaacagcacgtaccagaggtggaa

SEQ ID NO: 738517 - DNA, 80 bp, Homo sapiens
aacttaataaatcaagtcctatttgtgaatggaaaggactggaagttcaccttaaaagacccagatgatgtggtaccagt

SEQ ID NO: 738518 - DNA, 73 bp, Homo sapiens
gccgccccccgaagcccagggagagcaaggcgcgcggcgactccgagctgccaaatgctgttaaatcaactga

SEQ ID NO: 738519 - DNA, 90 bp, Homo sapiens
gaatctcttatgatgcctgcagtttttcatactgttgcttcaaggacacagcttgcattgatggtgtcctcagaccgaagccaactttcc

SEQ ID NO: 738520 - DNA, 75 bp, Homo sapiens
tcaaaacgggcttttaggaagaaggaatggaggctttgaaatttggtgcttccagatgtgagttatcaggtggaa

SEQ ID NO: 738521 - DNA, 82 bp, Homo sapiens
cccggaccccgactcgcccatccggaagatctcgtcaagccggtctaattgaagccaacggagaactcaaggtcttcataga

SEQ ID NO: 738522 - DNA, 75 bp, Homo sapiens
ctgccccgccggagcagcatcatcaaggtataagcagtttagccaaattttgaagaacattggagaaaatgaagg

SEQ ID NO: 738523 - DNA, 87 bp, Homo sapiens
acctgcgtcctttttcgtttttcggatgatgccttcaatactacctttatttccaccatagctgtttggggcaacttcgttaatatg

SEQ ID NO: 738524 - DNA, 114 bp, Homo sapiens
gccggcgccggcgccgcggcctcttcggctgcggaccctgccattccggaggaggaactctaactccttgccactcaagaaatgtcctccctttcagaatatgccttccgcatg

SEQ ID NO: 738525 - DNA, 82 bp, Homo sapiens
ggaaaaactggagagcttcatcaaaaatagtgatagctttgataaatcatagcaatggatcatttaacttgaaagctttgtc

SEQ ID NO: 738526 - DNA, 51 bp, Homo sapiens
cagattcgcagtggtcgcttcttctccttgctacgtgtctctctgtgataa

SEQ ID NO: 738527 - DNA, 98 bp, Homo sapiens
ggatcctgagtacctggctgctttcagatcccttttcctatcctgggagattgcctctcatcacccaattactggtgatttccccatcaccagtaaga

SEQ ID NO: 738528 - DNA, 75 bp, Homo sapiens
ggaggcaagattttgaaatctatggcagatgcactttgtgccttggacattttaagttgtgctggatttgtaaat

SEQ ID NO: 738529 - DNA, 50 bp, Homo sapiens
cacagcctctacaccccggtgatcaaggttccgagtctgaggaagacata

SEQ ID NO: 738530 - DNA, 96 bp, Homo sapiens
gagagactcacgggacgcgacgcgccccgcctcccccgtccggtccctctctccacggtaaggggcctgtcagagagttttccatgccaagaggag

SEQ ID NO: 738531 - DNA, 75 bp, Homo sapiens
cgctgctgcggaggttcaaagtgtccgacgaggagggcatcctggctgtttcacccgtggacttgaacttgccat

SEQ ID NO: 738532 - DNA, 75 bp, Homo sapiens
cccaacagctgaaaatgtggggaagccaacaatcattgagccggcagcaaaagtggaccaagaaaccttgacaga

SEQ ID NO: 738533 - DNA, 100 bp, Homo sapiens
cagacaagcggtggtgaggcaggctcgcctcctccagctgttgttgctgctggtatttatgcaagctctcggatcaggagttacgacagagtgcagctcg

SEQ ID NO: 738534 - DNA, 87 bp, Homo sapiens
tcccatgcaaaccaatgagggagaagtatcggaagaaagcagttccaaggtgtggatgaggtcaccattgtcaacattttgaccaac

SEQ ID NO: 738535 - DNA, 49 bp, Homo sapiens
ggaagagtaatgaaatggaggaggtgcaggccctagcaggtgcaggtgg

SEQ ID NO: 738536 - DNA, 82 bp, Homo sapiens
gaaagagttgctgaactacaaagaaaggtaatggtaactcgggatttgaaggacagagtcgctatgtaccatcctctggaat

SEQ ID NO: 738537 - DNA, 96 bp, Homo sapiens
tagtggtctgtgttctaatgactgtcctcgtaagataacagtctcttttattcaaaaccttgtattttgtgtggaaagagtttaccgtgtgcctga

SEQ ID NO: 738538 - DNA, 75 bp, Homo sapiens
agaaaactggtcaaggaagctttgacgaaggatcagagattggtgtattcgggcagactgcttcccgatcatctg

SEQ ID NO: 738539 - DNA, 82 bp, Homo sapiens
tatgatctacctaccaatcgtgaaaactatattcacagacattccactgcccttctcccaaaaagatgtcttttcgaaaaat

SEQ ID NO: 738540 - DNA, 100 bp, Homo sapiens
ggcgagcatggggcgcctggcctcgaggccgctgctgctggcgctcctgtcgttgggtgcttaatttacccatttctgatgcgaggaggaaagcctatgc

SEQ ID NO: 738541 - DNA, 75 bp, Homo sapiens
tagagttgtagcttccacctgacgtctttttacaagggaaacggttccacgaagccttggaaagcatactttcac

SEQ ID NO: 738542 - DNA, 100 bp, Homo sapiens
cgaccaacatccagaacttccagctgcccccaggtcttccacgtggcctacgtcctcatcaagtttgccaactcaccccggccggacctctgggtgctgg

SEQ ID NO: 738543 - DNA, 132 bp, Homo sapiens
cggcgctggggcccccagaagtgatcgctcagctggagaacgcggctaaagttctgatgggtgataaaagaaaatgtggctgaagttacccgaagttcagcttgcagtgtaattcagaagagttaagaccag

SEQ ID NO: 738544 - DNA, 75 bp, Homo sapiens
ggaacagaagcggaacagccacagcagcctcccaaggagtctgcaagttggactgaagcgggtcacgggcgggtt

SEQ ID NO: 738545 - DNA, 50 bp, Homo sapiens
tcgagtctcaagtggacaatggaaattgcaagacctaacatggctgaaag

SEQ ID NO: 738546 - DNA, 134 bp, Homo sapiens
cttcaagaccatcagccttagcatattgctatcactgcgcgcaaaaaggccattatggacacgttaccatgccagcaatgattccttttgagtttctgacagaagatagtggttttcatccaaataagtcaact

SEQ ID NO: 738547 - DNA, 101 bp, Homo sapiens
cgcggcagccctcgctgtcatcctcattgctactgccctctgcgctcctgcatctgcctccccatggcaggctgcagtggaccatatcaatgctgtcattc

SEQ ID NO: 738548 - DNA, 100 bp, Homo sapiens
aaccaccgcatcaagagcttcaagaacaagggccgcgatgtggaagggttgtagaaggtgatttagctgccatagaagcatacaagtcatcaggaggaga

SEQ ID NO: 738549 - DNA, 80 bp, Homo sapiens
agccctacaatgtgaagatacataagatcgtagccagacccccaggaattgactttaaaattaggaccatagagctcgat

SEQ ID NO: 738550 - DNA, 100 bp, Homo sapiens
tgtgccttctgtcgcaggctccttgaatggacattcactgaacaatgccagggatacaagtgccatggatactctaccgctaaatggtaattttaacaac

SEQ ID NO: 738551 - DNA, 100 bp, Homo sapiens
agagcagcggccccacctcgctgttcgcggtgacggtggcgccgcccggggcgaggcagggccagcagcaggcgggaggatgcagcaccgaggcttcctc

SEQ ID NO: 738552 - DNA, 97 bp, Homo sapiens
cggcatgtcatctttgccaggactgatgcagatgcccctcctccaccagaggactgggaggagcatgtcaacaggctgcacatggtccgtctaatgc

SEQ ID NO: 738553 - DNA, 98 bp, Homo sapiens
cattcctttccggaagcacacagtgcgcggggagcgttcctacagggagttctgggaaatcgttcattcatttacagatgaacagaaaagactcttct

SEQ ID NO: 738554 - DNA, 82 bp, Homo sapiens
ggaacctgatttgagatcaattcttggagaacacaaagaagtgtgatgatacaaaagttttgcagtactatttcaatctagg

SEQ ID NO: 738555 - DNA, 98 bp, Homo sapiens
tggatgagctgggccgcaaataccaagtggacctgtccaagacctatgccagatttactggtgctccactgaaggtacacaagatcagcaacccctgg

SEQ ID NO: 738556 - DNA, 100 bp, Homo sapiens
gggccttctggagatgcttccgaactgtgggcaaaaatggcgctgatggttcctgggaaggaaggtggggtaccccttgctcccaaccagcctgtccatg

SEQ ID NO: 738557 - DNA, 75 bp, Homo sapiens
gcgcgccggctcccgctcgggcggccgcggacatgtgcaggatgtccttcaagatttttgatgaaattgagtcat

SEQ ID NO: 738558 - DNA, 100 bp, Homo sapiens
aaggccatgtgggaagcctggggaaatcccagcagcccgtattcagcagtgtctttggtgcaacactaacaaggcttgtctggactacccagttacaagc

SEQ ID NO: 738559 - DNA, 84 bp, Homo sapiens
cagggaaccctggtcaccgtctcctcaggttttaaaatcaaagatgggaaaatcggagaaaattgcccttccccatggccagct

SEQ ID NO: 738560 - DNA, 74 bp, Homo sapiens
cggacgcgagcccgctcccctgattgagccccatatgggggttggcaggcagcagagaggcccctttcaaggtg

SEQ ID NO: 738561 - DNA, 82 bp, Homo sapiens
cccggtgtgtggcgcgcccagagccccgcgtttcagccctagggaagggagcatcgagtacagctgtccggcctccaacgag

SEQ ID NO: 738562 - DNA, 90 bp, Homo sapiens
cggctgccatcttagtctagggactgaggagtcgccgccgccccgagtcccgccccgtcgcagaatttagtctcaaaggaaacttcaacc

SEQ ID NO: 738563 - DNA, 75 bp, Homo sapiens
ctctgaggctttctcgcttgtctctcatttacaggctggtaacctacatctttgtctacgagaatcccatctccc

SEQ ID NO: 738564 - DNA, 100 bp, Homo sapiens
tggttacgaaagattcctgggacctgaaatattctttcacccggagcctgattcagaagtagccaatgctggtataaaacttgaaaattattttgaagaa

SEQ ID NO: 738565 - DNA, 98 bp, Homo sapiens
ggaaagcgaccccggggtcttcaccgagctcattaaaggattcggatgtacgaagtaggtccaaagttgttgaccgtatttacagtctctacaaactt

SEQ ID NO: 738566 - DNA, 100 bp, Homo sapiens
cctgtcaggccatggggaacctctaccatgacacatgcttcacctgtgcagcttgcaaggaagaagcccctccagatggtgctgttgccgaatacagaag

SEQ ID NO: 738567 - DNA, 75 bp, Homo sapiens
ctggtgaccgagcacccgcctccgggcatcttcaactgttttgggctggaggatagttgcaagtattgtttggtc

SEQ ID NO: 738568 - DNA, 76 bp, Homo sapiens
ttcagacccatttccagtcatgagatgcctggtgtgcaggagtatatacaacagcctattctcaatggtctgcggg

SEQ ID NO: 738569 - DNA, 100 bp, Homo sapiens
aaagtctgatatgcttgaaaaagagcagctttgaaatatcagtgatgtataatgaatctgacctgcatacactcgtgaaatcaagataatattttcatca

SEQ ID NO: 738570 - DNA, 100 bp, Homo sapiens
aaacaaaaggagatatcaagaggatggattcgacttagacttgacctcattgtttgtgctccccaaacctaaagtgatctcctgtctagagcaaggggaa

SEQ ID NO: 738571 - DNA, 75 bp, Homo sapiens
aatggaatcacggtttttggaacaaggattttggatgaagaagtttttgagaacattaaccaggtggtatttgtt

SEQ ID NO: 738572 - DNA, 112 bp, Homo sapiens
gtttgcaacatccttcttctggataacactgtacaagctttcaaagtcaatgaactgctgttgtaagcggctcatcaagagttgaacttcacgtagccttgttgggaatatg

SEQ ID NO: 738573 - DNA, 90 bp, Homo sapiens
cgagtcggctgccgtggctgtgctgagggtggcggccggataggtatgatctcgtgaaatcttgagagaaactgaatgacgaatgaaact

SEQ ID NO: 738574 - DNA, 76 bp, Homo sapiens
gaagaacagtgcatcatacaaggcaactcatgcagcaattccagaaccccgacttcccacccgaagtagaggaaca

SEQ ID NO: 738575 - DNA, 82 bp, Homo sapiens
aggttatctcctcagccaacagagctgtggttgacaatgcagatcttcgtgaagactctgactggtaagaccatcaccctcg

SEQ ID NO: 738576 - DNA, 90 bp, Homo sapiens
gagccccgcccggcccgggccatgtcggtgggcgagctctacagccaggcagaactggggctcccttgcatcttccagttacaaattcag

SEQ ID NO: 738577 - DNA, 90 bp, Homo sapiens
cacacgcagatgaacactggacttcagaaattgtcattggcacccccttctatgtgatggagtactgcccaggtctcatctacaaagacc

SEQ ID NO: 738578 - DNA, 51 bp, Homo sapiens
taaacaactacctgctgaaattggaggagatgttaaagtaacccatcttgc

SEQ ID NO: 738579 - DNA, 100 bp, Homo sapiens
gccagcagattcagtgtcatgtgaggacgtgcttcctgcttcatagataagaggtaccagatcatcagtcaattaagttaagtaatctaggtgagaataa

SEQ ID NO: 738580 - DNA, 100 bp, Homo sapiens
gtcaacaacggatgaaaatgaagacgacattcagtttgtcagtgacttggatgttgtgggtgatggtatgcagtgtcctccttcacctttgctttttgat

SEQ ID NO: 738581 - DNA, 73 bp, Homo sapiens
gaagacccagtacagctggacgtttgccgtccactctgaggtgaacagtggtatagcagccactccagcctct

SEQ ID NO: 738582 - DNA, 88 bp, Homo sapiens
aaggatggaatacgccatgaagtcccttagccttctctaccccaagtccctctccaggtcttcaacggggcctcttccacctcctggt

SEQ ID NO: 738583 - DNA, 100 bp, Homo sapiens
gccttttcaagtaaaaggtgcttggaatggttctatgaatatgcagatttggactgagcaacaaatttgaatctgaattcccttcttcattaactggaaa

SEQ ID NO: 738584 - DNA, 100 bp, Homo sapiens
cggacagtatgaggcaagcgcagggggacggggaccagcagctgtcgccgccgctctcagggaactctaatgatccaggacaaagaagttaccctggagt

SEQ ID NO: 738585 - DNA, 101 bp, Homo sapiens
acaccctgtcctatgtggacgttggcactgggaaggtatcgagtgaacttcagacctagatatgtcactaggtataagacagtgacacagttggaatggag

SEQ ID NO: 738586 - DNA, 122 bp, Homo sapiens
ctcggcagctgatgtctcttgttgcaggacttaggaatggagctcttttactcacaggaggaaagttgatattatggattcccataaggattcatgtcttctattcactttaatgaacagtt

SEQ ID NO: 738587 - DNA, 50 bp, Homo sapiens
gttcgctacacagcaatgcatcgagattactacaagggaagacataaatt

SEQ ID NO: 738588 - DNA, 100 bp, Homo sapiens
aagtaatcgttctgagattgaaacccagacagaggggagcacagagaaagagaatgatgaagagaaaggcccggagactcccctgcccttgatggatcag

SEQ ID NO: 738589 - DNA, 75 bp, Homo sapiens
atggttcccagcctcatttagtgaacatccaattcaggttgcttagccagacaatgaaggatcatctagtaagag

SEQ ID NO: 738590 - DNA, 90 bp, Homo sapiens
tgcagagatggcattacgaacctttggccacttgacagagaaagagctggacccagatgggctgaagaaggagtcagagcgggatcgggc

SEQ ID NO: 738591 - DNA, 75 bp, Homo sapiens
aaaaacacaaatgaattctataagaccattccccggttttattataggttaatggccagccaagaccccttgaat

SEQ ID NO: 738592 - DNA, 80 bp, Homo sapiens
cgagaggagctgagcgagcgcggaaggtgtctgacttccagcaactgctggcctgtgccagggtgcaagctgagcactgg

SEQ ID NO: 738593 - DNA, 82 bp, Homo sapiens
acctgcccggtgcccgaggaggcagccaagctcgtggcctgcctctgcgtgcgattttttatcaagcagaaatgcatcgaac

SEQ ID NO: 738594 - DNA, 100 bp, Homo sapiens
cggcacccacgcggcatcacgggatcgaaccccgctcccagcggccgcgattcggggaggtaggcgctgggccgaggagagtctcgctctgtggcccagg

SEQ ID NO: 738595 - DNA, 74 bp, Homo sapiens
aggggatggtatgaatgcatatgtagcctacaaagttacaacacaggatttaccgaggagcattatggatcctg

SEQ ID NO: 738596 - DNA, 100 bp, Homo sapiens
attttcgatctcgagaaggcgtgtgtctgtgtcttattgaaaccttaaacatatatcgcaggcaccagtgacaagtgggaaaagctggagaaggacattc

SEQ ID NO: 738597 - DNA, 104 bp, Homo sapiens
gattcgcagtggtcgcttcttctccttggtgtccctggccagtgtccttccacctgtccacaagcatggggaacatcttcgccaacctcttcaagggccttttt

SEQ ID NO: 738598 - DNA, 97 bp, Homo sapiens
cagaaggcccggaagaaagaggagcggcagagcctgctggatgtaggtgcaaaaaactacagacatctctgtgctgtttattacaacaagaatcctg

SEQ ID NO: 738599 - DNA, 100 bp, Homo sapiens
ctccaaaatggccacttacctgactggggaactgacggctcctgggcaacgtgctggtctgtgtgctggcccatcactttggcaaagaattcaccccacc

SEQ ID NO: 738600 - DNA, 83 bp, Homo sapiens
gccagggtgacgatcctcaagttcccaagtagaggagaggaagcggcagagggaggaggccactgtctgcagctcccgtgaag

SEQ ID NO: 738601 - DNA, 90 bp, Homo sapiens
ctgggagaagatggctttaaagaatacacttcaaatcagtgtactgttacccggacatacctattccttcacaagttctggttcttcagt

SEQ ID NO: 738602 - DNA, 50 bp, Homo sapiens
ggctcacctgtgcgggatggaacaaaagaaagctgacttcatgagaccga

SEQ ID NO: 738603 - DNA, 88 bp, Homo sapiens
atcccgtcccggcattccagagtgatggcacaggtgctgctagctgaggaggggatagctcctctttcttctgcaggaccagggaaag

SEQ ID NO: 738604 - DNA, 101 bp, Homo sapiens
accttgtgggatgtgaaaactctgttactgaagggactgttgacatttagggatgtggccatagaattctctctggaggagtggcaacacctggacattgc

SEQ ID NO: 738605 - DNA, 98 bp, Homo sapiens
aacatcaaagaggtctagcaaagtgtttgctttcacaaccaaagttctgggccattcagacatcagccttgatcctccggacaaaacttgagaaagga

SEQ ID NO: 738606 - DNA, 100 bp, Homo sapiens
cgagacccatgtcagccccactggatgccgttgtcctttgtggagggtcttctcgaatcccaaagctacagcaactgattaaagatcttttcccagctgt

SEQ ID NO: 738607 - DNA, 83 bp, Homo sapiens
ctcggcgcactcgctttccagcacctcaacacggactcggacacgatttgggatgatgaaattgttgcagacttttacgtagc

SEQ ID NO: 738608 - DNA, 50 bp, Homo sapiens
cgaaaatataattacgttgctatgagtatgaagagtgtaaagacctcata

SEQ ID NO: 738609 - DNA, 51 bp, Homo sapiens
cagcaaccagctagctactcgagagctcttgaatgtcgtctctcaactagc

SEQ ID NO: 738610 - DNA, 75 bp, Homo sapiens
cttgcaagcctggctatgcttcagccttgatgacggccatcttcccccggtccggcccggagcggccatgtccca

SEQ ID NO: 738611 - DNA, 83 bp, Homo sapiens
aacgaggagtggcgcccattaagcgtcaagctagagccggtgcaggccacgcagaacaagacagggaagtatgtgccgccgag

SEQ ID NO: 738612 - DNA, 90 bp, Homo sapiens
cctaatgcaactactttagaagaaacgacaccattgtttttaggcagtaccaagaagcaagagagacctatcttgatctggatagtaaag

SEQ ID NO: 738613 - DNA, 100 bp, Homo sapiens
aataggacagaacctattactaaagacttggatttccaactccaggaccctttccttctctacagaaatgccagatttggggcctcggtggatccagcag

SEQ ID NO: 738614 - DNA, 113 bp, Homo sapiens
gccgagccgggatctcaggtcctcgggggcggcggccacgccaaggacggtctgaacaacccagtcctgccagctccagctccagctccagctccagcttcacaccatcccag

SEQ ID NO: 738615 - DNA, 87 bp, Homo sapiens
ggaaaaagcttagccttactttgttctgctttagcatggcaacaatctcttagtgatgctccacgccctactagtcatgcccgtcct

SEQ ID NO: 738616 - DNA, 90 bp, Homo sapiens
ggtcagcttagtgcgttctacctttttgcctgtgtttggggcacattcattctcatctctgtgctggaaacatgcatgaagagctgcggc

SEQ ID NO: 738617 - DNA, 100 bp, Homo sapiens
tctgatcgccgggaacccttgccgctgctgtcctgcgaccccaagcagctgagctgactgctgcccactttggaggaggcggtgggctccttcacaagaa

SEQ ID NO: 738618 - DNA, 96 bp, Homo sapiens
ataacccaaatgtccttcccgttcagtgcactggcaagcgagatgaagatgctgagaatctcggcaacttcgtcatgttccccgccaacggcaaca

SEQ ID NO: 738619 - DNA, 88 bp, Homo sapiens
atgctgaccgctcaagagattctacatcagtttggtttcactcagaccgaagagtcaagtaccattggccaggatcaaacgcttatgg

SEQ ID NO: 738620 - DNA, 91 bp, Homo sapiens
ggcagtctgttgaggcatctggacaccacacacatcatcagtctgaataaaggttctcttcagtttgaagacaaatgggattttatgcgcc

SEQ ID NO: 738621 - DNA, 82 bp, Homo sapiens
gccgttgatcttcggccccacacgccttatgccagcctggaccatcttggaggcagtgtaggatcatggaagaactttgaat

SEQ ID NO: 738622 - DNA, 100 bp, Homo sapiens
tcagggccccagcaagcctccagcagtggcaagtgaaccggagcaaacgacttccgatccagtctgcgctgttgcggctcccgtttgggatttgatttgc

SEQ ID NO: 738623 - DNA, 83 bp, Homo sapiens
ccgagtggtctaaggcgccagactcaagtgaatttgctggacacgtcgaccatccacggggactggggctggctcacgtatcc

SEQ ID NO: 738624 - DNA, 100 bp, Homo sapiens
gtgtggggttggtgtgattagcttcgcagtctggaaagctttaggagttcacagttctattatcctcccagtccacaacgctgaaccgtggctggacgaa

SEQ ID NO: 738625 - DNA, 100 bp, Homo sapiens
cggcctttggtcgcctccgtgggcctcaatgacatacaacagctgtgccagactctgcttaaaccaagaaacagtatgtttagcaagcactgctatgaag

SEQ ID NO: 738626 - DNA, 75 bp, Homo sapiens
ggaattcaattaagtgcagttcaagctgctaggtccaggtcaagacctcgtctccgttctcatagtcgtagcagt

SEQ ID NO: 738627 - DNA, 75 bp, Homo sapiens
cggcgaggggcgaacgacccgacgcaagatggcgagtaaagagagcctgggcagtttttaaagggaagtttaaag

SEQ ID NO: 738628 - DNA, 75 bp, Homo sapiens
ctgcccatgctgggccggcgccctggggccccggagagcccatcatgttcagaggtgaggtccgtctgaatgtcg

SEQ ID NO: 738629 - DNA, 98 bp, Homo sapiens
gtttagaggactaggccccaatttagtgggggtagccccttccaggttctttatagagttggaagcaagacatcagaataatatcttcatagatgaca

SEQ ID NO: 738630 - DNA, 90 bp, Homo sapiens
aggcgacgggatggctaccttttccaattgctgcggattgctgatgcccacttggacagagtgcttatgtccctgatgccaaaaatgcac

SEQ ID NO: 738631 - DNA, 100 bp, Homo sapiens
cccctcgtgctcggcttcctgcgcgataaccaactctcagaggtggccaataagttcgccaaagcgacaggagctggtgccatgactcccggaatcccta

SEQ ID NO: 738632 - DNA, 50 bp, Homo sapiens
gcctgttggagaaacacaaagaggcatgacagcaagcgctgtggcggctt

SEQ ID NO: 738633 - DNA, 82 bp, Homo sapiens
caatggtcacagccaccaacagtatggaagagactctgatgcaaatagcgtgaaataactaagaagttgggcaaccccaaac

SEQ ID NO: 738634 - DNA, 100 bp, Homo sapiens
cttcaacaagagcaagtgtcagaactgcttcaagccccgcgagtcgcatctgctcaacgacgaggacctgacgcagatggatgatgatgacgacgacgat

SEQ ID NO: 738635 - DNA, 85 bp, Homo sapiens
gaggaacactctctgaggaagcccaactcctatgagctcctctctggcagggtcggtgtacccgagagaactgcaagtaccttca

SEQ ID NO: 738636 - DNA, 74 bp, Homo sapiens
gaagatagcttgaacagggctgacaacatttttccttttccggaattgaaagatgttggccatcgtgatcagat

SEQ ID NO: 738637 - DNA, 100 bp, Homo sapiens
catgagccggaggccattgagctgtgcacgaccacaccgctgatgaagacaaggactcacagtggctgcaagctgtttgcagacaaggtcccaaagacag

SEQ ID NO: 738638 - DNA, 90 bp, Homo sapiens
gctgcgggaaatcgggctgaagcgactgagtccgcgatggagctccagcggcgccatgagcaaatgaaaaagaatttggaagcacagcac

SEQ ID NO: 738639 - DNA, 100 bp, Homo sapiens
cgggagctcgccaaccagcttgaggccactggcgtcacctgctatgcagcccacccagactgatgcagagaaagttctcagagcccaacacttacatcga

SEQ ID NO: 738640 - DNA, 82 bp, Homo sapiens
tggcgggtcccgcgggccaggccgtggagggcacaggagctgcaagttttgacgaatttggcaattctaagtaccagaatcg

SEQ ID NO: 738641 - DNA, 87 bp, Homo sapiens
accgtagcccttccggaaacctccatgtgaggtcctttggcactgaagaccgtcccacagataggcctgcgccccccagagaggaga

SEQ ID NO: 738642 - DNA, 100 bp, Homo sapiens
tgatgtggatgatgccaaagttttattaggtcctgggaactccaacaagggagcaaatcagagaaatgaacccaaactacacagaatttaaattccctca

SEQ ID NO: 738643 - DNA, 75 bp, Homo sapiens
ctgcttcacctccgcgctggcggtctccgccgcagtctcagctgcagctgcaggactgagccgtgcacccggagg

SEQ ID NO: 738644 - DNA, 89 bp, Homo sapiens
tgctgaccgaggcccccctgaaccccaaggccaaccgcgagaagatgacccaggggaatgtgaccctgaaggagctgaatgctcgcccc

SEQ ID NO: 738645 - DNA, 100 bp, Homo sapiens
cctcgggtccccgcaccacctcctgctgccttcccgtcgccgctcccgaagcttttccaggtgagcgagtgctgtgctttcatgggcctcttctttatga

SEQ ID NO: 738646 - DNA, 75 bp, Homo sapiens
tcaaagatggaatcacaaacggcgcacattggtatgatgtggaaggaatcgacaaggagaacgttgaactctccc

SEQ ID NO: 738647 - DNA, 59 bp, Homo sapiens
ggacttcccgtccgcggcgtggagggttatcaatactctggctgaccatcatcatcgtg

SEQ ID NO: 738648 - DNA, 51 bp, Homo sapiens
tttgtctgactacaatattcaaaagaaacagaaaccacactgccgaggaat

SEQ ID NO: 738649 - DNA, 82 bp, Homo sapiens
gcaccaggagacgcaactcatcggacaatgcagatcttcgtgaagactctgactggtaagaccatcaccctcgaggttgagc

SEQ ID NO: 738650 - DNA, 74 bp, Homo sapiens
gctgtgctcgcgctactctctctttctggcctggaggctatccagcgctgagaagaaagccaaggtcattgcag

SEQ ID NO: 738651 - DNA, 98 bp, Homo sapiens
ataacttaaaagcagcgtgcctggttacagctgtttccacgtgcggtgctcgtcgggagtgatcacctaccctacagtctgcgggccaggcatcgaca

SEQ ID NO: 738652 - DNA, 98 bp, Homo sapiens
gagccttccatcacctttgcaaagagaggcgcattctacattctaaaggggagctcagtgaagatagacataaacagtatgaggaatttgctatgtct

SEQ ID NO: 738653 - DNA, 74 bp, Homo sapiens
tgggaaatacagcaatgacctctacgaactccaggtcctgctcaatctggaattttgtcagatcgtgaagtggt

SEQ ID NO: 738654 - DNA, 83 bp, Homo sapiens
ggtgggggccacaccatttgccgtggccaggctagagatgccatggacaatattaccaggcagaaccaattctacgataccca

SEQ ID NO: 738655 - DNA, 50 bp, Homo sapiens
cacaaggtgaagactgtctgcagcaaggtggtcattgggactcccacact

SEQ ID NO: 738656 - DNA, 97 bp, Homo sapiens
gcgccctcctcgccctccccaccgacatcatgctccagttcctgccttgaaaagatcttttgaggtcgaggaggtcgagacacccaactccacccca

SEQ ID NO: 738657 - DNA, 83 bp, Homo sapiens
tgttaaggattccaacaacaattccgatggcaaagccgttgccaagaccccaagactgcttctgagacagaaacagatatctg

SEQ ID NO: 738658 - DNA, 100 bp, Homo sapiens
ggccaacggggccctcaaagtctccgtctggagtaaggtgctgcggagcgacgcggcctgggaggataaggtattgttgcagcatctggcagtgagactg

SEQ ID NO: 738659 - DNA, 90 bp, Homo sapiens
ctcctgtgatggcagtcgttcggctccttgctgaaataaggacaagaccatgctcgacagctgaccaaggccatgatgcgaaaggccacg

SEQ ID NO: 738660 - DNA, 152 bp, Homo sapiens
cagcagccgcaagacattgtttctctccctctgcccccccttccccacgcaaccccagatccatttacactttacagtttatcatttaaaagtgcctgtgtgaagtcacttttgctggaaaactgcagcttgggagctttctttgtattcac

SEQ ID NO: 738661 - DNA, 50 bp, Homo sapiens
ctctactggacaaacatttcctccaagttcgatcctttggtacagaagac

SEQ ID NO: 738662 - DNA, 100 bp, Homo sapiens
atcatccctgccctggatcggcctggagccagtgcccaagctggtctccaggaggtaaggcccgccctgcaggcaacaccggtgcttgggctcctgctga

SEQ ID NO: 738663 - DNA, 99 bp, Homo sapiens
gaaagagcctccgtcaccacatacacatcccgctctgggctttaaacgtgacccctcgcctcgactcgccctgccctgtgaaaatgttggtgcttcttg

SEQ ID NO: 738664 - DNA, 100 bp, Homo sapiens
aattggatgaaagataaagcccttaaggacaaggtgtccagcacatcttcactggaagccagcttcctcacccccgcagttggctttgctgatcccccac

SEQ ID NO: 738665 - DNA, 50 bp, Homo sapiens
cagagcaccaggcccaccgtgaaagaagaatcctgcaaaaatgtctctct

SEQ ID NO: 738666 - DNA, 89 bp, Homo sapiens
gacccagggcccgcgggccaggagagcgctcggcggacccaacatgagtgaagtttcctgcaagaaacgggacgactatttggaatggc

SEQ ID NO: 738667 - DNA, 90 bp, Homo sapiens
acatcctggaagctgggaaatggaaggattacggccaggagatacaaccagcactttctgtggtactcctaattacattgctcctgaaat

SEQ ID NO: 738668 - DNA, 100 bp, Homo sapiens
ggctgacctcgctgtacgccgagcacccaggcgactgcctcatcttcaagaaacttcagtgctctcaagaaggaaaatatttatgaaaacaataaactgg

SEQ ID NO: 738669 - DNA, 98 bp, Homo sapiens
agctctacaaggacggaggcgttgcgattattgaccagtggatctgcgcacacgccaggggggctttctctgtggtccgacgctgtgtcaagctctgc

SEQ ID NO: 738670 - DNA, 75 bp, Homo sapiens
cacaaccgagcaaattgaagagacgttaaaatacttcctacctggagtagaacagaaaaattattatgtctgtgt

SEQ ID NO: 738671 - DNA, 75 bp, Homo sapiens
aaattatcaacaccaaaaagctttctgctagggaagattctagtgttccagaaactccagataatgaaagaaaag

SEQ ID NO: 738672 - DNA, 100 bp, Homo sapiens
ttacgttttggaacctcgtctttttattgacggtgtcttgtgtgaaagctgtggcagaggtaaaacttcgagatgatcaatatacactggaacacatgca

SEQ ID NO: 738673 - DNA, 100 bp, Homo sapiens
gtccctttgcctcatcccaggttgccttggaaaatgccaacgccgtgtctgaaggattgttagcaaagaaagctgtggatgctggcctgaacgtgatgcc

SEQ ID NO: 738674 - DNA, 100 bp, Homo sapiens
cctggaccttctggattacaggccaaattagcaacactttcagaccatgctgaagtctaaattgaatgtcttaacactgaaaaaggaacctctcccagcg

SEQ ID NO: 738675 - DNA, 98 bp, Homo sapiens
tcggaggggagggggcgttagccccgcgcagccgccggcgtcgccgccatggacctagaagatggcagtgaacgtatactcaacgtcagtgaccagtg

SEQ ID NO: 738676 - DNA, 82 bp, Homo sapiens
ctgggccgccgaatctccggccgaagagcggcggcggcagcggcgggctccacgctggccaggaggatgaaaggccccagct

SEQ ID NO: 738677 - DNA, 75 bp, Homo sapiens
ccaaggtcaattgaagtagaaaatgactttctgccggtagaaaagggacagcaaaacctggcgtttccacggtac

SEQ ID NO: 738678 - DNA, 98 bp, Homo sapiens
ggcggagtgtaggaagaggcactgctgagggggcgcgaggggaacggaggccagagctgcgagcagtaaacagtcctcagcgaagccgcctttttgcc

SEQ ID NO: 738679 - DNA, 93 bp, Homo sapiens
ctgggaggtcgcaacattccaatcacaggccctctccggaccagaagtccattggaatattaagcccaggagttgctttggggatggctggaa

SEQ ID NO: 738680 - DNA, 83 bp, Homo sapiens
cagctgtgaaaaactctttggatgattctgccaaaaagatttggtgcttccagatgtgagttatcaggtggaatccagtgagg

SEQ ID NO: 738681 - DNA, 75 bp, Homo sapiens
ttctctcccaggccacaagacatttcctgctcggaaccttgtttactaatttgaaagccctgtgtaaggaatgtg

SEQ ID NO: 738682 - DNA, 75 bp, Homo sapiens
ggttccaggtgcccaccgcgcactcggagatgcagccgctgttttctggatatgccgcagaaggatccgtgccag

SEQ ID NO: 738683 - DNA, 100 bp, Homo sapiens
ttcctgctgctgagctacccgagcggcggcggcggcagcagcggcagcggcaagcaccatgtgctacacaaaagatggagcatagtatcttcaccagaaa

SEQ ID NO: 738684 - DNA, 82 bp, Homo sapiens
tttgtcagattatcaggatgaggtggtattcatgggtagtttgaaatatccagatgagaatggatttgatgccttcctgaag

SEQ ID NO: 738685 - DNA, 75 bp, Homo sapiens
gcggatcccacacctccggaccgagggacgcggactttgagagttttgacctgcctgaagagcaccagattgcgc

SEQ ID NO: 738686 - DNA, 74 bp, Homo sapiens
agcagtaattacaacatgtattgtgctgtatatgaatggttccaggagagactcaaggtgacagttactttact

SEQ ID NO: 738687 - DNA, 75 bp, Homo sapiens
caagtgaagtgtgctgatgaagtcctctataaggtcttctttgtgatccgcctcattgctggccctgctgccaac

SEQ ID NO: 738688 - DNA, 82 bp, Homo sapiens
agccaggaagagccgccgtccgcaccgggaccggagaggaagcggaggattttttatcaagcagaaatgcatcgaacaacga

SEQ ID NO: 738689 - DNA, 90 bp, Homo sapiens
gcctttcagtctgatcaagcagcaagtgaaattgaggtcacatcttcagtacttcatgcaagcatagaatgtcaagctaaccaggcgtcc

SEQ ID NO: 738690 - DNA, 101 bp, Homo sapiens
ccgcccagtccccagttccgcgcttgctcggcagtcacgttccggctgggctgggatcagatgggaagcggaagctcatcatgaccagaaactgtttccct

SEQ ID NO: 738691 - DNA, 82 bp, Homo sapiens
gtcagaaataagccgttttttgacatctgtacttcaagaaaggttgtaaagaagaaagttctaccctttctgtcaaaatgaa

SEQ ID NO: 738692 - DNA, 100 bp, Homo sapiens
attttgcaagccgaatctggactgtggatgattatcgattacgggttgctacgatttctgcaaacggagacaaagaaattggcaatatcatctctgatgc

SEQ ID NO: 738693 - DNA, 80 bp, Homo sapiens
gacagattcgcagtggtcgcttcttctccttggctgggagtcctccgtcagcatcagctccggctccggtgtcctccttc

SEQ ID NO: 738694 - DNA, 87 bp, Homo sapiens
ggtgcgggcctgctgctccctcggaggtgagcaggggcaacctgttcacatgggcgacccaggccataaaattttgagtagaaaaat

SEQ ID NO: 738695 - DNA, 100 bp, Homo sapiens
ttcccagccttcagaaattgccggtctgggagttgggggcaaggagaagatcctggtggctttctttcagatgcaggctggtacagtgatgctgagaaag

SEQ ID NO: 738696 - DNA, 75 bp, Homo sapiens
tcagctccagctccgctctcttcggctgccccaatccccggcagctctctcaggagcatattaatgaaaagtgcc

SEQ ID NO: 738697 - DNA, 75 bp, Homo sapiens
cctcccacctcagccttccgagtagctagaactacaggtttgctggttggctcccgagcagacagcaggaaagaa

SEQ ID NO: 738698 - DNA, 75 bp, Homo sapiens
ctggaaggaaccgctctcgcttcgtcctacacttgcgcaaatgtctccgagttttgcggcctccaggtggtggat

SEQ ID NO: 738699 - DNA, 101 bp, Homo sapiens
tgatgacaaaccctttctatgtactgcgcctggatgtggccaggtaaggtactcaactgtgtggggtactacataaatcctgaaagactacaataaagtgg

SEQ ID NO: 738700 - DNA, 48 bp, Homo sapiens
ggacatgaagactaccacatgatgacttccttgccgtccaggaaggga

SEQ ID NO: 738701 - DNA, 90 bp, Homo sapiens
gccgggtggaccctgaggtccttcacagcctgcaggaattgaaagatgttggccatcgtgatcagatggctgcagctagaggaatcctgc

SEQ ID NO: 738702 - DNA, 96 bp, Homo sapiens
gctgaaaccacagacatgactgagtcctccatgaagagatccgggagacagtggaccctggagagaggacccagggctggtctagggatgcagcct

SEQ ID NO: 738703 - DNA, 100 bp, Homo sapiens
gaaaacggctgcatattggtgtcaaagtgtcactgaactaaaggctgactttccagacaacaaatatggctacacacacctttctgcaggagagctgctt

SEQ ID NO: 738704 - DNA, 83 bp, Homo sapiens
cggaaacgccgaggaacccggctgaggcggcaggaagaagaaattgtcgagacgaataacatgaggtcatatagaatcccact

SEQ ID NO: 738705 - DNA, 96 bp, Homo sapiens
ttgaagggctgggtaatgttgcatctgtggagctaaaaatgtctacacaaggaagtacaggatttggcttttctagatgtcgtatccaaacttcgc

SEQ ID NO: 738706 - DNA, 99 bp, Homo sapiens
tttgctcatttctatggctgtctgcataattgctatgatcatcttctccagctgcttttgttacaacctgaaccccctgcacgcccagccgcagccgca

SEQ ID NO: 738707 - DNA, 76 bp, Homo sapiens
ccgctcactcgcggatcccgaccgcccatctccgcctcgcttccagcccaggagtttcagggttttcattcagatg

SEQ ID NO: 738708 - DNA, 100 bp, Homo sapiens
gtagccactgctttagcatttatcacttccttccttactttgtcttggtatactacatggcaaaatgggaaaggatttggagaaaagtggtatatcaagg

SEQ ID NO: 738709 - DNA, 88 bp, Homo sapiens
cacgggcaaggcggagagtgacggagtcggcgagcccccgcggcgacagatgtcatctgggtgattctcagtgtggaggtgggtggac

SEQ ID NO: 738710 - DNA, 82 bp, Homo sapiens
ctttggagaacttctggagctggccaacgtgcaggaggatggtccagcagtttggggtggattttgagaagaggatcgaggg

SEQ ID NO: 738711 - DNA, 100 bp, Homo sapiens
tgatattcccatggattcaaagaagaaagcactgacttggccaggtcaaggtgtatattatgatgctcatgagaggctagaagattccaaactagaagct

SEQ ID NO: 738712 - DNA, 98 bp, Homo sapiens
tcggggtcttccccagttttctcagccaggcggcggcggcgactggcaatgtttggcctcaaaagaaacgcggggagctgaatatgtatctgcaagag

SEQ ID NO: 738713 - DNA, 100 bp, Homo sapiens
ctgaaaagtcgcagcgagctggagccgccggaggtcctgggaactccaacaagggagcaaatcagagaaatgaacccaaactacacagaatttaaattcc

SEQ ID NO: 738714 - DNA, 100 bp, Homo sapiens
tgcagtgggctacaggactggggacttccagctacacactaatgtcggtctgtatggacccaggcttgtcaaactgtactatacacatcgtgacagtcac

SEQ ID NO: 738715 - DNA, 100 bp, Homo sapiens
gtgttcaggcaggaaaacgtggatgattactacgacaccggcgaggaacttggcagttcaactttgtggggaaacttttgggtccacgtggcaattctct

SEQ ID NO: 738716 - DNA, 82 bp, Homo sapiens
cccgaagccccctgcaggaactctacaacccaatccagaacccagtgacttgattgtaaaaatttacagagcggaatcatat

SEQ ID NO: 738717 - DNA, 98 bp, Homo sapiens
tgacaactccaatgttgactgtgttccatgtacccctggaggagagaaaatacaaggatatgaaccagtttggagaaggtgaacaagcaaaaatctgc

SEQ ID NO: 738718 - DNA, 96 bp, Homo sapiens
agaagttgattgaccactaccttgggcacaacagcgaggaccctgctctagaaggaacgtacgccaggtccttcaactattctatgggaacccggg

SEQ ID NO: 738719 - DNA, 75 bp, Homo sapiens
gttcttggaagactaagaagtccaacattcggctgtgtggttccgggtgctggtgctgtggaagtggcaatggca

SEQ ID NO: 738720 - DNA, 101 bp, Homo sapiens
tacatcaccgctctgcaggctgttcctcctcgggtattgttgcagcatctggcagtgagactgaggatgaggacagcatggacattcccttggacctttct

SEQ ID NO: 738721 - DNA, 75 bp, Homo sapiens
actcactgtcccacagggagctcaaagagtgggccaggagatcatgaatcagacagataaaaatcaacaagaaat

SEQ ID NO: 738722 - DNA, 50 bp, Homo sapiens
cggaggcacccgaatgctgcccgggtgagtttcccgtcaccaattttcct

SEQ ID NO: 738723 - DNA, 100 bp, Homo sapiens
atcaaaacaccagagcgactttcattagaaggagagcgacagcccaagtcaccaggtctggagcccccaactcccttgacagtgtacgctggagcaggtt

SEQ ID NO: 738724 - DNA, 50 bp, Homo sapiens
ctacaaagcatttagtacaagatggaacctctaaagagagcaatcactac

SEQ ID NO: 738725 - DNA, 88 bp, Homo sapiens
gaggcggaggtcgataagctggaactgatgacatacaacagctgtgccagactctgcttaaaccaagaaacagtatgtttagcaagca

SEQ ID NO: 738726 - DNA, 83 bp, Homo sapiens
aaaccttcaaggcaaactgtgttcattgagaccctgattgaagagagagtacaagccagctgccatgttgtgagcacatacca

SEQ ID NO: 738727 - DNA, 83 bp, Homo sapiens
gcctattggaggaaaacacaccaagggggatcagtttgtgttttatgaagactggggagaaaacatggtttccaaaagcatcc

SEQ ID NO: 738728 - DNA, 75 bp, Homo sapiens
tggctggcggagcatgagcgccccaggtctcccacacaggtgaataattcgataaaacccctaagagaacgcatc

SEQ ID NO: 738729 - DNA, 87 bp, Homo sapiens
attctccgtccctttccagggagggaacaaagcccacaagcaccgttcccatttggccggcgcttgccttgtgacatctactggcat

SEQ ID NO: 738730 - DNA, 101 bp, Homo sapiens
cgcccgaaaacccggagtgccccgcacaggtcacttcatcctggcccaggtactgcagctccaaatcgtggggattctgtaagagcttgctacctgttgac

SEQ ID NO: 738731 - DNA, 87 bp, Homo sapiens
tcaaccttgtgggatgtgaaaactctgttactgaaggttaacacagaaatctgcctcctgggccatgccgcttctaaggcctgtttc

SEQ ID NO: 738732 - DNA, 50 bp, Homo sapiens
ataacaccctgtaacagctgagttaatgttgaagaaggaaaatgcggaag

SEQ ID NO: 738733 - DNA, 100 bp, Homo sapiens
gtagtatgacttccttcagtggaccactctgcaatgaccggaagtcgagataacatgagtattgtactagtttgcttttcaaatgctcccaaggtctcag

SEQ ID NO: 738734 - DNA, 100 bp, Homo sapiens
cggacgcgtccggctgtggaagagagcggcggccgctcacaacatgcacagcctggcgacggctgcggctcttgcagccaatgccggaacaggatttgct

SEQ ID NO: 738735 - DNA, 100 bp, Homo sapiens
catggaatgaaggttgtccttatcagcagatcaaaggataaacttgaccaggtttccagtgaaataaaacccatctcggcttttgcaggtgagaatttta

SEQ ID NO: 738736 - DNA, 74 bp, Homo sapiens
tcggaaggcggctaagtcccggcagcgggaacacagagagcgaagccaggaacagcgacatctcactcatgaaa

SEQ ID NO: 738737 - DNA, 75 bp, Homo sapiens
cagaaaccgctgcctgtgagccgctgggctcagatccacctggtgaagattacaggctgtgccagccctggaaaa

SEQ ID NO: 738738 - DNA, 90 bp, Homo sapiens
cacacctccattggatttaaaagacagtcctcgtcagcactgactttcagctatggaatcggtacctggtgacctttagccccctgatgg

SEQ ID NO: 738739 - DNA, 88 bp, Homo sapiens
tacagaaacctggtcttcttggccttggggaagcccacagcaggcaccactgatgcaggagaggctgcgaagatcttggctgaaaaga

SEQ ID NO: 738740 - DNA, 92 bp, Homo sapiens
cgctgctgctgaggagaggagcgtcaacagcagcaccatgggaggaaggattgaagttaacattccagaagcacaagttgatggcgaatgga

SEQ ID NO: 738741 - DNA, 100 bp, Homo sapiens
cgcgaggccgcgggcgcgcgggcgcgactcggcggcggcgtctttttaaaacgatgtttgcagaaatggaaatcattggtcagtttaacctgggatttat

SEQ ID NO: 738742 - DNA, 100 bp, Homo sapiens
gtcacagtggagaaggaactgtacacttgggtgcatttgccatctatcaatcgctgccttattttgaatcatttggcacttattccaccaagctgccctt

SEQ ID NO: 738743 - DNA, 76 bp, Homo sapiens
tctctttctggcctggaggctatccagcatgctcagccagcattgggcagcccccgcttcctgctcccctaccccc

SEQ ID NO: 738744 - DNA, 50 bp, Homo sapiens
accaccttcatctccaccatcggtcacaaggcacttaaagcattgttgag

SEQ ID NO: 738745 - DNA, 50 bp, Homo sapiens
ctaaaacatctagtgaagaggagggtctctgggggtacagtcagagagct

SEQ ID NO: 738746 - DNA, 89 bp, Homo sapiens
gcagaggtagggtgggagcagggacctcgcacaggcagagccttgaaaagatcttttgaggtcgaggaggtcgagacacccaactccac

SEQ ID NO: 738747 - DNA, 74 bp, Homo sapiens
aaagattgaaaatatcagccatctaacagagctgcaagagttctgggtggtggtgaagtttattaagaaggaga

SEQ ID NO: 738748 - DNA, 82 bp, Homo sapiens
attcgcctctttttggagctgcccagttgcctgtcttttgtgaatgcaaagggccgctgtcccgaggttcatccagcagaaa

SEQ ID NO: 738749 - DNA, 96 bp, Homo sapiens
agaaagcttacctttggtagtttagcaggtaaagctttccagtttgaatttagatgatcacgcaaagaagaaattaattaaacttgtaggagagcg

SEQ ID NO: 738750 - DNA, 100 bp, Homo sapiens
gctgcccaccctttgatgaacacaagtgtctggctgagggagtcatcaacaactatctggatgccaatgagcctgtgtccttggaggcccgtcttagccg

SEQ ID NO: 738751 - DNA, 75 bp, Homo sapiens
tacttgaagatagccatcagccgctacgtgactcttttctccagcagcctcccgcgacgatgcccctcaacgtta

SEQ ID NO: 738752 - DNA, 100 bp, Homo sapiens
cagctgctaaagtggcatcctgggattttgttgaagccacacaaagaacaaattgcagttgtttgaggtttgcccaaaggaccagccaaaacctcacctc

SEQ ID NO: 738753 - DNA, 75 bp, Homo sapiens
ctcggacaagtacttcgacgaacactacgagtaccggaaccacgtgaatgttgagggggcgacacacaagcaggt

SEQ ID NO: 738754 - DNA, 90 bp, Homo sapiens
tgacattaggatttcagcttcactggctgagctcaaggagtttatttccaaagttgaagaagtcttgaatgactggaaactgattggaaa

SEQ ID NO: 738755 - DNA, 100 bp, Homo sapiens
cccggttccccggcccacagtgggggtgtgcaaacccgagagaactgggaagaggatcacctagcccgggtagaagaggcaatcacccgtatgcttgtgt

SEQ ID NO: 738756 - DNA, 100 bp, Homo sapiens
gtggtctggagaccatggagaccctcacggagctgggcgacgagctgaccctgggagacatcgacgccaatcctgaggcaaaagaaacattttaattcac

SEQ ID NO: 738757 - DNA, 88 bp, Homo sapiens
cctggcctcagctgggaggaatattgctgcccggctgtttggcctgtcactgctcctcatcctcctgagccgtggtgaagacctacag

SEQ ID NO: 738758 - DNA, 95 bp, Homo sapiens
ggctactctggagttgaggtgcgagttacaccaaccaggacagaaatcattatcttagccaccaggcagcctgcttctgcaaagtggtacgatcg

SEQ ID NO: 738759 - DNA, 144 bp, Homo sapiens
gcggtcgttccctcggctgtggaccgggcggcacgcacgcggtgcagggtaacatggcggatgcggaagagatggagtcttactatgttgaccagcctggtctccatctcctggcttcgggcgatcctcccatgtcagcctccc

SEQ ID NO: 738760 - DNA, 90 bp, Homo sapiens
gctccagccccagctgcgtgcccagatccctcatccacctacatcaggcaactggagagcaaagtgaggctgctggagggtgacaagctc

SEQ ID NO: 738761 - DNA, 98 bp, Homo sapiens
gcagccgcctccgaagatgggggatttctacgacccggagcacccgacccctgagagtcagtgaccttcgaggatgtggccgtctacttctctgagaa

SEQ ID NO: 738762 - DNA, 88 bp, Homo sapiens
gcgggcgcggccggagaccgtggggcccccggttgccgccccctcggggcatggcctatctgcacgcgcagcactacatccaccgaga

SEQ ID NO: 738763 - DNA, 90 bp, Homo sapiens
cgtgggggaccggctgttggcggtgactgaggatctcctctctgtgctggctgagctgcaagaggctctatggcattggcccgaggacag

SEQ ID NO: 738764 - DNA, 100 bp, Homo sapiens
gggcgaagcgggcgagcggtggtttggacgccggcggagacgcgggcgagggggatatgagactttctactcggaatatcctgagtgttgcgtggatgta

SEQ ID NO: 738765 - DNA, 100 bp, Homo sapiens
tgggaggtctggtagggctgagcttgcaagaggatcaacatgcctgggcattgacgttgtgaggaataaaattaaaatgtttgctcaacaaaaagtcact

SEQ ID NO: 738766 - DNA, 75 bp, Homo sapiens
ctaccaatggacagctctcagtccacactcccaaaagggaaaggttgcataccctgtcctgagggcgcggcacgg

SEQ ID NO: 738767 - DNA, 90 bp, Homo sapiens
aggcagaatacctttacagaggttaaaattgatgtggtgaagctgtagagaaaaacaagcgtctcatcacggcagaccagagggaatatc

SEQ ID NO: 738768 - DNA, 50 bp, Homo sapiens
gaagcagttccacaaagccagccagacagaatgttgctgcgggatgtaaa

SEQ ID NO: 738769 - DNA, 73 bp, Homo sapiens
cgactccaggggagccgtggcctcctctccgccctagcgctgagggacccgagctgatccagaaagccaacgg

SEQ ID NO: 738770 - DNA, 90 bp, Homo sapiens
gatcacgatcaagatctcgttcctacagcccaatcaccaggagactaaagtccatcaaaaacatccagaaaattaccaagtctatgaaaa

SEQ ID NO: 738771 - DNA, 83 bp, Homo sapiens
cgggaccctcgcgcgcgaccgccgaatcgctcctgcagcagagtgcctccggagccagcgtggtggccatagacaacaagatc

SEQ ID NO: 738772 - DNA, 75 bp, Homo sapiens
gctggaggcataacaatgggaaacattggtcgacaactggcaatgagtcaactactggattttctgtctggcaaa

SEQ ID NO: 738773 - DNA, 100 bp, Homo sapiens
caggagttcattctcaacagtcctactgtgacctccattaaatggtggcctggtgggcccaataatttctgaagatcagacagcagccctgatggcccat

SEQ ID NO: 738774 - DNA, 100 bp, Homo sapiens
cttctactgacgaagcttggaagttgcagaagacattcacggcatggtgtaactcccacctccggaaggcggggacacagatcgagaacatcgaagagga

SEQ ID NO: 738775 - DNA, 100 bp, Homo sapiens
cagagacctggcaaatgacatcatgacactggtgtatgtgctcaagaggccttatgtggatgagttcctgagacgcatgggggaactctttgaatgtgtt

SEQ ID NO: 738776 - DNA, 96 bp, Homo sapiens
atggatttgagaggccaaagtactttgttccccccgacaaggctgtgtgccaaccacgatgcaaacatggtgaatgtatcgggccaaacaagtgca

SEQ ID NO: 738777 - DNA, 75 bp, Homo sapiens
atcactgcagctagtaatttgccttctggatttttctgtagaaaatgtttcctgactgcaatgagggaaagcgga

SEQ ID NO: 738778 - DNA, 100 bp, Homo sapiens
aaatatggtgtggacctcatcagatacactcatgcagcaaacacagttgtttacagctctaacaaaatagacggtcctgatatccgaaggcttgggacgc

SEQ ID NO: 738779 - DNA, 102 bp, Homo sapiens
tttgcgagcaggttctcggagggaccgggatagattgggggcaggagctgctttttcaatgagaagaatgaacagacctagtgggcgttgcctttagaccca

SEQ ID NO: 738780 - DNA, 100 bp, Homo sapiens
tgtttgcaaatgcagaggaagaatttttctatgaggaatagctattcagtcagacagaaccacttatcacgttttgcagtatctcctgaggaagtcagaa

SEQ ID NO: 738781 - DNA, 100 bp, Homo sapiens
accttaaacctgaaagtggtagcaaggcaggggaaatggaaggtgatgcagtcgaagccattgtggaggagtccgaaacttttattaaaggaaaggagag

SEQ ID NO: 738782 - DNA, 96 bp, Homo sapiens
actatgtgggcacgctggagttcctggtgtcggcttcccagcagcggcttatggaccagtggcagcagcggcggtggcggcagcaagaggatcagg

SEQ ID NO: 738783 - DNA, 75 bp, Homo sapiens
cgccgcagcaacaccaggagaggccgggggcagccgccatcggcagcgccagcggggatctgacgagcttttctc

SEQ ID NO: 738784 - DNA, 78 bp, Homo sapiens
aaaagtgcattgcttattctccaccttttggtgattatgcacagggagtgttgacattcagggatgtggctgtagaat

SEQ ID NO: 738785 - DNA, 75 bp, Homo sapiens
cccgaatgcagatctggcctacaatagtctgaaggtgatagctgcaaacattgggtacgccactgtgaggccatg

SEQ ID NO: 738786 - DNA, 75 bp, Homo sapiens
ccatacaaagttgatccttttgtaattatcattaagtttctgttgggtttatgggaaaaacagatggagactatt

SEQ ID NO: 738787 - DNA, 88 bp, Homo sapiens
gaccccaactgctcctgtgccgctgaggtgaacttccaggcggacctggccgacctgacttgtgagatcgaaatcaagcagaagctga

SEQ ID NO: 738788 - DNA, 127 bp, Homo sapiens
tggagagtggcaagttgttctccgtaaccagaaacaggttcattcattgcaccaaaatcgaaagttcggaaaaaggaatgtcagaaatcttgaacatgttctgatgaaagaaccaagtgacccaaag

SEQ ID NO: 738789 - DNA, 100 bp, Homo sapiens
gtagaggcggcggacgggccggagggaggatgttaaagccccgcggacatggatttgattgacatactttggaggcaagatatagatcttggagtaagtc

SEQ ID NO: 738790 - DNA, 83 bp, Homo sapiens
gaaaacatttcttttaatttttaaacttggtttgaaagaattctgcttggtcagaatcgtgatggcattgtgttcagcactga

SEQ ID NO: 738791 - DNA, 75 bp, Homo sapiens
gaggatttggccagagcgttttgtaggagaaggcagagcccccccaggctatgaatgccctgatgcggttgaacc

SEQ ID NO: 738792 - DNA, 100 bp, Homo sapiens
gcatggaccccgaggacgaaggggtagcgggagtgatgtctgtggggccgccggcggcccggcttcagctgcctcccgaatgatcaccaacagcctgaac

SEQ ID NO: 738793 - DNA, 126 bp, Homo sapiens
ttatgctgaacattagctctcgactacaagcagcagttgaaaaactcctagaagccataagtgaaactagcagtcagggacaatcttctgaaaacaattcctaatcaccagccaggaaaacctttg

SEQ ID NO: 738794 - DNA, 74 bp, Homo sapiens
tctttatctgaaacaaacaagagtggattagaacaagatgacatgagaattttatacaaataccttaccacctc

SEQ ID NO: 738795 - DNA, 88 bp, Homo sapiens
ccctcacagtttgctctgctcttccaacaccagtggaagatgatcacatcccaggtcgcgtctccttcttcacctcggggtccgagaa

SEQ ID NO: 738796 - DNA, 50 bp, Homo sapiens
agcggccgccggctcccccacgagccatccagtccaatggatcagatggg

SEQ ID NO: 738797 - DNA, 98 bp, Homo sapiens
cattgctgaaaatgatgttggaaatgcacaagctggagcccaactgataatccttgaacatgagaaagtggctcatgccaaagaagaaaaccttagta

SEQ ID NO: 738798 - DNA, 128 bp, Homo sapiens
gcgggcgcggcactgcgggtcccgattgctgcagccgcttgtcagtgtgatgaagattggcacccaggtgagaagccctaccactgcaactgggacggctgcggctggaagtttgcgcgctcagacga

SEQ ID NO: 738799 - DNA, 89 bp, Homo sapiens
ttacgtctgcggaagtgcagctgcctcagttcttagcgcagggaatgggtactgttcaaaaaggaatgccccacaagtgttaccatggc

SEQ ID NO: 738800 - DNA, 96 bp, Homo sapiens
ctggcgtaatgcctggccgcagtgtccctctggaccccgaggttggaccctactgtgacacacctaccatgcggacactcttcaacctcctctggc

SEQ ID NO: 738801 - DNA, 100 bp, Homo sapiens
acagtgttaccagggaggagcagtgaaagagaagggaatgctaagaactgctgggaggatgacagagatcctgctgggccgtggcttcaccttttggcag

SEQ ID NO: 738802 - DNA, 48 bp, Homo sapiens
tgataactcaagtttcatcacctgtctgttgcggttctcccacttttc

SEQ ID NO: 738803 - DNA, 100 bp, Homo sapiens
gggcagctcgggaacatggccctggagcggctctgctcggtcctcaaagggccaattcctgtccccccagcagcatggcatcgtgtgctgaaccctctga

SEQ ID NO: 738804 - DNA, 75 bp, Homo sapiens
agcgtgaccgagagcgcgaatatcgtcatcgttagaaggcttattcaaacctccttagagctaacatggatgggc

SEQ ID NO: 738805 - DNA, 90 bp, Homo sapiens
cgaggacgaggtgcgccggctgatcggaatccccttctggtcgaaggaaagctcttgctactagcagcatcaatatgaaacagtatgcaa

SEQ ID NO: 738806 - DNA, 100 bp, Homo sapiens
gacgaactactctcaggcagtgttctcagtagtccgaactctaatatgagcagcatggtagttacagtttctggaggctgctcacattccttggcttatg

SEQ ID NO: 738807 - DNA, 90 bp, Homo sapiens
tgggggtccgcgggtttgggaggagtatgccaaccagcatggccctggacaggattttttatcaagcagaaatgcatcgaacaacgagaa

SEQ ID NO: 738808 - DNA, 100 bp, Homo sapiens
tgaccagttttccgcacatggagaaccacagttgctttgagcacatgcaccacatacctgcggtgttcgaaatccgcaccactgatgacctcactgaggc

SEQ ID NO: 738809 - DNA, 90 bp, Homo sapiens
aaggattccaagtaactcttatttggaaggaagcagccaccctcgccatggcctccccgcccgcctgcccctcggaggaggacgagagcc

SEQ ID NO: 738810 - DNA, 75 bp, Homo sapiens
gctggagagaaggaagaactactgtcacagggcatgtggacttcacaatagaagtggaaagggccctgagagtgt

SEQ ID NO: 738811 - DNA, 75 bp, Homo sapiens
gtgcccctacgtgcacaacatcacccgcaagagctgacaaggaaggtttcgagcgttttgctggcaaagggattt

SEQ ID NO: 738812 - DNA, 83 bp, Homo sapiens
cctgaagcctcaaagtttcatgtgttatagttttgccgctggactcttccctcccttcccccaccccatcaggatgatatgag

SEQ ID NO: 738813 - DNA, 100 bp, Homo sapiens
cgtggatggggtgaggctgctgctggagcacggggcgaggaccgacatctgctttccgccgcaggtgaagctcgtgtgtggagtgccacggtacaatcag

SEQ ID NO: 738814 - DNA, 99 bp, Homo sapiens
gtcatttccttcgtacccacagtgcttcatgagaggttatcaatactctggctgaccatcatcatcgtgggactgactttggtggaagtccttggttac

SEQ ID NO: 738815 - DNA, 83 bp, Homo sapiens
ctggatcctggaacaacatgctgaaactgggaactgtggctgcaccatctgtcttcatcttcccgccatctgatgagcagttg

SEQ ID NO: 738816 - DNA, 100 bp, Homo sapiens
agcggctctttgtatgatgacgacccttgaacatctgtgaagaaatgactattctgcatggaggcttcttgctggccgagcagctgttccaccctaaggc

SEQ ID NO: 738817 - DNA, 75 bp, Homo sapiens
ctgctttgaaggcagaaaaccaacagtgagatcaagaattttagagatgtttatgattacttccgagctgtcctg

SEQ ID NO: 738818 - DNA, 73 bp, Homo sapiens
tgtggctctttctgctgggcctgcccttcaccctctacatggtatcttgcaatatattcagaactctccctcc

SEQ ID NO: 738819 - DNA, 87 bp, Homo sapiens
ctcttctgaggaactggatcgtgccctgcgcaaggttgttggggagttcaagggtccctccattaagcagttcatggacatcttctc

SEQ ID NO: 738820 - DNA, 82 bp, Homo sapiens
gttgggtgtggaacatcattctcaccaccagtctcttctctggtccttgaatgggcaagagggcacatgaagtacggcgtcc

SEQ ID NO: 738821 - DNA, 82 bp, Homo sapiens
cagggaaccctggtcaccgtctcctcaggtcttccaggatttccaggatctcctggaccaatgggtataagaggtgaccaag

SEQ ID NO: 738822 - DNA, 100 bp, Homo sapiens
atgtccacgttcaggcaggaggacgtggaggaccattatgagatgggggaggagctgggcagatccggaacatggtggcggtgctggaagtcatctccag

SEQ ID NO: 738823 - DNA, 100 bp, Homo sapiens
tgggctgttctctgtgttaaaccaatcagttgcgaccttctcttaacaggtaaaataccatgaagattttgaaaaaacaaaggggagaggctttactccc

SEQ ID NO: 738824 - DNA, 100 bp, Homo sapiens
ttttgagtacattgacagacttttcagtattgtaagaccaagaagacttctctacatggcaatagatggagtgtatttagcgtggactacaatgatgaac

SEQ ID NO: 738825 - DNA, 100 bp, Homo sapiens
gatatcagacaccgagcttcagcaagctctctccaacgcctcgatgctgattcatatcctactgcccatggttttctgcgtcttgctcatcatggtcatg

SEQ ID NO: 738826 - DNA, 77 bp, Homo sapiens
ccgagactgacaacgcggtcccacaggtgttaagtgtgatgcttccataatacatttggatgctgtcagctaagttc

SEQ ID NO: 738827 - DNA, 105 bp, Homo sapiens
gagaagatgaagttgaaggactaaaacgcttaatgacagaggttctagtaaataccgcttgctgtgttttgatgttggtggctaagctcatccagtgtattgtgt

SEQ ID NO: 738828 - DNA, 100 bp, Homo sapiens
atttgactacctgaaggaggaggctgaaatggctttgcttatgatggatgaggacgaggacagtaagaaacacttcaattacaacaagattgtggagcac

SEQ ID NO: 738829 - DNA, 82 bp, Homo sapiens
accagctccgaaatcaccaccaagctcctccgcctctgatgcagaatttgatgctgtggttggatatttagaggacattatc

SEQ ID NO: 738830 - DNA, 100 bp, Homo sapiens
ctcctgactgtcagtcagtacaaagccgtgaagtcagaggcgaacgccactcagcttttgcggcacttggaggtacatcaggaacgtctctatcaagaat

SEQ ID NO: 738831 - DNA, 50 bp, Homo sapiens
gggacccccaggaggtgaccctgcagtgacaaatggcctacagctgtgag

SEQ ID NO: 738832 - DNA, 100 bp, Homo sapiens
gctgagaagctgggggagaaggagaggagcgagctgaggaagaggaagctgttggctgaagtgtggacccaagtggagagattgtggaactggcgaaagg

SEQ ID NO: 738833 - DNA, 100 bp, Homo sapiens
ctgactatttttatcctttttcccctgaagctcgtagagaaatgtggcgcagttgtgtagcagttgagtaatgctggttagctgttaaggtggcgtgttg

SEQ ID NO: 738834 - DNA, 100 bp, Homo sapiens
acttggattcagcaaggaaccttccgattgtctccagctttaagaccacgacatcgagagctgcctgccagctcgtgaaggagtacatcggccaccggga

SEQ ID NO: 738835 - DNA, 75 bp, Homo sapiens
tgtggactacaccaccattgtgtttagttgtgaagtgtttaccagtgacagcaccagagaatggaaaaattgtca

SEQ ID NO: 738836 - DNA, 100 bp, Homo sapiens
cttaattctgaacatgaatgaccacggctttgtggtgcccacagtttgtgtgctgcggagatcgcctgatggggcccctgtgcaagtctttgtacctgaa

SEQ ID NO: 738837 - DNA, 98 bp, Homo sapiens
agggagccatgaagcattacgagttctgggaggtgatcagtgatgaacatggcatcgaccccaccggcacctaccacggggacagcgacctgcagctg

SEQ ID NO: 738838 - DNA, 100 bp, Homo sapiens
cgctgaggcttatttgggaaagaagggttatgtggtccgaatcagtggtgggaacgacaaacaaggtttccccatgaagcagggtgtcttgacccatggc

SEQ ID NO: 738839 - DNA, 100 bp, Homo sapiens
aacatccagctacgactggtacaaggattacattgcagtgaaggagaagtatgccaagtacctgcctcacagtgcagggcggtatgccgccaaacgcttc

SEQ ID NO: 738840 - DNA, 100 bp, Homo sapiens
ccaccatcttcgacttgagcgaagttttatgcaagtctcaaaccatgaattatgtgggacagctggctgggcaggtgattgtcactgtgaaggaactcta

SEQ ID NO: 738841 - DNA, 75 bp, Homo sapiens
gaaacaggcccggacctcctcctctaccacccccaatcgaaagaggccattgcccaagtctggccaggctgatgg

SEQ ID NO: 738842 - DNA, 90 bp, Homo sapiens
gaaatgaagagttattctcaagctgtcacaggaatgaacaggaagcggtgcaggaggttcctagagttgttcagaatcctccaaaaccag

SEQ ID NO: 738843 - DNA, 100 bp, Homo sapiens
gagtctgtgaaagaggaggcagatggcgtccacaacactctggaaaccagcctggacaccaagtctgtgtcagaaggccacctcaagaggaacatcgtgg

SEQ ID NO: 738844 - DNA, 99 bp, Homo sapiens
cagattcccccatctggaattttcaacagcagtcaagtgtgaagagtggccagattcgaaatctggagtctgcccgtgtctcaatggttggccaagtca

SEQ ID NO: 738845 - DNA, 100 bp, Homo sapiens
ctgaagcccaggagagcgatggagacgtatgcggaggttgggaaggagggcaaggtctacgacgttcctccatcggtgagcaaggatgtgcccgatggcc

SEQ ID NO: 738846 - DNA, 100 bp, Homo sapiens
cgcgggagggctgtgtgatggcctcggagcgcccggagccggaggaattgaatgatctggcacgggaccctccagcacagtgttcagcaggtcctgttgg

SEQ ID NO: 738847 - DNA, 113 bp, Homo sapiens
cacatagcgggcgctccctgaaggagagctggcaagatcgaatggtaccgccctgcacaaaggacagagttgcatgctgagaatttgaaaaatgaagatgatgtagacactgg

SEQ ID NO: 738848 - DNA, 50 bp, Homo sapiens
tacagaaacctcgtctccctgggtactgaacgacacctgggtctccttcc

SEQ ID NO: 738849 - DNA, 96 bp, Homo sapiens
gccgcgccaccgagtccggaccggagactttggggcctaactagattgggctaatggatactacagacaacagagaaaacttgttgaagagattgg

SEQ ID NO: 738850 - DNA, 90 bp, Homo sapiens
cctgggttacaaggctgcggacttccagctgcacacacatgtgtctcggcgcggaagatggccggcggcgtggacggccccatcgggatc

SEQ ID NO: 738851 - DNA, 50 bp, Homo sapiens
gggctgcctcgccgcgtctcgccacgactgcaataaggtcactgatcagt

SEQ ID NO: 738852 - DNA, 100 bp, Homo sapiens
cctggcaggaatcccaatttgcctccacttagtgagcggaagaatggtagtgtcgcctgcctctggtgggaccctattcagcggttactcttctcaggag

SEQ ID NO: 738853 - DNA, 83 bp, Homo sapiens
cttgctcaacttcctgatagatgtacactgaaaactggacattataacattaagtttggtgcacctcgatttggaggaagtag

SEQ ID NO: 738854 - DNA, 74 bp, Homo sapiens
tgaaccctgctcttggcatcgactgtttgcacaaggggacaaatgtcaccaggagactaaagtccatcaaaaac

SEQ ID NO: 738855 - DNA, 90 bp, Homo sapiens
gttgggcttctccagatgccggggctgggtccttcccaaggttgaggtgctggagaatctggtaaaagcaccattgtgaagcagatgagg

SEQ ID NO: 738856 - DNA, 116 bp, Homo sapiens
tgccatccagagctgtgcctcccagcaccacagtccttctgcagtccctcgtccagccacccccagatcctgcagctccaccaaagaaaccgcctcgccctggagctcccggtcat

SEQ ID NO: 738857 - DNA, 82 bp, Homo sapiens
ctgggaaagaacaggctaaattagaaaagggagtattttgtcaaagttgaagcatttatgacattaacagagaacaggacta

SEQ ID NO: 738858 - DNA, 50 bp, Homo sapiens
gggccagtctggagacagtcaagctcactgcaaatctaacttcatcatgg

SEQ ID NO: 738859 - DNA, 75 bp, Homo sapiens
aggccggctctccatgatgtccttcatcctcaacgccctcacctgaacccagtgacttgattgtaaaaatttaca

SEQ ID NO: 738860 - DNA, 50 bp, Homo sapiens
gggacctgatgaagcgaagatcaagatctgaagaagacacttgaatcatg

SEQ ID NO: 738861 - DNA, 82 bp, Homo sapiens
aatggcaagcgcagcaacaacagagagcacgtggtgaaaggtgtagcagtcactcggcctacacccacagcatcgaccttgt

SEQ ID NO: 738862 - DNA, 97 bp, Homo sapiens
gaaaccacttctctacatcccatctcaatcagaattactagattttctctcaaactacgaggacaaccctccatatgataagggagccttcagaatc

SEQ ID NO: 738863 - DNA, 83 bp, Homo sapiens
ctcatctgtcattcaaaggaaaaaagtagctgtcattggtggtggcttggtttaaagaaactaccagaccattttccaatgaa

SEQ ID NO: 738864 - DNA, 82 bp, Homo sapiens
ggccgggcaatgcctcgcgggcgcaatgaatccgcggcaggacagagcgggatgccaccagcttgtccaaagggaagttcca

SEQ ID NO: 738865 - DNA, 74 bp, Homo sapiens
ttcgacattgccgtcgacggcgagcccttgggccgcgtctcctttgagagcagcccgacggccatggaggctga

SEQ ID NO: 738866 - DNA, 100 bp, Homo sapiens
taaagccactccaaaagctaaggctgattttgacagggctgcagaagatgtgaggaagctgaaagcaagaccagatgatggagaactgaaagaactctat

SEQ ID NO: 738867 - DNA, 75 bp, Homo sapiens
ccatgtcagacgcagccgtagacaccagctccgaaatcaccaccaagagtttatgtggccgaggcagacaagtgg

SEQ ID NO: 738868 - DNA, 75 bp, Homo sapiens
tagctgttgtttgggctgtgtttcgaaatgaagacaggcctccccatggccacccatggaccagtcggcattcac

SEQ ID NO: 738869 - DNA, 100 bp, Homo sapiens
gaagagctcggtgggaggaaggagagaaaagctcctgggggcgccgaaagctcagcccagccgcggaagatcattaccattagaatatttgaccgtgagg

SEQ ID NO: 738870 - DNA, 82 bp, Homo sapiens
ggaacgctgaggtcccgcgctccccgaccgagagacactatggacagcgtgaagcagagcgcggccctgtgcttgctgcgcc

SEQ ID NO: 738871 - DNA, 100 bp, Homo sapiens
ttttccagtgtttttcgaattagttcaccaggattacaactatggactcattatgatacagtgatgtgtgttctgaaattgtgaaccatgagtctagtac

SEQ ID NO: 738872 - DNA, 75 bp, Homo sapiens
ggtatactacatggcaaaatgggaaaggtgcaatggatgagcttcatagtctggatccaagaaggcaagagttat

SEQ ID NO: 738873 - DNA, 50 bp, Homo sapiens
gcgacgaggcgggacgtcatggaagtgcccctcgggaggcattggcacag

SEQ ID NO: 738874 - DNA, 78 bp, Homo sapiens
gagccaagcgtcctgcccggccgtcatggcaaaaccccaaaagatgccgcgtcagttcgagccacgcatccaatacca

SEQ ID NO: 738875 - DNA, 100 bp, Homo sapiens
tcagatggttattgatgttcaaacaggataagccgcctcttcaatggcactgaacccatcgtcctggacagtttgaagcaacattatttcattgaccggg

SEQ ID NO: 738876 - DNA, 97 bp, Homo sapiens
cgtcaaccgcaggaggatgaagctgctgctgggcatcgccttgctggcctacgtcgcctcaagtaactggcagaagttttggtgataaagattttcg

SEQ ID NO: 738877 - DNA, 75 bp, Homo sapiens
ataattttgaaaaacctgttgtcatgaagtttaatggatcgagaagtggcgttgcttgctgaaatggacaaagtg

SEQ ID NO: 738878 - DNA, 75 bp, Homo sapiens
tgacagctgcaaggagttactgaaggaatgcagatgtaaacgtgctccccattccagaccacaaattaattgtca

SEQ ID NO: 738879 - DNA, 82 bp, Homo sapiens
ccgatccagcctgcggagcctgtggggcagctatatcgagaagtttactgactttcttcggctctttgtgagtgttcaccta

SEQ ID NO: 738880 - DNA, 75 bp, Homo sapiens
aaatgaatgccaaatgggacacgcaatacgaggattctctccaccacatagaatctgcagttttgaagaggcaaa

SEQ ID NO: 738881 - DNA, 74 bp, Homo sapiens
aagacatcagctacttaagcgccacgagaagattgaaactgcttctgccttggctagaggccagaattcatgag

SEQ ID NO: 738882 - DNA, 75 bp, Homo sapiens
ctggaattggttaaatatttgctggcttctgcttttcctactcttgccaagagggagaaaccaaggagctctggt

SEQ ID NO: 738883 - DNA, 74 bp, Homo sapiens
ctttcacagtttgcgggactcagtcccatcactccaaggagagaaggtgaccaagaatatggcccaggtgacca

SEQ ID NO: 738884 - DNA, 100 bp, Homo sapiens
ccacaaccaccaccttcaagggagtcgaccccaacagcaggaatagctcccgatgaacaagagaactgggcaacccatgatccacatctacctggacaag

SEQ ID NO: 738885 - DNA, 100 bp, Homo sapiens
atagaaacgggagagaatgtcacaggaatggagctcgaatttaagctgacaagctctctactgatgatctgaactccctcattgctcatgcacatcgtcg

SEQ ID NO: 738886 - DNA, 100 bp, Homo sapiens
cggagctgtccccagagaccctatgcaacgggcagctgggctgcagtgaccccgctttcctcacgcccagggggggccctcagcctcttggccttgaacg

SEQ ID NO: 738887 - DNA, 96 bp, Homo sapiens
ggctgagaaaagcgagaccgcgtgcgaggaccgtgcgtaaattcacagagaaacacgaatgggtaacaacagaaaatggcattggaacagtgggaa

SEQ ID NO: 738888 - DNA, 86 bp, Homo sapiens
gtgactgggtccagaatggcttcggattcggggaaccaggggaccctctgcacgagctcccagctcctccagcagccgacaggagg

SEQ ID NO: 738889 - DNA, 96 bp, Homo sapiens
aagaaacatatactgcttacctcattgaaacaaggccggtgctggtgtgtgctccgagcaacatcgccgtggaccagctaacggagaagatccacc

SEQ ID NO: 738890 - DNA, 100 bp, Homo sapiens
agcgggggcagtcagagcggagccaagatgcgaatgggaccacctggtggcccatggtagaatggcagaaaaggaggcacgtcggaagttcaaacagatc

SEQ ID NO: 738891 - DNA, 75 bp, Homo sapiens
ctcgtctccgtgggtgtggcggagcgcgcggtgcatggatggattggatgctttggtatatgatttggattttcc

SEQ ID NO: 738892 - DNA, 82 bp, Homo sapiens
tcactttcaagaagttggtgaagggccatgcctactctgtgaccggggccaagcaggatgggcaacactccagattcagcct

SEQ ID NO: 738893 - DNA, 83 bp, Homo sapiens
cagcctcgtcagactcggagacgtctgacagtgacgatgaggatgaaagtcaaacttctgcatcctcttgtgatgagactgag

SEQ ID NO: 738894 - DNA, 94 bp, Homo sapiens
cttcgcagtctggaaagctttaggagttcacagtaatcctgaggttggcttgaagcctgtgtggtatagtcccaaagttttcattgaaggtgct

SEQ ID NO: 738895 - DNA, 50 bp, Homo sapiens
cagggcttcaacaagctagctgaggtgaaaacttttggcccgtttggaag

SEQ ID NO: 738896 - DNA, 101 bp, Homo sapiens
aactcagatgcgctgaagctagctaaagaagttgatcctcaaggtatcagtttttggaagaagcttttcaaaatcagaagggtgcaattgagaatctactg

SEQ ID NO: 738897 - DNA, 75 bp, Homo sapiens
cggagggacaccttaaggaactgtataaagcaacagggagtctgaagatacagtattgctcgtcctcaaagagat

SEQ ID NO: 738898 - DNA, 98 bp, Homo sapiens
gtgggcagcagagggatggctgctcagctgctgactgatgaggcactggacaggctgcgggaggagctgcaggactgaggtacagaggccaggggccc

SEQ ID NO: 738899 - DNA, 100 bp, Homo sapiens
tggctttttacaatgacggaaaggagtcagaagtggtttcctttctcaccactgccattgacttaattcagtgcacaaatgagatgaatgtgaacatccc

SEQ ID NO: 738900 - DNA, 75 bp, Homo sapiens
gtacctgcgcaggaagtcgcgctccaagagctccagcctgagccggctcgagcggcgtcttcgacatcttcggaa

SEQ ID NO: 738901 - DNA, 51 bp, Homo sapiens
gagccggagaccgagcccgaacagcagctcggcaagatgtcggtgaaggag

SEQ ID NO: 738902 - DNA, 51 bp, Homo sapiens
ctcagcagcacgagggcggcgtgcaggagatgcagaggccaggatgtgggc

SEQ ID NO: 738903 - DNA, 51 bp, Homo sapiens
gaaggacgcgcagtccatctctctcagatgaattttgataagaggcaacat

SEQ ID NO: 738904 - DNA, 76 bp, Homo sapiens
gtcaccctcctgccctgcttttatttcgtcgagatcactggggtgatcctgctggctgttggagtctggggcaaac

SEQ ID NO: 738905 - DNA, 90 bp, Homo sapiens
tcatcgacgccgaggagctctgcagtgggggcgtaaaggctggcagcctccccgggtgcctccgcgtgctgatgagctccttctaactga

SEQ ID NO: 738906 - DNA, 75 bp, Homo sapiens
gggagaagttgaaggaggaggagaacacagtggatgggcccaaaagcacaagaactggaggtttcagaagacgag

SEQ ID NO: 738907 - DNA, 100 bp, Homo sapiens
cggggactcccgacccccatccttccaggaggaagagatagtcgctctggatcacccatggctagacgctgaaaacccacctggttccggaatcctgtcc

SEQ ID NO: 738908 - DNA, 100 bp, Homo sapiens
caccccccgccgacaaggaggctgcggttggatttctcacgatgtccagtgttatctccatgtctgcccctttcttcctggggaagatcattgatgtcat

SEQ ID NO: 738909 - DNA, 98 bp, Homo sapiens
tcagcctacagtatgacatgggtgggcagatggaaaaggacccctggcagctgcgttctcttccagtgaagtaaaagctttaattcgtgccttgtttc

SEQ ID NO: 738910 - DNA, 112 bp, Homo sapiens
ccggcggcggctgcgggctgagcggcgagtttccgatttaaagctgagctgcgaggaaaatggcggcgggagccacaatggtgcgcatgaatgtcctggcagatgctctcaa

SEQ ID NO: 738911 - DNA, 99 bp, Homo sapiens
gggggcggcggccgaacgatgtgcgagaactgcgcagacctggtggaggtgttaaatgaaagtaatttatcctcagcattccaaacttactgacagaga

SEQ ID NO: 738912 - DNA, 112 bp, Homo sapiens
ctacttcacactgcagaactgggttctggactttgggcgtcccattgccatgatctcgacatggcaggagctgaggcagctgcaggagcagatccggagcctggaggaagag

SEQ ID NO: 738913 - DNA, 75 bp, Homo sapiens
gaggcggagtggcgcccggcgaggtagcgccaggcgaggaatactcccccagttgcaagaggcgcaggaccgtgg

SEQ ID NO: 738914 - DNA, 100 bp, Homo sapiens
ttactccacagatagccaagacttatcgatgcggtatgaaaccaaatactgctattaagatacgatgaatggattaaagcagataaaatagtaagacctg

SEQ ID NO: 738915 - DNA, 90 bp, Homo sapiens
gcagaaagcatttaaccagcatggctacttcatattttggaaagcagtttttaagacaactgagatctgtatctgtggacctgaatgttg

SEQ ID NO: 738916 - DNA, 102 bp, Homo sapiens
cagaaagtgcactgactggtggtgtcaacccatggctcaactggaagcactgtggaagaagatggagggtgtggatgtcacatgtacttcagtttgaggata

SEQ ID NO: 738917 - DNA, 73 bp, Homo sapiens
ctcgcggcgagcggacggggtcgagtcagtgcgttcgcgcgaggtgaccagaagtcagcagcttcccagaagc

SEQ ID NO: 738918 - DNA, 50 bp, Homo sapiens
acaaaacctccagctttgagtcattcaggatgttgcttcagagtgtgaag

SEQ ID NO: 738919 - DNA, 100 bp, Homo sapiens
acagttacagtgaactctatagattctgctggtatacagctacatccaggagagaatgctgacagtcctgcagccgatggaaaatgtctggtgtcggttg

SEQ ID NO: 738920 - DNA, 100 bp, Homo sapiens
ccagttccctgctgaagatggccagatccccttgtctggatcagttcttaagagcagccccggtaactggaggaatgggagccgttttgatgagaaaaat

SEQ ID NO: 738921 - DNA, 100 bp, Homo sapiens
ggggattgcctggcaggacgtgaaggggaagaggcccaccctggagtaaccctcactggagaatccagagaggccgggaagttaaacttgtagccaccac

SEQ ID NO: 738922 - DNA, 90 bp, Homo sapiens
tccagagagacgtgaaacatgtgaacactcaagtgaagcaaaagccttccatgattacgttgtggaaaatgcccttaaagtgaacccaat

SEQ ID NO: 738923 - DNA, 96 bp, Homo sapiens
gtccccagcttactccagggatgatgtcagaaaatgagatttggccaattgggagagaaatcaactgtaagtgcttaaagacattgtctgtctctg

SEQ ID NO: 738924 - DNA, 83 bp, Homo sapiens
cttctctccctctatgttttatttcattgcctggcaaagaagacagacttcagtgttctgaaagaacagtaccttggctacag

SEQ ID NO: 738925 - DNA, 100 bp, Homo sapiens
ggtgaaactgggcaagaggccccagcccgtgaaaagtgagcttggaattgcgattgggttcttggtccctcctgttttggtacccaacattgaagaccgg

SEQ ID NO: 738926 - DNA, 75 bp, Homo sapiens
cttcttcagacaagtgaaggacatgaaaagatgtcttctaacgcagaaaagaagattcatgttacatgtaaagct

SEQ ID NO: 738927 - DNA, 100 bp, Homo sapiens
cagatcgattttaccttggataccctgctttggtatcttctcacaggtatgaaacacctagcgatgctattgaggtgataagtcctgccagctcacctgc

SEQ ID NO: 738928 - DNA, 75 bp, Homo sapiens
ctcttcgatgtgcgagactttggaaagccgattacacctcaacaagaaggcaactgacaaacagccttatagcaa

SEQ ID NO: 738929 - DNA, 100 bp, Homo sapiens
gggattggaccaaaccagagggacagagtcttctgggtctctctgcctgaggccctggagggagagaaggggaacgcccttttgcttgtgactggcaggg

SEQ ID NO: 738930 - DNA, 82 bp, Homo sapiens
caccgccgcccccccagacaagatggacaccgcggaggaagtttcactgttacatgccttgaagtgatgaggaggtttctgt

SEQ ID NO: 738931 - DNA, 101 bp, Homo sapiens
cctggaaaaggaaattctttattatcggaagacaataggctataaggaaaaaagggttgctcattttgggtatcactggagtctgatggaaagagataggc

SEQ ID NO: 738932 - DNA, 100 bp, Homo sapiens
ggaaggaggaagaggatgccatgcagaactgcacactcagtccctctgtgctccaggactccctcaataataaaccagcctggacaccaagtctgtgtca

SEQ ID NO: 738933 - DNA, 100 bp, Homo sapiens
gggaccatgttcaccagcaccggctccagtgggctctcttctaagtgccagatgatggaggagcgtgccaacctgatgcacatgatgaaactcagcatca

SEQ ID NO: 738934 - DNA, 83 bp, Homo sapiens
aataaaaacagaacaggaggtggtagagggcatggatatctctactcgctccaaaggttagaaaacgaaaagctgcttgagag

SEQ ID NO: 738935 - DNA, 98 bp, Homo sapiens
ttgccatggaccccaggaatggttacatggagccccactaccggtcttactgaagtaacacaaagcttaaaaatggaaaatgaagagtttaagaagag

SEQ ID NO: 738936 - DNA, 98 bp, Homo sapiens
agctctggaaaatgacagccttcatttctctgaacatactgccttatgggacagatcaagtgtctgcttttggggcagagttttcatcggaggcatgc

SEQ ID NO: 738937 - DNA, 96 bp, Homo sapiens
cgcagagagtaatgctgaacttaaggatccctccccgcggcggcgatggcccgagccatgagagtgaggactttccgcgcccattggtgacccttc

SEQ ID NO: 738938 - DNA, 100 bp, Homo sapiens
cttaccttcaacagactcaagaactggttatacttgaaaccataatgctacaaactctaggagcggaaagaatgtcggagcgggccgcggatgacgtcag

SEQ ID NO: 738939 - DNA, 74 bp, Homo sapiens
gctatttcgccgctggcgtcaggactattttcacgttttaatgccgagaggcaaaagtcaacaactctagctta

SEQ ID NO: 738940 - DNA, 100 bp, Homo sapiens
gaagtgggaaacccatactctcaacaactcagaatgataatgggtattatccaacaaaagaggccatattcaatgaagagtcttgctgtgtcgcccaggc

SEQ ID NO: 738941 - DNA, 75 bp, Homo sapiens
catatacaacacgattcttctaatggatgggaacatgggcaaacggggattcagcgtccgatcctttggaacagg

SEQ ID NO: 738942 - DNA, 75 bp, Homo sapiens
cccggtgcggcaagatcgtgtatcccacggagaaggtgaactgtctggataagatcctcacagccaccgtggaca

SEQ ID NO: 738943 - DNA, 75 bp, Homo sapiens
gaccattggatgatgcattagattcctctagtattctctatgctagaaaggcatgttatttgaaagcaattgaga

SEQ ID NO: 738944 - DNA, 100 bp, Homo sapiens
ttcaaattcaattttcgccaactctagtaaaaatcctgggtagaagctggatcagcaagaatgtcactccttatattggtgtccattttcttatctgcag

SEQ ID NO: 738945 - DNA, 83 bp, Homo sapiens
ccgagaggtaccgggggtgacagctccgggaccggccgaaaggcgaggaaccggaagcggggagaggtggtgagagatgaccc

SEQ ID NO: 738946 - DNA, 98 bp, Homo sapiens
tttgtaaaggctcattaagtaaaactcaagatgtttaccatgacaagtcccctcctggtatcttgcgctttgaacttcaagattcaggaagctctcta

SEQ ID NO: 738947 - DNA, 78 bp, Homo sapiens
cggagcctccgctgccagcgacatgttcaagctgcatatctatgtgagactgaattttcctcttagacttcagctaaa

SEQ ID NO: 738948 - DNA, 80 bp, Homo sapiens
atgcaaagtataaatgaagacttaaaagatatattacatgctgcaaagcagataggcataagggccatgtgttctgaaat

SEQ ID NO: 738949 - DNA, 75 bp, Homo sapiens
acacaaaccccaatctcagtggacaaggctaccggctctctgaccagttccacgacatcctcattcgaaagtttg

SEQ ID NO: 738950 - DNA, 75 bp, Homo sapiens
gctggcggacatcactttagaccctccacctaattgcaggtataattgaaatcctcaaaggaatgcaagaattgg

SEQ ID NO: 738951 - DNA, 83 bp, Homo sapiens
gctgctgaagtaatgcaatggtctcaatctctggaaaaacttcttgccaaccaaagatcagctgctgctctctgaaaagccac

SEQ ID NO: 738952 - DNA, 87 bp, Homo sapiens
ggattcgcagggaggatgtcgggacaccccggaagctgggaaatgatattgatgatgttaagaagttcaaaccgggttacctggaag

SEQ ID NO: 738953 - DNA, 101 bp, Homo sapiens
gccagcctcagctatcgccgctgactgtgcccctgtggaaggaggacggctgtcctcagcgaggggccgtgcacccgctcctgagcagcgccatgggcctg

SEQ ID NO: 738954 - DNA, 100 bp, Homo sapiens
agactgttactacaacctcgggcgtctggtcccctcttgctgttggctgcacatcaggaaggctgtgatgggaatgaaggtgaaaacttggagatttcac

SEQ ID NO: 738955 - DNA, 75 bp, Homo sapiens
ctgggatcccggccaccagcaattgtccggcctgattgttggcaaaggcatcataagaagctggcatttatttct

SEQ ID NO: 738956 - DNA, 73 bp, Homo sapiens
ccgaggctggagggggagaacacccagagctcagagttctacagagtcaccactgaacaatatcagaaagctg

SEQ ID NO: 738957 - DNA, 90 bp, Homo sapiens
cggtcgcggaggccgcgccgggccctgtcgcgaacctccggcgcgctgccccgccggaccgtgggaggcgcccagatcagcctggcggag

SEQ ID NO: 738958 - DNA, 83 bp, Homo sapiens
cttctccactttcgccagcccgtgccgcgagcgcggcctgcaggaggttgaaaggattgttgacaaaaggaaaaataaaaaag

SEQ ID NO: 738959 - DNA, 98 bp, Homo sapiens
aataacccttgatcctcctcctaattgcaggtagctacagcaagctgggtagcaggcagatccaaaggatatcatgaagtttccagggcctttggaaa

SEQ ID NO: 738960 - DNA, 100 bp, Homo sapiens
ctgctctgggaccggaggagacatcggcctctgcaggcttgccgaagaagggagttctccaaggagaagtacatcctggactcatcgccagagaaactcc

SEQ ID NO: 738961 - DNA, 101 bp, Homo sapiens
gaagccaagggagattataccaggtactccaaagattcaggtttactcacgtcatccagcagagaatggaaagtcaaatttcctgaattgctatgtgtctg

SEQ ID NO: 738962 - DNA, 100 bp, Homo sapiens
cgacaaggaggtgaagcggccccagcactcccagctgcgcagggcctgccaggtggcgctcgatatgaggccccaggattcctggcgaggtcctcctccc

SEQ ID NO: 738963 - DNA, 119 bp, Homo sapiens
attcgggccgagatgtctcgctccgtggccttagctgtgctcgcgctactctctctttctggcctggaggctatccagcaaggaagaggcccagcagaagggactcgctgagccacccc

SEQ ID NO: 738964 - DNA, 90 bp, Homo sapiens
aggcgaagctggccgagcaggctgagcgatacgacgggtcctgggcccagtctgccctgactcagcctgcctccgtgtctgggtctcctg

SEQ ID NO: 738965 - DNA, 82 bp, Homo sapiens
acggtgctggccagcagaccgcacacgctagatggccgaaacgtgtgagatgcacaatgcgaaacctaggccccagctttta

SEQ ID NO: 738966 - DNA, 101 bp, Homo sapiens
ccgttccgctgttctgggaacagccagggcttcagatcaatgtccgagttaccaccatggatgcagagctggagtttgcaatccagccaaatacaactgga

SEQ ID NO: 738967 - DNA, 90 bp, Homo sapiens
cagaatgcagagattttgttttgaattgtgaaatacttccacctcttttagagatgtacagttacccagcacgtgtacctcctcctcctc

SEQ ID NO: 738968 - DNA, 87 bp, Homo sapiens
gaggccggcgccggcgccggcgccgcggcctcttcggctgcggaccctgccattccggaggaggggaaacaggaatgtcactttgac

SEQ ID NO: 738969 - DNA, 95 bp, Homo sapiens
ccacggggacggattggttgttttttcctgtatgaagcggttggcaccactgaagtgaccgaatgaggtgctgcccataaactcgtgtgttattt

SEQ ID NO: 738970 - DNA, 75 bp, Homo sapiens
cggggacgcccgcgcgacgagcaggtggcggcggctgcagagttgaacaatgaccatagttgacaaagcttctga

SEQ ID NO: 738971 - DNA, 83 bp, Homo sapiens
aggagaattgcctgcactatgcccgcaaggtgggctacaggtctccaggaaacctagagaaaaaccgttatggggatgtaccc

SEQ ID NO: 738972 - DNA, 100 bp, Homo sapiens
ggcaaccaaagacgggcgcctatcagtacacaataagggctgtgggtgagcgtggaggatgctcagatgcacaccgtcaccatctggctcacagtgcgcc

SEQ ID NO: 738973 - DNA, 82 bp, Homo sapiens
cacttgtccgcatgccagctccacccgggcggacccacacatgacaatgcagatcttcgtgaagactctgactggtaagacc

SEQ ID NO: 738974 - DNA, 75 bp, Homo sapiens
gccccctgtgccttcatgggctcaatggctcctggccatgttgctgagttcccgtccgcaccctctcagacctga

SEQ ID NO: 738975 - DNA, 80 bp, Homo sapiens
cctcgggcaccatgagcgacgtggctattgtgaaggagggttggctgcacaaacgaggctactgcagcactggggtgtca

SEQ ID NO: 738976 - DNA, 100 bp, Homo sapiens
gaacttggctagcaagacaaacgtgtacatctctagcagtgctggagccaggtggcgagagttcctccaactcctctgccaaccaatgatgttgatgtgt

SEQ ID NO: 738977 - DNA, 74 bp, Homo sapiens
aaaccccaacaacagctcccttagcaaagtgtgggatgctgtctcaggagatgaattgatgaccctggctcata

SEQ ID NO: 738978 - DNA, 100 bp, Homo sapiens
gttaatgtttgcaaatgcagaggaagaatttttctatgagcaggcattttggagatcaaagatgggtagaaaagatgctgctactataaaacttcctgtt

SEQ ID NO: 738979 - DNA, 90 bp, Homo sapiens
acggacaggggccgcgccgctgccgctgctgctggtgttagcgctcagtcaagttggattggctagtgcttccagtattaaatagtgttg

SEQ ID NO: 738980 - DNA, 100 bp, Homo sapiens
cccgactgcaactgctggattgctgcaaggctgagggacgagaacgaggagattacctggggcaattgatgttatcggtcagactataactatcagccga

SEQ ID NO: 738981 - DNA, 83 bp, Homo sapiens
ggaaagggaaaggaagaggctctctggagattggttgacaatgcagatcttcgtgaagactctgactggtaagaccatcaccc

SEQ ID NO: 738982 - DNA, 82 bp, Homo sapiens
gatgtgaaaatgaagccagaccgaggaatttgctcgccctgatacatcgaatgatagagtttgttgtacgtgaagggccaat

SEQ ID NO: 738983 - DNA, 83 bp, Homo sapiens
caacaagtactgcgccgactgcgaggccaaaggtagttaacctgcagtacagtgaagttcaagatcgggtcatgctcactggc

SEQ ID NO: 738984 - DNA, 90 bp, Homo sapiens
caaggagtcacggatcggattcctcagctacgaggaggcgctgaggagagagttactggaggtgaactgtttgaagacatagtggcaaga

SEQ ID NO: 738985 - DNA, 82 bp, Homo sapiens
cggccccgccagcagcactgtggaggccgtcctcgaaaccaaggtgtatgttggtaacctgggaactggcgctggcaaagga

SEQ ID NO: 738986 - DNA, 100 bp, Homo sapiens
gtacgtggccctcgatgtgctctgcgtgttgctggacagcatcgcacagaattattttaaaaaaaagcagtgatccaagcaattgaattggaagcactct

SEQ ID NO: 738987 - DNA, 82 bp, Homo sapiens
ccgagagccggacaatggcaaggaggagcaggaacggagcaggccgggctctcgccatgggtcactgtcgcctctgccacgg

SEQ ID NO: 738988 - DNA, 82 bp, Homo sapiens
tgcgaggcctcccgggctccgggaaaactacactggccaggtcactatcatatgacaaaggctttgccgcagttcatcttcc

SEQ ID NO: 738989 - DNA, 100 bp, Homo sapiens
gcgggcggcatcggctgcgagctcctcaagaatctcgtgctcaccggtttctcccacatcgacctggctgagctgctgtacaagaagaacccaaagctac

SEQ ID NO: 738990 - DNA, 106 bp, Homo sapiens
ctttatttgttacaagttggcttatgagtggaacatggctagcaggaatgcttactgttgcgtggttcgttattaacagtgacttttttgaacgaaccattctgtg

SEQ ID NO: 738991 - DNA, 90 bp, Homo sapiens
ccctgcgggacctcaatgtccggaggaaccagctcagtacgctgcccgaaggcccacgaggactcggagaagctgcgggagatcgtactg

SEQ ID NO: 738992 - DNA, 91 bp, Homo sapiens
cgggcggctgcgtcgggctgcaggagaagatggcggtctccacagcattacagacatctttagttttttccagagatttcggtttgcttgt

SEQ ID NO: 738993 - DNA, 74 bp, Homo sapiens
acttccagaaaaagtgctcctgggactccaggataccagctgagatgagtgaactgagtgtggcacagaaacca

SEQ ID NO: 738994 - DNA, 75 bp, Homo sapiens
tggtacatgaactcttttccagtgtccttcaggagatctgtgatgaggtgacaggccgctgcggctctgtgctgg

SEQ ID NO: 738995 - DNA, 80 bp, Homo sapiens
tattttgcttggtacacaaaatggatctggtacaggaggatcaacgggacctgctgatcactggagattccatcgttagt

SEQ ID NO: 738996 - DNA, 82 bp, Homo sapiens
gagtttgtagcctattggaggaaaacacaccaagtgtatgtggtagaagaccaaagaagagatgagctaggaccatccacct

SEQ ID NO: 738997 - DNA, 100 bp, Homo sapiens
actgaagttgggggagattgtcaccaccatcccaaccatagtgtggcaaaggagcagagaactttgacaagttcttcacacgaggacagcccgtcttaac

SEQ ID NO: 738998 - DNA, 100 bp, Homo sapiens
aatcctaagactcagcactgttgcgggcaggtattgctctcactaagccagacctgatcacctgtctggagcaaggaaaagagccctggaatataaagag

SEQ ID NO: 738999 - DNA, 50 bp, Homo sapiens
cctggatctgcgatctgtttgtgggttacacatcattttggaatgactgt

SEQ ID NO: 739000 - DNA, 74 bp, Homo sapiens
gcggtgcggaccccggcgcgcggtccgggttgctggggcggcgcgttttgcctgagaatacagatcaacccaca

SEQ ID NO: 739001 - DNA, 101 bp, Homo sapiens
tttcgaatcttcatcgccctgtggaacatcttcatgatgttctgcatgattgtgatggcactggatctttaaaacgcagtggttcctttagcaaactccgg

SEQ ID NO: 739002 - DNA, 88 bp, Homo sapiens
gtgaagctgccctccggctccaagaaggttatctcctcagccaacagagctgtggttggtgtttgagcccagatgagtcatggctgga

SEQ ID NO: 739003 - DNA, 98 bp, Homo sapiens
tcgtctgagaaaactgaagtttgccataaaagttgatggagattacctttggaagaacatgagctgcctgtggacatggaaaccatcaacctggacag

SEQ ID NO: 739004 - DNA, 75 bp, Homo sapiens
gaggagctgagcgagcgcggaagcactagctgacgcgtctatgggcgcaacgccgcggccctgagccaggcgctg

SEQ ID NO: 739005 - DNA, 50 bp, Homo sapiens
ggaggattaagtgaggggacatgagcaatggctgccatccggaagaaact

SEQ ID NO: 739006 - DNA, 100 bp, Homo sapiens
gttttggaactgtcaggtacctcaaagcgtgtcatggagaaactccagctgggcccagagattctgcagcgggaaaatccaaggcttatttatgccaggc

SEQ ID NO: 739007 - DNA, 78 bp, Homo sapiens
ggagatcgtcccgcgcctgccggccgaatacatcaagcaatggtaacatctttaaatgaagataatgaaagtgtaact

SEQ ID NO: 739008 - DNA, 98 bp, Homo sapiens
cctttattcctgaatcttggctaaactctttaggtttaacctattggcctcaaaatgcacttggaggctcctcagctcttcatatcccagcttttcca

SEQ ID NO: 739009 - DNA, 51 bp, Homo sapiens
ctcccaaattgctgggattacagaaatacatgctacaggatttaactatca

SEQ ID NO: 739010 - DNA, 120 bp, Homo sapiens
gttattcgcctaaaagaaggtctggatatatctcatcttcaaggacaagttattcccaatattcccttcatctaatgaagttcctccaaatttcatgatccttgtgacaatccaccccag

SEQ ID NO: 739011 - DNA, 83 bp, Homo sapiens
cgatcctacatttaacagccctaccgtgcatgctttcacagtgaaggtcagcagatccggaagctcatcaaagatgggctgat

SEQ ID NO: 739012 - DNA, 98 bp, Homo sapiens
ccgactgcatcatgctgtctggagaaacagccaaaggggactatcctctggaggctgtgcgcatgcagcacctgggcaattgaaggaacagactaaaa

SEQ ID NO: 739013 - DNA, 98 bp, Homo sapiens
tcgggaccggctgccatcttagtctagggactgaggagtcgccgccgccccgagtcccgcagatcgatggcaaagccttcctgcttctgacacagacg

SEQ ID NO: 739014 - DNA, 125 bp, Homo sapiens
cgctggccatggcctccaactttaacgacatagtcaagcagggctacgtgaaaatccgcagcaggaagcttgggatagccgcaatggctgaaaatggtgataatgaaaagatggctgccctggag

SEQ ID NO: 739015 - DNA, 100 bp, Homo sapiens
aagagggagtcaccactggacctccaaggaagccacgtgcagacatctacaaccttcgatctcctgacgaatgcactgggccaggtcttgaaggctgtcc

SEQ ID NO: 739016 - DNA, 82 bp, Homo sapiens
ttctgggcttccacacaactccagtgctaactcaacagcaaggacacccaggcccattattttcctccagcctccatggacc

SEQ ID NO: 739017 - DNA, 88 bp, Homo sapiens
ggcaacggatagaggggctgtgtcatagacgtccgacgtgtctgcaacacttcttgttgctgtaaatgaacttcgtaggaatgctcgg

SEQ ID NO: 739018 - DNA, 100 bp, Homo sapiens
gcacaccaccttctgaaagaaatggcacttcatcaacttgtcaaggctcttgtcaggatggtgaagctgttcatcggaaacctgccccgggaggctacag

SEQ ID NO: 739019 - DNA, 82 bp, Homo sapiens
gaagaaggcatttctattttagaaagcagttcgacagacagtctagcagtgcttccttggagaccctgttagcacttcttca

SEQ ID NO: 739020 - DNA, 101 bp, Homo sapiens
ccggcttccgtcccggacagagcccgtggtcgcgcaggagtgagagagagaaccacgctgctgatgactccgagggaggggccctggacatgtgctgcagt

SEQ ID NO: 739021 - DNA, 109 bp, Homo sapiens
aagagcttcattgaagcagttgagaagtattttgaccacctgattcccagagtgattcctctccagttaagtgggcagaccaacatccacctcagcaaaaacttcttcc

SEQ ID NO: 739022 - DNA, 51 bp, Homo sapiens
gagggactggagattcactagggcccagttgtgcatttccagtttgccatg

SEQ ID NO: 739023 - DNA, 80 bp, Homo sapiens
ccggaaatacatcgtcgccaggactcagcgggccgcaggcacagcgtcaccttcgtcccctccggagctgcacgtggcct

SEQ ID NO: 739024 - DNA, 83 bp, Homo sapiens
gtagagggcatggatatctctactcgctccaaagggggatatgagactttctactcggaatatcctgagtgttgcgtggatgt

SEQ ID NO: 739025 - DNA, 99 bp, Homo sapiens
attttccccaaagtagcaacaaatatcatgagagcatggctcttccagcatctcacaggatgtccgtcgcttggtagtggccatgtctagagccagact

SEQ ID NO: 739026 - DNA, 87 bp, Homo sapiens
aagactccacgacatcccggaagccgaaaaatggatgctgaaaacgccattcaacagatgggtggccagtggcttggtggaagacaa

SEQ ID NO: 739027 - DNA, 51 bp, Homo sapiens
caaagaagagttgagcacaatcagtgaagagtgaatctaccaagaacgttg

SEQ ID NO: 739028 - DNA, 82 bp, Homo sapiens
ggcaaggagctaaagcagcgtgcgttcagccctgggggaatgaaagctactggttgattttaaagtgcctgggcctcacagg

SEQ ID NO: 739029 - DNA, 75 bp, Homo sapiens
gcactgcactgggtaggaaaaaggtatgaaattgaaggctgtgaagtgatttgggccattaaagataaagctata

SEQ ID NO: 739030 - DNA, 112 bp, Homo sapiens
gtttgtactatcctcggtgctgtggtgcagagctagttcctctccagctcagccgcgtagctgccatgtccacgcagagacttcggaatgaagactaccacgactacagctc

SEQ ID NO: 739031 - DNA, 75 bp, Homo sapiens
taaattttttgaagtcaacacaggaaatgtatttttatgacggttgtggcagcactgcctgaaggtatgagacca

SEQ ID NO: 739032 - DNA, 98 bp, Homo sapiens
ctcctcttgaaggcctactgtcatccacaaagctccttttttacgggcatcccatttaatgattaataagaaaattccccggggaccaccttctcctc

SEQ ID NO: 739033 - DNA, 75 bp, Homo sapiens
aaaacaacatctttccagaaagagagttgctggagaatgtaaccctaatccataaaccagtgtcgttgcaacccc

SEQ ID NO: 739034 - DNA, 96 bp, Homo sapiens
cagccagttactatggcagttgcaaaatattcaggagaccgtcgttgccttgtatttccagagaacagcctttttcacatagctcttggctgtagg

SEQ ID NO: 739035 - DNA, 75 bp, Homo sapiens
gcagcttcaagcttaggaccacccaccatgcctatccagttgcaaccagtgtggcagagagtctaagcttttgtc

SEQ ID NO: 739036 - DNA, 80 bp, Homo sapiens
cccatttcgcccctcgcgtccggagtccccgtggccaggcttcagtttcacattcttggtacctcctggtggtgcctggg

SEQ ID NO: 739037 - DNA, 82 bp, Homo sapiens
ggccttcgtacccgtcttgattgagatgtcgtgatctcaacagcttgtcacccaacagaaaacatcatcgcctctgctgcgc

SEQ ID NO: 739038 - DNA, 82 bp, Homo sapiens
agaagatgcagcacttacttttccagtccttttccaagatgtcatttatcaggtgtgatgaatgcagactctgctaccattt

SEQ ID NO: 739039 - DNA, 75 bp, Homo sapiens
aacaccgacaagctcatctttgggactgggaccagattacaagtctttccaaattcccaggactccggctctctc

SEQ ID NO: 739040 - DNA, 114 bp, Homo sapiens
atagcccccaagatggccgccaatgtgggatcgatgtttcaatattggaagcgatttgatctacggcgactccaggtgctggagaatctggtaaaagcaccattgtgaagcaga

SEQ ID NO: 739041 - DNA, 98 bp, Homo sapiens
ggaacaggcatcatggactgtgcgcccaagggatcatagacggtatttctatgtaaacgaacagtcgggcgagtctcagtgggagtttccagatggtg

SEQ ID NO: 739042 - DNA, 95 bp, Homo sapiens
aagcaagttaccaatgtctcttctccatgatcgaatccggcctcatcttccaccaacactttcttccaaatatcctgaagatgacccagactact

SEQ ID NO: 739043 - DNA, 100 bp, Homo sapiens
atcgccttcatcaaagccgtctctagcagtggcagtggactcggctccggaggtggcagttaagagatactttctagttgggagcaataatgcagaaacg

SEQ ID NO: 739044 - DNA, 51 bp, Homo sapiens
gccagtttggctgaaaataaaagtgataatagagtgacatccttcagagac

SEQ ID NO: 739045 - DNA, 71 bp, Homo sapiens
acaaagccgctccacctcccatgtcggcacagacccagggcccccaacacccgaagaagaactgtctgcag

SEQ ID NO: 739046 - DNA, 83 bp, Homo sapiens
agaaggccaaggctgcagaagccaaagccacgggactggtgattgcagctggaagtgcccatgaccgagctggcgtcctccgg

SEQ ID NO: 739047 - DNA, 91 bp, Homo sapiens
atgtacagccgctccatccagggccaccatgtctgcctcctggtgaaaaaggaagctcttcgtgggcggtcttgactggagcacgacccaa

SEQ ID NO: 739048 - DNA, 83 bp, Homo sapiens
tagataaagtattaggtcagccccaccatgagttagattccaagacgacaatgcagatcttcgtgaagactctgactggtaag

SEQ ID NO: 739049 - DNA, 83 bp, Homo sapiens
gacggtgcccggcgcccacgggacctgatggccaaaagaaaggaagaaaatttttcctctcctaaaaatgccaaaaggccaag

SEQ ID NO: 739050 - DNA, 48 bp, Homo sapiens
cagcccttctgaggagctcccaaacgatcagttcttaagagcagcccc

SEQ ID NO: 739051 - DNA, 138 bp, Homo sapiens
ctcgcacgttcggcagccccggcctggccccggcccctcctgcccatggcggtggccgagctgtacacgcagatacattccaccgttgatctgggggaaaagtggacacatccagacagccttgtatgggaagatggg

SEQ ID NO: 739052 - DNA, 100 bp, Homo sapiens
ctccgcggcggctgcgaaggcggcggctcctgccctctcgctttccctctcgcgtctctggctgcagcaattctgtggtgttcttggtcacacatttatg

SEQ ID NO: 739053 - DNA, 75 bp, Homo sapiens
gcctggcttcccagtgcatggcgctcaagtctgtgcgccttcttcagattattaaggaatcccagcagcagcatg

SEQ ID NO: 739054 - DNA, 50 bp, Homo sapiens
tgggatgtgaaaactctgttactgaaggtatacagaagatgggtgtccac

SEQ ID NO: 739055 - DNA, 100 bp, Homo sapiens
ctcggagtccgctggccacccagctgagaggagaggcgcccccggggacgccttatgtttgatcatcggccaaggtcctggcgagaactgcctctgcggc

SEQ ID NO: 739056 - DNA, 97 bp, Homo sapiens
gaacttcttatgaatcaaaaaagggatcagtgtccttcagtgatgtggctgtgggcttcacccaggaggagtggcagcatctggactctgctcagag

SEQ ID NO: 739057 - DNA, 74 bp, Homo sapiens
aggtgctcaggaggggcagcatgactccagggctcggaaggagcccctcagacttatctcagacagaggagaaa

SEQ ID NO: 739058 - DNA, 101 bp, Homo sapiens
gagtttggggtgttccaattcctgtgtttcatcataagaccaaggatgaatacttgatcaacaggtgtgagttcttgatacgaatgaaaggccaagagttt

SEQ ID NO: 739059 - DNA, 90 bp, Homo sapiens
ctatggggatccccctgaagagttaccagatttctccgaagaccctacctcctcagttgggacccctgattttagcaggatggcccaatg

SEQ ID NO: 739060 - DNA, 80 bp, Homo sapiens
tctggagtgcgtgggggaccggctgttggcggaaagaagatgctgatatgctacaacacggatgaacctggaggacgtgg

SEQ ID NO: 739061 - DNA, 82 bp, Homo sapiens
caatcccccactctttccgccctaatggaggtctccagtttcgggtcctgcagttctgagcttgggttccctttgcctggac

SEQ ID NO: 739062 - DNA, 100 bp, Homo sapiens
gacagagatgagtttgcagttgacacagctgggcaggagcggtaccggaccatcacaacagcctattaccgtggggccatgggcttcattctgatgtatg

SEQ ID NO: 739063 - DNA, 76 bp, Homo sapiens
cggcgcggaccccgcgtgcgccttgctcgcccgcagccccgagaccgcaggtgccgtggccagcacagaagtgaag

SEQ ID NO: 739064 - DNA, 100 bp, Homo sapiens
tacctccgagggaaacaagaaaacatcaaagaggtctagcaaaggcctgaccgccgctgcctacagagtcacactcaatcctccgggcaccttccttgaa

SEQ ID NO: 739065 - DNA, 75 bp, Homo sapiens
cagccccctgctccggaggctggtgcagagtcactgctagttggattgaagcacacctgccagatgattctaaag

SEQ ID NO: 739066 - DNA, 131 bp, Homo sapiens
gtcggaatcgctttaatagctggcattgctattcctgcaatgattattggcattcctgtgtatgtgggccgcaagtgcaagaagaaacacacgctgctgtgccccgactttgcccgcaggggggcgtgtcc

SEQ ID NO: 739067 - DNA, 50 bp, Homo sapiens
tgagctccgagaggtgaacagagcccctgcttgtagattttcagtggaaa

SEQ ID NO: 739068 - DNA, 98 bp, Homo sapiens
ggccgtggacacctgtgtcagcatgtgggacctggttctctccatcgccttgtctgtggggtgcactggcagtggccttgtcgtcgaagtctggcctt

SEQ ID NO: 739069 - DNA, 100 bp, Homo sapiens
ctcagcctcccgagtatctgggattacagcatgccccaggatttgtcagaggccctgaaggaggccaccaaggaggtgcacacccaggcagagaatgctg

SEQ ID NO: 739070 - DNA, 83 bp, Homo sapiens
gcggcccagctgggcgagtatctggaggagactggctcttcgtggttgtggtatgcctggctgccttcctcatcttcctcctc

SEQ ID NO: 739071 - DNA, 100 bp, Homo sapiens
cgcgcttttgctcctcctgaagtgtctttggtccaacgttgttccaggtacccgggctccacattcatggatcatgtgttacgctatcaggacactccag

SEQ ID NO: 739072 - DNA, 100 bp, Homo sapiens
caaaattcttcaagacattgcttcgggaagccatccatttagccagagaaaatgctgctgtgaagacccaattaaagctttcacataaatgaagctacag

SEQ ID NO: 739073 - DNA, 96 bp, Homo sapiens
tgtcacatctaggagcatctacccatggacagacatgtcttcccatggagataagaatgtgccttttgatgaaagaactttatctttctacaatga

SEQ ID NO: 739074 - DNA, 51 bp, Homo sapiens
ggactgcgccgcgtcttcctcaaggtgcctcaggaaccctgaagctgggct

SEQ ID NO: 739075 - DNA, 75 bp, Homo sapiens
cttgccccttttggaacagaaacagttgctgatcatctgggctgtgatccacaaacccggttctttgtccctcct

SEQ ID NO: 739076 - DNA, 75 bp, Homo sapiens
tcaccaccgccgtctccgccgacctggtgctggagaatctggtaaaagcaccattgtgaagcagatgaggatcct

SEQ ID NO: 739077 - DNA, 75 bp, Homo sapiens
agacaactctgcttttccagaaactgtgccaggatcacgtgtaccacatgaaggaagatggttgggtgaaagtag

SEQ ID NO: 739078 - DNA, 99 bp, Homo sapiens
cgctccggcctgggaggtgcgtcagatccgagctcgccatccagtttcctctccactagtccccccagttggagatctataacgaaggaggcccaactt

SEQ ID NO: 739079 - DNA, 136 bp, Homo sapiens
cgcaagacattgtttctctccctctgcccccccttccccacgcaaccccagatccatttacactttacagtagtaagcattaataatgtctttcatctttgagtggatctacaatggcttcagcagtgtgctccag

SEQ ID NO: 739080 - DNA, 100 bp, Homo sapiens
cagctttaaaggagatgcaggagaaaatacggcattgctaggaacatgcttaccctgctgatgaactcatgcctttaacctgtagaggtcgagttagagg

SEQ ID NO: 739081 - DNA, 100 bp, Homo sapiens
caatagggaaagtgaggcagctgcaaggagggcggcgggactgcactcgagtgtccagacctgctcgatggcacgggatgacatcctgaatggctctcac

SEQ ID NO: 739082 - DNA, 75 bp, Homo sapiens
cgggtgcgtctgccgcagagtcggcacctgaaggacatggaggtttcccaggcagctgcagacttgaaacagttc

SEQ ID NO: 739083 - DNA, 107 bp, Homo sapiens
cacctccattggatttaaaagacagtcctcgtcagcactgactttcagctatggaatcggtttggtgcacctcgatttggaggaagtagggcagggcccttatctgg

SEQ ID NO: 739084 - DNA, 76 bp, Homo sapiens
cgcgcctcgctcagctccaacatggatactatggaattcataagaagttttcagtcagaagcaccattaaagagag

SEQ ID NO: 739085 - DNA, 87 bp, Homo sapiens
tatggctggagattttgtgaatatggtggaaaaaggaatcattgacccaacaaaggatgaagatttgataaagtggaaggcactgtt

SEQ ID NO: 739086 - DNA, 98 bp, Homo sapiens
gagggaggaacactctctgaggaagcccaactcctatgagctcctctctggcaggattgcagttgtctggctagccaagccatcctgctgggtatact

SEQ ID NO: 739087 - DNA, 75 bp, Homo sapiens
ctccaaggtttgaaaagcagctggcctgcaagttcctctgtgacgagggtgcaggtatctctggggactacatcg

SEQ ID NO: 739088 - DNA, 100 bp, Homo sapiens
tatccctgtctcagcgaagtggtgaaagagcatcaggcaaagatgcaatctacacaatcccagtaaaaaacattcttgctgtggaaaaactggaagagag

SEQ ID NO: 739089 - DNA, 75 bp, Homo sapiens
ggttgctaagacttggcgaagcgctgcgctcgcgcccggatccctcaggtgttgcaccctggcctgctcgctcag

SEQ ID NO: 739090 - DNA, 83 bp, Homo sapiens
ggcggcgctggagagggggcgctgagctgttggggtggaagttaaacgagctgagcctcgggacagcaagagccaagcgccgg

SEQ ID NO: 739091 - DNA, 100 bp, Homo sapiens
catctgctgctgcctcttcatcctcttcctcttcctctcggagctcaccggatttataacgacagaagtctacaaaagaccccacagctgtagagagagc

SEQ ID NO: 739092 - DNA, 96 bp, Homo sapiens
cttgaatgtgttcaagaatgatcaggatacttgggactacacaaaccccaatctcagtggacaagggcctcggcttcacaggatggggctgccagt

SEQ ID NO: 739093 - DNA, 98 bp, Homo sapiens
ggagatcccaggcggtgacagagtggagccatggctagagtctgcgggccaggcatcgacatccgcaacgactatcagcagctgaagcgcctggagaa

SEQ ID NO: 739094 - DNA, 74 bp, Homo sapiens
aaccagaagcagattgccaacattgaccgtattacaaagccttcatggtgaaacacctcttggagtatacccag

SEQ ID NO: 739095 - DNA, 100 bp, Homo sapiens
gaatagtgcttgctgctgctggagctctctgatgtaaaggatggagtaaatcaagcagcacctgcatttggatttggcagcagtcaagcagcaacattta

SEQ ID NO: 739096 - DNA, 75 bp, Homo sapiens
ccgaacgatgtgcgagaactgcgcagacctggtggaggtgttaaatgaaaataagaccatcatcatgtggaaact

SEQ ID NO: 739097 - DNA, 75 bp, Homo sapiens
aattctgactcagccatttactaactgtgtgaccttaggcaacacttccccagatcaaaaggagccaacaccttt

SEQ ID NO: 739098 - DNA, 51 bp, Homo sapiens
tttgcgaaacttagagaattactgcttaggctggagtacaatggcgtgatc

SEQ ID NO: 739099 - DNA, 83 bp, Homo sapiens
gcctgcagcgggagctggacggcgagcgcgagcggcgcgagaaaacaggtgatttggcttctgcacagttaggaggagcacca

SEQ ID NO: 739100 - DNA, 50 bp, Homo sapiens
cagaaaccaacaggcagcacaggagggtcctccaccagcagcctggcccc

SEQ ID NO: 739101 - DNA, 51 bp, Homo sapiens
ccggaacaccctggaagccgagaaatgtgagtcagatggcaaccccagcac

SEQ ID NO: 739102 - DNA, 83 bp, Homo sapiens
gatctggtgtaccaggcgaagctggccgagcaggctgagcgatacgacgagacaagaggagcagcagcggcaccgcccctcac

SEQ ID NO: 739103 - DNA, 83 bp, Homo sapiens
aagacagttctgtctgcagaagcccattatggctgtaactggagatgacacaggaactgtggctgcaccatctgtcttcatct

SEQ ID NO: 739104 - DNA, 50 bp, Homo sapiens
ctgagagttgcattaaaaaccagcatgaccctgatgctcccataagacag

SEQ ID NO: 739105 - DNA, 82 bp, Homo sapiens
cgacgctggagtggggagaagcatcatggttcaacgcacaaatcctgaagagcccgtgggcgtggactgctcatctgtaaag

SEQ ID NO: 739106 - DNA, 100 bp, Homo sapiens
gtcggaggagaagctgcaggagaaagctgaaccttcacctagccccaggattacaaggaaaagcaccaggcaaaccaccatcacatctcattttgcaaag

SEQ ID NO: 739107 - DNA, 85 bp, Homo sapiens
ctgtgctcgcgctactctctctttctggcctggaggctatccagcgttgatgataattagaagcatgctttccactgaacttccc

SEQ ID NO: 739108 - DNA, 100 bp, Homo sapiens
tggatgacttctcagacggggatgtctttggcccagagctggacaccctcctggactcgctgggtatctcctctgagggtgatgctgacccagatggcgg

SEQ ID NO: 739109 - DNA, 80 bp, Homo sapiens
ttttgaaacttaaggatgggatacaggattactacagcatcccatttcccacacccactactccgctgactgggagggat

SEQ ID NO: 739110 - DNA, 74 bp, Homo sapiens
ggccacgccgcacctgcgcaacctcgccgtggccatgtgcagccgctaccacgaggtagaactaacattgaact

SEQ ID NO: 739111 - DNA, 87 bp, Homo sapiens
gtcttctgctgctggggatattacattaggaagtgttcatggataaaagaatcagagtgtctcaacccttgacaagaggaccaagtg

SEQ ID NO: 739112 - DNA, 75 bp, Homo sapiens
ggcaaaagcaatggggtcatcagccttggaaagaaactcagaagttctcatgagttcgaagcattcagcaaacaa

SEQ ID NO: 739113 - DNA, 75 bp, Homo sapiens
ttcgggtctacccctaatcaccactattcctgatcagagaactccagttgcttcaacacacagtatcagtagtgc

SEQ ID NO: 739114 - DNA, 75 bp, Homo sapiens
ggcttcaagcgttctcgaacccttgaggggaagttaaaggttaccacattctcatctggagccaggaggaagcca

SEQ ID NO: 739115 - DNA, 83 bp, Homo sapiens
ctgcagagatattctactccatctcattcattgtacagctctaagcgaaagacatgaggcctcagcctgaaatgaggttgttt

SEQ ID NO: 739116 - DNA, 90 bp, Homo sapiens
caacaccacaataatccacagccaagggacaggtgcctggtgctgctcttcctaaccctctcaacatgctggggcctcaggccagccagc

SEQ ID NO: 739117 - DNA, 82 bp, Homo sapiens
caggaaggagtttgagacactctgctcagagctgaccagggtaagtaaggaggtctctgtaccatggctcgtacaaagcaga

SEQ ID NO: 739118 - DNA, 100 bp, Homo sapiens
gtgatgctaagacatgtaaaatcaaagcaacttttcaatgtgcattaggagaatgttgtgaaaaatgccaactgaagtgagtagtgaatatagtatggac

SEQ ID NO: 739119 - DNA, 82 bp, Homo sapiens
gccggctgaggagcgccgctgcctcgcctcgacctccgcgctctggcagctcctcttccgtgtgctctcgccactccctgcg

SEQ ID NO: 739120 - DNA, 101 bp, Homo sapiens
ccggtcacacaaagcttcagcatgtcatgtggatgtaataggaaaagcactgcagtaccttggaacatttggtgaattgagcaacgtagagcaagttgtgg

SEQ ID NO: 739121 - DNA, 74 bp, Homo sapiens
ctttgaccaagttttgtttccccttctatgtggacagtcaaaccatttcgtgtgagaaaactgcttgatcttca

SEQ ID NO: 739122 - DNA, 100 bp, Homo sapiens
gcaatttgaagatacatgagacagcagccaaacccccagaacttcgagaaaccaagacctctgaatacttcagcctttcccaccatcctttagactacag

SEQ ID NO: 739123 - DNA, 75 bp, Homo sapiens
gctcaacgccaggcgccgctcctttacagatgaggacggggacttggttgccttttccagtgacgaggaattgac

SEQ ID NO: 739124 - DNA, 76 bp, Homo sapiens
gacatatgaaggactcattgatgaaatttatggcattcagaacagtgatgcagaagatggggaagaatatgatgac

SEQ ID NO: 739125 - DNA, 100 bp, Homo sapiens
agagaaatgggatgagatttcaattggctctttgcgtttccaggagtacaagcgcaagctagccagagtttccctggtgcgcaaagaactcaggtcccgg

SEQ ID NO: 739126 - DNA, 88 bp, Homo sapiens
agaaagatggccgggaactcgatcctgctggctgctgtctctattctctcggcctgtcagcaaatctgcgggccaggcatcgacatcc

SEQ ID NO: 739127 - DNA, 100 bp, Homo sapiens
ccaggaagcaattctggaagcgcagcaacagcaagctcccgggcagtggtgtccatgggctctggagaccatcagttcaacctcgcagagatcctgtcac

SEQ ID NO: 739128 - DNA, 110 bp, Homo sapiens
ccccgagaccccgtcggacccatggtttccagtgcagcgcggagtgggcgatgccagcgtgccaggtcaaaatgcagatcttcgtgaaaacccttaccggcaagaccatc

SEQ ID NO: 739129 - DNA, 82 bp, Homo sapiens
cttcgagaagcaggtcctgcagctgcagcaagagtgagccatggagctacgtgtggggaacaagtaccgcctgggacggaag

SEQ ID NO: 739130 - DNA, 121 bp, Homo sapiens
cagccacatactatccgtttgttcaggaaccaccagtgacagaggagaagagaagtttacctttattgagaaatgtaacaaccctcgttctgtcacattattgatcaaaggaccaaataag

SEQ ID NO: 739131 - DNA, 75 bp, Homo sapiens
gcggagctgggggccgactgcacctgcgggccccaggaaggaaacggtccccaggatcggctgagagccctggtg

SEQ ID NO: 739132 - DNA, 97 bp, Homo sapiens
aacatctcttcccagcggctcagtttttccagaaaggaggagtcaaggaagcccttagtgaacgagaactcttcaatgctgtttcaggcttaaacat

SEQ ID NO: 739133 - DNA, 83 bp, Homo sapiens
gttaatgtggtctcccatgtctcatattctctctcagcagttacagcagatggaagctgagcataatactttgaggaacactg

SEQ ID NO: 739134 - DNA, 100 bp, Homo sapiens
gggaaggcagcatggcacgctgcatggagccaaaatcgggtctgaggtggagccagctggactggaggaggtgatcacagatgctgtggctgggctgccc

SEQ ID NO: 739135 - DNA, 98 bp, Homo sapiens
gagagaatttccgtctgatctatgacaccaagggtcgctttgctgtacatcgtattacacctgaggaggccaagcctccacagctttccttgctgata

SEQ ID NO: 739136 - DNA, 100 bp, Homo sapiens
ctgagcacagcatcatcaaggacttcaccaagcaggtgctggagaatctggtaaaagcaccattgtgaagcagatgaggatcctgcatgttaatgggttt

SEQ ID NO: 739137 - DNA, 100 bp, Homo sapiens
attatacctcactattctcttgctcgatggctactctgtaatggcaggtttggacatatttgactcttttccccccaggttgaattgaccaaagcaatgg

SEQ ID NO: 739138 - DNA, 76 bp, Homo sapiens
ctctgatcgaaggggagtttccacagtgattgatgctgcctcagaaaaagcttgtggtgaaggggggcaaaaaaaa

SEQ ID NO: 739139 - DNA, 98 bp, Homo sapiens
agtaatcagtctttgacaagtgatgagaagctgtcggagcttcccaagtgggaatgtaagacggacttagatattgcatacaaatttggaaaaactgt

SEQ ID NO: 739140 - DNA, 100 bp, Homo sapiens
cgtggcaaaaccattctgatatctgctcatggaaatagcagtagggcactcctaaaacacctggaagttggagtcattcgttgcccagtttgcagccaag

SEQ ID NO: 739141 - DNA, 88 bp, Homo sapiens
aggagccactgagatgaggaggcgtcgcgcgcgcctgtagctcgcgggcctcgcaggatcaagcagaacaattctttagaagtggcca

SEQ ID NO: 739142 - DNA, 75 bp, Homo sapiens
cccagagcgtcagcagcctgttcggcgaggacaacgtgcgcgccgctcagaagggcaccctcatccagcatctga

SEQ ID NO: 739143 - DNA, 100 bp, Homo sapiens
tagagaccaaaatcatactttgaagacccagatgatgtggtaccagttggccaaagaagagcctggtgttggtgcatgtgctttggactagcatttatgc

SEQ ID NO: 739144 - DNA, 100 bp, Homo sapiens
cttagccaagagtctgggtctccgggccaacctgaggacaagtgtcccccagccccacctctccctggtgctgcaccctctgtggtgttgacagtgggcc

SEQ ID NO: 739145 - DNA, 75 bp, Homo sapiens
gccagactttaatgaagactatctagtgatacagttgatatattagttggatggcatatagatcatactcagaaa

SEQ ID NO: 739146 - DNA, 115 bp, Homo sapiens
ctccgtggccttagctgtgctcgcgctactctctctttctggcctggaggctatccagcatctgactgcagccatgagcagcaatgagtgcttcaagtgtggacgatctggccac

SEQ ID NO: 739147 - DNA, 113 bp, Homo sapiens
tcgttttatcctgatggtggagatcaggaaactgcaaagactgggaagttcttaaaaagctgctagcagaagaaagtcttcccacaaccccattttatttcatattgggaaaa

SEQ ID NO: 739148 - DNA, 100 bp, Homo sapiens
ccgagtcctagactgaagtcagtaggaattccagtattgtgtctaaattctgtggatgatgttttctcacccagtcatgatgggcttaggtcacgagcaa

SEQ ID NO: 739149 - DNA, 83 bp, Homo sapiens
ctgcccatcttgttactccctagcagtgtggtaagaaactgggagtgatttttccatgtttgaagctttgcgagatactattt

SEQ ID NO: 739150 - DNA, 74 bp, Homo sapiens
aaatactatgggtcatatttaaagggttcatcatttacaacccaacagcctcaggcttataaccttttcctgac

SEQ ID NO: 739151 - DNA, 108 bp, Homo sapiens
tcctgtcactgacaaatggacgctgcttccaacgaacatgagcacggggcggagctatgcaggatgattatttcagaaactggaatcccaacaagccctttgaccaag

SEQ ID NO: 739152 - DNA, 100 bp, Homo sapiens
ggggaacatggacatgaagaggaggatccacctggagctgaggaaccggaccccggcagctacacagagattgactggaaggcctacatggccgaggtag

SEQ ID NO: 739153 - DNA, 75 bp, Homo sapiens
ccacaataaaagagacctctacttagctcagcaattcttaccttgtcttgttgcagtaggagaaagagcacaaaa

SEQ ID NO: 739154 - DNA, 100 bp, Homo sapiens
gccagtggatccatatggaagaggatgtttggagtttaggctacagagcattcagaagaatgtcttccaagcaagccacctctccatttgcctgtgcagc

SEQ ID NO: 739155 - DNA, 75 bp, Homo sapiens
cccaaaagcaagcttgctgaaggggaggaagaaaagccaggtgatactgtgcttgtccaccgagttcacagttat

SEQ ID NO: 739156 - DNA, 82 bp, Homo sapiens
ctggagaccatggagaccctcacggagctgggcgacgagctgaccctgggagacatcgacgtggtgaccatcatcaagggga

SEQ ID NO: 739157 - DNA, 75 bp, Homo sapiens
ctggtctcaaactcccaacctcaggatgctttcattggatttggaggaaatgtgatcaggcaacaagtcaaggat

SEQ ID NO: 739158 - DNA, 75 bp, Homo sapiens
agtcagtcattaatgaccctgtgtgcaaaatgagttgataacaaccagaagttgacttgttagtgctgtgcttct

SEQ ID NO: 739159 - DNA, 100 bp, Homo sapiens
cggaggcccggccacctctgagaagggagacgacgctgctgggtccgctgagcggggcgacccgagatttgcttgtaaatgcatcacgaagaggcagccc

SEQ ID NO: 739160 - DNA, 75 bp, Homo sapiens
ccacagtgggattaaaaagaccactgaggagcaggtgcagatgaaggatttgggggcagagcacttggcaggtca

SEQ ID NO: 739161 - DNA, 101 bp, Homo sapiens
ctctactactgcttctccatcggcatcaccttctacaacaagtggctgacaaagggccaggactccacgctgggcttgagcctgaatgaaggggtgccggc

SEQ ID NO: 739162 - DNA, 75 bp, Homo sapiens
acaagccgcaacgtaaaatccttggaaaaggatcttcaacttgctgctgagcttgggaagacattactggatcgg

SEQ ID NO: 739163 - DNA, 50 bp, Homo sapiens
agcatgccctcagcgccatcggcgggggccggccccagcccagactggaa

SEQ ID NO: 739164 - DNA, 87 bp, Homo sapiens
atcaaccaggagctctgccggctcaacacgatggacttactgctggtgctggagaatctggtaaaagcaccattgtgaagcagatga

SEQ ID NO: 739165 - DNA, 100 bp, Homo sapiens
caggataataacgggaccatcattcctttccggaagcacacagtgcgcggggagcgttcctacagggccgttgctccagggagaactgcaaatatcttca

SEQ ID NO: 739166 - DNA, 89 bp, Homo sapiens
acttgacatagagattccaaaacatattcccgaaaggaacgtcaaggtcgtgggaaataaaaggcagttctacacagactgcagcaacg

SEQ ID NO: 739167 - DNA, 100 bp, Homo sapiens
cgaggaggccttcgaggctctggagtcctccacggctacgcttcttggacacttaatgattgttggcaagaaatgtgctgctgatctgggcctgaataag

SEQ ID NO: 739168 - DNA, 83 bp, Homo sapiens
ctctttggaaaattcccttatcgatattatgagagcagagcatgatcctcttaaggttgttgacctcctgtactggagagaca

SEQ ID NO: 739169 - DNA, 87 bp, Homo sapiens
gagcgcgcggcggacgcgcccgggacgcgcggcggcaccgggaggccgggccgagcggagtacatcgatgcccaccctgagaccatc

SEQ ID NO: 739170 - DNA, 90 bp, Homo sapiens
ctcagaagacagagggttttcttttgaggttcgatacaagaggctgttttcctagcgtggcttgctgcctttggtaagaacatgtcgtcc

SEQ ID NO: 739171 - DNA, 100 bp, Homo sapiens
tcatttccttctcagtactggacccatttatgaggaggtggcttatgaaagtgtgatgttcgcgtatttcttgacagatcattgagactgaaaatatgat

SEQ ID NO: 739172 - DNA, 80 bp, Homo sapiens
agctttgcctgtgagaggaacaagcgtccctgatccagaaggtggtgcagattcactttataggaacagcttcagcttca

SEQ ID NO: 739173 - DNA, 99 bp, Homo sapiens
gtttaataatgatagaatgaagaccacaataaaagagacctctacttagctcagcaattcttaccttgttttataggatcacattgacaaaagtaccat

SEQ ID NO: 739174 - DNA, 75 bp, Homo sapiens
ggttcgttaccccattgaaagaagctctggaaggatcttgtgctgtgaagacatttcccaagtgcttcatgttag

SEQ ID NO: 739175 - DNA, 100 bp, Homo sapiens
cgagggatgcggagagaccatatatgtcattgggcagggatcagaaatttccatcgtgaagcctttaatcatcttacccaaggctctaacaacctgggta

SEQ ID NO: 739176 - DNA, 73 bp, Homo sapiens
gctcatcaagcagcaggtccttaagtgcctgatttgagatggggtcccaggtctcggtggaatcgggagctct

SEQ ID NO: 739177 - DNA, 95 bp, Homo sapiens
atgactttttctgctagagtgtctagtgaatatcagctcctgggtcatttttctccctgaggacaacctgaggcaagataacccctgtgacagaa

SEQ ID NO: 739178 - DNA, 82 bp, Homo sapiens
cccacactaacgagttcatcacctggagccaggaatcacaaccaagatctggtttgttacagtcttcagtaattacagtcta

SEQ ID NO: 739179 - DNA, 80 bp, Homo sapiens
acacgacgtgcgctatgggtcagggtttgaaattcctgatatagatgctgaaaagttaatgtgtccacaagaaattgtag

SEQ ID NO: 739180 - DNA, 100 bp, Homo sapiens
gtcgaccccggcccggaggaggctcatgcgggatttcaagcggtgacagagctgaatgaacctctctccaatgaagatcgaaatctcctctctgtggcct

SEQ ID NO: 739181 - DNA, 100 bp, Homo sapiens
ctgtcctttgttttggattacataaaccagtcacccaagtgcattgcctttggaaacgagctgctgctgttcttgaagggtttttcagagtcggagagga

SEQ ID NO: 739182 - DNA, 100 bp, Homo sapiens
ctgacacgtattgtctcaagattaaagggcagccattctacaaaagtggaagctgtggtcagaactctgatgaaaatacagcttagagatccaggggcca

SEQ ID NO: 739183 - DNA, 88 bp, Homo sapiens
gaccccagacaccggagactgggaaatggcccttgatgagcctccctatttgacagtgggcactgatgtgagtgctaaatacagagga

SEQ ID NO: 739184 - DNA, 92 bp, Homo sapiens
gccgccgccgccgccatgaacaactcgggcgccgacgagatcggactgattcttgctattccaaatcctcttccacgttgacagcccttcag

SEQ ID NO: 739185 - DNA, 74 bp, Homo sapiens
ccacatggagacccattcagataacccactaaggtgtggacactgccagcggctgcagccgacttggaatgacc

SEQ ID NO: 739186 - DNA, 82 bp, Homo sapiens
cggctgctgaggggctgcagcgggtttttagaacttcagccataaaaatgggcagaattttccttgatcatatcggtggtac

SEQ ID NO: 739187 - DNA, 98 bp, Homo sapiens
gagaaccatgctcaccgacccttggtgaagcagcgcttgcagatgtacaactcgcagcaccggtcagcaatcagctgcatccggacggtgtggaggac

SEQ ID NO: 739188 - DNA, 98 bp, Homo sapiens
cactatgtcattgggccaaagatagagattccggtacattatgcagctctgtcagctgcagagaaggatgcacacactgtggcaggagcacttcaaac

SEQ ID NO: 739189 - DNA, 78 bp, Homo sapiens
aattctttcgaggattaaatgctccctttcccaatggtagttttgtgaatggctttaattcgccaggatcttataaaa

SEQ ID NO: 739190 - DNA, 89 bp, Homo sapiens
gagcggcggctccggggcagctccggcgggcgaacccagcccttgctgacatctacacagagcacgcccatcaggtggtggtggccaag

SEQ ID NO: 739191 - DNA, 75 bp, Homo sapiens
tggaggaggacgaggcgggcgagggcgccctgcgtccggcagaggaggcgagcatcccgctcaggtgatgaggaa

SEQ ID NO: 739192 - DNA, 100 bp, Homo sapiens
gtgcctttgaaaatcaacgacaacttgagcacaggtgaatctggattgggaaagtcgacattaatcaactcattattcctcacagatttgtattctccag

SEQ ID NO: 739193 - DNA, 110 bp, Homo sapiens
cccggagaaggtctacagagcggcctgcgccagcgagttgatgccggcccaggatggatcagacctgtgaactacccagaagaaattgtctgctgcccttttccaatcca

SEQ ID NO: 739194 - DNA, 122 bp, Homo sapiens
atctgaaggagcacctgctgcacggcaacatgaccagcagtgacatcctcctgtgctacaccacgacaatgcagatcttcgtgaagactctgactggtaagaccatcaccctcgaggttgag

SEQ ID NO: 739195 - DNA, 75 bp, Homo sapiens
caagaatagtgcttgctgctgctggaggtctgtgaggaacagaagtgcgaagaagaggtcttccctctggccatg

SEQ ID NO: 739196 - DNA, 100 bp, Homo sapiens
aagccaagaggaggacagttcgctacacagcaatgcatcgagacagccgctcaggaagcaatcttgcatgcgtctggaaatggcacaaccaaggactact

SEQ ID NO: 739197 - DNA, 100 bp, Homo sapiens
cccagacccctcagcgtctggcatctgttgcagtgtaggattttggaagtcctccctccatcacatcaaaatggttttgctaatggacatgttaacagtg

SEQ ID NO: 739198 - DNA, 100 bp, Homo sapiens
aaagctgaaggcaactatggatgctgggaaactgatgatgaggacagtgattaccaccaggaggcctacaaggagtcctacaaagaccggcggcggcgcg

SEQ ID NO: 739199 - DNA, 75 bp, Homo sapiens
agcccggagaaatccgtgcagatccagaatgcgctggcatcgtcatcagacagtgaggaggacccagaagccttg

SEQ ID NO: 739200 - DNA, 100 bp, Homo sapiens
gaccgccatgcctcgccttggcgctttcttcctggagcggagcgcaggcgccgagactgacaacgcggtcccacaggtttcattgaaaacagatcctgca

SEQ ID NO: 739201 - DNA, 82 bp, Homo sapiens
ccccatgtaccacacctgtgtggccttcgcctggccttcctacagcaacttcccactccaggtggccagacgggagttccag

SEQ ID NO: 739202 - DNA, 101 bp, Homo sapiens
gcccctcaggccggggcgcgaccgcggatccgcagttcccgggccagcctggggcggccggccaggaaccacccgttaagaatgaagtccctgaggtgaag

SEQ ID NO: 739203 - DNA, 99 bp, Homo sapiens
gtcgacgccatcatgaccacggcccagaggcataattatgataagacatttctcatctggataaatgaggaggatcacaccagggtaatctcaatggaa

SEQ ID NO: 739204 - DNA, 51 bp, Homo sapiens
gcaccatggaggaggacgacagctacgttactccacaggatccgctgaaca

SEQ ID NO: 739205 - DNA, 50 bp, Homo sapiens
agaagagcgccaggcgccgcgggggtcgagtctatgctgtcttgtcaaag

SEQ ID NO: 739206 - DNA, 75 bp, Homo sapiens
tggaccgtgctagtgacctgactgatgccttcgtggaggagaatggtgttgaacgcgtgtgtcctgagagcctgc

SEQ ID NO: 739207 - DNA, 105 bp, Homo sapiens
ggaacattcacaggaggatagagaacggggtttacatatgaaattagaccatgtactgccaaatctgtcgaaagggagataatgaagaactgcttcttctttgtg

SEQ ID NO: 739208 - DNA, 101 bp, Homo sapiens
cactggacatcctggtacagttggacctgctggcattcgaggccctcagggtcaccaaggccctgctggtgctcgtggaaatgatggtgctactggtgctg

SEQ ID NO: 739209 - DNA, 100 bp, Homo sapiens
taaagtcacccggcggccaaaggccagtgactaccaacgtttggaccagaaggtttgctggttggctcccgagcagacagcaggaaagaagaagcccttc

SEQ ID NO: 739210 - DNA, 100 bp, Homo sapiens
aggagaaaaaccagctggagattgagagactggaggagcaggtgccatgcctctgcaactcctcctgttgctgatcctactgggccctggcaacagcttg

SEQ ID NO: 739211 - DNA, 73 bp, Homo sapiens
aggcatcaccctcaagagctgccggagacaggttatcagtgagctgaatggaaaaaacattgaagacgtcatt

SEQ ID NO: 739212 - DNA, 75 bp, Homo sapiens
caccaccaccatctccatcacccaccaacaacaccacaataatccacagccaagtatcaacaacctgcaggctga

SEQ ID NO: 739213 - DNA, 108 bp, Homo sapiens
ccaagcggagaggccgggcgtcttctgagagtcagatcgaaattgcccagaagcatcctgatatctatgcagttccaatcaaaacgcacaagccagaccctggcacgc

SEQ ID NO: 739214 - DNA, 51 bp, Homo sapiens
gagcaggcttgcaatattaaagcttcccagctggcgtgtatgttgtaaaga

SEQ ID NO: 739215 - DNA, 100 bp, Homo sapiens
gtggttcggccgcggcgaccccactccggcggcgcgtcccccgagcttgatgctgtgtgctgtggacccacctggggttcatggagtgggccacggggcc

SEQ ID NO: 739216 - DNA, 74 bp, Homo sapiens
aagctgacccttggcctcatctggacaatcattctgcacttccaggagccttcacgtaaatgggtccagtcatg

SEQ ID NO: 739217 - DNA, 132 bp, Homo sapiens
gcgggaagacgcggcggcggcggcggaggatgagcctgcagagcgcgcagtacctccgatcccactgtcaaccgatatcatgtgcggtggtttcctgaagcgtgtgcccacaacagaacaaccggatcagag

SEQ ID NO: 739218 - DNA, 96 bp, Homo sapiens
tgcggcgcggggaccgctgtgctctcgcgagcagatcagccggcggcagtctcaggtggaccgcctgtacgtggcgctcaaggagctgggtgagga

SEQ ID NO: 739219 - DNA, 75 bp, Homo sapiens
gccacaaagtgaccaagaacgtgagcaagcccaggcacagccgacgccgcgggctggtcagtgagaaggtcggag

SEQ ID NO: 739220 - DNA, 99 bp, Homo sapiens
gtgccttctctactgatggcagtgttttagctgctgggttcctccccgggcagaagaaatcaccattccagctgatgtcaccccagagagagttccaac

SEQ ID NO: 739221 - DNA, 75 bp, Homo sapiens
ggagaaggaggtcgacgaggacacgacagtcacaatcccctcggccgtagatgacctgatcagagccatcaagaa

SEQ ID NO: 739222 - DNA, 90 bp, Homo sapiens
acagaagctcagagaagtgaagcaacttgcccagctatgagagacagagccaggatttgaaaccagaattagagcccattgggaacgatg

SEQ ID NO: 739223 - DNA, 104 bp, Homo sapiens
tcacaatgagaccaacacagacacgaaggttggaaataataccatccatgtgcaccgagaaattcacaaggctgatttaaactgcaatattcaagatgatgctg

SEQ ID NO: 739224 - DNA, 100 bp, Homo sapiens
gacggcctcagcaggcggggaagatgaaagggatatggaatattatcttgtaaaatggaaaggatggccagattctacaaatacttgggaacctttgcaa

SEQ ID NO: 739225 - DNA, 100 bp, Homo sapiens
catgaatgtgaggagggtggaaagcatttcggctcagctggaggaggccagctctacaggcgttcctggcagacatggaaaataatgtactttttcggga

SEQ ID NO: 739226 - DNA, 80 bp, Homo sapiens
aaggcaacatcctgtcacaggccatgctctggcaaaaacgttgccaacttggcctgttccatctcaaataatgaagaagg

SEQ ID NO: 739227 - DNA, 50 bp, Homo sapiens
tttctttctccaacaagaaactcctcggtgtgcttctaaaattggggata

SEQ ID NO: 739228 - DNA, 80 bp, Homo sapiens
ggcggagatcgaggccatccaggaaagcctgcagccctctgggtagatatggattcccagtttctccagcggccagtgct

SEQ ID NO: 739229 - DNA, 76 bp, Homo sapiens
aatcattgaagtgcttggagtgcagaactgaaagagaacattgtaacccaccttgtcaacatggtggcacatgctt

SEQ ID NO: 739230 - DNA, 101 bp, Homo sapiens
ccatcggaggacctccctgccctgtataccgagggaacagacctagaggatcaagacataatgggagcatttttagacaagccaaagatggaaaagcataa

SEQ ID NO: 739231 - DNA, 100 bp, Homo sapiens
ttttggtttacagttggctgatgattccacagataacccagaataattccggctaatgggaagatgactgtgactattaagtttacaccctttcagtatg

SEQ ID NO: 739232 - DNA, 73 bp, Homo sapiens
ctttgtgcagctggccctccagctggcgcactacaaggtggccttgcccagcaagaatggagagtgcctgaac

SEQ ID NO: 739233 - DNA, 100 bp, Homo sapiens
gtcagctcaggacagtcggcggcggaagaaggagtacattgatgggctggagagcagcagcagtgagcggggttcccggagaggccagcgtggggacagc

SEQ ID NO: 739234 - DNA, 80 bp, Homo sapiens
gaaagatctaccttctggaagctactactacgtggtgcttggaaaggtacactgaggaggggacggctccgtcttcacat

SEQ ID NO: 739235 - DNA, 55 bp, Homo sapiens
gaagccgcaaccagagccgccgccacggtttggtgcacctcgatttggaggaagt

SEQ ID NO: 739236 - DNA, 75 bp, Homo sapiens
gcgaagctggccgagcaggctgagcgatacgacgttggtgtaatacggtgcccagtatgccgccaagaatgcaga

SEQ ID NO: 739237 - DNA, 75 bp, Homo sapiens
tggagacatccgctaaaacatcaatgaatgtaaatgaaatattcatggcaatagtagagacggggttttaccatg

SEQ ID NO: 739238 - DNA, 98 bp, Homo sapiens
gcgtgctgcagtgggaccgcaagctgagcgagctgtcagagcccggggacggcgaggccctcatgtaccacacgaggatgatgtggacctggaagccc

SEQ ID NO: 739239 - DNA, 51 bp, Homo sapiens
tcgcagtggtcgcttcttctccttgaaaagcagcatctgttatagcaaaat

SEQ ID NO: 739240 - DNA, 100 bp, Homo sapiens
gctgcttaaggtcggtgagctgagctgagggcattaagtgcaccaattccagctggacatcactgtgaaaatgggacgggataaagtccgagaaatgttt

SEQ ID NO: 739241 - DNA, 90 bp, Homo sapiens
ctggattttgagactgttggagacatcattgccatcattgaggacaaggaagagagaagggcacagttacctaagtatcaacgtaatctt

SEQ ID NO: 739242 - DNA, 51 bp, Homo sapiens
ccgaagcgttcgtatctggaagccaagcagcatgagctgatgacactggat

SEQ ID NO: 739243 - DNA, 98 bp, Homo sapiens
tggaaaacacattcattcataacactgggaaaacagacacttctgagaaattcatcaggctgtgaagcgcgccgtgatgaatatcgaacagagtttac

SEQ ID NO: 739244 - DNA, 50 bp, Homo sapiens
ggccatatttgataaacaggaacttgagggtgatcagcccatgacctaaa

SEQ ID NO: 739245 - DNA, 75 bp, Homo sapiens
ggagatcatgccccgggcgctgtccacgcgctgtgtcagcggagtctgaaagaaatgaccgcccggatgtgccac

SEQ ID NO: 739246 - DNA, 100 bp, Homo sapiens
gaggctgcggagccccaggaggggtgtacaactatgagcctttgacacagctcaagaatgtcagagcaaattactatggaaaatacattgctctaagagg

SEQ ID NO: 739247 - DNA, 90 bp, Homo sapiens
gcccggggccgtgcgctctcgggccactcggccgcagagctggagtggaccagagaaattgcttgctttagatgaactcattgatagttg

SEQ ID NO: 739248 - DNA, 96 bp, Homo sapiens
caggtctgcaaaagatgattttacatccattattgggaaatgtcaaggtgaccaagaatatggcccaggtgaccaaagccctggacaaggccctga

SEQ ID NO: 739249 - DNA, 100 bp, Homo sapiens
tattgcacagtgagagagtctgtgatatcattctgccccgactacaggtgcctgatgtgttgccagtgttgccagacctcccgttacccgcgatacaggc

SEQ ID NO: 739250 - DNA, 75 bp, Homo sapiens
tgaatatcgtaagcgcacgtttaaacatctcaagatccagacatttaatgtggatgcaccatgccagaccgtgga

SEQ ID NO: 739251 - DNA, 98 bp, Homo sapiens
ctgaagaaagcatcgtcctaggaatggatttctcctctaatgacagtagtttatgccaacgtgacttcattcatacagatgaaccaaggatcgggata

SEQ ID NO: 739252 - DNA, 74 bp, Homo sapiens
gacgacaataagctcttcagggaggaattcaacgtcgtcacgctgtggtacagagcacccgaagtcttgctcca

SEQ ID NO: 739253 - DNA, 89 bp, Homo sapiens
tcgggcagaggcgacctccccgcgttccatgcgcacagggacaggggcacgttgcccctggcctcgcaggagtcggccgtggtggagga

SEQ ID NO: 739254 - DNA, 100 bp, Homo sapiens
tccctgcagtaccctttaacggacatggatttgattgacatactttggaggcaagatatagatcttggagtaagtcgagaagtatttgacttcagtcagc

SEQ ID NO: 739255 - DNA, 98 bp, Homo sapiens
gcagctggcgcagcccacgctcatgatcgacttcctcacccgcgcctgcgacctcgggctgggttacgacccctacaaccctgagctgcccaagcccc

SEQ ID NO: 739256 - DNA, 100 bp, Homo sapiens
aactcgagaggaccaacaagttcatcaaagagctcattaaggacgggaagaacctcatcgctgcgacgaaaagtcaaaatgcagatcttcgtgaaaaccc

SEQ ID NO: 739257 - DNA, 71 bp, Homo sapiens
aatgacaacatcatcttctcagaaggaggaatgccagctcctgagcaggcctcattggtggaggaggggca

SEQ ID NO: 739258 - DNA, 101 bp, Homo sapiens
gttttctgtcttcatgagtcaaaatttgaagaggaaaggatggtggctgggtggttgacaaattactctcaggaacaagctgaaagctggatacctaatgt

SEQ ID NO: 739259 - DNA, 95 bp, Homo sapiens
tgtcactcggcttcttgaggaggagtcagtgacctttgaggatgtggctgtttacttcacccagaatcaatgggccagcctcgaccctgcgcaga

SEQ ID NO: 739260 - DNA, 96 bp, Homo sapiens
ctctggcccccggaaaacctaaccatgaagacttgaacttaatacagcaagaaagaccatcaagtttaccagtctctaattaacagaagatggcaa

SEQ ID NO: 739261 - DNA, 82 bp, Homo sapiens
caacggcaaagttttgcagatcttcaacaagaggacccaggagaaattcgccctcaaaggcacacgtgtttcacgttgacag

SEQ ID NO: 739262 - DNA, 50 bp, Homo sapiens
tggctgtcagcctggtgctcctctatctgacctcagcagccatgtcgaag

SEQ ID NO: 739263 - DNA, 90 bp, Homo sapiens
ctgcccatgctgagcgcctctcacacagcacatcaaccccgtggccgcctccctcatccagaagatgcttcagacagatcccactgcccg

SEQ ID NO: 739264 - DNA, 100 bp, Homo sapiens
ccggggaccaggacagtcgcgaggttcgagtgttgcagagcctgcggggcaagatctttactccacaggatccgctgaacataggatgttgccacaaaat

SEQ ID NO: 739265 - DNA, 100 bp, Homo sapiens
gacacagaagagacccgggtgaatcagctgtttgcacaagcaaaggcctgcaaggtgctggtggagaaatgggccacgcctggctgaaagatgacgaagc

SEQ ID NO: 739266 - DNA, 100 bp, Homo sapiens
ctggattgtagctgcatatgcccattttgctgtgtgttacaggacgctgccaaggtctgcagagaattcaccgagcgtgagcaaggagaagtccgcttct

SEQ ID NO: 739267 - DNA, 82 bp, Homo sapiens
gtttccgttaagctggacaacaggtctcctctgagcctccggcctccataagacccaaaacagatgacacctcttcccagtc

SEQ ID NO: 739268 - DNA, 76 bp, Homo sapiens
aacctcttttccatcatgtatactggagcaccgttcctgagaaacatctttgtcctcacctgcatcatcatcgtct

SEQ ID NO: 739269 - DNA, 100 bp, Homo sapiens
gacgagctgtggggatctggcactgtggttcctgcatgaagacagtggctggcggtgcctggacgtacaagaccagaggagcgagagcagcaagaaccac

SEQ ID NO: 739270 - DNA, 95 bp, Homo sapiens
ctccccaggacctgagcaggaacctggagttttcaggtttagcatttgctctgctggtcgacattcccccagtctatgggttgtatgcatccttt

SEQ ID NO: 739271 - DNA, 148 bp, Homo sapiens
ctcagtcacctgtgtggtcgcagtgctgccatggacctgggacccatgcgcaagagttaccgcggggaccgagagacctagtgaaaccagtgtgtctgcccaacccaggcatgatgctgcagccagaacagctctgctggatttccgg

SEQ ID NO: 739272 - DNA, 74 bp, Homo sapiens
agagggtgtttccgaggtgctcgacagtaggtatttgggaataagatgatcattccttccctggatggagccct

SEQ ID NO: 739273 - DNA, 75 bp, Homo sapiens
gctggaaggggccagtctggagacagtcaagccatttccccaaaggaatgtcttgcatattactgacatttggta

SEQ ID NO: 739274 - DNA, 100 bp, Homo sapiens
cagagacatggtaaaagaattatctgacattatccatgagcagcactggaagaagtacgacatctatgagaagcaaaccaaggaggaaaccgactctgta

SEQ ID NO: 739275 - DNA, 75 bp, Homo sapiens
tttttccttgagctgaacgtcttgcaacagtggccgcacgcataggtgctggagaatctggtaaaagcaccattg

SEQ ID NO: 739276 - DNA, 95 bp, Homo sapiens
caattatttcgagagtcaaaatgtggatttccgaggcaagaagacctccaagaagctggtgaactcggtggctggctgtgctgatgacgctcttg

SEQ ID NO: 739277 - DNA, 90 bp, Homo sapiens
caaatgtttgtccactgagctgatctcctctctggagcaccggggccaccaggagggaggatcttttgccagaaatgagggcatactggc

SEQ ID NO: 739278 - DNA, 83 bp, Homo sapiens
gccatgtgcaggaccctaacgacaggcgcctccggcccatttacggttcaagaacatgaagactcgggtgactcagaagtgga

SEQ ID NO: 739279 - DNA, 90 bp, Homo sapiens
ggggaatccggaagggacacgctgaacaggtgctggagaatctggtaaaagcaccattgtgaagcagatgaggatcctgcatgttaatgg

SEQ ID NO: 739280 - DNA, 82 bp, Homo sapiens
tcaccaaagcctgccgggagctagaactcaaggtgcccctggtggtccggcttgaagcggttgtggaacaggaaatgaaaaa

SEQ ID NO: 739281 - DNA, 100 bp, Homo sapiens
attgcaataaaatagaacttccaactactgaggcggggtttcaccatgttgcccagactggtcttgaactcctgagcttaagcaatccacctgcctcggc

SEQ ID NO: 739282 - DNA, 50 bp, Homo sapiens
aaggaagacttgtaacctggagaagaggatggcacatttcctagaggcag

SEQ ID NO: 739283 - DNA, 83 bp, Homo sapiens
gaatcaactgagagagatgcttaaaaatcaccagttactttaatgatgttcatcatttgccacttaagctacttgcagtcacg

SEQ ID NO: 739284 - DNA, 82 bp, Homo sapiens
tgggcacagacaaggagctcagtgacctcctggacttcagcatgatgccatggacaatattaccaggcagaaccaattctac

SEQ ID NO: 739285 - DNA, 75 bp, Homo sapiens
cctcggccccccaatggacagtctcccattgcccttgcttcaggacagaggtggtggagcttcagcagaccctgg

SEQ ID NO: 739286 - DNA, 100 bp, Homo sapiens
ggactacgacgtccctcaaaccttgcttctaggagataaaaagcaaattgtggctactaatttgccccctgaagatcaagatggctctggggatgactct

SEQ ID NO: 739287 - DNA, 74 bp, Homo sapiens
aaagtctctcttcaccctgccgtcatgtctaagtcagagaacaatgctaaagtagctgtgctaggggcctctgg

SEQ ID NO: 739288 - DNA, 80 bp, Homo sapiens
atatgaactatgataagctgagcagagccctgcgatactattatgacaagctgtcaccactgactaaagaagagaaaact

SEQ ID NO: 739289 - DNA, 100 bp, Homo sapiens
ggcctggctaactcctgccaggcagtgcccttcccggagcgtgccctcgccgctggaggaagacagcgaacccctcccaccacaggatgcccagacctct

SEQ ID NO: 739290 - DNA, 98 bp, Homo sapiens
acgccaggacccactggaagcctagaaatgggaaaaagacctcgatgaagttctgcagacccactcagtgtttgtaaatgtttctaaaggtcaggttg

SEQ ID NO: 739291 - DNA, 100 bp, Homo sapiens
gcggatgaggaccggagcggaaaaccttctgaaatatgaattgagaattcgttatttgccaaaaggatttctaaaccagtttactgaagataagccaact

SEQ ID NO: 739292 - DNA, 87 bp, Homo sapiens
tggaagcagccgatccagcctgcggagcctgtggggcagagataatcattcaggtcttcgtgagctaaggccaaacaaacaaaaaac

SEQ ID NO: 739293 - DNA, 114 bp, Homo sapiens
agtgcaaccttcttctgagttctgtttctattgccttgggaaacactggctgacatgggagatgaagtttacgatgatgtggatacctctgatttccctgtttcatcagcagag

SEQ ID NO: 739294 - DNA, 111 bp, Homo sapiens
gtatggaaagcatacagttggactgagaaactgatcttacctagccatatggcctgctgcctctgccaacttaaaaacagcattgaggctgtctgcaagacagtcaagctg

SEQ ID NO: 739295 - DNA, 75 bp, Homo sapiens
catttaatgcataaaaactgcaatcatttttcttcagctttatcagagtgctgggattacaagcgtgagctacca

SEQ ID NO: 739296 - DNA, 100 bp, Homo sapiens
ccgccactacctcctggctgccgtgaataggcagcctaaagggtgtcgtagtcattcttcagcacaattcttaattggagaccaagaaccctgggccttt

SEQ ID NO: 739297 - DNA, 83 bp, Homo sapiens
tggagctgggtcagtccgccgctcaccccgcggccgcaccttcccgccttctcagggcgaagctgtgctcaggcccgggctgg

SEQ ID NO: 739298 - DNA, 75 bp, Homo sapiens
ccaacaatgagcaactgcccatgctgggccggcgccctggggccccggagagagaggctgctctgccatacgcgg

SEQ ID NO: 739299 - DNA, 101 bp, Homo sapiens
tttcaggtcatgtgcacagattaatggctggatccatggcagtacagaacctgctaaggccatcaaacctattgatcggaagtcagtccatcagatttgct

SEQ ID NO: 739300 - DNA, 73 bp, Homo sapiens
gtggagcaggtcctgagcctcgagccgcagcacgagctcaaattccgagttagcatgtaaatactgggctccc

SEQ ID NO: 739301 - DNA, 98 bp, Homo sapiens
gaaaaaccgcgaagtcatggggctctgtcgggaagtgaatgaactcattcttaaacagaagcaaagatttgaggaaaagaggttcaaattggaccact

SEQ ID NO: 739302 - DNA, 100 bp, Homo sapiens
ccagaagagaggtatcagaagcttaaaaaggcagaagctcctcctggggtagagacagatcttattgatgttggattcacagatgatgtgaagaaaggag

SEQ ID NO: 739303 - DNA, 50 bp, Homo sapiens
gggccagaggattcaggcacaggaagaactcccccactggaaaggattct

SEQ ID NO: 739304 - DNA, 100 bp, Homo sapiens
tgatcccaagttgtcgacgaccgacagggtggtgaaagaggatgaggaagatgaggaaatggtggaatctaaagttggccaggactcagaactggaaaat

SEQ ID NO: 739305 - DNA, 100 bp, Homo sapiens
tactcgcagcacttggagcgcagaaccggccgcgcccgcttctgaaagttctgctgaagacagtgagcaggaagatgagagaggtgctcaagacatggat

SEQ ID NO: 739306 - DNA, 75 bp, Homo sapiens
ctcagagcacttgaacttcaggccatcacaaccttctattattgtcactctgatgccagtatggactggagatga

SEQ ID NO: 739307 - DNA, 75 bp, Homo sapiens
tgtctacacacttctgatgacacctttattttaaaagctgatgttccaaggtccctgactatggctccccagagc

SEQ ID NO: 739308 - DNA, 75 bp, Homo sapiens
aacaaaaaatcactgcattacatcagcagaatgttgtaccatctttgggtaggcagacttccctgacgacatcag

SEQ ID NO: 739309 - DNA, 82 bp, Homo sapiens
catgtcctcctgcatctcctcctgctccccatcgccatcccctatgcaggttctcccagcagagatgtgggtccttccctgg

SEQ ID NO: 739310 - DNA, 75 bp, Homo sapiens
aagtgggctttgctctgccaaatccacagtgaatccagacagaaagtgaaagtacagctggcaagatctggaccc

SEQ ID NO: 739311 - DNA, 101 bp, Homo sapiens
tggcccctcaggtcccgctggtgaagttggcaaaccaggagaaaggaggcatttcatccttcatgaagccattcaggattttgaattgcatatgagtgctt

SEQ ID NO: 739312 - DNA, 100 bp, Homo sapiens
acacaacgagggacctgggtctacgataacgcgcttttgctcctcctgaagtgtctttggtccaacgttgttccagctgctgcagaagaatattttgcct

SEQ ID NO: 739313 - DNA, 98 bp, Homo sapiens
gggcttggaatctcgagcgggaaaagttgctcatgtgcggcctcggtgatgtggatgtgaatgactggagacagcattctatttacaagaacggctac

SEQ ID NO: 739314 - DNA, 95 bp, Homo sapiens
cacagcatccgggacctccagcgactcctggagatagactcctaagcccagaggtctccaccccacgggaggaaggctgaggccaagaccccgga

SEQ ID NO: 739315 - DNA, 87 bp, Homo sapiens
tgactgccctctaaaggaagagttgctctaggtcgtaaccagcctttgaaaaaggagaaaccaaaatggaaaagcgattatcctatg

SEQ ID NO: 739316 - DNA, 100 bp, Homo sapiens
tctctcacccatccatgggaagccctgctactgctggattagcgccagacttatctaaaaacagactggttgaagttccaatggaattgtgccattttgt

SEQ ID NO: 739317 - DNA, 75 bp, Homo sapiens
ccgcttcaggtcctgggtcgatgtctgtctatggaataaagccccgtcagatggaatttcactcttgttgcccag

SEQ ID NO: 739318 - DNA, 76 bp, Homo sapiens
tctgcgcgcgggagttcgaggccctgcggagctgcttcgccgctgcggtacagacagtgtttgtgtgttcctgttg

SEQ ID NO: 739319 - DNA, 100 bp, Homo sapiens
atcaatgtcattgaagagcaggtagcagctcttgagcaggcagcttacaagttggatgcatattcaaaaaaactggagtggctgagctcccttcgggccc

SEQ ID NO: 739320 - DNA, 50 bp, Homo sapiens
tgggaactgaggaagcgcccaagttcacacaaaagatgttggacaatttc

SEQ ID NO: 739321 - DNA, 83 bp, Homo sapiens
tggagcgctccttggatcctgacctgcatctgaccaaatcccaggcatcctggtttgggggcagtgaggtgaatgtcattggc

SEQ ID NO: 739322 - DNA, 100 bp, Homo sapiens
ggcggggcccgcgctgcagccggagacccggagaaagggctgcagtttgaaaagtttggatcttgatagctgcactctttcagaaatcctcagactgcac

SEQ ID NO: 739323 - DNA, 98 bp, Homo sapiens
gccatcgtcatcctgctgctgaagatctggaagacgcgctcctgcgccggcctgggccgaggccactggtgcatatgttcccgggagggataagccag

SEQ ID NO: 739324 - DNA, 107 bp, Homo sapiens
tgcagagccgcctttccagcatgcaggggctgctcagacctagaggatcaagacataatgggagcatttttagacaagccaaagatggaaaagcataatgcccaggg

SEQ ID NO: 739325 - DNA, 99 bp, Homo sapiens
atcgtcattgccatcctcgcggttgaagaaatatggagatcaacacaaaactgctcatcagtgttacctgtatcagctttttcacctttcagcttcttt

SEQ ID NO: 739326 - DNA, 109 bp, Homo sapiens
gcggatggccccaggtgtaagcgcagaaagcaggcgaacccgcggcgcaataacggctgcactccccgaaagtgcggcagaggtgtcaccgatgtcgtcatcaccaggg

SEQ ID NO: 739327 - DNA, 75 bp, Homo sapiens
gaaccttgacaagctcatccggctggtaaatgcgcagaacctcaagaaggcatgaagccagcccctgcagtgccg

SEQ ID NO: 739328 - DNA, 100 bp, Homo sapiens
gtcctgcaggtattgggagatccacagctaagacaccgggacctcctggaagccaaaaatggacgccaggaaagcatgtgcagatgcaactctctctcag

SEQ ID NO: 739329 - DNA, 50 bp, Homo sapiens
tgacaaccagcatgccgagatggagcaagatactgctgtgcaaaatatgc

SEQ ID NO: 739330 - DNA, 83 bp, Homo sapiens
ctacagccgccgtttctggcagggagacaccttccatcggggcagcgacaagatgggtgatcagcccatgacctaaacctcca

SEQ ID NO: 739331 - DNA, 96 bp, Homo sapiens
ccgactcggtgattgaggacaagaccatcgagctcatgttcaaaaggtgatgacctatcaacagccattctcaaacagaagaaccgtcccaatcgg

SEQ ID NO: 739332 - DNA, 96 bp, Homo sapiens
atatcgaaggaatcatgtataaatggcttttaggaatggtagcttcctggggatggtatgctggatatacagaaatgacctccaccttcaaccccc

SEQ ID NO: 739333 - DNA, 90 bp, Homo sapiens
ggcgccccgggagcagccagcccgtgggcgagccgcccgcccgccgagcagccatgagattgatcgtgtcctgtgctgaagatgtttccg

SEQ ID NO: 739334 - DNA, 95 bp, Homo sapiens
tctgtctttgtgtcctgagatcaaatggcacttcattggccacctacagaaacaaaatgtcaacaaattgatggtgacaacactgcagctgaagg

SEQ ID NO: 739335 - DNA, 96 bp, Homo sapiens
ggtctcgttgggcgccggtgtcctggcctcttcctcaggtggggaccaaggcatactgaacacattttttagcagctgggcaacaacagatatcag

SEQ ID NO: 739336 - DNA, 100 bp, Homo sapiens
ggatcctggtggacgtggagaaggtggactgggacaaggatgaccggaaagaagggatgaccgcgtttgtggaaaagagaaaggccaacttcaaagacca

SEQ ID NO: 739337 - DNA, 87 bp, Homo sapiens
gtgcttctcgaaaaaaaccttcaggcggcccatggcctccagggtcgtatagacctccccctcctatgggcaaaccaccaggttcaa

SEQ ID NO: 739338 - DNA, 129 bp, Homo sapiens
tcttgggaaaggacaaaaaaattcctggaaaaagaagtccaagaagcaaaaaagggactgctaagaagataccaccagttgcctgggagagaatcaaaagaagcccaagaaaggaaacccagatgagga

SEQ ID NO: 739339 - DNA, 80 bp, Homo sapiens
agtttgcagaagtggaaggagcagaacgtgagggtgtaacttacaaaaagaaagaagatgctgatatgctacaacacgga

SEQ ID NO: 739340 - DNA, 50 bp, Homo sapiens
caagaacgggcacctggctgtggttctgccgatgatgagaggatcttgag

SEQ ID NO: 739341 - DNA, 82 bp, Homo sapiens
cagggagcagaggggacagaggcaccaaggacctccaagacagtgtttcctgaggttataggcgggtgtttgaggagtacat

SEQ ID NO: 739342 - DNA, 113 bp, Homo sapiens
atgggatgctggaggacatctgggggccacaaatgctccttctcctggagacgcaactcaagcacctgagatgttcagctccagaaaaggagcaggctattcctttgctgttg

SEQ ID NO: 739343 - DNA, 80 bp, Homo sapiens
gacatgcaatgtaatgcagtttaagaagtgcaccatagcgggagttgcttatggtaatagtagacgtcgccatgaaagtg

SEQ ID NO: 739344 - DNA, 82 bp, Homo sapiens
cctcaatttgctggatttaagcactgctgcactttatgagtctacaaataagaaacctcgaaaatctccaggtgagaagagc

SEQ ID NO: 739345 - DNA, 90 bp, Homo sapiens
gtcttcgccgccgccgccgcggccccgccagatctgactgcagccatgagcagcaatgagtgcttcaagtgtggacgatctggccactgg

SEQ ID NO: 739346 - DNA, 75 bp, Homo sapiens
tcagtcctgcctcatcccagccatgtcatcttatctacgaaatgattcaggatgtaaatgaagaccctggagaag

SEQ ID NO: 739347 - DNA, 51 bp, Homo sapiens
ctagatctggactccgacccggcgccagaggaattcagaaaagcagctcag

SEQ ID NO: 739348 - DNA, 88 bp, Homo sapiens
tgttttttcctgtatgaagcggttggcaccactgaagtgaccgaatgaggaaattgagagtcagattgacagaatctgtgaaatggga

SEQ ID NO: 739349 - DNA, 98 bp, Homo sapiens
tggcctataacaatctgtctgtgttcagacagcaaatgaaaccaacctggagagttcatgggtttggaaatcccttgtctccaggttgctgggattga

SEQ ID NO: 739350 - DNA, 100 bp, Homo sapiens
ttcccattggataatgaagtgaaggcctttatgagaggacagaggctatatgaaaatgccggtggtggtgtgcacattgagccccggtatagacagttcc

SEQ ID NO: 739351 - DNA, 75 bp, Homo sapiens
ctgatgcccagtggggcattcgtcttggtaaacttggtattgtcagaagcttcagttctggtaaaagagaaggtg

SEQ ID NO: 739352 - DNA, 90 bp, Homo sapiens
ggatcgtcagtagagatgctgcaggctgaagtcgcccagctgcaagaacaggtggccctgaaagatgcagaaattgagcgtctgcacagc

SEQ ID NO: 739353 - DNA, 90 bp, Homo sapiens
ttacagatcttataacagtcggtttaaagagatgggttgtcactgtgttgccccggctggtctcaaactcctaggctcaagcaatcctcc

SEQ ID NO: 739354 - DNA, 82 bp, Homo sapiens
agcgaggagaagcgagaaaagatgaaacggaccctctggtcaaaatgtctttggaagtttcctaaagtctgaattcagtgag

SEQ ID NO: 739355 - DNA, 100 bp, Homo sapiens
gtggagtctcaccacgtctccatcacgggtatgcagcaactattggatgattatccgaaatgtttcattgtgggagcagacaatgtgggctccaagcaga

SEQ ID NO: 739356 - DNA, 101 bp, Homo sapiens
agaactccaggcgcaagcgggatcttgtactctctgatgaaatctttgacatggtaaaaccaaaggatcctttgaaaatctctcttcaggatttaatcaac

SEQ ID NO: 739357 - DNA, 100 bp, Homo sapiens
taatttcaacagaagagtgagagatggaacccgaagaagaaaggattcgttacagccagagattggtcagatttcatttcagtgtaaaggtaaatggaat

SEQ ID NO: 739358 - DNA, 90 bp, Homo sapiens
ggcccgttggcatcgctgccttctgtctagcccagaagaagttgattcaagtcagttgagacgccagttgtgtggaggaagtcaggccgc

SEQ ID NO: 739359 - DNA, 75 bp, Homo sapiens
ttcatatttggcttcaatgtcatattttggtcaagagaatccatcccattaaatgacctgaagtcagaagtatca

SEQ ID NO: 739360 - DNA, 75 bp, Homo sapiens
ctaccgcacaccctgcaggcccatccaggcccatccagacaataaacagatgggtttccagatttccaggattct

SEQ ID NO: 739361 - DNA, 98 bp, Homo sapiens
ttctctctcctcgattgttgcgcgctcatcttcctctcggtctacttcctgtggaataatggcaacagaaagactggctaactacaccggaggcatct

SEQ ID NO: 739362 - DNA, 100 bp, Homo sapiens
cacagtttaggtctcaaggcaagcctattgagttaacacctctgccgctgctaaaagcccagttcaatacaaacaagtgagtttgactcatcagatgaag

SEQ ID NO: 739363 - DNA, 88 bp, Homo sapiens
gattttatgaaaatggagaactctgtgatgtcacactcaagttttttgctccactcaagcctgttagaatcaccatggaatacagctc

SEQ ID NO: 739364 - DNA, 90 bp, Homo sapiens
ggaaagcagagctggtggcacagatgatgctcctggactggattgagggcaaggagcggaacatccgggccctgctgtccacgctgcaca

SEQ ID NO: 739365 - DNA, 95 bp, Homo sapiens
tttaaaagatgaggtgacttggtgattttcctggaaaattataggatgtgggctctcttgatgagaagatgaagagcttggatgtgaatcaggac

SEQ ID NO: 739366 - DNA, 101 bp, Homo sapiens
ctaaaacatctgttgcagcgagccccagattattgcccagagacaatgacccgaaaaatcctgtctgcctgtgagaagaatcccacagatgcctaccagct

SEQ ID NO: 739367 - DNA, 83 bp, Homo sapiens
gacaagctttcaagaaattggcattgaagttacatcctgataaaaacccgaccaagtctgtgtttgagattggactctgcagt

SEQ ID NO: 739368 - DNA, 100 bp, Homo sapiens
caagaagtttctaggaaaggccggacaccaggccgctgtgctcgctgtggagaaaacgtagttggggaaggtacaggatgcactgccatggatcaggtct

SEQ ID NO: 739369 - DNA, 82 bp, Homo sapiens
agttcaccgaaaatcagtgaaaaaaggttttgagttcacactgatggtggtcgaacccttaggagaaatcttgagagtggac

SEQ ID NO: 739370 - DNA, 50 bp, Homo sapiens
ccccgtccggtccctctctccacgggaaaagactactttgtgtgtatcca

SEQ ID NO: 739371 - DNA, 75 bp, Homo sapiens
tcctccacctgtccgctacgctcgccggggctgcggccgcccgaggtgagcacctgcggatctgtccccagggct

SEQ ID NO: 739372 - DNA, 100 bp, Homo sapiens
aaaacaaaggatatcgtcaatgggctgagtgtcctggtgaagacctagttcttgccggagacaattccactgcagaagcactttacttaaaaggacttgc

SEQ ID NO: 739373 - DNA, 119 bp, Homo sapiens
gaggagccatgaggcgccagcctgcgaaggtggcggcgctgctgctcgggctgctcttggaggtgaatgaaaactttgccattgatttgatagcagagcagcccgtgagcgaggtggag

SEQ ID NO: 739374 - DNA, 75 bp, Homo sapiens
gaaggactcgctcgacccgtccttcactcacgccatgcagctgctgacggcaggacccatggatgaaggaccaga

SEQ ID NO: 739375 - DNA, 73 bp, Homo sapiens
ttctttggcttttactaaaaatggacgcctggcaaccaagattgacttggcctctacttcttgttaaggaaat

SEQ ID NO: 739376 - DNA, 107 bp, Homo sapiens
gatgagataactgaaagggaagcagaaccatactatgcctgatggaattgggactgtttcagtggaagaaaaagaaagatttgaggagataaaagagagactctctt

SEQ ID NO: 739377 - DNA, 90 bp, Homo sapiens
gcgagcgccccagccaggcctgcgccggcatcctccgaggtatgctatacctccggagcatggaaaacgacttgaaagactagctcaagg

SEQ ID NO: 739378 - DNA, 83 bp, Homo sapiens
gaaactcttcgactacttcaaccaggaggttttccgagacaacaacggcaccgcggtgtccctacctgcaccggacgacgggg

SEQ ID NO: 739379 - DNA, 51 bp, Homo sapiens
ggctgcctgaaagtcctgcagcgagaccagaatctgagggagagcagattc

SEQ ID NO: 739380 - DNA, 100 bp, Homo sapiens
ccgagccgtgtcacacagggacagccgcaatccggacctggcgaatggcctgtccagaagacagccaaatacatccttcaaacagacttcactgcaggag

SEQ ID NO: 739381 - DNA, 92 bp, Homo sapiens
gcacagttcctgggaaggtggagccaccagcctctccttggctaactatatgtcagaaagcatcagcttttctcgatggacccattcatcta

SEQ ID NO: 739382 - DNA, 82 bp, Homo sapiens
ggaagtcctctgagcagcctgttaccttctgcctcagtgccagagtccatgacaattacatttaaatcaaacggtattgaga

SEQ ID NO: 739383 - DNA, 75 bp, Homo sapiens
ctctgaggcctgtgttggcctggagcctccccaggatgtgtctcgactgcattgtgagagtgaatctttcaagat

SEQ ID NO: 739384 - DNA, 74 bp, Homo sapiens
ctgttgctggtctctggctccctcctcccagggccaggcgccgctcagaacggattttttatcaagcagaaatg

SEQ ID NO: 739385 - DNA, 100 bp, Homo sapiens
aaaacttttgccagtggcagcattcgaagaacagtccaggtggaatccatcatgatactgctgttctcttaacaagagtgtgatgctggatcttgccaag

SEQ ID NO: 739386 - DNA, 111 bp, Homo sapiens
ttgtcggggacggtaaccgggacccggtgtctgctcctgtcgccttcgcctcctaatccctagccactatgactaatagggatgccaaaggaaaaatatgatcctccagat

SEQ ID NO: 739387 - DNA, 50 bp, Homo sapiens
ctggcgcggggcttcacggccgcaggaggcaagtgaggcctatctggttg

SEQ ID NO: 739388 - DNA, 75 bp, Homo sapiens
gtcgccgctggagaggggctcggcgcccggcggggactgcaggaccaagaagctgataattgatgtgatccggaa

SEQ ID NO: 739389 - DNA, 75 bp, Homo sapiens
cgctgttttgccggaggagcccctcaggccggcaatgacatcattgcagcagccaagcgcatggctctgctgatg

SEQ ID NO: 739390 - DNA, 98 bp, Homo sapiens
gcatattaacaagggtagattttgaaaatttggaagatttgcacaaagcagcagagaagcatagcatgtccagcatttcaactgatcatcagttctcc

SEQ ID NO: 739391 - DNA, 100 bp, Homo sapiens
gttctcgggatccttctgtcatagaaactcacatgagacaaatgcgctcagcttcaattgaatgagtgagatgatatttcgaagaataaagatgccctgg

SEQ ID NO: 739392 - DNA, 82 bp, Homo sapiens
cttcctgtcgctgacggcgactgcgggaggccaggctggtggatgaccgctgtgtggtggagcccgcggccggggacctgga

SEQ ID NO: 739393 - DNA, 100 bp, Homo sapiens
cgggatcgtgaccgagaccgtgaccgagagcgtgaccgagagcgcgaatatcgtcatcgttagaaggagaagcaacagtttcagcgccatctgacccgcc

SEQ ID NO: 739394 - DNA, 75 bp, Homo sapiens
gctggtgccttcattcatgaaaagcatgcccatacgattaaacctgcgaatgtcgttgtctgctgggtcttcccc

SEQ ID NO: 739395 - DNA, 82 bp, Homo sapiens
agaagatgaactaatgagagcagcaggatcagatggtactgaactttttgatcagactgtgatcaaccactctatgattgtc

SEQ ID NO: 739396 - DNA, 75 bp, Homo sapiens
tcagatcttcacagcacagttcctgggaaggtggagccaccagcctctccttgccgtactctgacagctgtgcac

SEQ ID NO: 739397 - DNA, 100 bp, Homo sapiens
tttgtctcttccagatcagaactgaggaacaaaaacccccatcctgggaaaaatggggaagctggtgtaattagcatggtcaatgcgggagcgatgagtg

SEQ ID NO: 739398 - DNA, 100 bp, Homo sapiens
gctgtgggtgctgggacttcccgtccgcggcgtggaggttcaaacgatatgtcaataaacttcgaagcaagagtacagttttcaaaaagaagcatcagat

SEQ ID NO: 739399 - DNA, 100 bp, Homo sapiens
cactccaggaatgccagtgcatcttttgcacagctaaaatgcatccgatgcagatttatggctcctgaacagttgcactgtaaaaaacccagctgaagac

SEQ ID NO: 739400 - DNA, 100 bp, Homo sapiens
ttagacagtatggctcagcagactcctgtaggtaatgctgctgtatcctcagttgactcattcactcagtcttgtgaaaatgccattgtgtgctggaaac

SEQ ID NO: 739401 - DNA, 100 bp, Homo sapiens
atggccctggatcttatggaggtctgacattcaaggatatttatctaaaaattcttcttttgagtgccagtaaaggtgatgtggaagaattagaaattca

SEQ ID NO: 739402 - DNA, 83 bp, Homo sapiens
ggccccgagccggcccgggtcgagaactctcttgatagagcccaagcagccaagaataaaggcaataaatattttaaagcagg

SEQ ID NO: 739403 - DNA, 98 bp, Homo sapiens
acgggcatccttgactccatcgggcgcttctttggcggtgacaggggtgcgcccaagcggggctctggcaagaatgcaatcgtgtctattaaggaact

SEQ ID NO: 739404 - DNA, 75 bp, Homo sapiens
tccctgacatgcaagaacagggtccaggattactacagcatcccatttcccacacccactactccgctgactggg

SEQ ID NO: 739405 - DNA, 90 bp, Homo sapiens
agagagagagcttggttaacttgggagaaagtttcatctgtggatggagtattgatacaggtatccccgtttttacaacagatgttcatg

SEQ ID NO: 739406 - DNA, 98 bp, Homo sapiens
ccgtggtgatcgctgtcaagatgcaggtctcagcatcagaggagcccaggaggaggaccctcccgatccccagctaatgagactggacaatatgcttt

SEQ ID NO: 739407 - DNA, 71 bp, Homo sapiens
gacactcaatgagtgggattccagggcagtggagtgggagtgaagaagctgtgtgaactgcagcctgagga

SEQ ID NO: 739408 - DNA, 100 bp, Homo sapiens
tttgatgatcatgatacagttgataaaattgttggcattggaggtgatccttttaatggaacagattttattgactgcctcgaaatctttttgaacgatt

SEQ ID NO: 739409 - DNA, 74 bp, Homo sapiens
tgaagatggcggcagccgaggccgcgaactgcatcatggagtaatagctcttcaagtctgcaataaaaaatggc

SEQ ID NO: 739410 - DNA, 97 bp, Homo sapiens
atgagaagtataatgatttatataagttccagcaggatcccctaacaacagtgagagagcaatgcgagcagttggagaaatgtgtaaaggcccggga

SEQ ID NO: 739411 - DNA, 73 bp, Homo sapiens
aaaaattaaacttcaacacaatgagatataagtgtctctgtgatgcaggctgggttggcatcaactgtgaagt

SEQ ID NO: 739412 - DNA, 100 bp, Homo sapiens
gaactgcacggtgagtttaaaacaaccgcttgtggccgatgcatcagtggaatggcagcttggatcttaaaagcaagagcgctaacagaaatggtataca

SEQ ID NO: 739413 - DNA, 75 bp, Homo sapiens
ccctttgcaggatgcagaagaagccaaaaacattctggttttctggatatgccgcagaaggatccgtgccagaag

SEQ ID NO: 739414 - DNA, 82 bp, Homo sapiens
cgctagcgttcgccttcagccaccatggggaatgggatgaacaagatgataccacgagtcaacccaaaagttgctggggaga

SEQ ID NO: 739415 - DNA, 100 bp, Homo sapiens
acggtgaccttcgcttggtgtcctcctggcctcagcaacctgacaattctgtcgtgtcccgcttggcagtgaccttggcgggggcattggaggaagtccg

SEQ ID NO: 739416 - DNA, 49 bp, Homo sapiens
cgccatgtgacacactggcatcaagaatcctcactatggatgggctcat

SEQ ID NO: 739417 - DNA, 50 bp, Homo sapiens
gaactacagacacctggtcttccttgggaccattgcaatttagagatgtg

SEQ ID NO: 739418 - DNA, 100 bp, Homo sapiens
ccgactggggttggagttcttcgaccagccggcagtccccctggcccgggcatttctgggacaggccgcctggccatccggtacagaatgtattgccaag

SEQ ID NO: 739419 - DNA, 100 bp, Homo sapiens
ggagaactgtgcccattacttctgcctggactgcattgtcgaatggtccaaggtgtggagagagtatgctctgtgtcgtcccagacatttctgcattccg

SEQ ID NO: 739420 - DNA, 97 bp, Homo sapiens
cacagatgtccaagctgccaagaactagaagatcttctgccatctagaccggaagttcctaacataattggagaaacagaggaggtagagcttcagg

SEQ ID NO: 739421 - DNA, 73 bp, Homo sapiens
ctgaatgaccacctagagccttggatccaggagaacggcggctgggtgaggaattttaaattggaacaagagc

SEQ ID NO: 739422 - DNA, 82 bp, Homo sapiens
cagccgggaggccgaggactcggagttcacctgcaggtgctgactgggttacttttttaaacactaggaatggtaatttcta

SEQ ID NO: 739423 - DNA, 90 bp, Homo sapiens
tggcctaccaggaggccaggggtgtcgccatggctcctggaacagctcatccttatgatagtggccacattgcaatgacctacactggcc

SEQ ID NO: 739424 - DNA, 51 bp, Homo sapiens
attcttctgctgtccttgacataggtgtccagcacatcttcactggaagcc

SEQ ID NO: 739425 - DNA, 83 bp, Homo sapiens
aacttgtacagagatgtgatgttggagaactatagcaatctggttttcttggggatttgtcttggctgttactatgacacggg

SEQ ID NO: 739426 - DNA, 50 bp, Homo sapiens
aaatccttcgcccggaaattcatcaagtggacccaagtggagagattgtg

SEQ ID NO: 739427 - DNA, 101 bp, Homo sapiens
tcctgggaaacaaagacttggaagggtttaagactctgacattcctggctgtcatgctcattgttctgaactccacgatggagcagcatattgtatgggac

SEQ ID NO: 739428 - DNA, 83 bp, Homo sapiens
tggagagagaccagacctgcaagctctttgacacacagcagttcttgtcagggtttgaaagtattcttgaagggctgtttgga

SEQ ID NO: 739429 - DNA, 87 bp, Homo sapiens
agagcctccgtcaccacatagtacagtgaaggtgaaattcgatttaatttaatggccattgtgtctgacagaaaaatgatatatgag

SEQ ID NO: 739430 - DNA, 74 bp, Homo sapiens
catccaggcctcattggacagcattcgagcgtgagtgcatctccatccacgttggccaggctggtgtccagatt

SEQ ID NO: 739431 - DNA, 100 bp, Homo sapiens
gggagaaatccccactcctccaagaaccaacccccaaattggctgggacaggcagtagtctcctgactggcccagagggacttttggccaaagaacgaga

SEQ ID NO: 739432 - DNA, 98 bp, Homo sapiens
ggcagccgattcctggccacctccatagcaagcaggcttgtccagccggaagccctgagggcagctgttcccactggctctgctgaccttgtgccttg

SEQ ID NO: 739433 - DNA, 95 bp, Homo sapiens
ggagctggcggcgacggccacaggggcggcgacggcgcagtgcgaagcgaaacaggactggttgccataaaggaagcccacgacatagagaccag

SEQ ID NO: 739434 - DNA, 75 bp, Homo sapiens
atcgtatcgtatgtccgctatccagaacctccactctttcggcagcggaggaggagaaagagatggacctcccgg

SEQ ID NO: 739435 - DNA, 96 bp, Homo sapiens
ttttaagctgcaaagaagcatttgcagacgttgtctcatgggtaccgcttgccaactttggaggttaatttggagtggcccctggagtcagtttcc

SEQ ID NO: 739436 - DNA, 88 bp, Homo sapiens
gcggggaggaggatggagatgctctgtgccggcagggtccctgcgctgctgctctgcctggatatggtagcatgtgtggtaccttctg

SEQ ID NO: 739437 - DNA, 101 bp, Homo sapiens
gcctattattctgctatatctgaagctaaaattaagaaacgtcaggctcctgatccgaatttggatgacgtccggttgtttgccttcgtgcgcttcaccac

SEQ ID NO: 739438 - DNA, 105 bp, Homo sapiens
cgtggccttagctgtgctcgcgctactctctctttctggcctggaggctatccagcgttatgcctccgcctcgttgccctgaaagccgcagcgacagcgaaaagg

SEQ ID NO: 739439 - DNA, 109 bp, Homo sapiens
ggacagcgcgtgcccgcgaggagccgccgcgcgcccgcgccctccgcgcgacgccaggccaccagcccctcgggttccaagatgcagctactggagacagagttctcac

SEQ ID NO: 739440 - DNA, 90 bp, Homo sapiens
cagcctgcagcggagcccacgagaggcagcgccatggcggagcagacctactcgtgacacagaatgttcagcttaacaaagaaatgacac

SEQ ID NO: 739441 - DNA, 83 bp, Homo sapiens
cttcagaagaccgaagcgttcgtatctggaagatccagacatttaatgtggatgcaccatgccagaccgtggaagatttaacg

SEQ ID NO: 739442 - DNA, 76 bp, Homo sapiens
ggcccgcggtgaccgaggcctgggccccggctgaaaatgtgtgtctgacatgcaagctcagtggggcagagacccg

SEQ ID NO: 739443 - DNA, 83 bp, Homo sapiens
gtggaaacagcggatgattctggaactgggagaagatggctttaaagaatacacttcaaccaccggcatgttctttggttcag

SEQ ID NO: 739444 - DNA, 100 bp, Homo sapiens
aggacgtccgggaacgtggaagacctggtgcccctgggtgaactgaccaagcacagcacatcagcggtggatctatccacctgctttgcccagatcagcc

SEQ ID NO: 739445 - DNA, 83 bp, Homo sapiens
gctgctgctgtgtgcggtgctgctgagcttggcctcggcgtcctcgggtgctggcatcggccccaccattcagattggggagg

SEQ ID NO: 739446 - DNA, 90 bp, Homo sapiens
aaatggcggaccgcttctcccgcttcaacgaagaccgagactttcagctatgtttccagtgtcctctgggtgtttccaagagcaacaaga

SEQ ID NO: 739447 - DNA, 100 bp, Homo sapiens
cagtttcccttatatactgcttacaagcataatactcaccctactattgagcacccttacccttctgaagaacagaaaaagcagttggcacaagacacgg

SEQ ID NO: 739448 - DNA, 90 bp, Homo sapiens
gcgagatggacctgcaggtgcagagattattgaacatggggaaggaagaggcctcacttgaggaagtgttagtctatctcaatcaaatct

SEQ ID NO: 739449 - DNA, 75 bp, Homo sapiens
cggcgagagagcggctgacagaggggatgcgagggatcgcttacacctgagacgaactacagaacagcacgtacc

SEQ ID NO: 739450 - DNA, 96 bp, Homo sapiens
ctgtaaggaaacaagatggtccttaaaaccgaagaggaggacgattgggaaaatgaggtacgttagtgttcgcgattttaaaggcaaagtgctaat

SEQ ID NO: 739451 - DNA, 82 bp, Homo sapiens
ctgggctggaggcggcggagcgcgagagcttcgagcggactcaggaccttgctaagcagtactctgacagactagaatgctg

SEQ ID NO: 739452 - DNA, 98 bp, Homo sapiens
tccagatggcagccagtcagtggtggagtggtatcctgaggtgcggcaccactgtcccaacactcccatcatcctagtgggaactaaacttgatctta

SEQ ID NO: 739453 - DNA, 98 bp, Homo sapiens
tccgctggctcagccgcaagtacccgtccatcatagtcaactgcgtggaagagaagggggagctgatcaccttctattactattggaagaagaccccc

SEQ ID NO: 739454 - DNA, 100 bp, Homo sapiens
ctcgacctgggtgaatgtactcttttcagcaaccatatcctccctcctgttgccaggccaccatgaagactttgcttagaacttggtcagaattatatag

SEQ ID NO: 739455 - DNA, 83 bp, Homo sapiens
agccgatccagcctgcggagcctgtggggcaggctagcttgtcactttctgcaaaggtttccctcagggagcctcctgctgcc

SEQ ID NO: 739456 - DNA, 90 bp, Homo sapiens
ggccagaagtcagaaaacaaggtgtctgcaggaccaacctctcctctggatgctctaggttgattcaggaagaaaaagaaaatacagagc

SEQ ID NO: 739457 - DNA, 50 bp, Homo sapiens
atcctattttttattatgttgcacggagtggacagaggactgcagaaaat

SEQ ID NO: 739458 - DNA, 80 bp, Homo sapiens
gaaagagtcatacctggagcagcaggcccttcagtgaggaaagcgtctctgagtgtagcagggccaggaaaaccccagga

SEQ ID NO: 739459 - DNA, 88 bp, Homo sapiens
ggagcgcggtgctgccggtggagcttcaggttcagccgtctgtatatctccccagatacctgaaactgaccacctgagtacgttttcc

SEQ ID NO: 739460 - DNA, 75 bp, Homo sapiens
gcaaagaagagttgagcacaatcagggaggtgttgtagcaggaaatgtggctcatattctggactcaaatcatgg

SEQ ID NO: 739461 - DNA, 100 bp, Homo sapiens
atccatttggcttgtgatattctggaggaggaggcacagaccccacaggctcctcggacactgggtccatcacctcctgccccatcatccactccaacac

SEQ ID NO: 739462 - DNA, 108 bp, Homo sapiens
gaaaaggagatggaagctgaattaaattctaccatgaaaacaatggaggacaagttatcctctctgggaactgccaccaattaccctagttatgggcccatcatctca

SEQ ID NO: 739463 - DNA, 75 bp, Homo sapiens
tgagaagttgggctatcaatggaagaaaagttgtatgaatcagagtgaattcaatgtgtacagtcaggaagtcat

SEQ ID NO: 739464 - DNA, 90 bp, Homo sapiens
acgcccgggacccagattgcgggttcagcaataagagctaactgccatcaagagccatcagtatgtcttcaagctgcatgcccagaaagc

SEQ ID NO: 739465 - DNA, 100 bp, Homo sapiens
cagagcctcgcctttgccgatccgccgcccgtccacacccgccgccagcccagctcaacattggcaatgtgctccctgtgggcaccatgcctgagggtac

SEQ ID NO: 739466 - DNA, 100 bp, Homo sapiens
gccactacagttcatcaacatcaactacgtccctctgaaggtggtctatgttgcccgaaacccaaaggacgtggcggtctcctactaccatttccaccgt

SEQ ID NO: 739467 - DNA, 83 bp, Homo sapiens
ggccgccgaatctccggccgaagagcggcggcggcagcggcgggtgttgaaagcagcaggggcctagaagacattaaaccgat

SEQ ID NO: 739468 - DNA, 75 bp, Homo sapiens
tccgactccagctctgacttttttcgcggctctcggggatccagttcttggtggagaatgaactgctgcagaaca

SEQ ID NO: 739469 - DNA, 74 bp, Homo sapiens
cactggaagacgcaacgcagtgaggagtatgaagcggaaggcctgtctccactaactctggaccctaaaacagc

SEQ ID NO: 739470 - DNA, 97 bp, Homo sapiens
tccagcctgagccccagccaggacgagaggatgcggagcccgcagaacctccacagtcaagaggacggaaactctgatgaggaagaaagtgcttcag

SEQ ID NO: 739471 - DNA, 75 bp, Homo sapiens
cagaaggatttgattcagcaaatgggatcaatatttcacctgatgataagaacgactaccaaaatcactacaatc

SEQ ID NO: 739472 - DNA, 75 bp, Homo sapiens
tggatcggcatctagtctttccgcttcttgaatttctctctgtaaaggagtggtgccaccgaacatcgcagaact

SEQ ID NO: 739473 - DNA, 50 bp, Homo sapiens
ctttccaacacagatgtccaagctgccaactccacctgaagaagattgta

SEQ ID NO: 739474 - DNA, 74 bp, Homo sapiens
ataatcggaatgtgatcacagagcctatttacccagaagtagtccatatgacccatcctcatgccaacaaacta

SEQ ID NO: 739475 - DNA, 74 bp, Homo sapiens
catggagaatctgataccgagcagctccagagttcctatcagactgagattgggcagaccctggacctcctcac

SEQ ID NO: 739476 - DNA, 90 bp, Homo sapiens
ctccaggctgctccagtactcaagggaacggatgttgaaatgcttcaggccagtacatctaacccaatccctggagatggtttctctcgg

SEQ ID NO: 739477 - DNA, 100 bp, Homo sapiens
ttgagtctactctgtcgctcttgtgccctagcaccccgagaaccgtcagtttgagccagatgcaatggctgccatccggaagaaactggtgattgttggt

SEQ ID NO: 739478 - DNA, 96 bp, Homo sapiens
ccctaacgttcttgatctctgtgaagattcaagtatcctagaaggaaaacatcaccatggctacagaaattggttctcctcctcgttttttccata

SEQ ID NO: 739479 - DNA, 106 bp, Homo sapiens
gtggcggcgaacgcggagagcacgccatgaaggcctcgggcacgctcaccatggatgatgatatcgccgcgctcgtcgtcgacaacggctccggcatgtgcaaggc

SEQ ID NO: 739480 - DNA, 92 bp, Homo sapiens
ccgcgagcacagagcctcgcctttgccgatccgccgcccgtccacacccgccgccaggctgaaggtgatgtggccgccctcaaccgacgcat

SEQ ID NO: 739481 - DNA, 96 bp, Homo sapiens
gatgggtcgaggcggacgcgcggctgcgtcaggtgggtcatgataactgggtacgtggagttctgttccattctggggggaagtttattttgagtt

SEQ ID NO: 739482 - DNA, 73 bp, Homo sapiens
aaaatctgggcgtttaacaaaaaggttatattcccagaggatgtcagtcccaaggaccagtagctgccatcag

SEQ ID NO: 739483 - DNA, 75 bp, Homo sapiens
gctcgcgctactctctctttctggcctggaggctatccagcgtgaagccaaaaaccttccctcttacccggggcc

SEQ ID NO: 739484 - DNA, 100 bp, Homo sapiens
cccgggcggctgcttatgtggccaagcggcacctagagactgtggatggagccaaggtggttgtattggtcaacagggttcccagtgcccccgacaagcc

SEQ ID NO: 739485 - DNA, 50 bp, Homo sapiens
agctgatcaagtatatgactgaagaagagtcacttggaactcttctgtgg

SEQ ID NO: 739486 - DNA, 131 bp, Homo sapiens
gtttgaggtcgtcccggaagacttcagaaccaggcgaacctagacgaaggcggctggaatgaaccaggatctcattttgcccaacggtggtactccagcaggtacttcaagtccagcttcttcatcttccc

SEQ ID NO: 739487 - DNA, 50 bp, Homo sapiens
ccgcctgtctcgtcaccacatccaggtcaccatcagaaaagctaagtttg

SEQ ID NO: 739488 - DNA, 90 bp, Homo sapiens
ctttttgccaccaatcccttcgatcaggatgttggattgtgagggtgaaactcccattcacaaggcagctcgctctgggagcctagaatg

SEQ ID NO: 739489 - DNA, 82 bp, Homo sapiens
agaaggaggttgccgacgccatcaggctcaacgaggaactcaaagtggatgaggaaatgtcaacagcatctccaccctggag

SEQ ID NO: 739490 - DNA, 73 bp, Homo sapiens
tcctctgactgcagcgtcactcaggatgaatgctatcaagtaagacaagtgtttgcccagaaacttcacaaag

SEQ ID NO: 739491 - DNA, 100 bp, Homo sapiens
cgacgagatcttccgcaacctggagaacgccaagcgcttcgccatcgacataggatcatgcggccagatgatgccaacgtggccggcaatgtccacgggg

SEQ ID NO: 739492 - DNA, 49 bp, Homo sapiens
agttcaccatcctccaaacaagtgaaaaatatgtaatcccctggctgac

SEQ ID NO: 739493 - DNA, 80 bp, Homo sapiens
tctcagaaggctcagggactaagaaacaagccttgtatagattgtcatggattttaagcacccagatggcattgcagtgc

SEQ ID NO: 739494 - DNA, 75 bp, Homo sapiens
caggatgcctctcagctgccacctgcctttgacctttttgaagcctttgcaaaaacagagtctcgctctgtcacc

SEQ ID NO: 739495 - DNA, 96 bp, Homo sapiens
cccaccaacaacaccacaataatccacagccaagccatgtgaagatgtgcttgcttcccctttgccttctgccatgattctaagtttcctgaggcc

SEQ ID NO: 739496 - DNA, 78 bp, Homo sapiens
agagatcagagtactaagagacagggcttccgttacaagatgaggtctgtgtatgctcacttccccatcaacgttgtt

SEQ ID NO: 739497 - DNA, 82 bp, Homo sapiens
tagagatgtgatgttggagaactacagaaacctggtctccctaggcatttgcctggtggcctgatttattggctgaacatgc

SEQ ID NO: 739498 - DNA, 75 bp, Homo sapiens
cagatactcagctacactttttgtgcagatataaagatgaagcgcagctgtataaagaagagcacctgaggaatc

SEQ ID NO: 739499 - DNA, 95 bp, Homo sapiens
gtggggacataagccttttaacaaggaactctttttacaggccaaaataattgtgtgcccaagaagatgctgcagctggttggtgtcactgccat

SEQ ID NO: 739500 - DNA, 100 bp, Homo sapiens
ctcagactgactgtccttgctcctcaagcttgcagacagcctattgtgggacgttgtgatcattattggtaaaggttttcaaggtgtcatgaaaagatgg

SEQ ID NO: 739501 - DNA, 51 bp, Homo sapiens
cagcaagcctttctcattttctccatcaggttgccatcaacctgatcgtgc

SEQ ID NO: 739502 - DNA, 88 bp, Homo sapiens
ctacctcttcctctggcccgaagccttcctttatcgctttcagacaatgcagatcttcgtgaagactctgactggtaagaccatcacc

SEQ ID NO: 739503 - DNA, 75 bp, Homo sapiens
accatattggtatctcaattgcggggcttactgctgatgctagactgttatggaaatatattcttccctctctcc

SEQ ID NO: 739504 - DNA, 87 bp, Homo sapiens
aggtgcacccagctatatgagaaaggctttctctgctcagagctccaagccacccgcctcctgtgcctccgctctctgctggatccg

SEQ ID NO: 739505 - DNA, 98 bp, Homo sapiens
tactgcacctgcacaagaagaaaaagccaccaagcatcagcgcccagttccagactgccatcagtgagaattatcagacaatgtcggacactactttc

SEQ ID NO: 739506 - DNA, 100 bp, Homo sapiens
agagaagcagctgttgctattggaggaggaaagaccacagcaagattctttcattcgtctcctcctagcctgggggaccaggctcgaactgaccctggac

SEQ ID NO: 739507 - DNA, 75 bp, Homo sapiens
tggctgcagaggatccatctgtcttagcaaggctgtcatcacagtcgttgaggacttccacatggagattggcac

SEQ ID NO: 739508 - DNA, 100 bp, Homo sapiens
caagccacatgtgtcagaccataaccgcctccttcacttggccagcctcctcgctggggaggcagagtcctcgcgtggtctcctgcctcgagcacagcct

SEQ ID NO: 739509 - DNA, 110 bp, Homo sapiens
gtgacttcagagacactgccaagcagccttagccctagtgtagaggctaactatatgtcagaaagcatcagcttttctcgatggacccattcatctaatgaaatatgcct

SEQ ID NO: 739510 - DNA, 77 bp, Homo sapiens
ttgtggatcgctgtgatcgtcacttgtctgcgctcctcagaccaccggcaggtgaacagcctgatgcagaccgagga

SEQ ID NO: 739511 - DNA, 87 bp, Homo sapiens
agacggtactataacttcaagtgattaccttacggaaaagtgtggaatcagcattaagacagttagaaagagaaaaggcgcttcttc

SEQ ID NO: 739512 - DNA, 74 bp, Homo sapiens
cttctggccgcgggaaggagagtgctcttaaagttccgtacagataaaggaagagatcccagttctgatacata

SEQ ID NO: 739513 - DNA, 100 bp, Homo sapiens
tttaagaggcagcaggcgatgccctccacaggtatggcaggtcaaaatgcagatcttcgtgaaaacccttaccggcaagaccatcacccttgaggtggag

SEQ ID NO: 739514 - DNA, 110 bp, Homo sapiens
ttcctgcagaaagacttgaaggcgtatacaggaacaatattgatgatgtagtaaggtggcacaagaatggctcaactctccaaatagagagaatttctatcagttgcaag

SEQ ID NO: 739515 - DNA, 100 bp, Homo sapiens
actcaccccttcagcgtcgctgcccccagctcagctcttactgcgggccgctccgacggcggtccatcctggtcagaatggcggcagtggagcatcgtca

SEQ ID NO: 739516 - DNA, 131 bp, Homo sapiens
gcttaggaattttgtcttctgttgggcttggaacagggctgcacacctttctgctttatctgcaactgaatgccatcattgcagcctcaatgtccatcaagtcctctgacaaactccgccagatcctggag

SEQ ID NO: 739517 - DNA, 100 bp, Homo sapiens
ttacgtccgtgccctgttttctggtcttttcttccagtgggacgtagctgagctgcagctgaatcacacagctctacagtctgctggagaggatcaaccc

SEQ ID NO: 739518 - DNA, 51 bp, Homo sapiens
gacgcactggcccaggacctgcacaagtgtttcatcattacgattagccta

SEQ ID NO: 739519 - DNA, 75 bp, Homo sapiens
tttaatgagctgaaagatagagtcgtcattgaattttgagaagcattctgaaaactttgcatggacagagaatcg

SEQ ID NO: 739520 - DNA, 100 bp, Homo sapiens
ggagatcaccgccctggcgcccagcaccatgaagatcaagagtgatgtgcagctgatcaagactggagacaaagtgggagccagcgaagccacgctgctg

SEQ ID NO: 739521 - DNA, 82 bp, Homo sapiens
ccacctgatgcccttcaggcagcactgcaggcagagcctggccagcaggctggattctagtgacatttataacgaattgaaa

SEQ ID NO: 739522 - DNA, 53 bp, Homo sapiens
attccagaggggtgacagcaaaacgtgggaacatccagttgcgggaaaacaag

SEQ ID NO: 739523 - DNA, 82 bp, Homo sapiens
ctgcccgcctgccctgaggagtccccgctgcttggtatagacacgtgtggccgtttacgctgtaggatcctcattcccactg

SEQ ID NO: 739524 - DNA, 100 bp, Homo sapiens
agccagagcctgcagtcccacacggtggtccagcatgacccatgtcggggcggagcagggtattggaacagccttttccgtttcaagcatctggccacgg

SEQ ID NO: 739525 - DNA, 83 bp, Homo sapiens
gtcgagaggaaactgttgtgcctcttcatattggcgatcctgttgtgttgatgataattagaagcatgctttccactgaactt

SEQ ID NO: 739526 - DNA, 51 bp, Homo sapiens
cgtccgttctctcaggctcccgttcaggtttacccaaggtccagcctagcc

SEQ ID NO: 739527 - DNA, 80 bp, Homo sapiens
atgcaaaacagaaccttccaaatttccttttccaactaagcttattctaccagattccatgaaagtattgccagtgtaca

SEQ ID NO: 739528 - DNA, 101 bp, Homo sapiens
gtcagcatccgcgtgtggggcgtgggccgcgacaatggccgggggccgaaggccagagaccaggatttggctacggaggcagagcgtccgactataaatcg

SEQ ID NO: 739529 - DNA, 75 bp, Homo sapiens
ctgccgcctccgagcagcccgccagcccatcgccgaagcaccattcaagttcgacatggaattggatgacttgcc

SEQ ID NO: 739530 - DNA, 97 bp, Homo sapiens
gaaggacaccaagatgcggatccgggcctttccgttttccaagagataacttcaccaagatgtccagtgataggcaaaggtccgatgatgagagccc

SEQ ID NO: 739531 - DNA, 100 bp, Homo sapiens
gctggtgaaccacaagcagtacctggaggccaagaggctgttgaaggagttccaggcacgttaccggcagctggtatgtcgagagtaccaacgtggcaat

SEQ ID NO: 739532 - DNA, 51 bp, Homo sapiens
aaggattccaagtaactcttatttgcggtgacttccacagtaaagcaagcc

SEQ ID NO: 739533 - DNA, 100 bp, Homo sapiens
cgagcttccgcgccgcccgcacgcgcgacctacctgggcgctccgcgcccccggatgctgcaggaagcaatgaggctccccaagaacacacctgaggaaa

SEQ ID NO: 739534 - DNA, 51 bp, Homo sapiens
ctggtgtgcagccgcccaggagggttcatcaatggtgctaaggaaatttgc

SEQ ID NO: 739535 - DNA, 82 bp, Homo sapiens
gcccagcagcagtatggcttccagtacccccttgccatggcagcaaagccccttcccagctgcctgcctgccctagccagct

SEQ ID NO: 739536 - DNA, 50 bp, Homo sapiens
tcgcactttataccacctgcgattactatgcgtctgttactagagtggag

SEQ ID NO: 739537 - DNA, 97 bp, Homo sapiens
taacagctaaggtattcctggaagcagagtaaataaagctcatggcccaccagctagaaaggtgtcatggagaaactccagctgggcccagagattc

SEQ ID NO: 739538 - DNA, 95 bp, Homo sapiens
gagggctaccacgttctgcggtgctgcaggtggagaaattttcagcctgtgtttacctgagttggctgaaatggtttctgaaaatgatgttatca

SEQ ID NO: 739539 - DNA, 100 bp, Homo sapiens
cctgcaagaaaacaagcagcttctgcacgacgcactggcccaggacctgcacaagggggctgaggccatggttctggagagcgttatgtttgccattctc

SEQ ID NO: 739540 - DNA, 74 bp, Homo sapiens
aagcgaggcacttgctaactcttggactctggctcctcctcctcctcagaagatgaacgacccaagagatccca

SEQ ID NO: 739541 - DNA, 125 bp, Homo sapiens
tcaagatggcggccaatgtgggatcgatgtttcaatattggaagcgctttgatttacagcagctgcagggccatgttctgcaacgatttaaaggaaaagtatgagaaaaggatcattattaaagg

SEQ ID NO: 739542 - DNA, 89 bp, Homo sapiens
agtagtcaagatggataaaaagtcctttgaaatggtgctggatgaaattagaaagttaacaagcacaagccctggctggagcccaccta

SEQ ID NO: 739543 - DNA, 96 bp, Homo sapiens
agcctggggactctgcctcgtgccgctgagcctggcgcagatcggtgtcatggagaaactccagctgggcccagagattctgcagcgggaaaatcc

SEQ ID NO: 739544 - DNA, 89 bp, Homo sapiens
tagcaagaaggtagaaatcatcataggtgaccaagaatatggcccaggtgaccaaagccctggacaaggccctgagcaccatggacctg

SEQ ID NO: 739545 - DNA, 90 bp, Homo sapiens
tgcaagcgcagttctcttcggacaggggcctttacaacaactaaacggacaggcattccagccccacgggaattttcagtaactgtctca

SEQ ID NO: 739546 - DNA, 74 bp, Homo sapiens
ccaagtgcattgcctttggaaacgaggtttacccagggttgatgataaccgctggccttattcattggatttta

SEQ ID NO: 739547 - DNA, 100 bp, Homo sapiens
catctgccctacccccatcctgcagaaggtgaagctttgttctaagaatatttgtttcatctagtttatgagtccaaatgatatagactgtaaatgtcac

SEQ ID NO: 739548 - DNA, 100 bp, Homo sapiens
cccgggaggaaggaacgaggcaaggagctaaagcagcgtgcgttcagccctggggtctctcaggcagctgcagagcttcaacagtactgtatgcagaatg

SEQ ID NO: 739549 - DNA, 98 bp, Homo sapiens
aagtacaggcagtcaaccctaaacagtggactcaacttcaaagacgttctcaaggagaaggcagacctgggcccaagttgttttacaaggcaaatcca

SEQ ID NO: 739550 - DNA, 75 bp, Homo sapiens
actccttcaagcatataagtggtcaaacaaggagagcctgacaaggagctgaatcctaagaagaagatttgggag

SEQ ID NO: 739551 - DNA, 75 bp, Homo sapiens
accacctgcgggagatcatcatctgcacctaccgccagtttggcaatgaggagcagcagctggcgtgggccaagc

SEQ ID NO: 739552 - DNA, 98 bp, Homo sapiens
ggcacggcagccaccatggcgctcctgctgtgcttcgtgctcctgtgcggagtagtggatgcaagtattggcattatgatgaaaacttgctcacttcg

SEQ ID NO: 739553 - DNA, 100 bp, Homo sapiens
ctccgcgccgcatcgctcgggtgcagcgcagctcagcgcagcgctgcggcctttcggcagccgaacggccgcggcagctatccagtcagttcgctgctat

SEQ ID NO: 739554 - DNA, 100 bp, Homo sapiens
atataaacagagaaatggctggtctcacaaagatctattaagattgtcacatcttaaaccttccagtgaagatttgtcccatcagatgaaaagaagaaac

SEQ ID NO: 739555 - DNA, 90 bp, Homo sapiens
ctgaatcctggctgtgtgaccccaaagtcttgctgtgtggcccaggctggagtgcccggctggtctcaaattcctgacctcaagtgatct

SEQ ID NO: 739556 - DNA, 100 bp, Homo sapiens
aggacagcagcattgatcaatcttacagctaacatgttgtacctggaaaacaatgcccagactcaatttagtgagaacaaaagtccagaatgttgaccta

SEQ ID NO: 739557 - DNA, 82 bp, Homo sapiens
aaatgcggggacctggtgttcgccaagatgaagggctacccacactggccggcccggactaatagggatgccaaaggaaaaa

SEQ ID NO: 739558 - DNA, 107 bp, Homo sapiens
ggccggtgccagcacctttcggcttctgagacggcggcagcagcggcattcaggaccgtataatagacgctggccccaaaggaaactactctcgatttatgaatcac

SEQ ID NO: 739559 - DNA, 75 bp, Homo sapiens
tctcctgtgctgcgaccactgcccggctgccttccacctccagtgctgtggtggtgaccgcggtggcttcaaaaa

SEQ ID NO: 739560 - DNA, 105 bp, Homo sapiens
gcagaggatccagtgttcaccatcctggccccggaaggcaaaatacatatctcagtgcattgatgagatcaagcaggagctgaagcaggacaacatagcggtgaa

SEQ ID NO: 739561 - DNA, 100 bp, Homo sapiens
caacaacagcaacttgtgattggcggtgaccggatattcagttgcacatccccacatcaatgcactgccaatggtattacacaatggcctcgttatggag

SEQ ID NO: 739562 - DNA, 100 bp, Homo sapiens
gaatcctataattgaaaaacagtaaagatggaaaaccagttattgaatatcaagaggaggagttgttgccttgggagaccatttcagaggaagtgaatat

SEQ ID NO: 739563 - DNA, 75 bp, Homo sapiens
attgaagaggaactgaagaccacaaaacgtaaaatgaaccttaaaattcaagagtcaatgcaaaatcatgctgcc

SEQ ID NO: 739564 - DNA, 82 bp, Homo sapiens
gtcttccagtcccctgacgaggacgaggaggaggactatgagcagtggctggagatcaaagtggacagtagtcctgatgagg

SEQ ID NO: 739565 - DNA, 100 bp, Homo sapiens
gcagagactgatctttgctggcaagcagctggaagatggacgtactttgtctgactacaatattcaaaaggagatctataaggacaggcagaaattctca

SEQ ID NO: 739566 - DNA, 80 bp, Homo sapiens
ccaggtgactcgtgctgtgctaggggatgatccgcaactgatgaaggtgctaaaatgatgtattttctggacaagtcaag

SEQ ID NO: 739567 - DNA, 75 bp, Homo sapiens
acatcccagccggtgactgcagtgaggccagaaatgtacacacaggagagctggctgcagtaaaaatcattaaat

SEQ ID NO: 739568 - DNA, 51 bp, Homo sapiens
ctatgttacgtggatgtttgtaacatcatcttaacaccaattgaagttgct

SEQ ID NO: 739569 - DNA, 100 bp, Homo sapiens
tcgcgagtatctccgtttcctggatgtgaacattggctctaccagtgcacctggacagggaggaatcctggctcagcgggagtttgacaggcgattctcc

SEQ ID NO: 739570 - DNA, 100 bp, Homo sapiens
gatagaaacgtgttcgctgcccagaagaagggaaggcgcgagtgaggaaaggaggtactgtaggtacatcaggaacgtctctatcaagaatacaatttca

SEQ ID NO: 739571 - DNA, 85 bp, Homo sapiens
agaatcttgtctttggcaaaggattccaagcaaagatcttccctgagagtcctggtccgcgccagagcccagcgcgcctcgtcgc

SEQ ID NO: 739572 - DNA, 89 bp, Homo sapiens
aattctgtggattttcgtctaaaaataacaagaatgggaggagaagggagctgtggccctcaagaatcttcaaattaaagaaaatgccc

SEQ ID NO: 739573 - DNA, 75 bp, Homo sapiens
ctgggattacaggtgcctgctaccacacccggtaccgctagagcgacatgatggtggaatctgcctcggagacaa

SEQ ID NO: 739574 - DNA, 75 bp, Homo sapiens
gccgcacagctctacactttgcctcatgcaatggcaatgaccagattggttggttacatcacttgctgagttgta

SEQ ID NO: 739575 - DNA, 98 bp, Homo sapiens
tggacatcgatggacgcattcagaaggctgaaggtgatgtggccgccctcaaccgacgcatccagctcgttgaggaggagttggacagggctcaggaa

SEQ ID NO: 739576 - DNA, 50 bp, Homo sapiens
ccggggagctgttggcttatcagccgcttacaaacacgcagatggcaaga

SEQ ID NO: 739577 - DNA, 100 bp, Homo sapiens
cgagcacatgatggcgatacgggagctcaaagtgtgccttctcggggcccttgatgagcctccctatttgacagtgggcactgatgtgagtgctaaatac

SEQ ID NO: 739578 - DNA, 75 bp, Homo sapiens
ttggatccgcgggacaagaaaattcatgcggtaagaatgattgatgttggctgatattggagtgctcattcacat

SEQ ID NO: 739579 - DNA, 98 bp, Homo sapiens
cctccccaaccccaccatcccaccaaagggggctgctgaccgagagagctcactcagccagccagagaacatcctgtgtgtcaacaccaccgggcatt

SEQ ID NO: 739580 - DNA, 82 bp, Homo sapiens
aagagattcagtatcactcgctcccttgatgatcttgagaagccaaagatgttgaccaggaagatcaagctgtgggacatca

SEQ ID NO: 739581 - DNA, 135 bp, Homo sapiens
cttgacctcaggaccctacccagggttctagaaatccaggcaggcatctatcttgaagaacctatgagaaccccaaagacattaaagattgctgaaatacaggcaagacggattgctgtggactgggaatccttg

SEQ ID NO: 739582 - DNA, 75 bp, Homo sapiens
gtgattggcaggatcctggtatccgctaacaggtaacaactccgtgggtgccatccagtgccctgatagtcagtt

SEQ ID NO: 739583 - DNA, 134 bp, Homo sapiens
ccaaattgggcgagggcacaaaataaccacttaccccttctcaccgaggaagagcgggagaaaggagatctcatcaaagtgctcaaatggtacgtggaccggatcacagaagcagagcggcaagagcatatcca

SEQ ID NO: 739584 - DNA, 98 bp, Homo sapiens
cttcagactggtggactgttcatcattctgttgaagaaacgcttaacccagtgaagcaaaaaatttattgccatatcttggaccccacaaaatgagag

SEQ ID NO: 739585 - DNA, 96 bp, Homo sapiens
gagacgaggttcctgtgcaactcttcacaggacgtgagcctgcacttcgtgctctggggctgcctgcacgtgtaccagcgcatgatcgacaaggcg

SEQ ID NO: 739586 - DNA, 75 bp, Homo sapiens
tgtcactgtccccccggcttccagggaccccgctgtcagtatggtacatgtcccagagcaagcacacggaggccc

SEQ ID NO: 739587 - DNA, 90 bp, Homo sapiens
tcagtgccagagaaccgagcatccagtcatctcctataaagggtttcgaaaaaacgatgaaatgaaagctatggatgttttaccaatttt

SEQ ID NO: 739588 - DNA, 87 bp, Homo sapiens
gtcatcccacccacggctctcaacagcatcgactccgatggacatggatttgattgacatactttggaggcaagatatagatcttgg

SEQ ID NO: 739589 - DNA, 75 bp, Homo sapiens
atttcctcctggacttgaggctgacaggaaaagcacaatagtgaggctattatttcgcttctatgagcctcaaaa

SEQ ID NO: 739590 - DNA, 100 bp, Homo sapiens
caggcacttcctcactaatatcagggcttattttgccctggtacctgacagtgtaaagaaggagctcctacaaagaataagaacattccttgctcagcat

SEQ ID NO: 739591 - DNA, 90 bp, Homo sapiens
ttgcaacactaaacgagaaattgacagcccttgaacggagaatagagtacattgaagctcggttaagtgggcagaccaacatccacctca

SEQ ID NO: 739592 - DNA, 100 bp, Homo sapiens
gcagcccgacgttccgctgctggggagggtgaggacaaaatcttcttaatcaacaagcttcactccatctacgagaggaaggagagggaggagaggagca

SEQ ID NO: 739593 - DNA, 75 bp, Homo sapiens
aaaggcaacatcctgtcacaggccatgctctggcaaaaactgcacgatctgattttctggagagatgtgaagaag

SEQ ID NO: 739594 - DNA, 75 bp, Homo sapiens
ggcaacaggccagcagccaaagtggatgaaagccaaactggagaacccggctggcttggaggagaattaaaagga

SEQ ID NO: 739595 - DNA, 75 bp, Homo sapiens
ggttatggtgggaggagccgatactgagcttcttcctatttgccatgggactgcctccgggcctgccaggagcag

SEQ ID NO: 739596 - DNA, 97 bp, Homo sapiens
gaagccctttgaggtgcactggaggaagcacaccctgtcctatgtggacgtcggcactgggaaggttgtggcagcactgcctgaaggtatgagacca

SEQ ID NO: 739597 - DNA, 101 bp, Homo sapiens
cgtcccgcgcggggcacgatgttgaacatgtggaaggtgcgcgagctggtggacaaagcgagcagatgtctcaagtattagatgccatgtttgaaaaattg

SEQ ID NO: 739598 - DNA, 82 bp, Homo sapiens
ccagtccagaccctgctgctgtcttcaaagaagattgtcactgctgttccaagggcacacgcagagggatttggaattcctg

SEQ ID NO: 739599 - DNA, 88 bp, Homo sapiens
ggcgtctctggccggccttggtgcggcgagccgagcgaggcagctctgagccgcgcgggttcatagtggcgtcatgcacgcagactcc

SEQ ID NO: 739600 - DNA, 100 bp, Homo sapiens
gttggagctgccgccgcctgcagtcggtgaccgcgcgactcggcgcccgcccgcgtggaaaagcgagattgtctttgaccatttgctatggacattgtca

SEQ ID NO: 739601 - DNA, 78 bp, Homo sapiens
gatttctgcatttccatctgaggtggttagacgatgctattattgacgagattacacccaagctgatcagagattggc

SEQ ID NO: 739602 - DNA, 100 bp, Homo sapiens
ggcaggggacgtgaacatggatgaccctaagaaggaaggtttccaatacttatctacaggaatcgccatgaccccagctctgagggaggcaacagcaaag

SEQ ID NO: 739603 - DNA, 75 bp, Homo sapiens
ccggcagaggatccagtgttcaccatcctggccccggaagcttttctccatggaatccttctgtacatgatgaag

SEQ ID NO: 739604 - DNA, 98 bp, Homo sapiens
gagacatgagcaagaaaagcctctgggagcagaagggaggctccaagacctcatcaacaattaaggaaaattgcctaagaattatgacccaaaagtta

SEQ ID NO: 739605 - DNA, 82 bp, Homo sapiens
agaagaataagcacaagcacaaacagagccgtacccaggatcctgtccccccagacaaggaagaggtgcagcggaagcggag

SEQ ID NO: 739606 - DNA, 100 bp, Homo sapiens
ccgagtggtctaaggcgccagactcaagatcaaaggctcgtggtccagcaagaggggcggtgaggcctctgtcaacccctacagccataaaagtattatc

SEQ ID NO: 739607 - DNA, 100 bp, Homo sapiens
cgcaaacaaaaaagaaggaagacggagcagcacagtcattcctttgtgaaaaaggcattcagcttctagtgaacaataaaatcattagtttggaccttcc

SEQ ID NO: 739608 - DNA, 100 bp, Homo sapiens
ctgcaacacttacacagcagcaacagcctgctacaggcccatggagagactgcctgcaggccctggaggatggccacgacaccagctccatctacctggt

SEQ ID NO: 739609 - DNA, 97 bp, Homo sapiens
acaaaactgtgtggagttttatcctatattcataattacattgtggatggctgggtggtatttcaaccaaggatttgctcgaatatttgggtaccca

SEQ ID NO: 739610 - DNA, 100 bp, Homo sapiens
cacaaatgaacacgccttctcagccccgccagacagagcgcctgtcggctgagcagatcaaggagtacaagggagtctttgagatgttcgacgaagaggg

SEQ ID NO: 739611 - DNA, 75 bp, Homo sapiens
tgtcgctgcccgcctgccctgaggagtccccgctgcttggtgaagagtgttgagctcagcccccatacagattat

SEQ ID NO: 739612 - DNA, 97 bp, Homo sapiens
cagcagcagctccagcaggcgctggctcctgctcagtttgaaaaagtaccagaaggtcctatccctccatctacaccaaagtttgcatatggaaagg

SEQ ID NO: 739613 - DNA, 100 bp, Homo sapiens
tagtattctctatgctagaaagtatgtctggatttggaatgaacaggaatcaggcatttggaatgaataactccttatcaagtaacatttttaatggaac

SEQ ID NO: 739614 - DNA, 100 bp, Homo sapiens
aagacttattgatctccatacaaatgttgccactgctgttttagaacatataaagacaaaacttacctggggtccctacttatggttttacatgcttcgg

SEQ ID NO: 739615 - DNA, 74 bp, Homo sapiens
gccacacttctgcacaacctcatctcctacatgctgctgatgaaggtatgaagaaattgatttggaaactggaa

SEQ ID NO: 739616 - DNA, 100 bp, Homo sapiens
cggcggccctggaacctggatatcgcgcgaggccaagaagcttgagagaagaaaaatttcagaaaaattgtctcaatttgactagaatatcaatgaacca

SEQ ID NO: 739617 - DNA, 100 bp, Homo sapiens
ctcgctggcctgcgacccagccagccagcaacctggaccgatgccacagggcccagtgggctccgggtcctgccccagggctacggctggaacctgctgt

SEQ ID NO: 739618 - DNA, 100 bp, Homo sapiens
cttccagaagagcggaccagggctgctgccagcacctgccactcagagcgcctctgtcgctgggacccttcagacaatgcagatcttcgtgaagactctg

SEQ ID NO: 739619 - DNA, 113 bp, Homo sapiens
aacacatagaccacacatttgagatccagtacaggaaagacacggccacgtggaaggctttatcctgtggataaacgcagagtgaacgagtttggggagtcctacgaggagaa

SEQ ID NO: 739620 - DNA, 82 bp, Homo sapiens
cctggagcctcagttggaagcagccgatccagcctgcggagcctgtggggcaggacaccgctctatgacttccacctggccc

SEQ ID NO: 739621 - DNA, 90 bp, Homo sapiens
gaggctgtgcgggccccgctccgcttcgaatggtttcagaagaatcgacgagaccaggacgccaccaaacacaagctcatagagatcgcc

SEQ ID NO: 739622 - DNA, 80 bp, Homo sapiens
ctcctacctgtgtaccgagccaggaaaaccagtagattcccagacatcgcgaagtgaatctgaaattgtgccaaaagttg

SEQ ID NO: 739623 - DNA, 100 bp, Homo sapiens
ctgcaatgtttgcgatgactttgatctttgctacggatgctatgcagcgaagaaatactcctacgggagccagatgaccaggatgccccagatgagcatg

SEQ ID NO: 739624 - DNA, 82 bp, Homo sapiens
aaaacccggagtgccccgcacaggtgtggatgaggtcaccattgtcaacattttgaccaaccgcagcaatgcacagagacag

SEQ ID NO: 739625 - DNA, 75 bp, Homo sapiens
cctcggtgtcccccagttcggcaaaggtccaagggtagccaaggatggctgcagcttcatatgatcagttgttaa

SEQ ID NO: 739626 - DNA, 75 bp, Homo sapiens
tcgcgacgcgcccggcccggagcccccagcgcagcggccgcggtattaatctctggagaagacacatccacagtt

SEQ ID NO: 739627 - DNA, 50 bp, Homo sapiens
gcgagcttgacaacccctttcagtgagaaggcaaccaaagtgcaggacat

SEQ ID NO: 739628 - DNA, 82 bp, Homo sapiens
cagacagccggcgctggctgtggtcggtgctggcggcggcgcttgggctctgagatggtaacctgcacctcaatgtgacggc

SEQ ID NO: 739629 - DNA, 98 bp, Homo sapiens
tgacctggggaacctgctcaaagccctgggtcgcttggaagaagccaaggactctcgttggggagatagagattcagaaggcacctggagaaaaggac

SEQ ID NO: 739630 - DNA, 75 bp, Homo sapiens
cctccacggcccgggagatagagtgcttttggtcgaatattgaacaggttatcaatactctggctgaccatcatc

SEQ ID NO: 739631 - DNA, 76 bp, Homo sapiens
tacacggaccagaggagcctggaccgctcattcggactcgtcgggcaggagatggtaacctgcacctcaatgtgac

SEQ ID NO: 739632 - DNA, 100 bp, Homo sapiens
gaaagcttgtcctggtataaagatgatgaggaacttctacttgcagaaaagtgggctaaaatgaacaagctcccctttccaaagattgatccttatgtgt

SEQ ID NO: 739633 - DNA, 80 bp, Homo sapiens
ggaaatcgggctgaagcgactgagtccgcgatggaggacatggtctgctatacagctcagactctcgtccgaatcctctc

SEQ ID NO: 739634 - DNA, 96 bp, Homo sapiens
tggagagcctgttggagaaacacaaagagcaaatggttatgagccttagagtttctgaactccaagtactgttgggctacgccgggagaaacaagc

SEQ ID NO: 739635 - DNA, 75 bp, Homo sapiens
attctgcagcataagaaagtggatgaatacacagacactgacctgtacacagtatgccgagattttgctgtcctg

SEQ ID NO: 739636 - DNA, 82 bp, Homo sapiens
aagagattaaagatgcagtacgccacggggccgctgctcaagttccagatttggtacttcgtactggatttcgaggctggca

SEQ ID NO: 739637 - DNA, 80 bp, Homo sapiens
ggagctgaggaaccggaccccggcagctgtttttagaacttcagccataaaaatgggcagaattttccttgatcatatcg

SEQ ID NO: 739638 - DNA, 83 bp, Homo sapiens
gtctgactctgactctcggactgagaaacgcaagcagaaaggacccaggagcgataacagtaaatcaaataagatatttgtcg

SEQ ID NO: 739639 - DNA, 100 bp, Homo sapiens
tggaagcccttcctggtcaacatgtgcgtggctacggtcctcacggccggcgcttacctctgctacagggttaatatggctccaaaagggccccctcctt

SEQ ID NO: 739640 - DNA, 100 bp, Homo sapiens
gaaaaggagaaagatcacctcgaactgcaccatagctgaagagtctgctgcttctggagcaaagggagatctggctgctagtgaccgatgtcactctgca

SEQ ID NO: 739641 - DNA, 90 bp, Homo sapiens
cgcgcagtgcctggggtactacggctacagcaaggtgctggagaatctggtaaaagcaccattgtgaagcagatgaggatcctgcatgtt

SEQ ID NO: 739642 - DNA, 89 bp, Homo sapiens
acctgaagaagatgaacaagcgccagagtggagactgctgcacggactctggaaccatgaacatatttgatcgaaagatcaactttgat

SEQ ID NO: 739643 - DNA, 80 bp, Homo sapiens
atacattacagtggttggaataaaaaattccagctaagaaagagtcttgtccaaacactggaagagacaaagaccacctg

SEQ ID NO: 739644 - DNA, 100 bp, Homo sapiens
ctttctggatgatggagtggatgaacaagtactgatggaactaaaaactgaaaggcagcaacaggtggaagctgttgagttggaggctaaagaagttctc

SEQ ID NO: 739645 - DNA, 100 bp, Homo sapiens
gtccctagagaggataccgggacgctcctgaagccgcgagatggatgaaacaggcgcctatttaatcgacagagaccccacctactttgggcctgtgctg

SEQ ID NO: 739646 - DNA, 75 bp, Homo sapiens
attaagtacaatttagaagaactctaccagtggttacccaggctgtccttacccacctggtggtccatatcctgc

SEQ ID NO: 739647 - DNA, 100 bp, Homo sapiens
gcagtccctctccccaccgcccagtaccggcagcctcagcaatagtcgcacgcttccgagtttacccaaggtccagcctagcccctaggcaccatgtcgg

SEQ ID NO: 739648 - DNA, 100 bp, Homo sapiens
gattttatgggaaaattaagcagatgctccagtttgagaaacctggatctgcgatctgtttgtgctgtgattgggttattatacccctgcattgacagac

SEQ ID NO: 739649 - DNA, 90 bp, Homo sapiens
ctgcgaaggaaacttacccaaagggaagtctatttccagcaagctctctatgagttgtcatatcatgtaattaaaggaaatctaaagcat

SEQ ID NO: 739650 - DNA, 100 bp, Homo sapiens
caggcctggctctgaactgccacataaacaagaagtccttgtttgacaggaagcactacttctatgcagacctccctcattgctggattttcctccaatc

SEQ ID NO: 739651 - DNA, 83 bp, Homo sapiens
ccaacagccaccaccaccaccagatgtaccataacagcttgggggaaagaccatgaaaaagatgcttttgaacatattgtaac

SEQ ID NO: 739652 - DNA, 100 bp, Homo sapiens
gcgaagagagaagaggtgagggcggtcgtcagctaagggccccggggctcgcggggggtgcgcagggcaggaatgtgccataccgaatccgtgtgcggct

SEQ ID NO: 739653 - DNA, 95 bp, Homo sapiens
ggccgtcgcccaggagtcatcggacgccagaatctgggccgagaactactggtggcgtggccagaacacacggacgctgtgtgtggggcccttcc

SEQ ID NO: 739654 - DNA, 82 bp, Homo sapiens
ttctagatgatattggacatggagtaaagctgaaccgtgtgaatggcacgtcatcaccacagtcccctctgagcacatcggg

SEQ ID NO: 739655 - DNA, 98 bp, Homo sapiens
ggcaagctggctgcgagcggctgaggtcaaaatgcagatcttcgtgaaaacccttaccggcaagaccatcacccttgaggtggagcccagtgacacca

SEQ ID NO: 739656 - DNA, 82 bp, Homo sapiens
tggaaaccatggatctcgaccagggtggagaggcacgctacaccccaactgccaagacagcagcgggcggccgcggcgtgac

SEQ ID NO: 739657 - DNA, 74 bp, Homo sapiens
tggaatatgaagagacacagtatggtagccacacccccaggctggtgcagtggtgtcatcttggctcagtgcag

SEQ ID NO: 739658 - DNA, 75 bp, Homo sapiens
gtggtctactctgatgtcaatcttgagggctagattgggaaaatgaggtacgttagtgttcgcgattttaaaggc

SEQ ID NO: 739659 - DNA, 50 bp, Homo sapiens
aacaccatattgaagcctgtgcccagaattccttcgacaatcctgagtgg

SEQ ID NO: 739660 - DNA, 87 bp, Homo sapiens
gggaacagatttcagtgtcctccttagctctgcaggtgaatctggattgggaaagtcgacattaatcaactcattattcctcacaga

SEQ ID NO: 739661 - DNA, 82 bp, Homo sapiens
cgaagcgagagcggaggccgcactccagcactgcgcagggaccgcccagctcaacattggcaatgtgctccctgtgggcacc

SEQ ID NO: 739662 - DNA, 101 bp, Homo sapiens
tggccctgcgggctcagaacgatgtggctgcccggcagacgacagagatgctgaaggatttacttcatttgggtcactaggtcacgggggcctcacttcat

SEQ ID NO: 739663 - DNA, 75 bp, Homo sapiens
agcaaaaggacttatgagttacaggataattacaggactttccttatcccagttgattgtgcagaatacactgcc

SEQ ID NO: 739664 - DNA, 98 bp, Homo sapiens
cgccttgctcctcgccgcggcggggactgcagtgaccccgacctggccccgctccaggatgggactgccgagtgtggcccggagctggcccgggacag

SEQ ID NO: 739665 - DNA, 90 bp, Homo sapiens
ataaaatttcatggagaagaaggccttgactacggaggggttgccaggtgtcacaacataatgaaagttgctcaagccaaactggaaatg

SEQ ID NO: 739666 - DNA, 75 bp, Homo sapiens
tcagttgccatgagagccatgaacggagagaggcatttcatccttcatgaagccattcaggattttgaattgcat

SEQ ID NO: 739667 - DNA, 99 bp, Homo sapiens
ctttcttcatgtgttcctgtagctctgatgagtgcaatgacaacatcatcttctcagaaggtccttatgtcgtcagaagatcgagaagctcaggaggat

SEQ ID NO: 739668 - DNA, 96 bp, Homo sapiens
cgaagtttgtcggcccttgccttggcagagctgagctgaagaaatcaggggagaaacccctgcttggtggaagcctgatggaatatgcaatcttgt

SEQ ID NO: 739669 - DNA, 111 bp, Homo sapiens
tggtagtactgccagtggcacttctgggcagagtactactgcgccaaatttggtgcctggagtaggagatcatccaattatgatgggttttgaaccccttgtgaaccagag

SEQ ID NO: 739670 - DNA, 99 bp, Homo sapiens
ctgacgcatctgtctgaggagcggtcagtgacgcgatggagcgggcaagcaattctgtggtgttcttggtcacacatttatggagtttctgaagggcag

SEQ ID NO: 739671 - DNA, 80 bp, Homo sapiens
atcttgaggggtctccatccagatcagctgaatcagagtttgcattgttaacaagccttgttgtcctcctggtgcgaaga

SEQ ID NO: 739672 - DNA, 90 bp, Homo sapiens
ctgggatttggaggatttaatacacagcagcagcagcaaactagtacagcagggaagaactggaaactcagagaaagaaactgcccttcc

SEQ ID NO: 739673 - DNA, 100 bp, Homo sapiens
ccggctacaattggagtcagagtcccaaagacatggaatgtctacacaaggaagtacaggatttggcttttctagatgtcgtatccaaacttcgcagtca

SEQ ID NO: 739674 - DNA, 82 bp, Homo sapiens
gatcatgtctgcgagccaggattcccgaacaccttccaccatgaccacctcagcaagttcccacttaaataaaggcatcaag

SEQ ID NO: 739675 - DNA, 101 bp, Homo sapiens
tcgcctgatgaaccaattgatagaccgcaacttgttccagcgatggcatgttcctctagaactccagatgacaagacaaatggctagctctggtgcatcag

SEQ ID NO: 739676 - DNA, 89 bp, Homo sapiens
atcagagttttctaaaatgcaagaagatctgtgtcatattgcccataaagcatggcacattacacttctgtggatttaaagtccttgcc

SEQ ID NO: 739677 - DNA, 101 bp, Homo sapiens
atggtgggcaaactaagccgattttccggaaaaagggctgacaaagaagagaaccaaagtccagaagaagtcactgcttctcaagaaaccccttcgggttg

SEQ ID NO: 739678 - DNA, 100 bp, Homo sapiens
cattcagatgtggtggaatatgccaaggaaaaactggagagcttcatcaaaaatagtgatagctttgataagaaaaccagtggctgttacaagtaacaga

SEQ ID NO: 739679 - DNA, 75 bp, Homo sapiens
attgatacatgctggaggtctggctcaggttttgtggtctttgcaacccttgtggtcattgtggccttgatatta

SEQ ID NO: 739680 - DNA, 50 bp, Homo sapiens
gagaagcaccagatcatgcaccgaggtctcggcgcggaagatggccggcg

SEQ ID NO: 739681 - DNA, 75 bp, Homo sapiens
gcctttttggcctggcttgtttgcaaagtttgggcttcctgtagacacccttttcctgcgcaacagagctgggcc

SEQ ID NO: 739682 - DNA, 75 bp, Homo sapiens
cttcaacctcttattggaagattatccaaaagataggaaccaaggctttagccttctcaactcattgactggaac

SEQ ID NO: 739683 - DNA, 96 bp, Homo sapiens
atgcactaagcactccttctacatgttgcttcttggacacttaatgattgttggcaagaaatgtgctgctgatctgggcctgaataagggttatcg

SEQ ID NO: 739684 - DNA, 100 bp, Homo sapiens
ccaagacagagcgctactcctggcagtgcgtcaatcagagcgtcctgtgcgaaggaagaggcccagcagaagggactcgctgagccaccccccgccccac

SEQ ID NO: 739685 - DNA, 90 bp, Homo sapiens
tcgagctgtccgacaaccctggcgtccatgagcctgattttcagctgaactctcatctctcaacactggcaaatattcataagatctacc

SEQ ID NO: 739686 - DNA, 83 bp, Homo sapiens
cgcagccgtagacaccagctccgaaatcaccaccaaggcccagctgagagccagcctggaggttacccagcagcaggccaccc

SEQ ID NO: 739687 - DNA, 101 bp, Homo sapiens
tgcaccacagccatctcacatttccaagtacattctcaggtggagaccttcgggaacatgccctgtgtgccgccgtcatttcccacctgcggttattgaag

SEQ ID NO: 739688 - DNA, 100 bp, Homo sapiens
aattggaagctaaagctaccaaagacgtagaaagaaatcttagcaggatcttagtaagagccctaagaccatgaaaaagctgctgcccaagcgcaaacct

SEQ ID NO: 739689 - DNA, 75 bp, Homo sapiens
agcgcggcagggggccgggggcccaggtttttagaacttcagccataaaaatgggcagaattttccttgatcata

SEQ ID NO: 739690 - DNA, 101 bp, Homo sapiens
tgatcaacttcaaccctcacttcgatttggaggacagagactgcaagatgaggatgggacagaagaggataacagtcgtgttgaacctgttggacatgctg

SEQ ID NO: 739691 - DNA, 98 bp, Homo sapiens
agaactggtgcaagcggggccgcaagcagtgcaagacccatccccactttgtgattccctaccgctgcttaggtagctgcagcaaagtccacttccat

SEQ ID NO: 739692 - DNA, 100 bp, Homo sapiens
ctggtgtggggcaccaagagcagccccggtctctcggacaccattttctgccgctggacgcaagacaagttggatggcttgaggactggtactaaaagga

SEQ ID NO: 739693 - DNA, 97 bp, Homo sapiens
ccatggagggggtgctgtacaagtggaccaactatctgagcggagttccgattctgaagaggcatttgagaccccggagtcaacgacccctgtcaaa

SEQ ID NO: 739694 - DNA, 74 bp, Homo sapiens
cgccagagcatcctctgaagcagattaaggatctcgaggacctggaagaagcagaggagccagacatggaggaa

SEQ ID NO: 739695 - DNA, 100 bp, Homo sapiens
atgatggacttggagctgccgccgccgggactcccgtcccagcagccaccattggttcaggcaatcttcagcggtgatccagaggagatccggatgctca

SEQ ID NO: 739696 - DNA, 80 bp, Homo sapiens
cagggtttctcaatctctgcagatggccgtacgtgtgaaggaataagacgagttggaagaagacctgatcaacaacttca

SEQ ID NO: 739697 - DNA, 100 bp, Homo sapiens
cagcgggcggtgttcccggctccgtggggccgtcttcccggcgagtccgcgacggtcgccgcccacggcgaggtaagccgcgtagcagatacgctgccag

SEQ ID NO: 739698 - DNA, 90 bp, Homo sapiens
tgaggactgactggggttctgagactccctgtcccggaccgcaggttggtcaaagaaaaagtgatgtatgaaaaagaggcaaaacaacaa

SEQ ID NO: 739699 - DNA, 90 bp, Homo sapiens
taactagctccaggttaggccgagctttgcgggaaagcagcggtcagaaaaagagtgcacgccagtatcacgtacagttctttggtgacg

SEQ ID NO: 739700 - DNA, 101 bp, Homo sapiens
ggccccggggagacggacgcgtttggcaacagcgagggcaaagagctggtggcctcaggtgaaaaggccacccgttcatcgtgcagttcaatgatggaaat

SEQ ID NO: 739701 - DNA, 96 bp, Homo sapiens
gtggaggacaggggtcagtggtggaagtgagaccgaaatagactctgaagtaatatctggactttgaaattgacagagcgggatgccaccagcttg

SEQ ID NO: 739702 - DNA, 74 bp, Homo sapiens
ccgccccggctcggcctggcagagacgctctcctggtctgtgttctgactctttggaaaagagcttaaggatca

SEQ ID NO: 739703 - DNA, 50 bp, Homo sapiens
tgaggaaaatgaagtagatgacactgagcatgcttttcacttccactgca

SEQ ID NO: 739704 - DNA, 100 bp, Homo sapiens
ggcggtccacggccggaatggcagcaagctcaggttcttgcacgcattgcaaatgccacgaggccaactattcatctgtgtgagattgtgaacgaacccc

SEQ ID NO: 739705 - DNA, 100 bp, Homo sapiens
tcagacgcagccgtagacaccagctccgaaatcaccaccaaggtggcagtagagaagagcatcacagaagttgctcaggagctgacagagctggtggaac

SEQ ID NO: 739706 - DNA, 140 bp, Homo sapiens
ctggacctgccgcagatcgctgtagtgggcggccagagcgccggcaagagctcggtgctggagaacttcgtgggccggaggccactgtctgcagctcccgtgaagatgtccactccagacccacccctgggcggaactcc

SEQ ID NO: 739707 - DNA, 75 bp, Homo sapiens
aacgccatcaccgacctcatcagtgagctgtccctgctggaggagcgcttccggattttactatgagcagcgatt

SEQ ID NO: 739708 - DNA, 82 bp, Homo sapiens
aagctccgcaccaaggtggagaacgaggaggaaggaagagacttgagctgttgtgtagcttctcttgttcaagtgatgctgg

SEQ ID NO: 739709 - DNA, 82 bp, Homo sapiens
agttcagactcttgatcccacagccacttcttgagtgagaaaacctacagggactttcgattgcagggtgtgttggaaggaa

SEQ ID NO: 739710 - DNA, 108 bp, Homo sapiens
ggactggctcttattgctgaaagactacccatgctatatccagaagtaattcaacaggtctattacaatggctaccatggagacacctctgaaacatttttggtgggc

SEQ ID NO: 739711 - DNA, 100 bp, Homo sapiens
gcctatcctctccgagcaagatggcaaccccggcggcggtcaaccctccggaaaaaagagtttgatgtggatactctcagtaaatccgagctgcggatgc

SEQ ID NO: 739712 - DNA, 50 bp, Homo sapiens
ctgttccctggaggactttctctgtgtttcagctgaaccatccgttcatc

SEQ ID NO: 739713 - DNA, 75 bp, Homo sapiens
gtgttggagaaggggtgactacagtcaaaccagggcagtagctcgcctgagccagagatttcccaaagctgagtt

SEQ ID NO: 739714 - DNA, 99 bp, Homo sapiens
agaagagattttggattctcaaaacttaaattcaagaaggagccctgtcccagatggatagctcccagttgatccattgtcgggagcttgtggcacatc

SEQ ID NO: 739715 - DNA, 75 bp, Homo sapiens
ggacacagagaatttttccaagttacagctacctagcggggatctgatgagcttctttcttctggcatcattaac

SEQ ID NO: 739716 - DNA, 76 bp, Homo sapiens
cttggatatgcgaggacgatgcagtgctggacaaaagacaagttggatggcttgaggactggtactaaaaggaaac

SEQ ID NO: 739717 - DNA, 90 bp, Homo sapiens
atgtcggcgaagagttcaaccagttggcttcagctgttctggaggctgtggaaaacaatactctaagcattgaaccagtgggattacaac

SEQ ID NO: 739718 - DNA, 100 bp, Homo sapiens
cctcccttgaaaccggcactgggacttctcgatctctggaggcacctgttgcaagtgacagatgagctcacagtgcctgcactttaccccagtagccctg

SEQ ID NO: 739719 - DNA, 74 bp, Homo sapiens
gatcatgggcaaaggacagatccaggtgacagagttagtccttgataattgcctgtgtgtcaatggggaaattg

SEQ ID NO: 739720 - DNA, 98 bp, Homo sapiens
cgagatctgcgtggtgatcggcggcgtccgcaaccagcagacccttggagagatggagccatctcagtgtgtggaggagctggaggatgatgtgttcc

SEQ ID NO: 739721 - DNA, 100 bp, Homo sapiens
gaatgaccctagccagactcagggatcaaagagcaaacagattcagtggcctgcattggaaacagagcaaatgcagcgttacaatcaaagacttattgag

SEQ ID NO: 739722 - DNA, 50 bp, Homo sapiens
acatccagagcgctctgctggtcacagttattaaagagggtgtacgggag

SEQ ID NO: 739723 - DNA, 75 bp, Homo sapiens
ggagcatggaggcgcacaacatcctcagatccactccttataccgccgcacaggtgccagctttcagaaggccca

SEQ ID NO: 739724 - DNA, 75 bp, Homo sapiens
cctcctgagtacctgggattacaggaaacatctgtatggattatttcactataatcctatgatgcttggacttga

SEQ ID NO: 739725 - DNA, 98 bp, Homo sapiens
caccattggcaaggagatcattgacctcgtgttggaccgaattcgcaagctggccataggaaaaggatacagagtagagtttcatgaacctgaaactt

SEQ ID NO: 739726 - DNA, 74 bp, Homo sapiens
ccgctacgtgactcttttctccagtgggaggtctgaagagcccttggaggggagaatataaagaaccaagacat

SEQ ID NO: 739727 - DNA, 103 bp, Homo sapiens
tggccctctgtctgcctgtgtccctgaccatggctccctgcagtaccctttaacggtgtcccatttcccaaaaactttatgtctgtggcaaagactattctaa

SEQ ID NO: 739728 - DNA, 76 bp, Homo sapiens
gcttgggacatgcaggacttgtatatgagtatacattggaagatgagaatgtgcctactgctcctgatcctccaag

SEQ ID NO: 739729 - DNA, 100 bp, Homo sapiens
ggaggttgctaacccagaacactatattaaacatcccctacagaacaggtccaggagatgaagaccccaaccctaaacatccaaaaacgccagacaaatg

SEQ ID NO: 739730 - DNA, 100 bp, Homo sapiens
atggaatgaaggttgtccttatcagcagatcaaaggataaacttgaccaggtttccagtgaaataaagtgaacctctgtatgtgcctgtgaaattccatg

SEQ ID NO: 739731 - DNA, 96 bp, Homo sapiens
gacccagaaccttccttctgcagctcccggactgactggctctgcccttccccatggacgtacaggtttgcagattccgccagcagcacagcaagc

SEQ ID NO: 739732 - DNA, 101 bp, Homo sapiens
aggaacctctacttccccaccaaaaagtggcacacactggagagatatcagttgcaatgaatgtgtatgagttatcatcagctgccggattaccttgtgag

SEQ ID NO: 739733 - DNA, 50 bp, Homo sapiens
ctgggctgtctggaaatctgaggtgcgtcttcctgcctgaccagggtgcc

SEQ ID NO: 739734 - DNA, 90 bp, Homo sapiens
atcgcatcctatggctcaaagaaagatgattatgtgccccctgataagtgccgatgtgccgtgggcagcatcctgagtgaaggtgaggaa

SEQ ID NO: 739735 - DNA, 89 bp, Homo sapiens
tgggcggcgaggaaggcgtctcccgggtatggcagatcccagaaaatggactcaccctttccctgactgaacctgtggtgattttggaa

SEQ ID NO: 739736 - DNA, 75 bp, Homo sapiens
ctgccgtggatctgatcagctgaggcctgagacacaggaccagatttggactgagcaacaaatttgaatctgaat

SEQ ID NO: 739737 - DNA, 100 bp, Homo sapiens
ctgagggtgccttcgttccccccgagttcgacgtgaccgggaacacctttgagggtctgggggtggtggcatctcccctaaaggaagtggtccctctgtg

SEQ ID NO: 739738 - DNA, 100 bp, Homo sapiens
ccggaactggagccgaggcgcaggtggcgctgggtattgttgcagcatctggcagtgagactgaggatgaggacagcatggacattcccttggacctttc

SEQ ID NO: 739739 - DNA, 98 bp, Homo sapiens
gaacatccagtttgatgtttactacaagatgtgacactcaactctctggtgtccgaagcatttgtcaggttttttgtggagttggtaggacattattc

SEQ ID NO: 739740 - DNA, 100 bp, Homo sapiens
agcgcgaatatcgtcatcgttagaaggtgtgtgatgagattaagagcaagcttgcctccctgaaggacgttcccagccgcatcgagtgtccactcatcta

SEQ ID NO: 739741 - DNA, 83 bp, Homo sapiens
ctgggatcccggccaccagcaattgtccgcgttttaccaacgaggatcatttggctgtccataaacataaacatgagatgaca

SEQ ID NO: 739742 - DNA, 73 bp, Homo sapiens
ttttatattcatctcaaaaacaaaattctgaactcaggacttggcaagaacaggagtacagctgtgtagtaaa

SEQ ID NO: 739743 - DNA, 90 bp, Homo sapiens
ccccacaattcaaagttcagcaacaagtaatagttcagaggaagcagaaagtgaaggagggacctcagcagccatgtcgaagccccatag

SEQ ID NO: 739744 - DNA, 100 bp, Homo sapiens
cttcactaaagggctctgtgagaaagacatagggcctgattacattccaacagaggaagaaaggagagtcttcgcagaatgcaatgatgaaagcttctgg

SEQ ID NO: 739745 - DNA, 90 bp, Homo sapiens
aagattccaaaactagaggagctactttcaaaaagagatttcactggagctattaccctgttggagatacaagtactggttgaacctgac

SEQ ID NO: 739746 - DNA, 100 bp, Homo sapiens
gtgggtctcccatcacttgccctgacatggtgtgcctaaaccacgggaccctgcaggaagctgaggcaacaaacaggcatttcccacaaactgttacagg

SEQ ID NO: 739747 - DNA, 82 bp, Homo sapiens
ggcgggtggaggttcgagcgctgttctcgctccggagccgctgcacatttcgttgtctatcaacgtctatgactacaactgc

SEQ ID NO: 739748 - DNA, 98 bp, Homo sapiens
gtttgatgcggtggtggaagctgtggcccgcgcatctctgaaaaggaatctctttgcgttctttgacatggcctaccaaggctttgccagtggtgatg

SEQ ID NO: 739749 - DNA, 82 bp, Homo sapiens
tggtttccctcccacctttgccattcctcaagctgcaggtaactaggatttctacctcaaccgcgagacctatgcaaggacg

SEQ ID NO: 739750 - DNA, 100 bp, Homo sapiens
tttggagaaaggcgaacagataaaacgcacagcagtaaatttcagggactagaaactccttctcagaaacccaaggacttggacttcgcccagcagaagc

SEQ ID NO: 739751 - DNA, 74 bp, Homo sapiens
cacagcgccttgttccagcagggcctgatccaggttgcagattttaaagatgcccttgccagagtatatggagt

SEQ ID NO: 739752 - DNA, 82 bp, Homo sapiens
ttccgccccccctcacgaatcctcattgggtgccgtgggtgcgtggtgcggcgcgattgggggatatgagactttctactcg

SEQ ID NO: 739753 - DNA, 75 bp, Homo sapiens
ctggagcagaagttagcgcttctctctcgtacttcctcgcgtattgctaaaggaggagttgaccacaccaaaatg

SEQ ID NO: 739754 - DNA, 90 bp, Homo sapiens
ctacgtcttccgcctgccagaggtgcaaagggatgtgcccaagtcaggcactatgtcgtccgaggcccagagatgaccccttatgaaggt

SEQ ID NO: 739755 - DNA, 114 bp, Homo sapiens
caaccattgacgccatgtcgggttattcgagtgaccgagaccgcggccgggaccgagggagcatcagatccatgctgctgctgactcggagccccacagcttggcacaggctct

SEQ ID NO: 739756 - DNA, 108 bp, Homo sapiens
cagataaagaagacaatgctgaggacaaagtagatggcctccagaaacaaacggaagatattttcgattcagataaagaagttcctatcgaatccacttttgttcgca

SEQ ID NO: 739757 - DNA, 107 bp, Homo sapiens
ggcagagtggagtatctggtgaaatggagaggctggtcgcccaaacaatgcagatcttcgtgaagactctgactggtaagaccatcaccctcgaggttgagcccagt

SEQ ID NO: 739758 - DNA, 50 bp, Homo sapiens
gcgctcgttcccgtcggccgggagtcactttgtggcatgtatgacagcca

SEQ ID NO: 739759 - DNA, 114 bp, Homo sapiens
atgccagttgcaaagaagaatattggctcactatttttcctctgggcatggagagtcccgtattctcagagtaaaagttgtttctggaattgatctcgccaaaaaggacatctt

SEQ ID NO: 739760 - DNA, 100 bp, Homo sapiens
agaactacagaaacctgatcttccttgaatctgtcactgcgaaggggatgaagagagccccctcatcacaccctgtcgctgcactgggacactgcgcttt

SEQ ID NO: 739761 - DNA, 103 bp, Homo sapiens
caacctgctgctggaggaggataacaagttttgtgcagattgccagtctaaaggtcagcccaaggccaaccccactgtcactctgttcccgccctcctctgag

SEQ ID NO: 739762 - DNA, 98 bp, Homo sapiens
gtctcaggtccaagatggccatccaggatgccaggccaaggtggagcaagcggtggagacagagccggagcccgagctgcgccagcagaccgagtggc

SEQ ID NO: 739763 - DNA, 99 bp, Homo sapiens
tcacagaagccgacaaggcgttcaagcgaaaacatgaccgctgagcccatgaggcgcattctacattctaaaggggagctcagtgaagatagacataaa

SEQ ID NO: 739764 - DNA, 100 bp, Homo sapiens
cctgggtgagacagcttgagccccatcgtggattccaagacatccctgctgagagagccaagggtcctggcggcagagaccacgtcccagcaggagcggc

SEQ ID NO: 739765 - DNA, 76 bp, Homo sapiens
attcaggggaaccgcctcaccgttctgcccccagaactagatctttccctagatcattctgacctagttgcagagt

SEQ ID NO: 739766 - DNA, 100 bp, Homo sapiens
gggggcagccgctgagacggtttttcacaagatcaatgtccgagttaccaccatggatgcagagctggagtttgcaatccagccaaatacaactggaaaa

SEQ ID NO: 739767 - DNA, 100 bp, Homo sapiens
tgatggggcagcaagtggccaacctgatgtgtgaaaaaagaatttttgaaactgtgaatagtgtaaggcatccctttttggtgaacctttttgcatgttt

SEQ ID NO: 739768 - DNA, 100 bp, Homo sapiens
cggcaacgggctgctctacgccggcttcaaccaggaccacggcacttaaagagaaggctgagctgcaggcccagctggccgccctcagcacgaagctgca

SEQ ID NO: 739769 - DNA, 100 bp, Homo sapiens
gcatcctcagccgcttttctgccttcaggatcctccgctcccgagatgcagattctgcccaagaagcccctgcattgcagagggactggagatctgtatg

SEQ ID NO: 739770 - DNA, 50 bp, Homo sapiens
cctggggacagagtgaatgttacagcccactcccccaccgcccccggtgc

SEQ ID NO: 739771 - DNA, 98 bp, Homo sapiens
tttggattgcaaagtcatcagccggtgccaaagagcactgcagtttcctcctgaaggctggctccggctctccctcaataatggcagcatcacccacc

SEQ ID NO: 739772 - DNA, 78 bp, Homo sapiens
acctcagatgctcccttctgctcctggattttttatcaagcagaaatgcatcgaacaacgagaatcaagatcactgag

SEQ ID NO: 739773 - DNA, 75 bp, Homo sapiens
cggccaagcatactccggaagaaacctgccacagatgggtattctccactggttgaatgcaaatggaagccagag

SEQ ID NO: 739774 - DNA, 90 bp, Homo sapiens
ttatatcatttaaaccacatggctatctaaagagtttcctccagcttatggaggcatatctgaggtgaatcaacctgccgaattgatgcc

SEQ ID NO: 739775 - DNA, 100 bp, Homo sapiens
ccggagatacctactcaggcggcagctcgggcaggggaggagaaggcagagcccccccaggctatgaatgccctgatgcggttgaaccagctgaagccag

SEQ ID NO: 739776 - DNA, 82 bp, Homo sapiens
gtgaacttgggaagtgtgttgctggaaaaggagcacgtgaattgcctctgcttacgttcaggccctgtcctaaacccagccg

SEQ ID NO: 739777 - DNA, 75 bp, Homo sapiens
cgaatatcgtcatcgttagaagtttctcctaagtccactgtctatccaatcttcagtgcatcttcagtcaattca

SEQ ID NO: 739778 - DNA, 74 bp, Homo sapiens
acctgcggaaacggagagaccttggagaacttcctcatggtggataaggttatcttatgatgaggcttttgcta

SEQ ID NO: 739779 - DNA, 98 bp, Homo sapiens
cgacttgccggcagaacttacgctgcgggaccccgggcactgttgctgctgcgggaggccaagtcaaattcctgcagagctttggcaactgggatgag

SEQ ID NO: 739780 - DNA, 87 bp, Homo sapiens
ccaggagctggttctggtggcggcggggccgcgggagctggcgcggggtccgccgggggaggcggaaccatggccaactgtgagcgt

SEQ ID NO: 739781 - DNA, 51 bp, Homo sapiens
aaaaaagaagacttcaagcgtttgggacccagagaagagctgccagccagt

SEQ ID NO: 739782 - DNA, 90 bp, Homo sapiens
ttgtgttacaacagatgatgctttgcaagaacttgtggaactcatctatcaacaggtggaggaagccttgactatcaaaaacacagatat

SEQ ID NO: 739783 - DNA, 90 bp, Homo sapiens
tgagctggggacatgcaacaataacagtgaacagcagagctgaaatggaaattggcaggtaccactggatgtacccaggctcaaagaacc

SEQ ID NO: 739784 - DNA, 98 bp, Homo sapiens
aagcggcggcgtggaagctgtgagcgcccccatcccggaggtctccgccggctcccggacctagaggatcaagacataatgggagcatttttagacaa

SEQ ID NO: 739785 - DNA, 83 bp, Homo sapiens
gtgttactggcagtatcttttaaggacaaaagtggctctcaatccagcacatgcacattgaagcaagttaaaggatttaatat

SEQ ID NO: 739786 - DNA, 83 bp, Homo sapiens
aaatgcgcttcctgagggagtgggtggagagttgtatcacggactgattcaccgagcccaaccgtactcaactcacatatttc

SEQ ID NO: 739787 - DNA, 100 bp, Homo sapiens
aatggagcctagaagtggaacgtgtactaccgcaactgaaagtcacgattaggactgacaataagccacctgtctttaccagtttccaagactatgttac

SEQ ID NO: 739788 - DNA, 118 bp, Homo sapiens
cgccagcacgcgcctgcttcccgtctgcgcgagtccacgcagctccccaggacgagaagctcactgtgacccaggacctccctgtgaatgatggaaaacctcacatcgtccacttcca

SEQ ID NO: 739789 - DNA, 100 bp, Homo sapiens
cagctcgatctgctcttcgtctgcttcttcctcttcagtcaagacttccttgccgtccaggaagggatttcgacaccagaccaccaagtttttgtatcgc

SEQ ID NO: 739790 - DNA, 75 bp, Homo sapiens
caagctgagcttgccgcacaaaaagctagagagtcactcaagactgcttgcaactgattgcagacagtgaaacac

SEQ ID NO: 739791 - DNA, 97 bp, Homo sapiens
aacagtttttgaaagtggacaattttctgcatacaactggaattactctcaataaaccagaaaaatatgattatgtaggcagactcctaaaaccagg

SEQ ID NO: 739792 - DNA, 98 bp, Homo sapiens
ctcaggagtgggattgctggatcatatgtgtatgctgatggtagcatatgtttagatatccttcagaatcgatggagtccaacatatgatgtatcttc

SEQ ID NO: 739793 - DNA, 90 bp, Homo sapiens
gttccttaaatgtcgaagaaggagccacctgagctgaagattcccttgagaacaagtactgtcctgtggtttcatggcctttcttccatt

SEQ ID NO: 739794 - DNA, 83 bp, Homo sapiens
atccgcaaacacgcgcagaccttcgttgccctctgtgccacagggactttgaacatgtcggggatcgccctcagcagactcgc

SEQ ID NO: 739795 - DNA, 110 bp, Homo sapiens
tcaaaccacttctcagacaagttccatcccacctttgagtcagccctgaccagtgtagagattccattacctcatatctcaaaggagaagctggcaaatttgaagcaaat

SEQ ID NO: 739796 - DNA, 100 bp, Homo sapiens
ctgcagagtgcatctgtggtctatgacttactcaccattgctcttggaagaagaggccagtatgagatgctgtcagaggaatggcatcaccagctgccgg

SEQ ID NO: 739797 - DNA, 90 bp, Homo sapiens
cccatatgccaacccacctaactacggaaaacctgatcccaaaattattgaaaacactcgaaggaaaaactgttcttgaaaaccacctgc

SEQ ID NO: 739798 - DNA, 98 bp, Homo sapiens
ggaatgtcatggacttcatcgtggtcctcagtggaaactggcgatggaatatgagaggagccctctggaaagaaaaggacagaccctgtgctttcatg

SEQ ID NO: 739799 - DNA, 75 bp, Homo sapiens
gaattcagaaggagctagctgaaataacccttgatcctcctcctaattgcagtggctgctaatttacagaagatt

SEQ ID NO: 739800 - DNA, 74 bp, Homo sapiens
ggcaagagggagttaaggacattccaggcagaggcaaggtagttgtgtcaactaacatagcagagacgtctttg

SEQ ID NO: 739801 - DNA, 75 bp, Homo sapiens
catgtcgggttattcgagtgaccgagaccgcggccgggaccgaggggtgaggtggctttgaccccgggttgcccg

SEQ ID NO: 739802 - DNA, 73 bp, Homo sapiens
gagcgacagagacaagctgagcttgccgcacaaaaagctagagagattgtgttcacctattgaaaattaaaaa

SEQ ID NO: 739803 - DNA, 100 bp, Homo sapiens
cctgctgtcgcggccagatggctctgcttccttcctgcaaggtcctcagaatggttggaatgaccctccagctttgaacagagtacccaaaaagaagaag

SEQ ID NO: 739804 - DNA, 100 bp, Homo sapiens
tgcgcacgaccggcgcctcggacaccttcgagggttgggtcatcatcagatttgaaatatttaaagtggatacaaaactatttcagcaatgcagacaatt

SEQ ID NO: 739805 - DNA, 75 bp, Homo sapiens
cagtacgagaaccacctgatggctaatggatttgacaatgtgcagtttatgcatagggctactttcaaatttgaa

SEQ ID NO: 739806 - DNA, 100 bp, Homo sapiens
ttttgatgacatcaagcacacgactcttggtgagcgaggagctctccgagaagcaatgaggttcctacctgatcccgctcccagcagcagaactggccag

SEQ ID NO: 739807 - DNA, 75 bp, Homo sapiens
gggagggggccaagtatgtgtcccacggcgccacaggaaaggctgagtcatcactagagagtgggaagggcagca

SEQ ID NO: 739808 - DNA, 98 bp, Homo sapiens
cgcgcgcttttgggctgcgccaccgacagagacatctggaagccggagctagtggaagatttacagaagcacttgcagaactcatcagaagccacccc

SEQ ID NO: 739809 - DNA, 83 bp, Homo sapiens
ggtcttgctcggccgatgaagtgcagaggtttttttctggccctggccaacgtcaacattgggagcctcatctgcaatgtagg

SEQ ID NO: 739810 - DNA, 100 bp, Homo sapiens
tcagcctggtctacctgatccgtctggccgccggccacctggtccagctgcccgcaggggtgactgtgccctgtccacggtgcctcctgcatgtcctgct

SEQ ID NO: 739811 - DNA, 75 bp, Homo sapiens
atctctgcttgaaaggagaagacttggattctcaggatcagttccatgacaagaccccttatacgattatgtttg

SEQ ID NO: 739812 - DNA, 98 bp, Homo sapiens
gcctggctcggagcagcagcctctgaggattcagtgtcatttgaagatgtggctgtggcctttactcaggaggagtgggctttgctggatccttctca

SEQ ID NO: 739813 - DNA, 98 bp, Homo sapiens
cgacgacttctacatcctgggcagtgggctggtggcttcccacacttctgactcggacgttccttccggtgtcactgaggtggtcgtgaagctctttg

SEQ ID NO: 739814 - DNA, 98 bp, Homo sapiens
cagcgccgatggctccgacccgctctgggctcaaggatgtccaatcaatggatgagctgaaagatgtctacaaccattttcttctttattatggccga

SEQ ID NO: 739815 - DNA, 100 bp, Homo sapiens
aagaatttccaaatgaaaatcaagtagtgtttgccagagttgattgtgatcagcactgcatcagtgtcattcaaggacgtgactatagaattcacccagg

SEQ ID NO: 739816 - DNA, 100 bp, Homo sapiens
gcggacctgcggcccgacgaggaagttttctactgtaaagtcaccaacgagatcttccgccactacgagctgctgacttgagtaaaccaatagataaaag

SEQ ID NO: 739817 - DNA, 100 bp, Homo sapiens
cctgctcaagccgctcttccccacctgcccggtgcccgaggaggcagccaagctcgtagcctgccactccgtgcgctgctttgactctcccgcgaagacc

SEQ ID NO: 739818 - DNA, 100 bp, Homo sapiens
ggaattttgaagtacaccgtggtgacattgtatcattggttttaatgagtggtgttaagaataatgttggaagagggatcaatgttgccttggcaaatgg

SEQ ID NO: 739819 - DNA, 82 bp, Homo sapiens
aacacacactctttaagggcacttacttccctacctgggaggggcttttctggctgaccctgggcaagccccttggggaggg

SEQ ID NO: 739820 - DNA, 120 bp, Homo sapiens
tcgcgcttcagcgtcccggcgccgtcgcgccactcctccgaagagacaagagagacacctccaacttcgacaaagagttcaccagacagcctgtggaactgacccccactgataaactct

SEQ ID NO: 739821 - DNA, 100 bp, Homo sapiens
tcctgttccaccttcagagcgtcacggcgtacgccctcatggggaaaatctccccggtgactttcagtctattatcctcccagtccacaacgctgaaccg

SEQ ID NO: 739822 - DNA, 83 bp, Homo sapiens
ttgttgcctacaagaaaaatctggtagaacagcacattcaggacattgtgtaaaaccaggggcagatgtgaggtggtgatcat

SEQ ID NO: 739823 - DNA, 51 bp, Homo sapiens
agcggctctccagcaagaaggtggcaagagaacggagaccaacctgggctg

SEQ ID NO: 739824 - DNA, 115 bp, Homo sapiens
ggcctctcttctaattgatgctggggccaatgtgaatgtgaaggacagaaatggaaagacgccccttatgttgtctatcaacgtctatgactacaactgccatgtggacttgatc

SEQ ID NO: 739825 - DNA, 98 bp, Homo sapiens
ttgactactcgcatcgcgcactttttggatcggcatctagtctttccgcttcttgaatttctctctgtaaaggagctaatcttccagtaccaacaatt

SEQ ID NO: 739826 - DNA, 98 bp, Homo sapiens
accctcggatacgatagaaaatgtaaaggccaagatccaggataaggaagacgttggaacttgccaggaatccagcaatgatgcaggagatgatgagg

SEQ ID NO: 739827 - DNA, 75 bp, Homo sapiens
attgacccatggggaggagggtcacttcccgtgaaaagccatccagtccaatggatcagatgggcaagatgagac

SEQ ID NO: 739828 - DNA, 100 bp, Homo sapiens
ggctggaaggaaccgctctcgcttcgtcctacacttgcgcaaatgtctccgcttcatattctccaattcagcctcattctctaataaaacatcagcagat

SEQ ID NO: 739829 - DNA, 75 bp, Homo sapiens
aaatcttacttcagaagagcttcggaagagacgagaagcctactttgaaaactatcatggtgaacttacttcaga

SEQ ID NO: 739830 - DNA, 74 bp, Homo sapiens
cccggcccgtagtgtggaagcagcttcagcatatagcactttctacattgtgggtttaatattatcaatgcaga

SEQ ID NO: 739831 - DNA, 74 bp, Homo sapiens
aagaactggcgtcacgtttacaagatccggaagaccacggccagccaggtgtacgagacattgctcacctacag

SEQ ID NO: 739832 - DNA, 75 bp, Homo sapiens
gtttgcggttcagccctttgatgaccgcagcagggttgcagcttcacaggattcaaagcaaatgaacttactcag

SEQ ID NO: 739833 - DNA, 100 bp, Homo sapiens
aggaacttgcagaaatcacattggaccctcctcccaactgtaggggaaggggaggagttacagcccggccagttggagttgtagtaccacgagggacgcc

SEQ ID NO: 739834 - DNA, 100 bp, Homo sapiens
acgaactgctttggagataatgatcctattgatgtttgcgaaataggctcaaagaatttggttgatcttgcaggcagtgaaagagctgctcaaacaggcg

SEQ ID NO: 739835 - DNA, 50 bp, Homo sapiens
tcacgtttgagtgtgctcagatatcgtttgctgatggccgccaaagttgg

SEQ ID NO: 739836 - DNA, 78 bp, Homo sapiens
tgcaccttatcacccggaacctgcagactgtgccctgtccacggtgcctcctgcatgtcctgctgccctgagctgtcc

SEQ ID NO: 739837 - DNA, 100 bp, Homo sapiens
gtgctgattcggcgcgatttgaggagctgctgctgcagggactatgtcaccggtggggcttgccccagcaaggccaccatccctgggaagacggtcatcg

SEQ ID NO: 739838 - DNA, 95 bp, Homo sapiens
gagcgagccagcgcccggagcaagcggagctcccccaagagccggaaaggaacgtcaaggtcgtgggaaataaaaggcagttctacacagactgc

SEQ ID NO: 739839 - DNA, 100 bp, Homo sapiens
agcatataccacagaacattggctggtcaggatatacaagctagtatgttcaacacaccaggaatgcagagcttgttgcaacaaataactgaaaacccac

SEQ ID NO: 739840 - DNA, 75 bp, Homo sapiens
atagttgctgctatacaacacaattataaaatgtcagcttttaaggatgagcaccatgccaggactgcccacccg

SEQ ID NO: 739841 - DNA, 87 bp, Homo sapiens
acagtaaaaacacatctaacatctttgaagaccaaatttcctgctgaacagtattacagtgaactcttatgggcacccacaagctcc

SEQ ID NO: 739842 - DNA, 96 bp, Homo sapiens
agatcgtgcagctcttggcaggagtagctgatcaaaccaaggatgggcctactgaacttgacgcactggtatttggccatctatacaccattctta

SEQ ID NO: 739843 - DNA, 80 bp, Homo sapiens
agttgctactcgggacgctgcacctcccgcgccgcacggtggacgaggtcactatcatatgacaaaggctttgccgcagt

SEQ ID NO: 739844 - DNA, 100 bp, Homo sapiens
cagaaaaatacaaagttggaagcaataccaaacagtggcatggaccacacccagcggaacaaatgcagccctgaggatttggctactgcatataacaaca

SEQ ID NO: 739845 - DNA, 90 bp, Homo sapiens
ctcctgtgtgatagatgataaaatgattgtctttggtggctctttaggatcccggcaaataaatttctgaataaattggcagaagaacgc

SEQ ID NO: 739846 - DNA, 100 bp, Homo sapiens
cagcgggacccggcgaagacgcgaccgcggcgcgagtcaccatggtgaaagaacttgtcctggacaacagtcggtcgaatgaaggcaaactcgaaggcct

SEQ ID NO: 739847 - DNA, 106 bp, Homo sapiens
gcgctggagctgggtcagtccgccgctcaccccgcggccgcaccttcccgccttctcaggagcatcagatccatgctgctgctgactcggagccccacagcttggc

SEQ ID NO: 739848 - DNA, 80 bp, Homo sapiens
gacaaccaggcaatgctggatagataccgaattcttatcacaaagatcactttgccagctgtgtggaggatggatttgag

SEQ ID NO: 739849 - DNA, 98 bp, Homo sapiens
tgggggacgcgggcgcgtcaggtgaagactgggggctgcaggcgcgctaggtttacccaaggtccagcctagcccctaggcaccatgtcggacagtga

SEQ ID NO: 739850 - DNA, 97 bp, Homo sapiens
tgtggctgtgcttgccaggcctggctccagagcggaagctgtgtgcctatcctcggctggagatctaccaggaagaccagatccatttcatgtgccc

SEQ ID NO: 739851 - DNA, 98 bp, Homo sapiens
gcccttcctagttggcattgaaggttcactcaaaggcaggctgcctttaatattggttgggaacaaatctgatctggtggaatatagtagtatggaga

SEQ ID NO: 739852 - DNA, 50 bp, Homo sapiens
ccatcaccgcactgagatcaacaagaaggcgggcagggctgggcagcggc

SEQ ID NO: 739853 - DNA, 96 bp, Homo sapiens
ctcagaacagagcagaaatcaaattgaagagagcagttgaagaagtgaagaaattattggtacctgcagatgaatctggttatagatggacaagag

SEQ ID NO: 739854 - DNA, 140 bp, Homo sapiens
gtggtgaggagcattggggaacgcttcagcccaattcgggtcctccgattactgaggcatacgtaacagatctggacggccaaccgccatgtgatgtaagcctccatacgaaagcactgttgcagatagaagaagaggtg

SEQ ID NO: 739855 - DNA, 90 bp, Homo sapiens
aagtgattgctgacattaattgcaaaggtgccactgattaatgaacttgaatcagcaatacatcagctgtacaaacagcgagcttcccgc

SEQ ID NO: 739856 - DNA, 75 bp, Homo sapiens
tcgacgtcgtgatccagaagtccagagctgaggactgcctgtttgcagatctgaagaagacacttgaatcatggg

SEQ ID NO: 739857 - DNA, 101 bp, Homo sapiens
ggaagactttgcagtgcatatatgtcacaggcacagccactatcctcagctgcacgttcgcaaagccaggtcatcaagaacaacctgaaccctacatggaa

SEQ ID NO: 739858 - DNA, 97 bp, Homo sapiens
agttggcttatgagtggaacatggctagcaggaatgcttactgttgcgtggttcgttattaacagatctgacaggatggcatctgatgactttgaca

SEQ ID NO: 739859 - DNA, 100 bp, Homo sapiens
catcccgtggccgactcttctcctgcggggaacctagaaagattgtacaatgaatggtgattctcgtgctgcggtggtgacctcaccacccccgaccaca

SEQ ID NO: 739860 - DNA, 110 bp, Homo sapiens
gcccgctcccgccggcgagcaagtgagccatctttatggatttggactgatggacgcagaagccatggtgatggaggcagagaagtggaccaccgttccccggcagcacg

SEQ ID NO: 739861 - DNA, 82 bp, Homo sapiens
tatggctcaaagaaagatgattatgaggactcacgaatggcagtggaagatacatctctgctgctccaggcgctgaagccaa

SEQ ID NO: 739862 - DNA, 128 bp, Homo sapiens
ttattacaatgctgcccaccagtatcaatgcaatagaagcttattccggagcaaatgggattctaaaattcatgacagatgctgcccgccgagagcaggagtccctaaagaagaagattcagccgaag

SEQ ID NO: 739863 - DNA, 98 bp, Homo sapiens
cgcttatctggcaaatgtgtaatctgagtaatagaggtggtcattgggactcccacacttaaacaaagaaaggaaattctgcaagtgattacctcgaa

SEQ ID NO: 739864 - DNA, 100 bp, Homo sapiens
ggccctgaaagcttttctaactcacttggtggtaagatcggacttgaacaaatgcaagaaaattggatgtatattttgaatatgaagaaaaaataatgag

SEQ ID NO: 739865 - DNA, 76 bp, Homo sapiens
ctgggaaggagctatggagtcccatccagcaggcgcagcccagcctcgaaatgcagaacgacgccggcgagttcgt

SEQ ID NO: 739866 - DNA, 75 bp, Homo sapiens
gcttctggcctctgggcatcgcagccttctacttgtcccatgaggacgagattgaggagctgcgggccgagatgc

SEQ ID NO: 739867 - DNA, 96 bp, Homo sapiens
gacggcgacggctacaagaagcgggccgcatgcctgtgtttccgcagcgagagcgaggaggaggcggtcaggctgctgaggaaacaccacaggctg

SEQ ID NO: 739868 - DNA, 75 bp, Homo sapiens
gccaaggagaccaggaagcgagcactcagcagtaatccagtccctcatagcactggtgaatgacccccagcctga

SEQ ID NO: 739869 - DNA, 100 bp, Homo sapiens
agaagctgccgcccatcgtatcggcgggcgccggcgcgaccgcggatgaagatgggtttcaagaactaaatgagaatggaaatgctaaggatgagaatat

SEQ ID NO: 739870 - DNA, 78 bp, Homo sapiens
cgccgcgctcagcgacaaacaactcaaactttggaacaaataccgaatttccaacattccatcactaatattcctcga

SEQ ID NO: 739871 - DNA, 75 bp, Homo sapiens
gggctcttctgttctacccctggggttgccttggcaagagcagtgcctagaaagtttcggagcaacatcccctgt

SEQ ID NO: 739872 - DNA, 90 bp, Homo sapiens
atatctacaagggggtccgcaagttgaggctgtgaagctgggcagggtttcagctgagctgaggttggaagtccctgaccttcagctgtg

SEQ ID NO: 739873 - DNA, 100 bp, Homo sapiens
ttgatgttaacaaatgtgagattgccagaatttcgctaaggagtttgtgatcagtgatcggaaggagctggaggaagatttcatcaagagcgagctgaag

SEQ ID NO: 739874 - DNA, 50 bp, Homo sapiens
aaccctctggattatcacatgaagaacaagtgtgcagaatactggccgtc

SEQ ID NO: 739875 - DNA, 100 bp, Homo sapiens
gctgatttagaaggaggttcaggctacggtgagccgaagaaaaatggctacaaacttcctagcacatgagaagatctggttcgacaagttcaaatatgac

SEQ ID NO: 739876 - DNA, 101 bp, Homo sapiens
ttcatctcattgctcagcgcggacctagacctggaatcgcccaagtccctctactcgcgaggtctattctggataagcaggttttgtgaagacatttattc

SEQ ID NO: 739877 - DNA, 75 bp, Homo sapiens
aaaactttatgattcagggtggggacttcagtgaaggtgactctgacatcattagaagcatgccagaacagactg

SEQ ID NO: 739878 - DNA, 95 bp, Homo sapiens
gcggccgagggcgtcgcggactctccccgcgatgatgccgcccaggatggcggcccaggtgactctggaggacgcgctgtccaacgtggacctcc

SEQ ID NO: 739879 - DNA, 75 bp, Homo sapiens
ttgggtgacatctgcctgagagatctccaagaattacagagtgatgacagacctaatgctctattaagttcacct

SEQ ID NO: 739880 - DNA, 116 bp, Homo sapiens
atgcctttgccgccgccaagctcctggccctggccctgatcatcctgctgggcttcgtccagatcgggaagggtgctgcagggtgcacagctgatcgccgtggcctcctcggaccc

SEQ ID NO: 739881 - DNA, 97 bp, Homo sapiens
aggaaggcgtccgttggccttcgtacccgtcttgattgagccactgaggcggctcccagctgcgttggcgacatggccgacacccccagagatgccg

SEQ ID NO: 739882 - DNA, 82 bp, Homo sapiens
ctgctgcctctgctgtcctcagcttctgggagcatcttagcagccagctccgggttttaaaatcaaagatgggaaaatcgga

SEQ ID NO: 739883 - DNA, 89 bp, Homo sapiens
ctccttctacctgctcagcggcctgctggacgctttcgatggacacgctgccccccggtgtggaccccacccaagtttcctcctccctg

SEQ ID NO: 739884 - DNA, 101 bp, Homo sapiens
agaccccaggcatcctactatgcttcctgagtgcttctttcttggagctgaccatgtgatgatgatgtagaagaaacacatccaatggatgggaatgatag

SEQ ID NO: 739885 - DNA, 100 bp, Homo sapiens
gtgctttgtaaacacggctgtgctcagggctcgcgggtgaccgaaaggatcatgaactagtgacctggaaaggtgctttacaaggccaagtacggtccaa

SEQ ID NO: 739886 - DNA, 75 bp, Homo sapiens
ccgggacctcaagtccagcaacagccaatttaacctttgacccagctgctctactgcctggggcctcacccaaga

SEQ ID NO: 739887 - DNA, 96 bp, Homo sapiens
cgactgccttgtctatgcatatatcataaaggagtatctagaaacaaatctgaaaagaaacgtagagatcaatttaatgttctcattaaagaactg

SEQ ID NO: 739888 - DNA, 90 bp, Homo sapiens
ggccgtcaaggagctggacctctacctggcctacttcgtgcgtgagcgaggacggaagctcctgttttcttgtcagccgccagctgaggg

SEQ ID NO: 739889 - DNA, 82 bp, Homo sapiens
tgattcaagtgcctgcctctgccccttggtgggctgaagcttcatggagatgaggcctgcctgtgttaatacacctagtgag

SEQ ID NO: 739890 - DNA, 100 bp, Homo sapiens
tcaaccacaataacaggcggagggtcggcgtaggtggcagcacaccctgggccccccactccccgccgcaagtcctgaggatggccagcagagaaacaag

SEQ ID NO: 739891 - DNA, 80 bp, Homo sapiens
agatgttgtcaaggtggcctaccaggaggccaggggtgtcgccatggttttgatgatgatggttcagaatttcatgaaca

SEQ ID NO: 739892 - DNA, 83 bp, Homo sapiens
aagaaatagcaagaactgaggagcaccaggagacgcaactcatcggaacaccttccaccatgaccacctcagcaagttcccac

SEQ ID NO: 739893 - DNA, 88 bp, Homo sapiens
caagatttgcctctgcacagtttcccaatgatttctctatgaatcatcatcaagaactctgggagaacttttgaattcataaccaagc

SEQ ID NO: 739894 - DNA, 74 bp, Homo sapiens
atttccttactgaaaccctctacaaaggcattagtcctatcttgtaagggtacagctctgccggggggggaaaa

SEQ ID NO: 739895 - DNA, 75 bp, Homo sapiens
ttaaaaaatttattaaaggaagcacacctaagcacacacatgccctcttggttctgtttctttgaagaaccccag

SEQ ID NO: 739896 - DNA, 82 bp, Homo sapiens
caccccggaagctgggaaatgacggtctggaaaatcccgaagcagaagcccgtattcatctaggcattcaagatctcgtagc

SEQ ID NO: 739897 - DNA, 50 bp, Homo sapiens
tgaatatcaagaggaggagttgttgacttctgcgctgacccaggggctgg

SEQ ID NO: 739898 - DNA, 90 bp, Homo sapiens
gccaaatttgttaaagagaggatagaaattgaacagaactatgcgaaacaattgagtattctaccttgtaaatactgttatttgtatata

SEQ ID NO: 739899 - DNA, 75 bp, Homo sapiens
gccgagggacttggggagcacaggtgtggatgaggtcaccattgtcaacattttgaccaaccgcagcaatgcaca

SEQ ID NO: 739900 - DNA, 74 bp, Homo sapiens
ctgggcctcgggcacctccttgcaggactccggccagaacagcattgatatgaaccatggacaagtatattctg

SEQ ID NO: 739901 - DNA, 75 bp, Homo sapiens
cagtaatggtggatgaagttgttcattgtttgtcaccacaaaaaggacagatacgaaaaccggtgaggtccaaac

SEQ ID NO: 739902 - DNA, 76 bp, Homo sapiens
agaatctgttgctggaactccgtaactatgaggaaaatgccaaggaagaagaatttggacttgatgaagaagatga

SEQ ID NO: 739903 - DNA, 97 bp, Homo sapiens
gctataataatagcaaacatcgatggcctactggggataacattcatgcagaacatcaggttgcagaattgtcggagtgcataggctcagcactgat

SEQ ID NO: 739904 - DNA, 98 bp, Homo sapiens
cggcgccgacatcaattacgccaatgtggacggactcactgccctgcaccagttgtatcacggactgattcaccgagcccaaccgtactcaactcaca

SEQ ID NO: 739905 - DNA, 82 bp, Homo sapiens
gcgtgttgctgcgagtgggacgcgcactggtcggtgccggctcaggagccgggccctgactgccgccgcaggaagagggaag

SEQ ID NO: 739906 - DNA, 75 bp, Homo sapiens
ggagaaggccgccgggcccgggcatggtggtctggggcaacgcggaagattgataggttatatgattggaaaaag

SEQ ID NO: 739907 - DNA, 83 bp, Homo sapiens
agctcaccgacagtgccctgagggccttcgagagctaccgcgccagacaggttttgagcaaaattttggactgtgaagcaagg

SEQ ID NO: 739908 - DNA, 90 bp, Homo sapiens
gtgtgacggctgggcgacttgcgaggatgagagcgacgaagccaactgtccagagcccacccacctttgggttcctgttggacatcgatg

SEQ ID NO: 739909 - DNA, 75 bp, Homo sapiens
gcatcagcagtcatctcactagttatgttcaaaaaattgagtcagcagatactggagttatttgaaacatgtcag

SEQ ID NO: 739910 - DNA, 90 bp, Homo sapiens
gcacagcagaccttggtgatgtgctacagatcctgataacttaagtgactctctcttttccggtgatgaagaaaatgctgggactgagga

SEQ ID NO: 739911 - DNA, 100 bp, Homo sapiens
caggcctcaagtggaacctcaggccggtgcataaacttctcccgagttccatctcagtaaaagggaagcaggaagaccaagaaggtacgaagatggcaca

SEQ ID NO: 739912 - DNA, 75 bp, Homo sapiens
cagttcgctacacagcaatgcatcgaggattattgcatcgagcttttagtgtcttcttattcaacaccgaaaata

SEQ ID NO: 739913 - DNA, 50 bp, Homo sapiens
tcctgtgaggtccccggaatcaaggactggtgattgcagctggaagtgcc

SEQ ID NO: 739914 - DNA, 75 bp, Homo sapiens
tacacatgttcctgcaagaggaggcaattgacaggaactacgtcccggggaagattccatgcaatggaaaagcag

SEQ ID NO: 739915 - DNA, 90 bp, Homo sapiens
gacctgttgaactatcagtacttggacaagatgaacaacaatatcggcattctgtgctacgaagattggggaccacaaattcagtgccca

SEQ ID NO: 739916 - DNA, 82 bp, Homo sapiens
ggcacctccgagcgcaaggacagcgcgaggtccgcgcagcccagcgcagccatgaggctactcacagtcgaactacaactcc

SEQ ID NO: 739917 - DNA, 83 bp, Homo sapiens
gacgtccaaggatgatgggcactggtttgcctgcaatgagatttcattctctacatttaaaggacatcctttctgagctgctg

SEQ ID NO: 739918 - DNA, 75 bp, Homo sapiens
tcaatactacctttatttccaccatagtaattcgccaaaatgacgaacacaaagggaaagaggagaggcacccga

SEQ ID NO: 739919 - DNA, 82 bp, Homo sapiens
cccgcgaccgtccgccagtcgtcccgagggcgaccattgacgaggtggagacggacgtggtggagattgaggccaaactgga

SEQ ID NO: 739920 - DNA, 100 bp, Homo sapiens
cgggcgcaggagggcagcaccagaggccagtggcactcccagctcggggaagctgctcgctgatctggccaggcgcctgggcctccactatgtggtctac

SEQ ID NO: 739921 - DNA, 98 bp, Homo sapiens
cagcctcctggccaacctgtggcagtacaacaagctccaccgtgacttccgggcgcctaactgaaggggccttggctcattctgggaaccctgtatca

SEQ ID NO: 739922 - DNA, 82 bp, Homo sapiens
cacgttcttccaagaaaccaacattcccaacagccaccaccaccaccagatgatgaaaagaggcttgattagtactcctcca

SEQ ID NO: 739923 - DNA, 100 bp, Homo sapiens
ctacatcctgagctacatggccccctggtttagggaggcaccccagatactcgcccagctggtctggaagaggctgatcagccaccgttgcctggagaac

SEQ ID NO: 739924 - DNA, 100 bp, Homo sapiens
tcatcaagaacctgcatgatgattcctgctactgcaaagtgaattttataaagaggatttccaccttccgcatcattgtgtttattggatctggtcaagt

SEQ ID NO: 739925 - DNA, 83 bp, Homo sapiens
cctgcagcgggagctggacggcgagcgcgagcggcgcgagaaaggcgaactttctgaccaagtatacaactacccagagggcc

SEQ ID NO: 739926 - DNA, 50 bp, Homo sapiens
tgatgtgcttccttggctttgataatcatggacatattgatccctctctg

SEQ ID NO: 739927 - DNA, 74 bp, Homo sapiens
tacacacttatagatcttctgcactgtttacaggcacaggtctgctgagaacagacccagtccctgaggaagga

SEQ ID NO: 739928 - DNA, 100 bp, Homo sapiens
cttcagtctacaaaggactcttctaaaaggatatgtgttgctaatacccatctttactggcatcctaaagagaccctcatggacacaaaatgggtaacat

SEQ ID NO: 739929 - DNA, 100 bp, Homo sapiens
gttcatctccttctgcatccttaactgagaatgaggtcttgagagctgatgacaataacatgggcaatggctgctctcagaagctggcgactgctaacct

SEQ ID NO: 739930 - DNA, 98 bp, Homo sapiens
tgttttcgacaggtgtgcaggtttcggcacatggagattgataatgcagtaatagtggccttgtcttcaaaatcatgggatgtagagactgcaacaga

SEQ ID NO: 739931 - DNA, 82 bp, Homo sapiens
tgggactgtctagttgcaggaaaacaagctcagggcttccactgattctacattatggaagggccatactgatgcagagatt

SEQ ID NO: 739932 - DNA, 75 bp, Homo sapiens
cggcttccaggcgcactaccgcgtgaaaaatgtactctgacctgaatcctgaattttccttgatggtcaaaagat

SEQ ID NO: 739933 - DNA, 75 bp, Homo sapiens
gtcacgctcagcacttgccgaggaattagttgttgaatgttgggtcacgaagatctcaacctggccaaagaagag

SEQ ID NO: 739934 - DNA, 74 bp, Homo sapiens
gaagatggggttccttccaaagtgcagcgctgtgcagtgctgatgactatcagccagttcgtctgctcagtaaa

SEQ ID NO: 739935 - DNA, 83 bp, Homo sapiens
cgcattttggcattgacatttaattttagggtcctttatatagaagggagagtaggtacaaactcgacttcagacctcccttg

SEQ ID NO: 739936 - DNA, 100 bp, Homo sapiens
gcccagcgccgggcgctggccacgtgcagagagcaatgtggtgttaaaaatgatgaaagtagcagctcatccattatctttgctgagcccaccccagaaa

SEQ ID NO: 739937 - DNA, 98 bp, Homo sapiens
tccggatttggctttactttaagaggagattcagacatagacaagaatgattacccagggatcacatgcagtggtctaaggaagaagaagcagcagcc

SEQ ID NO: 739938 - DNA, 75 bp, Homo sapiens
ttaaagagaaactcatttttccctacgtggaattggatctacataggcagttctgccttgagctaaatggacttg

SEQ ID NO: 739939 - DNA, 100 bp, Homo sapiens
cggcggcggagtgtaggaagaggcactgctgagggggcgcgaggggaacggaggccagagctgcgcttggccatccacccagatatggtcaccatcgcca

SEQ ID NO: 739940 - DNA, 75 bp, Homo sapiens
gagtgatgtcttccagactcgaggcctgagggagctcaatcctggtagcaacacccctgaattcctggtggtgaa

SEQ ID NO: 739941 - DNA, 83 bp, Homo sapiens
caagtacctttatgaaccagtgtatcccaactaatcttccagtaccaacaattgcagcaatagatggactcgctttaggtggt

SEQ ID NO: 739942 - DNA, 88 bp, Homo sapiens
gatgatgaagttacagcaataatcgcttccttcaggcaaaggaaggatgaactggagcagaggatgtcggccctgcaggagagcaggc

SEQ ID NO: 739943 - DNA, 80 bp, Homo sapiens
gtggggaccctgtgctgctgcgcctcttctaccaagtggctgagtacaccttccgccagatggagtcttgctctgtcacc

SEQ ID NO: 739944 - DNA, 101 bp, Homo sapiens
atgaaatttttgggaaggtgcaaggggtgtttttccgtaagcatactcaggctgagcggaaggaggagaaaaaggcggctgcccctgctcctgaggaggag

SEQ ID NO: 739945 - DNA, 74 bp, Homo sapiens
cctgatgttacaaatgaacaaggatctcccagattccgtcctatttcagtgttccgggaagccaatgaagatga

SEQ ID NO: 739946 - DNA, 96 bp, Homo sapiens
ccgaggcaggcggatcacttgagacggagttagaagccaaaagtgaaaccaggcaggaaaattactggctgattcagtatcaacggcttttgaacc

SEQ ID NO: 739947 - DNA, 98 bp, Homo sapiens
cgctacgagggcatcctctacaccatcgacaccgaaaactccaccgtagcccttgccaaaggctgggcttcatcaccaggcctcctcacagattcctg

SEQ ID NO: 739948 - DNA, 126 bp, Homo sapiens
ctgctgttgcacactgggttgcagcctatggcctgttatttgtctcaacaaaagattaatcagctgtgttcagcgaatacttatgaacagaaggctccagcagcagtacaatcagcagcaacagca

SEQ ID NO: 739949 - DNA, 100 bp, Homo sapiens
ttctggccaacgcagacaccatgaaggtgctgggagtgcagcggcctctcctacagggtcccgggattcttgagctgtgcccagctgacgagcttttgaa

SEQ ID NO: 739950 - DNA, 83 bp, Homo sapiens
tgcattttcctgatccaaacaagcttcattgttttcagctaacagtaaccccagcaggatggcccaatggaatcagctacagc

SEQ ID NO: 739951 - DNA, 100 bp, Homo sapiens
cctggacccctggttcgccggctcctccaatgtgggcatcaacaggtggcggccgggtgagagcaaaactttcagcaccacttgctggcatgggaaatgc

SEQ ID NO: 739952 - DNA, 74 bp, Homo sapiens
tttcctacacagtttgcaccccagaatgagtccctggaacgccagatgcgtgaaatggaagagaactttgccgt

SEQ ID NO: 739953 - DNA, 76 bp, Homo sapiens
gacattttgaagttacttttgaagcaaaacgtggatgtcgaagcagaggttgtggaaaatgcccttaaagtgaacc

SEQ ID NO: 739954 - DNA, 90 bp, Homo sapiens
agaaaggcgagactgatctaattcagaaagacagcatgagtatctatgacgatattgatgctgacgtgctgcaaaattaccaagaataca

SEQ ID NO: 739955 - DNA, 89 bp, Homo sapiens
aggcatatcgtcagttaccttctaactttaagggttacaagtacagatcattatttcctaagtgatggtctgtatgtacctgaagacca

SEQ ID NO: 739956 - DNA, 75 bp, Homo sapiens
cagcctggtggggctgcccctcgccacctgccaaggcatcatcaagggcctgtcccagtcggctttaccctatcg

SEQ ID NO: 739957 - DNA, 100 bp, Homo sapiens
caaccaggctttgtcaagactaaatcttcccaaggctgcagacaccgacggatttgctttgggagccagagtagctgccgccaccagagtccggagccat

SEQ ID NO: 739958 - DNA, 83 bp, Homo sapiens
tctctggagccccagattcaacccgtgtacgtgcctgtgcctaaaaattgcagaatttacctcaagaactctttgctgttgac

SEQ ID NO: 739959 - DNA, 100 bp, Homo sapiens
gaagaatctaacaaacggcaaagaacttactgattcttgaggtcaagagcaatctgaatccaaatgcaaaggagtttgttcctggggtgaagtacggaaa

SEQ ID NO: 739960 - DNA, 82 bp, Homo sapiens
cagcagagacgtcatacttggaaatggctgcaggttcagaatgtacctgtgtggtctaagctggaatctggtcaccttccat

SEQ ID NO: 739961 - DNA, 83 bp, Homo sapiens
ctaaagacaaactggaacaagcccaaaatgaactgagtgcctggaagtttacgcctgatagcaaatggttatgagccttagag

SEQ ID NO: 739962 - DNA, 100 bp, Homo sapiens
gaagtgcaagtcgatcgaggtcaagaacacgatcacgttctagatcacatactccaagaagacaaagccgctggagttctggagtgggtggaagtggtgg

SEQ ID NO: 739963 - DNA, 75 bp, Homo sapiens
aagtatggatgagtatgtccatcagggcagagcggcttgggtaaatccaccttaatcaacaccctcttcaaatcc

SEQ ID NO: 739964 - DNA, 100 bp, Homo sapiens
gaggagaccggcacccagacaggtggcgacggcagaggaggccctccagaatttccacagcatacacctggacctgttcccaacagtttcagccagcccc

SEQ ID NO: 739965 - DNA, 100 bp, Homo sapiens
aaggacaaactagaggagttcttccaaaaagcggggtgggcgcggagaagacctgccggagccatggaggacgaagtggtccgctttgccaagaagatgg

SEQ ID NO: 739966 - DNA, 100 bp, Homo sapiens
cccacccgcaaaaccaaagccctgctgcaaaacgctatcagtcaacgaccccccggacgttctggacaggcagaaatgccttgctgccttggcgtccctc

SEQ ID NO: 739967 - DNA, 80 bp, Homo sapiens
acagctatgcaaatatagaacactaaagtgttacatgacagatgtatgaggagcatattaatgaaaagtgccataaactg

SEQ ID NO: 739968 - DNA, 75 bp, Homo sapiens
tctcagcaagaacgggaacaaaactctgcatgacgtatcccagactttactcaaggcaacactggacagtgttgt

SEQ ID NO: 739969 - DNA, 100 bp, Homo sapiens
gacggcgccttcggcaaggtttacaaggttcgagaacttgtcttggacaattgcaaatcaaatgatggaaaaattgagggcttaacagctgaatttgtga

SEQ ID NO: 739970 - DNA, 100 bp, Homo sapiens
cagctttcgaagacgggatactgctcagcaaggtgttgtgaatttcccatatgatgattgctgtccccggcataggtccatctctgcagaagccatttca

SEQ ID NO: 739971 - DNA, 100 bp, Homo sapiens
tcaaaaagagtctcctggctgccttgatcctctgtctcctggtggtgagatttgatccaggtgggtttggaggatttgggacaacatctacaactgcagg

SEQ ID NO: 739972 - DNA, 98 bp, Homo sapiens
tgtaggcaagatcgacacctgccagatggcaccgaaagcgaaggaagctcctgctcctcctaaagccgaagccaaagcgaaggctttaaaggccaaga

SEQ ID NO: 739973 - DNA, 100 bp, Homo sapiens
gaggaaaacaacttcgagggcagagtgaatctggattgggaaagtcgacattaatcaactcattattcctcacagatttgtattctccagagtatccagg

SEQ ID NO: 739974 - DNA, 75 bp, Homo sapiens
acccttatgcaacagtttctctagtgggcccttctaggtgccttgtccacattttgcgagagacaacagtaaaat

SEQ ID NO: 739975 - DNA, 76 bp, Homo sapiens
tggcaagaagcagatgcgcattttgatgggttatgatgtgattgctcaagcccaatctgggactgggaaaacggcc

SEQ ID NO: 739976 - DNA, 100 bp, Homo sapiens
tgagcccagcccccagaaaggattgtgacatatcgttggacccagaattgaggtgctcagagccagaccctggtttgaggagccccccaaggctgtggaa

SEQ ID NO: 739977 - DNA, 73 bp, Homo sapiens
agaaagactgtagaaaatttccagttccacagaaggtacgttttgtcaattgagagtgctgaagagatacgag

SEQ ID NO: 739978 - DNA, 101 bp, Homo sapiens
tgacgggacagagcggtcggtgacagcctcaagggcttcagcaccgcgcccatggcagagccagaccgatgaaaactttgacctgtcaaaaagactgagtg

SEQ ID NO: 739979 - DNA, 88 bp, Homo sapiens
gaccaaagaggatgagaaggacgacaagcccatccgagaccttgacagaaaacttgctgaaaaaagaacaagactatactaagttaga

SEQ ID NO: 739980 - DNA, 82 bp, Homo sapiens
ccaggtccgacccgcgaacccctctgggatccccgccgctctgtctacaacccgagggtctgggggtggtggcatctcccct

SEQ ID NO: 739981 - DNA, 98 bp, Homo sapiens
ggattttcttaatcccaatgttgccctgaaatttatgtccaggattcaaaaagtttaggactgctaaggtgccagcgagatttcagattcctgtaaac

SEQ ID NO: 739982 - DNA, 100 bp, Homo sapiens
gagaggatgtggtggtctactctgatgtcaatcttgagggctagcctcagtgtatgggcgctgttcatcctctggtgctgaagcagccaagagacccaag

SEQ ID NO: 739983 - DNA, 75 bp, Homo sapiens
ggcggcggcccagccacgatggtcaaaatgcagatcttcgtgaaaacccttaccggcaagaccatcacccttgag

SEQ ID NO: 739984 - DNA, 99 bp, Homo sapiens
taccttgggcccagtcatgaagatggaacctctgaataacctccaggtggatagatacttctcaagacatcacacagcgtgagtcaatcaaggagggaa

SEQ ID NO: 739985 - DNA, 90 bp, Homo sapiens
attgtacgatttctggtacagttagatgactacagggacttgaagttggacggaggaagacaatcaactggtgcagtgagtttgaaagag

SEQ ID NO: 739986 - DNA, 75 bp, Homo sapiens
ctttgcaccaagaaacaagaacttcaacatccatggaacggcaaaagtcaacaactctagcttaattggagtagg

SEQ ID NO: 739987 - DNA, 118 bp, Homo sapiens
gacctgcaatgattatatttcggtttttgaatttgacatctttacccgactctttcagttttctggatatgccgcagaaggatccgtgccagaagcaagcctgtgagatacagaaatg

SEQ ID NO: 739988 - DNA, 100 bp, Homo sapiens
ggtgtgcaaacccgagagaactggttccagaaagctgagtctgatctggattacattcaatacaggctggaatatgaaatcaagactaatcatcctgatt

SEQ ID NO: 739989 - DNA, 75 bp, Homo sapiens
agaatacttgctgaaaaggaagttttctggaatggggaaaggcgtaggaggaggagcaggagttcttccagatcg

SEQ ID NO: 739990 - DNA, 96 bp, Homo sapiens
ctcatcgtgatcccggcgacatactacctctggccccgagatcagaatgccggagccgaatcagaaatgtcatcctcaggcacgccagacttacct

SEQ ID NO: 739991 - DNA, 100 bp, Homo sapiens
gtttgcagccctagtgtttgccggagccatggaatttgctgaaggctatgcctttctgctgttccaagaggaaagctcagtacaagctttgatagatgcc

SEQ ID NO: 739992 - DNA, 100 bp, Homo sapiens
cgggagggaggaaggtggcaagatggtgttggaaagcactatggtgtgctcacggatgattgatatccagaccaggatggctgggcgagcattggagctt

SEQ ID NO: 739993 - DNA, 85 bp, Homo sapiens
gaaattgtttatgcagttgacttcaaccacaagagggagatgaacctcggagtgatggtgtgttcctccctgtgtgacataggtg

SEQ ID NO: 739994 - DNA, 80 bp, Homo sapiens
tacgagatgacagtctgctaaaaaatttagatataagatgtataagaagtcttaacggaggagatgttaaagtaacccat

SEQ ID NO: 739995 - DNA, 98 bp, Homo sapiens
tgccaggttctactcctgagattgccaccagaatatgaaaaagaactacatattgctttagaaaaggatttacctaaccagttttatcgggattctca

SEQ ID NO: 739996 - DNA, 97 bp, Homo sapiens
tgtgctactgccatgaaactacttcgtgtcctggcctcagctgggaggaatattgctgcccggctgtgtgattggtccagatagctgccttatccaa

SEQ ID NO: 739997 - DNA, 100 bp, Homo sapiens
agccctagagtatgcaaaaagagcactagaaaaaaatgaatcaagttttgcatctcataagtctacccatggtgttggaatgaatggaaataatgcagca

SEQ ID NO: 739998 - DNA, 100 bp, Homo sapiens
gactttgatgaagagactggcattctccctaaggtggatgatgaagaagctaactgccttctatgaaagcagtcattattcaaggtgatcgtattcttcc

SEQ ID NO: 739999 - DNA, 100 bp, Homo sapiens
gaccacccgtctgtcgcccgaggcggccgccgctgcaccttcaccgcgtacccgggacccgcccgcccgcgggagggtcccgggattcttgagctgtgcc

SEQ ID NO: 740000 - DNA, 100 bp, Homo sapiens
gttcgcagtcaagatctcgttccagttccagagaacgttcgagatctcgtgggtcgaaatcaagatgaccttgaatgatgccatgaggaacaaggcaagg

SEQ ID NO: 740001 - DNA, 82 bp, Homo sapiens
aaacggactcatgtactttgtcagatgctgaaattttcttctaaggagaaatatcccttatttacttttgtaaatggtcatt

SEQ ID NO: 740002 - DNA, 74 bp, Homo sapiens
tcttgtgcgtctaacatctgcggctggagcattggatttgctaaaggagcttaagaatattcctatgaccctgg

SEQ ID NO: 740003 - DNA, 83 bp, Homo sapiens
ctgctccgtggagatcgtcccgcgcctgccgatcagtcgcatcgaatacattcattcaaagaacttcatccaccgggatgtga

SEQ ID NO: 740004 - DNA, 51 bp, Homo sapiens
gtttatgtccgacgtgcagctgaaacaatttctgataattgtgtggtgatt

SEQ ID NO: 740005 - DNA, 74 bp, Homo sapiens
ggagttcaaaactatgcatcaattccacagcctatgactgctaggtggaaagttacctctaaggaagctctgca

SEQ ID NO: 740006 - DNA, 101 bp, Homo sapiens
cacctgcgcgaagctggccaaagcctgcccagacggctcacctgtgcgggatggaacaaaaggatgatcacggacgtgcagctcgccatcttcgccaacat

SEQ ID NO: 740007 - DNA, 100 bp, Homo sapiens
ggtccggaaagagccgaaagcggtgtccgggtgggtggcaggaggtggaaacagccgaaagaaaagcagccaggatgttggccgatgatgcagaagcagg

SEQ ID NO: 740008 - DNA, 51 bp, Homo sapiens
cccacacctccggaccgagggacgcggatcttatgccttcattcatccggc

SEQ ID NO: 740009 - DNA, 51 bp, Homo sapiens
caagggccggattctcacccagagctttcagcagaggccaaggcagcattg

SEQ ID NO: 740010 - DNA, 100 bp, Homo sapiens
tcttccttgaagaaatacagcttggtgaagagttactagctcaagtgcaggatttggactgctacacgaccgttgctcagctgtgcccgtttgaaaagcc

SEQ ID NO: 740011 - DNA, 90 bp, Homo sapiens
tgatgttttctttctgccactattactattttcttccactaaaaaagcgtaatttggccaagtataaggagcgagggacggtcttggctg

SEQ ID NO: 740012 - DNA, 73 bp, Homo sapiens
aggattccaagtaactcttatttgagaccatcatgcagacatcagagactgggtcggacacaggctcgacagt

SEQ ID NO: 740013 - DNA, 100 bp, Homo sapiens
cacccttatttggtctttacaaacgatggcaacaacgggaagctgccttacaagcacaaaagcgacttgtttaagtatcactgcaatgctgacactggga

SEQ ID NO: 740014 - DNA, 83 bp, Homo sapiens
ggcaggacgggaaccacgcgagctgcagccagccattgtttgatgtcctgtgactgagaaaccaggctttaaactttatgcct

SEQ ID NO: 740015 - DNA, 100 bp, Homo sapiens
gacaatctcatcattttctccccttcggtagaaggagctttttagaaaagttcgaagtatcttaaataaattgacaccacagatgttcaatcaactgatg

SEQ ID NO: 740016 - DNA, 75 bp, Homo sapiens
tcaaggacaaacccaccttcatcaaagggacgcatcttctctccagactgccgatcccagaaagccaggtgatca

SEQ ID NO: 740017 - DNA, 95 bp, Homo sapiens
gtagcagcgactcatgagagcgcggccggaggacagatctctcaaaggccttggttctgacagaaattggccccaaacgtgaccctgcgaccctg

SEQ ID NO: 740018 - DNA, 95 bp, Homo sapiens
gaatactggaaagttgctatgttttgggatcgatttgcttagtggtataatacctgaactctgtcagaaatatccagatttaaatttcataattg

SEQ ID NO: 740019 - DNA, 100 bp, Homo sapiens
ctctgggtacccggctctgcatcgcgtcgccatgatgggccatcgtccagtgctcgtgctcaggctcccactgcagcagctcgggggaccccgctgagta

SEQ ID NO: 740020 - DNA, 83 bp, Homo sapiens
ctctatctgcgcaccttggagtccaagcttgtgctctttgtgcctccggagccagcgtggtggccatagacaacaagatcgaa

SEQ ID NO: 740021 - DNA, 90 bp, Homo sapiens
cgccacccgccgacgcctcagccgcttggggcccgcacggaccctctacttcaaacaagttgaaatcatcgcagaaggataaagttcgtc

SEQ ID NO: 740022 - DNA, 100 bp, Homo sapiens
cgacatggggcacccggtgtaccgcggcgagaagccccagctgcactacgcgtctccagagaatacagagggcaaagatggatccaaagtaactaaacag

SEQ ID NO: 740023 - DNA, 100 bp, Homo sapiens
ctgagtcagctgtgctgatgacatcagataagtgcacacatggtcttctgaagaagccatgggtagctgttgtagctgtccagataaagacactgtccca

SEQ ID NO: 740024 - DNA, 100 bp, Homo sapiens
gcaccacagagaccggcttcaatatcttcacccagcatggactgatcctttgaaatactccagccatgactaaaagagaagcagaggagctgatagaaat

SEQ ID NO: 740025 - DNA, 75 bp, Homo sapiens
agaccgcggccgggaccgaggcatccctacccaacagaggatgagaaaaaacagattgctgctcagacaaatttg

SEQ ID NO: 740026 - DNA, 78 bp, Homo sapiens
cctgcattcgcggggcatgttcccgaggctgtcaccaggaatcctgcaatatggcgaacataagagaatattatgaga

SEQ ID NO: 740027 - DNA, 98 bp, Homo sapiens
gtggttccatttgcaaaggttgtttgtaaaatgagtgaccagtcttcactggttctgggcacgtgtggttctcaaatataggcattctgatgggaact

SEQ ID NO: 740028 - DNA, 50 bp, Homo sapiens
atgaaacgtcaggaatttactacacagctgatgtagaaggccaatcctta

SEQ ID NO: 740029 - DNA, 98 bp, Homo sapiens
aaagaatggctgttgaacatccacaaggcacctgcaaggaagaaggtagataatgactataatgcccttcgagaaagactcagcaccttgcctgataa

SEQ ID NO: 740030 - DNA, 87 bp, Homo sapiens
atcggaatggtggagaacttcaaccaggcactcaagggccacgactgcttcccggtgctgttcacctatgacgccgccgcggggatg

SEQ ID NO: 740031 - DNA, 75 bp, Homo sapiens
cgtcccagggcccaggccgagcagctggagcagttcaacatgatggagaacgccatcagctccagcagcctgtac

SEQ ID NO: 740032 - DNA, 50 bp, Homo sapiens
cttggatacagaaatttcctgggctaaaacatatctgaagagatggatta

SEQ ID NO: 740033 - DNA, 98 bp, Homo sapiens
gtgcaaacttcccccaccccgccttccacccatgtgtgtcaaccctaccccaggagggaccatctctcgagaactgtctcagcaaacagcagctcctc

SEQ ID NO: 740034 - DNA, 90 bp, Homo sapiens
ctcccaaattgctgggattacaggctgctgggcctttgcaacaacttctcttatgtggtgatgctgagtgccgcccacgacatccttagc

SEQ ID NO: 740035 - DNA, 75 bp, Homo sapiens
ttttcttcagcctccttgtcctaggatatccgacatgaagccagtgacttcccatgtagagtggccaagcttcct

SEQ ID NO: 740036 - DNA, 50 bp, Homo sapiens
aattcgacaaccgcacaagttggcatttcagctcctggcatcagctctat

SEQ ID NO: 740037 - DNA, 101 bp, Homo sapiens
cgggcggtgtagaggcggcggacgggccggagggaggatgttaaagccccgcgatctttaatctcatgaagtacgacagctacagccgcttcttaaagtct

SEQ ID NO: 740038 - DNA, 90 bp, Homo sapiens
tgttgaataagacctggaaggagatgcgggctacacaggaggacttcgacaagctggagcagatccgcagggacatccgagacttccggt

SEQ ID NO: 740039 - DNA, 98 bp, Homo sapiens
ttacaagctttgtctccttcgacttggagtctttgtccaggacggtgactccccggacagctcaacaccaaagctttcgcgggcacagcggccgcagt

SEQ ID NO: 740040 - DNA, 98 bp, Homo sapiens
aaaaacccttcactgtgaagagacatgagatgattgccaaatccccaggaatctttgtctgaagtggaagaaaaatacaagaaagccatggtttccaa

SEQ ID NO: 740041 - DNA, 95 bp, Homo sapiens
actggctgcaggaagctgagaattatccttggacttacataaagcattttggactttatgaattaaaaagtcttgcaactaaaaagcctgataag

SEQ ID NO: 740042 - DNA, 74 bp, Homo sapiens
gaggccaggggtgtcgccatggagccatctgtgtgtgaaaaggaggccttgcccatctctgagagctcctttaa

SEQ ID NO: 740043 - DNA, 100 bp, Homo sapiens
tggtaatagatgtctgacaaactaaagaaagacttgtgttacgctctttggtgtaacgggaaactgcgctgcctgtagtaagctcatccctgcctttgag

SEQ ID NO: 740044 - DNA, 90 bp, Homo sapiens
caaattttggaaaatgtgataaaaacaaggtggaagattcttccaaggaaccagtgcgaaggccctcgggaccaaggatcacgtcatgac

SEQ ID NO: 740045 - DNA, 76 bp, Homo sapiens
ccatcaaatcagagagaaggaatccaccttcttacgctatggcagtgcaccaattccagctggacatcactgtgaa

SEQ ID NO: 740046 - DNA, 75 bp, Homo sapiens
atgaaggtgttcgtcacccgcaggatacccgccgaggatcatcatgctcaggaacgacatttaccgctgccgagc

SEQ ID NO: 740047 - DNA, 101 bp, Homo sapiens
gtgctggactacaatgcaggactgctctcctactacacgatggactagaggcttttaccagatttcttaaaactgaattcagtgaagaaaatattgaattt

SEQ ID NO: 740048 - DNA, 82 bp, Homo sapiens
gctagaaatatgggaggatctgaagataataagattttgtgaaaatggaaaattatgaggcattggtaggctttgatctctg

SEQ ID NO: 740049 - DNA, 74 bp, Homo sapiens
cgccgtcaacgccttcaaccaggagattcttctaacagagaaaatgccattgaggatgaagaggaggaggagga

SEQ ID NO: 740050 - DNA, 100 bp, Homo sapiens
actgtccgaaacatcgcctccatctgtaatatgcacatcccgctctgggctttaaacgtgacccctcgcctcgactcgccctgccctgtgaaaatgttgg

SEQ ID NO: 740051 - DNA, 100 bp, Homo sapiens
ccagtgtcccacttgcatcaagctgggcatccagggctcgtacttctgctcgcagatgtccagctcgccgctgtccaagaaacgtcgcgtgtccgggcct

SEQ ID NO: 740052 - DNA, 98 bp, Homo sapiens
ttcggagcggccggtactgttgaaagcgacaagtggaggcgccgctctagcggccgggactctgaactatggcgttgacgagccaggataaaaccccc

SEQ ID NO: 740053 - DNA, 75 bp, Homo sapiens
tccgagcgtgccggacacagccagagtatgccaagatggaaggaagcctcatacagtgagattaataatccgtcg

SEQ ID NO: 740054 - DNA, 74 bp, Homo sapiens
caaactggagctggtgcagcaggaattgggatcgtgtcgctgcggtgcactacatcctccaggaggtggtgatg

SEQ ID NO: 740055 - DNA, 83 bp, Homo sapiens
cgacgaggagaggctggctgagtccaagcaggcgtttgtccagaatgacagggtccagaaactggcgagccacgagggacatg

SEQ ID NO: 740056 - DNA, 75 bp, Homo sapiens
tgctgaatcagcgaggccttcgagatccaggggagattgcatcctacctgatcacctttgagaagcatgatgagt

SEQ ID NO: 740057 - DNA, 101 bp, Homo sapiens
ctgaagagctatggtgaaacaccactgaagcattgccaagcaataccaagtttccaggcccgaagagcatcccagactattgggactcctctgccctgcca

SEQ ID NO: 740058 - DNA, 75 bp, Homo sapiens
cgacatcaccaagctggaggtggacgccatcgtcaacgccgccatcgactacagtgacagcgccatgctccaagc

SEQ ID NO: 740059 - DNA, 80 bp, Homo sapiens
gaaaatctgaaggaggacccctcctcacaacaccagggtccttttgtacaagtggatgaactgatggaaattttccgaag

SEQ ID NO: 740060 - DNA, 90 bp, Homo sapiens
gtcctacgtgaaggatgacatcttccgaatctacattaaaggcgcagttgtgtagcagttgagtaatgctggttagctgttaaggtggcg

SEQ ID NO: 740061 - DNA, 88 bp, Homo sapiens
aaaaagatcacaagcaactctggatgggattgcaaaatgcaattctgtggtgttcttggtcacacatttatggagtttctgaagggca

SEQ ID NO: 740062 - DNA, 100 bp, Homo sapiens
cgttcggctactacttaataatgacaatctcctcagggaaggggcagcacacaatggcaccagcatgatatcattgatcattcctcccaaagaccagatt

SEQ ID NO: 740063 - DNA, 100 bp, Homo sapiens
gaaagacctgaggtccagaagcagatgcttgttgatatggccaaaaagctaccggtttacacaagaactggaagtggagttaaaagatgttgatactcgg

SEQ ID NO: 740064 - DNA, 75 bp, Homo sapiens
tacattgcccaaaccagtgcatttcaaatcttcagccaaggaaggttccaactaaatgaactgtcagctctcatg

SEQ ID NO: 740065 - DNA, 82 bp, Homo sapiens
gccagtggagcccccgcgcgcccggccggcccggagcaccgagctcgcggcacggaagctcttcgtgggcggtcttgactgg

SEQ ID NO: 740066 - DNA, 101 bp, Homo sapiens
tactgaagaggaggaagcccaggtcaaaatgcagatcttcgtgaaaacccttaccggcaagaccatcacccttgaggtggagcccagtgacaccatcgaaa

SEQ ID NO: 740067 - DNA, 83 bp, Homo sapiens
tgggagcgtgctttccacgacggtgacacgcttccctggattggtctgcagatctccaggggagcccaccagcctagtcaaca

SEQ ID NO: 740068 - DNA, 75 bp, Homo sapiens
gcccggataaggcggcgctgaacgcactgcagcctcctgagttcaggtctcattcaggaacgtcgcctgataaca

SEQ ID NO: 740069 - DNA, 115 bp, Homo sapiens
ggagacggcggccttcgaggaggtcatgaaggacctgagcctgacgcgggccgcgcggcacggccgacaagaacggggccctcaagtgcaccttctcggcacccagccacagcac

SEQ ID NO: 740070 - DNA, 104 bp, Homo sapiens
gaacaaatcagcctggtcaccagcttttcggaacagcagagacacagagggcagtcatgagaacatacatatgatagttgagaaagacacatattctgatcatg

SEQ ID NO: 740071 - DNA, 100 bp, Homo sapiens
agaagctggacaagctggggatgaggggctctaacacctgtgagctaatctttgaagactgcaagattcctgaagtgcctttcacctcctgccatgattc

SEQ ID NO: 740072 - DNA, 83 bp, Homo sapiens
gagcagatcgacaagtccgggagctgggcggccatttaccaggttgatgataattagaagcatgctttccactgaacttcccg

SEQ ID NO: 740073 - DNA, 100 bp, Homo sapiens
aagtgcgacagccacatggagacattcttgcgctgcatcgaagcctcagaccacagcaccgggaagtccagtcagcggcagatggtgttcggggtggtca

SEQ ID NO: 740074 - DNA, 99 bp, Homo sapiens
tcatctccctgctggagcaagaggcagagctgtgggcggtggagtctagacttccccaaggcgtgtacccaggtgaatcagctcccggccgactttagg

SEQ ID NO: 740075 - DNA, 75 bp, Homo sapiens
cttcagcaagctgaaggaggaccagatcaagaagtcaatgcaaaatcatgctgccgtgttccgtgtgggaagcgt

SEQ ID NO: 740076 - DNA, 50 bp, Homo sapiens
atgcgctcgggctggaccagcaggtctgcaattaaggccttacgtcctgg

SEQ ID NO: 740077 - DNA, 101 bp, Homo sapiens
gtctttatatcctgacactatgaatgctacttggatgcctcttaagaaactaatctggattcactccctctggttgatacccactcaaaaaggacacttct

SEQ ID NO: 740078 - DNA, 99 bp, Homo sapiens
atgtcctttgtttggtctttctggaatcaatgcaagttcggttcccactgatggctcagctgcagaaccttggcctgaaaatgctacattatatcagca

SEQ ID NO: 740079 - DNA, 100 bp, Homo sapiens
cggcaacgtgtaatcagaaggcacagattagaggaaggaagaggcatttcctgcagatcaccctgtgcgtgtgcgagctgtatggctgctggatgacctt

SEQ ID NO: 740080 - DNA, 80 bp, Homo sapiens
gttgggaactcagaccgtaccttgcaacaaggcactactgcagtcttcagttaagcaacaagtagaagctattgaaaaac

SEQ ID NO: 740081 - DNA, 75 bp, Homo sapiens
gtcgacctaaagcctgactggggcaaggttggatggcaagcatgtggtgtttggcaaagtgaaagaaggcatgaa

SEQ ID NO: 740082 - DNA, 132 bp, Homo sapiens
gccagaggaggaggccggggaatggccgcggtgtggcagcaagtcttagcagtggacgcgaggaggaagagcaagcaggccctgagggactataagaaggttcagatccagctggagaatctggagagcagt

SEQ ID NO: 740083 - DNA, 100 bp, Homo sapiens
cccgtgttgccaacgaacagagcgtcagcatattttagactgaaaaattttaaccgtgattggagataccacaaagaagaacgagtatggattaccaggg

SEQ ID NO: 740084 - DNA, 100 bp, Homo sapiens
gatgggcgcgaacaatggcaaacagtacggcagtgagggagctggtgactgccctcatgtgtgatttgcggcggccagcggcaggtgggatgatggactt

SEQ ID NO: 740085 - DNA, 90 bp, Homo sapiens
gaagaagcaggatgaactgaaacggattgccagagaattggcagaaggaagtgggaaaactcttgcctttgccatcccaatgattcatgc

SEQ ID NO: 740086 - DNA, 69 bp, Homo sapiens
ggtgtgcagtggatggagcttgtcaagattgaggcgtagaggctccggtgttttttgtgccaattgcct

SEQ ID NO: 740087 - DNA, 80 bp, Homo sapiens
cagagatttccacagaaggactgggatgatacaccttttccacagggaattgagttgtgcctttactttcccgaattctg

SEQ ID NO: 740088 - DNA, 96 bp, Homo sapiens
cctctggtcttccctgaccccgcggccggacgacccaagcccgctgagcaggatgagggcactactgcagtcttcagttaagcaacaagtagaagc

SEQ ID NO: 740089 - DNA, 133 bp, Homo sapiens
gacgcctccgccgccgcctgaggaggcgagctagccgggagttacaccgccaccgccagatgaggctgctgtcatttgtggtgttggctctatttgctgtcactcaagcagaggaaggagccaggcttttggc

SEQ ID NO: 740090 - DNA, 98 bp, Homo sapiens
ttcacacctttcaccctgggcaaggagttcaaagaaggacacagctactactacatctgccacatccacgtcctccgagcctacatcaagacccaagt

SEQ ID NO: 740091 - DNA, 82 bp, Homo sapiens
cggcgagagtgggcgagaacgtccactgcgggccggcgaaagctgttggaggattgtgctctgcaagtgtctccctccggat

SEQ ID NO: 740092 - DNA, 83 bp, Homo sapiens
gtctcaatctctggaaaaacttcttgccaaccaaaaatagcctaacatggcagaccagagacagcgctcactgtctacctctg

SEQ ID NO: 740093 - DNA, 96 bp, Homo sapiens
ctgcctgacttggaccctggaaaacctggccctcttcaatttctgacaaaagctcaactataaatttccagcaacagtgcacatggcgcatcaaaa

SEQ ID NO: 740094 - DNA, 98 bp, Homo sapiens
ttcttgccagaaaggattctaataactcggtgtcaaagccaagacataaactcaaccccttctcttccaaaagctttgaaaagtccagccgcatttca

SEQ ID NO: 740095 - DNA, 75 bp, Homo sapiens
gccaggagtcatgagcgacagcggcgagcagaactacggcgagcggaaaatgcatccgatgcagatttatggctc

SEQ ID NO: 740096 - DNA, 50 bp, Homo sapiens
cttcttcgagaattacaccggggtccaggactgcaatgtgccgatcttag

SEQ ID NO: 740097 - DNA, 90 bp, Homo sapiens
attcgcagtggtcgcttcttctccttggacatgccccagccacggcttgctctcaactgtgttggtgggaaaagctccacagagctgctg

SEQ ID NO: 740098 - DNA, 71 bp, Homo sapiens
aggacgagatccagtttctgaggactattgaaaatggctcaggaatcagtcagcaagttgacttcagagaa

SEQ ID NO: 740099 - DNA, 75 bp, Homo sapiens
tttgctgtagccgtagtatcacctcatacttttcatttgcgacctcatcatccatggacatttgggagcaataaa

SEQ ID NO: 740100 - DNA, 125 bp, Homo sapiens
agagcgcgagagatggagatgggcagacggattcatttagagctgcggaacaggacgccctctgatgccctggccaacgtcaacattgggagcctcatctgcaatgtaggggccggtggacctgc

SEQ ID NO: 740101 - DNA, 87 bp, Homo sapiens
gagcgccgctgcctcgcctcgaggtggggctggtgtccgagcacttctcgcaggccccgcagaggctgtccttctacagctggtacg

SEQ ID NO: 740102 - DNA, 98 bp, Homo sapiens
tcatggtgtacttgtggttggctatggtgatcttaatgggaaagaatactggcttgtgaaaaacagagttttgcggcctccaggtggtggatccaatt

SEQ ID NO: 740103 - DNA, 82 bp, Homo sapiens
gagtacaacgagccgcatgagagccggacaaactcagacatcgtggagccactgttccatccctgacccatctttgtcgttt

SEQ ID NO: 740104 - DNA, 90 bp, Homo sapiens
cacctctgctcagtgttcaacatctgacagtgcttgcaggatctctcctggacaaatcaatcaggtcaaaatgcagatcttcgtgaaaac

SEQ ID NO: 740105 - DNA, 75 bp, Homo sapiens
aattgaagacgtatcggacgatttaaattcttgctcacttgtggcatctgggctactcaccagaagatatcattg

SEQ ID NO: 740106 - DNA, 82 bp, Homo sapiens
aactggagagcttcatcaaaaatagtgatagctttgataagggatcatggaagctgataaagatgacacacaacaaattctt

SEQ ID NO: 740107 - DNA, 83 bp, Homo sapiens
cgaggagtcggaggagccgcgggcggcgcggcccagctcgttccaggctgaagctcagggccctgtctgctctgtggactcaa

SEQ ID NO: 740108 - DNA, 75 bp, Homo sapiens
gagcagagagctggcgagcaagaacatccagtcatggataaaaatgagctggttcagaaggccaaactggccgag

SEQ ID NO: 740109 - DNA, 90 bp, Homo sapiens
gcctgaagaaacctggatctttgctagaaagagagtaagactttgaccccgacgcaggcttcagtgattgccgcggatcagaagcctgag

SEQ ID NO: 740110 - DNA, 58 bp, Homo sapiens
ggaaaacttcccttccctttcgtcctattttgtaacggattatgatccaaccattgaa

SEQ ID NO: 740111 - DNA, 75 bp, Homo sapiens
cagtgagcgagatgctgcagatgccgttaaacaaatcctggaggcagttgctttttttgctccactcaagcctgt

SEQ ID NO: 740112 - DNA, 98 bp, Homo sapiens
cacaatgaggctccctgctcagctcctggggctgctaatgctctgggtctctggtggcctgccatgggtatccatggtgacaagagtcaacaagagcg

SEQ ID NO: 740113 - DNA, 83 bp, Homo sapiens
tcttcttccagatttcctttcagaacactcaaagagtgtcacaccctccgcagattgttctgcccattcataactgggaacca

SEQ ID NO: 740114 - DNA, 90 bp, Homo sapiens
ttggttaaagtcattgaggactttccagcaaagaattccagcctggtcaccttccaagagcccccgggggtcaacaccacagagctgcca

SEQ ID NO: 740115 - DNA, 108 bp, Homo sapiens
ctggagcctcagttggaagcagccgatccagcctgcggagcctgtggggcaggttcgatacaagaggctgttttcctagcgtggcttgctgcctttggtaagaacatg

SEQ ID NO: 740116 - DNA, 101 bp, Homo sapiens
ctgcggggatgtatttggaacattatctggacactggctgagagtgactttgcctctaccttccggctgctcacagtgtttgcttatgggacatacgctga

SEQ ID NO: 740117 - DNA, 100 bp, Homo sapiens
gggaagcacgtggatgagtacgaccccgaggacacgtggcaggatgaagagtacttcggcagctatggaactctgcttatcttaatggccatgcagaaac

SEQ ID NO: 740118 - DNA, 100 bp, Homo sapiens
tgggtgccggtgctcttcatcaccttcgtggtcgtctggtcctactacgcgtacgtggtggagctctgcgtgtatgaggagactgtccttcctgtttcgc

SEQ ID NO: 740119 - DNA, 82 bp, Homo sapiens
gaatggacaagcttaataaaataaccgtccccgccagtcagaagttgaggaactgtggctgcaccatctgtcttcatcttcc

SEQ ID NO: 740120 - DNA, 137 bp, Homo sapiens
tacagctccgcgcccgccagttgcttgatcaggtggaacagattcagaaggagcaggattaccaaagggaagcacaagcctatgcagacgacaacagtttgctgttcatggagacatcagcaaagactgcaatgaac

SEQ ID NO: 740121 - DNA, 80 bp, Homo sapiens
gtcgtgaggaaactgagaggagaagatcaagaggtggagctggttgtagattatctggagctctcaaacactgctgtcct

SEQ ID NO: 740122 - DNA, 100 bp, Homo sapiens
agatgcagatcctcatttccatcatttcctgctaagccaaacagagaagcacaacattctgaaattttttggttattgtaatgatgttgatcgggagttg

SEQ ID NO: 740123 - DNA, 74 bp, Homo sapiens
tgggccttccaggggacgaggtggataacaaagtgaaaggtgcgggagtatgagttaagaaaaaacaacttctc

SEQ ID NO: 740124 - DNA, 51 bp, Homo sapiens
ctggactgtgggctggtgtgtggaactgatggcccactgcgtgaccttggt

SEQ ID NO: 740125 - DNA, 59 bp, Homo sapiens
gcttcatcaacgatatatgtcagatctaaaggtgaagccaaaaaccttccctcttaccc

SEQ ID NO: 740126 - DNA, 75 bp, Homo sapiens
ttattgtgttctggttccagtcaagcaaaattattcagcaccaaatacagattctgttcatcttgctctgaaatt

SEQ ID NO: 740127 - DNA, 75 bp, Homo sapiens
cgtggtgttggccttcgagctgtactaccataccacccagatttggtcgtattgggcgcctggtcaccagggctg

SEQ ID NO: 740128 - DNA, 82 bp, Homo sapiens
cgcgcctctcgatgggcagctcgcacttgctcaacaagggcctgccgcttgcggaatcggacatgtccaaaccaccgtgtta

SEQ ID NO: 740129 - DNA, 83 bp, Homo sapiens
gttttctgccggctgtaaagtcatcacctcctgggatcagatgtgcattgagggggtctgccacatgtagaaagatatcttcc

SEQ ID NO: 740130 - DNA, 82 bp, Homo sapiens
cctgccactgtcttgttccgaggcggccccagagcaggtctctgaggctgtggttgctacagggtcaccacgagcttggctt

SEQ ID NO: 740131 - DNA, 127 bp, Homo sapiens
cttcctcaaccagatgttttcccattgttcaaggacaaaggtggcccagaattttccagtgccctgaaaaataaaattgcttcccaagaagaaggtgctactatacagtggatgtcatctgtagaag

SEQ ID NO: 740132 - DNA, 89 bp, Homo sapiens
gggctatcagtgcaccttcggcgtgctgcagggtcaaaagcggctggtgctttccgaaagctgctcccgggactccatgagcagtcagc

SEQ ID NO: 740133 - DNA, 50 bp, Homo sapiens
gcatgatgttcgtccgcaacgattgcaagattgagaggatccagaatcca

SEQ ID NO: 740134 - DNA, 93 bp, Homo sapiens
caagtatgttcttaagccggccacagaaggaaagcagtcttgccccagaagctgcgggcacatccacgcctgaaatgcggcgctcagtcctgg

SEQ ID NO: 740135 - DNA, 50 bp, Homo sapiens
cgccggagctgaccccggaggaggagcagattcttggtgccaccattgag

SEQ ID NO: 740136 - DNA, 83 bp, Homo sapiens
ggggagtgtctgtctgtgcaggtggtcaactgcagccgtgtattcagccttaggagcgtgaggatcatccccggagaggacgg

SEQ ID NO: 740137 - DNA, 90 bp, Homo sapiens
cgggaggctccttgtgccacattcttgcagctgcctacaaattcaagagtgaccagggatgatgagcaccatgccaggactgcccacccg

SEQ ID NO: 740138 - DNA, 74 bp, Homo sapiens
tttccttccatctctgctgctctctcatttgctggccatcggattggggtcactctacatgacatgatcctgaa

SEQ ID NO: 740139 - DNA, 100 bp, Homo sapiens
tctgcggaagtgcagctgcctcagttcttagcgcagcctacaacacagcagtcccctcaggatgagcaggaaaagctcttggatgaagccatacaggctg

SEQ ID NO: 740140 - DNA, 101 bp, Homo sapiens
gaaaaattacgttcctcccaaaggtgataagaaggggaagaaaaaggaccccaatgctcctaaaaggccaccgcttcctgcttttccgaagccttccccga

SEQ ID NO: 740141 - DNA, 101 bp, Homo sapiens
cacaaactatggaccaaatccaagaccagtttaatgaccttgttatcagtgatggctcttctctggaagatcttgtgggcacaagagactatagtccccgg

SEQ ID NO: 740142 - DNA, 97 bp, Homo sapiens
agcatttaggcaggtggctcccaaattaccggaaaggactgttcttgaggtattcaggtatctcttccaaatgcacaatgaaggagttctcatcaac

SEQ ID NO: 740143 - DNA, 100 bp, Homo sapiens
tctcacagggattgagtgggccccaaacggctgtgtgctggcagtgtgggacacctgcttggagggtgtacaactatgagcctttgacacagctcaagaa

SEQ ID NO: 740144 - DNA, 99 bp, Homo sapiens
gacatggagattctcttaaaaagagcaaatcatggaggaagataaaaaacatggtgcactggtctcccttcgtcatgtccttcaagaagaagtacccct

SEQ ID NO: 740145 - DNA, 100 bp, Homo sapiens
agatggcagatttgcatctttacaaccagaagctcagggagaagttgaaggaggaggagaacacagtggctctcacctgtgcacagttccaccctgacgg

SEQ ID NO: 740146 - DNA, 50 bp, Homo sapiens
gtcagcactgactttcagctatggaatcgtccaagccttatgcatttgat

SEQ ID NO: 740147 - DNA, 75 bp, Homo sapiens
agctggacggcgagcgcgagcggcgcgagaaatgaaggagaacgacctgctcagaatgagaagaggaaggagaaa

SEQ ID NO: 740148 - DNA, 88 bp, Homo sapiens
gcaacccgcaaacggtgggggtcggccggggccgcttcaccacttacgaaatcagggtcaaggcacgtgtggttctcaaatataggca

SEQ ID NO: 740149 - DNA, 83 bp, Homo sapiens
gctccgtcgtggaagcaggactgcgccgcgtcttcctcaagatgtagccgcctgtcccgggagcctggactgtgccctgaaga

SEQ ID NO: 740150 - DNA, 75 bp, Homo sapiens
ggacgggatgcggggcctggcggtcttcatctcggatatccgcaactagtcgtgtcccaaatgcgaacatcctcg

SEQ ID NO: 740151 - DNA, 83 bp, Homo sapiens
ttgacgccatgtcgggttattcgagtgaccgagaccgcggccgggaccgaggaatccacattcatctcaatggaaggatcctg

SEQ ID NO: 740152 - DNA, 74 bp, Homo sapiens
caagtgtggcagcagttcgtgaagtctgtgaggagttctttatagctccaagctctacagattcttcaaatata

SEQ ID NO: 740153 - DNA, 90 bp, Homo sapiens
gcttcgtttttcgccgtcatgggcgcctcggccgccatggtcttcagcggcccgcgatgctcccagcccggtgagacctgcctgaatggc

SEQ ID NO: 740154 - DNA, 127 bp, Homo sapiens
ggaaaagtgaacttttcgaggcatttgacttgtttgatgttcgtgactttggaaagatcagtgtactgttacccggacatacctattccttcacaagttctggttcttcagtgctgcttactatttt

SEQ ID NO: 740155 - DNA, 100 bp, Homo sapiens
gagatgtggggggattctcgacctgctaacagaactggaccttttcggtggtgtgtgatgagaacggctctaagggttatgcctttgtccacttcgagac

SEQ ID NO: 740156 - DNA, 75 bp, Homo sapiens
gctgaggctacctgtgaacagtacgcagtgaatgttgtgaactactgagttcttcattatgtctgatggagatta

SEQ ID NO: 740157 - DNA, 100 bp, Homo sapiens
tggatcatggctgccgcgccgccgctacgggaccgcctgagctttctacaccggggcctggagaacagctggcgccagcaccgcgaggccgcggcgtatc

SEQ ID NO: 740158 - DNA, 87 bp, Homo sapiens
ttcctggaggtgaaactgggcaagaggccccagcccgtgaaaagtgaggcccttccttctaccatgattatagtagcagtttattgt

SEQ ID NO: 740159 - DNA, 82 bp, Homo sapiens
cagcatgtcggtggcggggctgaagaagcagttctacaaggcgagccaggctggcctgccactcctcctgctatgatgcctg

SEQ ID NO: 740160 - DNA, 101 bp, Homo sapiens
ccgcggtggaggtctgcgttgctcttgcttttcctcgctggggtgtacggctcctgtgacgtttgatgacatcactgtgtacttactccaggaggaatggg

SEQ ID NO: 740161 - DNA, 75 bp, Homo sapiens
aaactctctgaaaaatggctccctccgagttaagagggtctcgctgttggagttggatttggggctatagaaaag

SEQ ID NO: 740162 - DNA, 73 bp, Homo sapiens
ttggcactgctcctgctggccgcctggacggctcgggcgctggaggtggagaagaccaagctttcttcctccg

SEQ ID NO: 740163 - DNA, 74 bp, Homo sapiens
gacgtaggaagaagggcaggacctgggcggaggccgccaagacgatggcccactgcgtgaccttggttcagctg

SEQ ID NO: 740164 - DNA, 84 bp, Homo sapiens
tggtggattctcactgagttttgactagcggaagaaaaggatgtggagagcatcttgtgcgcaccatactggctagagaatgtt

SEQ ID NO: 740165 - DNA, 75 bp, Homo sapiens
caaacaaaggcgaccctcgaaaggagtttcaattactgaaaattacttggaaatagaaggaatggctaattgtct

SEQ ID NO: 740166 - DNA, 75 bp, Homo sapiens
ccgacgcattagacaatgagaggcaccacactgtaactcgaggcatcaccaaaggcgtgaaggaggactttcgcc

SEQ ID NO: 740167 - DNA, 98 bp, Homo sapiens
ccccgccccgctccacccgtgagggaactcgaatcatttatgacagaaagtttctgttggatcgtcgcaattctcccatggctcagaccccaccctgc

SEQ ID NO: 740168 - DNA, 101 bp, Homo sapiens
cctggacaggatggattgccagggcttcctggcccgaaaggagagcctgacatggatttgattgacatactttggaggcaagatatagatcttggagtaag

SEQ ID NO: 740169 - DNA, 75 bp, Homo sapiens
gatcaacactgagagttctctctggagtctcgagcccgggaagtgcgttttgattgttgtgtccactgtatcctg

SEQ ID NO: 740170 - DNA, 101 bp, Homo sapiens
gggagtcaccactggacctccaaggaagccacgtgcagacatctacaaccttcgatctcctgacgagtattttaacagcagtgataacaatttacagtatt

SEQ ID NO: 740171 - DNA, 55 bp, Homo sapiens
ggagacacggccagatctgccctccaggtcctgtattaataggaagttcacatgg

SEQ ID NO: 740172 - DNA, 100 bp, Homo sapiens
cctaggaggaggactagatagtctggttgccaagctgttctgcctttctggaatggtgcatggagaatatcaaaaccaagaaatgcacaatctgggccat

SEQ ID NO: 740173 - DNA, 90 bp, Homo sapiens
gcccgggtctgttggtgctcagagtgtggtcaggcggctcggactgagcagatgcctgaggaaacccagacccaagaccaaccgatggag

SEQ ID NO: 740174 - DNA, 82 bp, Homo sapiens
ggatcatgtctgcgagccaggattcccgatggcatgatcaacattgacatgactggagagaagaggtcgttggatctcccat

SEQ ID NO: 740175 - DNA, 50 bp, Homo sapiens
ttcgggccggctgtcctggcgcggctcagagcccctacctcccacacagt

SEQ ID NO: 740176 - DNA, 80 bp, Homo sapiens
agctgcacaggctgcagccaccgcagctgccatggttgatgccttccctcccaatggttatggcttatacaacatagtgg

SEQ ID NO: 740177 - DNA, 110 bp, Homo sapiens
atggtgatgatcgaattgagccatacattcatgaaggagatattctcgaaagacctgaccttttctacaactcagtgattccagcagtctcagcagcactgatgctggat

SEQ ID NO: 740178 - DNA, 90 bp, Homo sapiens
gttccacttgaccgctctaagccgccgcgcagcctgcgttttctccggtacaggttgaggctactaagctacctctacccagatggaaag

SEQ ID NO: 740179 - DNA, 74 bp, Homo sapiens
ctggatttacctgttttctgggagcttcgaagtactatactggcaattgctggagaagattttgcaattgttgc

SEQ ID NO: 740180 - DNA, 50 bp, Homo sapiens
tgtcgggaaggtcactgaacctgaacatcatttacagcgagcaatttcag

SEQ ID NO: 740181 - DNA, 75 bp, Homo sapiens
gggaccggcggcgctggaggagcgaggcagctgtactaggactgggaacggggctacagaactggctacccttat

SEQ ID NO: 740182 - DNA, 83 bp, Homo sapiens
ctcggagctgagaggagctgctgctcggaccagcgcgcctgctgagggatgcccaagaagttccagggtgagaacaccaagtc

SEQ ID NO: 740183 - DNA, 97 bp, Homo sapiens
ctcagcttcctttctggaacaactggacccaaagaggaattgcattttgtgaaaaaagaacaagaattttctgcaaggatcatatctaagtgcactt

SEQ ID NO: 740184 - DNA, 82 bp, Homo sapiens
ctcacatgagacaaatgcgctcagcttcaattgcaattctgtggtgttcttggtcacacatttatggagtttctgaagggca

SEQ ID NO: 740185 - DNA, 100 bp, Homo sapiens
tctcatgtatgtgaatttggacaacgaaatagacaatggactccatcccactgaggaccgtcttattgaagttaaaacagatgagtttcctcgccatggg

SEQ ID NO: 740186 - DNA, 99 bp, Homo sapiens
gttcaatgtatgggacacagccggccaggagaaattcggtggactgagagatggctattatatccaagattgggactttaaccaggacatctgacagtg

SEQ ID NO: 740187 - DNA, 73 bp, Homo sapiens
agatcttcaagttcatctatatcttcgatacctaaagcaaacctaatatgattctataacagactcttccaga

SEQ ID NO: 740188 - DNA, 100 bp, Homo sapiens
tcgacgtgcggcccgaatgccagcgcctcttctaccggggcaagcagacactgccctaaccatcatggaggtggccgaggtggaaagtcctctgaacccc

SEQ ID NO: 740189 - DNA, 75 bp, Homo sapiens
gggcagaaggttgaagaacaggagaagggcgtataccgcatctctaggagagacagcagttgcatttgactttgg

SEQ ID NO: 740190 - DNA, 100 bp, Homo sapiens
ttactcgcccccacctgtggactctgaccgcaaacaaggagagcctactgagcagcctgagtgggtctctcaggcagctgcagagcttcaacagtactgt

SEQ ID NO: 740191 - DNA, 100 bp, Homo sapiens
taatgagaagatctccattcctgaggaggaggtattctctactgccgctgatggtcaaacgcaagtggaaattaaagtgtgtcagggtgaaagagagatg

SEQ ID NO: 740192 - DNA, 83 bp, Homo sapiens
tccagcatgggctcgcctgtcaacgcgcagctggagaagttcagcatctccgctcatggcaaggagctgttcgtcaatgcaga

SEQ ID NO: 740193 - DNA, 83 bp, Homo sapiens
tatcagggcaagctgtgttccatggcagggaacttttggcagagctcccactaacaatgcagatcttcgtgaagactctgact

SEQ ID NO: 740194 - DNA, 136 bp, Homo sapiens
gaagaagtagacatggcgagcgactccccggctcgaagcctggatgaaatagatctctcggctctgaggtatctcggaagatggtacgaaattgagaagatcccaacaacctttgagaatggacgctgcatccagg

SEQ ID NO: 740195 - DNA, 82 bp, Homo sapiens
ccttgtcttgacagtatcatgcacagggtttctattgcctgggctggagtgtagtggcatgatcatggctcactatagcctt

SEQ ID NO: 740196 - DNA, 112 bp, Homo sapiens
gaagagttaaatgccctcaagtcgacaggggatgggaccctagcccatcacctcttcatgaccactgcctgccaggaggctaactacggtgccctcctccgggagctctgcc

SEQ ID NO: 740197 - DNA, 74 bp, Homo sapiens
tccttccaatgggcttttggtgtaggatgtcggagaaccaagaacaggagaaacctgtttccctccaatcttgt

SEQ ID NO: 740198 - DNA, 83 bp, Homo sapiens
ctgcctctgtcactcctggtgaccagcattcaagggagatcttgtgcgaaaactcaaagaagataaagcaccccaagtagacg

SEQ ID NO: 740199 - DNA, 82 bp, Homo sapiens
tcagttggaagcagccgatccagcctgcggagcctgtggggcaggatttgcctcaaagggcactgcaaaaattgaacagagg

SEQ ID NO: 740200 - DNA, 100 bp, Homo sapiens
gtaaagtcgagtatctggtgaagtggaaaggatggcccccaaatgcagagcagagcgggcggaggaccccgggcgcgggcgcggacggcacgcggggcat

SEQ ID NO: 740201 - DNA, 74 bp, Homo sapiens
gaagcgcagggagaaggaagaggtgtttgaaaaggcaagagtttcaccttgaccataaccgtcttcacaaatcc

SEQ ID NO: 740202 - DNA, 100 bp, Homo sapiens
ggaggaatacctggcattgacctctcagatcccaaacaactggcagaatttgctagatctctctcagccttgtctgcttatcacactggcttgatcgcgc

SEQ ID NO: 740203 - DNA, 75 bp, Homo sapiens
ccgaaacagtctccatctacctaggcctctcacaactgggctcaaaatgcagagaactcaaagatattcatttcg

SEQ ID NO: 740204 - DNA, 97 bp, Homo sapiens
ggctgcaccttcagatcatggcgttggcattgaacctgtatttccggagaacacaggacagagcccccacataaaatcaaatctactctcaggaagc

SEQ ID NO: 740205 - DNA, 50 bp, Homo sapiens
gtgcgggccgcctccagagagatgacgcggcatggcaagaactgcaccgc

SEQ ID NO: 740206 - DNA, 75 bp, Homo sapiens
cccagggcagggctcctaaggaaggacccgcctttaggcttatgcaagcaaagatctggaggagcagttacggtc

SEQ ID NO: 740207 - DNA, 75 bp, Homo sapiens
aaagaatttaccaagctagaggagttctttattggtgaaaacatgaatccagatggcatggttgctctattggac

SEQ ID NO: 740208 - DNA, 78 bp, Homo sapiens
cggaagctctttgaccttctggatgtccttgagttcaaccagtctcttcaagaaaatgaggaggaggagattgggaac

SEQ ID NO: 740209 - DNA, 73 bp, Homo sapiens
gcagatgcccctcctccaccagaggactgggaggagcatgtcaacagggtcatctagtagcaggcacccaaat

SEQ ID NO: 740210 - DNA, 95 bp, Homo sapiens
accaggccctgaactgcggtgggactgcctcgactggcagcgcgggaaacgtcaaactcgaggtaaaatttggtaataccacctttaaaacagat

SEQ ID NO: 740211 - DNA, 90 bp, Homo sapiens
cgtgttgttggcacaacatttcatggaactgggtattgcaggcaacaaggacctttcatacagggcagccacaccttgtccctgtaccac

SEQ ID NO: 740212 - DNA, 98 bp, Homo sapiens
aaatttgccatccgagggatgctgaaaacctttgggcttcatggagtcgtcttagatgttgattcagaatgctcatcaaatttaacaacgctgttcag

SEQ ID NO: 740213 - DNA, 100 bp, Homo sapiens
gtttccttgctgatctatttaccaagtggaaggagatctattgggaaactgattataaccactcgggcaccatcgatgcccacgagatgaggacagccct

SEQ ID NO: 740214 - DNA, 100 bp, Homo sapiens
cgccaagaaaggcagcgaggtggagagcgcctttgcaactggactgtgacctttgtgccatagtgtcaaactcaggtcagatggttggccagaaggtggg

SEQ ID NO: 740215 - DNA, 100 bp, Homo sapiens
ctcctccgctaccaccaccacaccagaaactagcaccagccccaaatttcggcccatttggaggccagcgctgagaagtggaacaggttgctgatgtcct

SEQ ID NO: 740216 - DNA, 99 bp, Homo sapiens
ccttaccagtggataatagtctactgtccaattctgtttactctgaattaccatcagctgaagggaaaatgaagacctagaggatcaagacataatggg

SEQ ID NO: 740217 - DNA, 82 bp, Homo sapiens
attcgcagtggtcgcttcttctccttggacctcagcaatggagaatatccccatcatcacaactgtcatcactctgccgcac

SEQ ID NO: 740218 - DNA, 100 bp, Homo sapiens
gcgctgcggcctggcggcttccaggcgcactaccgcggggtcgggccccggctcagtggtcccaggcagctcgggtgtcggaacccccagacagttcacg

SEQ ID NO: 740219 - DNA, 80 bp, Homo sapiens
gaccctggagcctcagttggaagcagccgatccagcctgcggagcctgtggggcaggtctattgaatgatggaactgtgg

SEQ ID NO: 740220 - DNA, 83 bp, Homo sapiens
gatgtggagcactacctttgtgagcagtgtgacccaaggcctgtggacaggctgtagctggaaccactataacatgcagtacg

SEQ ID NO: 740221 - DNA, 101 bp, Homo sapiens
tgaggcagctgcaaggagggcggcgggactgcactcgagtgtccagacctgctcgatggttcgagaacttgtcttggacaattgcaaatcaaatgatggaa

SEQ ID NO: 740222 - DNA, 119 bp, Homo sapiens
caagcagctcttccggaagatcaactgcagactgtcctattgcatctcaagccggaggtggggaagacagggctccagctaccacaggacgggctctgggtatagccgttccagtcagg

SEQ ID NO: 740223 - DNA, 100 bp, Homo sapiens
aacgcccctccagccttcgagtcgttcttgctcttcgagggcgagaagaagcagctgcattcagcctcagcggaggacacgcctgtggtgcagttggcag

SEQ ID NO: 740224 - DNA, 100 bp, Homo sapiens
cttcgagagtcgcatctccgacacgggctctgcgggcctcatgctcgtcgagttcttcgccccctgaaacagcataccaattgtgacagagcagcccctc

SEQ ID NO: 740225 - DNA, 101 bp, Homo sapiens
ggggaagacctgcgtcctttttcgtttttcggatgatgccttcaatactacctttatttccaccatagtagtttatgccaacgtgacttcattcatacaga

SEQ ID NO: 740226 - DNA, 80 bp, Homo sapiens
cctgcgaaaggatcaagggataaaccatggtatgtaccctctggtcacagcgacccaggatgctgacagcagccggaagc

SEQ ID NO: 740227 - DNA, 98 bp, Homo sapiens
ggagactcagaatcgaatctcttctccctccccttcttgcaatggctgccatccggaagaaactggtgattgttggtgatggagcctgtggaaagaca

SEQ ID NO: 740228 - DNA, 83 bp, Homo sapiens
tgatgcaaaggcagcaagagatgcacaggagcttacaaaacactacacagcaaaataatgatctgctagactgctaacccgag

SEQ ID NO: 740229 - DNA, 143 bp, Homo sapiens
ccgggcagctccgggacctgcttcaggatgagcccaagctggaccggatcgtgcggctcagcaggaagctcacggatgattgatatccagaccaggatggctgggcgagcattggagcttctttatctgccagagaataagcc

SEQ ID NO: 740230 - DNA, 83 bp, Homo sapiens
cgccccttcgcgtcccctgcaccatgagctggggcaccgagctctggggcaaacctggtggacctgcagaagaagctggagga

SEQ ID NO: 740231 - DNA, 100 bp, Homo sapiens
cccaggcgagggcgccgcacccacaccgcgctgcgcagttttgttctgctccagctgttcgaaggtgatccaggtgaagacattcagtgaagcttgcctg

SEQ ID NO: 740232 - DNA, 100 bp, Homo sapiens
ctgcaggtattgggagatccacagctaagacgccaggactccctggaagcctagaaatgggacagagcagaatgggctgatatagatccggtgccgcaga

SEQ ID NO: 740233 - DNA, 75 bp, Homo sapiens
atgagtataaaggatgggttttaactacagacccagtctctgccaagcagtgctcggaatgtgaccaggcaggga

SEQ ID NO: 740234 - DNA, 76 bp, Homo sapiens
tgaacctggagctccagttcactccgttccagctgtgccatgcggaagagagtctacaaggagattgaacaggtgg

SEQ ID NO: 740235 - DNA, 75 bp, Homo sapiens
aaccttggagagaggagaacgaacatcttctggacctttgtccagttgccctcaaattggctgtagccacacgga

SEQ ID NO: 740236 - DNA, 99 bp, Homo sapiens
cccctggaatgcaggaagagctccagcagatcattgattgtctggataccagcattcctgagacaatccgctgacaactgcagtctccagtttagaata

SEQ ID NO: 740237 - DNA, 100 bp, Homo sapiens
acaccatgagcaaagctcaccctcccgagttgaaaaaggcgtctctggccgagcctctttttgtggaaaacgacagcagcagcagtggcctggaagacgc

SEQ ID NO: 740238 - DNA, 148 bp, Homo sapiens
aagaacatccccgccgggctgcagtccatgaaccaggcgttgcagaggcgcttcgccaagggggtgcagtacaacaggaactctaatgatccaggacaaagaagttaccctggagtatgtatcaagcctggatttttggtactgcaaa

SEQ ID NO: 740239 - DNA, 100 bp, Homo sapiens
agaggccgcgtcctgggcagagggaagaaggagaaagggccaacccctgaagaagcaatacagaaactgaaggagacagagaagatactgatcaagaaac

SEQ ID NO: 740240 - DNA, 83 bp, Homo sapiens
gttgtcgtggccggagcggcccgcgcctgggctgccggcacttcgcggcaggtatcacctcttctgggctcaagatggacaac

SEQ ID NO: 740241 - DNA, 99 bp, Homo sapiens
gtggcgatgtggtggcccaggaggcggcaggacggccaagaccagcgcgagggccctgggcaaggcccgacaggggagagaatgtagaagatgccttcc

SEQ ID NO: 740242 - DNA, 100 bp, Homo sapiens
ggccataggcaatacatggcctattcagctgtaccagtccgccattttgctaccaagaaagccaaagagagttgaaagataaccttggcagtgatgaccc

SEQ ID NO: 740243 - DNA, 82 bp, Homo sapiens
tccagcccagcgattctcagtcagagctttcattgttgaggttcctcagtgctgaactaacaagagggtacttccttgaaca

SEQ ID NO: 740244 - DNA, 80 bp, Homo sapiens
tccaaaaagactcctgactgctgaggtagtatcttccccagcagatgttgctgaaaaagctgacagaattattacaatgc

SEQ ID NO: 740245 - DNA, 74 bp, Homo sapiens
gattcaggattcagatgaaccagacttaattcagtgcacaaatgagatgaatgtgaacatcccacagttggcag

SEQ ID NO: 740246 - DNA, 100 bp, Homo sapiens
atctgagctcagacctgccaatttaccagagataattgataacaccctgtaacagctgaaggctgataaaataccagtaatgcgtggacagtggtttatt

SEQ ID NO: 740247 - DNA, 100 bp, Homo sapiens
gaccaatagctcagatcctttccttaacagacttaattcagtgcacaaatgagatgaatgtgaacatcccacagttggcagacagtttatttgaaagaac

SEQ ID NO: 740248 - DNA, 75 bp, Homo sapiens
gctcaaaacctcgctccggaaaggggacacctggaggccccgtgtgggccgcggcccggccctcaccatggagtc

SEQ ID NO: 740249 - DNA, 87 bp, Homo sapiens
ctgcagaggtgccgacatggggcttaagatgtcctgcctgaaagaatttgccatctgccttagtaagtcatgtactaaatcctcaac

SEQ ID NO: 740250 - DNA, 75 bp, Homo sapiens
ggagagagaacagcaagcagctatccagcttgagagagcaaagattgtgccaaggacttgaatggatgatgtcac

SEQ ID NO: 740251 - DNA, 90 bp, Homo sapiens
aaaaacattgtttgaggattcctttcaacaggacagccttttgaccctcatttcaagatcaacaatgcagtttccaatatcatttgctcc

SEQ ID NO: 740252 - DNA, 100 bp, Homo sapiens
taggaagaggcactgctgagggggcgcgaggggaacggaggccagagctgcggtgaaataaacagcgttgttgctcacacaaagcctgtttggtagtctc

SEQ ID NO: 740253 - DNA, 73 bp, Homo sapiens
ccagaagaggaggttgcccagaagaaaaaggtattcccagacaggcaactatgaactagctgtggccctctcc

SEQ ID NO: 740254 - DNA, 100 bp, Homo sapiens
gctggccaagaagatcatcattaaggacggaggcacgggccaattcctgtccccccagcagcatggcatcgtgtgctgaaccctctgagccctctgcccc

SEQ ID NO: 740255 - DNA, 100 bp, Homo sapiens
cggcgctggacccgacgcggcgagagaggccaaacgtaccaagaaagtcgggatcgtcggtaaatacgggacccgctatggggcctccctccggaaaatg

SEQ ID NO: 740256 - DNA, 76 bp, Homo sapiens
ccgacattgaatatctggaagatgttaagttttcagataactattatcgtgcagaaatgattgatgccctggccaa

SEQ ID NO: 740257 - DNA, 100 bp, Homo sapiens
agaccaaggcctggaccgagttccacaagaaggactgcggggacctggtggccatcgcttcgttccagagcccagcatgaatggatacgcggaatttccg

SEQ ID NO: 740258 - DNA, 50 bp, Homo sapiens
ctgggaggcacggagggtggcgaggcagggaaaggcgtaggaggaggagc

SEQ ID NO: 740259 - DNA, 80 bp, Homo sapiens
cttccttgcagcctcttctccgggtgctgagcgccgtcctcaaggatctctaccacctgctgaagcacgtagtgtgtctg

SEQ ID NO: 740260 - DNA, 50 bp, Homo sapiens
aaaaaatgcagtcccctcatgccaagatatcaaagctcagctctttgaaa

SEQ ID NO: 740261 - DNA, 75 bp, Homo sapiens
tcaaacagaaataaggtagactcaatgggaataagacgagttggaagaagacctgatcaacaacttcagggtgaa

SEQ ID NO: 740262 - DNA, 101 bp, Homo sapiens
gctcaacccaaccggctccagggcactgactgtgccctgtccacggtgcctcctgcatgtcctgctgccctgagctgtcccgagctaggtgacagcgtacc

SEQ ID NO: 740263 - DNA, 75 bp, Homo sapiens
gtcacttgaaccttgggaatattgaggcaacgccctgctgcggcggctggtccgcattggggtgctggatgaggg

SEQ ID NO: 740264 - DNA, 50 bp, Homo sapiens
ctcagcctccggagtagctgggaatacagattctgtgctgaacgcctccg

SEQ ID NO: 740265 - DNA, 100 bp, Homo sapiens
ataaagttgatctgtaatgttcaggccatggaagaaatgatgatggaaatgaagtataataccaagaaagccccacttgaaaacatagctctgctggcag

SEQ ID NO: 740266 - DNA, 99 bp, Homo sapiens
gatggttcctgtgactccagcttcagtagcggcatcagtgtcttcactgcagccagaaaccagcctggacaccaagtctgtgtcagaaggccacctcaa

SEQ ID NO: 740267 - DNA, 100 bp, Homo sapiens
tccggtgtgtccaattttgctcaacttattgtgagagatgctattccaagttcagatcaaattcgagtagcaccatctttaaaaagccaaagaggctcag

SEQ ID NO: 740268 - DNA, 74 bp, Homo sapiens
gatccggttccttggtgtcatccagccttagcaaaccagagatggacttcagcagaaatctttatgatattggg

SEQ ID NO: 740269 - DNA, 50 bp, Homo sapiens
aacaccactgaagcattgccaaggtcaaaatgcagatcttcgtgaaaacc

SEQ ID NO: 740270 - DNA, 90 bp, Homo sapiens
cggcggagtgtaggaagaggcactgctgagggggcgcgaggggaacggaggccagagctgcggctggaagtacagctcaggcttcgttac

SEQ ID NO: 740271 - DNA, 75 bp, Homo sapiens
aaaggagagcacaaccatcgcagttggaagcccatggggcagagaatgctctcatcactcagtcaaggctaatgc

SEQ ID NO: 740272 - DNA, 100 bp, Homo sapiens
agcttgtgaatctggtgtagaagatgatcaaatggcccaggaggatacagaccacaattactatatatctcgaatatatggtccatctgattctgccagc

SEQ ID NO: 740273 - DNA, 89 bp, Homo sapiens
ggtacttgctccactgtgccaggctcaatgggcggccagtgtgtgaggacagcttcagccaggagtatccgtaccattctgatgttttg

SEQ ID NO: 740274 - DNA, 98 bp, Homo sapiens
gcggaggcggaactgcggagttgctgggtccaccgacccttaccctcagcgagagaagtaacctctgaacaacccagtcctgccagctccagctccag

SEQ ID NO: 740275 - DNA, 75 bp, Homo sapiens
cgctgggagccgcaccacctaacgctggccgacaacagcctggcgtccgccacgaacaccttccaccatgaccac

SEQ ID NO: 740276 - DNA, 98 bp, Homo sapiens
ggattataaggatgtcatccccatggctgatgcagcaggcatcatccgctatgcaattgggcatctatattggaaagcgactgagcacaccctctgcc

SEQ ID NO: 740277 - DNA, 100 bp, Homo sapiens
gtctgttcagacttcagcttggtaaaataatgttgagtttccatgaagaacaggaagtactgccagaaactttccttgctaatttcccttctctgataaa

SEQ ID NO: 740278 - DNA, 75 bp, Homo sapiens
atgagatggtagccaaacccccagacttaattcagtgcacaaatgagatgaatgtgaacatcccacagttggcag

SEQ ID NO: 740279 - DNA, 100 bp, Homo sapiens
tgggactacaggaacacaccactacacctaggtgtgatccctcacatccacaaatctctgattggaaagaagggacagcagaaaactgcttagagggatg

SEQ ID NO: 740280 - DNA, 100 bp, Homo sapiens
cctgattgacctgagcgaagggttttcagagacgagctttaatgacatcaaaggagaacccatccccccacggaccttgactgaagctggcacaatggca

SEQ ID NO: 740281 - DNA, 100 bp, Homo sapiens
aaaatgctggcgtcagcatcggaagatcattttattgacattgctgaagtggagacagcttccttcaaaatgtctactgttcacgaaatcctgtgcaagc

SEQ ID NO: 740282 - DNA, 75 bp, Homo sapiens
gtctggagtgcgtgggggaccggctgttggcgggtgagccgttctccaaccctttggcccccgatggccacgatg

SEQ ID NO: 740283 - DNA, 90 bp, Homo sapiens
gtcttagtcaagatcctgaaagtcccaaaccgaagtttgtaagagaagttctagaaaaatgtatgagcttggattccttagcaccaccac

SEQ ID NO: 740284 - DNA, 100 bp, Homo sapiens
aggaggaagaagaagaagaagaaaaagtttctcaaccagagatctgccgacaccccaggccatcgagccccaggccatcgtgcagcaggtcccagccccc

SEQ ID NO: 740285 - DNA, 82 bp, Homo sapiens
tccggccggtcagggcaagagccagggggatatgagactttctactcggaatatcctgagtgttgcgtggatgtaaaaccca

SEQ ID NO: 740286 - DNA, 75 bp, Homo sapiens
agctccagtatgaccattgtaagacctgcctagagctggaacgttacctccagagcgagccctgctatgtttcag

SEQ ID NO: 740287 - DNA, 80 bp, Homo sapiens
gaataggtgtatcaagtaatggtgcaaagcctgaagttccaagttccccatcaagtggacagccccagaagctgccctct

SEQ ID NO: 740288 - DNA, 100 bp, Homo sapiens
tttggacgccggcggagacgcgggcgagaaaaagcttgtggtgaaggggggcaaaaaaaagaagcaagttctgaagttcactcttgattgcacccaccct

SEQ ID NO: 740289 - DNA, 100 bp, Homo sapiens
caaaatggcgaccggcaactactttggattcacccacagcggggcggcggcggcggcggctgcggcccaatatagtggtgatcatgtgtgcgagcagtga

SEQ ID NO: 740290 - DNA, 100 bp, Homo sapiens
cacacaccggcccggggaggttgagaactgttacagaatgtctgaaggggacagtgtgggagaatccgtccatgggaaaccttcggtggtgtacagattt

SEQ ID NO: 740291 - DNA, 110 bp, Homo sapiens
aagtctctttccagaggccaggctttatgggagcatgggttaccagcgacgcacccttcttactgttctgatccaaaccttgtgttagatttgaagaacctcattgtgct

SEQ ID NO: 740292 - DNA, 100 bp, Homo sapiens
gcgagctttccgagtgccaggcgccggccggctgcgaagacgcggtgggccgcccctccgaatggacagcaaattatggatgaacctatgggagaggagg

SEQ ID NO: 740293 - DNA, 90 bp, Homo sapiens
aaagaccaagcatctcagagaagaggaggaagaaggcgagaagcacagggcatcgagcgcctcaaacgaaagaaccagcccagggagcac

SEQ ID NO: 740294 - DNA, 75 bp, Homo sapiens
ctgggattcaaatgaaagtgaaaatgttagaagaactcgtgagccggattgatgtacaaatggtgatgatcatca

SEQ ID NO: 740295 - DNA, 74 bp, Homo sapiens
aagcatgtgcgactgcaggagagcggagctccctgggtcctcagcagtgaggctggcctccctgcgtgacctgc

SEQ ID NO: 740296 - DNA, 80 bp, Homo sapiens
caagtttgcagatcgggagcgcaaggtcgccctcaaggccatgatcaaaacgcttctcacggcattcagcagcagcgttg

SEQ ID NO: 740297 - DNA, 89 bp, Homo sapiens
gggaacatggacatgaagaggaggatccacctggagctgaggaaccggaccccggcagctgaagaagatgaagtaccggacgatgagac

SEQ ID NO: 740298 - DNA, 101 bp, Homo sapiens
acaacatcgaggaagccctcctgctcctcctcatcagcgaatccatgagctgatgcagacagaggtgcaccacgtgcggacgctcaagatcatgctgaagg

SEQ ID NO: 740299 - DNA, 71 bp, Homo sapiens
atcaaagaagcccatctcccgccgggcgccatggcagccgtgggagcagcggctgcggcagcgcaacactg

SEQ ID NO: 740300 - DNA, 74 bp, Homo sapiens
agctgtttctcatctttatactcttccagcactctcgagtggaccctgaggagctcttcaccaagctcgaccgc

SEQ ID NO: 740301 - DNA, 75 bp, Homo sapiens
ccatgagcgagcgcctccgtcccaggatgagacctgcacgcagtggctcacagcagcacgatttgtgacagcccg

SEQ ID NO: 740302 - DNA, 83 bp, Homo sapiens
caaggggaaatggaaggggcctccagggtctgcagacaaggcagggtgagtgatttcacgtggagccatgatggaactcaagc

SEQ ID NO: 740303 - DNA, 82 bp, Homo sapiens
ctgtgcagccgcgaggaggcgcgggaggtgttcgagaacgaccccgagacgcctacagacctggtacctggatttttgcccg

SEQ ID NO: 740304 - DNA, 75 bp, Homo sapiens
gatggtgatggagattttgatgtggatgatgccaaagttttattaggctttcaaggaatacacaagcgatgatat

SEQ ID NO: 740305 - DNA, 74 bp, Homo sapiens
tggaatactgttctggaggagatctccgaaagctcagccatctctctgattctaagaacgtcttcaatcctgag

SEQ ID NO: 740306 - DNA, 132 bp, Homo sapiens
gagaaagccagcctaatccaaagactgtggaacttttaagtggagtggtggatcagaccaaagatggtgctgggcctaaaggagataacatttatgaatggagatcaactatacttggtccaccgggttctg

SEQ ID NO: 740307 - DNA, 98 bp, Homo sapiens
attttgctactcgctgctcggcatggaacggtcagaacattgacatcaccaatttcagcagcagctggagcgatggcctggccttctgtgctctgctc

SEQ ID NO: 740308 - DNA, 82 bp, Homo sapiens
acttcatcatcatctacttcacaggaattgccatttgtgacttaagagattaaaattaatttggttgctgttggttctgaac

SEQ ID NO: 740309 - DNA, 100 bp, Homo sapiens
tgtgtcctggaaactgggctgggtagagatcaacagcagttcaaggagttggtaatgcttctcttagaatataatgctgatactactattgttaatggga

SEQ ID NO: 740310 - DNA, 75 bp, Homo sapiens
cgcagtggtcgcttcttctccttgttggaatttggagctggagacctacaggggcctttgttcggtctcaagctg

SEQ ID NO: 740311 - DNA, 142 bp, Homo sapiens
ttgcatgttggctagactagaaatcaaacaacttggaaatcgatcacaaccaggcattaagttcacacagagctccctggatcctcaacagtaaggctgacctccctgtgtgacctgcccacccaactcctggagctgtacc

SEQ ID NO: 740312 - DNA, 100 bp, Homo sapiens
tgaacgcacaggccgtcgctatgagcgggaccaccctgggcacagcaggcatcggaggtgcatctgcagacgcagcaggaggtgaagctgcgcatgacgg

SEQ ID NO: 740313 - DNA, 100 bp, Homo sapiens
catgattgtccatgatgatgtagaaagtgagccggccatgaccccatccaaggagggcactctaatcgtccgccaggtttggtaccatgtatgtagcagc

SEQ ID NO: 740314 - DNA, 87 bp, Homo sapiens
ggatttatgtcttgaagacaaaagacgcattgcaaacttaattaaagaactggccaggtggtatcacggaaaacttgacagaacgat

SEQ ID NO: 740315 - DNA, 50 bp, Homo sapiens
gcgtttcacctaccttcccgccaacgctgtttgcagacaaggtcccaaag

SEQ ID NO: 740316 - DNA, 50 bp, Homo sapiens
cgggacgaggaggacagcatggtggaagcagggaaaggcctggagatgag

SEQ ID NO: 740317 - DNA, 75 bp, Homo sapiens
gagcaatggacatcttttcagcaggtgctggagaatctggtaaaagcaccattgtgaagcagatgaggatcctgc

SEQ ID NO: 740318 - DNA, 75 bp, Homo sapiens
ccgctcctaaggcaggaagatggtggccgcaaagaagacggccccttcacagatgtagtcactacaaatcttaaa

SEQ ID NO: 740319 - DNA, 75 bp, Homo sapiens
agtacttcgacgaacactacgagtaccgaaaaggcgacggcggattgacagaagtatgattggagagcccacaaa

SEQ ID NO: 740320 - DNA, 96 bp, Homo sapiens
ccaatctctcctgcaagtatcccaggctcgggttatgtatgattttgctgctgaacctggaaataatgaactgacggttaatgaaggagaaatcat

SEQ ID NO: 740321 - DNA, 75 bp, Homo sapiens
ataaccgactgacctggatagtagttgttcttcaggtctaacttcaaacttgtggctgttaattcaaaactctat

SEQ ID NO: 740322 - DNA, 75 bp, Homo sapiens
aagtgggactggatgctacaaactgtttgaggataactgacttaaaatctgggtgtgactgcacagaaaagttac

SEQ ID NO: 740323 - DNA, 76 bp, Homo sapiens
aaactctgtgagcgagtcacaaaggttggtggtgtggacccaaagcagttggctgtttacgaagagtttgcacgca

SEQ ID NO: 740324 - DNA, 101 bp, Homo sapiens
caccttctgccatgattctaagtttcctgacgcctcccagccgtgcttcctgttaagcctgtgaaactgatttacttacaagacataaattgctcagtgca

SEQ ID NO: 740325 - DNA, 100 bp, Homo sapiens
aaatgccccaagtgcgacaagaccgtgtacttcggggacggcaaaacagaacagaaaggcggagataaaaagaggggtgttaaaagaccacgagaagatc

SEQ ID NO: 740326 - DNA, 75 bp, Homo sapiens
tgcctgcagagctgtggcttaccaggaactgtggctgcaccatctgtcttcatcttcccgccatctgatgagcag

SEQ ID NO: 740327 - DNA, 75 bp, Homo sapiens
tgttgacctcatgaacagcaaagaatccaagtttaccttcaagatgaatccagacagagtttcactcttgttgcc

SEQ ID NO: 740328 - DNA, 75 bp, Homo sapiens
gttccttggccatcccaaagctattctgggggcaacagagagcaccacagacctgccaaaggctttccacgtttg

SEQ ID NO: 740329 - DNA, 82 bp, Homo sapiens
gatgcccgagtgctacttctactccaagttcgtgtactaatggtcacttgatgtgcgctggctgttttatccacctactagc

SEQ ID NO: 740330 - DNA, 74 bp, Homo sapiens
cttccaagcagctgggattacaggtatcacatcggtatcctcgaattcaaagtatcaaagtacaatttaccggt

SEQ ID NO: 740331 - DNA, 119 bp, Homo sapiens
tcctgaacgaagtggccaagaaggagaagcagctgcggaaaatgctagaagacaatgcagatcttcgtgaagactctgactggtaagaccatcaccctcgaggttgagcccagtgacac

SEQ ID NO: 740332 - DNA, 75 bp, Homo sapiens
aatatgccaaaaatggagaaatttttggtgccgtgagcgatgtggagatgcaggaacactatgatgagttttttg

SEQ ID NO: 740333 - DNA, 90 bp, Homo sapiens
ctccacagccccgcgcacaggcctccggagagcctcgcaaggtagtcctgcacaaaggctccactggcctgggcttcaacattgtcggtg

SEQ ID NO: 740334 - DNA, 83 bp, Homo sapiens
gggagatggagcatttgagacaggctaccaacctggctcctgcagaccccaatggcaaagcagacccttacgtggtggtgagc

SEQ ID NO: 740335 - DNA, 100 bp, Homo sapiens
aagagaagcaagagatgcttcaaactgaaggcagccagtgggaagtaccttctgtctatagtggtgttatcctgggaattaaagacaatttaacaagaga

SEQ ID NO: 740336 - DNA, 75 bp, Homo sapiens
gatgccgaggaaacagtgaccctgagcgaagccaagccgggcggcagtaacagatcaactcctagcaatcatgat

SEQ ID NO: 740337 - DNA, 75 bp, Homo sapiens
tggtccgctttgccaagaagatggacaagatggtgcagaagaagaacgcggaggaagacaatggtcctataatgc

SEQ ID NO: 740338 - DNA, 100 bp, Homo sapiens
gtcatcatctattgttggaaaaaatcttctgtggattaactcagtggctcaacaggctgaagggagctcttatggaaggcatggcagaagatgagacagg

SEQ ID NO: 740339 - DNA, 74 bp, Homo sapiens
tctctttgcggaggatggcgtctaatgagcgcagttgattcgaggaacgtaccctgactttggtagacacaggc

SEQ ID NO: 740340 - DNA, 75 bp, Homo sapiens
ccccttggattcagacgccgattcgcccaggtgttgaaaagtctcctctagagctttggaaggctgaatgcacta

SEQ ID NO: 740341 - DNA, 100 bp, Homo sapiens
aacatggactgtctctgtatagtgacaaccaagaggcggggtttcaccatgttgcccagactggtcttgaactcctgagcttaagcaatccacctgcctc

SEQ ID NO: 740342 - DNA, 90 bp, Homo sapiens
attcaatgtgaaatccctgaacttgcgatcaagctcattacagctgtgggcataaggcagagcggcttgggtaaatccaccttaatcaac

SEQ ID NO: 740343 - DNA, 88 bp, Homo sapiens
agtcgggaggaggagagcttcacctgtcggcttggagagatccagattttgaagacattttggctacaatatattttttgatgcacaa

SEQ ID NO: 740344 - DNA, 50 bp, Homo sapiens
gtggagctcacgtttattcaacaaatccagactccaaaatgatgcaaatc

SEQ ID NO: 740345 - DNA, 83 bp, Homo sapiens
tggtctgtgcacatggatttaactttataaggggatatcattctctgctggaactgggtgagaagcgtaaaggcatgttggag

SEQ ID NO: 740346 - DNA, 74 bp, Homo sapiens
gcccagcgccaggatcgccccttcttcctgtactatgcctctcactctgtagatggacggcagatccgagtaga

SEQ ID NO: 740347 - DNA, 73 bp, Homo sapiens
gagatctgagctacagaagtgcagccttcaaagaaaaacctcggtatccaccaagtcaggctcaagcagctct

SEQ ID NO: 740348 - DNA, 75 bp, Homo sapiens
cacgaactgagctgatccttgccccagacaatgcagatcttcgtgaagactctgactggtaagaccatcaccctc

SEQ ID NO: 740349 - DNA, 101 bp, Homo sapiens
gagacttggatgaggtgaaagactatgtggccaagaggctgccattcgctgcaaggttgaacacccccatgggccctggacgaactgtcgtcgttaaagga

SEQ ID NO: 740350 - DNA, 100 bp, Homo sapiens
ccagagcagaggaatctatacaaagaagtgatgctggagaattacaggaatcttctctcattggatcgatgggctagaggagaagctgtcccagtgtcgg

SEQ ID NO: 740351 - DNA, 98 bp, Homo sapiens
ttgtattctgcaataaaacccagagtaaactcttagataaaatgacgacgtccttctggaagaggcgaaactgatgtgaagttcatttccaatccgcc

SEQ ID NO: 740352 - DNA, 75 bp, Homo sapiens
atgatgtgcctgaatctataatgctggagatgaaagagtcttttattcaaaacttcagcgttctctatagtccct

SEQ ID NO: 740353 - DNA, 75 bp, Homo sapiens
ctcgtggtgggtggaaaagtgttcgccgagcctcttggggcctgcggtgcatgcagtgtaagaccaacggggatt

SEQ ID NO: 740354 - DNA, 90 bp, Homo sapiens
ctttagagaagtatggtctggaaaaagaaaaccctaaggattactgcatcgcccgggtgtattttgattacatgagaagctggatccaaa

SEQ ID NO: 740355 - DNA, 80 bp, Homo sapiens
atttttggatgatgatggatccatttctcctattgaggagtcaacgcagcacacttctgcttttgttccttcatcaggac

SEQ ID NO: 740356 - DNA, 82 bp, Homo sapiens
cctgaggagccggagagggtgctggctgccgcgcggccgagctttggcagcatgtaagcagctgtttgccaagaacccaggt

SEQ ID NO: 740357 - DNA, 113 bp, Homo sapiens
tgcaggtcctgcatccaatggatgctgcccagagatcgcagcatatcaaagagccaggtgagaatttcaaggattatcgacttcatattgcacattaaagttacaaattaaag

SEQ ID NO: 740358 - DNA, 100 bp, Homo sapiens
agcaactggtctattatatcatttaaaccacatggctatctaaagaggatgttggcaaaggatgaactgatgaccatacttgagaaatgtttcaaggttt

SEQ ID NO: 740359 - DNA, 98 bp, Homo sapiens
ctgtttctggcaaacatgaagtcaggcctctggtatttctttctcttctgcttgcgcattaaagttttaacaggagaactatgccatttttgggtcag

SEQ ID NO: 740360 - DNA, 100 bp, Homo sapiens
ctttgctacagacaacgtttggatgcagggaatctaagggaggaaattatcaactgtgcacaaggaaaaaaatagatatgtgaaaggttcacgtaaattt

SEQ ID NO: 740361 - DNA, 96 bp, Homo sapiens
gtcctcgccggcgagttcagcgagatggtaacctgcacctcaatgtgacggcggaggccttcagcccctcgctcctggctgccctggagccccacg

SEQ ID NO: 740362 - DNA, 96 bp, Homo sapiens
cagaagtcctcgctggagtttcataagtctattatcctcccagtccacaacgctgaaccgtggctggacgaatgtttgaggtctgttttgcaacag

SEQ ID NO: 740363 - DNA, 75 bp, Homo sapiens
gagaagcccaactaaagccccacatttgcagctcattgaaggaaagagtccttcgatatctcctaatacgagttt

SEQ ID NO: 740364 - DNA, 90 bp, Homo sapiens
ctgctccctctcagcacctgggcggacgatgttcctcctgctgatcaagagaagctttttatccagaagttacgtcagtgttgcgtcctc

SEQ ID NO: 740365 - DNA, 97 bp, Homo sapiens
tcctcctagtgttccggaagctggtggaaaatgcagttagaacctgtcacctctcagagtcgacttcaatgttcctatgaagaacaaccagataaca

SEQ ID NO: 740366 - DNA, 74 bp, Homo sapiens
cacagacagaatccctgctaccacacgcactcctggctttaaagtttatacttgcatttgccatacctgataag

SEQ ID NO: 740367 - DNA, 90 bp, Homo sapiens
gaggaatttgtggctggctggatctctggtgagacatttttcttccttctgtcacatcacacccaatgtggaatgcagtagccctctggg

SEQ ID NO: 740368 - DNA, 100 bp, Homo sapiens
ccaacgccaccgagagggcgcctggaattgaatctgaatggtgcctaccctaagctggtgcctttcagacctgcaggacggctgatctctccacctctgc

SEQ ID NO: 740369 - DNA, 101 bp, Homo sapiens
gacgtcgtgatccagaagtccagagctgaggactgcctgtttgcagcaaattcttcttcatgctagagaaaactcaacaaaagttgtatttctcatcactg

SEQ ID NO: 740370 - DNA, 83 bp, Homo sapiens
ccacagcgtgcccccgctggcaaggccccggagctgccatcagtcatgctcttaaacggggactgcccagagagcctgaagaa

SEQ ID NO: 740371 - DNA, 80 bp, Homo sapiens
cctgtccagccagcatggaaccaaagcggatcagagagggctaccttgtgaagaaggttcggctcctggctgatcccact

SEQ ID NO: 740372 - DNA, 85 bp, Homo sapiens
ttaacagcgcgttcccgttggcgtctgagagcatggtaaataccaagcccgagaagacggaggaggactcagaggaggtgaggga

SEQ ID NO: 740373 - DNA, 99 bp, Homo sapiens
agcctcccgagtggctgggattacagattgtgaatcggcacggtcctgaggcagacaggcatttattacgctgcctattttcgcatgtggatttcagtg

SEQ ID NO: 740374 - DNA, 101 bp, Homo sapiens
cacctgagccaggtgaagggccccgtaaattggaaggatgcacaagttccaaggttacgtttcagtacatggtgcagtggccgggagcacgcatccttcgg

SEQ ID NO: 740375 - DNA, 100 bp, Homo sapiens
ccacagaatacagccaacctccaggtttcagtggcagttctcaggtatggtgtggtggactttctttgagtactgggatgcaggttccaagtgctgtgag

SEQ ID NO: 740376 - DNA, 75 bp, Homo sapiens
gtcttcacatactggattttgccaatcttcagcttggcatggtggaatggattgaacctcctaaacgagaacgca

SEQ ID NO: 740377 - DNA, 100 bp, Homo sapiens
attggaactgtgtttgggagcctcatcattggttatgccagaatccaaaggccctattgtgcctttaaatgtagctgaccaaaagcttcttgaagctagt

SEQ ID NO: 740378 - DNA, 100 bp, Homo sapiens
catctgtcaaaactttggatggccctactttcagacatatctgaagagatggattaagaatgctttggattaaggattgtggagcacatttcaatcattt

SEQ ID NO: 740379 - DNA, 90 bp, Homo sapiens
ccgagtcaagccgccgcctcgacccagggcccgcgggccaggagagcgctcggcggacctcctgccccccgaggtctgcagtctcctgaa

SEQ ID NO: 740380 - DNA, 100 bp, Homo sapiens
ttttgctgcgcagtacagcaacagtggatgttcaagattaagattagagtcaagttgtgtgattaagacagtatacgccatccgagaagctgccaccaac

SEQ ID NO: 740381 - DNA, 82 bp, Homo sapiens
cgaagtgctatccgtgcgagaacagctattccacgagaggatccgcgagtgtattagaggtacaggcagttgaaggaaagaa

SEQ ID NO: 740382 - DNA, 83 bp, Homo sapiens
ggccgtggtgcgggctctgcagcgagcgctcgatggaacctcatcccaggagccttcacgtaaatgggtccagtcatgcctcc

SEQ ID NO: 740383 - DNA, 82 bp, Homo sapiens
agttcgagagaagaaaattttagaagttcatattgacaaaggttggcaaaagcagcttttgatgatgcaattgcagaactgg

SEQ ID NO: 740384 - DNA, 88 bp, Homo sapiens
cgtgaataagacttacaacagcaacctcttcttctggttcttcccagctcagggcgttacctactgcagagaaagttcagcaagcagt

SEQ ID NO: 740385 - DNA, 88 bp, Homo sapiens
tgatccaggcgggggccaggggcccctcgcctcccctctgaggaccgaagatgagcttcctctttttgtgaagtgtggatatgcaggc

SEQ ID NO: 740386 - DNA, 82 bp, Homo sapiens
attccaagtaactcttatttgactatctgttatagtccctgggtcaagacaacaatttttataccttcgtcgtggttcagaa

SEQ ID NO: 740387 - DNA, 82 bp, Homo sapiens
cttcgccaaggctggcgcagtcgttgtaatttagattcgagaagtggtttatcctttgactggaaaagaaaagtagctgcag

SEQ ID NO: 740388 - DNA, 76 bp, Homo sapiens
cccaattcttacatcaagaggaaagattagactctaaaatatttacaccagcagctccagttcataccaataaaga

SEQ ID NO: 740389 - DNA, 75 bp, Homo sapiens
cgccgcgtgggagccacgcacatcgtgacagggacccagacatggagctgcgggaagaagcctggtctccggggc

SEQ ID NO: 740390 - DNA, 82 bp, Homo sapiens
taataaagtgccctattacatcaatcactcagcctctgaagaagcttcgggttcagactcaggcagtcagtcggaaagtgag

SEQ ID NO: 740391 - DNA, 100 bp, Homo sapiens
gcggtcgcctgggtccgcgccgagtataaggatgcatttatgaaagcaaatcctggctacaaatggtgtcctaccacaaacaagcctgtgaaatccccaa

SEQ ID NO: 740392 - DNA, 83 bp, Homo sapiens
agaagcctgtataaagatgtcatgatggagaattatggaaacctggtctcactgggtagcctttccagtaaatatatgactca

SEQ ID NO: 740393 - DNA, 82 bp, Homo sapiens
cagtcatgagcagggcttctctgtggaagtgttatgaagcggagattgaggagatagatgaagaaaatggcaccgctgcaat

SEQ ID NO: 740394 - DNA, 80 bp, Homo sapiens
aaaggagattgacagtcacaattttgtaataaggttggtcaaagaaaaagtgatgtatgaaaaagaggcaaaacaacaag

SEQ ID NO: 740395 - DNA, 88 bp, Homo sapiens
gatgcacacggcactcgagtgtgagatgccctgctctctgacctggagactaccacctcgcacatgccaaggtcaggggctcccaaag

SEQ ID NO: 740396 - DNA, 100 bp, Homo sapiens
ggaccaggaggaggttttcaggaccaaaattgtggaaaagtcactctggagctcatgggacacatgtagctagtatagctgctggacactttccagaaga

SEQ ID NO: 740397 - DNA, 100 bp, Homo sapiens
ccgagatgtgatgttggagaactacaggaacatggtcttgctggcaactctctgcaaggtcctaagggttctaagttgaataaggcccactccctccctt

SEQ ID NO: 740398 - DNA, 100 bp, Homo sapiens
acttggctcactgcagcctcaacttcttgtcctcaagtgatcctcccaccttagcctcctaagtagctgggaccacaggagattgcatcctacctgatca

SEQ ID NO: 740399 - DNA, 100 bp, Homo sapiens
cgcgggtcgctggcgggggtcgtgagggagtgcgccgggagcggagatatggaccgtgtgtatgtacaacaaaataatgtggagaacgtctacaatttgg

SEQ ID NO: 740400 - DNA, 82 bp, Homo sapiens
ctactggattatgggcctttcagagatgtgcctgcctatagtcaggatgcagactcatctgagcgtatcattgctcccatgc

SEQ ID NO: 740401 - DNA, 100 bp, Homo sapiens
gcgcctaaagtctgagagagggaagtcgcctctgtgctcgtgagtgcatggggtataaggtcttatatccagatggccaggctcagatgattcaccccaa

SEQ ID NO: 740402 - DNA, 88 bp, Homo sapiens
tcttgataaaaagagatgtggggggattctcgacctgctaacagaactggaccttttcggaaaaccgtcttcagatacagtccctaag

SEQ ID NO: 740403 - DNA, 98 bp, Homo sapiens
ccattgttgtgacctattatgttgacttctttaaaacccttaaagaaaacttccacactagcagatatctttagaggacattcaagcttttgaaaaga

SEQ ID NO: 740404 - DNA, 101 bp, Homo sapiens
aaagaagacagccatcatttgaaaggggtttgccaacttgttaataagatggaggagaatactggcaaggttaagcctttcaaccgaaatgacgaacagtt

SEQ ID NO: 740405 - DNA, 83 bp, Homo sapiens
cttcggcagtccacccaccgccgccgcctcccaggtatgttctggatgatcagtacacaagttcttctggtgctaagtttcct

SEQ ID NO: 740406 - DNA, 51 bp, Homo sapiens
tttattgtcccatgttttcttcaaacagccgagaccgacccgcccgcccgc

SEQ ID NO: 740407 - DNA, 87 bp, Homo sapiens
gaaggaactatcccatctggtcaaaatagtactggaaacgtacagggggcagtacccaaaggaaacgctacgaaagaatacatggag

SEQ ID NO: 740408 - DNA, 75 bp, Homo sapiens
acagtgaaaatgattggagtattaacattgtcctattttgtaacggattatgatccaaccattgaagattcttac

SEQ ID NO: 740409 - DNA, 100 bp, Homo sapiens
tcattgaagctatgcagtatttctttggcatcactgcagctagtaatttgccttctggattacccttctcaggtgcagccagagagacactagcccactg

SEQ ID NO: 740410 - DNA, 75 bp, Homo sapiens
acgatcccaaccgccgagggctcatcaatgtaaccggaagactcctggtgggccttcgatggtggaaccagatag

SEQ ID NO: 740411 - DNA, 51 bp, Homo sapiens
gaacgatgttgctctagatacaggccaggtgtggtgtcttacacctgtaat

SEQ ID NO: 740412 - DNA, 100 bp, Homo sapiens
agatgccgcctcacatctacgccatcgcagacacggcctaccggagcatgcttcaagagatgtggtatggtgtattcctgtgggcactggtgtcttctct

SEQ ID NO: 740413 - DNA, 100 bp, Homo sapiens
tcacccagcacacaaaatggatctcttacggaaaaagctcctcaatttctgaagagaaaggtgactctgatgatgagaaaccaaggaaaggagaaagacg

SEQ ID NO: 740414 - DNA, 100 bp, Homo sapiens
ggaaaaataagcttgaagaaactttccctgcctatttacaagttggaaaagagactgttcaaaccactgaggatcagattttgaagagagatatgccacc

SEQ ID NO: 740415 - DNA, 101 bp, Homo sapiens
caagacccgcgccgccgggacccccaggacgacgtgtacctggacatcaccgattttaacagcttctctgtggatgatgagtgcttagtgaagttacttaa

SEQ ID NO: 740416 - DNA, 50 bp, Homo sapiens
agaagcccccatactcccggtgaaaaagcagccagacccggtccgtttgg

SEQ ID NO: 740417 - DNA, 100 bp, Homo sapiens
tactacaaccagagcgaggccggttcgagactataagaggcttacccccatttctgtgctggaccatgcactagaatctttagataaccttcggcctggg

SEQ ID NO: 740418 - DNA, 100 bp, Homo sapiens
aaagaaaagaaaacttgaaactaatcctgatattaagccatcaaatgtggaacctatggaaaaggattaacctccatttcagctaatcatgggagagatt

SEQ ID NO: 740419 - DNA, 98 bp, Homo sapiens
ggccctggaggagcagctgctcaagtactcgccggacccggtggtcgtccgcggctccggtcacgtcaccgtcagacctactccaatgaagtccattg

SEQ ID NO: 740420 - DNA, 76 bp, Homo sapiens
gctccagctgctggtgaagatgcatgaataggttgaagaacaagcaagcactacagaaagagtatttcaagacaga

SEQ ID NO: 740421 - DNA, 100 bp, Homo sapiens
gccatgattggaggcttattcatctataatcacaagggggaggtgctcatctcccgagtctaccgagatgacatcgggttggagatgaagatcatcaagg

SEQ ID NO: 740422 - DNA, 96 bp, Homo sapiens
tgacctggccccagtgctgcgtccttatcagccgagccgctagagatgatcgctatggaaaatcctgcagacttgaagaagcagttgtatgtggaa

SEQ ID NO: 740423 - DNA, 50 bp, Homo sapiens
tgcattacatcaaagacacactgagccggttgctgaaccaatccccatct

SEQ ID NO: 740424 - DNA, 100 bp, Homo sapiens
agtgaagattgctgtaaaaaatttcaggattggtactacaagtctgagggaaaaggccataccaatgctggagatgcaatatatgaggtggtgagtctac

SEQ ID NO: 740425 - DNA, 100 bp, Homo sapiens
acccgccctgcgccccgctctgctgtgggcgctgctggcgctctggctgtgctgcgcgacccccgcgcatgataaacctctcataatgaaggcccccgct

SEQ ID NO: 740426 - DNA, 100 bp, Homo sapiens
aagagggggcggatttacctaaaggctgaggttgctgatgaaaagctccatgtcacagtaggtgatttcaaatcggagaagtccaacggggagctaagtg

SEQ ID NO: 740427 - DNA, 89 bp, Homo sapiens
gtctctgggacatttagccaaaggagccagcctggacgatctcattgacagctgcattcaatcttttgaggaggaaggaagagacttga

SEQ ID NO: 740428 - DNA, 98 bp, Homo sapiens
ataatggcagcaaaggctgtagcaaatacaatgagaacatcacttggaccaaatggttttgaaaacattgaattgactcctcttgctgcaatatgtgt

SEQ ID NO: 740429 - DNA, 101 bp, Homo sapiens
cttcagcatcgtcacggacactcctgagctacagagactgaagaggactcaggagcaaatcagtaatgtggatgaaaatactaggaaaagtttatttaagt

SEQ ID NO: 740430 - DNA, 96 bp, Homo sapiens
aagcttgcagccctgtgccttgacaagagcctcatccacaccgtgttgctgcaaaaggactatcagaccctgcacttgatggaccagctggcacca

SEQ ID NO: 740431 - DNA, 90 bp, Homo sapiens
cctccccagccatgtggaaccacaggagttttttcacatgcaaagagaattgttgaaggagaggacacgctgccgagccctggaggagga

SEQ ID NO: 740432 - DNA, 82 bp, Homo sapiens
gaagacagtgtgccagataccattgatgaaggaaatgctaaagcgattccaaggtgtacaaagataatcaatgctgattcgg

SEQ ID NO: 740433 - DNA, 100 bp, Homo sapiens
acaagccaatcccaggaggaaaaacgaaggtgggtgcggctgctatttggacgagagttccccctgcaggaccttctggtggtctgggatgccttgtttg

SEQ ID NO: 740434 - DNA, 75 bp, Homo sapiens
gaagaggatggaaagtcaggctgcagtgacttgagtaaccaaggagcagtgaacagcagctactacagtagtgga

SEQ ID NO: 740435 - DNA, 95 bp, Homo sapiens
agttcctctccagctcagccgcgtaggagcagtgaggagaatgaataccttccaagaccagagtggcagctccagtaatagagaaccccttttga

SEQ ID NO: 740436 - DNA, 99 bp, Homo sapiens
gttctcaaaactctctgaaaaatggctccctccgagttaagaagctcattcacacagaagacccatttaatgatgaacatcaggagaggcaagaggtgg

SEQ ID NO: 740437 - DNA, 96 bp, Homo sapiens
cctgcatatctgaagcggctcccagtccctgaaagcattaccgggttcgctaggctcacagggaaaacaaagtgcatgatgaagtcttcagactgt

SEQ ID NO: 740438 - DNA, 98 bp, Homo sapiens
ttgcctatgtgccatttggagctgcttacctgttgattcggtggtaattacagaatctgatgcacagagaacaatgtaccctggaagttgtgtgaaaa

SEQ ID NO: 740439 - DNA, 88 bp, Homo sapiens
tttggggggaaactaggtcgatggtcggcggcgcccggatgggcagctgaggttctgtcagatagtgagaaacggaaacagtacgata

SEQ ID NO: 740440 - DNA, 97 bp, Homo sapiens
aatgagacaattgaagctcaagcagagcttacagtgcaagtgctcatcttcaaactctatcagcgggcaaagcatgtgtacagcgaggctgcgcgag

SEQ ID NO: 740441 - DNA, 98 bp, Homo sapiens
gccaagatccaggataaggaagctcatgcggatgatttattcccatttttcttgagacatgccaaacaaatatttcctgtgttggactgtaaggatga

SEQ ID NO: 740442 - DNA, 50 bp, Homo sapiens
ctgccgtgtggacccgtaaaataaaatggagggagaaccgaagattacag

SEQ ID NO: 740443 - DNA, 75 bp, Homo sapiens
ggaaactgaggcatctaatatgaaggttcctgcacttggccatcatccatgaagaaaaggcactgaccatggaag

SEQ ID NO: 740444 - DNA, 51 bp, Homo sapiens
cttggatgaattgcttgctttggagaggtggggctggtgtccgagcacttc

SEQ ID NO: 740445 - DNA, 90 bp, Homo sapiens
cggctgctccccggtggcccaggcctcggactccgcggccggcccggcgcggcccagcgccctcaggttcatctgcagaagccagcggac

SEQ ID NO: 740446 - DNA, 90 bp, Homo sapiens
gtcgtgagggaggcgtcgacggcgtgcggttcgttccaccagtcataaaccagatgaaatctatggcatgattgaaagactatctcctgg

SEQ ID NO: 740447 - DNA, 100 bp, Homo sapiens
gtaaggccaaaaatgtgcatactcacagagttagagagagggatggtgattctggacaatcaggaagtccaagccacaatgatcctgccaagaatcctcc

SEQ ID NO: 740448 - DNA, 91 bp, Homo sapiens
gcgcgcagggcctgcagcgggagctggacggcgagcgcgagcggcgcgagaaacccagggccttgctgccgccatgactgaggaatcagag

SEQ ID NO: 740449 - DNA, 75 bp, Homo sapiens
ttatggataccaaggaagagaagaaggaacggaaacaaagttattttgctcggtcaacaaaaatctctcatttac

SEQ ID NO: 740450 - DNA, 100 bp, Homo sapiens
aaaacggaatctaatcaggaggttgctaacccagaacactatattaaacatcccctacagaacaggtggaagaactcagtaaaatactccaacgtgggag

SEQ ID NO: 740451 - DNA, 49 bp, Homo sapiens
gccggcaccaccgctgcaagagccgggagaattactggctccagtagcc

SEQ ID NO: 740452 - DNA, 74 bp, Homo sapiens
gaatttggaaacacatgtgggacatacaagcgttggatatagagctgctctgttaaaagcgaaaatgaaacaat

SEQ ID NO: 740453 - DNA, 100 bp, Homo sapiens
cctctgggtcctcggtcggtacagtctctgcacctcgcgccccagcagcattttgaaagcgaagcagaagccgtagaatcagcggcgagcctgttgaaag

SEQ ID NO: 740454 - DNA, 49 bp, Homo sapiens
gtagtggacaaagatttccttgataaaaggaagaatcctgctcaaaaat

SEQ ID NO: 740455 - DNA, 100 bp, Homo sapiens
cagcctcctgattagctgggattacaggaacgagtctttgggaacgtggtccacccagggatgtaaaactgtgcttaccgatgcatcccatacgaaatgc

SEQ ID NO: 740456 - DNA, 82 bp, Homo sapiens
gctgatagacatgggggcctcaaacgtggagatcaactcctctctgttaatggagtggtattttgaccaacgtgatttagct

SEQ ID NO: 740457 - DNA, 100 bp, Homo sapiens
cagatctcagaggagcctggctaagcaaaaccctgcagaacggctgcctaatttacagcaaccatgagaacagctttgctgagccatcaaggtctaatgg

SEQ ID NO: 740458 - DNA, 102 bp, Homo sapiens
tgattatgaagctcagagacactggcaagaaataacttttaatttaccggtcaaacaatgtttcctgttttccagcacccaacataacttgtaaggattcca

SEQ ID NO: 740459 - DNA, 50 bp, Homo sapiens
ttaaaggcaagatcgacaccatgaagcttttctgggagaagaggctacaa

SEQ ID NO: 740460 - DNA, 75 bp, Homo sapiens
acttgggatcccccagttccaaagtgtcttaaagcatttgatgaatacagaaatatcagccaaaaggacattgtg

SEQ ID NO: 740461 - DNA, 109 bp, Homo sapiens
gagcgcggggcgacgctggctgcagggacccggtgacagcgtgagaggttcgcagagtgctggagaatctggtaaaagcaccattgtgaagcagatgaggatcctgcat

SEQ ID NO: 740462 - DNA, 100 bp, Homo sapiens
ggccttttgggcagcttttccggcctgacaacttcatctttgggaaacactactatgaagtatcctgtcatgaccaagggttatgcagggtcgggtggtc

SEQ ID NO: 740463 - DNA, 75 bp, Homo sapiens
cggctcaaggcgtcaacatgaacagacttcctgtggagaacatgcagctgaccctgaacctgcagacggagaaca

SEQ ID NO: 740464 - DNA, 74 bp, Homo sapiens
tcctggacacgggggtcgacccgggggctccgggcatgcaggttgcccgaagctcagcagagagtcggaggctg

SEQ ID NO: 740465 - DNA, 74 bp, Homo sapiens
ccgggagaagctggcctgggccaaggctgctttgctggctctgcaagaaaatggactagacgcaactacagtga

SEQ ID NO: 740466 - DNA, 75 bp, Homo sapiens
tcaaagaaaaacttgatggtggaatagaaccatatcgacttccagagatcctgaataagacagttgctgcccaga

SEQ ID NO: 740467 - DNA, 51 bp, Homo sapiens
ggagacttcaaagatgtattgcgcagacggggaagcggagccaacatgcca

SEQ ID NO: 740468 - DNA, 82 bp, Homo sapiens
ttcgagcagatcgacaagtccgggagctgggcggccatttaccaggccttcctggatgctctgcagaaccaggctgaggcca

SEQ ID NO: 740469 - DNA, 74 bp, Homo sapiens
acccagcactgatgatattataaactccaaagacaacaggccctccctctgccctcccgtctgtgagctccctg

SEQ ID NO: 740470 - DNA, 100 bp, Homo sapiens
gagactctgtccccggactgggagtttgaccgcgttgacgacggctcgcagaggtgaagttgaacaaattgctatgatgaaaccaaaaggccagactgaa

SEQ ID NO: 740471 - DNA, 75 bp, Homo sapiens
acttgttcttttccaggacactgacgaccgaaacaagatgtcagtgagagaagatgactgaggaggaggtggaga

SEQ ID NO: 740472 - DNA, 100 bp, Homo sapiens
ttgttaaggattccaagtaactcttatttggacaagaccctgtaccaccctgtcagtggcagctgcatggactgcagtgaaagtgaccataggatcttca

SEQ ID NO: 740473 - DNA, 100 bp, Homo sapiens
tcgttccctcggctgtggaccgggcggcacgcacgcggtgcagggtaacatggcggatgcggaagggagttacccagggagattatacacctatggaaga

SEQ ID NO: 740474 - DNA, 136 bp, Homo sapiens
gttgctttcattgtgggagagatgaagaacctgagtcaggacgtaaatggaaccctggaaagaccacagcaagattctttcattcgtctcctcctagcctgggggaccaggctcgaactgaccctggacatcaaag

SEQ ID NO: 740475 - DNA, 98 bp, Homo sapiens
gaaagccttgtaaccatcaggtagatacagcaccaacgttttgtgcaccgagggcggcctgagcctctggatcttcacttgggcatgttcctgcccac

SEQ ID NO: 740476 - DNA, 100 bp, Homo sapiens
gtgaatttgtgacagctgcagttgctccccgcccccgagcagccgagtttccaacatggctagatccatcagaaactgaagccgtggagaacgctctcgg

SEQ ID NO: 740477 - DNA, 101 bp, Homo sapiens
cctggccaggggggcacctctggctcaggagctgtgttcagagtcaaggaggctgccggcgtggaccgcgggaaggcggggctggggctcggcgggaggcc

SEQ ID NO: 740478 - DNA, 75 bp, Homo sapiens
gcggaggcttcgagtgacccgggtgccgaggagcgggaagagttgctggggagcaggggagagaagacagaagag

SEQ ID NO: 740479 - DNA, 51 bp, Homo sapiens
gcggtgtcctcttaagaaaatgcgatgtgcattttgtaagcactttggagc

SEQ ID NO: 740480 - DNA, 83 bp, Homo sapiens
ctcggtttgcctactgaagagcttatcagagctctacttgggaaagaatgggtaccacagaccatgtcatcgtcctggcgtcc

SEQ ID NO: 740481 - DNA, 83 bp, Homo sapiens
cacaaaagctgataccagagctatacagctgctattaggcagataacgaaggaggcccaacttcattcaataaggagcctgac

SEQ ID NO: 740482 - DNA, 100 bp, Homo sapiens
tggacttggtgtgcattaacctgccgccgcccctcaccagacagatcgctgtcaaaaccctaggtcactctgtgagactgctgggtcagaaaaaggataa

SEQ ID NO: 740483 - DNA, 98 bp, Homo sapiens
caggagtcggcggctcagttgtccatgaccctgaaggtccaggagtacccgaccctcaagctggagatggagctgaagatgctgaagtctcagtccag

SEQ ID NO: 740484 - DNA, 50 bp, Homo sapiens
aagaattcccaagccaaagctttccagatatggaatgtgcagatgtccca

SEQ ID NO: 740485 - DNA, 80 bp, Homo sapiens
atttaaagcactgaaacaaatgattaagattaacttcaagttgttctgtggctcctgatggatctgagaagatggacgtg

SEQ ID NO: 740486 - DNA, 83 bp, Homo sapiens
tgcgcagggtcagccaccagggctacagcactgaggctggtgtggacactgccagcggctgcagccgacttggaatgacctgg

SEQ ID NO: 740487 - DNA, 90 bp, Homo sapiens
gattaacttcaaggttggggaggagtttgaggagcagactgtggatgggaggccctgtaaggatgttcgtgacctgctggcagggccaag

SEQ ID NO: 740488 - DNA, 99 bp, Homo sapiens
tgccgggattgtacctgcaggcagaaagtcttcctacgaccgtcttttcccttagaggcaccaggtgcttcaagaagatctagaacaagaacaagtcag

SEQ ID NO: 740489 - DNA, 100 bp, Homo sapiens
ttcagatttcgggttctcctgccacttggaacctggcgagaagcttcgagagctcccgccactcgaagctggagaaggcggacatcctggagatgaccgt

SEQ ID NO: 740490 - DNA, 74 bp, Homo sapiens
caccgtctggtgtctaaaccgcctcgggttcccacgtaacatcacatcagacccaagggcccgttcattgcaag

SEQ ID NO: 740491 - DNA, 105 bp, Homo sapiens
ttctgtcctaaatagctgacattgcatcttcaagactgtgtgtcatggagaaactccagctgggcccagagattctgcagcgggaaaatccaaggcttatttatg

SEQ ID NO: 740492 - DNA, 89 bp, Homo sapiens
tggaatgtgaagagtgcagagacagtagccatccagccaggttgcagagaacacatcttagaagatgaaaaacctgaatctatcagtga

SEQ ID NO: 740493 - DNA, 100 bp, Homo sapiens
ccacttttgattgcaaagtgctatcaaggaaccacgctctcgtctggtttgatcacaagacgggcaagattctacaagggggttgctcctctctggatga

SEQ ID NO: 740494 - DNA, 100 bp, Homo sapiens
aaagatggagaagagcggcaaaaaaataaaaaaaaagccaaaaagataaaagcccggatgaacttcaggtgaacaacctttggacaaaacaggacatgtt

SEQ ID NO: 740495 - DNA, 104 bp, Homo sapiens
ccgtgaaccttagggacaacaccgggacacccgcgaggccggaaaatgacaatgcagatcttcgtgaagactctgactggtaagaccatcaccctcgaggttga

SEQ ID NO: 740496 - DNA, 80 bp, Homo sapiens
accatcaacaaagaagaccacacactgggaaacatcattaaatccggacaaggcaaaatctcagcaagttcggacctcta

SEQ ID NO: 740497 - DNA, 75 bp, Homo sapiens
ctcagatccgctacctcacccagggcagccgatgaagtgcaaccttcacatgaatgggaatgttatcacctcaga

SEQ ID NO: 740498 - DNA, 118 bp, Homo sapiens
gtcggttcctgctattccggcgcctccactccgtcccccgcgggtctgctctgtgtgccatggacgggttcgtgctggccgtgggcagcgccgtctttgatgccatgttcaacggggg

SEQ ID NO: 740499 - DNA, 83 bp, Homo sapiens
ctaacttcagcggtggcaccgggatcggttgccttgagcctgacaatgcagatcttcgtgaagactctgactggtaagaccat

SEQ ID NO: 740500 - DNA, 87 bp, Homo sapiens
ccttctaattcaggcaatttgcaaaagagttcgcagtatgtgcagtgcgtggccgggtgtttgcagctgatgctccgggtcaatgag

SEQ ID NO: 740501 - DNA, 104 bp, Homo sapiens
aagagccgagcacgcgggtctgtcatcatgtcgcgttacgggcggtacggaggagccttatgccagcctggaccatcttggaggcagtgtaggatcatggaaga

SEQ ID NO: 740502 - DNA, 82 bp, Homo sapiens
cagaaaacagaaatcgaaacagatacagagatgtaagcccatttttcggctttgtgagaaaccttaccatcaaacacgatgg

SEQ ID NO: 740503 - DNA, 83 bp, Homo sapiens
ggataagggcgacagcaacagctctgccggctggaaggtgagcgtcctgaccaccctggagcgtaggttcaacctgcagagcg

SEQ ID NO: 740504 - DNA, 100 bp, Homo sapiens
gggcaggcctagtttgactctgacagtcctcccactaagatttacactgactgggccaaccactacctagcaaaatcaggccacaagcggctgatcaagg

SEQ ID NO: 740505 - DNA, 100 bp, Homo sapiens
gatgaagggtttattccagcctgcttactggttcaaaccttgtactactcagctgatcacaagctgcttgatgggaacctactagatggacaggctgagg

SEQ ID NO: 740506 - DNA, 75 bp, Homo sapiens
gcagagagctgtgaaatatctttggcttgcagccaacaatgggctatcagttgagggatttgcagttgataaaat

SEQ ID NO: 740507 - DNA, 90 bp, Homo sapiens
cggccatcgggccaacgagtgggtcggccacacacccggagcaccgtcatcacagcggtcaagttccttatctcggaccagccccatccc

SEQ ID NO: 740508 - DNA, 83 bp, Homo sapiens
ttttcgagaaattgcatttttagaacctagagaaatcacactgcctgaggccaaagataaggcatacaagaattaaattctga

SEQ ID NO: 740509 - DNA, 90 bp, Homo sapiens
gcgggggggaagtgactgggcggtgccggcgccggagacgatgccgttgtgtgtgtggctgctgtggtgccctacgccccaggtacaaaa

SEQ ID NO: 740510 - DNA, 83 bp, Homo sapiens
cagctgattgtaatgaatttgcccaatgttttgatgattggcagagacccactgtctgacaaaaggatgccacggagaaagaa

SEQ ID NO: 740511 - DNA, 75 bp, Homo sapiens
acagcggagaggagagcggtgcggaggactgaggtgagaagccctaccactgcaactgggacggctgcggctgga

SEQ ID NO: 740512 - DNA, 100 bp, Homo sapiens
ccgctgcatcccgcgtccagcacctacgtcccgctgccgtcgccgccgccaccatgcccaagagaaagatatgtgcagcgggggctacagcgagtggggc

SEQ ID NO: 740513 - DNA, 75 bp, Homo sapiens
cttaatatctaccagtgcaacagcatcttcaaagccaccaccaaagatccctgacaagcagttagatgaaaggga

SEQ ID NO: 740514 - DNA, 100 bp, Homo sapiens
tgaggcctggaatttgattaactcattcaaggttacccagttgcatttgatgaatacagaaatatcagccaaaaggacattgtggacagcataaaaggag

SEQ ID NO: 740515 - DNA, 99 bp, Homo sapiens
gggcggagggggcggcggcagcgacggcagcggcggcggctggactaaacaggtcacctgcaggttgggggccgtcccgctcctaaggcaggaagatgg

SEQ ID NO: 740516 - DNA, 83 bp, Homo sapiens
tgcagtttgtgaagaaaaaattaggcttgggcactgtttaaaggaaagttccgagaaggcatcgacaagccggaccctcccac

SEQ ID NO: 740517 - DNA, 100 bp, Homo sapiens
gcgcgtacgagatctccgaccagtctgggggcgctggcggcctgcgcagccacctcaaggtcagatgggcagacctggaagagaagaaggatgcagatag

SEQ ID NO: 740518 - DNA, 113 bp, Homo sapiens
cacctctccagctcgccctctgagcctcccgagccctctctccatttcccacaattgtgctggcaattaagttggaatatgcaaggttggttaagttggcccaagaagacacc

SEQ ID NO: 740519 - DNA, 87 bp, Homo sapiens
gtgaccgagagcgtgaccgagagcgcgaatatcgtcatcgttagaagcaaacagcggcacaacaagctgtggcgtcagcagacagac

SEQ ID NO: 740520 - DNA, 78 bp, Homo sapiens
agaaatgaggtgtgttggccgcagcttctatatccatggactcagtattatcaagacagcaactctggaaagtggctt

SEQ ID NO: 740521 - DNA, 83 bp, Homo sapiens
cgactacctgcgcggcgcgctcggccgcctcaaggtcgcccaagtgcacaacagctccagctggcagcatcacttcccgccaa

SEQ ID NO: 740522 - DNA, 90 bp, Homo sapiens
cgccgcggcattcggggaatctgcagggcagggtctcagcttcttggaagtgaaagaccagctgctgctcatgtaccttatggatttgac

SEQ ID NO: 740523 - DNA, 100 bp, Homo sapiens
gaggaaccggtggcatcgtctcccgagcctgctcctgccgccgaggttgtgtgtcgcagccctgtcggtgaataacttctgtgacaaccgcgaagccctg

SEQ ID NO: 740524 - DNA, 75 bp, Homo sapiens
gcctgaccctggctgccattatgaccaactaattgaaattaacctcagtgaggtcgtgtacaacgtgggactctg

SEQ ID NO: 740525 - DNA, 100 bp, Homo sapiens
ctccccaaaataaccattctccagatccaggtatcagtcagagccggatctctcattggctgttgcagcagggatcagacctgagtgaacagaagaaaag

SEQ ID NO: 740526 - DNA, 99 bp, Homo sapiens
ccaaaacgcagccaccgccgtcaccaatctctacaaagcgggagatacagatgacccaccaagaattactcagaaccctgtgatcaatgggaatgtggc

SEQ ID NO: 740527 - DNA, 100 bp, Homo sapiens
gtcagtccctgctctgtgcgcgcctccatctgggccatggatggtttcaccagtgatcattaaagaatgggcagcttacaaaggaaagtctcctcaaacc

SEQ ID NO: 740528 - DNA, 100 bp, Homo sapiens
agaagcagctgcggcggccacaccctggatgaggtggagccatcgaagcccccacccacaggctgacagaggcaccgttcaccagagggctcaacaccgg

SEQ ID NO: 740529 - DNA, 51 bp, Homo sapiens
aaggaacaggaggaaaccattcagagatggacaagaggaaagacccttctt

SEQ ID NO: 740530 - DNA, 101 bp, Homo sapiens
caagaatacaatccttatgaagtattaaatttggatcctgtggactgggtggttatggatcaggagacagtgaagatgagaggagtgacagaggatctgag

SEQ ID NO: 740531 - DNA, 50 bp, Homo sapiens
tttgctggatattgatgcgccagtcactgcggcaacctttggcactgcat

SEQ ID NO: 740532 - DNA, 50 bp, Homo sapiens
ccttgcttccttccactcgacggacaaggagttgtgaaactggacgttca

SEQ ID NO: 740533 - DNA, 75 bp, Homo sapiens
ccgggccgtgaacgaaagcagtgacggaggagcttgtaccaccgaacacaagcagacattcccaaacattctaaa

SEQ ID NO: 740534 - DNA, 49 bp, Homo sapiens
gctgtcacaggggagtttacgataacatttgacaacaaggcccatagtg

SEQ ID NO: 740535 - DNA, 97 bp, Homo sapiens
agtgaattcatctagagaactctttcatttattcagatggtggccagcagagatctgcaaccccaggtctgtgccactgaacatccagggccttaaa

SEQ ID NO: 740536 - DNA, 75 bp, Homo sapiens
tggaagtgactggccacgcccacgtgctcttggctgcctttgaaaaggctcccctgcaaactttgctgtgtacac

SEQ ID NO: 740537 - DNA, 100 bp, Homo sapiens
attggaaaagtgaatggtgtgcatcacattaagcggacaaggcaaaatctcagcaagttcggacctctagtacaataaggcgaacctcctctttggatac

SEQ ID NO: 740538 - DNA, 95 bp, Homo sapiens
gccatgctgtctctagactttttggacgatgtgcggcggatgaacaagcggcaggtactccaaagattcaggtttactcacgtcatccagcagag

SEQ ID NO: 740539 - DNA, 88 bp, Homo sapiens
gggctgcaggagaagatggcggtctccacaggtggcgacatgtctaagaatgtgagccagtcacagatggcaaaattgaaccaacaaa

SEQ ID NO: 740540 - DNA, 75 bp, Homo sapiens
tggacaacaccatggaaatatttgacattgaggactaatttattattgtgcaactgccagtcctgcgcattccag

SEQ ID NO: 740541 - DNA, 75 bp, Homo sapiens
gtcctacagagacagttatgacagttacggcacgccagccccacgggcctgctcctgacggtgctggtggccctc

SEQ ID NO: 740542 - DNA, 75 bp, Homo sapiens
gcgcagccgcggctctgtgttttgagagtgcaaaatcgagagctccagatcatgagaaagctagatcactgtaac

SEQ ID NO: 740543 - DNA, 138 bp, Homo sapiens
agaagaggattggaggtgtcagtgttaaaggaacctctacaacgaaggtgaagccacggaagataaggctactatgtgggcatgtgccttgcggcttcagaaaagcggctccacgccctcagccaggcccctgaggcc

SEQ ID NO: 740544 - DNA, 129 bp, Homo sapiens
atgactgagtacctgaaccggcacctgcacacctggatccaggataacggaggctggaacaactctgctcatggtgattacatgcaaaataacgagagcagcttaatagagcaagctccaatacctcag

SEQ ID NO: 740545 - DNA, 74 bp, Homo sapiens
gaaaccaggccttccaggaatgcccggtgctgacggacccccgaaatgcactcggtgatggaaagagagccact

SEQ ID NO: 740546 - DNA, 100 bp, Homo sapiens
cccgatcccagtatctatgcctatgataactttggcgtgctgggcctggacctctggcaggtaaagaagcttcttaataaagtagtgctccgtgaatctt

SEQ ID NO: 740547 - DNA, 75 bp, Homo sapiens
tctgggtgtgcgggcggcctggcgcggcgctccggttgcatcataaatacaaaggactgaagttataaaagagaa

SEQ ID NO: 740548 - DNA, 96 bp, Homo sapiens
ttcatctagaaatctcaaagccatgtctcaggaataggatgagtgataatccacccagaatggaagtgtgtccttactgtaagaagccatttaaac

SEQ ID NO: 740549 - DNA, 98 bp, Homo sapiens
aaaaaatacacaagatttgaaaaaattggtcaagggggaactgtgtcaatctgacagaagcactgtcgctctatgaagaacagctggggcgcctgtat

SEQ ID NO: 740550 - DNA, 100 bp, Homo sapiens
tggaatgatgtcgtcagtaatgcctggaatgatgatgtctcatatgtctcaggcttccatgcagcctgccttaccggtcatttcattagagaaattgaag

SEQ ID NO: 740551 - DNA, 74 bp, Homo sapiens
tggaaagtttcctgactatacattcaggacctgaggaatcttacatcctttctgcagaacttggagaaaagtgt

SEQ ID NO: 740552 - DNA, 108 bp, Homo sapiens
gctgtgctcgcgctactctctctttctggcctggaggctatccagcgttgtggcagcactgcctgaaggtatgagaccagattctaatctttatggttttccatggga

SEQ ID NO: 740553 - DNA, 96 bp, Homo sapiens
cgagaaggacggtgagaaaggccagtacacacacaagatctaccacctgcagagagttacactgttagaccttatgatagccaagataacgagtga

SEQ ID NO: 740554 - DNA, 101 bp, Homo sapiens
cgacgcgcccggcccggagcccccagcgcagcggccgcggattttttatcaagcagaaatgcatcgaacaacgagaatcaagatcactgagctaaatcccc

SEQ ID NO: 740555 - DNA, 80 bp, Homo sapiens
caagtcaccgtggagctccgccgccccgaaactttcaccgcgagcggacaatgcagatcttcgtgaagactctgactggt

SEQ ID NO: 740556 - DNA, 100 bp, Homo sapiens
tgccatttcgcctttatcgtggtggagtccaccctggctgtggacatgatccacatcgcggacaccaaggtcgccaggcgttatggggatttcttcatcc

SEQ ID NO: 740557 - DNA, 50 bp, Homo sapiens
tgaagactgtgtaaataatatcaggtcaaaatgcagatcttcgtgaaaac

SEQ ID NO: 740558 - DNA, 51 bp, Homo sapiens
cagtcatcagatccaccatctgcttcaacgtctgcaactgtgtctgatggc

SEQ ID NO: 740559 - DNA, 82 bp, Homo sapiens
gtgtggcccgacgactgtgacgaggacgaggaggcagccacggggcccctggcgtgagtgcatctccatccacgttggccag

SEQ ID NO: 740560 - DNA, 124 bp, Homo sapiens
agaacggacctcagaggttgtctgaaggccgaggccaagatggcggtgctgtcaggtttacccaaggtccagcctagcccctaggcaccatgtcggacagtgatctaggtgaggacgaaggcct

SEQ ID NO: 740561 - DNA, 75 bp, Homo sapiens
aacgaattcagtgatatcattaagtccagatctgaaattccgggtagatatgcctggctcaggcagtgcattcat

SEQ ID NO: 740562 - DNA, 75 bp, Homo sapiens
gtggatccatgccttagaagaaacaattcttcgacatactctccagcttcaattcttcgtgccatgaaggaggac

SEQ ID NO: 740563 - DNA, 97 bp, Homo sapiens
ctttaatcctgaaagccatgcagcgggtcaccgacgatgagggcgcacctgctgtcctggagcttccgatctctgttcggggaccctgtgagccttc

SEQ ID NO: 740564 - DNA, 75 bp, Homo sapiens
aaggttgtgagtctctacagccatttgaactgcctatgaattttccaggttatatcttaagtgtggtgctgctaa

SEQ ID NO: 740565 - DNA, 74 bp, Homo sapiens
caaaaagaaagctgctgttatcatcatggctgtagaggttcctgatgctataaaatctcagtaccagtttccac

SEQ ID NO: 740566 - DNA, 95 bp, Homo sapiens
aacgcttgtgcgagtaaatgtagagtcattaacaaggagcatgtactggccgcagcaaagcccatttcaatggaaaatccttataaagaacctct

SEQ ID NO: 740567 - DNA, 73 bp, Homo sapiens
tcaccttggcctggaggagcccaagaagctgcgaccaccccctgccagggccaaacgtaccaagaaagtcggg

SEQ ID NO: 740568 - DNA, 75 bp, Homo sapiens
gagaacgtcccgctggatctgacccgaggttggggcaaacacaatggataatcctttgttgaaatacagtgcaaa

SEQ ID NO: 740569 - DNA, 103 bp, Homo sapiens
aaacaagtgtgtgcatctggctgttagaagaattcatgctcatccgggaacattttagtggacaaaccaaatgaccaatcttcaagatggtcttcagagagca

SEQ ID NO: 740570 - DNA, 75 bp, Homo sapiens
gcccttccagatacagctaccaggagaaagaattgtgccatgaaaaatggaaaactcctgagaagctgttccagc

SEQ ID NO: 740571 - DNA, 75 bp, Homo sapiens
gaagtacatccagcatacgtacaggaaaggcgtcaagaatggaccagtggccatggttgggtcagccgcaatggg

SEQ ID NO: 740572 - DNA, 88 bp, Homo sapiens
agaagtcattccttttttgaaggatgaatgctatcaagtaagacaagtgtttgcccagaaacttcacaaaggcctttcccgtttacgg

SEQ ID NO: 740573 - DNA, 105 bp, Homo sapiens
acccgcagcaggactacgaactcgtccagagggtcggcagcggcacctacggggacgtctataaggtattgggagagttgctgctacatctttaggaaatttgac

SEQ ID NO: 740574 - DNA, 85 bp, Homo sapiens
ttgtgaaccatttcaagtgctcttgcccaccaggcactcggggcaaggattactgcaaagtaatatttccatatgaggcacagaa

SEQ ID NO: 740575 - DNA, 105 bp, Homo sapiens
gacacagaaatctggtgactggaatccagcttaaccccaacaaccatctacagttggctggatctattattggcaaaggtggtcagcggattaaacaaatccgtc

SEQ ID NO: 740576 - DNA, 75 bp, Homo sapiens
ccacgcaggcaaacgagaattaaatgccgagaaggccagtacgatgatcacagtcgtgttaaactgcaaaatgct

SEQ ID NO: 740577 - DNA, 106 bp, Homo sapiens
ttactgcaagagtgcaaaaaaattatagttctaactggagctgggttcttctcaccactaaatccaatacgagttcatattgatattggagctgatggcagagcca

SEQ ID NO: 740578 - DNA, 100 bp, Homo sapiens
attcatgggctcaccgctgaggttcgacgggcgggtggtactggtcaccggcgcgggggcaggtaatgcatgtccatggtacacaaattcacaaggtttg

SEQ ID NO: 740579 - DNA, 98 bp, Homo sapiens
ttttattcaccgcctccgaatttgcaaagaggaggaaggagggacttcttggcttctcccagcatagccccagggtgcaatatgtgacttctgtgaag

SEQ ID NO: 740580 - DNA, 83 bp, Homo sapiens
tttaagcactacttttgcctcatcctacaaattttggcacctacgtgatgaccgtcacggccaacgatgctgacgacagcacc

SEQ ID NO: 740581 - DNA, 129 bp, Homo sapiens
cttaatcctactcagaagaacttgtacagagatgtgatgttggagaactatagcaatctggttttcttgggatgaaggtgaccaagcagcaagtgttgaagagctggaaaaacagattgaaaaactgag

SEQ ID NO: 740582 - DNA, 101 bp, Homo sapiens
gacggggccccctgttgacttacaccctcaggactttttgtcatctgttttgttccagcaattcagtgaggtgttggtgtctgtccagtcccttatattag

SEQ ID NO: 740583 - DNA, 100 bp, Homo sapiens
gactgctcaatggagagaaggaaagtcaatcgtaggaagaacacagtacagagaaggatatgagaatttctttgataagctccaacaacatagcatcccc

SEQ ID NO: 740584 - DNA, 51 bp, Homo sapiens
tgcccgggctgccactgttgggacagggaaactgaaacttcccaggctgtg

SEQ ID NO: 740585 - DNA, 75 bp, Homo sapiens
gtggcgacttgtgcacacatgtagagacctttgtatgctgtaccagtgcaggtcctcactttaatcctctatcca

SEQ ID NO: 740586 - DNA, 100 bp, Homo sapiens
tggaaattgacagaattctctttgaaattacagcaggtcaaggtcagcatctcctcgacgatcaagatctatctctcttcgtagatcaagatcagcttca

SEQ ID NO: 740587 - DNA, 100 bp, Homo sapiens
gtgagagacatgtgtcgtctgcaccagcagcacccgctcaccctcaagtgggtggacagcgaagatgagcagcaccagcagtaagagggctccgaccacg

SEQ ID NO: 740588 - DNA, 75 bp, Homo sapiens
tgatcatcaaacagctatggtgatgattagagacatactaatgtacatgcccacaccagttatcctattgaaaga

SEQ ID NO: 740589 - DNA, 83 bp, Homo sapiens
cgcccggcgccagcgagaacgagctgaagaaggcatgtcgggccccaggcctgtggtgctgagcgggccttcgggagctggga

SEQ ID NO: 740590 - DNA, 98 bp, Homo sapiens
ggcagcggcagagagggaatggtgcaggcaggcgctgagaaggacgcgcagtccatctctctcagatggatggagtggaaccctggcttccccttgag

SEQ ID NO: 740591 - DNA, 83 bp, Homo sapiens
agaaaatcgagcaggagctgacggccgccaagaagcacggcaccaaaaacaagcgcgatctggccagccaggagaaggagcgg

SEQ ID NO: 740592 - DNA, 100 bp, Homo sapiens
gaaggcgagaaccgccgggaagcgacgccccggggcgggggcgatggcggcggcggcggccggagcttctctcagccgctcaaactttggaacaaatacc

SEQ ID NO: 740593 - DNA, 100 bp, Homo sapiens
agaaagacaaagacccagtgaacaaatccgggggcaaggccaaaaagaaggactggacctacagagacatctgggattttctgcgtcagctgtttgtccc

SEQ ID NO: 740594 - DNA, 75 bp, Homo sapiens
ggcggctgagacaaaggcgacgatgatgattattctccaccgtctaagagaccaaaggccaatgagctaccgcag

SEQ ID NO: 740595 - DNA, 100 bp, Homo sapiens
cgctgatgctgtagcttgtgcaaagagggttgtccgtgatccacaaggcattagagcatgcaacacagtcactcctggcggcaaaccaaacaaaaccaga

SEQ ID NO: 740596 - DNA, 80 bp, Homo sapiens
cttttcatgagtgttcctgtggtctctgcacctcctttctctgccactgcagagccccgccatggaagacacgccgttgg

SEQ ID NO: 740597 - DNA, 75 bp, Homo sapiens
gctactgccctctgcgctcctgcatctgcctccccattttgtgaagtgtggatatgcaggctctaactttccaga

SEQ ID NO: 740598 - DNA, 75 bp, Homo sapiens
tatgcagtgaaagagttgctgaactacaaagaaaggtatatttgcttacttaaactaccatgttcctcgaacgag

SEQ ID NO: 740599 - DNA, 75 bp, Homo sapiens
gcctggcggccatcgtggctaaacaggtactgctgggattttatggaagaccttgggttatggaacagagaaaag

SEQ ID NO: 740600 - DNA, 75 bp, Homo sapiens
atcgactcggacacagaggacagcggcagcgacgagaacctggatcagtttcgccgtgaggaagatgcggaaaag

SEQ ID NO: 740601 - DNA, 98 bp, Homo sapiens
catgaacaacaattatgagccccgcagtggcaagttcacctgcaaggtgcatgccgtgataggggtgctgatggatgacacggatcccctggtcacag

SEQ ID NO: 740602 - DNA, 76 bp, Homo sapiens
tttccctttggaggggctgggctcctactgttcttagagatgtacctttctcaggaagaattcagggaacttcgag

SEQ ID NO: 740603 - DNA, 100 bp, Homo sapiens
caactccgccgcccaccatggcttccgaggagctgtacgagtgcaagcagctaatgactcagtctgtagactccaacagagggaacaggaacgaaaaaag

SEQ ID NO: 740604 - DNA, 89 bp, Homo sapiens
ggaatctgttcttcttttgcatcctacgtaaccagaccaagctgtgggtttcctgtgcctggtccccgaggaagccaagacctctgcct

SEQ ID NO: 740605 - DNA, 98 bp, Homo sapiens
cccagccggtgactgcagtgagggaatgacagaggaagaggaagacaaacttctggcactgaaagacttcatgatgaaatctaataaagcaaaggcca

SEQ ID NO: 740606 - DNA, 100 bp, Homo sapiens
tggaacgccaaccggctggacctgttcgagatcagccagccgaccgagagctccaaacgagaatggaagccgctggaggaccgtagctgcacagacatac

SEQ ID NO: 740607 - DNA, 109 bp, Homo sapiens
cgtccttctccactttcgccagcccgtgccgcgagcgcggcctgcaggaggcaacatgagtgagaatgaggaagaggaaatttctcagcaagaaggcagtggggactat

SEQ ID NO: 740608 - DNA, 100 bp, Homo sapiens
tctgccttctactccatcgtgggactcagcagccttggtgctcaggtgccagatgcaaaggcgacagccctgtactgtgtctgaaattttccatttttgt

SEQ ID NO: 740609 - DNA, 100 bp, Homo sapiens
gcctactgggcttctgcaaccgctttccacgggtagtgggcagcagtcagtgacaggtgtaacctctgtggatgacagcaacagttactggaggatacgg

SEQ ID NO: 740610 - DNA, 100 bp, Homo sapiens
accctgcccagcacgaccagctcatgcaggccagaagcctgtcttagatgttcatgcagaactagacagaattacacgaaaaccagttacagtttctccc

SEQ ID NO: 740611 - DNA, 80 bp, Homo sapiens
agaaccttctggactaatgatgatccagatcttcttcagcagtatcgttctgctgtgtgcaaactagacagtgtgaataa

SEQ ID NO: 740612 - DNA, 80 bp, Homo sapiens
aggatgctggaggcacagctggagcggcgagctctgcagggcgaagctgtgctcaggcccgggctggacgcagagccaga

SEQ ID NO: 740613 - DNA, 74 bp, Homo sapiens
gagcaccgacaccgcctgtgtggggcccaccctccgatctttaatctcatgaagtacgacagctacagccgctt

SEQ ID NO: 740614 - DNA, 96 bp, Homo sapiens
cattggccgccgcgatgtcagctcagtgctgtgcgggccaggtgtcatggagaaactccagctgggcccagagattctgcagcgggaaaatccaag

SEQ ID NO: 740615 - DNA, 100 bp, Homo sapiens
cgatggcgctctataacccctaccgccacgacttcccaagtaagaagcggaagaggagccgctggaaccaagacacaatggaacagaagacagtgattcc

SEQ ID NO: 740616 - DNA, 100 bp, Homo sapiens
gagacggaaccatccctcatgaatggggcagagtatcaggcgggcagtactgctgcgcacggccactgccaacggcttccagatggtcaccagcggggta

SEQ ID NO: 740617 - DNA, 98 bp, Homo sapiens
ttgttctgtatccagagggcattcagactaaaatctacaaccttctcattcagacacacggtaaaagtgcagttttaaagtgtctcctggatattcac

SEQ ID NO: 740618 - DNA, 89 bp, Homo sapiens
gggcctgggcctcccggtccgcaagcaggttggatttggtctagggagtcccagaaagaagtagaaaaagagagagaagcctaccgtcg

SEQ ID NO: 740619 - DNA, 75 bp, Homo sapiens
caccaggctcaacaaagctgtctgggccaaaggaataagagccgctcccgaggccccggcgcggcgcgagggcgc

SEQ ID NO: 740620 - DNA, 75 bp, Homo sapiens
gccttccagaagctgacagacttccctccgataatgctcggaatatttttcaatgtccattccgctgtgttgatt

SEQ ID NO: 740621 - DNA, 90 bp, Homo sapiens
tttcctggcacagctgtggagagtgtgacggattccagcaggtatgaaaatgaaagtcttcagaatggaaggaagtcaactgaatttcca

SEQ ID NO: 740622 - DNA, 51 bp, Homo sapiens
caagaatgtgaaatttgttctcaagcacaaatcttaccaatatatttgagt

SEQ ID NO: 740623 - DNA, 100 bp, Homo sapiens
tagagaggaccccggtacatctgaaagccgggaaatggtacctatggagttgtgtataagggtagacacaaaactacaggtcaagtggtagccatgaaaa

SEQ ID NO: 740624 - DNA, 80 bp, Homo sapiens
ccccgccgcccgcctgcgcctccggggccggccctgcaggtttacccaaggtccagcctagcccctaggcaccatgtcgg

SEQ ID NO: 740625 - DNA, 50 bp, Homo sapiens
agcatatgttctagaagacattcttgagggattttgcttatgtagcaaga

SEQ ID NO: 740626 - DNA, 82 bp, Homo sapiens
actggtgacttcacttttgagtgcaactgccttccagggggaacgcctagtttgaaaatattatggctgaaccaagagccag

SEQ ID NO: 740627 - DNA, 101 bp, Homo sapiens
ctgctacaagacaacaccctgatctggcatggacatgaaagaccacagcaagattctttcattcgtctcctcctagcctgggggaccaggctcgaactgac

SEQ ID NO: 740628 - DNA, 98 bp, Homo sapiens
gattggcatcgatctctccatcccttccgaggcccgacttcggaacttagtgatttggcccgtgaccctccagcacaatgttctgcaggtccagttgg

SEQ ID NO: 740629 - DNA, 76 bp, Homo sapiens
ccttcagcttttggcagcatgaaagttagcagtggaatatgtgatcaagtgtgacatgtcagctctgcagaagatt

SEQ ID NO: 740630 - DNA, 83 bp, Homo sapiens
cacacgttccacctcatcatcagtgagttctcccgccctcttggtgagatggagatcttataacaatttttgatagttctgac

SEQ ID NO: 740631 - DNA, 90 bp, Homo sapiens
gaaatttggagtgtgcgtgcgcgccgagcggcacttccgttccggcgcccctccggtcatcaacccgctgggcaccagcttcccggacga

SEQ ID NO: 740632 - DNA, 100 bp, Homo sapiens
cgccggtgatctacaccatggagaacaagcccatcgtcacctgaccgtggcaaggaggtgtacagccctgactttcatagcctcggaggagaaggtcttg

SEQ ID NO: 740633 - DNA, 74 bp, Homo sapiens
gaacactgctctggatgatgcagaagaggagtcctttaggaaggctcagctgtcgcaggccctggaggagctgg

SEQ ID NO: 740634 - DNA, 100 bp, Homo sapiens
taaagaggcgatttcctattacagcaagaataactgtgtagaatacattgaggatgatgaggagcacgtggacattgagactgtagaagagctctcagag

SEQ ID NO: 740635 - DNA, 51 bp, Homo sapiens
aacaccgtcacgctgctggaggagggcacacgtgtttcacgttgacaggtt

SEQ ID NO: 740636 - DNA, 110 bp, Homo sapiens
ggtctatgtctactgaaggcaataaacgaggaatgatccagcttattgttgcaaggagaataagcaagtgcaatgagtccaagccttatgcatttgatcgggtgttccag

SEQ ID NO: 740637 - DNA, 100 bp, Homo sapiens
ccgctgcactcacagggaggaggaggcggcagcggcggaggaaggcggcgcaccccgagagcctgtttctggaccagtacagagccagccttgttgatgc

SEQ ID NO: 740638 - DNA, 75 bp, Homo sapiens
gttgcttttggaatgaatttggaatcttcccttgaagagaggcctcgtggacagagagattcaagctattattgg

SEQ ID NO: 740639 - DNA, 90 bp, Homo sapiens
tttctcaggcagcggcagcgcccccggcaggcgcggtggcggtggcgcgcagccaggcagcacacttctgcttttgttccttcatcagga

SEQ ID NO: 740640 - DNA, 101 bp, Homo sapiens
aatacacacacctgttgccattatagagctggaattaggcaaatatggacagggaacagagttcagaggcagcagaaactggagttagtgaaaatgaagag

SEQ ID NO: 740641 - DNA, 71 bp, Homo sapiens
taatgatattgtgcttgccatccttgaattactaaacatgacgacagagatgatggtgtggattattgggc

SEQ ID NO: 740642 - DNA, 100 bp, Homo sapiens
ttaagagcttggaggcggcccgcgggtgaaaggtgtagcagtcactcggcctacacccacagcatcgaccttgtgaacccagcgacctgactgccttggg

SEQ ID NO: 740643 - DNA, 83 bp, Homo sapiens
ctggagcttaaaaagctgcacgcaagtgttaaacttctgcggaatcggacatgtccaaaccaccgtgttacgaagaggcggtg

SEQ ID NO: 740644 - DNA, 83 bp, Homo sapiens
gagcgcccggattggggatgagtatgcggaggacagctctgatgaggagggtttgccttcccggattgggcctacaagccaga

SEQ ID NO: 740645 - DNA, 95 bp, Homo sapiens
acgatggggaagacaccctgttctcggaacccaagtttgcacagaaggtagaagatagcaccatgccgattcgtcgaactgtgaattctacccgg

SEQ ID NO: 740646 - DNA, 50 bp, Homo sapiens
gcgacgcccttgtcctcgccaaaatgaaatgagccgtcagactgctacag

SEQ ID NO: 740647 - DNA, 90 bp, Homo sapiens
aaaggaagaaagaaaagaagaggaggaattaaattttaatgaagatattctgtgtccacatgccatggactttccccagcacagccagca

SEQ ID NO: 740648 - DNA, 83 bp, Homo sapiens
aaaagcgcactaaatcgtctccaaggagtgaaacctcggtccggctgggctattgatccctttggacactcaccaacaatggc

SEQ ID NO: 740649 - DNA, 89 bp, Homo sapiens
gcgatctctgtggtaggcccagcggatctgaaaagaacaattgctgtccttctggatgacattttgcaacgattggtgaagctggagaa

SEQ ID NO: 740650 - DNA, 95 bp, Homo sapiens
ccacctaaaatccccaaaattgagaccactcatccaccgttgcctccagcccacccacctccagaggacgtcggtgatgaaggagaagaagaaaa

SEQ ID NO: 740651 - DNA, 90 bp, Homo sapiens
ggattccaagtaactcttatttgctatgaaacccacgtagtcgaacaccgtgatgcttctcctgcagggcgtgtgatgaggaggcgagct

SEQ ID NO: 740652 - DNA, 82 bp, Homo sapiens
agacttcgaggaagccaggaagaaggcactgaagcttggggccaaaaagaatggagatttacagacagtcatctgggtggag

SEQ ID NO: 740653 - DNA, 97 bp, Homo sapiens
ggcttgttcgacccaacagcatcgttcctctttccaagaagacctgtggatgaagagccagagtcctctgaggtcgatgctgctggtcggtggcctg

SEQ ID NO: 740654 - DNA, 74 bp, Homo sapiens
aaaatatccgccatggagaaatcttgattagaagcccaggacccaggaaggagacacaggaaatttattcaaag

SEQ ID NO: 740655 - DNA, 100 bp, Homo sapiens
gaaagaccgagtgctaaagaagcaggatgcattctacaaagaacagctggctagactggaggagagggtttattgggcacttcctagcaccaggcactgc

SEQ ID NO: 740656 - DNA, 83 bp, Homo sapiens
ctgcttcatccttgtttaatgactttggtgccctcaacatctctcagagacgaaagtctcttgcatggcaccaagaatgttac

SEQ ID NO: 740657 - DNA, 51 bp, Homo sapiens
agatgaagaaactccattagcagtgcagggcccgtgactactctgcgccag

SEQ ID NO: 740658 - DNA, 82 bp, Homo sapiens
gcgcccgggaggaaggaacgaggcaaggagctaaagcagcgtgcgttcagccctgggctgagctgactgctgcccactttgg

SEQ ID NO: 740659 - DNA, 75 bp, Homo sapiens
cagaaagcagtcagcagactctacagaattcccagtttcttttaacaagcatttatgacattaacagagaacagg

SEQ ID NO: 740660 - DNA, 82 bp, Homo sapiens
agcggagcctggcgggcgtgggaacccaggccccgccgaggcggccagcaagagtgagccatggagctacgtgtggggaaca

SEQ ID NO: 740661 - DNA, 100 bp, Homo sapiens
gagggccagcagcaggcagcccggagacagaactttacaagacctaagttccaagaagcagcagtcccacaacattctggatctgcttcgaacctggaat

SEQ ID NO: 740662 - DNA, 90 bp, Homo sapiens
ctgacggccaatgaaacccccaagatgggcatctattacattccagcttataccagtcagttcatctctctggtgatgtttggtttgatg

SEQ ID NO: 740663 - DNA, 100 bp, Homo sapiens
gaagacgcgccacgacgtgggactgcccggggtgtctcgcgcacgggccctcaggaagatgtccagctcgccgctgtccaagaaacgtcgcgtgtccggg

SEQ ID NO: 740664 - DNA, 50 bp, Homo sapiens
tcagaggatgacagttgcaaccattcaacaaagacagttatggacttcgt

SEQ ID NO: 740665 - DNA, 100 bp, Homo sapiens
ggagatcaagaaggcctatcggaagctggcgctcaagtaccacccggacaagaacccggatgagggcgagaagtgctggaatgaatccattcatctttaa

SEQ ID NO: 740666 - DNA, 115 bp, Homo sapiens
gctgcagccgagatgccgggggagcggggccttccacaccccctccgtgggtgtgtggacgtggcccagtggaacatcgggagcctccggaccatcctggacatggtggagcgcg

SEQ ID NO: 740667 - DNA, 88 bp, Homo sapiens
agagtgagcgagcggacccgcgatgggatgccaaagaagagtgaatggcccacaaagagcctggtagcacatacgcttttcaaaaggt

SEQ ID NO: 740668 - DNA, 100 bp, Homo sapiens
cccgtgtacgtgcctgtgcctaaatggccaatccgccatggtatagttgaagattgggacttaatggaaaggtttatggagcaagtgatctttaaatatt

SEQ ID NO: 740669 - DNA, 100 bp, Homo sapiens
acactgagagccgctttcatcaaggtttgaagatgccgcatttggattggatgaattccaaattctgcttgcttgctttttaatattgatatgcttatac

SEQ ID NO: 740670 - DNA, 100 bp, Homo sapiens
gacgtgtgctacatacgggctgaatgtggagagggtcttccaggacggaaggaaaatcacctcggcagtgtttgaaggaaggatactgcaactctttgaa

SEQ ID NO: 740671 - DNA, 75 bp, Homo sapiens
ctcaaacaagacaacttgagctgaaagcgaaaaactatgctgaccagagatcataaaaggattcctctgtactag

SEQ ID NO: 740672 - DNA, 90 bp, Homo sapiens
ggcgccgctggagatcctttcctgcttttggtttccctggcaggggttgaactgtggagtgtgtggttgctctaggtcgtaaccagcctt

SEQ ID NO: 740673 - DNA, 83 bp, Homo sapiens
tgtctgacatggaggatgatttcatgtgcgatgatgaggaggactacgacctggattttttatcaagcagaaatgcatcgaac

SEQ ID NO: 740674 - DNA, 75 bp, Homo sapiens
tcagggcaagcatgagattgcagcggagcacagtgacagggctgttgataatcaggtgtatgtggccacagcctc

SEQ ID NO: 740675 - DNA, 100 bp, Homo sapiens
gacccatacatgtcaaatggatctctttctccacccatcccgagaacaaacctcagtatctgtacatttgatggaatggtctcctgatggtgaatatttt

SEQ ID NO: 740676 - DNA, 50 bp, Homo sapiens
ttcaagtagctatgatggtctctgctgcatcttcctcccgtgaggctggc

SEQ ID NO: 740677 - DNA, 100 bp, Homo sapiens
caaatacccaagcctaggacaaaagcctggaggctccgacttcctcatgaagagactccagaaagggagacgagttgtactgctgtcacaggaaatggac

SEQ ID NO: 740678 - DNA, 100 bp, Homo sapiens
caggatttaactatcagaatgaagatgaaaaagtcaccttgtctttccctagtactctgcaaacaggatccggatcacctgtttgaaaccatctcccaag

SEQ ID NO: 740679 - DNA, 90 bp, Homo sapiens
ctgaagagctatggtgaaacaccactgaagcattgccaagattctgaaggaagatttccattaggtaatttgtttaatcagtgcaagcga

SEQ ID NO: 740680 - DNA, 83 bp, Homo sapiens
gtttggagccccggagtggggtgtcggcgcctcattcgggtggagctgagccggagacaggttatgaagacagtatggagttt

SEQ ID NO: 740681 - DNA, 50 bp, Homo sapiens
ggtagacagagaagccaagccacacatggaattactcaaggtgatgagga

SEQ ID NO: 740682 - DNA, 83 bp, Homo sapiens
cagaaacgggtcctgctgctcaccaagtacctggagtagaacagaaaaattattatgtctgtgttcccttgggactcattgga

SEQ ID NO: 740683 - DNA, 109 bp, Homo sapiens
cacggaggtcagaggggaggaggactctggagctgacagcgcgcacttcacccgcagttgggggatatgagactttctactcggaatatcctgagtgttgcgtggatgt

SEQ ID NO: 740684 - DNA, 101 bp, Homo sapiens
gaacgatcctcgaattcagcacagctctccctgtgcaggccccagccaacgactcctggaggaaagctgtcactgccttcagcagcaccgagactggctct

SEQ ID NO: 740685 - DNA, 49 bp, Homo sapiens
aacatggatagagctactcactgagtgtctctatgtattcccctgccag

SEQ ID NO: 740686 - DNA, 83 bp, Homo sapiens
ggaagtgcagctgcctcagttcttagcgcaggacaaccctccatatgataagggagccttcagaatcgaaatcaactttccag

SEQ ID NO: 740687 - DNA, 82 bp, Homo sapiens
aggcggtgacagagtggagccatggctagaggacacaatgtttgcacgaggactgaagaggaaatgtgttggccacgaggaa

SEQ ID NO: 740688 - DNA, 90 bp, Homo sapiens
tttataattccctaagcatggctatgcagactctaaatgtgatttggaaggaatcatgccaaatgttaccatcagcttgagtctccccac

SEQ ID NO: 740689 - DNA, 106 bp, Homo sapiens
gataccaagtgaaatttagaagacgacgagatggcaagaccatggactatgctgaagtatcaaacacatttgtgcgactggcagacacacactttgtacaacgctg

SEQ ID NO: 740690 - DNA, 100 bp, Homo sapiens
cggcgaggccggcgggggtcggcgtcccggctctgtacccagtccgccggaggagagaaaccttacaagtgtacctgggaaggctgcacctggaagttcg

SEQ ID NO: 740691 - DNA, 75 bp, Homo sapiens
actccagctgtgaaagcaacataaatggcccaagaaacagatattttcaagaaaaagaagaggaaaggacaggag

SEQ ID NO: 740692 - DNA, 101 bp, Homo sapiens
aacaacaatatcggcattctgtgctacgaaggtgaagccatcagtgtctacagcttcagctattgcccgtgtgcagatggtgcttaatctctcttgtgcct

SEQ ID NO: 740693 - DNA, 75 bp, Homo sapiens
tgctttagctggactaacagatttgacttaattcagtgcacaaatgagatgaatgtgaacatcccacagttggca

SEQ ID NO: 740694 - DNA, 96 bp, Homo sapiens
gggagaccaggaagatctgcatggtgggaaggacctgatgatacagaggaatctttcaaagaagtaccaacctaaaaagaactcgaaggaggaaga

SEQ ID NO: 740695 - DNA, 75 bp, Homo sapiens
gcagcgtccagcaactccagcctgtccggctcgtcggtgtcctccggaggattccctgggagcacccaccagctg

SEQ ID NO: 740696 - DNA, 100 bp, Homo sapiens
aatgagcttttatgcagccaaacgagttattggtgataacccatggacacctgaacaattggaacagcgttctgccctaggtccaaatgttaccaaaatc

SEQ ID NO: 740697 - DNA, 102 bp, Homo sapiens
attataattacgatgatgaagatgaagatgaaaatgcaatggatgctgatggtggtgatgatgatgatcaaggtttttgattggtcaaggagcacatgtagg

SEQ ID NO: 740698 - DNA, 105 bp, Homo sapiens
aaacaagtgtgtgcatctggctgttagaagaattcatgctcatccgggcttgaacatgacaagcagatttgggagtccaaggcccagacagaggtccagcttcag

SEQ ID NO: 740699 - DNA, 74 bp, Homo sapiens
cgggagcatggcagccaacgtctcgggaagcatgagtgggaaaagcatgggacctgcgccgcccaggtggatgc

SEQ ID NO: 740700 - DNA, 74 bp, Homo sapiens
gttcaacatctgacagtgcttgcaggatctctcctggacaaatcaatcaggtgggtttggaggatttgggacaa

SEQ ID NO: 740701 - DNA, 100 bp, Homo sapiens
cctctaggaagcgctagacacatgtgtcatggagaaactccagctgggcccagagattctgcagcgggaaaatccaaggcttatttatgccaggctgagt

SEQ ID NO: 740702 - DNA, 74 bp, Homo sapiens
gccaggaagactccctgcctcctgagtcccatgattgccattgatatcgatcctgttaagattgcccttgctcg

SEQ ID NO: 740703 - DNA, 101 bp, Homo sapiens
ctggagagaagagaatgcctgaagacttggatgaaaatatggattacaggttgatgtgggagactggaatcagccattttaccaagaaagttgggtttctt

SEQ ID NO: 740704 - DNA, 75 bp, Homo sapiens
gagcttggttaacttgggagaaagtttcatctgtggatggagtattgcctagtatcagaaggccaggcgagactg

SEQ ID NO: 740705 - DNA, 95 bp, Homo sapiens
atgttcatatgttggctgtggtgaatcacaagtagatcacagcaccatacattctcaggcatgtactggcattgaaaacattgacgaagctatta

SEQ ID NO: 740706 - DNA, 100 bp, Homo sapiens
ctgaaaaggaggtagaaatactcttcattcaagtcaatcagtttgcattgaatttctctgcaaagaatgtccaaaaattcatattcacattgatcgtatc

SEQ ID NO: 740707 - DNA, 82 bp, Homo sapiens
ccagatggaagaaccattgttagtgaacgtggacaaagctgttgtctcagggagcacagaaagctggactggccattatgga

SEQ ID NO: 740708 - DNA, 100 bp, Homo sapiens
tgccatcgacaaatcttatgataaacccgcggtagatgatgatgatgaaggcatggagacctgttgtctgcattcaaaagagcattctattaaagctacc

SEQ ID NO: 740709 - DNA, 100 bp, Homo sapiens
gaagaaggcgcggtggcaggagctgacagagtgatgggaaacgcgtgagccaggccgagaggtacatgatgttgattgatggcacaaatgaagtttttat

SEQ ID NO: 740710 - DNA, 74 bp, Homo sapiens
ctctgagcagaactgacagcatgaaggtttgacttctccgtgacagtgttcgccttcctgggactgctggcgct

SEQ ID NO: 740711 - DNA, 96 bp, Homo sapiens
catgtggcagtggaaaatgcgctcgggctggaccagcaggcctccggtgtggctgtctctgatggtgtcatcaaggtgttcaacgacatgaaggtg

SEQ ID NO: 740712 - DNA, 100 bp, Homo sapiens
gttttttgatgctgaggagctcctggtcgatgaagaggatgatgtttttggtgaaggactgggcacttggagtcctgcatgccaaaatcattgcagctat

SEQ ID NO: 740713 - DNA, 75 bp, Homo sapiens
tgactgagctgctggctaagatcaccaacacagacgtgatatcagttttagagaatgtggcgtggagaaattctc

SEQ ID NO: 740714 - DNA, 109 bp, Homo sapiens
ctcccgcggagccggagccgcagaggctcccgggctggactcaggcttctcagggggatatgagactttctactcggaatatcctgagtgttgcgtggatgtaaaaccc

SEQ ID NO: 740715 - DNA, 51 bp, Homo sapiens
gtcagcactgactttcagctatggaatcggaccaagaatcgccttcagccc

SEQ ID NO: 740716 - DNA, 90 bp, Homo sapiens
ggcatttcagtcactggtttgcagagtccagatgaagttgcggagaataatgaacatgatgtcacttctactgaattagatccctttctg

SEQ ID NO: 740717 - DNA, 83 bp, Homo sapiens
gttctgctagtcacgtttccaaagctgtgtgctcaacctacttacagtcacgttactacaggtcgggaaagaggttaaagaag

SEQ ID NO: 740718 - DNA, 83 bp, Homo sapiens
ctctacaaggacggaggcgttgcgattattgaccagtggatctgcgcacacgccagaggcctgtgggagcaaatctgtgtatg

SEQ ID NO: 740719 - DNA, 100 bp, Homo sapiens
atggtgaagtataggctgaggctacctgtgaacagtacgcagtgaatgttaaaagagtctcatcgtggaaggcaagagggaaaagaaaaaagtagagagg

SEQ ID NO: 740720 - DNA, 102 bp, Homo sapiens
tctcgaagcacaagcccgtggatcccccaattacagtatgcctttcaggacaaaaatcacctttatctggccaacagagcacttatggcaaggcatctcgag

SEQ ID NO: 740721 - DNA, 75 bp, Homo sapiens
ctgcaaatgggtgctaatcacaccagccagcaagccctggatgaaaacatggacctcttggaaggtataactggc

SEQ ID NO: 740722 - DNA, 100 bp, Homo sapiens
gcagctggcggcgctggtgcgcgcgctctggactcgcgaatacacgccccaactttccgcggagttcaaggtcaaaatgcagatcttcgtgaaaaccctt

SEQ ID NO: 740723 - DNA, 74 bp, Homo sapiens
taaagtgttacatgacagatgtatgaggtcagttcaccgggacctggaggcccagattgcgatcgtgacggaga

SEQ ID NO: 740724 - DNA, 100 bp, Homo sapiens
ccatgtcagtgctgagaggaaaacttcagcttgtgggcactgctgctatgctgttagcctctccctgcactaggtcagacaatcccctttggggtacagg

SEQ ID NO: 740725 - DNA, 100 bp, Homo sapiens
tccacagcaagctcccttatatacttgtgcaccatggacaattttgctgagggagatttcactgtggcggattatgccttgttagaagattgccctcacg

SEQ ID NO: 740726 - DNA, 98 bp, Homo sapiens
tgaacatcctttgactggttagccaggggacccgaagctgccagtactgtaccaagtggagcggacacgaacagggtcgagcttctcggtgcgctctg

SEQ ID NO: 740727 - DNA, 100 bp, Homo sapiens
agagggattcgtggtgaaggtccggggcttgccctggtcttgctcggccgatgaagtgcagaggtttttttctgagtactgggatttaatgaatttgtct

SEQ ID NO: 740728 - DNA, 75 bp, Homo sapiens
cttgctaaggctattgctacgcttgaaatccatggcccaaaatgactctaccagtggagactctcttctgtgaag

SEQ ID NO: 740729 - DNA, 95 bp, Homo sapiens
cagccgggctcgggcttcggccacggcatagctaaccacatattcttctctttagacgacctcttccaaaagatcaacaaaaatgaagtttatct

SEQ ID NO: 740730 - DNA, 78 bp, Homo sapiens
gaggagccatggactgcagcctcgtgcggacgctcgtgcacagatacgcgaggattaaatccaccacacagggtgaaa

SEQ ID NO: 740731 - DNA, 100 bp, Homo sapiens
gttggctattatatctatgtaactttcctgggatacagtgcgggaacttcattgcaggccgtgtgtcaccctgaccacgtctatctctgggggtcgcacg

SEQ ID NO: 740732 - DNA, 100 bp, Homo sapiens
cagcgatcctgttctcagattgggtcagcagcctctggacccgtgaaagagctggtcggttccgttggtggggccgtgactttccccctgaagtccaaag

SEQ ID NO: 740733 - DNA, 99 bp, Homo sapiens
ctgtgggcctggcgctggaggcagcggtgcacgtgcagaatcatttgctgtttcaaatagagaactgtgcgatgatgagaaagagttcatacattttcc

SEQ ID NO: 740734 - DNA, 114 bp, Homo sapiens
ctgctccagagatgcccaaaaccagggagttgtctcccacggaaccacaggacaggtgaggagccggaagaggaaccgaaagtgaaaacccagtggccgaggtctgcagatgag

SEQ ID NO: 740735 - DNA, 89 bp, Homo sapiens
ctgagcagaggacccggcgggcggcctcgcgggtcaggtgtagagcagaccaaacagtgcaaggaggagcccaaggaggagaaggtggt

SEQ ID NO: 740736 - DNA, 96 bp, Homo sapiens
ccgccgcctgcggcctttgctgcgggcgccggcgctggcggccgtgccgggagagctctgagctcttcaccctgacctatggtgccctggtcaccc

SEQ ID NO: 740737 - DNA, 87 bp, Homo sapiens
catggtatatttgcagccagtactctatatgaacaatccgtctggatcacggatgtaggaagtggcaaatgaagaggattcttccag

SEQ ID NO: 740738 - DNA, 103 bp, Homo sapiens
gtccgcggctggggttccctcctccgtttctgtatccccacgagggtttggaaatcccttgtctccaggttgctgggattgacttcttgctcaattgaaacac

SEQ ID NO: 740739 - DNA, 97 bp, Homo sapiens
tcatatgacataaggatgatcatctctggcacaacagctcacttttcttccaaggataagttgcaagaggtgaccaagaatatggcccaggtgacca

SEQ ID NO: 740740 - DNA, 82 bp, Homo sapiens
ctgggcctgccccccgtgccagacaatgcggacctctctgggctggctattaaggtcgcgtggggcaggcagtggcgctgcg

SEQ ID NO: 740741 - DNA, 83 bp, Homo sapiens
cgcatgggcctactttacatcacactctgcataggttcccgtgtcagtggctatgatgacacctcaagttatcactccccagc

SEQ ID NO: 740742 - DNA, 83 bp, Homo sapiens
cgcagtggtcgcttcttctccttgaattatagaccaatccagcaatgtggagatagcatcttttccaatctataaggtgttat

SEQ ID NO: 740743 - DNA, 100 bp, Homo sapiens
tcccttctctcctggacagaaggccgtgtcctgggacttctctgatggcgagaggctgcggctgtaccagtggatgtggccacggcgctgcctctgcaag

SEQ ID NO: 740744 - DNA, 75 bp, Homo sapiens
caccaaggcccccaagccctccttcgtgtcgtacgtacgccctgaggagtacaagcgcaagctagccagagtttc

SEQ ID NO: 740745 - DNA, 75 bp, Homo sapiens
tggggtgtgagaggttttctcgctctaggaactgtggctgcaccatctgtcttcatcttcccgccatctgatgag

SEQ ID NO: 740746 - DNA, 98 bp, Homo sapiens
cgagtgatcctgcagggacgggacagtaacatccccgggtccgactacatcaatgccaactacatcaagttcattctgtagataatacacgcatggac

SEQ ID NO: 740747 - DNA, 100 bp, Homo sapiens
ctgctgcaaagatctgacccctcagtccccaagattgtggcatttgaaactgtccattcaatggatggagcgagcccagggcgtggtgctgaaagtgctc

SEQ ID NO: 740748 - DNA, 74 bp, Homo sapiens
ccttgggatccggagggaggaagctgggacacccgggagtcaggaaatgtgttgggtggtgaattcctcaagta

SEQ ID NO: 740749 - DNA, 83 bp, Homo sapiens
cgactggcatgattttgtggtggtggaaacagtggacttccaacccaatgagcaagagatgggatttcaccatgctactcagg

SEQ ID NO: 740750 - DNA, 51 bp, Homo sapiens
tctgaccatctcacatgccacaggaatacagaagcagatttacaaatgaag

SEQ ID NO: 740751 - DNA, 97 bp, Homo sapiens
atgtattaaaagacctgagaacctggtagtggagactgctgcacggactctggaaccatgaacatatttgatcgaaagatcaactttgatgcgcttt

SEQ ID NO: 740752 - DNA, 75 bp, Homo sapiens
tcaaactgtaatggcatttggcttttcctccgcaaccatgtctgacaaacccgatatggctgagatcgagaaatt

SEQ ID NO: 740753 - DNA, 75 bp, Homo sapiens
gtaaaagaagctattattacaagaataaaggcaggaatcaatccattcaatgagttttgccgaattgacaagccc

SEQ ID NO: 740754 - DNA, 75 bp, Homo sapiens
tttggactaatgggagttgcttttggaatgaatttggaatcttcccttgaagagatttctgctggacagagtcag

SEQ ID NO: 740755 - DNA, 100 bp, Homo sapiens
cagttcattttgcagtgcgatgatgatgtcggctgggactgggaccatctgttcactgaggtgtcctcagaggtcctcactgagtgggacccactgcaga

SEQ ID NO: 740756 - DNA, 100 bp, Homo sapiens
cctcaatgaagagctgggacaggatattgctgcatatcgagctaaaggaaagcctgatgcagcaaaaaagggagttgtcaaggctgaaaaaagcaagaaa

SEQ ID NO: 740757 - DNA, 74 bp, Homo sapiens
aacactcaagtgaagcaaaagccttccatgattacgcctcgaaaaagcccaagacagcagaagcagacacctcc

SEQ ID NO: 740758 - DNA, 75 bp, Homo sapiens
ctcgagtgcctgcaggatgtgagggaggctttcatgagaaggacaagaagccatattgccgaaaggatttcttag

SEQ ID NO: 740759 - DNA, 74 bp, Homo sapiens
agcccggatgctgaagcaaaattcagagagattgcagaaggtcagaaagcaacattgaatgcagaagaaatggc

SEQ ID NO: 740760 - DNA, 100 bp, Homo sapiens
ggaaaagatgcttctgggaacaaggttaatcatgttatcagccctctgttggatatctactttcctgaaggatctggtgttaagataatttcagaacccg

SEQ ID NO: 740761 - DNA, 90 bp, Homo sapiens
tgcagcctggcggcctgagcgccgagcctggggctggggccgcggtgctgaggacgcaaatgtgatccctcatccacctacatcaggcaa

SEQ ID NO: 740762 - DNA, 100 bp, Homo sapiens
gaaaaactccaacagcttcatatggacagatggacttcaaatgctgtttgtattccagagactaggtcgccccacggctgaattctcggtgataaaggcg

SEQ ID NO: 740763 - DNA, 90 bp, Homo sapiens
aagctcaaggccgaagccgagcagaggatctaaatacaagagtggcctattgaagatgctgtggacaattatcgagatagactaacagaa

SEQ ID NO: 740764 - DNA, 115 bp, Homo sapiens
cttcctgattttatacaaagaattatactacaggcacatatatgccaaagtcagtggtctggtcgccagcaacctgaatctcaaacctggagagtgccttcgagtgcgaggcgag

SEQ ID NO: 740765 - DNA, 75 bp, Homo sapiens
gtgcacctcagcactatcccaagactgctggcaacagaggatttccaccttccgcatcattgtgtttattggatc

SEQ ID NO: 740766 - DNA, 100 bp, Homo sapiens
cagagctgaatttaactacagtgtggggtttaaagatttaaatggtctgtgtacactgggctcagtaagttgttatgttgctggaattgaactactccac

SEQ ID NO: 740767 - DNA, 100 bp, Homo sapiens
tcgcgaggagaagaggacggccctgagcaagctaggacttctctcaaacttgtgtgctgaggagactcagatgttggcctcagctcctaggctgaactca

SEQ ID NO: 740768 - DNA, 90 bp, Homo sapiens
ttgtgtcttgaattgttagtaaacaacggggcagatgttaacattcagtgctgcaggtggagaaattttcagcctgtgtttacctgagtt

SEQ ID NO: 740769 - DNA, 129 bp, Homo sapiens
cttcctgcggcactacacagtgtcggaccccaggactcaccccaagggctacaccgagtacaaagtaaccgcgcagtgggtaattccagaattgattggccataccattgtcactgtattactgctcat

SEQ ID NO: 740770 - DNA, 82 bp, Homo sapiens
taacagctggagagaacagttcattgaagctatcactgtcagtgctgttttcggctttgtgagaaaccttaccatcaaacac

SEQ ID NO: 740771 - DNA, 100 bp, Homo sapiens
gagtttgaagagttccctgccgaaggtttctggcacagccctgagtgtgaatttgtccgccactgcatcgccaagtcccaggagcgagtggaagggaaag

SEQ ID NO: 740772 - DNA, 99 bp, Homo sapiens
gaaggacagcggcaccgccagacggccagaaagttccgccatgagctggggcacggagctgtggcactaagtcaggagattggaaaagcaaatgctttt

SEQ ID NO: 740773 - DNA, 96 bp, Homo sapiens
ggagcttctcagaagacagagggttttcttttgagggccttcctggatcaataaaacagagagagctttcttcagaggtagagacagccgagagga

SEQ ID NO: 740774 - DNA, 82 bp, Homo sapiens
cttggactgagtcctgcaggacacagatggggaacaggatggagcagctggaagtatggatgcttctacccagggcttatta

SEQ ID NO: 740775 - DNA, 75 bp, Homo sapiens
ccctggtggtgctcagcttccctgagctcgagttctggatagtaaagcaatagaccttatgaatgcactaatgag

SEQ ID NO: 740776 - DNA, 83 bp, Homo sapiens
cttgcaggattgggaccagacagttgagacagcacaaaggacaatgaaaagcgaaccccattgcacgccgcagcttaccttgg

SEQ ID NO: 740777 - DNA, 100 bp, Homo sapiens
cgccgggaggtaggcgcgggacgggcggctgcggtggcggcgggtggaccgattgtcgctcggcggcgggagtcggtgctggagaatctggtaaaagcac

SEQ ID NO: 740778 - DNA, 139 bp, Homo sapiens
cagaaatcacccggaggcctgttgaagacttaatccttcaaatgaaggcgctcaacgttgaaaaggatgagtacagcattctgccctattcattcatcattggggtccatggttatgtgcttgtgtattctgtcacctc

SEQ ID NO: 740779 - DNA, 98 bp, Homo sapiens
tggtggatgtgaaggtggacactgaggatatagagaagaaaccagagtcatttttcactcaattcgatgctgcttatgtacataaaagcgtgatggag

SEQ ID NO: 740780 - DNA, 100 bp, Homo sapiens
ctctcgccgtccgagtcgtttattgtatgatgagctgccgcactacccaggcatcgtggatggccccgcagccctggctagcttcccagagacagtgccc

SEQ ID NO: 740781 - DNA, 90 bp, Homo sapiens
tggcatccaggagagcccatggcaggaccggcacggcgaaaccttcaccttcaggccttctggcggccgcccctggtttctcctgggggg

SEQ ID NO: 740782 - DNA, 50 bp, Homo sapiens
aagctctcttaagagattatgcccaagaagatgaaaggattgttcttgtt

SEQ ID NO: 740783 - DNA, 101 bp, Homo sapiens
ggaaaacttgttattggacacaatatgctcttggacgtcatgcacacagttcatcagttctactgccctctgcctgcggttccatgtagcagtaaactcat

SEQ ID NO: 740784 - DNA, 84 bp, Homo sapiens
gctagggaagatcgcaccgcggacgcccgctgagcttggcgcacgggccgaccagccctgggcgctgcctatggcacagccaag

SEQ ID NO: 740785 - DNA, 100 bp, Homo sapiens
ggagttaaggaacagatccccggaggagctgggagtgtccactcgccttccaccagcatggcaacgtcttcacagtaccgccagctgctcagtgactacg

SEQ ID NO: 740786 - DNA, 100 bp, Homo sapiens
aaggagttggtgaatgatatcaggaagttctcccacatgttactatatttgaaagaagccatattttcagggtggttctcttcccaaagtggaagccaaa

SEQ ID NO: 740787 - DNA, 97 bp, Homo sapiens
accatgtccgtggccttcgcgtctgcccggccaagaggcaaaggggaggttacgcagcaaaccatccagaagaattctgagacttatggttggtcat

SEQ ID NO: 740788 - DNA, 90 bp, Homo sapiens
ttcctgtattggaatatgatgctaagattgccaacactcctgatagctgaatgtgtgctggtttacatgactccagagcagtccgcaaac

SEQ ID NO: 740789 - DNA, 96 bp, Homo sapiens
cgtggctgctcgataaatcagacagaacagttaatcctcaatttaagcctgatctaacccctagaaacaggagggcaaagataaaatgttcctgat

SEQ ID NO: 740790 - DNA, 78 bp, Homo sapiens
atggacagacctcaggggaagaagctggacttcagccgtccaagagccctgaagacaaggggtaacactccaaaatat

SEQ ID NO: 740791 - DNA, 74 bp, Homo sapiens
cggagctggaatgactggcaacccagtcaacaggttcttgggagaaaaactggaacagcatctgttcacaaagt

SEQ ID NO: 740792 - DNA, 90 bp, Homo sapiens
gttaatggctgccgacgtcactggaaggatatggagtaatagtactaaatcccaatgaaaactatattgaagtagaaaagccgaagatac

SEQ ID NO: 740793 - DNA, 100 bp, Homo sapiens
atgactatcttcaagactgcctcgatgccatccagcaagacttcgtgatttttaacagagaaaaggtgctgttggcccaaaggttgccctgaagcccccc

SEQ ID NO: 740794 - DNA, 82 bp, Homo sapiens
gcggatctcaccgccgctcagggaaactcccagtacagccagcagcaggccgggtaccagcagggtgccgcgcagcagcaga

SEQ ID NO: 740795 - DNA, 101 bp, Homo sapiens
acagccccaggatgccgtgggccgcagccactcaggactgtcaaaggaggttgtggctcactggattgctgaaagccgcattgccattgagaagatccgct

SEQ ID NO: 740796 - DNA, 100 bp, Homo sapiens
tgagcatcacccgtctgcatgagcagaagctgattgctggaatgactcttccatatgatactctggatcaagtaaggaacagattggaagaagtctctcc

SEQ ID NO: 740797 - DNA, 89 bp, Homo sapiens
tggctcctccattcaaacatcgacgccatcgacaagcgggcgatgccagtccctccactccagaggagaacgaaaccacgacaaccagc

SEQ ID NO: 740798 - DNA, 129 bp, Homo sapiens
gtcattgacaagtccacagaagaccggatggagagcttctttctcagtgagacctgtaaatatttgtatctgagctcaaatgatacttttcccacagcaatgcacattgctgctgcaatagaagttcat

SEQ ID NO: 740799 - DNA, 90 bp, Homo sapiens
cccttttttgacatcgcgcactatctagtgtcagtgatggcggtgaaacgtcagccggggatagcccacctcatgttcctgtacctgaac

SEQ ID NO: 740800 - DNA, 100 bp, Homo sapiens
caacatccccaaacagcggcgtttcacggtggcacatacatggcatggattccgtgaaggaacaacacctaaacccaagagggcagctgttgcagcatcc

SEQ ID NO: 740801 - DNA, 50 bp, Homo sapiens
cgggacccgcggtccccgctcttgctgattcgtggtactctaaagagctg

SEQ ID NO: 740802 - DNA, 90 bp, Homo sapiens
ctggcctggtttgatactgacctgtaaatcatcctttaggtttttctatatgagtggagaagacagctgttaccagggaggtcatacaac

SEQ ID NO: 740803 - DNA, 100 bp, Homo sapiens
ttttcaccgcggccatcctgcaggcacagttgccgattacaggcacttcagacaccacctccaacaacacagcaaccgtgatttccacagcgcctccagc

SEQ ID NO: 740804 - DNA, 100 bp, Homo sapiens
cggtgaagtgccatcttcggctaggtcgtcacaggctccggctcatggcatcaagtggcatccatcataagacttaggagaaaactctggtattggaaaa

SEQ ID NO: 740805 - DNA, 100 bp, Homo sapiens
ctgcctgcatgctgtgggcgacaaggccgtggaattcttctttgcttctgatgcaagcatttacagccgaacaataccagcaacatcaacagcaactggc

SEQ ID NO: 740806 - DNA, 95 bp, Homo sapiens
ctctgcaatagatacatggagcccatcagaatggcagatggcttatgaaccacaggagccagcaccgctctttgaccttgccatgcttgccttag

SEQ ID NO: 740807 - DNA, 75 bp, Homo sapiens
cttagctgtgctcgcgctactctctctttctggcctggaggctatccagcgacacctgctccacttcaccttttg

SEQ ID NO: 740808 - DNA, 100 bp, Homo sapiens
ctgggtgcgcctgcagggatcggaagccggttggggtgtgagaggttttctcgctctagtggaatgcagtagccctctgggcctgggatattgtggttga

SEQ ID NO: 740809 - DNA, 51 bp, Homo sapiens
aggccagcaactcccagctcaatgcaatgattcgacggaggcgccttgcac

SEQ ID NO: 740810 - DNA, 100 bp, Homo sapiens
tccaatcaccgtccccaagtcaccagcctttgcattgaagaacagaattcgaatgcccaccaaagaagatgaggaagtgggtcctaaaaactcttacatt

SEQ ID NO: 740811 - DNA, 98 bp, Homo sapiens
agtgcaaacagacttcggagtacctgcgctatgaagacacgcttcttctggaagaccagccaacagatgatctatctggtggtgaaagcagccgtcgg

SEQ ID NO: 740812 - DNA, 101 bp, Homo sapiens
gtggattcggtggcatcacgatgctcttcacaggatacttcgtcctgtgttgtagctggagtttcagacgtctgagctggagtgcagtggcgtgatctcgg

SEQ ID NO: 740813 - DNA, 82 bp, Homo sapiens
gccggggcaggggcggaggcggaggcagaggtggaggcgctttgaaagaccatggtgaatccgggcagcagctcgcagccgc

SEQ ID NO: 740814 - DNA, 80 bp, Homo sapiens
aactgaaattaggaactggggaaatgaagcctgctcactgctactgtggcgtctcgcattcaccgggccgcccagcccgc

SEQ ID NO: 740815 - DNA, 100 bp, Homo sapiens
gccagagccaccagcgcagcgctgccatggagcccagcagcaagggatatcagtatgaacaacattactcagttgccagaagatgcatttaagaactttc

SEQ ID NO: 740816 - DNA, 98 bp, Homo sapiens
gcagctgggcgagaagctgctccggcctagcctggcggagctccacgacgagctggaaaagaatctccctggaaaaggagacatgaatgtctgcaatg

SEQ ID NO: 740817 - DNA, 74 bp, Homo sapiens
ggccacaagacatttcctgctcggaaccttgtttactaatttgggtaattccagaattgattggccataccatt

SEQ ID NO: 740818 - DNA, 93 bp, Homo sapiens
atcccctgtttgagaaaaggcctaagaattttggcattgccacaatggtgcgcatgaatgtcctggcagatgctctcaagagtatcaacaatg

SEQ ID NO: 740819 - DNA, 96 bp, Homo sapiens
cggctgccgccgccgccgcctcggccgaccagggacctgcccgcctgcggctgctccggtttgaaggatgacctctaggaagaaagtgttgctgaa

SEQ ID NO: 740820 - DNA, 73 bp, Homo sapiens
tgaaaaagaactacatattgctttagaaaaggtacaaagtgaaatcacttcagcaaacacagaagatgatgat

SEQ ID NO: 740821 - DNA, 100 bp, Homo sapiens
gccgtggtcagccgcttcgacgagcagggtaaaagccccaaagctgtcatcagcattaaggacttgaatgccaccttccagacagagaagatagggcacc

SEQ ID NO: 740822 - DNA, 90 bp, Homo sapiens
tgaagcgcaccccgactgccgaggaacgagagcgcgaagctaagtgccttcagtgctgcccatgaagagcaatggaagttaaaggagcaa

SEQ ID NO: 740823 - DNA, 75 bp, Homo sapiens
ctcaaagtgcccaaggagcgcctggctcttctccacaaagacacgtctcctctgagcctccggcctccataagac

SEQ ID NO: 740824 - DNA, 80 bp, Homo sapiens
gttgtcgactcatttggataaagaccaagaagtgggattactggattatatgcactgccagtgaaagatgtagaagataa

SEQ ID NO: 740825 - DNA, 87 bp, Homo sapiens
ggcccacagtgggggtgtgcaaacccgagagaactggtgaataccagggcctggtgaagcacacaggaggctgccactgtggagcag

SEQ ID NO: 740826 - DNA, 50 bp, Homo sapiens
cgggagtcatcttcaaagccctgaagagttgcatgctgagaatttgaaaa

SEQ ID NO: 740827 - DNA, 82 bp, Homo sapiens
caccatttctggccaaaactacaaacaagacttcgcagcgatgccctcctagctagccgtcacgggatggagggcttcatgg

SEQ ID NO: 740828 - DNA, 60 bp, Homo sapiens
cgatggctcttttcatatcagaggggtcaggcccagccccaggcccagtggtattactga

SEQ ID NO: 740829 - DNA, 76 bp, Homo sapiens
ggctctcaaagaaccagcggacctgagtcttcaatgaaagcaccctcatcacatgtgtggattctgggattctcag

SEQ ID NO: 740830 - DNA, 82 bp, Homo sapiens
cagcgatcagctgttttacaccaagatcttcttggacccggagaagagggatgtcatccaagtctccaagaagttcctgcca

SEQ ID NO: 740831 - DNA, 100 bp, Homo sapiens
gcagaaaatcaaaacgctgattaaaagaagcacgtgaagcagccgacacgagtcgttgttcataaaacagcttttgaaagttgagagcacacccctggag

SEQ ID NO: 740832 - DNA, 78 bp, Homo sapiens
ctgcccacttggccgcgaagtggcccgagaccccgctgctgctggaggcaaggatgcagaagaagctgtcagaattgc

SEQ ID NO: 740833 - DNA, 82 bp, Homo sapiens
gcagcgggaacacagagagcgaagccagcactgccagtgaaagatgtagaagataaacctgaacaacaaaccagaacaagag

SEQ ID NO: 740834 - DNA, 100 bp, Homo sapiens
gtcgtcttagatgttgattcaggtgtccgcaatgttgccagtgtctgtctgcagattggctacccaactgttgcatcagtaccccattctatcatcaacg

SEQ ID NO: 740835 - DNA, 100 bp, Homo sapiens
ccctgcttggagacggacttgcttccggtgctgccatgcttactgagtcccttctctctccttctctatcatcttccatcagtgagtatcaccagccttt

SEQ ID NO: 740836 - DNA, 74 bp, Homo sapiens
attccaaaggcacaggaagaagcttgcaggttcttctgtgtggcagttcagaatgatggatcaagctagatcag

SEQ ID NO: 740837 - DNA, 75 bp, Homo sapiens
cgtgacggccagcgcagcagcatcatggacgtgcgatactaatggaccatactaccaaggaccagtccacctgaa

SEQ ID NO: 740838 - DNA, 107 bp, Homo sapiens
tggaacgcaagcgcctcacccgaatctctgacccagagaagtgggagatcaaacagctccagtcagcccggtcaagcatgacagcaactcaaactcggcaaacttcc

SEQ ID NO: 740839 - DNA, 124 bp, Homo sapiens
attggaactaccaagcatgtggctcctggtcagtgtaattctaatctcacggatatcctctgttgggggagaagacacctcctgtgtgaatccgcccacagtacaaaatgcttatatagtgtcg

SEQ ID NO: 740840 - DNA, 96 bp, Homo sapiens
aggagatctaccgctacagccgcagcctggaggagctgctgctcgacgccaaccagctgcgcgagctgcccaaggaggactgccaccagaagatcg

SEQ ID NO: 740841 - DNA, 50 bp, Homo sapiens
ccgcactctccctgcccgagacccggttgatgataattagaagcatgctt

SEQ ID NO: 740842 - DNA, 83 bp, Homo sapiens
gacgtcacgttgtttcgcgggagaaattcgaaagtggattttgtgcaatttgacaggtgacatttacaaagaggaaatttggg

SEQ ID NO: 740843 - DNA, 100 bp, Homo sapiens
ctgctccttctgcatctggctcctgcagtcactcatccacatcttgcagctcgggcaaatctggagtgtctcatagttgggggaggaccctgtggcttgc

SEQ ID NO: 740844 - DNA, 90 bp, Homo sapiens
ctgcaggcgctgatggagagattcttcagcacgcgaagctgcccccagacagctgtcccctccttgtgttcgtgaaccccaagagtggag

SEQ ID NO: 740845 - DNA, 82 bp, Homo sapiens
gggcagtcggcggagcttcgccaaggctggcgcagtcggcttgggcactgtttaaaggaaagttccgagaaggcatcgacaa

SEQ ID NO: 740846 - DNA, 76 bp, Homo sapiens
aaaggctaatggcacaactgtccacgtaggcattcaccccagcaaggggtggcacagaatcaacaagatatgcagt

SEQ ID NO: 740847 - DNA, 90 bp, Homo sapiens
gaggggagtcatcatgagcgatgttaccattgtgaaagaaggttgggttcagaagagggggaagacaaaggcgctttggctaagctggtg

SEQ ID NO: 740848 - DNA, 75 bp, Homo sapiens
ctcctccttacgaaccgcactgccggtgccccgcgggtgagctggagacctcagacgtggtaactgtggtgctgg

SEQ ID NO: 740849 - DNA, 75 bp, Homo sapiens
aggaaactgctgttaacctcgtcaaagctgatcagcagctaaggtgctgtctgaggtctgtgggcaggacatcac

SEQ ID NO: 740850 - DNA, 100 bp, Homo sapiens
cactccagtattcttccctggaaaatgggaaccttgttttcatcttatatctcatgcagcgcctaacatagtcacctggaggctgaagatgagaagtcag

SEQ ID NO: 740851 - DNA, 100 bp, Homo sapiens
atggcagcagaagccgcagctctgcgggtctactttcagtgacacaggtacaggtttgcagattccgccagcagcacagcaagctctacagatgagtggc

SEQ ID NO: 740852 - DNA, 117 bp, Homo sapiens
ttcccttgggaaccgcctgggaactccgccatgtcatccacttcgcccaacctccagtcaggcagatctagccagttctctgtctaatgctgtgcaaatcgttggcatgagtgctac

SEQ ID NO: 740853 - DNA, 82 bp, Homo sapiens
gtggttgtgtggtcgcgtctcggaaaccggtagcgcttgcagcatgcagcctcaaaaccaactttagatcccatcattactg

SEQ ID NO: 740854 - DNA, 50 bp, Homo sapiens
gtcgccggaagccttgtgcaaagtttgtgaacgcatctgcagatgccggg

SEQ ID NO: 740855 - DNA, 82 bp, Homo sapiens
gaagatcctggtgtcgccatgggccgccgccccgcccgttggatttttagactctgaggagcagttggagctaatccacatt

SEQ ID NO: 740856 - DNA, 99 bp, Homo sapiens
ctgcaataaaaaatggcctccaacaaaactacattggatgttgcttcagagtgtgaagtcaaatgcatgccaacattccagttttttaagaagggacaa

SEQ ID NO: 740857 - DNA, 90 bp, Homo sapiens
cgatcaaggaggaggattattttaacaggaacaccacttcaaaataacctaattgagttatcagatgtagaaggtggtgatggactgcag

SEQ ID NO: 740858 - DNA, 90 bp, Homo sapiens
caacagcctggtcaatttgtacctgcaggcctcctacacctacctctctctgtctgttctctggggaggcagtaaggggccgtggagctg

SEQ ID NO: 740859 - DNA, 50 bp, Homo sapiens
aggaaagctgaggacttcaccagcgctgaaaaagcttgagtctccacccc

SEQ ID NO: 740860 - DNA, 98 bp, Homo sapiens
agaggcagctcttcagcctatgggatattgaaatggattccaggcgtgtgcctcgagacaagctggcctgcatcaccaagtgcagcaagcacatcttc

SEQ ID NO: 740861 - DNA, 75 bp, Homo sapiens
ccctggacatcaagattaaaagagcgaataaagtttatcacgccggggcgtccgacctccgatcatgaacgggcc

SEQ ID NO: 740862 - DNA, 96 bp, Homo sapiens
ctggcttcgcccttattgtctgtcagcgttgatggcactcagaggactgtccagatgcagcagcttttttatgagaattacgagcagaacaaaaag

SEQ ID NO: 740863 - DNA, 75 bp, Homo sapiens
caactatggcagcagcgtggcctccgccaccgtgcacatccgaatggatgtgaactatgaagactttactttcac

SEQ ID NO: 740864 - DNA, 75 bp, Homo sapiens
aagagacaggaggcagcagacggacatccaggctacagatgcacatgttgaatggagctcttctggcattgctgt

SEQ ID NO: 740865 - DNA, 100 bp, Homo sapiens
caaaaaacagagctgagcagtggaatgttaactacgtggaaacatctgctaaaacacgagctaatgttgacaagccctattacttatgcctgggaaggtg

SEQ ID NO: 740866 - DNA, 100 bp, Homo sapiens
ccccaagtttggcatcgagaaggaggtgcgcgtgtgtgagccctgctacgagcagctgaacagacttctgcgctgacccaggggctggagcgaatcccag

SEQ ID NO: 740867 - DNA, 90 bp, Homo sapiens
atccagtctaaatgttggttataaactcacctgacatccacagggcccttccaaaatactgtcaactgcggttggatttctcacgatgtc

SEQ ID NO: 740868 - DNA, 100 bp, Homo sapiens
gccctgagggctgagttctgcacccagtcaagctcaggaaggccaagaaaagtgtgccatgcggagctgaatgccatcatgaacaaaaattcgaccgatg

SEQ ID NO: 740869 - DNA, 100 bp, Homo sapiens
taatggagaccaaaagtatgttgtaccttgtgacagaatatgccaaaaatggagaaatttttggggccttggacaagttgttactgactatgttcatggg

SEQ ID NO: 740870 - DNA, 98 bp, Homo sapiens
gtggcatctgcggccatggcggcgactactgccaaccccggtaatggaactgctggtccatctgaataaacgtataaaaagccgccccaaaatacaac

SEQ ID NO: 740871 - DNA, 100 bp, Homo sapiens
ggaacaaaatacaaatcatggagccgctggggtcccttttgcctcagatactattttgaaggtgtcagcttcctctggtgcaaccagcaagtcttccagt

SEQ ID NO: 740872 - DNA, 80 bp, Homo sapiens
catcatcccgtcagagctgaggtacttcgtgaaggctcttgtcaggatggtgaagctgttcatcggaaacctgccccggg

SEQ ID NO: 740873 - DNA, 100 bp, Homo sapiens
gaaatagcaagaactgaggagcaccaggagacgcaactcatcggcttcctgcctgacacagctcacttcaagaagtgcacaatgtcagaacgtggaatta

SEQ ID NO: 740874 - DNA, 100 bp, Homo sapiens
gaaagttattgaacggctgggccagagcgtggttgctgaccagttgaaagggtctccaactgaattccttgaagagaaaatggcctaccaggaataccca

SEQ ID NO: 740875 - DNA, 101 bp, Homo sapiens
aacagcaggcccgagcccaccgcgccgggccccggacgccgcgcggaaaaggctctctttttgcctgctgccatccatgtaagacgcgacttgtttctcct

SEQ ID NO: 740876 - DNA, 144 bp, Homo sapiens
ccagctgccaattatctcagatgacttcaaattccaggtgtggaggaagatgttccgggctctgatgccagccttgaccttatgtcatgggttcaacttggacactgaaaacgcaatgaccttccaagagaacgcaaggggctt

SEQ ID NO: 740877 - DNA, 100 bp, Homo sapiens
ccttgtttgcacggagcagcaaacgcagagacaaaagaaacgggccccgactgatttctcactatgtgcaatagacactttggcagtgttgtggcacaaa

SEQ ID NO: 740878 - DNA, 80 bp, Homo sapiens
ctgggagaatccaccgccatccgccaccatgacctgcctagagctggaacgttacctccagagcgagccctgctatgttt

SEQ ID NO: 740879 - DNA, 100 bp, Homo sapiens
cctcggccttccgacgtgggcggtgggccccagccccacagaccagcccagcattcaggagttaaagttcctcgtaattttcgcttgttggaagaacttg

SEQ ID NO: 740880 - DNA, 100 bp, Homo sapiens
cccaggcctgcgtccgagtctccgccgctgcgggcccgctccgacgcggaaggtgtcgtgaaaactacccctaaaagccaaaatgggaaaggaaaagact

SEQ ID NO: 740881 - DNA, 100 bp, Homo sapiens
cagcctgggtctcagccccgcgtacggcctttcacgagtcttcaagccttcaggtggcatggaatattcacatgggagagccgcatgaggccgcccacca

SEQ ID NO: 740882 - DNA, 100 bp, Homo sapiens
gagatcctggcgagcctgcaggatggcgcggccgagtccccgtacggccacccggcggacatttatgcagtgtgtgattctttctaaaacaactccctgg

SEQ ID NO: 740883 - DNA, 89 bp, Homo sapiens
tgtcctgaaggagttccaccaggccgggaagcccatcgggctcacagaacatttcctgcctgttgctcacactctgttgtccacagcat

SEQ ID NO: 740884 - DNA, 83 bp, Homo sapiens
gtcgcagtctccacggcgcaggcccacggtagcgcagccgctctgagacaatgcagatcttcgtgaagactctgactggtaag

SEQ ID NO: 740885 - DNA, 75 bp, Homo sapiens
gttcttgtttgtggatcgctgtgatcgtcacttggttccttgtggagaagcactggtataagcagtgggaggcat

SEQ ID NO: 740886 - DNA, 100 bp, Homo sapiens
cgccgcccagcccggccccgcccgcgccggaagagccacgccggaaagtggagaatgaggacatgaataaagaccagatcttgctggaaaaagaagctga

SEQ ID NO: 740887 - DNA, 98 bp, Homo sapiens
cagccatgtggccatcgcagctactaattttcatgatgctcttagctccaataattcatgtttttcagaagaagtgaagtcaagatgaagaaccattt

SEQ ID NO: 740888 - DNA, 74 bp, Homo sapiens
ctcctgcaccatattctaagtgggaaagagtttggcgttgaaagaagtgtgcctgtatggagtggaatgaatgt

SEQ ID NO: 740889 - DNA, 76 bp, Homo sapiens
atacatggagtctaaaggagcccatcgtgcgggtcttgcaaagattagccgatgaattacatatgccatctctccc

SEQ ID NO: 740890 - DNA, 98 bp, Homo sapiens
ttcccgcctggtatatgatggcatccgggacatcaggaaagcagtgctgatgataaggcagctgcaggtggtgccccttttcggcgacatgcagatag

SEQ ID NO: 740891 - DNA, 100 bp, Homo sapiens
ccgctaccgctcaggtgctgcaggcacagcccgagaaaccgcagcactacacgctaccggctctctgaccagttccacgacatcctcattcgaaagtttg

SEQ ID NO: 740892 - DNA, 100 bp, Homo sapiens
atgccccacagcactgctcttccagaggcaagaccaaccaagatgagtttggtgaggattcatcaacctccagtatgatgtctgtgaactttgatgttca

SEQ ID NO: 740893 - DNA, 51 bp, Homo sapiens
cgatgaagtgcagaggtttttttctgcatctatattggaaagcgactgagc

SEQ ID NO: 740894 - DNA, 100 bp, Homo sapiens
gtcctggttctgcagcaggaggatgatttgagttttgtcaccggctcccacgtcggagagctgatcatctgggatgccctggactggaccatgcaggcct

SEQ ID NO: 740895 - DNA, 75 bp, Homo sapiens
ggatgtggtttccgttaagctggacaacaggtggtccagctgctcacctgtgacctgctactgtcgctacggaca

SEQ ID NO: 740896 - DNA, 100 bp, Homo sapiens
ccggctggccgtgatgctgcccactggtggtcccccgctcccggggtccccggccggccaagcaggcccacagcagcagaacttttaaaatgcaaattct

SEQ ID NO: 740897 - DNA, 58 bp, Homo sapiens
cggaggtcgataagctggaactgatggtacaagttgcttaaccaagaagaaggtgagt

SEQ ID NO: 740898 - DNA, 100 bp, Homo sapiens
ggaggccctgcggctcttccaagtgtccacgttggatgctgccttgtccggtaccctgtcaggtggctttgccctataaaccgtatttctacattgcgac

SEQ ID NO: 740899 - DNA, 100 bp, Homo sapiens
ctcggtctgggcttctctgaggcggcgagagatggtcaggtctggagctcgaccgggccaggtttttgaagaaccctccatcagcctttttgctctggag

SEQ ID NO: 740900 - DNA, 80 bp, Homo sapiens
cctctacgagcaggagcagtacaggagcatgcaagttgtccccttggacaaacagatcacaatcatagatagtccgagct

SEQ ID NO: 740901 - DNA, 100 bp, Homo sapiens
tggaccctggagtacaccccgcagcacagccgcgacttcaagtctatccttcactggagtctgatgatgatgaccctgctttgaaatctcgacccaagaa

SEQ ID NO: 740902 - DNA, 82 bp, Homo sapiens
agcagagccaggtgtacggagaggttacttcttgctgcagattctgcgcaggatcggagctgtgggccaggctgtgtccagg

SEQ ID NO: 740903 - DNA, 100 bp, Homo sapiens
cgagaagcagctgcggcgggacaagcgcgacgcccggcgcgagctcaagctgctgctgctcggatgtgatcttcgtggtggaaagctaaattttaaaacc

SEQ ID NO: 740904 - DNA, 90 bp, Homo sapiens
tgtaatggatgtaggaaccttggcttccccatgcttgcccagacttataagctagcaattacagatttaactacagctatcagcatggac

SEQ ID NO: 740905 - DNA, 100 bp, Homo sapiens
gcagaggggtccatacggcgttgttctggtaatatctgcttcttctgacacgacagtaaaagtatggaatgcacacaagggattttgcatgtcaacatta

SEQ ID NO: 740906 - DNA, 100 bp, Homo sapiens
atctgtggatctcaatcaagttagcatgctttctccagctgccctatcacctgccagctcatcacaaacttagcagtgtctgcaaaaacgaatcttttcc

SEQ ID NO: 740907 - DNA, 97 bp, Homo sapiens
caacttccgcgacatcatgctggccactggcaagctgtcccctgatgccatcccagggtgacagtgaccagcgagggtggccgtggcacactgatca

SEQ ID NO: 740908 - DNA, 83 bp, Homo sapiens
cgagaacgtgtcggtcattgcctggggcctctccctggagcgagttgaagtattgataacaccaaggaactctatcacaattt

SEQ ID NO: 740909 - DNA, 89 bp, Homo sapiens
cttgttaatcaaccggtcaggctggacgtgcacgcagcccggcgggaggataaagaccaccacgattggagctggagtgagccttccag

SEQ ID NO: 740910 - DNA, 75 bp, Homo sapiens
gtttccgcggagcggacccagcaatgacgattcaagtccagcatccagcggccaagtccatgatcgaaattagcc

SEQ ID NO: 740911 - DNA, 71 bp, Homo sapiens
gagtttccgatttaaagctgagctgcgaggaaaatggcggcgggaggccaagactaaggggctgcagagcg

SEQ ID NO: 740912 - DNA, 76 bp, Homo sapiens
tgaaggtccagtcattccaaatgaagagatgcctggaatataaatagtttctggaaaggacactgacaacttcaaa

SEQ ID NO: 740913 - DNA, 100 bp, Homo sapiens
agcttacgtctctgctcttcagtacaatcctaaaaaatgtgagcgctattggcctttgtatggagaagaccccataacgtttgcaccatttaaaatttct

SEQ ID NO: 740914 - DNA, 75 bp, Homo sapiens
cagatgtctgacagccctgtgtgacaccaagataagtaacatggatgacccctctgtgggccccaagatccccca

SEQ ID NO: 740915 - DNA, 71 bp, Homo sapiens
agtgtgtgaggcgcctttcaaaccggagggattggcaagtgcacttggaggctcctcagctcttcatatcc

SEQ ID NO: 740916 - DNA, 82 bp, Homo sapiens
caggggctgaatggacacaggtgtcagcagggccacctggtaaaggtatggaggggcaacaccctccactaaagagtcaagc

SEQ ID NO: 740917 - DNA, 100 bp, Homo sapiens
cagctgaagacccggccgcccagatgatgcggtggtgggggacctgccggcacgcgactccccccgggcccaaatctcggaagggtgctgacctggaccg

SEQ ID NO: 740918 - DNA, 100 bp, Homo sapiens
ctggtgtgctctctggtgatcaagatacagttacatcatgctgatgacagcttcctggtcctcaccacagatggaattaacttcatggtgaatagtcaag

SEQ ID NO: 740919 - DNA, 100 bp, Homo sapiens
tgctgctagttgatgatcgggcactacctgatttcaaaggtgatagaccattacaggacttgtcaaataccagttttgtttcaaataacactgctgaatc

SEQ ID NO: 740920 - DNA, 99 bp, Homo sapiens
agcctcaaactcccaggctcaagcaatcctaccatgtcagccttcccagtagctggaactacagagacaacccagaagccacccaacagatgaatgacc

SEQ ID NO: 740921 - DNA, 100 bp, Homo sapiens
taccttgtatgaagatggtaccctggatgatggtgaatacaaccccactgatgataggccttccagagcatgtcctttgcaacctgatcacacaaatgat

SEQ ID NO: 740922 - DNA, 74 bp, Homo sapiens
cagtatgaagtggtgaaggagtgtgtgcagcgcttcacttaaagagaggaaacttcttggtgctcaaagcaaag

SEQ ID NO: 740923 - DNA, 100 bp, Homo sapiens
ctgtaaccacctcacagattccagcttcggaacaagagaccctggagggcgtgtgaagacctggaagcgccggtggttcatcctgaccgataactgcctc

SEQ ID NO: 740924 - DNA, 95 bp, Homo sapiens
agcaaaccctgtatgagaagtggggagagtacaggtccctaatggtgcaggagcagcggctggtgcatgaactcttagctgtggaagaacatcat

SEQ ID NO: 740925 - DNA, 97 bp, Homo sapiens
cacccaagcctgagccggttcctgttcaaaaggggtggcctatgtatgcacagctactgattgatttattcaaatatttagcgcctttccttagaaa

SEQ ID NO: 740926 - DNA, 90 bp, Homo sapiens
gtataatctctttgcagtgaacggcattctcttcaatcatgagagtcccagaagagtgcacttgcaggaaagacatggtgaagatttcaa

SEQ ID NO: 740927 - DNA, 96 bp, Homo sapiens
cccacaacgcttgtgttcagaacccagatatcttcactcccaagtctacaggggatgaacgtagggcacttagcttcttccaccagaagggcctcc

SEQ ID NO: 740928 - DNA, 90 bp, Homo sapiens
ccgcgcgcgtcgccggcccagctctgtcgctgacgggaggatctgaagccggccgcagaggaaacctcggactttgctgaacccaccacc

SEQ ID NO: 740929 - DNA, 83 bp, Homo sapiens
cacctttccaaaggacgcgaccataactctaaaaggttttaaaatcaaagatgggaaaatcggagaaaattgcccttccccat

SEQ ID NO: 740930 - DNA, 100 bp, Homo sapiens
ctggataaccttttgctaacaaaaacagcttcttcctggagaagaatatgtttgttttcttcttgaacatcttgcggcaaaagtcgggccgttacgtgtg

SEQ ID NO: 740931 - DNA, 82 bp, Homo sapiens
tgcagatctgaagacctattttactgataagaaaacacatctttacacactaaccaagaaggatcaagaaggtggagaagaa

SEQ ID NO: 740932 - DNA, 100 bp, Homo sapiens
agaacgtgtactgcttgagaacagaatacattgctgattatctcatgcaggtagaagatgacagattattgaggttgtcccaaaagaagttctgtgctgg

SEQ ID NO: 740933 - DNA, 83 bp, Homo sapiens
tcatcaaaaatagtgatagctttgataagcagcaagctcattatgatgctatggataatgatatcgttcagggagcagaggac

SEQ ID NO: 740934 - DNA, 75 bp, Homo sapiens
gtcctgctccgtggtgctctatgaccccctggtgaccaggtggcctgtaggaaaccaagggctgctatatgaccg

SEQ ID NO: 740935 - DNA, 100 bp, Homo sapiens
agaactacatcaccgctctgcaggctgttcctcctcggttcacacaaaagatgttggacaatttctacaattttgcttcatcatttgctgtctctcaggc

SEQ ID NO: 740936 - DNA, 127 bp, Homo sapiens
atgaagagattaatggcagagtgcctcaaaaagaaaagagatgagagaccactctttccccaaggtcaaggtggaaggtccaaggactgagaaagaccctcgaaggcatccactttagtcctccatt

SEQ ID NO: 740937 - DNA, 98 bp, Homo sapiens
tttgatacgactgccataaacaaaagctattacaatgtgttagaacctggcccattagatgaaacccagatcgctactatattaagagaaatactgaa

SEQ ID NO: 740938 - DNA, 100 bp, Homo sapiens
tgcctacggaggtggcagccatctccttctcggtgttacagttcgagtgcctcaaacaaccacatatgttgtaaacaatggactaaccctgggatcaaca

SEQ ID NO: 740939 - DNA, 50 bp, Homo sapiens
aagaggatgatgtttttggtgaagtgcatgcaagatatgggaaatactaa

SEQ ID NO: 740940 - DNA, 90 bp, Homo sapiens
aaaaaccaacatcaagtcggcttccatgcatccctaccagcggttgttcccacagcctggaagtctcttccctgacttgttccacgatca

SEQ ID NO: 740941 - DNA, 90 bp, Homo sapiens
ccacaagatcgtcttctttaaaggaggtgtcctgtgggacctggagagccctcccgtgtgcctgactgtggggcccgggcctgtccgcac

SEQ ID NO: 740942 - DNA, 74 bp, Homo sapiens
tttggcaaagctggggattggccagctgactgctcaggaagtaaaatcggactgtaactcttgaccaggcaaca

SEQ ID NO: 740943 - DNA, 75 bp, Homo sapiens
caaagatgatatcaagagggtcatggcggcgatcgagaaagtgcgcaaatggaaggaagcagccaccctcgccat

SEQ ID NO: 740944 - DNA, 75 bp, Homo sapiens
ggtctaaacttgatccaaagacaatgaaggtacaaattctgagctgtctaacccctctgaaacggaatctgagcg

SEQ ID NO: 740945 - DNA, 100 bp, Homo sapiens
accagaaacatatctattatatcacagccaacagaatcctggatttgagtctgtcctttgaaagcatctctgctagagttcccacttccaaacccctttc

SEQ ID NO: 740946 - DNA, 75 bp, Homo sapiens
ccgcggctcctgagggatcggtctcagccgcgcggggcgtctctggccgagcctctttttgtggaaaacgacagc

SEQ ID NO: 740947 - DNA, 74 bp, Homo sapiens
aaaagtggtgcagtttttgatgaaattgtagagaactgtggagccgccaccaaaatgcagattttcgtgaaaac

SEQ ID NO: 740948 - DNA, 101 bp, Homo sapiens
catagaaatgcagttgcgaagagtattacatgatattagaaactcactgcagaatctttcacagtccatcaataaagccatggagaaagaccatgaagaat

SEQ ID NO: 740949 - DNA, 100 bp, Homo sapiens
ttccaagctctactgtgacttcagagacactgccaagcagccttagccctagtgtagagagagctgcttttgcacattttcctgaactctatgattttgc

SEQ ID NO: 740950 - DNA, 100 bp, Homo sapiens
ccacaacaagggccggattctcacccagtggaatgcagtagccctctgggcctgggatattgtggttgataactgtgccatctgcaggaaccacattatg

SEQ ID NO: 740951 - DNA, 90 bp, Homo sapiens
ttttggattacataaaccagtcacccaagtgcattgcctttggaaacgagatcacaaatcgggacaaaccgctgtcatttggtatttccc

SEQ ID NO: 740952 - DNA, 75 bp, Homo sapiens
cggcggcggcggcggcggcgcagcattgatatgaaccatggacaagtatattctgctgccacaaagactgtaaag

SEQ ID NO: 740953 - DNA, 100 bp, Homo sapiens
aagacgatctgcacttcgcattttggcattgacatttaattttagggtcctttatatagaagggagagtagactgcaggcaccacctgtgtgaaccggac

SEQ ID NO: 740954 - DNA, 74 bp, Homo sapiens
ccgcccggctgccgggagccgacagcttcgcgccggatcacaggttttcagatccagagagagtgaattacaag

SEQ ID NO: 740955 - DNA, 75 bp, Homo sapiens
ggagcagcccgcaccggacaacttgcgagccatggggctggcggatgcgtcgggcctcctgacaaggtgatccgg

SEQ ID NO: 740956 - DNA, 100 bp, Homo sapiens
acaacttatcagtagtgacttacagtaagatggataatgtgcttatggtgtaaccaggtttgagggaggcatatctcatgtgactgggagaagccaatca

SEQ ID NO: 740957 - DNA, 74 bp, Homo sapiens
aaaggagaaacaccagacactggaagtctcactgtctcgaactggaaatagcaaaggctatgcatttgtggagt

SEQ ID NO: 740958 - DNA, 100 bp, Homo sapiens
actccctattttagaggagcttcaccagcacacagagcagcttgtacaggatagctggaatggccttagtcatgaggcttttagacttgtttcaaggcgg

SEQ ID NO: 740959 - DNA, 95 bp, Homo sapiens
tgttttgctttcagaaagaggaatgcctcgacgtcgagaatttgtgatgcaggtgaagacattcagtgaagcttgcctgatggtaaggaaaccag

SEQ ID NO: 740960 - DNA, 98 bp, Homo sapiens
ttcagtcacaacagatgaagacagcaccaggttccaaatcatcaatgaagcaagtaagaacgttctcaggttgaccagctgctgaatatttctttaag

SEQ ID NO: 740961 - DNA, 90 bp, Homo sapiens
aagaaacaccagagaccttctacattgtataaatcaaagccattctgtgaaaaactgctttcctgggtgaaaagcagtggctgtgccaga

SEQ ID NO: 740962 - DNA, 83 bp, Homo sapiens
tcagggcccccaaactgtcacagaaagagctgttaacacttcctagataacggagttgatctctctaatgtattagatcttca

SEQ ID NO: 740963 - DNA, 100 bp, Homo sapiens
ccgtgctgaagccgctggagtacagccagtatgaagtgcgcgattccctcccaggctgtccctcgccgccttgctacagcccccaagactgaaaaacctc

SEQ ID NO: 740964 - DNA, 87 bp, Homo sapiens
cgattttaccttggataccctgctttggatagaccacatggtacaaggccatgctgcttttccagaactacaagtaaaggccacagc

SEQ ID NO: 740965 - DNA, 87 bp, Homo sapiens
ctacttcaaggataagggcgacagcaacagctctgccggctggaagggcgtgatggtgggcatgggtcagaaggattcctatgtggg

SEQ ID NO: 740966 - DNA, 51 bp, Homo sapiens
ctggatgcgtccggactcctgcagaccactctggctcacatcatagccagc

SEQ ID NO: 740967 - DNA, 100 bp, Homo sapiens
ctccgccactgcgcacattttgcagcctgcaccggccaacggatttggaatgccctgacagataattatgggaatgtgatgcctgtagactggaagtcat

SEQ ID NO: 740968 - DNA, 90 bp, Homo sapiens
cttgctcagtctctgtcagaggaagatcccttggagtgtgaggaagaggctgtctgtgtcattatgtgtgcgtcggtcaagtataatatc

SEQ ID NO: 740969 - DNA, 100 bp, Homo sapiens
aggagactggatgatagaattgtagattttcgttccgtcacccaggctggagtgcagtggtgtgaccttggcttgctgcaaccctttgcctcctgggttc

SEQ ID NO: 740970 - DNA, 90 bp, Homo sapiens
ttcgcagtggtcgcttcttctccttgagaagaagttcgtgccccaattcctcaaaagcaggaaatactggtggaaccagaaccattattt

SEQ ID NO: 740971 - DNA, 90 bp, Homo sapiens
gcttcaggctcgctccgtgcggaaaccccatttcatttcactttgcctaaagaaggtgatatcatcccaccattgactggtgcaacccca

SEQ ID NO: 740972 - DNA, 74 bp, Homo sapiens
gacccaggagtttctgtctgcctgcaagtcgctgcagacccgtcagaggagaattctgcctaagccaactcgaa

SEQ ID NO: 740973 - DNA, 75 bp, Homo sapiens
ccgccaccgccacctgcgcggcagtcatcaaggtctcctaaaaacccagaacagaagatcattaagagagtgatt

SEQ ID NO: 740974 - DNA, 100 bp, Homo sapiens
atcaatatttgaggaatgagaaaggaagaaaagcctcccacaaaagagatgagacaagaggaatggttacacagggaagagcaagaagagacgtctgcaa

SEQ ID NO: 740975 - DNA, 73 bp, Homo sapiens
gaacaccatctcgccaccgcagctacgaacggagcagccagaagatacctgaaattcctgcagatgttgtggg

SEQ ID NO: 740976 - DNA, 102 bp, Homo sapiens
atgaaccgtgcactggaccaggtgctgggccgcttcttcctctaccacatccacctgtggatcattggattggatgctgctggcaagacaaccattctgtat

SEQ ID NO: 740977 - DNA, 60 bp, Homo sapiens
cggagagttctgcatgttgattcgatgtggggcaatcaagttggggatgaaggagcaaaa

SEQ ID NO: 740978 - DNA, 75 bp, Homo sapiens
ctcccttcggggagagaacaaccgttgtttaatggaagatttcgatcagttaggtggtggacttgctttgtgaag

SEQ ID NO: 740979 - DNA, 100 bp, Homo sapiens
ctactgtgacttcagagacactgccaagcagccttagccctagtgtagagggcgcaaccatgtcgccatttcttcggattggcttgtccaactttgactg

SEQ ID NO: 740980 - DNA, 89 bp, Homo sapiens
gccccgccgtcgccccgccgcgccgcgctccaaccgcctcctcctcctcagtaacgcggagtggagcctttcaggctggcatggagagc

SEQ ID NO: 740981 - DNA, 100 bp, Homo sapiens
caacttatgcaagaaactgttgaattagacccgtttcctatagatgagaaaccatacaagctgtggatggagggtacagagtctgcctacatcagctcct

SEQ ID NO: 740982 - DNA, 50 bp, Homo sapiens
gggaacgcagctgaaagcgtgaacttgttgctaacaaccacaagcagaat

SEQ ID NO: 740983 - DNA, 100 bp, Homo sapiens
ccgtccccagccctgagcggttcttcatgcccctgtacaagggctgcagcggagacttcaaggtgaagggcccatttgtcacctggcaggtggtacggga

SEQ ID NO: 740984 - DNA, 98 bp, Homo sapiens
agcactcagctctccaatctgggaagcaccgagactctagaagaaatgccctccgggtcacaggataagctcccctcccacccggtcactccgtccag

SEQ ID NO: 740985 - DNA, 75 bp, Homo sapiens
gcggggcagttcgggccggctgtcctggcgcggacaagcatgctaaaggcacaccaagtgactacaagaaattta

SEQ ID NO: 740986 - DNA, 99 bp, Homo sapiens
gggctgctgcagctccgcctcctccgccgcgcaggtgaggaattttaaattggaacaagagcaagaaaaaaacaaaatcttgtcagaagcactggagac

SEQ ID NO: 740987 - DNA, 80 bp, Homo sapiens
catgagatgcaggaccttggggacaagctgcgcatgatcgtcatgggacacagaagatggccgccctgctcccccaatga

SEQ ID NO: 740988 - DNA, 75 bp, Homo sapiens
ttctcttcttctgaaaaagagatcttgtaatggcaacgttgcagctaccagccactaatttggccaacttggcaa

SEQ ID NO: 740989 - DNA, 101 bp, Homo sapiens
gcatagcagaaacctacggtcgtatagaaaaacaaccagtgctgcgacccttggaactaaaaacttttctcaaagttggtgacttcatggtcatgacgatt

SEQ ID NO: 740990 - DNA, 98 bp, Homo sapiens
catggagggacctgtgaggccacagcaggatcacccctgggtttcatctgccactgccccaaggatgaccggaaagaagggatgaccgcgtttgtgga

SEQ ID NO: 740991 - DNA, 100 bp, Homo sapiens
aggacgaaggccctactgggcaagaagaagctcattcacacagaagacccatttaatgatgaacatcaggagaggcaagaggtggaaatgttggctaaga

SEQ ID NO: 740992 - DNA, 75 bp, Homo sapiens
gtctgaaggaagaaaggaaaattctggaaaacgcccagagatttaatcagtcagagcaccataacatggtgtggg

SEQ ID NO: 740993 - DNA, 82 bp, Homo sapiens
gggcacggcatcgggggcctggactgcacggcccggcagcaggaaatgcttgacatcatgaagtccatctatgacatgatgg

SEQ ID NO: 740994 - DNA, 75 bp, Homo sapiens
gccggcctagcgtcctggaattacttcaatcaaggcaatcatgactcatgcatcagttcttaagaatgacagaga

SEQ ID NO: 740995 - DNA, 100 bp, Homo sapiens
ctcccttcatgtctgggtcatggatgaagatttgataaagtggaaggcactgtttgaggaagtccctgagttactcactgaggcagagaagaaggaatgg

SEQ ID NO: 740996 - DNA, 101 bp, Homo sapiens
tgtgctgagcgttctaaaggaaggcgtccgttggccttcgtacccgtcttgattgagggaaggtggccatccagaaggaggacttgcagaagtaccacaac

SEQ ID NO: 740997 - DNA, 74 bp, Homo sapiens
tcgacaactgctttgcctcaaactcagctttctaccagcagacagaagttcaccatgtctattctcaagatcca

SEQ ID NO: 740998 - DNA, 100 bp, Homo sapiens
gagagcctcggacgtggtgcttggcttcgccgagttggaaggttaaacccatccagagtaatggctgcggccttacccaggaccctgggggagttgcagc

SEQ ID NO: 740999 - DNA, 97 bp, Homo sapiens
agaagaacaagccagaaaaacatttgagagagccatgaaactggaacaggagtttactgaacatttcacaggccagtgaagaagcaaaggaagacat

SEQ ID NO: 741000 - DNA, 75 bp, Homo sapiens
tctactgctcctacttcctgtggttcgagaatgacatgttatctccagaagaagaagagaaaaggagaatccgaa

SEQ ID NO: 741001 - DNA, 90 bp, Homo sapiens
atattcagcaacacttcctcctctctgaccggttggccaggcctcgaaggagctccagcaagcccagacaaccagaccagaatcgacaca

SEQ ID NO: 741002 - DNA, 75 bp, Homo sapiens
gaaccatgtgactttgtcacagcccaagatagttaagtggggatgagaacaagttgagcagtgccaacggccatg

SEQ ID NO: 741003 - DNA, 82 bp, Homo sapiens
cacccaggcgactgcctcatcttcaaggtgacttaagagattaaaattaatttggttgctgttggttctgaacaaataatga

SEQ ID NO: 741004 - DNA, 98 bp, Homo sapiens
tcgcttgaaaagactgggcttgtccttgctggtgcatgcgtcgtcggcctctgggcagcaggatttttacctcctataactccaccagaaaagttttt

SEQ ID NO: 741005 - DNA, 83 bp, Homo sapiens
gcgaccctcccagaccggccgctctcccctcctctcacggcacctcccaccatgaagagccaacacagatctatagatttctt

SEQ ID NO: 741006 - DNA, 100 bp, Homo sapiens
tgagccaggccgaccccgacccggactcggacaagctgaaaatgtgtgtctgacatgcaagctcagtggggcagagacccgtggattgctgtgccctgcc

SEQ ID NO: 741007 - DNA, 100 bp, Homo sapiens
aggtattatgacagtcgacctggagggtatggatatggatatggacgttccagagactataatggcagacaatgattgaagctcacgttgatgtcaagac

SEQ ID NO: 741008 - DNA, 100 bp, Homo sapiens
tctacttcttccagagtatggaatgggatgttggaagtgattatgccatctttaaatctcaggacttctgaagagagccttagatcgtctgtcagtgaag

SEQ ID NO: 741009 - DNA, 96 bp, Homo sapiens
ttattggcaatagcatcatcattgtttgtggcattccagttaagagcacaacattttcaagaaaattcaaggaagtcctggctgagcaaggttgga

SEQ ID NO: 741010 - DNA, 98 bp, Homo sapiens
ctccactgggacaagatgtggaggaggacaatgatattgatgatcctgaccccgtatgtagccatagctgtaacgtataaccatgatgggtcttatag

SEQ ID NO: 741011 - DNA, 51 bp, Homo sapiens
ggcagtttggggaagtatggatgggttactataacaacagtaccaaggtgg

SEQ ID NO: 741012 - DNA, 76 bp, Homo sapiens
cagaagaggactgatcatttcttgcagctctaaaaaccatggctcggatttggaatccagatatgacactaaaaag

SEQ ID NO: 741013 - DNA, 75 bp, Homo sapiens
acggcgccgccctggccaccgcgcgcgcctcgccccggcagggtttcaagtgccccatttgctccaagtctgtgg

SEQ ID NO: 741014 - DNA, 75 bp, Homo sapiens
actacctggcattgccttttgttgaggtacagccatagtgctgaagttcaagttcgtcttcaattcttgacttgt

SEQ ID NO: 741015 - DNA, 50 bp, Homo sapiens
aagggctccacacaccaagaccaagggctcccgcactggcgcttgcctcc

SEQ ID NO: 741016 - DNA, 82 bp, Homo sapiens
ctggctctgggccttgaacattccgaaactgtcaagattggcaagctgggtccatggctggcagtggaaatccctgatctga

SEQ ID NO: 741017 - DNA, 100 bp, Homo sapiens
atgttttctcctgatcaagaaaatcatccatctaaagcaccagtaaaatatggtgaactcattgtcttagggtgctaaaatgatgtattttctggacaag

SEQ ID NO: 741018 - DNA, 98 bp, Homo sapiens
agaaacatcagttgaaacatagggaactctttttgtcacgccagtatgaatctctgcccgcaacacatatcagtgatgactcgtggcactgcctccag

SEQ ID NO: 741019 - DNA, 95 bp, Homo sapiens
tccggggaaagccgtggccccgagggcggatccgagattacttctctaacaggatcaccagtttgctccacaaagcacaatgtctcgatcacgac

SEQ ID NO: 741020 - DNA, 83 bp, Homo sapiens
gcgcggcggggctgaggcggccgcggggcccgagcgcagagcccactgcggaagagggcagcccggcaagcccgggccctgag

SEQ ID NO: 741021 - DNA, 76 bp, Homo sapiens
ccttcatgagaggcgagcacaactcgacctcctatgactctgcagttagacatggatttgattgacatactttgga

SEQ ID NO: 741022 - DNA, 82 bp, Homo sapiens
aaacttgacactcaccctgaccggtcagcccaaggccaaccccactgtcactctgttcccgccctcctctgaggagctccaa

SEQ ID NO: 741023 - DNA, 100 bp, Homo sapiens
catcaaagctttgcgcaacgccaacctcaggcgagatggttacaggaaatacaggaggcagaggaacaaataaaagacaccacgagaaacagacacatcc

SEQ ID NO: 741024 - DNA, 100 bp, Homo sapiens
cctgaagtctttacaacatatattagtctacttgctgacacaaagctggatctacatttaaaggaccctgatgcttggtgtgacctgagtaaatttgacc

SEQ ID NO: 741025 - DNA, 100 bp, Homo sapiens
ttcccagccgcgcggcttcctccagacctctcggcgcggaaatatggctacacacacctttctgcaggagagctgcttcgtgatgaaaggaagaacccag

SEQ ID NO: 741026 - DNA, 100 bp, Homo sapiens
gaagttcttcaagaggaaacccaaagtccttgggagaaagcatgggattatggcaaccacagaatctcagtagtacaagttccattcagttttttctgaa

SEQ ID NO: 741027 - DNA, 88 bp, Homo sapiens
aaacatcatgtcaacagaacatgatacaggagcttatagaaactaatcaacagcttaggacatgaacaagctgagtggaggcggcggg

SEQ ID NO: 741028 - DNA, 100 bp, Homo sapiens
acgatctctcaaaattggtcaactatcctggttttaatatatctactcccagaggaattccagacacaagctgtaacccttcacgtgccttaccttcact

SEQ ID NO: 741029 - DNA, 90 bp, Homo sapiens
tgagaaccttctggtgtctggtctgcagcagatacctggcctgcttccagctcatggagaatccggttatgaagacagtatggagtttcc

SEQ ID NO: 741030 - DNA, 100 bp, Homo sapiens
attttacatgtatgagattctgaagatattgaagtattgccaagatatgagacttcgaaaatgtggctcacagttgcagacagaacaactgttgtttaac

SEQ ID NO: 741031 - DNA, 75 bp, Homo sapiens
aggtgagactttcacaataagagcagaggatggaacacttcagtgcattcaagatactttggtgttgaacatttg

SEQ ID NO: 741032 - DNA, 100 bp, Homo sapiens
gcattatgaacgaattctcaacccctacaacttattcctgtccggagacagcctaagggaggtcccaggtgattgaaaagtttgaggccttggacattga

SEQ ID NO: 741033 - DNA, 101 bp, Homo sapiens
gccgcccaggagacccctctgctgcaccacttcatggtgctggcccagcagggggagtacagtgaggccatccccatcctgagggcagccctgaagctgga

SEQ ID NO: 741034 - DNA, 50 bp, Homo sapiens
ggtgggagtgacccgattttccaggtggagagagaacctgtggagtacat

SEQ ID NO: 741035 - DNA, 100 bp, Homo sapiens
ctggcggacatcactttagaccctccacctaattgcagtgaatctaacattataagcatttggaataatgggaaaggcattccagtagtagaacacaagg

SEQ ID NO: 741036 - DNA, 138 bp, Homo sapiens
ctacaaacagttacagtgaactctatagattctgctggtatacagctacatccaggagagaatgctgacagtcctgcagagagctagcaatctagagaatagtacctatgacctgtacaccatccctaaagatgctga

SEQ ID NO: 741037 - DNA, 111 bp, Homo sapiens
gcgagcacagagcctcgcctttgccgatccgccgcccgtccacacccgccgccaggttaacacagaaatctgcctcctgggccatgccgcttctaaggcctgtttcttctc

SEQ ID NO: 741038 - DNA, 100 bp, Homo sapiens
ataacttctatgtgattgatcaaggagagacggatgatgaggattttgtgggtcgggatgattttgatgatgctgaccagctgaggataggaaatgatgg

SEQ ID NO: 741039 - DNA, 100 bp, Homo sapiens
cccagaattttttctgtgccggctgtggaactccagtagagcctagtattcctggagtggagagccactctttttgacctgccctacatcagaagtcacc

SEQ ID NO: 741040 - DNA, 74 bp, Homo sapiens
ggacagcacgcctgccctcacacccacggaggtatctcccaataagtcaccccagattcgttcgaaccatcccg

SEQ ID NO: 741041 - DNA, 100 bp, Homo sapiens
tggctcagccgcaagtacccgtccatcatagtcaactgcgtggaagagaagcttcagtatcagacacagcacagcagccatctgaagagcaaagcaagtc

SEQ ID NO: 741042 - DNA, 101 bp, Homo sapiens
tcggattcttcgcctcaaagagagacatggcttaataagggccaggctggcaggagcacagaatgcaacagacatgccaccactgctctttgaggtgtcat

SEQ ID NO: 741043 - DNA, 82 bp, Homo sapiens
ctatgaagagtgtccttctggaattcccatagatatgtggaatgtagaagaagtatgtcttcctggaccccctggctggtgc

SEQ ID NO: 741044 - DNA, 100 bp, Homo sapiens
cagcgccattggcctctttggggtcatcgtcgcaattcttcagctttgtgtccctggtgatgttggaacattaatgatggaacatggccaaacttcagtc

SEQ ID NO: 741045 - DNA, 107 bp, Homo sapiens
tgcttcccatcgaagctctagaaatgaatgtttccatctcttcagagatgaaccaggtgagaagccctaccactgcaactgggacggctgcggctggaagtttgcgc

SEQ ID NO: 741046 - DNA, 82 bp, Homo sapiens
gatggcggatgccctgcagtacctgcagaaggtctctggagacatcttcagcagtggtatgtgtgcaacagagagaaattat

SEQ ID NO: 741047 - DNA, 100 bp, Homo sapiens
actgctgcctccagctagttatttcgtcctcttccgttcttcacccctacaccttggagagcagtgaggagaatgaataccttccaagaccagagtggca

SEQ ID NO: 741048 - DNA, 90 bp, Homo sapiens
tccctgtgacctgtggagacacggccagatctgccctccactgaagatgcttgtggaggaacaatgagaggatccagtggcatcatatcc

SEQ ID NO: 741049 - DNA, 75 bp, Homo sapiens
tggcggtgcccgaggagtagtcgctggagtccgcgcctccctgggaagctcttcgtgggcggtcttgactggagc

SEQ ID NO: 741050 - DNA, 75 bp, Homo sapiens
acaggaactgtggacagtgaagagaggcctctcccaaagcacctgcgcagagcaaacatgaacgttggagttgcc

SEQ ID NO: 741051 - DNA, 75 bp, Homo sapiens
aacagctgcataatgaaatgcagttaaaagatgaaatggagcagaagtgcaggtttggaataccttgtagcagga

SEQ ID NO: 741052 - DNA, 100 bp, Homo sapiens
aggagcaggcacctggccaggcttggaagaaaaagactgtagatccaaaatgatacggaacgggattttccaacagaaaccattaaatttggtcctgaac

SEQ ID NO: 741053 - DNA, 88 bp, Homo sapiens
accgctgctggcagttttgccaggtgtttgttaccttgatttcaggtatgctgctgaaagtgggaatcctctacattggtgggcagct

SEQ ID NO: 741054 - DNA, 82 bp, Homo sapiens
atgaagctccttccaacctcagccaagcttccaccttgcaggccaaccgagaaggctgaggcctccgtagaagacagcgcct

SEQ ID NO: 741055 - DNA, 75 bp, Homo sapiens
aaaaaaattgcaagagagagactattttcgttattacaaggtgatctgcaactctttcaccatctgtaatgcgga

SEQ ID NO: 741056 - DNA, 89 bp, Homo sapiens
ttcagaaggaacttgcagaaatcacattggaccctcctcccaactgtagagccctggaaaccaacaggtataaccatatcacagccaca

SEQ ID NO: 741057 - DNA, 81 bp, Homo sapiens
gtgtttcgaaaatgtgtgtgaattggatttgatcttccatatggataagaactacctgaagaagcaggtcacacccctctt

SEQ ID NO: 741058 - DNA, 136 bp, Homo sapiens
tgctcttgaagaagattttgatattttatcagtttacgatggacagcctcaacaagggaatttaaaagtgaggtacctgtgccgggtggaggagatgcgccagtccctgagaattatcgcacagtgtctaaacaag

SEQ ID NO: 741059 - DNA, 97 bp, Homo sapiens
gattctacccaagtacatatgatttcagctgcaatggcaggaatttatctcactaatatcttgaaaacagaagaaggcaaccctgaggtcctaaaaa

SEQ ID NO: 741060 - DNA, 95 bp, Homo sapiens
tttgatacaaacaactgccttggggatcaaaaactagttgagaggcttcatatgcccccttacccaggaatggaacaacctccacaccatcctta

SEQ ID NO: 741061 - DNA, 100 bp, Homo sapiens
ggcccaggtgtcatcgaccttactcggccagaagatgcagagggtgacagcagagctagacgcctggaatgaagacttgcttcggcagatgaatgacttc

SEQ ID NO: 741062 - DNA, 90 bp, Homo sapiens
cagagagagctgctggaacagcactatgcccagtatgatgccgacgatgacgaggtgtggatgaggtcaccattgtcaacattttgacca

SEQ ID NO: 741063 - DNA, 96 bp, Homo sapiens
gacagaacagttttatagaaagcttttaaacaagcatggaattaaaaccgtttctcaggtaaaactgccattcaatgcacaacggataatttcact

SEQ ID NO: 741064 - DNA, 100 bp, Homo sapiens
ggagacgctgcaccagaatagcatcacgctggttgaactcatggacctgatacttttctcttgagaagcaaaccagcccaaaagaaaaatggcgtttgtt

SEQ ID NO: 741065 - DNA, 98 bp, Homo sapiens
gcggattagccttcgcggggcaaaatgagagaagggccgtaaggagagagagtccctgcagcagatggccgaggtcacccgcgaagggttccgtctga

SEQ ID NO: 741066 - DNA, 75 bp, Homo sapiens
gtcggcggcccctgcgggcgccagtcagggggacttgatctcatcttcatgccaggccttgggtttgacaaacat

SEQ ID NO: 741067 - DNA, 100 bp, Homo sapiens
tggactatggcatctatgttatcaaccaggcaatcttgtgtcgttataatgaggagagtcaaaaacatgcagccttaagcctcagcaaagagcataatcc

SEQ ID NO: 741068 - DNA, 83 bp, Homo sapiens
cctcaccgcgcccgtggccgccgtgcaggcggccgtcagcaacctcgtccgggtcatcatcagatttgaaatatttaaagtgg

SEQ ID NO: 741069 - DNA, 101 bp, Homo sapiens
gacacaagaatcatgtgacgtatctccagtattgacacaggcaatggaagccctgcaggacagacctgtcttatataagccataaagaatgctgatgggag

SEQ ID NO: 741070 - DNA, 101 bp, Homo sapiens
gagaaattccaagttcagattctccaggccaagtctctgaatctctgacctttagaagaaaatgaagactctgccggggtccagcctgtctcctgcataac

SEQ ID NO: 741071 - DNA, 100 bp, Homo sapiens
ggctctggaattgctactgctgcctctgtcactcctggtgaccagcattcaaggggaatcccggaggcaagacacttgaggagaggcgctccagcctgga

SEQ ID NO: 741072 - DNA, 82 bp, Homo sapiens
ccagagtcagctcccctttctcgcccagcgcccccaggccgctcccggggctcacggtggattgctcaggtaatgacctgga

SEQ ID NO: 741073 - DNA, 90 bp, Homo sapiens
caaatatgaccacactacagcctgtacacaacaagacagtttatcttgtccatggggtctataagaaggagaaagctcgagtcatcactg

SEQ ID NO: 741074 - DNA, 75 bp, Homo sapiens
aaatggctctgtcggtgtaaaaaaagtcactcaagggaaaggattaatgccagatggtaccagcagatttacttg

SEQ ID NO: 741075 - DNA, 73 bp, Homo sapiens
ttatggtgggaggagccgatactgagcttcttcctatttgccatggagctggaagtcgagtgtgctactcaac

SEQ ID NO: 741076 - DNA, 100 bp, Homo sapiens
ttccccgcggccttcgcgccccaggcttcgcggggctacatgacatcagggtgaccatcgggatgaggaggaagagacccacatgaagaagtcagagtcg

SEQ ID NO: 741077 - DNA, 100 bp, Homo sapiens
gacagccaggcccgggagaagttttgagtttgatcgatggctgaatacccccggctggcccccgtacctccctgatctctcccctggggactcactcatg

SEQ ID NO: 741078 - DNA, 100 bp, Homo sapiens
attttctactgtccctgcgcgaggtacctgcaccagtcaggggccctgaccatggaggccctggaggacccttcccccgagctcatggagggcccagagg

SEQ ID NO: 741079 - DNA, 97 bp, Homo sapiens
ccacctgcctttgacctttttgaagcctttgcaaaaagtgcagcagctgccccgagccccgtgcttggcaacattccccccaacgatgggatgccgg

SEQ ID NO: 741080 - DNA, 50 bp, Homo sapiens
gctctgcactgggcagcatacatggggtggagagattcaaccagttagcg

SEQ ID NO: 741081 - DNA, 100 bp, Homo sapiens
ctttcggccttcgccgtccaccaggtccctctctctgtccccggccgccatggagcagccgccggcgcctaagaggtcccagagaactacttctatgtgc

SEQ ID NO: 741082 - DNA, 96 bp, Homo sapiens
ccgcctggccctggagaactacatcaccgctctgcaggctgttcctcctcggaaattgcaggtgctgcagtgtctgaaatttccgggcctttctca

SEQ ID NO: 741083 - DNA, 51 bp, Homo sapiens
aaacctgtgtaccatgcactgagagcccttcttggagctggctttacagag

SEQ ID NO: 741084 - DNA, 100 bp, Homo sapiens
ggtggcagagaccccagacatcaagctctttgggaagtggagcaccgatgatgtgcagatcaatgacatttccctgcagcaaaccagtccagctacgggg

SEQ ID NO: 741085 - DNA, 83 bp, Homo sapiens
atcacccgggtcgctgttcctgaggagcgagcccagggcgtggtgctgaaagtgctcacaaacttcaagagcagtgagattga

SEQ ID NO: 741086 - DNA, 82 bp, Homo sapiens
atttccatcaaaaagtgattaagcagagaatggagaagaaggttgattccaggcaggatgtagccaatcaaatgtgcaccaa

SEQ ID NO: 741087 - DNA, 100 bp, Homo sapiens
tggagtgggcgcggaggcgaccgccatggcgttcctcaaactccgtgaccagcggagctccctgggtcctcagcagtgaggctggcctccctgcgtgacc

SEQ ID NO: 741088 - DNA, 51 bp, Homo sapiens
attgaatgggttgaacttttcacaggttccaatcgttgcacttactgctac

SEQ ID NO: 741089 - DNA, 83 bp, Homo sapiens
caaactccctggtctctgttggtgtagaagccaaaatcagcttcagaggatgattccgaagaagacggagaccataacaggac

SEQ ID NO: 741090 - DNA, 88 bp, Homo sapiens
ctgctggctgcttccagtgttcgccgagaggggaacgcccttttgcttgtgactggcagggctgcgacaagaagttcgcccgctccga

SEQ ID NO: 741091 - DNA, 98 bp, Homo sapiens
tcaaccagagcctttcatcctcaaactggattgcctcttctttcaagccctcttgcaagaaaatatgatttcctcataatagaagatgatccttacta

SEQ ID NO: 741092 - DNA, 75 bp, Homo sapiens
ctgcagtacctgcagaaggtctctggagacatcttcagcaggtgctggacgtcattgctcctccttatacctctg

SEQ ID NO: 741093 - DNA, 90 bp, Homo sapiens
aaggcgcctgaagaggacgaagccctgggcgctgcctatggcacagccaagagcggtaccggcattgcggccatgtctgtcatgcggccg

SEQ ID NO: 741094 - DNA, 90 bp, Homo sapiens
ggagctcagcagttgatggatatggttaggtgtcagcagcggattatgacttacaggtaggcattgtagaagctttgtgtagaatgacca

SEQ ID NO: 741095 - DNA, 50 bp, Homo sapiens
aatgctaacaacagcttcacggtaagaagtttgatagctgtaggactggg

SEQ ID NO: 741096 - DNA, 98 bp, Homo sapiens
ctcaaggcctctccaccatgcttgccaacctcttctccatgaggtcattcataaaggaaagcacccaacaaacctgcaactcagaagccaaatgagac

SEQ ID NO: 741097 - DNA, 100 bp, Homo sapiens
ctctctcctgatacagcaggcgctcaccatgttccctggagggaacggcaggagcagctgatgggatatcggaagagagggccgaagcccaaaccgctag

SEQ ID NO: 741098 - DNA, 80 bp, Homo sapiens
aggaacatgtggctgctcccagctctactccttctctgcctctcaggcacacaaactgcagtctcagaatggacaaccac

SEQ ID NO: 741099 - DNA, 100 bp, Homo sapiens
gggagccgcaccacctaacgctggccgacaacagcctggcgtccgccacggcctcgctcgccatgggggaggtggagatctcggccctggcctacgtgaa

SEQ ID NO: 741100 - DNA, 97 bp, Homo sapiens
tctggctgcagctctgcggggcgcaggaggcggtgcacagcgccaaggttatgaagacagtatggagtttccagaccatagtagacatttgctacag

SEQ ID NO: 741101 - DNA, 100 bp, Homo sapiens
tgagggaaaagcgaggcaaggcaggcgggtattgccatcagagagtcagcaaaggtagttgaccaagctcaaaggagagtgttgaggggagttgatgacc

SEQ ID NO: 741102 - DNA, 83 bp, Homo sapiens
gaaaacctgccaatcaagatgagtatggatatgctttcttcatcagcaagcagtcctgctcctgatcccgcccctgaacctga

SEQ ID NO: 741103 - DNA, 88 bp, Homo sapiens
cttgaaataaagccagatgagttggcaaagaaaagaggcccagagcaagagaggcatcctcaccctgaagtaccccatcgagcacggc

SEQ ID NO: 741104 - DNA, 83 bp, Homo sapiens
caggagaaaatacggcattgctaggaacattaatcctgatgttctttttgaagtacacaactataatataaccacagtggaaa

SEQ ID NO: 741105 - DNA, 90 bp, Homo sapiens
cgtgcgagagactcacgggacgcgacgcgccccgcctcccccgtccggtccctctctccacgaaatgttttagcaagtgcatcagctgac

SEQ ID NO: 741106 - DNA, 75 bp, Homo sapiens
gtcaaaggagagcacaaccatcgcagttggaagcccatggggcagggagaagaagaagttgagcaagtccctgca

SEQ ID NO: 741107 - DNA, 82 bp, Homo sapiens
cgccgccgctgctgccgccgccgcccgcgaagccggagctcgagccgcagcggacaatgcagatcttcgtgaagactctgac

SEQ ID NO: 741108 - DNA, 100 bp, Homo sapiens
aaaacgaagaggaaacagaaattatgagtaagcagcggaagttggttctctacttaaaagacaatgactactgatgaaggtgccaagaacaatgaagaaa

SEQ ID NO: 741109 - DNA, 75 bp, Homo sapiens
aaaaagaagaggaaaaaccctgatctgggattttcagatccccgtcgaggtcaagatcaagatccaggtctattt

SEQ ID NO: 741110 - DNA, 100 bp, Homo sapiens
ggaaccaaaaaagacaaggaaaaggacaaggggaaatggaaggggcctccagggtctgcagacaaggcaggaaatatccgcgcaagatgttgacgttgca

SEQ ID NO: 741111 - DNA, 83 bp, Homo sapiens
aagagctcgtggcgtgcgacaacgcggcgcagaagtccccttcccctgagcccatctacaatagcgaggggaagcggcttaac

SEQ ID NO: 741112 - DNA, 75 bp, Homo sapiens
aataaagctgctgtttttgaagaggttttgcgtgtgaagctgtgtggaaatgtgaaatactaccagtcacaccat

SEQ ID NO: 741113 - DNA, 101 bp, Homo sapiens
ctcctccgcctcctcctctcccgcgggcaccgaggactccgctcctgcccaggtcttgatttcccagttaaagatgttcttcacccgaatgcagtctttcc

SEQ ID NO: 741114 - DNA, 82 bp, Homo sapiens
acaagccgacagcacctgttctatggacagtatgaaggcaaagtcagatgccagaggaacaagcattctgtgttttggtgaa

SEQ ID NO: 741115 - DNA, 50 bp, Homo sapiens
aggttcttcagtgtatgcctggaatcaagagagacccggccaaggctttt

SEQ ID NO: 741116 - DNA, 102 bp, Homo sapiens
ctctgctctcactggcattcctcttcccctcatcaaggattctcaaagaccaggtgcccacttaactgtgaaaaagatatttgttggtggcattaaagaaga

SEQ ID NO: 741117 - DNA, 82 bp, Homo sapiens
gtgggatttggatgtgggatccggttccttggtgtcatccagccttagcaaaccagaggcagctaatccaggttgctccctg

SEQ ID NO: 741118 - DNA, 82 bp, Homo sapiens
gcacccaggcgactgcctcatcttcaagctgcatcttcctcccgtgaggctggccgagctccacgctgatctgaagatacag

SEQ ID NO: 741119 - DNA, 75 bp, Homo sapiens
gcgagtgaggaaaggaggtactgtagggcccagtcctatgcggagagactgcgtctgggtttggccgtcattcac

SEQ ID NO: 741120 - DNA, 75 bp, Homo sapiens
acatggccacctgggacgaaaaggagtccttcaataatgttaaacagtggctgcaggaaatagatcgttatgcca

SEQ ID NO: 741121 - DNA, 100 bp, Homo sapiens
gcattgtcccagatatagccgttggtacaaaggtgagaagccctaccactgcaactgggacggctgcggctggaagtttgcgcgctcagacgagctcacg

SEQ ID NO: 741122 - DNA, 75 bp, Homo sapiens
cgggcccccaggcatggctagctcgaccatggtgaatccgggcagcagctcgcagccgcccccggtgacggccgg

SEQ ID NO: 741123 - DNA, 96 bp, Homo sapiens
atcagtgtttgggaatgattctgatgatgatgatgaggaagcacaagcctatgcagacgacaacagtttgctgttcatggagacatcagcaaagac

SEQ ID NO: 741124 - DNA, 78 bp, Homo sapiens
atgattatgaggcatgggcaaaacttgatgtggagtacttgattcttcagaaaacctccaaagtagatgtggactcaa

SEQ ID NO: 741125 - DNA, 100 bp, Homo sapiens
gcaatggctcagcgggctctgaacacagcatcaatggcaggaggtttcctgttgaggatactagttccacacgtgctcccgggaaaaccctgccagaaat

SEQ ID NO: 741126 - DNA, 100 bp, Homo sapiens
acgcgcttctgcaatccaagccgactgatgactggagaggatggctactatttcaccaatctgaagtaccagcaggtggatgaggagtttctgaggagtg

SEQ ID NO: 741127 - DNA, 100 bp, Homo sapiens
gggcgacctgcaggcagcaccggaggcccaggtctccgtgcagcccaacttccagcaggacaaggattggaatacttttctgctacggttcaatgatttg

SEQ ID NO: 741128 - DNA, 75 bp, Homo sapiens
ctactctctctttctggcctggaggctatccagctctctggaatctgttctgcgccacccggcagataatcgcac

SEQ ID NO: 741129 - DNA, 100 bp, Homo sapiens
cgtgcacgaggcttgggctgggatgttgaaggaggaggacgatgacacagaacgcttgcccagcaaatgcgaaggtttgtttctgcgtcacatgatcttg

SEQ ID NO: 741130 - DNA, 100 bp, Homo sapiens
gtggacaagatcatgggcaaaggacagatccagattggctcacagtggttgattgatcaaccccattggacgttggttctgtggtacaaatggagtacag

SEQ ID NO: 741131 - DNA, 101 bp, Homo sapiens
ggccttgaatggcaactgatacataataagacacaatctattctgctgattcacaattatggagactgtatggaccacacatccccgacctacatgcttgc

SEQ ID NO: 741132 - DNA, 83 bp, Homo sapiens
cagcctcttatgagaacgtccgcgccaagagtctctggtaagaagagtgaaagcaaagaagccaagaagtctgaagaaccaag

SEQ ID NO: 741133 - DNA, 75 bp, Homo sapiens
ctaaactgtgtggggcgcggatgggatccagctgttagtcggtgtttgctttcacaaccaaagttctgggccatt

SEQ ID NO: 741134 - DNA, 100 bp, Homo sapiens
gggagctagtggaagttactgccgcgccaccgagtccggaccggagactttggggcctaactagatgcctgtgaggagccaccaacatttgaagctatgg

SEQ ID NO: 741135 - DNA, 100 bp, Homo sapiens
atacctctcagcatttgagggccttttctcttcctgcttcatctctaaaggtccttctaggagagaggtgaaaggtattcaggagtctccggtgccgaac

SEQ ID NO: 741136 - DNA, 82 bp, Homo sapiens
cgctgagagggacacgcagtgacgagcggccgaagcagctttgcgggcgtctctggccgagcctctttttgtggaaaacgac

SEQ ID NO: 741137 - DNA, 98 bp, Homo sapiens
ggagattggaaaccagaaggtgatgaatggctgaagatgtcatagtttaccattgcttgttcagagaacaattgcgagaactattgtgttacaagaaa

SEQ ID NO: 741138 - DNA, 90 bp, Homo sapiens
cgctgctgctggtgttagcgctcagtcaagggtctcctatggacagaagtgcgggcaaggagctttgttcctccccgatgtcaccctccc

SEQ ID NO: 741139 - DNA, 100 bp, Homo sapiens
ctgaagaccatccgtctgcccaccttcaagaccacctcctccaccctgaagggtgccatccagctgggcatcggctacaccgtgggccacctgagctcca

SEQ ID NO: 741140 - DNA, 100 bp, Homo sapiens
ggccggcgtcttcgccaaggtctcctacgacaaggcccaccgccctccacgggagatgaacatccacaggtgctgtgattgtctccacgccccaggacat

SEQ ID NO: 741141 - DNA, 80 bp, Homo sapiens
caacaaacaccagcgctttggacatttatgcagtgtgtgattctttctaaaacaactccctggaagagaggacatttaat

SEQ ID NO: 741142 - DNA, 100 bp, Homo sapiens
attttgagccagcacagttaccaaaattgaacttgtctttcgcttgtgagcggttgtggtcattgtgaggtcaactttgtagtgtgccaactctttgcct

SEQ ID NO: 741143 - DNA, 98 bp, Homo sapiens
gcgccttcctgctgctcttcctgctcgtgctcactgtcaccgagccgctgcggccagggactttgaacatgtcggggatcgccctcagcagactcgcc

SEQ ID NO: 741144 - DNA, 75 bp, Homo sapiens
gcaaaagatgcttaccgaatccggagatcctgaggagggggcaatggcggcttcctgtgttctactgcacactgg

SEQ ID NO: 741145 - DNA, 50 bp, Homo sapiens
ttccttgaggaggtttgaaaaaacagatttgaccagttttgggccatcaa

SEQ ID NO: 741146 - DNA, 90 bp, Homo sapiens
agtgtatgctcgaaatcctggatactgcagggacagaatcaaacattttaagtccagtgcaggatggaacaaagaaacctcagattgaca

SEQ ID NO: 741147 - DNA, 100 bp, Homo sapiens
cacggacgcaacacttttggaacttagacgctaagagaagaagaaggaggttcctgctgtgccagaaacccttaagaaaaagcgaaggaatttcgcagag

SEQ ID NO: 741148 - DNA, 76 bp, Homo sapiens
ctctgaggatatttctggctgtcgccaactccatggctttccagggtgtcaagaagaattgtaagcagattgaatc

SEQ ID NO: 741149 - DNA, 100 bp, Homo sapiens
ctggaatctggatgagcagctcaagcaggtactccaaagattcaggtttactcacgtcatccagcagagaatggaaagtcaaatttcctgaattgctatg

SEQ ID NO: 741150 - DNA, 88 bp, Homo sapiens
gagatctcctgtgctgcgaccactgcccggctgccttccacctccagtgctggcaagtgaaccggagcaaacgacttccgatccagtc

SEQ ID NO: 741151 - DNA, 98 bp, Homo sapiens
aggagggaatgatattcagtggtgtttttctcaggtgaaaggagcagtagatgatgatgtagcagaaggccaagtgcaggaacatggagcatgcactg

SEQ ID NO: 741152 - DNA, 82 bp, Homo sapiens
gcggagccggcgctgagaggggctgcggccggagcgggcggctgagacaaaggcgacggtttggaagaggacagttgccctt

SEQ ID NO: 741153 - DNA, 100 bp, Homo sapiens
tttctactagcgtggaggaacggaggaagaatccattcacactccccaaaccagggaagggcgacctgatcggctgtgagctgccccggcgggagcaggt

SEQ ID NO: 741154 - DNA, 90 bp, Homo sapiens
tccttggatttacaatgagagtttggttccagccacccacacagaatatgcctatgggtcctggagggatgaatcagagcggccctcccc

SEQ ID NO: 741155 - DNA, 82 bp, Homo sapiens
actgctgggccctgaggctgcaccaagtggcgaaggagccggctccaaggtcgtcgtcccgcagacacacaatccagaagtc

SEQ ID NO: 741156 - DNA, 101 bp, Homo sapiens
ttatggacaacgaccacaggaatctggaattttattaaacatgaaagcataacccctactgtagaactaaatgcactgtgcatgaaacttggaaaaaaacc

SEQ ID NO: 741157 - DNA, 114 bp, Homo sapiens
cgggaccccgcccaggtgaagctgctgcctggaaggcacatgctcttccctcctcttgagagagtccactacttacagccgcttacaaacacgcagatggcaagaagattgatg

SEQ ID NO: 741158 - DNA, 90 bp, Homo sapiens
gtccgcggccaggtgctggcgccgctgcccctccacggagcatcttcatgatacagttaagaggaatcttgacagcgccacttcccctca

SEQ ID NO: 741159 - DNA, 96 bp, Homo sapiens
gaggaaagggccgcctcgtctccgctcctgggggaccgcagagtgtgaacatggctacgcctcttcattcccgtccatgccgagcccccgactgca

SEQ ID NO: 741160 - DNA, 100 bp, Homo sapiens
atcgctctcaactaactacaattgtattggcagctagagagttgcctttccccatcttcctggttctgctccttcgtggcctagtcttgtggacaccagc

SEQ ID NO: 741161 - DNA, 74 bp, Homo sapiens
agggactcacagctgatgacctgctgctcgtgctgatctcagacttctgcctggtgtcgaaggtggtgggcaga

SEQ ID NO: 741162 - DNA, 100 bp, Homo sapiens
actggaacaacaagatccatggataataggtcaagaaatcctaaatcagaacttttcaggacccaaccctggaagaaaagatggaatattttcagaatca

SEQ ID NO: 741163 - DNA, 75 bp, Homo sapiens
caaagctggaacgtagagacaacttctcacctcagccctaaagagggagcctgtgggttctcagagagatatcac

SEQ ID NO: 741164 - DNA, 83 bp, Homo sapiens
aaacaagaaaatggactccctggctgctggagagttgaatgccagccaccagccatggggacgtccagatcggtgacatcgtc

SEQ ID NO: 741165 - DNA, 98 bp, Homo sapiens
tcatgctgtctggagaaacagccaaaggggactatcctctggaggctgtgcgcatgcagcacctgatggcagttgaattcctgcatgaactgaatgtt

SEQ ID NO: 741166 - DNA, 82 bp, Homo sapiens
gtctggagtgcgtgggggaccggctgttggcgggctccccacaggtgcaggaagccgccgcccagccatggacggggaggag

SEQ ID NO: 741167 - DNA, 100 bp, Homo sapiens
cgaggaggtcttcaccaccatggcctccgtctgccacacgctgatggtgcagcaccgcatgatggtacccaaagtcagggttcgggacggtacgcaccag

SEQ ID NO: 741168 - DNA, 99 bp, Homo sapiens
atgaggaatgtctttcctaccatctaaaatacgaaggtttctggctgggtggcgtgtgacgagcatggctcccggggtttcggctttgtccattttgag

SEQ ID NO: 741169 - DNA, 82 bp, Homo sapiens
tgctcgctggcaccccgaacgggttgcttcccccgctgcgagacctgcctagagctggaacgttacctccagagcgagccct

SEQ ID NO: 741170 - DNA, 100 bp, Homo sapiens
ggaggaagccctttctcctcggcactgtattctttacctgcttcccaatcccactgatgaggatcagcccatgagacgagttgtactgctgtcacaggaa

SEQ ID NO: 741171 - DNA, 100 bp, Homo sapiens
aattaacataaataggctgcttggagaaaatgatggggaaacaagagctttgaacctcaagaaggcatgaagccagcccctgcagtgccgtccacccgcc

SEQ ID NO: 741172 - DNA, 75 bp, Homo sapiens
aaatttcgatattgaagtgtcaaaatccatagatggaaaagatgaatgggtaaaggacgaggaagatgaagatgt

SEQ ID NO: 741173 - DNA, 96 bp, Homo sapiens
acttggctgtcctagagaaacgcgtggaatcaacaaggcgtgcaggtattttgatgaaggacgtgggagctgcccatttggagggaactgttttta

SEQ ID NO: 741174 - DNA, 51 bp, Homo sapiens
acagccatcactcatgtccataaggaggtcgtgatgtctcgggagtcggat

SEQ ID NO: 741175 - DNA, 80 bp, Homo sapiens
ctcgtcagactccagcagccaagatggtgaagcagatcgagagcaaggtgcagcagtaccgcgtcgccatgactgccaag

SEQ ID NO: 741176 - DNA, 100 bp, Homo sapiens
gtgaaaatgaagccagaccgagcttcgagacaccaagtccacagatcagaagatgacgttgttacacttcttggctgagttgtgtgagaatgactatccc

SEQ ID NO: 741177 - DNA, 96 bp, Homo sapiens
ccctgcagtacctgcagaaggtctctggagacatcttcagcagtttaagctatgaagaaggacatccctcacactctgaaacagatctccttcaga

SEQ ID NO: 741178 - DNA, 95 bp, Homo sapiens
cgcgagacactctggcagttataggaacacaaagaacgtcaagtctgagttggagatggcccaggaagacctgtccatgacccagaaggataaat

SEQ ID NO: 741179 - DNA, 90 bp, Homo sapiens
tggacttcgcctttcccgagccctggaggtggggagaaaagcctatggaggctccagtcatgctgtgggatgagtccagcttccctgaca

SEQ ID NO: 741180 - DNA, 100 bp, Homo sapiens
ttgcaagcatcttttcttctgcatggtgggtacccccatgctgtggcacggcttcagttctttgtttcaacaccagttttcagctatgatgccatttcgt

SEQ ID NO: 741181 - DNA, 83 bp, Homo sapiens
atcagaacaagggccgcgggaacgagtgcgtgcagtgctcttacagcctgttccaagtgtggcttaatccgtctccaccacca

SEQ ID NO: 741182 - DNA, 100 bp, Homo sapiens
tgctcaacaggctcttcctgcccctctacgtgtactcactggagaaccaggacaaggtatatttgcgtgctctcgtgagaaatctttttaatgaaggaaa

SEQ ID NO: 741183 - DNA, 100 bp, Homo sapiens
gatggaagaggtcctatgacaggatcaaggtaactttcgaccgactttccccaagagaaaattcctagaaattgaacaaaaatgtttccactggcttttg

SEQ ID NO: 741184 - DNA, 100 bp, Homo sapiens
tctccaaaatccccagtgtcgtcacagacattcacggcatggtgtaactcccacctccggaaggcggggacacagatcgagaacatcgaagaggacttcc

SEQ ID NO: 741185 - DNA, 100 bp, Homo sapiens
cgcgttccggaggcccggccacctctgagaagggagacgacgctgctgggtccgctgagcggggcgacccgagaaatggtggagtcaatgaagaaagtag

SEQ ID NO: 741186 - DNA, 80 bp, Homo sapiens
ggagctgtgctggcgccgggtcccgcggggaaaaaccgggctgtgggtcggcccaaggggaagctgggcccggcctccgc

SEQ ID NO: 741187 - DNA, 100 bp, Homo sapiens
gtgcagactccatgctcttggcattgcagctttctatggcggagaacaacaaacagactgttaccaatgctgtggtcacagtgccagcttactttaatga

SEQ ID NO: 741188 - DNA, 75 bp, Homo sapiens
cgaggacctgcaggtggaagtgatgaagatcatggagctttgtggtgcaacaagacttggttattttggaagaag

SEQ ID NO: 741189 - DNA, 100 bp, Homo sapiens
catcaagaaatgaagaacgagattcagacacagggtcggcactcttcaccctcccgagccctgcccgtctcggccccatgcccccaccagtcagccccgg

SEQ ID NO: 741190 - DNA, 76 bp, Homo sapiens
cagtcatcatctgctgctatacataaaccctaccttcattttacaatgtgtggtcactgtcaaagattaacaccag

SEQ ID NO: 741191 - DNA, 99 bp, Homo sapiens
gaatcttctgaattaagagttttggatataccaggacagaccccacatcttgttaacctcaatgaagacccactaatgtctgagtgcctactttattac

SEQ ID NO: 741192 - DNA, 99 bp, Homo sapiens
aaaacaatcaaagagctgtgagagaacataaaggcctcccatatcttatcagatttctgagttctgattcaggttatcaatactctggctgaccatcat

SEQ ID NO: 741193 - DNA, 97 bp, Homo sapiens
cgggtgcacgtgccacgcacggccgtaagttcatcatcgccaacgctcgggtggagaactgcgccgtcatctactgcaacgacggcttctgcgagct

SEQ ID NO: 741194 - DNA, 82 bp, Homo sapiens
gctgctgcttcaatgtccgcatcgcaaccaccgccctggccatctaccatgtgcagctccacagctgggtcctgctcctcag

SEQ ID NO: 741195 - DNA, 74 bp, Homo sapiens
ttcacaacatgatagttgatctggataatgtggtcaaaaaggaaactctgagtacattggaatatgctcataga

SEQ ID NO: 741196 - DNA, 50 bp, Homo sapiens
tggaccgcggcagaagagtgggacagtcattttgtttactcattcagccc

SEQ ID NO: 741197 - DNA, 100 bp, Homo sapiens
tgggttctggactttgggcgtcccattgccatgatttctcactatgtgcaatagacactttggcagtgttgtggcacaaaccattcggactcaaaaaacg

SEQ ID NO: 741198 - DNA, 82 bp, Homo sapiens
cgactccccccgggcccaaagattttttatcaagcagaaatgcatcgaacaacgagaatcaagatcactgagctaaatcccc

SEQ ID NO: 741199 - DNA, 75 bp, Homo sapiens
tgccctcccgctcggccccgccagcagcactgtggaggccgtcctcggccaccagcttgggctccccacggaggg

SEQ ID NO: 741200 - DNA, 100 bp, Homo sapiens
caaggaggggaccgagaatcaaggcgttgagcctcaaggcttcatgaacagttgactgagtcagaacaggctgcccagtgttacatcaaatatatccaag

SEQ ID NO: 741201 - DNA, 82 bp, Homo sapiens
tttaattttagggtcctttatatagaagggagagtaggtattttgaaggtggcgtctcatctgtctacctctgggatctgga

SEQ ID NO: 741202 - DNA, 100 bp, Homo sapiens
tgtgacaatctggtgaatggatacaggtgtacttgcaagaagggctttaaagggatggttctccatggcaaacgctctgtgaagggtgacctgctgggtg

SEQ ID NO: 741203 - DNA, 100 bp, Homo sapiens
ttaatgaagacatcccagaagtgtctgatacggtgttgaaggcaatcacaggtggtggttgacacagcacagattgagaataaagaagcctatgcccccc

SEQ ID NO: 741204 - DNA, 51 bp, Homo sapiens
atgatcgtgtgtcggatgaggagaaggtattggcaagcttgccagtgtacc

SEQ ID NO: 741205 - DNA, 75 bp, Homo sapiens
tgcagacagggcaaagaaaatgggactggttgaccaactggtggaacccctggcggagctccctgggtcctcagc

SEQ ID NO: 741206 - DNA, 74 bp, Homo sapiens
cacggaggagctctttgacttcttgcatgcgagggaccattgcctggaggagagcaggagtgttcagaagcaaa

SEQ ID NO: 741207 - DNA, 83 bp, Homo sapiens
cacagctgctgcaatcgcttgggagagctcctgggccacccctcctttcaggtcaaggatgatcggctgaatgtaacagagga

SEQ ID NO: 741208 - DNA, 90 bp, Homo sapiens
agcttaataaaataaccgtccccgccagtcagaagttgaggattccttttaagattgggcagcccaagaaacagattgtgcccaaaacag

SEQ ID NO: 741209 - DNA, 100 bp, Homo sapiens
tttaacttcaaaagtgatgacaagaaagtatggacaccccttcaggaccaacctgataagtcactgaaatgaccatggttgacacagagatgccattctg

SEQ ID NO: 741210 - DNA, 50 bp, Homo sapiens
ctgccagccgctgcctggctgtgctgcagaccggagagcaatggtgtgat

SEQ ID NO: 741211 - DNA, 98 bp, Homo sapiens
ggtagaaggccagagtcacacacggtcctaagagctgggcaccaggaagcgaaggctgttcaaaaggtgatgacctatcaacagccattctcaaacag

SEQ ID NO: 741212 - DNA, 74 bp, Homo sapiens
tgaagtcccttgtcccagttgaagaacccataggctactgcagcactggggtgtcagttgttggtccgacccag

SEQ ID NO: 741213 - DNA, 101 bp, Homo sapiens
ccagttcgcccgtccccctgccccgttcacaatatgctgcacttaaaaggatgcttgttttgatgtcctgctcattgttttccctatgaagtatcagtaat

SEQ ID NO: 741214 - DNA, 74 bp, Homo sapiens
tggtggtatagatttcagtagctcctcagataaaaagagaattactctgcttaatgtaagcaagctgaacattt

SEQ ID NO: 741215 - DNA, 76 bp, Homo sapiens
accgagaccgcggccgggaccgaggacttaattcagtgcacaaatgagatgaatgtgaacatcccacagttggcag

SEQ ID NO: 741216 - DNA, 92 bp, Homo sapiens
cttagctgtgctcgcgctactctctctttctggcctggaggctatccagctgtctccagaacgctatagctatggcacctccagctcttcaa

SEQ ID NO: 741217 - DNA, 83 bp, Homo sapiens
caacgcctggctcggagcagcagcctctgagagctcccagctcctccagcagccgacaggaggcccgtcaagatgcaggcagg

SEQ ID NO: 741218 - DNA, 82 bp, Homo sapiens
cgggcggggcggcggcgacgcggacctgcggactagcgaacccggagtttttattccatcagatgaaagactataaacaagc

SEQ ID NO: 741219 - DNA, 83 bp, Homo sapiens
tgaacccattgtcacccctccggtggagtggctgaaacttctcagcaggcgcatctacactagtgacctgaggagagaaaccc

SEQ ID NO: 741220 - DNA, 75 bp, Homo sapiens
gcccaaaaagctgaaggtggaggcgccgcaagcgctgagctagtgagacctgcaacgacttccacccgatgttct

SEQ ID NO: 741221 - DNA, 97 bp, Homo sapiens
ccacgaggagtggctgaaagtgtgactggactacaggcaatcctggccttggcaggagctggtgtgggtgacattggtgtggaggtggaagatcccc

SEQ ID NO: 741222 - DNA, 78 bp, Homo sapiens
ctcacgcagcttcaggacgctgtgaattcggacgcggattctgatagcggggacgattctgacaagaggtcgtgtgaa

SEQ ID NO: 741223 - DNA, 100 bp, Homo sapiens
gagctgaggaggccggctgcagccccaagacagagcgctactcctggcagtgcgtcaatcagagcgtcctgtgcggtagctacagcaagctgggtagcag

SEQ ID NO: 741224 - DNA, 100 bp, Homo sapiens
atcagaaattctgaagaatctaagccaggtaactgcaaaaacaatggctcagcatgaagaactgatgaagaaaactgaaacaatgaatgtagttatggag

SEQ ID NO: 741225 - DNA, 98 bp, Homo sapiens
gaaggcgccgcgccaggccggggggcggcatcctagaatacgtttccacacgggtcttgtggatgcccacctctactgtttgaaaaaatacatcgtgg

SEQ ID NO: 741226 - DNA, 98 bp, Homo sapiens
gctgcggggcccacctctctaagcctatggaaaagcttctgggcctgacctctcgggacacacccagccctgtggacccagacaccgtggaggtgttg

SEQ ID NO: 741227 - DNA, 75 bp, Homo sapiens
caggcatacattgggcgctcggacgcgctccaggagatatataatcagaagggcatgtttccaggggagcagttt

SEQ ID NO: 741228 - DNA, 75 bp, Homo sapiens
ctgtgatatttgatgttgcaagtatcatcctgggctccaaggagaggctccactggggccatgtcagagcgagaa

SEQ ID NO: 741229 - DNA, 50 bp, Homo sapiens
gcccagtccccagctcgccagcaacaagttgaaatcatcgcagaaggata

SEQ ID NO: 741230 - DNA, 100 bp, Homo sapiens
ttctgacagtggagacactggcattggaacttcctgttctgatagcgtggaaggagagacaggtttgggcaagtccaccctcatggacaccctgttcaac

SEQ ID NO: 741231 - DNA, 100 bp, Homo sapiens
aatgttaagttgattgccctttcaatagacagtgttgaggaccatcttgcctggagcaagagttcagcaagaccagcagattggaagtatcaaagtggat

SEQ ID NO: 741232 - DNA, 75 bp, Homo sapiens
aacggagaggtagccatgatgccccacttggtgaatggagatgcagctcagcagcactatgggactgagtaacat

SEQ ID NO: 741233 - DNA, 83 bp, Homo sapiens
cccacctgagccgcgtctaccccgagcgtccggtgaaatgacaatggatgctctgttggctcgattgaaacttctgaatccag

SEQ ID NO: 741234 - DNA, 96 bp, Homo sapiens
accacacgctgtacaatgtgcagagctgcggacagaaggcaattgcagctaaggaacaatggaaagagctgaaggccacctacagggagcacgtag

SEQ ID NO: 741235 - DNA, 101 bp, Homo sapiens
taggacgccgagcggtgactccccgccgctcccgggggccgtgacggtgagaagccttataagtgctcatgggagggatgtgagtggcgttttgcacgaag

SEQ ID NO: 741236 - DNA, 100 bp, Homo sapiens
agaatcctcatgctcctactatccatttcaactacagatactttgaagtagaagaagctgatggttcctaggagaatgttaacagtccagacctttttca

SEQ ID NO: 741237 - DNA, 106 bp, Homo sapiens
gaagagccatggaaacaggaggaagaattcccaagccaaagctttccaggtagatttcgggcagacaacttgaacaagctgaagaacctatgcagcaagacaatcg

SEQ ID NO: 741238 - DNA, 97 bp, Homo sapiens
gtgcaaagctgcagaaaccacagtggtagaggtacttctggaaaaatacaaatatgtggagaattttggtctaattgatggtcgcctcaccatctgt

SEQ ID NO: 741239 - DNA, 82 bp, Homo sapiens
acacaacttgtaaagggcacagccaagattcagagccagattttactctgcagaaatcagtctagcattaaattatcttcat

SEQ ID NO: 741240 - DNA, 100 bp, Homo sapiens
gcgggaagggatcccctggaaacatgaatttgctgattcccttggaattccgtttttggaaaccagtgctaagaatgcaacgaatgtagaacagtctttc

SEQ ID NO: 741241 - DNA, 100 bp, Homo sapiens
tgaagatgtgtccggcagtagctttccgcagattgaaattaataaaatgcacatatcccagtccattgaggctaacagagaccctgatgctggaattgat

SEQ ID NO: 741242 - DNA, 100 bp, Homo sapiens
gtcatcctgtacaccctcgtcagcggctccctgcccttcgacgggcacaacctcaaggactcagtggcctctgaggatgtggctgtgaacttcacacttg

SEQ ID NO: 741243 - DNA, 74 bp, Homo sapiens
aaggaagcttcaggtggagacagcccgaaggtgggagaaggagaagcacgaagacggggtgaagtggagacagc

SEQ ID NO: 741244 - DNA, 87 bp, Homo sapiens
cgtggactgcggggacggggttggcgcccggcagcacgtgttcctggtttcaggaccagtcctgcctctgttgtagaagacatgtgg

SEQ ID NO: 741245 - DNA, 51 bp, Homo sapiens
catttggcagaataaatgaaccaggtgatggcatcagctgagaagggaagg

SEQ ID NO: 741246 - DNA, 82 bp, Homo sapiens
aagaagatgcctcgaactaaacaaattcatcccagaaatctaagaggttttgccagatcgaagtcatcctaaactgctgatg

SEQ ID NO: 741247 - DNA, 100 bp, Homo sapiens
gccttcagtgggactcccccagcagatacattctcattcttcgtgccatgaaggaggacagtgaaaaagttccgagcttgttaactgattatattctgaa

SEQ ID NO: 741248 - DNA, 78 bp, Homo sapiens
ttgaaccatgtttggattgaagccgcctctgtattacttaccagaaagcgtggatacccatcaacgaagttttgatat

SEQ ID NO: 741249 - DNA, 101 bp, Homo sapiens
tcaggcctgaaatacgttcagcacacctacaggactggggtgaaagtgcctatgaagtcatcaagctaaaaggatataccaactgggctattggattaagt

SEQ ID NO: 741250 - DNA, 55 bp, Homo sapiens
accaccagctggatcgacccgcgggacagctatgaccacgaaggccgcctgacca

SEQ ID NO: 741251 - DNA, 82 bp, Homo sapiens
aggcgggcgttttcttggatgaattgcttgctttggagggggatatgagactttctactcggaatatcctgagtgttgcgtg

SEQ ID NO: 741252 - DNA, 88 bp, Homo sapiens
aaggtccggggcttgccctggtcttgctcggccgatgaagtgcagaggtttttttctgcgagttctatgagcctgaggctttaatgat

SEQ ID NO: 741253 - DNA, 89 bp, Homo sapiens
tgctgaccttggacaaatcaatttacgtttctgtgctccagtttcttggtttataaaagagatggctgcccaaagattgtcaatctggg

SEQ ID NO: 741254 - DNA, 100 bp, Homo sapiens
aactctgtttgacctcaaacgtcaaaagtcagacagttccatcttatgaccagcaccatttcggattctggtatcgcaggacttccctttcctccacccc

SEQ ID NO: 741255 - DNA, 97 bp, Homo sapiens
atggaactgttcaaggcaggaagtacttcacttgtgatgaagggcatggcatctttgtgcgccagtcccagattatgtttgagaccttcaacacccc

SEQ ID NO: 741256 - DNA, 82 bp, Homo sapiens
cgagtgccccggggaagccattccccaccccccagatgccatggacaatattaccaggcagaaccaattctacgatacccaa

SEQ ID NO: 741257 - DNA, 100 bp, Homo sapiens
tggtgcttcagccaagtgaaaggcactatcgagattggaaccacagaagatagtcaaagaggttggtcaactggcagaaacccaacgcttcgaatgcacc

SEQ ID NO: 741258 - DNA, 98 bp, Homo sapiens
ggagaaatgaaaagattgctgtccactgcacagttcgaggggccaaggcagaagaaatcttggagaagggtctaaagagcaatggtggaacaaagcgg

SEQ ID NO: 741259 - DNA, 98 bp, Homo sapiens
ctcagtctacctgcctacccgcgagtacccgtctgaacagagtctttctgtggaatttggaacaattctagtttacacatgtgagaagagttgctggc

SEQ ID NO: 741260 - DNA, 75 bp, Homo sapiens
agagaagtggatttgggagacatttaggagcttattttgggagaggccagccgccatgtcatgaagacactcaag

SEQ ID NO: 741261 - DNA, 75 bp, Homo sapiens
cctctcaggacaacccagatgtgcaacaaagtgcgatgctacctgaacgacctggagcgtattgcacagagtgac

SEQ ID NO: 741262 - DNA, 83 bp, Homo sapiens
agtgagcgaggagtcagaaactcagccactggttgccttggtaggcaataaaatgagacggtttaagcggaagcatcttactg

SEQ ID NO: 741263 - DNA, 100 bp, Homo sapiens
gaacaaatgcctcctgaggatttctgtgcctggaaaatatctgttaacagactgcttttacacctacattgatgcctgggctcagctgaactctattcct

SEQ ID NO: 741264 - DNA, 100 bp, Homo sapiens
gccaccgtgcacatccgaatgggattggatagctttagtcaaagcagctgctgcagctgcagccaagaacaaaacagggagtaaacctcgaaccagcgct

SEQ ID NO: 741265 - DNA, 100 bp, Homo sapiens
gtgtgaccccccttcaggcttcagggggactggtcctcctggaggagatgctcgccttggggaataatcactttattgaaagctgacttcatgagaccga

SEQ ID NO: 741266 - DNA, 75 bp, Homo sapiens
tgggcgactctgtgcctcgctgagggagcccagcgaagtgccaacacctaagagacctcggggccgaccaaaggg

SEQ ID NO: 741267 - DNA, 83 bp, Homo sapiens
gaaccctggtcaccgtctcctcagatgcaccttggtgtggagtcaaaagtacacatgctggatcaaaatatataagaactgca

SEQ ID NO: 741268 - DNA, 82 bp, Homo sapiens
cggagaggaaggcgtggtgtggcgtctccaggctgaaggtgatgtggccgccctcaaccgacgcatccagctcgttgaggag

SEQ ID NO: 741269 - DNA, 100 bp, Homo sapiens
caggggcggaggcggaggcagaggtggaggcgctttgaaaggtggaggaaggagaggccagtctaccctcccctgccatgaccctgtcatcagccattga

SEQ ID NO: 741270 - DNA, 83 bp, Homo sapiens
tggcccacaagcagatctactactcggacaagtacttcgacgaacactacgagtaccggtgacttaagagattaaaattaatt

SEQ ID NO: 741271 - DNA, 100 bp, Homo sapiens
atctggcactgtggttcctgcatgaagacagtggctggcggtgcctggacgtacaagcattgaatgccccagaggagcccgaaacctcccaggcttggtg

SEQ ID NO: 741272 - DNA, 100 bp, Homo sapiens
gttggtaaatcatgcttattgctacagtttacagacaagaggtttcagccagtgcatgaccttactattgatctcccttgagtttagaaatctggctgag

SEQ ID NO: 741273 - DNA, 87 bp, Homo sapiens
tgatgtgatgctggagaccttgacacttatatcctccctggagtgaagttcccagaccctacgccccgctgtcaggcagcccgccga

SEQ ID NO: 741274 - DNA, 100 bp, Homo sapiens
tctggggcctgtctgccagggacgaccccagccacccagaagccaagggcgaggctggagcccgcttcctcatggcctcggccatcctgatttacctgag

SEQ ID NO: 741275 - DNA, 75 bp, Homo sapiens
aaagtcgcccaggcaccttctccatgcattgcaaggtaaagtgaacagagttatctgtgacattccatcaggcac

SEQ ID NO: 741276 - DNA, 100 bp, Homo sapiens
aggaaactgccgccgctctgccacggtctgcccacccaacgcgaagacggtaacccgtgtgactttgactgggatcgacgagaacgtgctaggagcccag

SEQ ID NO: 741277 - DNA, 98 bp, Homo sapiens
ctggtggtgcaggaggtctccagcgtgctcaggtcggcggaggagaagtctcggaaagggagcgacccagacaaagagaagaaaggcctggagagtcg

SEQ ID NO: 741278 - DNA, 83 bp, Homo sapiens
taagaacgcattgccgccggtcctgaccaccgtgaacggacagtcccccccaggttttaaaatcaaagatgggaaaatcggag

SEQ ID NO: 741279 - DNA, 90 bp, Homo sapiens
ggcgcggaggaagcggagcggcgcgcgcgggacaagcagcaacatggctgacaaggccaagcctgccaaagctgccaacaggacgccccc

SEQ ID NO: 741280 - DNA, 75 bp, Homo sapiens
cacttggccaggtttctgcggatgcttctgcgactcgctgatgaggttcaggtggaaggttataattacactggc

SEQ ID NO: 741281 - DNA, 74 bp, Homo sapiens
gccgcacctggtgcagagcgacgggaccgtgcccttctgggcccacgcggggaaacaatcaaccatgacgaccg

SEQ ID NO: 741282 - DNA, 100 bp, Homo sapiens
agcggcaggagagtccggccgcgacaggacggttgctgaaaagccaggagtcaaaatgactgagcgctttgactgccaccattgcaacgaatctctcttt

SEQ ID NO: 741283 - DNA, 98 bp, Homo sapiens
gcggagagaggctgcctcctgcagcccccatagcagagggaccacagagcaccagcctgcatggaacttccttcctcactcagcttcccacgttgcca

SEQ ID NO: 741284 - DNA, 96 bp, Homo sapiens
atgtatcgtcagacatgagaataataaaaacggagttgatcaagaaattatctttcctccaataaagacagctctggttgaagaagtgtattttgc

SEQ ID NO: 741285 - DNA, 75 bp, Homo sapiens
caagttccgcagcctggcatggcttctggggacctttacgagctctgcttatgataatgtcaacaaagttcgagt

SEQ ID NO: 741286 - DNA, 98 bp, Homo sapiens
cgggaagatggcggccgtgcaggcggccgaggtgaaagtggatggcagcgagccgaaactgagcaagaatgaaactggaacgccaagctgaagaagaa

SEQ ID NO: 741287 - DNA, 80 bp, Homo sapiens
atcgcaaccaccgccctggccatctaccatgtgcccgcggcgccatggctcacgtcggctcccgcaagcgctcgaggagt

SEQ ID NO: 741288 - DNA, 80 bp, Homo sapiens
ctcggagcgcggtccctgtattggtctcctgctcctagagatgcgagccacccctctggctgctcctgcgggttccctgt

SEQ ID NO: 741289 - DNA, 75 bp, Homo sapiens
catctgtggaaggacctaccaaccaggtcaaaaccgctttccgggatgccgctgcaaagcacagtgcaacaccaa

SEQ ID NO: 741290 - DNA, 75 bp, Homo sapiens
taatgaagacttcatcgctagtggcagtgaagcctgtacaggtcagaaaagagtgaaagatgctcagggaggagg

SEQ ID NO: 741291 - DNA, 50 bp, Homo sapiens
ccgggcctccaaggaacttaagcaaaggtgtgatccctcacatccacaaa

SEQ ID NO: 741292 - DNA, 97 bp, Homo sapiens
cgaagtttagcaatggaaaagataaagtgttttggttttgatatggattatacccttgctgacttcacagagaatgcagttgtcttgacttcaggtc

SEQ ID NO: 741293 - DNA, 88 bp, Homo sapiens
gcgacccgctgctcagcgtcctcatgtggggggtaaaccactcgcactgtgacttctgccgtgttcaccgtgggagacaacgtggttt

SEQ ID NO: 741294 - DNA, 74 bp, Homo sapiens
atcggatgtgcactctcattgacaagtttgatgaacatgatgctgccgctcagctttgatggaacaacgcttat

SEQ ID NO: 741295 - DNA, 82 bp, Homo sapiens
ccggcaaccgagggacccgcgtccaggtgagaagccctaccactgcaactgggacggctgcggctggaagtttgcgcgctca

SEQ ID NO: 741296 - DNA, 74 bp, Homo sapiens
ctccgtgttctgctgtcttcatcagcgtgggccgcggtctcttcaagaaaatgaggaggaggagattgggaacc

SEQ ID NO: 741297 - DNA, 75 bp, Homo sapiens
ttctccgagtcagattggagcatttgtgttgatgaagatgaaagagactgcagatatcaatgatgtcaaacggct

SEQ ID NO: 741298 - DNA, 100 bp, Homo sapiens
tgaagagttattctcaagctgtcacaggagttatggccattgcaccaacccattatatctggcaaagagaacgttctgttcatcacagtggagctgtcag

SEQ ID NO: 741299 - DNA, 101 bp, Homo sapiens
gcccccacactcccagctgctcttctacagatgccatcaacgagcaggactctgggtggctccactgtctaaggtgctggagaatctggtaaaagcaccat

SEQ ID NO: 741300 - DNA, 80 bp, Homo sapiens
cagcctcctgtacagcccgccgcccctgcaggtcctggaccggatcaaaggctcactgctgccccggcctggccacaact

SEQ ID NO: 741301 - DNA, 101 bp, Homo sapiens
ctctcagccaagaacaaagactacatgagcatcattcgcatgtggctaggacccctacaagtcttttggtttaccatctattgggagattgtctcagtacc

SEQ ID NO: 741302 - DNA, 90 bp, Homo sapiens
gggatcgtgaccgagaccgtgaccgagagcgtgaccgagagcgcgaatatcgtcatcgttagaagcctgacttcctcctccacccctcca

SEQ ID NO: 741303 - DNA, 75 bp, Homo sapiens
aagagcggcggcggcagcggcgtaagactttgaccccgacgcaggcttcagtgattgccgcggatcagaagcctg

SEQ ID NO: 741304 - DNA, 100 bp, Homo sapiens
tggttacattcgttgaaggacaccagctgcggaatttgcggctttggcaggaacttccgcaaacacctgcgcatggtcggcagccggagggtgaaggccc

SEQ ID NO: 741305 - DNA, 50 bp, Homo sapiens
gcctcctgagaagctgggattacagattcaaaaacatgccacaggaaaga

SEQ ID NO: 741306 - DNA, 117 bp, Homo sapiens
ggagagcgaggcggggccgccggggccgccatggagcccgactcggtgattgaggacaagaccatcgagctcatgtccgggaccatgtctggagaactaccaccaaacattaacatc

SEQ ID NO: 741307 - DNA, 100 bp, Homo sapiens
gagcgcccctccgagctggggttggacgctgccagtttgcacagcagcagatgctggacgagaaccaccacctgatccagtgcatcctggagtaccagag

SEQ ID NO: 741308 - DNA, 131 bp, Homo sapiens
cttgtctgtgaagctaaactcaatgctgctgtgtgggaagaagatttgtaaagaaaactcttagactcagcccacctgcacccaggtgaaataaacagctttattgctcacacgaagcctgtttggtggtc

SEQ ID NO: 741309 - DNA, 100 bp, Homo sapiens
cccgccgcagctcctcggacgcagagataatcattcaggtcttcgtgagctaaggccaaacaaacaaaaaacacttgctttgatggactgaatactgtta

SEQ ID NO: 741310 - DNA, 100 bp, Homo sapiens
cgccaaaggggacagcgagtcggaggaggacgaggacttggaaggttatgaagacagtatggagtttccagaccatagtagacatttgctacagtgtctg

SEQ ID NO: 741311 - DNA, 90 bp, Homo sapiens
ctagcatttggacctgtggccagtgttgtcatggacaaggacaaggttataactcgaaacgaactcatgctggaagaaactagaaacacc

SEQ ID NO: 741312 - DNA, 100 bp, Homo sapiens
cgacatgtctctagtggcggaagccttcgtctcccagattgcagcttgaagaagtcatggaaaaagaaacttacaagacggctaaattaattcttgaaag

SEQ ID NO: 741313 - DNA, 75 bp, Homo sapiens
tgaacacagtattgaaatgcatttgccttatacagctaaagccatggaaagatctgggacatgagcgatgatgag

SEQ ID NO: 741314 - DNA, 50 bp, Homo sapiens
aaagctcccaaattagaggaaagtggtctcacgtgtgaaacatggctaca

SEQ ID NO: 741315 - DNA, 105 bp, Homo sapiens
ccaccctgtggacatcagcgccatccccgagcagcggtggaagctggcagcaatgaatgtggatcacgaggttaacctcttagtggaggaaattcatcgtttggg

SEQ ID NO: 741316 - DNA, 82 bp, Homo sapiens
cagggaggatgtcgggacaccccggaagctgggaaatggtggcacaagaatggctcaactctccaaatagagagaatttcta

SEQ ID NO: 741317 - DNA, 119 bp, Homo sapiens
agcgagtgcagctggtgaaaaaattcatcaaaattgcggctcaagcactagacaaactgaatggatttcagttagagaatttcaccttgaaagtagcctatatccctgatgaaatggcc

SEQ ID NO: 741318 - DNA, 80 bp, Homo sapiens
cacgttggaaccgaagagagctctgttgttgcaggatgcccgggtagttaaagacatggcaactggaaaatccaaaggct

SEQ ID NO: 741319 - DNA, 100 bp, Homo sapiens
atgaagacggcggcggcgagggtggtggcggggagttgctgagtcagcccagaccggaaggagtggcagagatcatttgccccaagaacggcagcgagcg

SEQ ID NO: 741320 - DNA, 82 bp, Homo sapiens
ggcgcccggatgggcagctgaggaaacatttactagggacaacttttgagtgtcagaccctgtggacacaaagaaaaagctt

SEQ ID NO: 741321 - DNA, 75 bp, Homo sapiens
cacgaccatcaaatccgtgtcggagtccttacaggcaaagaggccatgctgcgacagaaggactatgagaccgcc

SEQ ID NO: 741322 - DNA, 74 bp, Homo sapiens
aaagacgatggagggcagcgaagagagtcaccgaccatgacggattccatcacccagcacaaggtctgtgcccc

SEQ ID NO: 741323 - DNA, 50 bp, Homo sapiens
cgacaagggtgttcccgaactagagtggggaccagttactctccacaaga

SEQ ID NO: 741324 - DNA, 100 bp, Homo sapiens
tgcaccaccaatcaccccattaacccaaagggcctggaggaaaatgagcgtaccaaggatctaatcattgagcaaagatttcatcgcacaatcattgggc

SEQ ID NO: 741325 - DNA, 75 bp, Homo sapiens
cgggacctgggctgggaacccgcggtggagcgggacacgaacgtggccagccatgtgactgccttcctcccctgc

SEQ ID NO: 741326 - DNA, 95 bp, Homo sapiens
agtgcgcgccctggcgggtccggaccaagatggctctgagagattcctctgcgaatctgtttttagctatcaagtggcatccacgcttaaacagg

SEQ ID NO: 741327 - DNA, 50 bp, Homo sapiens
ggcacatgtacgggaaggacaaagtggcaatcagccatgactgcctttgc

SEQ ID NO: 741328 - DNA, 75 bp, Homo sapiens
caggatagctgttgtttcagagaaagggaaggatcgaatcatatttgtaaccaaagaagatcatgaaactccaag

SEQ ID NO: 741329 - DNA, 75 bp, Homo sapiens
gttcacgcacgggatccagagcgccgcgcacttcgtcatgttcttcgcgccctgatgggatggggtgacctcggg

SEQ ID NO: 741330 - DNA, 83 bp, Homo sapiens
gttagctaattaaaacatttttcagggacgtagccatccagaggtatcatgatattagctggtttgacatcaagtcatttgtg

SEQ ID NO: 741331 - DNA, 90 bp, Homo sapiens
gacctgcagaacttagccaagagtctgggtctccgggccaacctgaggtgcacctgtggcgattctcaggtggctacccagccctcatgg

SEQ ID NO: 741332 - DNA, 100 bp, Homo sapiens
gtggggccgtgtctcagtccacccaaggtctcctcggatcgcctggagaggcactcggacctggcccagtgacgagcaccatccggaagtgaaggctgat

SEQ ID NO: 741333 - DNA, 75 bp, Homo sapiens
aaagaagaccacacactgggaaacatcattaaatcttgcatttgctggtctggcctttgcgtccttctacctggc

SEQ ID NO: 741334 - DNA, 75 bp, Homo sapiens
tgtttgtggatcgctgtgatcgtcacttggagtgtgaggaagaggctgtctgtgtcattatgtgtgcgtcggtca

SEQ ID NO: 741335 - DNA, 90 bp, Homo sapiens
aacttggccatgaccatctggattctcaaagtcatgaacttcacaattctggtgaccttgttgcagatgtgggttgtccccttatatttc

SEQ ID NO: 741336 - DNA, 82 bp, Homo sapiens
gcgctggtcgtcagcgccgaggctgggctgaggcgccgcggtaccatgaggcgccggaactgtggctgcaccatctgtcttc

SEQ ID NO: 741337 - DNA, 97 bp, Homo sapiens
taactgctggcagcaccgacgaacccccaatgctgaccaaggaggagcctgttccagaactgctggaagctgaggatcaatctccccatccagacct

SEQ ID NO: 741338 - DNA, 100 bp, Homo sapiens
cctaaacgtagtgtccacggcactcaacgacacggtagagttctaccgctggacctggtccatcgcaggcactgtttagtacagctgttgaaatgaagat

SEQ ID NO: 741339 - DNA, 89 bp, Homo sapiens
gggacatgttgctggccaataaggtgacaggccgctgcggctctgtgctggtacgcctcatccctgcacccaggggcactggcatcgtc

SEQ ID NO: 741340 - DNA, 82 bp, Homo sapiens
ctagaatcaactgagagagatgcttaaaaatcaccagttactttaatgagaggatttgttggtattgaggaaaacggtgaaa

SEQ ID NO: 741341 - DNA, 100 bp, Homo sapiens
cccgcccctcggacactgcccccgccgccgccggagctctgcagcacgtccaatatcagatggaaatgatgcggagccttcgccatgtaaacattgatca

SEQ ID NO: 741342 - DNA, 87 bp, Homo sapiens
caaggaagaggacaggtagtggagatcctgcaatctgaaaagcagactgaaagatgtgttcagagcaacattgttttgttgacacaa

SEQ ID NO: 741343 - DNA, 75 bp, Homo sapiens
agaaaagcccccaaaagcagctattcaggacagagcgggatgccaccagcttgtccaaagggaagttccaggagc

SEQ ID NO: 741344 - DNA, 75 bp, Homo sapiens
cggtcgggcggggcggcggcgctgacagacgcccagcggcagcaggatgagtgcggaggcaagcgcccggcctct

SEQ ID NO: 741345 - DNA, 97 bp, Homo sapiens
ctcgacctgagagacccatggcattcctcagggaatactttgagaggttggagaaggttgaagccatccttgtcaatatatttggtggtatcgtcaa

SEQ ID NO: 741346 - DNA, 100 bp, Homo sapiens
acttcatgaacgccctgcgctacgatgccatgatatttgtgggaaagatcccaagagatctatttgaggatgaacttgttccattatttgagaaagctgg

SEQ ID NO: 741347 - DNA, 50 bp, Homo sapiens
gaggaggacaacagctacaaccgggggccgagacgcatccagagctttcg

SEQ ID NO: 741348 - DNA, 98 bp, Homo sapiens
gtccccggcccaaccatggcgtcctccgcggccggctgcgtggtgatcgttggcaggtgtaattattgaaacagatataattggttcagaccttttga

SEQ ID NO: 741349 - DNA, 82 bp, Homo sapiens
atccctttccatcaagtgtcctacgtaaaggagtattggaatgatgtgttcaggtgtccctggccagtgtccttccacctgt

SEQ ID NO: 741350 - DNA, 83 bp, Homo sapiens
tggagtttgtgacgctgtgatgcttggtatgtgctgtgagttatacaactcaggctggagaaaaaatgtatttcagaaaattc

SEQ ID NO: 741351 - DNA, 74 bp, Homo sapiens
agccgggacggacgccgatgcccggggctgcgacggctgcaggcagaggtggaggagacactgaagcgactgca

SEQ ID NO: 741352 - DNA, 98 bp, Homo sapiens
tgagcccttgagttggtcacttgaaccttgggaatattgagacaatgtcactttattattcaagttatactgcttggcagtgatgaccctgatggctg

SEQ ID NO: 741353 - DNA, 100 bp, Homo sapiens
atgccgcaagacacgtggccccggaaatcagggagctcttaacccagtttgaaacgtaactggttccctgaccaggagcatcagatccatgctgctgctg

SEQ ID NO: 741354 - DNA, 74 bp, Homo sapiens
ggagctccaggaagagcaaagccgagctgcaggccctcaggaaagcagagagcttgaagaaatgtctctctgtc

SEQ ID NO: 741355 - DNA, 100 bp, Homo sapiens
gccagtctgcgaactgtacgaaacaactttgctgcattaactaatttgcaagatcgagcacctagcaaacgaagggaacgtcatcgtttggaaagcgtcg

SEQ ID NO: 741356 - DNA, 98 bp, Homo sapiens
tcatctccaagttggaacaaggagaagagccatggatcataaagagacacataccaaattggatctatccagataacaacgaacttgatgcaagtgat

SEQ ID NO: 741357 - DNA, 75 bp, Homo sapiens
tctggcatcctttaagaatgagggtgccgaaccagatctaatcagggtgctagcttcccttaatcttccagcagc

SEQ ID NO: 741358 - DNA, 96 bp, Homo sapiens
agaggatggcgtgcgaggtcgccgcggggctggccgccatgcacaagctgcacttcctgcacaggaaatctgaaatagagtactatgctatgttgg

SEQ ID NO: 741359 - DNA, 96 bp, Homo sapiens
ggcggccttcgaggaggtcatgaaggacctgagcctgacgcgggccgcgcggatcctgaccaagatgaagcagcagggtcatgagacagccgcctg

SEQ ID NO: 741360 - DNA, 100 bp, Homo sapiens
gacgccaccgaccccaacggcaccagccctttgcacctcgcagctaaaaacggccacatcgacatcatcagggcttggtggccatccctgtctccatctt

SEQ ID NO: 741361 - DNA, 112 bp, Homo sapiens
attgcacttcagtatctcaggcggcaccctgtccccgaggaggggaccatgacacaggtgctttcttctgcgacctggtactcatctacctcatcaaaaagagagagtttta

SEQ ID NO: 741362 - DNA, 50 bp, Homo sapiens
catccggagagtggacaagaaaccccaggccatttactgcaaggatgttc

SEQ ID NO: 741363 - DNA, 96 bp, Homo sapiens
tggagatccggagggcctcgggcaaagaagccctgcagaacatcaacgaccagaaaacgtacaatgtggccacaggcctgcttttccaaactcgtc

SEQ ID NO: 741364 - DNA, 82 bp, Homo sapiens
tcaagcggaggcgcgcggaacagtcgccgaggcgattcccgcccagacagattacatcaatgccagtttcatggatggctac

SEQ ID NO: 741365 - DNA, 74 bp, Homo sapiens
gatgttctctcagtttgcacaagggaggcgacagagacagcagcaggttttgtagtgcatccctgagcatgagc

SEQ ID NO: 741366 - DNA, 100 bp, Homo sapiens
tcttgtattgatgcactggagggataggatgggcattgctcaaaaagagaattcctagaggacctgtgcaacaacctcttgaggatcgaatcttcactcc

SEQ ID NO: 741367 - DNA, 100 bp, Homo sapiens
gaagaataagagatgtgattaatgtattccaccacctccgccagttaagaggaaaaagatgacacctttgaggccctgtgcatcgagccgttttccagcc

SEQ ID NO: 741368 - DNA, 101 bp, Homo sapiens
ctcccactccctgaaatctggagtgaagaacgccgccatccagccaccattccaagtattttaataagcggaaaacctactttgctcacgatgcccttcag

SEQ ID NO: 741369 - DNA, 100 bp, Homo sapiens
aatgggtggataccgtcaagctggccaagcacaaagagcttgctccctacgatgagaactggttctacacgcgagctgatctctggaaacatggctacag

SEQ ID NO: 741370 - DNA, 51 bp, Homo sapiens
tggtttgctgttcctcgggagaggttaatgttgaagaaggaaaatgcggaa

SEQ ID NO: 741371 - DNA, 100 bp, Homo sapiens
agactcaatccgagctagaccgcatcaatgcccagtacctggaagtcaagtgcggtgctatgatccttaagctgaggatgcagaaagtagatgacattcc

SEQ ID NO: 741372 - DNA, 100 bp, Homo sapiens
aaaaaaaaaaggaagttaaggggccattcccaaagtcaaagatcaagcaccaccttccatggtcaataatgaacaacgccagcatgcagagcacatattc

SEQ ID NO: 741373 - DNA, 82 bp, Homo sapiens
gaagcagccgatccagcctgcggagcctgtggggcagatgaggagcgggaaggcctcctgcaccctggagaccgtgtgggaa

SEQ ID NO: 741374 - DNA, 74 bp, Homo sapiens
gatggaatgtgctttagaagttaaaaagttccaaaagctgagacaagatcttgaaatggtactgtccactaagg

SEQ ID NO: 741375 - DNA, 96 bp, Homo sapiens
atcttcctataaatagcaatccagcagatataccagattcatcattgtgggagaatccagattctgcgcaagcaaatggaattgattctgttttgt

SEQ ID NO: 741376 - DNA, 95 bp, Homo sapiens
aggaagcgatggcttcagacagcatatttgagtcatttccttcgtacccacagtgcttcatgagagatccggccccacatcgcaactcttcgtaa

SEQ ID NO: 741377 - DNA, 82 bp, Homo sapiens
ctggaggattgtcactccaacctcttttcgctgcgtccgtctccaagagagtatgaagagagtgcgtctgtagggcagggaa

SEQ ID NO: 741378 - DNA, 100 bp, Homo sapiens
ggagccccagagccaagtgcgagcccagcgggagaaaatcaaggaggtgggtaaagcaggaatctgagatttccaaggaatctcaagaaatggatgctcg

SEQ ID NO: 741379 - DNA, 100 bp, Homo sapiens
catcaagaagtttctggaatcagaagatgaccctgtcataaagaaaattgcccttcgggaaatccgaatgctcaaggcagctgacacacaagagttcagg

SEQ ID NO: 741380 - DNA, 101 bp, Homo sapiens
cccacggagctggaggtggcttggactccaggcctgagcggcatctaccccctgacccactgcaccctgcagcccatcgccgaagcaccattcaagttcga

SEQ ID NO: 741381 - DNA, 89 bp, Homo sapiens
gccaacagagcagcagctacgggcagcagaatgatggtgtgagcatccccggggagtacacttcctttctggctcccatctcttcctcc

SEQ ID NO: 741382 - DNA, 74 bp, Homo sapiens
ggcagcggcggcggctggactaaacaggtcacctgcaggtgaatcagctcccggccgactttaggattcttctg

SEQ ID NO: 741383 - DNA, 90 bp, Homo sapiens
cccgaggacttcgtggacgacgtgagcgaggaagatcccagctctcctgttggcttcgtgcttggggtagatcttcttcacatattcccc

SEQ ID NO: 741384 - DNA, 75 bp, Homo sapiens
gccggcctttgtcagagccatcatggtctatccttcactggagtctgatgatgatgaccctgctttgaaatctcg

SEQ ID NO: 741385 - DNA, 100 bp, Homo sapiens
ttcatcccttctgtggcagttaggagactgaatcaaggtccagagaaggtggaggaatcctgatactgagcgagtccggcagcgtcttctcttgagggag

SEQ ID NO: 741386 - DNA, 74 bp, Homo sapiens
cgggtggcggcgaacgcggagagcacgccatgaaggcctcgggcacggcctccggtgtggctgtctctgatggt

SEQ ID NO: 741387 - DNA, 96 bp, Homo sapiens
cagccccggcctggccccggcccctcctgcccatggcggtggccgagctgtacacgcaggcccagtggagcaggcagcaagtaaaggaggagctgg

SEQ ID NO: 741388 - DNA, 50 bp, Homo sapiens
caaaactggaaggcattctgaagtacacgaacatggagctgatccaggac

SEQ ID NO: 741389 - DNA, 73 bp, Homo sapiens
gccgacagcgaagctgagcgtaaaggtattcagaaacgtgaagccagcaattgtttcgcaattcggcattttg

SEQ ID NO: 741390 - DNA, 82 bp, Homo sapiens
gccgaggcggccacccgagacgcggcgcgcacgctccggcctgcggagcaggccgggctctcgccatgggtcactgtcgcct

SEQ ID NO: 741391 - DNA, 74 bp, Homo sapiens
tctgtgactattaagaccatgttggaagctaccagagattcactgactgctataagtgcttctaccagttgcag

SEQ ID NO: 741392 - DNA, 96 bp, Homo sapiens
tattctggtggggagatgaacccaacctagtgggtgtaatacatcatgaactgcagggccaagctataacatcagaaatggtgaatgaatacaaga

SEQ ID NO: 741393 - DNA, 82 bp, Homo sapiens
cttctctttcaaccaggactgcacgctggctacagcaaacatcattcaagatgtccagcaaagggagcagcacagatggcag

SEQ ID NO: 741394 - DNA, 82 bp, Homo sapiens
cagggatgagtcatgtggcagtggaaaatgcgctcgggctggaccagcaggttttaaaatcaaagatgggaaaatcggagaa

SEQ ID NO: 741395 - DNA, 83 bp, Homo sapiens
cagttacactgcttgtagctcttaagagcagaatcggagatcagaggaggctcatagagctgaacagttgcaggatgcggagg

SEQ ID NO: 741396 - DNA, 115 bp, Homo sapiens
ctgttccttttataggctgcaggtagctgccaagtttatgcctgtatccagccttattgtggctctgtcctgtccccgtatgagaggcagcttaacctggatgccagcgtgcagc

SEQ ID NO: 741397 - DNA, 100 bp, Homo sapiens
tcttttcagcaagcctatatcacatgtttatgttctatgctccctaatgaagatgctattaaggagatgatgaggagtctgatgaggaagctgtgaagaa

SEQ ID NO: 741398 - DNA, 75 bp, Homo sapiens
caggtaccaggtagccccaaggaggagctgccgacctggcaggcctcaggcccaggcccaaggccaagtgagaga

SEQ ID NO: 741399 - DNA, 82 bp, Homo sapiens
tcacgacgggccgagcctgccactgtgccttagctggaccaattattgtggagccacatgtcacagcagtatggggaaagaa

SEQ ID NO: 741400 - DNA, 90 bp, Homo sapiens
tgcactgcaactcggagaggacccagtcccttctggagctagagcttgacagcggatttgaaagaagccaacactaaaccacaaatatac

SEQ ID NO: 741401 - DNA, 73 bp, Homo sapiens
tttgctgagcacatcagtgatgaatgcaagaggcgtttctataagaattgggctgcgctggcctcggcacacc

SEQ ID NO: 741402 - DNA, 90 bp, Homo sapiens
gtcttaatcatggaacatttgaagtcacgtaaagaaggacctggaagccggcgagagagacccctgtctgcaacccgcaaaactctttgc

SEQ ID NO: 741403 - DNA, 83 bp, Homo sapiens
cccgccgccgccgttggctggagttgatattcactgatggactccaaagaatcattaactcctggtagagaagaaaaccccag

SEQ ID NO: 741404 - DNA, 117 bp, Homo sapiens
tttatataaagctggggcttggacacatgtaaagggaaacatgccaaatcagagggtgtaaatccatctgttggaagatcaacaattggaacgagttttggaaatgttcatctggac

SEQ ID NO: 741405 - DNA, 75 bp, Homo sapiens
cggtcgcctggaggaccagtatttcccatggaggccctacctgaacccatccttccatccctccaaaaaatttac

SEQ ID NO: 741406 - DNA, 83 bp, Homo sapiens
ccgcgcggccgcggcggcggagaagcagctcgccagccagcagcccgccagccgccgggagcacttctcagaacttctggatg

SEQ ID NO: 741407 - DNA, 75 bp, Homo sapiens
ctgaaacccatttgccagctcaaggtgttcctgatccaagcagaaccctgttatttgaagagcctgagaaatctt

SEQ ID NO: 741408 - DNA, 75 bp, Homo sapiens
ccttgtgccaaacgtctggccaatgtcgttcgccaagtacagggttatgtggtccgaatcagtggtgggaacgac

SEQ ID NO: 741409 - DNA, 97 bp, Homo sapiens
gcaaagttgtgttggatcattttgaaaaacagtattccaaagaactcggagatgcctggaatacagtaagaagcatcagatggtgaaggagaaggag

SEQ ID NO: 741410 - DNA, 83 bp, Homo sapiens
gctggggacgcgcgcggccgagactctggcctgcagtcgccgccgccgccgccaggtgcactacatcctccaggaggtggtga

SEQ ID NO: 741411 - DNA, 100 bp, Homo sapiens
cccgagcggaactggagaaagctgaggatggcccactgcgtgaccttggttcagctgtccatttcctgtgaccatctcattgacaaggacatcggctcca

SEQ ID NO: 741412 - DNA, 98 bp, Homo sapiens
ggaagctctttgcggtggcgttggtgctgtttgcggatgctgatgcaggtgctggagaatctggtaaaagcaccattgtgaagcagatgaggatcctg

SEQ ID NO: 741413 - DNA, 98 bp, Homo sapiens
tttcctccaacattgatgttcctccagcaaggagtcagaaataccatcagaggaggggtactgtgactttaatagtaggccaaatgagaactcttatt

SEQ ID NO: 741414 - DNA, 101 bp, Homo sapiens
cccgcagcctggacgacatcgacctgtccgccctgcgggctctgccgacttccagttctggaacaagatggttaaactcatttttccctgctctgctcctc

SEQ ID NO: 741415 - DNA, 113 bp, Homo sapiens
gaaactgaggcctggagaggttaaagagacccgttcagagtcctacagtggcaggctacccacctttctgttctgagacccctcaagagacatataagaaggtgatgaactgg

SEQ ID NO: 741416 - DNA, 83 bp, Homo sapiens
cgctgccgctgccgctgccgcacctccgtagctgactcgcttaaagcttttcaagccaggccaagaagctgtgaagtaccagg

SEQ ID NO: 741417 - DNA, 75 bp, Homo sapiens
ggaggcttggtgactccagtggcccaggtgaaaatggcattacggacatcaggacatctcttactgggagtagtt

SEQ ID NO: 741418 - DNA, 74 bp, Homo sapiens
gtccctcggggcgtctgggcagcctacgctttccggaagaaatgttggctatttggcgatgagaggtggtgaac

SEQ ID NO: 741419 - DNA, 75 bp, Homo sapiens
cgatgggatgcgggggctcgcggtgttcatctccgacatccggaactgaaaatcctgccttgcttcgttgggcct

SEQ ID NO: 741420 - DNA, 100 bp, Homo sapiens
ggcttgtgatccatgggcgagtctacgatgtcacccgcttcctcaacgagatcttgagccagatgattgtgcatccatttacatctttaatgtagatcca

SEQ ID NO: 741421 - DNA, 82 bp, Homo sapiens
cttcatcgtggtgcagaagaggcaccacacccggctcttctgcactgacaagaacgagcggagcttactcacatagcatatt

SEQ ID NO: 741422 - DNA, 75 bp, Homo sapiens
gacgagaagcctgaaaagtcgcagcgagctggagccgccggagatgtatggtctgctggctgtgtgttggctgag

SEQ ID NO: 741423 - DNA, 83 bp, Homo sapiens
ctgctgcagtgagatcccaggaagctggcgtggtgaccaagatgaagatgcagaggaccattgtcatccgccgagactatctg

SEQ ID NO: 741424 - DNA, 96 bp, Homo sapiens
ttagttgatgatttagttgattctctgaagacaaatgctgtgcttcatgaagttaaaagagaggggctccccgtggaacaaaggaatgaaatcttg

SEQ ID NO: 741425 - DNA, 96 bp, Homo sapiens
tggcagttgagagactgttggagcctcttgttacacagagggtgtggcctgcttctcagcgagacgtattatatctttctgtcattcgaaagatac

SEQ ID NO: 741426 - DNA, 100 bp, Homo sapiens
gccgggagcacccaaggcaggaaaatgaggtgattttcttccacccccacctccacctctagatgattccagtgcccttccatctatctctggaaacttt

SEQ ID NO: 741427 - DNA, 100 bp, Homo sapiens
gatttgttctgtatcagaagacaatatcatgcaagtgtggcaaatgaccatgccagatgatgtccaaggcactgttgcaaccatttatacaagcagtgaa

SEQ ID NO: 741428 - DNA, 74 bp, Homo sapiens
gggtcctttatatagaagggagagtagcatggaccgagacggcacaatgaccattgactggcaagaatggcgcg

SEQ ID NO: 741429 - DNA, 100 bp, Homo sapiens
tcgggaacaggtaccggctgggccggaagatcggcagcggctccttcggagacatctatctcggattcagtccccgtgggggtggctttggcggccgagg

SEQ ID NO: 741430 - DNA, 83 bp, Homo sapiens
gaaaattcggccagggttctcgctcttggaaacctggacaagcatgaagaactagaggagcttgtagcaaggttcttaggagt

SEQ ID NO: 741431 - DNA, 75 bp, Homo sapiens
aacctgccgaaagcccacacttgttggctcttcgaaatgaggaggcagaaaatgaaaacagcaaattaagaagag

SEQ ID NO: 741432 - DNA, 75 bp, Homo sapiens
gcaattgtgatgagatattctgctgagtggaaggtgaaggtacaagtaagaagctggcgaaacatagagctgcag

SEQ ID NO: 741433 - DNA, 82 bp, Homo sapiens
gcgtgtctcctcctagtgcttcccgtctcagaggcaaactgtactccaaagattcaggtttactcacgtcatccagcagaga

SEQ ID NO: 741434 - DNA, 100 bp, Homo sapiens
ccatcgttgctgccttcttcgtcaaggaactgtggctgcaccatctgtcttcatcttcccgccatctgatgagcagttgaaatctggaactgcctctgtt

SEQ ID NO: 741435 - DNA, 100 bp, Homo sapiens
tgatgtggatgatgccaaagttttattagattcccgacagttaagcaatggggagacatttggctttgctcctgcttctgctccttctcttccaacattt

SEQ ID NO: 741436 - DNA, 100 bp, Homo sapiens
agctgctatggtgctgagtttcctggtagagccggccgagctgaggcggtcgcggccatgaagtgtgaagcctcagtttaggtcatctggtggttcagaa

SEQ ID NO: 741437 - DNA, 75 bp, Homo sapiens
actgaagatttacatgaagaaagcccaggacctagaagtctatattcaagagctcaccactgatgggctgctttc

SEQ ID NO: 741438 - DNA, 100 bp, Homo sapiens
ctccaccgagtcgtgctctcgccccaacccgcgcgccagcctagtgtgttaattgtaacctacaaggagcctgcaaaatcatctactcagtttggatcct

SEQ ID NO: 741439 - DNA, 75 bp, Homo sapiens
tttccaaggaagaatttcctctgaagcaccggtgtcgtgaaaactacccctaaaagccaaaatgggaaaggaaaa

SEQ ID NO: 741440 - DNA, 92 bp, Homo sapiens
gccccaccaggaggcgactcctcgggcctccaaaggggcccaggctgggtggactgggtggttatggatcaggagacagtgaagatgagagg

SEQ ID NO: 741441 - DNA, 95 bp, Homo sapiens
cacgccgggctttgttgtggaaatcccggttacctggagatcatgaatcagacagataaaaatcaacaagaaatcccatcataccttaatgatga

SEQ ID NO: 741442 - DNA, 82 bp, Homo sapiens
attggacacagtgccagagtgtatgcactttactacaaagatggacttctctgtacaggaatttttcacagacaacctatgg

SEQ ID NO: 741443 - DNA, 100 bp, Homo sapiens
ccgctgtcaagccgcataacagaccaatttttattccacgaggaggagtacctggaaattaggctcaaagagagggctgaactccagttttgaaacctct

SEQ ID NO: 741444 - DNA, 100 bp, Homo sapiens
gagctcatctggaattttgccgatttcatgactaaccagtatatgattctataacagactcttccagaaatgatatgaagaggaaatttgccctgacaat

SEQ ID NO: 741445 - DNA, 100 bp, Homo sapiens
ggaacgatgggagacgttctgcacaagctccttaggagaaactaacaagaggaacacggtagatctaaatgttctgaaggatctggaaaagagaaaagct

SEQ ID NO: 741446 - DNA, 74 bp, Homo sapiens
ggcgcttccgagcctcacctttattctctcagcacactgcagggaagaaggagaaagggccaacccctgaagaa

SEQ ID NO: 741447 - DNA, 98 bp, Homo sapiens
atttatagacaatgaaatgatagtgatccttggtcaaatggatagccctacacagatatttgagcatgtgttcctgcttgttggggagttcctggaag

SEQ ID NO: 741448 - DNA, 75 bp, Homo sapiens
tgtgatattactgaatattgtactggagactctggtcagagtgcacagttgactgagatcatcaacagtttgatt

SEQ ID NO: 741449 - DNA, 50 bp, Homo sapiens
ccgagtcgcgcggaggcggaggcttgggctttctgaaaaggatatgagca

SEQ ID NO: 741450 - DNA, 100 bp, Homo sapiens
gggcggctgagctagagactgccggtgccttcatgggcaggactaggccgaaaactccccaggatatagtttctttggtcccacgcctgcggcacatcat

SEQ ID NO: 741451 - DNA, 90 bp, Homo sapiens
gcgtcctggactcctctgagaaacagctcctggatctcccaggtatcattgaaggtgccaaggatgggaaaggtagaggtcgtcaagtca

SEQ ID NO: 741452 - DNA, 51 bp, Homo sapiens
gttatttgcctcagtaaaagactcttgaagtcctattggctggataatttt

SEQ ID NO: 741453 - DNA, 100 bp, Homo sapiens
tgcagcagtaccgagtgccccggggaagccattccccaccccccagctcaaaagccaaaagtctctgagaacgactttgaagatctgttgtccaatcaag

SEQ ID NO: 741454 - DNA, 75 bp, Homo sapiens
gcggagctgtgcgagagcctcctcacttggcctgcaggacgctggcatcggattcatcctggtgatagaccggcg

SEQ ID NO: 741455 - DNA, 100 bp, Homo sapiens
tgaaaggagagacacttgtgaacattcaagtgaagcaaaagcctttcatgattataaacgcttcgttaagggactcaggcagtacgggaagaacttcttc

SEQ ID NO: 741456 - DNA, 101 bp, Homo sapiens
gacaactgcaagggggaagtagagagataacaaaagctgctcagagtctcaatgaacttgaaagatgtagcacttaagcctcaggaacgtgtggagaaacg

SEQ ID NO: 741457 - DNA, 100 bp, Homo sapiens
acaactcgaacaaagacagccagagtgaagggaaatgatatggaacctagcaaagctgttccactgaatgcatctaagcaagatggacctatgccaaaac

SEQ ID NO: 741458 - DNA, 73 bp, Homo sapiens
gaaatcgggctgaagcgactgagtccgcgatggagggcatgagccagaaggagagctctaagtctgccatgat

SEQ ID NO: 741459 - DNA, 100 bp, Homo sapiens
acttaccatacggccgcctctacccttggcagccaagctcagattggtcctccagaagtacatttagaagctgaagataaggcaatagtgatacacatct

SEQ ID NO: 741460 - DNA, 98 bp, Homo sapiens
ggctggaccactcacagcagatttcattgtcaaggtagacgaagttcctgatggagctgtaaagccacccacaaacaaactacccattttcttttttg

SEQ ID NO: 741461 - DNA, 100 bp, Homo sapiens
gtggtgaagaaagtgagcgaggagtcagaaactcagccactggttgccttggtaggcaataaaagttttgagagtattttagaagggctttatggaccac

SEQ ID NO: 741462 - DNA, 80 bp, Homo sapiens
aaaaacgcttttcacgtcacctggagagatgcacagaactgccattggatgtccagaatcccctgtagttgataatgttg

SEQ ID NO: 741463 - DNA, 102 bp, Homo sapiens
atctcgctcggctgcgggaaatcgggctgaagcgactgagtccgcgatggagcgtgagtgcatctccatccacgttggccaggctggtgtccagattggcaa

SEQ ID NO: 741464 - DNA, 90 bp, Homo sapiens
accaggaactcctgctgcaaaaatggaacaagttccagcacaagtgatcctgggtgtttggctgacctacagatacaggaaccagaaaga

SEQ ID NO: 741465 - DNA, 90 bp, Homo sapiens
aaagggctgtcatctggttggatacttctctaaggtaagatcctggttcactgcgtcatgggccgcagccggtcagccaccctggtcctg

SEQ ID NO: 741466 - DNA, 98 bp, Homo sapiens
aggcggaggtcgataagctggaactgatggatgaaacgaggaggaagagatagtgaccgtaattcatcagaagaaggaactgcagagaaatccaagaa

SEQ ID NO: 741467 - DNA, 101 bp, Homo sapiens
cgggcttgtgtcatgagcatggcagaggcacccccagggacattagcaagccaatgaagtcatcccaggggtctgtggaggagcaagaggagctggaggag

SEQ ID NO: 741468 - DNA, 98 bp, Homo sapiens
gatcccagcctcaggcgtgcgcggacggtgtgcggtatgccgagattttgctgtcctggaggaccacaccctggctcacagcctgcaggaacaagaga

SEQ ID NO: 741469 - DNA, 75 bp, Homo sapiens
ttgcagagcctgcggggcaagatctccattcgttatctatgacatgaattccttaatgatgggagaagataaaat

SEQ ID NO: 741470 - DNA, 75 bp, Homo sapiens
gggcccgggccatggccgccgccgatgccgagctgcggttggatttctcacgatgtccagtgttatctccatgtc

SEQ ID NO: 741471 - DNA, 83 bp, Homo sapiens
agctcaaggaaacctttccaacacagatgtccaagctgccaaatttctgacagtcagacttgtccacaagaactcaactggca

SEQ ID NO: 741472 - DNA, 97 bp, Homo sapiens
gggtagaatggccgctgccgccgtcacccgcgggaccccgggaggtttccaatacttatctacaggaatcgccatgaccccagctctgagggaggca

SEQ ID NO: 741473 - DNA, 98 bp, Homo sapiens
ggcgttggtgggagccgtgctctacctctatccgaatttgcaccatcctgggattgtaaacctggaatgtatgtttgaaaccccagaacgagtctttg

SEQ ID NO: 741474 - DNA, 101 bp, Homo sapiens
cccagctgcggccgccgcggagatgtgacccggcagtacggcaaatatggcggaggtttaccaaagatgcaggtcattaggaactattctggaacaccacc

SEQ ID NO: 741475 - DNA, 100 bp, Homo sapiens
agggatgggttacatgcccaagaggggacttgatgttaacaaatgtgagattgccagcatgcttttcacttccactgcatctctcgctggctcaaaacac

SEQ ID NO: 741476 - DNA, 73 bp, Homo sapiens
gagcggagcctggcgggcgtgggaacccaggccccgccgaggcggccaggaagtcctgagttgaggcttgcgg

SEQ ID NO: 741477 - DNA, 51 bp, Homo sapiens
caggccgtctctgtttgaacaagccgtttgagcaaggaagacattgaacgt

SEQ ID NO: 741478 - DNA, 96 bp, Homo sapiens
gggcaacctgagttatcagaaagtgacttcctggccttcccttctttactgatcaggtgcaagttcttcagtctgactgagacaccagaggattac

SEQ ID NO: 741479 - DNA, 101 bp, Homo sapiens
cgagagtcaccacaaggccaagggcaagtgatttgacaggaactttatattgctgttggaatatctggagccatccaacatttagctgggatgaaagacag

SEQ ID NO: 741480 - DNA, 88 bp, Homo sapiens
ctggatgaactgataaaacccaccagtctagatgaggaaaatgaggcccaaagaagtgatgccacttggttaaggtcccagagcaggt

SEQ ID NO: 741481 - DNA, 101 bp, Homo sapiens
ctttcatgcagtgacatgttgataaaaaatgatgaactggctgcggctttatggctacctgcctcagcccagccgccatatgtccaccatgcgttccgccc

SEQ ID NO: 741482 - DNA, 75 bp, Homo sapiens
cacattggaccctcctcccaactgtaggcactacctggcagcaccatctaaacctgtatcatctgctgtggtccc

SEQ ID NO: 741483 - DNA, 74 bp, Homo sapiens
accctctctgcagaactttccagtcgactctcaacattccttcctagtagcttctgtatgtacactacgttgat

SEQ ID NO: 741484 - DNA, 90 bp, Homo sapiens
tattgggagatccacagctaagacgccaggacccactggaagcctagaaatgacatcacttagtgctcttacccagctgatgaaaaagat

SEQ ID NO: 741485 - DNA, 86 bp, Homo sapiens
ccgagaccgcggccgggaccgaggatcagtgtgcgtgtgaccaccatggatgcagagctggagtttgccatccagcccaacaccac

SEQ ID NO: 741486 - DNA, 100 bp, Homo sapiens
cttttatctgcctagagaagaactatggatctacaacatggagactggaagatggtactatcgtggtgcagtgggggccctcctggtgtttgacctaacc

SEQ ID NO: 741487 - DNA, 100 bp, Homo sapiens
agtgctttggccaacctgacatggcagtcccgaacacaggatgaacatccgaagacaatgttctccaaagataagataactgtgtccagaggacccccag

SEQ ID NO: 741488 - DNA, 100 bp, Homo sapiens
gagaagacctccaggaccccttggggctgactgttcgggggtcttgtctggattttggttgcctcctccaatgttcctctacctctactacaaggatggg

SEQ ID NO: 741489 - DNA, 98 bp, Homo sapiens
agatttcgttcggcgtgttgagcagcgaaagatcctactggacatgtcagtgtcctttcacacccatgtgaaagaggctttttggaaaggatataaac

SEQ ID NO: 741490 - DNA, 76 bp, Homo sapiens
gtgcgtcaatcagagcgtcctgtgcggaaactactttgcttcgcactttttcatgggaggagagaaattcgacacc

SEQ ID NO: 741491 - DNA, 75 bp, Homo sapiens
acaaaacaattattccccgacttacagacttgtgtatgcggatacctgcttcagtaccatcaagttaaaagcaga

SEQ ID NO: 741492 - DNA, 74 bp, Homo sapiens
ctcagcagcaccggcttctttttgaagtgtttgacgaaaaccgattgattcgagaaatgatggagtccttcgaa

SEQ ID NO: 741493 - DNA, 96 bp, Homo sapiens
ctcccagggccaggcgccgctcagaacgtacagtgctgtggataccaatccactttctctgtatgtcatgcatccattctggaacactatagtaaa

SEQ ID NO: 741494 - DNA, 82 bp, Homo sapiens
ataggtgtatcaagtaatggtgcaaagcctgaagctgtttgtactgatggcaagctcttcaaccacttagagactatttggc

SEQ ID NO: 741495 - DNA, 75 bp, Homo sapiens
tgatgatgaacagtttgtcccagattttcagtctgataaccgagattcctcaacagctgaatgggagtgattgtg

SEQ ID NO: 741496 - DNA, 82 bp, Homo sapiens
agcctcagttggaagcagccgatccagcctgcggagcctgtggggcaggatgaccagtgtcccagtgaaggaacgagtgaag

SEQ ID NO: 741497 - DNA, 100 bp, Homo sapiens
gccatggctcacctccggggatttgccaaccaggccaggacgactggaatgggaccaggccgtcgctgaaggcccctcctgctaggccagtgaagggagc

SEQ ID NO: 741498 - DNA, 80 bp, Homo sapiens
cgggacccggtgtctgctcctgtcgccttcgcctcctaatccctagccactatgactacatgaggaaataattgactttt

SEQ ID NO: 741499 - DNA, 100 bp, Homo sapiens
tttaacggagatcctgatgaagttcgagcactaatatttaagaaagaagatgttaactttcagaaactgattcagcagtacagaaagaacttagaaacca

SEQ ID NO: 741500 - DNA, 115 bp, Homo sapiens
ggaagatgttcagcgtagagtcgctggagcgggcggagctgtgcgagagcctcctcacttgggattctttctactaatccagatacttgttgaagtgctgactagtttcttgggg

SEQ ID NO: 741501 - DNA, 90 bp, Homo sapiens
agctgggacacccgggagtcaggaaatggtgtgatgaatgcagactctgctaccattttggctgtttggatcctcctttgaaaaagtctc

SEQ ID NO: 741502 - DNA, 75 bp, Homo sapiens
ggagaaggacacggtgaagaagctgcaggaacagctggaaaaggctgagaacgggaagcttgtcatcaatggaaa

SEQ ID NO: 741503 - DNA, 97 bp, Homo sapiens
taagagcttggaggcggcccgcgggtccctgactatggctccccagagcctgccttcatctaggatggctcctctgggcatgctgcttgggctgctg

SEQ ID NO: 741504 - DNA, 75 bp, Homo sapiens
ctcgaagtgcgcaaacttgacactcaccctgaccgaggctgctattccaaaaagctttcaactctcagcagttag

SEQ ID NO: 741505 - DNA, 98 bp, Homo sapiens
ccgggatcgtgaccgagaccgtgaccgagagcgtgaccgagagcgcgaatatcgtcatcgttagaagcagcagcacagcaagtggataaaagcacaga

SEQ ID NO: 741506 - DNA, 126 bp, Homo sapiens
agcaggagtcgtccgcttatagtggaggctgctaggagccggtcagaggagagaactcgatgccaccgcaacggtattggcgaaccggcaggatgaaagtgagcagtccagaaagcggcttatcga

SEQ ID NO: 741507 - DNA, 80 bp, Homo sapiens
cagccccttgtcagccagggctgaacccccgcaggatgaccagtgtcccagtgaaggaacgagtgaaggtgtctcagaac

SEQ ID NO: 741508 - DNA, 90 bp, Homo sapiens
tgacgggcctggtcctgcctcactttctgccatgactaagagctccctgaggcctctccagaagcaggatggtgattgctcacaccaaag

SEQ ID NO: 741509 - DNA, 75 bp, Homo sapiens
tttgaacaactatccttgcaagaaaaatacctttacaagagctaaggaatccagagtcttgctctgtcgcccagg

SEQ ID NO: 741510 - DNA, 100 bp, Homo sapiens
tggaccgggacgcacgctcagctgaggaggacccccaaaggctgatttggagcaatataaaaaagctttaactgatgcaggatgcaaccttaatccttta

SEQ ID NO: 741511 - DNA, 100 bp, Homo sapiens
caggcccaggaattcccataccaaccacagagagtttattaaccacttaacctctcagaactgaacaaagacaacattgttcctggaacgccctcttttt

SEQ ID NO: 741512 - DNA, 112 bp, Homo sapiens
tcgagactactggccgaaggggcgtctgcggctctccgccgtccccagccctgcctctccctgggctctgctgtactggaacccaaggagatgttcacaaggaagatggaaa

SEQ ID NO: 741513 - DNA, 75 bp, Homo sapiens
tagaacagtgtgactacccacctcttccttcagatcactattcagaagaaccaacaaatggaattttcttgagca

SEQ ID NO: 741514 - DNA, 95 bp, Homo sapiens
gatgctgtgaaattctttgtggcagtcccagaaatgttgctgaagtgctgctgaaagggccagagatgcaaggatttgggatacattttgaacct

SEQ ID NO: 741515 - DNA, 99 bp, Homo sapiens
gcagacgcgggccagcctcagcaccgacagccgacgcgcagatagcagagccatccttgggttccaacaggatggattcctggtgctggaaggattctt

SEQ ID NO: 741516 - DNA, 97 bp, Homo sapiens
cggatattcagttgcacatccccacatcaatgcactgccaatgaaaatgtgccagaggaacttcaagaaccattttacacagatcagtatgaccagg

SEQ ID NO: 741517 - DNA, 101 bp, Homo sapiens
agaaaggcgaagctggatgagaactcggccttccttcagttcaactggaaggcggacgtggtggagtcctggatcgaattggcagagggggtcgatttggg

SEQ ID NO: 741518 - DNA, 82 bp, Homo sapiens
tgcgtgaaagtgggactcctcctggtctcttcctcacccagtgctgtttctcaaggatggagaaggaggagacaacccggga

SEQ ID NO: 741519 - DNA, 98 bp, Homo sapiens
tgaacttctcatgaaactctcaggaaagtgaaaaggtttctgaatatccagcagtgattgtggagccagttccaagtgccagattagagcagggctat

SEQ ID NO: 741520 - DNA, 83 bp, Homo sapiens
cagtccgggcaggggcagcgggagccggccgggggttgtgtccactgtggtccccgactctgcccacaagctgttcatcgggg

SEQ ID NO: 741521 - DNA, 74 bp, Homo sapiens
ccgagttcatcgcctacccccatctccgcatcaggaccaaggaaccagcacctatgacagaagatctgctagaa

SEQ ID NO: 741522 - DNA, 101 bp, Homo sapiens
acaagataatagccagctccccagaaatgaacctgcccacggtgtccgcgctcaggaaatatggctacacacacctttctgcaggagagctgcttcgtgat

SEQ ID NO: 741523 - DNA, 101 bp, Homo sapiens
gagaacactgctctggatgatgcagaagaggagtcctttaggaagggtgaaaatgggatggaggattgtgtcatggccctagaaaccttgtttagtgttct

SEQ ID NO: 741524 - DNA, 99 bp, Homo sapiens
gccccagtgagaaaggtcaccgcaagtacagagagtacagccccccatatgcgccgatgttgtgactgtgacagactcactggggtttgtacatgctgg

SEQ ID NO: 741525 - DNA, 83 bp, Homo sapiens
ccttgctcctcgccgcggcggggactgcagtgagcagcggttccatcgcagtgaacgccgactcttcggtgcagttgttggcc

SEQ ID NO: 741526 - DNA, 98 bp, Homo sapiens
cgctccccgccgggacgccccgcgccgagccggaggccgcgtggacccgaaagccgctgggaaaaatcgcccaggaccacaccgcagcgtaactgcag

SEQ ID NO: 741527 - DNA, 87 bp, Homo sapiens
ctctgggacctggttgacaggatagggaagatgttaccgagtacttcagtgaattccttagtgcaggggaacggagtcttgaattcc

SEQ ID NO: 741528 - DNA, 90 bp, Homo sapiens
agcacatctcagtgaatttgcaagtgacagccgctcaggaagcaatcttgcatgcgtctggaaatggcacaaccaaggactactgcatgc

SEQ ID NO: 741529 - DNA, 100 bp, Homo sapiens
gcgactactacgaggcgcaccagatgtaccggaccctgttcttcaggtcaaaatgcagatcttcgtgaaaacccttaccggcaagaccatcacccttgag

SEQ ID NO: 741530 - DNA, 74 bp, Homo sapiens
tccttcatgtcaagagagcgtgagctgctggggaaggtgcatcgccatctacaggagcagaagaatggacttgc

SEQ ID NO: 741531 - DNA, 75 bp, Homo sapiens
ccgtccccctgccccgttcacaatgtattagaaaactactcggatgctccaatgacaccaaaacagattctgcag

SEQ ID NO: 741532 - DNA, 83 bp, Homo sapiens
gggcgaggcagggccagcagcaggcgggagagcactgcagtttcctcctgaaggctggctccggctctccctcaataatggca

SEQ ID NO: 741533 - DNA, 100 bp, Homo sapiens
tggcattgttgggagcgctgttttcgtgatcttcagaccccaggttctttgcattggggctttccagctctcacagaaccttcagcatccccagctgccg

SEQ ID NO: 741534 - DNA, 100 bp, Homo sapiens
gtcggctgcggttctctctcgaccccttctgcccggcgcttcggcccgggccgctcaggtgcagcttcaaggttactgactttttatgatgtttggtggc

SEQ ID NO: 741535 - DNA, 98 bp, Homo sapiens
ttggggaggcactattagaggctgaaactattgaagaacaagaatctccagtgaactgctttagaaaattatttggccctcgggaccaaggatcacgt

SEQ ID NO: 741536 - DNA, 75 bp, Homo sapiens
tgcctgctatcgccgagttctacaacacggttgtttgcattcgctccacttggaatgctctctctccaaagctga

SEQ ID NO: 741537 - DNA, 74 bp, Homo sapiens
cccagccgacatgtctctagtggcggaagccttcgtctcccagattgcagactgattcttgctattccaaatcc

SEQ ID NO: 741538 - DNA, 97 bp, Homo sapiens
ctttacttaaacatctacgtgcccacggaagatgatactgaacggctgtattcagtggtgtttcaagaaatatgtaatcgctatgacaagaaataca

SEQ ID NO: 741539 - DNA, 75 bp, Homo sapiens
ctcgtcaccagcaagcttgcgggcttggaagctcgaagtctggctgtggccatgggagatacagtagtggagcct

SEQ ID NO: 741540 - DNA, 97 bp, Homo sapiens
tctactcacaggctccgatggcggcggccgccctgagggaccccgctcagtggctacagcaaaccaaacagcccagcagcccagcagcccagccatg

SEQ ID NO: 741541 - DNA, 74 bp, Homo sapiens
ggccctcaccgccctcaccacccctatccagacggctgcccttcaagtaccagatttgttaaggattccaagta

SEQ ID NO: 741542 - DNA, 82 bp, Homo sapiens
ggaatgaggagttacagagggccgagaaggacaggatcaggtctctaattaacagaagatggcaaagcccagccacagcagc

SEQ ID NO: 741543 - DNA, 98 bp, Homo sapiens
agcttacaacaagaaaaagaagcgtatggactactatgactctgaacaatcgccaaactgaggcagcaactacaacgcagtaaacagagtagtcgtca

SEQ ID NO: 741544 - DNA, 100 bp, Homo sapiens
gctgccatggatgccaccaagctggaaagaccacagcaagattctttcattcgtctcctcctagcctgggggaccaggctcgaactgaccctggacatca

SEQ ID NO: 741545 - DNA, 50 bp, Homo sapiens
cgccaaccccttcgagcaagacgtggtctacatcagcatcagcatctgcg

SEQ ID NO: 741546 - DNA, 101 bp, Homo sapiens
ctacctattaaaaggaccatacgagtcctagatgtcaataaccagtccttcagagaacaagaggcttctccagggaaagtgaccgaggcagtgaaagaggc

SEQ ID NO: 741547 - DNA, 100 bp, Homo sapiens
acagacatgactttccggcacgtgggttccaaattaatagttattgaggtggtgccttctgcctctgccctgatcatcaaagccctcaaggaaccaccaa

SEQ ID NO: 741548 - DNA, 75 bp, Homo sapiens
cagcgctttggatgccgagagcgagtatctgttgactagataacgaaggacaatgcatatatacaaaattgctgt

SEQ ID NO: 741549 - DNA, 144 bp, Homo sapiens
gcctccgtgggacatggagtgttccttccgctagtgatcctttgcaccctgcttggagacggacttgcttccggccctccctatcctgaagacattagctgagagtctggcaccttttaaaggtctgatcatcaattgtctctc

SEQ ID NO: 741550 - DNA, 99 bp, Homo sapiens
ctgtcaagacatttcttcggcattctgcaacagacttggattcacttgctggtcatcattggtagcatcttgtcttattttttatttgccatagttttt

SEQ ID NO: 741551 - DNA, 100 bp, Homo sapiens
tacagagttatcaggttccagaccctgccttctcttctgaaaggagtatgctgctgctgttccgctttgcgtcctcgctacaaacgcctggtggacaaca

SEQ ID NO: 741552 - DNA, 100 bp, Homo sapiens
tccacgggttttagaaaaacaagaattacagcagccaacctatgttgccctgagttacataaataggccatccggctgtccttagagcaagccctgcctc

SEQ ID NO: 741553 - DNA, 109 bp, Homo sapiens
tctgaaagctcttcttgaaaaatgcaaagatgtagatgagagaaatgagcaagatggaaagttgccttttgttcctccggaggaagaatttattatgggagtttccaag

SEQ ID NO: 741554 - DNA, 75 bp, Homo sapiens
gtggtcatgaacagtgcacaggcttccatcaactcgcagacctctgaagagagtgccattgagacgggttccagc

SEQ ID NO: 741555 - DNA, 98 bp, Homo sapiens
gttaacttgggagaaagtttcatctgtggatggagtattgaaaatcagaaagtgcagttgacagaagggtcacgttcacactacaatatcaattgcaa

SEQ ID NO: 741556 - DNA, 82 bp, Homo sapiens
ctttgtctttgacgggtcctccctgcctgccgatgtgcatcggtacatgaagattgggaatgtaagacggacttagatattg

SEQ ID NO: 741557 - DNA, 100 bp, Homo sapiens
catagtcaactgcgtggaagagaaggcaagaaaattggatgtatattttgaatatgaagaaaaaataatgagcaaaactactctggataaatctcttcta

SEQ ID NO: 741558 - DNA, 100 bp, Homo sapiens
ctacagttgagacgatttgctcatggaacagcaggtctggtgttccttacggccctctcagggcttcgtgggacacatatgcaacatgcctatgattttt

SEQ ID NO: 741559 - DNA, 83 bp, Homo sapiens
ctcgattccccccacgcggcggcgccgcctgtttacggtgactattatatggttaaaaagattttggaggaaaacagttcagg

SEQ ID NO: 741560 - DNA, 75 bp, Homo sapiens
ccgaacacgagcaccacaggcgcccgaaggccggaacaggaactagaggctgctatccagccagatactagcctg

SEQ ID NO: 741561 - DNA, 74 bp, Homo sapiens
cctgggctcgagcctgcacatgaaggttggagcaaaacgtcccactcactggaggcacctgaggacgacggggg

SEQ ID NO: 741562 - DNA, 73 bp, Homo sapiens
tgggccctgggccagaggcagaaaacggacggaagaaaaggtctggccgattggccatctgcaagcttccctt

SEQ ID NO: 741563 - DNA, 100 bp, Homo sapiens
acttacttggataaagttccagagcctggagtgcccactgaaaccataaaggtttctgacgtagaagagcttacccctccagagcatctttctgatcttc

SEQ ID NO: 741564 - DNA, 75 bp, Homo sapiens
aaaaataaagtgttgagtaaacagaccaagttgggtattaatctctggagaagacacatccacagttagcacttt

SEQ ID NO: 741565 - DNA, 100 bp, Homo sapiens
ccaccagctaccatagttgctattgatgaagaaagtcggaatggtgctaaagagattgatatcgcagcgaccctggagcacttgagggaccagagacccg

SEQ ID NO: 741566 - DNA, 97 bp, Homo sapiens
cgccgcttagcctgatgctggaaggacgaagtggaaatcctgactgctcgtcagaagaaagcagaagaactaaagagactcactgaccttgccagtc

SEQ ID NO: 741567 - DNA, 74 bp, Homo sapiens
gcgccggcctcctcagtgcgaagaagctgcagccgcacctggccaagggactcagaattcatgattgaagaaat

SEQ ID NO: 741568 - DNA, 87 bp, Homo sapiens
aaaatctgtttcagctgagatcaactatggaataaggtttactcagctctagccaagagcttagaagatgctctgaggcaaactgca

SEQ ID NO: 741569 - DNA, 75 bp, Homo sapiens
cggagccggcagcccagcactccgggccctcatctttgtgtcccatggagccggagagcacagtggccgctatga

SEQ ID NO: 741570 - DNA, 100 bp, Homo sapiens
ccggacggggcggacggcgacgcagcccgcggcagaagattttggaagatggcaaagttcatgacacccgtgatccaggacaacccctcaggctggggtc

SEQ ID NO: 741571 - DNA, 74 bp, Homo sapiens
caagatgtggcagaagaacaagaagttgagaccgagaatgtggaaacagattcagtgtaccactttgataagtc

SEQ ID NO: 741572 - DNA, 75 bp, Homo sapiens
caccgctttatcctgctgcgatccccagggaacaaggtcaaaatgcagatcttcgtgaaaacccttaccggcaag

SEQ ID NO: 741573 - DNA, 74 bp, Homo sapiens
ggccagggaaccctggtcaccgtctcctcagcaaccatgtccaagggacctgcagttggtattgatcttggcac

SEQ ID NO: 741574 - DNA, 50 bp, Homo sapiens
gggttctggagagcggggtgtgggaaaccaaggtgtatgttggtaacctg

SEQ ID NO: 741575 - DNA, 82 bp, Homo sapiens
tcccacctggcggccatcgtcatcctgctgctgaagatctggaagacgcgctcctgcgccgcggagctggagtttgttcaga

SEQ ID NO: 741576 - DNA, 100 bp, Homo sapiens
ctacacacggctctacctggacccaggactgagggaagcacaagcctatgcagacgacaacagtttgctgttcatggagacatcagcaaagactgcaatg

SEQ ID NO: 741577 - DNA, 80 bp, Homo sapiens
caacattcagacccatttccagtcatgacctgccacagtgactcaggtcactcaaggaactatccgaccagctgccaact

SEQ ID NO: 741578 - DNA, 100 bp, Homo sapiens
agcgggaccttcctggaaaacaggcccagctctcaaggttgcaggtgaggtcccagcttgaagagaaagaaaacaagaagttccctgtgtttaaggccgt

SEQ ID NO: 741579 - DNA, 135 bp, Homo sapiens
cccagagcccctcgcggagggagcggcggccgagttctccagcctgctgcgcaggataaaaggcaaactcttcacctggatgtgatggtggcaggtgggatggagagcatgtccaatgttccatatgtaatgaac

SEQ ID NO: 741580 - DNA, 83 bp, Homo sapiens
cagatgcccaccgggatggagaaggaggaggaatcgtcaagctacaacttcaagcagaagagagaggagttgtgtctatcaaa

SEQ ID NO: 741581 - DNA, 74 bp, Homo sapiens
gccgaggcaccgaggcactcagaggaggagcgagaacccgagcagcgccatgagcaacactaccgtcgtcccca

SEQ ID NO: 741582 - DNA, 100 bp, Homo sapiens
ggggacggcagtgctgaggcggaacaggccgggcaccaaggcgcagcctgaaaactggttttttaaaatggaagccagattatgacagtgccgcttctga

SEQ ID NO: 741583 - DNA, 100 bp, Homo sapiens
tccgtgtggaccctgactcacagaccgtagctttatgggatctgcgtaacttaaaattaaaactccataccttcgaatctcataaagatgaaattttcca

SEQ ID NO: 741584 - DNA, 75 bp, Homo sapiens
ccagcctcaggcgtgcgcggacggtgtgcgggagtacgagagggcctccaaagtggaccagtttgtgacgcgctt

SEQ ID NO: 741585 - DNA, 78 bp, Homo sapiens
cacgtggcaggagatgctgaaccatgctacctgcaaggagcagctgatgagccagatccgggagacgcagcagctctg

SEQ ID NO: 741586 - DNA, 98 bp, Homo sapiens
ggacagcggccccctggagggggcagtcccgggagaacctgcggcggccggagcggaccctctttgcaagttcagtgcttaacctgaccgaactggct

SEQ ID NO: 741587 - DNA, 76 bp, Homo sapiens
cgctcgattttgtcaccgttatgtgggaagcgaatccagaattacatgaacgacagccttcgcaccgacgtcttcg

SEQ ID NO: 741588 - DNA, 100 bp, Homo sapiens
aagaactggaggtttgtgcaatttgagaccggtcggcactgtgcagagatcagagtactaagagacaggagagaattgccaagcggggtcggaaactcgt

SEQ ID NO: 741589 - DNA, 100 bp, Homo sapiens
tgccaacgcctctttggaagaaatggcttctctagaggaggaagcctgcagccttaaggacaatatttttaagctggagaactcacattttgaaaacggc

SEQ ID NO: 741590 - DNA, 74 bp, Homo sapiens
cactgactgagtccccctgcagagccgtggtccttcagcatatctctgtgctgcagacaacacaccttcctgat

SEQ ID NO: 741591 - DNA, 101 bp, Homo sapiens
cctcaggccagtcgcctccaggccaagagggatccttcacccgtgtctgtattaaaggtggaagaaggtccatatctttttctgtgggtgcttcaagtgtt

SEQ ID NO: 741592 - DNA, 82 bp, Homo sapiens
tagcacatgcagtacttgggcatgctgaaatctaccactgtcgaagacaaataaaatatagcaaagacaagatgtggtattt

SEQ ID NO: 741593 - DNA, 74 bp, Homo sapiens
gtccaatggttttttgccttgcttttggagccacattgctactggaacgaatgatcacacactttgaaaggtcc

SEQ ID NO: 741594 - DNA, 82 bp, Homo sapiens
cgcgctgctgctgaggcggagagagcaagtgcaccggcacctggaccaacacgaagtgagatacctgcagtttgccttccgc

SEQ ID NO: 741595 - DNA, 74 bp, Homo sapiens
caagctggggctgcctcccctgacgcccgagcagcaggaggcccttcagaagaaactggcagccctcagtgcca

SEQ ID NO: 741596 - DNA, 100 bp, Homo sapiens
gtgtgtacatcacccccatggaggccctggcagagcagctagaaagagacatgtccaatgtcagcctgggcccgacccccatccccgagctcacgcacat

SEQ ID NO: 741597 - DNA, 90 bp, Homo sapiens
ctggatcctgctactcttcgttttcctttgaaaggccttttgccatatgataagatggataatcaaatagtggtttctgactatgcccag

SEQ ID NO: 741598 - DNA, 97 bp, Homo sapiens
ggatctttccggatcaatccagatggcagccagtcagtggtggagcccctggcgaagcggtgctgcctccagcccagagatgccgccaagatgcccg

SEQ ID NO: 741599 - DNA, 90 bp, Homo sapiens
gaaaaatttggatgtgtaaaaagaactcttaacggcgatgcaggtcttccacagctaagaggaagtatcattctgcaaaggaggcatatg

SEQ ID NO: 741600 - DNA, 50 bp, Homo sapiens
cttcattcccacaggccgcataaggcagaaatactcagtgtcctcagtca

SEQ ID NO: 741601 - DNA, 90 bp, Homo sapiens
tcttgattggaatgttctccctgcagcagtcagcccaaaggaagtgaataaccctataccttccaatttgaaatcagaagcaaaaaaggc

SEQ ID NO: 741602 - DNA, 75 bp, Homo sapiens
catctttatgtcagaaacacaaagcagcccaaccaaaggccatatcagcgggaacaagattggctgggagaagac

SEQ ID NO: 741603 - DNA, 100 bp, Homo sapiens
cggaaacttccactttgcccctgggaagagcttccagcagtcccatgtgcacggcaacaccgtgacaggagagacgactcccttttctcctcttgtggcc

SEQ ID NO: 741604 - DNA, 113 bp, Homo sapiens
caccaactccagtttctgtaagcaatgacttgtggggagacttcagcactgcctccagagacagcctggagctgttgcccaaagaattggaagtcatttagttccaactgcta

SEQ ID NO: 741605 - DNA, 83 bp, Homo sapiens
atcgacatggctttgtctcaacccacttccttcagagaaaccatactcaggaggtctttgtctccaagaaacagcccgggaag

SEQ ID NO: 741606 - DNA, 90 bp, Homo sapiens
cgcctttagtttcaaaaagttgctggatcagtgcgagaaccaggagctcgaggccatgggtatcaatgatctgctgtcctttgatttcat

SEQ ID NO: 741607 - DNA, 100 bp, Homo sapiens
ccataataaaagcagggatagaaagcgcaggcgaggtgtccaggcccaacccctcaatgtaggcttctgtgagcaggagtttgaacagacctgagcccca

SEQ ID NO: 741608 - DNA, 100 bp, Homo sapiens
gacctgccatggagagccatctctttataattccctaagcatggctatgcagactctaaagtgctaaattttatgcttcctcgtcaaagcaagaaaaaag

SEQ ID NO: 741609 - DNA, 83 bp, Homo sapiens
accattgacgccatgtcgggttattcgagtgaccgagaccgcggccgggaccgagggtaggcacaacttacgtaacagataag

SEQ ID NO: 741610 - DNA, 73 bp, Homo sapiens
gtcatgctctttgtagcgtggtgcttctgttgctcacagttggaaaatggatataccttatttgattatgatg

SEQ ID NO: 741611 - DNA, 87 bp, Homo sapiens
aactgatagctgcagagaagaaatatttttctttaaagcctgaagaaaagggaaatggaagttccagtattaccgaaaatctctcta

SEQ ID NO: 741612 - DNA, 102 bp, Homo sapiens
cctcgcctggctcggacccacggagccggcagcccagcactccgggcgccctgcgtccggcagaggaggcgagcatcccgctcaggtgatgaggaacccctc

SEQ ID NO: 741613 - DNA, 89 bp, Homo sapiens
gagatgtactgtgcttggctggaaaaccccaaaagtgtacataagctaatggcagcattagccgctgttgggcctcctaatcctcgggc

SEQ ID NO: 741614 - DNA, 95 bp, Homo sapiens
atctcggtgctgcagacggcgagacctcctgcacaggtgtggacactgccagcggctgcagccgacttggaatgacctgggagacaaatacaaca

SEQ ID NO: 741615 - DNA, 100 bp, Homo sapiens
attgatacccgcaaaatcaacaacagtttcctgcgcgaccacagctatgcgaccgaaggttaaacccatccagagtaatggctgcggccttacccaggac

SEQ ID NO: 741616 - DNA, 100 bp, Homo sapiens
accaactcctgcaagaacttctcagaactgcccctggtcatgtggcttcaggttgccaaggaaagtgtactgcagttttacccgaaagctaatatcgttg

SEQ ID NO: 741617 - DNA, 97 bp, Homo sapiens
cattcgcatccaaaatggaatccgagacagaaagaggaccttagtctcgtttcctctcagtccatccacccttcatggggccagagccctctctcca

SEQ ID NO: 741618 - DNA, 75 bp, Homo sapiens
attattgcaatcacaatgaagatgctggcgtgacatgttctgctcagagtcaagatctccactgaagttggcatc

SEQ ID NO: 741619 - DNA, 76 bp, Homo sapiens
atcgccatgtgacacactggcatcaagtgagaaagatcagtctaaagaaaaggagaagaaagtgaaaaaaacaatt

SEQ ID NO: 741620 - DNA, 97 bp, Homo sapiens
tacgcagaacccgggagtaggagactcagaatcgaatctcttctccctccccttcttggacaaggagactggctttcacagaggtttgggttgggtt

SEQ ID NO: 741621 - DNA, 100 bp, Homo sapiens
aggactgtacgcctctcatgctgacctccacaggcttaagttttatgccgctgagataatgtgtggactgcagtttctacacagcaagggcatcatttac

SEQ ID NO: 741622 - DNA, 120 bp, Homo sapiens
ctctaatgtattggctagatccaaatcttcgatacgccacaagggaagcagatgtcatggaccctggcagagaaggctgccggggggccggccaccaccgtgtggggttagttccaggca

SEQ ID NO: 741623 - DNA, 80 bp, Homo sapiens
tcagaaagccccgtgagagaaaagatcgatctggaatagaaaacgtcaactctgtggaggctttgcaggaaactctcatt

SEQ ID NO: 741624 - DNA, 100 bp, Homo sapiens
tcttccagttcatctaactcttatttctccgttggcccaaccagtcccagcgctgtcgtgctcctctactcggaggactggaatgaaattgaccccatta

SEQ ID NO: 741625 - DNA, 88 bp, Homo sapiens
tggtccacgccgtggccggagccgtggactggactcgggccatatccgtggtgccgtcaacatgcctttcatggacttcctgactgag

SEQ ID NO: 741626 - DNA, 50 bp, Homo sapiens
ggcctcgcctcctcgcagcagcgccatgaggtggggctggtgtccgagca

SEQ ID NO: 741627 - DNA, 98 bp, Homo sapiens
ctggagtgcccactgaaaccataaagtatgaatctgatgaacaagaaaagagtgcctatcaagagtatgacagtgacagtgatgttcctgaggaactc

SEQ ID NO: 741628 - DNA, 92 bp, Homo sapiens
ctcacgggcggcggcggggccgagcgcggccctgcaggcgatgtcgccgaaaccgggctgcaggcgggattctaccatcagaaaagaggcca

SEQ ID NO: 741629 - DNA, 75 bp, Homo sapiens
gatttacctgtgagatgtttcatcccaacacaatggctgccatccggaagaaactggtgattgttggtgatggag

SEQ ID NO: 741630 - DNA, 90 bp, Homo sapiens
cagaagaggaggttgcccagaagaaaaaggtaaatattgcagattttcaagagaatcagtgggtgacttgtttccaggagtctgctgaag

SEQ ID NO: 741631 - DNA, 50 bp, Homo sapiens
gataccgaattcttatcacaaaggtctctctgctccctggtgtgtaagtg

SEQ ID NO: 741632 - DNA, 100 bp, Homo sapiens
tgcaaagcaggcttcgaggccgttgagaatggcaccgtctgccgagagcttgggaaagtcgaggtgacggtgtttgaccctgactccctggaccctgatc

SEQ ID NO: 741633 - DNA, 82 bp, Homo sapiens
gcctcagttggaagcagccgatccagcctgcggagcctgtggggcaggatccatcagttacacaagtgacaagaaatgttcc

SEQ ID NO: 741634 - DNA, 75 bp, Homo sapiens
cagaaggagcaggattaccaaagggtacatccagacactgaaggaccacaggccccggatggtgtgggacagcca

SEQ ID NO: 741635 - DNA, 51 bp, Homo sapiens
ctactctatactctcagtggcttagatactatgggggagcagaggtggtgg

SEQ ID NO: 741636 - DNA, 100 bp, Homo sapiens
ctggacgacatcgacctgtccgccctgcggttcgctcccaggaccccgggcagcggcgggtgctggaccgggctgcccggcagcgtcgcatcaaccggca

SEQ ID NO: 741637 - DNA, 87 bp, Homo sapiens
catccctgaaattactatcagtgatatacttagcatagttgttgcccaaatctcttggtacagaatgtttttgtagaaacacacaac

SEQ ID NO: 741638 - DNA, 82 bp, Homo sapiens
cgcctcctcggagtccttggggacggagcagcgcgtcgtggggcgagcggcaggttctgggccggagaaggggcgacgttcg

SEQ ID NO: 741639 - DNA, 75 bp, Homo sapiens
cagttcgctacacagcaatgcatcgaggaagttaaatgaagttcgaaagagattgaatgagctaagagaattagt

SEQ ID NO: 741640 - DNA, 90 bp, Homo sapiens
cagaagataaaatgaggttgtttcttatctattatataagcacacagcaagcaccttctgaggaatgggtaccacagaccatgtcatcgt

SEQ ID NO: 741641 - DNA, 82 bp, Homo sapiens
aggtgaaggtcggagtcaacgggctggtcgtctgatgataaggaaattagttgcagagaaattgaatatcccttggaatcat

SEQ ID NO: 741642 - DNA, 90 bp, Homo sapiens
ccgtgcggagcgagttacgagaattcccggccgctgcaagggggtctgggatccccaaggcctgggcaggcatagacttgaaggtacaac

SEQ ID NO: 741643 - DNA, 88 bp, Homo sapiens
ctgtagaagccaaacaagtgggcctggcccgagccaagtcaatcccaacaaagacatactccaatgaggtggtgacactgtggtaccg

SEQ ID NO: 741644 - DNA, 74 bp, Homo sapiens
gaagggagtggatcagagcactgcctgaggacttgatagacgacctgaagtcagaactgagtggcaacttcgag

SEQ ID NO: 741645 - DNA, 75 bp, Homo sapiens
ggaactgaaaaagcactgactgctctgcttaaccttatgtttgatcatcggccaaggtcctggcgagaactgcct

SEQ ID NO: 741646 - DNA, 100 bp, Homo sapiens
ctgctcaagccgctcttccccacctgcccggtgcccgaggaggcagccaagctcgtagcctgccactccgtgcaactgccattggatgtccagaatcccc

SEQ ID NO: 741647 - DNA, 100 bp, Homo sapiens
ccagagatctcccacctcagtgtgggttccatcttacttgtcacggacaagaatccttcaagaaacaggaaaaaactcctaaaacaccaaaaggacctag

SEQ ID NO: 741648 - DNA, 101 bp, Homo sapiens
tacatcacccccatggaggccctggcagagcaggtcctagctggactgctgcaccttggcaatatccagtttgctgcctccgaggatgaagcccagccctg

SEQ ID NO: 741649 - DNA, 75 bp, Homo sapiens
cagcttccgaaagatgtgtctccagacccttcaagtttcagaaaagggatccctaacatcagaagagtttgctaa

SEQ ID NO: 741650 - DNA, 83 bp, Homo sapiens
aagcaggtccggacccactggctgctggagcttgtcaccaccaggtgtggacactgccagcggctgcagccgacttggaatga

SEQ ID NO: 741651 - DNA, 100 bp, Homo sapiens
attcagagacccagaaaatggtgcttaccaactacatgttccctcaacagccaaggactgaggatgactcagattgatggacaacttttcttaattaagc

SEQ ID NO: 741652 - DNA, 100 bp, Homo sapiens
agcatcaagatgatttatggtaataaggaggaattttgttgtcagagaataaaaggaggttgtccataattgactttaagcagcaatcagtaaaacattg

SEQ ID NO: 741653 - DNA, 83 bp, Homo sapiens
tctcggcccagtagtgacaatgcagatgttcaatgtatctatgcctgcctacctcaatctgcaagggagtgtcagaaaggccc

SEQ ID NO: 741654 - DNA, 96 bp, Homo sapiens
cttgggacacaaggcaaatcactccttcactccaaactgcatctacgatatgaagagcctaggctggatgtcttgatcaataacgcagggatcttc

SEQ ID NO: 741655 - DNA, 98 bp, Homo sapiens
agcaccccagatgggtgagagatgtgatcactggtttcgtggcctgaccaaggacctccaagcatcaactggtatcccagcctgggctgaatcgaggc

SEQ ID NO: 741656 - DNA, 75 bp, Homo sapiens
gaaatgccatgaacatgcaagaaacatatactgcttacctcattgaaacaaggctgtgaaactaaatccacaacc

SEQ ID NO: 741657 - DNA, 75 bp, Homo sapiens
ttggccataccttctgaagtagatggcatttgatgtagaactactgtacatagcacagttctttaaaattccaat

SEQ ID NO: 741658 - DNA, 100 bp, Homo sapiens
ctagtctgtatcctgtagcatcaccatctcttcagcaactggtagtagagtaaatacaatcaagtggcatcttaaatttttgctggaagtggagtcatga

SEQ ID NO: 741659 - DNA, 103 bp, Homo sapiens
ggctggagaagaggagcgtgctcaatgggagatggttgccaccctggggaccacaacatgctgctcctttgacaatctcttagaagtcggtcctatctgtaag

SEQ ID NO: 741660 - DNA, 74 bp, Homo sapiens
agtgagtcccccacttatcactcaggactttgattcctggtttgatacaaacaactgccttggggatcaaaaac

SEQ ID NO: 741661 - DNA, 100 bp, Homo sapiens
aaacgtcggccagggccaaggctctaggaagtgggatttctggaaataatgcaaagagagctggaccattcatccttgggtggatgtgaacactgaccgg

SEQ ID NO: 741662 - DNA, 87 bp, Homo sapiens
aagatttagctgagccatggattcaggtacagagtgaagacagtgtcctcctgtttgttattgcatggacgatcacggaaatcatcc

SEQ ID NO: 741663 - DNA, 100 bp, Homo sapiens
cttcagccaaagaaacaagccgtggaataggtgtatcaagtaatggtgcaaagcctgaaacagtgatctgacacaaacacagctgaagcaaacagaggtc

SEQ ID NO: 741664 - DNA, 50 bp, Homo sapiens
gagctctacatgctcttggcagaattagctgcatatcacccaacacctcc

SEQ ID NO: 741665 - DNA, 74 bp, Homo sapiens
agaaggcctctctcctgatacagcaggcgctcaccatgttccctggaggcttcagtttcacattcttggtacct

SEQ ID NO: 741666 - DNA, 100 bp, Homo sapiens
caaatccaagtggcaagaagaaactcaagatcttccagccttgtcacaccatgtctgaccggaaggcagtgatcaagaacgcagacatgtctgaggacat

SEQ ID NO: 741667 - DNA, 80 bp, Homo sapiens
gtctcaaggcaagcctattgagttaacacctctgccgctgctaaaaggtgacttaagagattaaaattaatttggttgct

SEQ ID NO: 741668 - DNA, 100 bp, Homo sapiens
gcacctagtcgtggccggaggagtctcagagctgtcagaaagatcaagtctcgggttctcatgactcccttagccctctcacctccgcggagtaccccag

SEQ ID NO: 741669 - DNA, 100 bp, Homo sapiens
ctctacctggctctcgtcctggccccgaccaccctgctggcctcctattgttcatctgtagcttcatggtggctgcccccatcttcggctacctgggcga

SEQ ID NO: 741670 - DNA, 50 bp, Homo sapiens
tagagtgaatgtagttgcaccagggaagtgccagacacagcttcagaatg

SEQ ID NO: 741671 - DNA, 83 bp, Homo sapiens
gtccgtgtcaccgccggaacctggcgcaggtgcgcgcggagccatggttatcatgtcggagttcagcgcggaccccgcgggcc

SEQ ID NO: 741672 - DNA, 97 bp, Homo sapiens
gagccgccgccggccacccgggtgtcatggagaaactccagctgggcccagagattctgcagcgggaaaatccaaggcttatttatgccaggctgag

SEQ ID NO: 741673 - DNA, 83 bp, Homo sapiens
ccaaagaagagaaagacaaggatgaccaggaatgggaaagccccagtaacggcacagccaacaagatgaacggagctttggat

SEQ ID NO: 741674 - DNA, 100 bp, Homo sapiens
cctgcgcaacctcgccgtggccatgtgcagccgctacgttaacgtccctaaaacccgccggactttctgtaagaagtgtggcaagcaccaaccccataaa

SEQ ID NO: 741675 - DNA, 90 bp, Homo sapiens
ccagcccgcccaactcccagcggagagcaagagccagtcttggtgctctgtgttcacctggttcatctgaggagctgcatctaccctgcc

SEQ ID NO: 741676 - DNA, 97 bp, Homo sapiens
gagaagaccagtgccaaccctgagactctgctgggggagatggaggcgaagacaagagagctcattgccatattgaaggtggtatcatcggtcctgc

SEQ ID NO: 741677 - DNA, 97 bp, Homo sapiens
gactacttctggcatcctttaagaatgagggtgccgaaccagatctaatcagaatgcagtttccaagtacggctctcagttccaaggcaattcccag

SEQ ID NO: 741678 - DNA, 90 bp, Homo sapiens
ggacagttagtcacccacctacatgttgagagcaatgttgatcccagggatgatgtatttggatatcctcaacaatttgaagataaacca

SEQ ID NO: 741679 - DNA, 100 bp, Homo sapiens
gcgatgtcagctcagtgctgtgcgggccagtgtgcaggatgacagaattcgagtcgaaaggatggataacatttattttgaatacagccatgctttccag

SEQ ID NO: 741680 - DNA, 123 bp, Homo sapiens
caggagcggcatcttttcctattcaatgatctgtttgttgtggccaaaatcaagcctccccatggccacccatggaccagtcggcattcacttcctcccttctgcggcccataaaagccctgg

SEQ ID NO: 741681 - DNA, 75 bp, Homo sapiens
gagccgcggcggggggaaaatggagcccttcaccaatggatggagagcaatacatcatcatctttggagaattta

SEQ ID NO: 741682 - DNA, 98 bp, Homo sapiens
tccaggacctcctctgtgattttgaagaaaccacccctactcctaatcccccgactacagaagaggagaaaacggaatctaatcaggaggttgctaac

SEQ ID NO: 741683 - DNA, 75 bp, Homo sapiens
ttaaatccatttggagatcctgactcagaagagccctatgagtttgtctctctggaatggctgcaaaagtggttg

SEQ ID NO: 741684 - DNA, 100 bp, Homo sapiens
agaaagctgcgttaatgtttgcaaatgcagaggaagaatttttctatgagatccctgggtatcagtatgtgtcacctgaaggcaattgtatagaacatgt

SEQ ID NO: 741685 - DNA, 90 bp, Homo sapiens
gagctacagatcacaaatgtgatggaggcaaaccagcgggtctcctctgagcctccggcctccataagacccaaaacagatgacacctct

SEQ ID NO: 741686 - DNA, 87 bp, Homo sapiens
aagatccattggtaaattgatcaggatttttggcctaccctccaaagaaaaggcagctgagtatgtcccagagaaggtgaagaaagc

SEQ ID NO: 741687 - DNA, 82 bp, Homo sapiens
cgagcaggctgagcgatacgacgcccagctcaacattggcaatgtgctccctgtgggcaccatgcctgagggtacaatcgtg

SEQ ID NO: 741688 - DNA, 90 bp, Homo sapiens
tgacatatcgttggacccagaattgaggacccgtcgccatgggccgtgtgatccgtggacagaggaagggcgccgggtctgtgttccgcg

SEQ ID NO: 741689 - DNA, 90 bp, Homo sapiens
cagatgaattcttttctgctgtccactgccagccaacaggagattgctactctagacaacaagacagcacccaagaaaacctcatttggc

SEQ ID NO: 741690 - DNA, 75 bp, Homo sapiens
cccggtggtcgtccgcggctccggtcacgtcaccgtaatgtgaaaacctttgcatcttctgatagtctagccaag

SEQ ID NO: 741691 - DNA, 82 bp, Homo sapiens
agctgcagcagcagcagcacagcgacaagacgctcggagcccaagatcctcttctcctacaaatgccaagtggacgagacag

SEQ ID NO: 741692 - DNA, 83 bp, Homo sapiens
ctgacgactgtgcaggaagaaaacgagccagtgatttacaatagagcaaggcagcataattcgttgtatgaggcgcctggaag

SEQ ID NO: 741693 - DNA, 141 bp, Homo sapiens
cgagggtgacgctcgctccgctcgtcccgctcgtcatggcctacccgggatacggaggagggcaataatgacgatgaggacctgacaccagagcagaaggcagagcgtgagaaggagcggaggatggccaacaatgcccga

SEQ ID NO: 741694 - DNA, 88 bp, Homo sapiens
gagcgacccccagggagggtcggacctgcctcaataccgccaaggtcaaaatgcagatcttcgtgaaaacccttaccggcaagaccat

SEQ ID NO: 741695 - DNA, 74 bp, Homo sapiens
agaatcgctgtttcatgtgcaggaagaaagtgggacttactggtacaccaggggttggaaaaaccacactaggc

SEQ ID NO: 741696 - DNA, 83 bp, Homo sapiens
ctgctgaccgcgggccctgccctgggctggaacgaccctggtactggctgtgatcgaacttctcaaccctcagagacttagat

SEQ ID NO: 741697 - DNA, 75 bp, Homo sapiens
atctctgactatgggtcgcgtgtgcgggtcgattcctcgggacccacagtctcaccacgtctcctccagaggacg

SEQ ID NO: 741698 - DNA, 100 bp, Homo sapiens
cttctacccgacacttacatgccatggccttctacgttgtgaaaatggctttccttaaagtttcccatgtctcaatggactcctgaatataacgagctct

SEQ ID NO: 741699 - DNA, 75 bp, Homo sapiens
gcctatcctcgaacctgcactgtggacttttcgatacaaactggactctcaggacaaaacgacaccagccaaacc

SEQ ID NO: 741700 - DNA, 75 bp, Homo sapiens
cggaaggcttcaaaggctgtcgcaaggaggaaggtgtgggccaggtcgtgctccaggttgctgctgccaccaact

SEQ ID NO: 741701 - DNA, 100 bp, Homo sapiens
aactctttgtattggttgtggtatctgtattaagaatgattgactggctatcctggccattggctcagcatgtggatacatgggtaattgcactcctgaa

SEQ ID NO: 741702 - DNA, 87 bp, Homo sapiens
ctgaagtgaacactgcagggccatttgattcatgatgttgctatcaaaagttgagaaattgtcagaagaaatcatggagataatgca

SEQ ID NO: 741703 - DNA, 120 bp, Homo sapiens
aaaatcattctgccttattacgccgtctccaagatgtagctaatgaccgtggttcccactgaggaaaatgagcgtaccaaggatctaatcattgagcaaagatttcatcgcacaatcatt

SEQ ID NO: 741704 - DNA, 98 bp, Homo sapiens
gcggcgtctggctgctgcggaccccgccgagtcctagcgcctggcctgcgcgccgctgcccgcgccacaggggacagatgatttctgctgaagattgt

SEQ ID NO: 741705 - DNA, 75 bp, Homo sapiens
ctcacctggagaagggatggaaatacttcaacaagtttgcagagcagtctctgatgaagaatgccataaaaacat

SEQ ID NO: 741706 - DNA, 51 bp, Homo sapiens
gtcagaccgatctgctctgctctcggtatgcagtggaactgatgaagaccc

SEQ ID NO: 741707 - DNA, 100 bp, Homo sapiens
cctgtatgcatggtgtggggttggtgtgattagcttcgcagtctggaaagctttaggagttcacagtaattcagatcaggaaggaggtggaaagaaaaag

SEQ ID NO: 741708 - DNA, 75 bp, Homo sapiens
cccgtggaaagtacaggtcctgacagctggtaatcgtgctgtccacacgactcctgaagccacttaacattcctg

SEQ ID NO: 741709 - DNA, 87 bp, Homo sapiens
cgatggctgcggctgcgccgaggcgccctactcagaatatgcttttaaggctattaaccagggtggccttacatcagtagctgtcag

SEQ ID NO: 741710 - DNA, 100 bp, Homo sapiens
atttctggctctgaaggcgaacgcttcgctggccatttaggagctctgctcaaagccagacggtgcttttgaagatgatgatatcacgcacgttgaagga

SEQ ID NO: 741711 - DNA, 98 bp, Homo sapiens
cccaatagtgcaaaagtcatggcaacttctggatgtgcagcaatcagatttatcattcgggatattgacggccaagcactcctgcttctgacccttcc

SEQ ID NO: 741712 - DNA, 82 bp, Homo sapiens
aaggtcgcctacgtgcagctggtgaaaacttttggcccgtttggaagcggcagccaggacaacctgactatgtacatggatt

SEQ ID NO: 741713 - DNA, 100 bp, Homo sapiens
atcgtgaccgagaccgtgaccgagagcgtgaccgagagcgcgaatatcgtcatcgttagaagacatgaagccattattatatcaggaaccgaaatggcca

SEQ ID NO: 741714 - DNA, 99 bp, Homo sapiens
ctcctgtcgctccttcagacaaaggtaaataccagctgtcccctacagtgaatatgccccaagatgacactgtcattatagaagatgacaggttgccag

SEQ ID NO: 741715 - DNA, 82 bp, Homo sapiens
agcagatgctccagtttgagaaacctggatctgcgatctgtttgtggagagcgacttgcagttgtggaggtacagtgtgaac

SEQ ID NO: 741716 - DNA, 98 bp, Homo sapiens
tcaacagccaggggccccagcagcctgacctgattatcaacggtgtgcctctgcctgagcacctggctgcagtggaagaaagaaagatcaagtccctg

SEQ ID NO: 741717 - DNA, 100 bp, Homo sapiens
cgaccggctctactgcgtctaccagagcatggtgctcttcttcttcgagaattacaccggggtccagagcgatcgtcttctgatcaaaggaggtaaaatt

SEQ ID NO: 741718 - DNA, 88 bp, Homo sapiens
ttagtcacccacctacatgttgaggtgtctcaatgcttgtacctactgcaaaactaaacacgccagaggaaatttggccagttatcca

SEQ ID NO: 741719 - DNA, 86 bp, Homo sapiens
gatctagaatcaactgagagagatgcttaaaaatcaccagttactttaatgaacaatgcagatcttcgtgaagactctgactggta

SEQ ID NO: 741720 - DNA, 100 bp, Homo sapiens
tgggctctggacaggtggtaaagacacttgtgggattgttcaggagctgacctgcttcctacatcgcctggcctcgatgcataaggactatgctgtggtg

SEQ ID NO: 741721 - DNA, 90 bp, Homo sapiens
tgtgctggagggcactaccagatgggatatttgatcaagttccttgcaaagcttgctcagaccagcgatgtgaataaaatgactcccagc

SEQ ID NO: 741722 - DNA, 143 bp, Homo sapiens
cgaggatggcttcgaccacaacctgcaccaggttcacggacgagtatcagcttttcgaggagcttggaaagtagttggcaaaaaaggagaaagccactaaggtacaaaagacactggacaaccatattgcaatcagatctaca

SEQ ID NO: 741723 - DNA, 75 bp, Homo sapiens
cagcggcgggctatgcctgcctagggattggagtttggaatcctgccttcgatgtcaccccccacgacctcatca

SEQ ID NO: 741724 - DNA, 76 bp, Homo sapiens
aatccttccttgtcaggacactccttctgtgaaattaacctatactgcagaggttacaggaatacttaaagatgct

SEQ ID NO: 741725 - DNA, 100 bp, Homo sapiens
tggggactacgacgtccctcaaaccttgcttctaggagataaaaagccacttctgccccaccaacgttgggccaaccaaaaggagtcagtgccagtcaag

SEQ ID NO: 741726 - DNA, 82 bp, Homo sapiens
gaaccctcagctggttcagccagccaaaaagccatagaacgccagatcaagtgtcccaagtgtgataagctgttcttgagaa

SEQ ID NO: 741727 - DNA, 130 bp, Homo sapiens
tgcattgagaataataacagagggtgcatcaattcttcgacaggaaaaaaatttgctggatattgatgcgccagtcactgattctgaagactactttgaggtcaacattccaacagacctacgagcaaaa

SEQ ID NO: 741728 - DNA, 83 bp, Homo sapiens
cttgagtcagtgcgccgctctccagcccgcttgaacgagttgatctctctaatgtattagatcttcatgcctttgatagtctc

SEQ ID NO: 741729 - DNA, 100 bp, Homo sapiens
agaccctgcaggcccaaagtgaagaagccagaaggctcctggggtctctaattaacagaagatggcaaagcccagccacagcagctatgtccttcagcag

SEQ ID NO: 741730 - DNA, 101 bp, Homo sapiens
gaagaggattggaggtgtcagtgttaaaggaacctctacaacgaaggtgaagccacggaagataaggtctgaagaactgttgcccaattcaacagtgccag

SEQ ID NO: 741731 - DNA, 75 bp, Homo sapiens
attggcccactttccccattcacagttaaatggaagctgatcggcgttcacatggaatcctcctcacgtagctca

SEQ ID NO: 741732 - DNA, 100 bp, Homo sapiens
caaattatgtgtacaaggtgcagccctcctctatgagtactgtcagcaaaagggaatttcctacaagcagtgtggcaagacttcagtattgatgctcctc

SEQ ID NO: 741733 - DNA, 98 bp, Homo sapiens
gaaattcaggaaacatccaagaaaattgctgtcaaagccattgaagactctgatatgttacaggagaaataaacggtgactggcaaagagctgatgca

SEQ ID NO: 741734 - DNA, 100 bp, Homo sapiens
ccgagtcaagccgccgcctcgacccagggcccgcgggccaggagagcgctcggcggggggtccactggacggggcctgagctacaacttcacccacctgg

SEQ ID NO: 741735 - DNA, 75 bp, Homo sapiens
cagaatggcagatggcttatgaaccacagattagtgacaagagctggggttaggatccggttggactctgacatc

SEQ ID NO: 741736 - DNA, 90 bp, Homo sapiens
ttgccgagggctctcacccaaatatgccttcaattaagttgcagagttctgatggagagatatttgaagttgatgtggaaattgccaaac

SEQ ID NO: 741737 - DNA, 83 bp, Homo sapiens
aatttgcagagagaacggttgcaaaactggaaaagacaattgatgacctggaagggcggctgctggcatatcacagagatgag

SEQ ID NO: 741738 - DNA, 75 bp, Homo sapiens
tggaattggtgacaaaatcagaggcatactttatagattcatgatgttgctatcaaaagttgagaaattgtcaga

SEQ ID NO: 741739 - DNA, 98 bp, Homo sapiens
aaaaagcacctgacttccttcctcttctgaacaaaggctcgggttatgtatgattttgctgctgaacctggaaataatgaactgacggttaatgaagg

SEQ ID NO: 741740 - DNA, 96 bp, Homo sapiens
gaaaaccactgtcttcggcatgacaggccatctgcctgacttctgcatgctcatggtattgttgcagcatctggcagtgagactgaggatgaggac

SEQ ID NO: 741741 - DNA, 50 bp, Homo sapiens
ccgtacctggcgagtccagctcgtcgcgaaaatgtggtgacctggaagaa

SEQ ID NO: 741742 - DNA, 50 bp, Homo sapiens
gttggccttcgtacccgtcttgattgaggaccagaggagcgagagcagca

SEQ ID NO: 741743 - DNA, 75 bp, Homo sapiens
cattatcgtacagactcatagcttacaggccctccaagctgtcgacagggtgaagaggccgtctccggaatccca

SEQ ID NO: 741744 - DNA, 118 bp, Homo sapiens
actcgcccgccaccctgcgctgccgccgctctgaggagttaaagagagttggaaactcaactattggaacaatgtactgttgacacaagtgttgctaaagaacagagccttccctcag

SEQ ID NO: 741745 - DNA, 100 bp, Homo sapiens
tccagctctcacagaaccttcagcatccccagctgccggtcttggcatcttcgaagtaaggagagaacgctagccctaattaaaccagatgcaatatcaa

SEQ ID NO: 741746 - DNA, 90 bp, Homo sapiens
tcatacttttggataaaaggagattttggaatctatagagtatgtcagtatgaatctgatgaacaagaaaagagtgcctatcaagagtat

SEQ ID NO: 741747 - DNA, 73 bp, Homo sapiens
gggcacagacaaggagctcagtgacctcctggacttcagcatgcttatcacacagactttcagccaccacaat

SEQ ID NO: 741748 - DNA, 100 bp, Homo sapiens
cccgggctgtgatttacctgggtgagacagcttgagccccatcgtggattccaagacatccctgctgagagagccaaggcagtggaccaatccagctatg

SEQ ID NO: 741749 - DNA, 100 bp, Homo sapiens
gcacaggaatctcactctgttaaagctggtctgttctaactgagctctattatcaagtcctaaattttggaatgattgtctcatcggcactaatgatctg

SEQ ID NO: 741750 - DNA, 83 bp, Homo sapiens
gcataatatggtgaacggccgcctggcagtgtactaatggtcacttgatgtgcgctggctgttttatccacctactagcagat

SEQ ID NO: 741751 - DNA, 100 bp, Homo sapiens
tttggggaccagagatggacggtcactcagcctatggagatacagatccacgggttttagaaaaacaagaattacagcagccaacctatgttgccctgag

SEQ ID NO: 741752 - DNA, 82 bp, Homo sapiens
gatctgataatcaagtgattcactgggaaatagaggataatcaggttgaagaagaggatgaacttgaatctggagaccaaga

SEQ ID NO: 741753 - DNA, 101 bp, Homo sapiens
aagaagccctgcacccggtctttgacatgcaaggtattatacctgaagaaccttagccctcgggtgactgaaagagatcttgtgtcattgttcgctcggtt

SEQ ID NO: 741754 - DNA, 83 bp, Homo sapiens
tgccttcgaaacatctgcaagtttttagtcttgctcatcccactcttccttttactaggtatagactatgtgatacctaaaac

SEQ ID NO: 741755 - DNA, 74 bp, Homo sapiens
gggctccatttctccagcttctccaaagatctccctggcccccacagatggtctcgaagtgctgcagctaaaac

SEQ ID NO: 741756 - DNA, 74 bp, Homo sapiens
agagatcaaaacaagccctccaggaactcacgagtggctttggagagatatcatcccctgtaatccgggaggca

SEQ ID NO: 741757 - DNA, 83 bp, Homo sapiens
gttttcttagccctctacttttcaagacaccaagtgagaggccaaccagatcgaaagctgctttgcgtcgcagttggagcagc

SEQ ID NO: 741758 - DNA, 100 bp, Homo sapiens
aaacttgatatgtactggcttcctgcttatgtggtgcagttctactaatagtatagatctcagtggttcaatagcatccccagatgtcaaattaaatctt

SEQ ID NO: 741759 - DNA, 75 bp, Homo sapiens
tcactagcggactcttcttcgccttcgaggaagaggaagaacgtctgagaaataaaattcgagctgatcatgaga

SEQ ID NO: 741760 - DNA, 74 bp, Homo sapiens
tgcgacatcccagagagcttccagattatcaggaactgttgccgttattacatcagatgggagaatgattgtgg

SEQ ID NO: 741761 - DNA, 83 bp, Homo sapiens
accaggttcgtggctatcccactcttctctggttccgagatgggaaaaagctgaggagaagaaagtggaagcaaagaaagaag

SEQ ID NO: 741762 - DNA, 100 bp, Homo sapiens
agaggagtctcagtcagcaccagtccagaaaaatgactcagttgtttctgtggggatgatgacatagagaccaccaaggtggaaatgctgagactttctc

SEQ ID NO: 741763 - DNA, 82 bp, Homo sapiens
cgacaccaaccccttcgcggacccagtggatgtaaaccccttccagtctgatatcctgttgggcattctggacaacttggac

SEQ ID NO: 741764 - DNA, 75 bp, Homo sapiens
gcgactccctcaccgagtacgaagcgggcgtttgcgaaggtgtcagctgtgatgcatgtttaaaaggaaattttc

SEQ ID NO: 741765 - DNA, 100 bp, Homo sapiens
tgctgtcttcgtgggaggcgccgtgagttcgccgctggtggctccgggacttccaatagtagtcagacattatcatcctgtcatactatggagccatgta

SEQ ID NO: 741766 - DNA, 100 bp, Homo sapiens
ccgagttggagaacaggcgtggccagcactggctccttgatggctctgcggctaccctcctttttatgatgaaaatgactccaagctctttgagcagatc

SEQ ID NO: 741767 - DNA, 83 bp, Homo sapiens
tgaagctgcagatctgggacacagcggggcaggagcgcttccgcaccatcacctccacgttcctcaagccaggacctacgcac

SEQ ID NO: 741768 - DNA, 98 bp, Homo sapiens
tgttttgccggaggagcccctcaggccattggtttatcttggaagctaaagggcattgctcatcctgaagatcagctgaccattgacaatcagccatg

SEQ ID NO: 741769 - DNA, 83 bp, Homo sapiens
aacatggataagcatgccctgaaaaagtatcgtcgagaagcctatcatcgggaaaagagtgcaaattcggaaagcacctcaag

SEQ ID NO: 741770 - DNA, 95 bp, Homo sapiens
atagtcatagaagatttgtggaaggagaactttcaaaaggatggatcaaacctcactgcaagtcagagggcctatgcgcctgagcagctgcagaa

SEQ ID NO: 741771 - DNA, 50 bp, Homo sapiens
gtggtgggctgcctgctccaactcaagagcaagatgacgttctcatagtt

SEQ ID NO: 741772 - DNA, 75 bp, Homo sapiens
gtgaaatgtttggatatatgaaattacatccagaggattttcctgaagaaggcattcccatcaagagcaccatgg

SEQ ID NO: 741773 - DNA, 100 bp, Homo sapiens
catccatttcgtggttcacccgctgccgggcaccgaggaccagctcaatgacagattgtaaaccatggctgtgtggatacaagctcagcagctccaagga

SEQ ID NO: 741774 - DNA, 120 bp, Homo sapiens
tgagctccaggagttcgtctcttacgtctgcggaagtgcagctgcctcagttcttagcgcagttgttgacctcctgtactggagagacattaagaagactggagtggtgtttggtgccag

SEQ ID NO: 741775 - DNA, 75 bp, Homo sapiens
agctgggcgcggattcgccgaggcaccgaggcactcagaggagatgtcatgtggcctgtgttttggaccgtggtt

SEQ ID NO: 741776 - DNA, 100 bp, Homo sapiens
ggtgacttcaagggatggccggctcctctccaccgtcatccgtgccttggacacaccgagctttcaccaacaatcaccagtggtttacacaacattgcaa

SEQ ID NO: 741777 - DNA, 82 bp, Homo sapiens
gcggctgctgctgctgctgacgctgctgctgcccggcctcgggacttcccaagtaagaagcggaagaggagccgctggaacc

SEQ ID NO: 741778 - DNA, 100 bp, Homo sapiens
cgaatatcgtcatcgttagaagtggatgctgtggggcaccacctccttgaggaccaaggcactccagctgccaggaatttggctgctaacctcacacagc

SEQ ID NO: 741779 - DNA, 80 bp, Homo sapiens
caccacgcctggcctcactcaaacagtaaacgagggaagccgtggcggacggagcagacggaggacctgaagcgagtgct

SEQ ID NO: 741780 - DNA, 101 bp, Homo sapiens
ccttgccttgagtcagtgcgccgctctccagcccgcttgaacgaacatccagtcatggataaaaatgagctggttcagaaggccaaactggccgagcaggc

SEQ ID NO: 741781 - DNA, 95 bp, Homo sapiens
ggagcagcaacagcctcaaaagatgctgaaattttcttctaaggagaaatatcccttatttacttttgtaaatggtcattccagagactatgatt

SEQ ID NO: 741782 - DNA, 101 bp, Homo sapiens
tgccaagtcatccgtgtcattgcccacacccaggcccctacaaaggcttcagagtagatatctctgccaacatgaggacagaaggactggtgcgacccccc

SEQ ID NO: 741783 - DNA, 90 bp, Homo sapiens
gccgttagtcatgccggtgtggtggcggcggcggagactgcgggcccgtagctgggctctgcgaggtccatggacagaaagctgcttggg

SEQ ID NO: 741784 - DNA, 82 bp, Homo sapiens
ctatgaccagcaagaggatggggccctggatgagggggaagggcctcaaagccagaaggacagtgatggtgacaaaagcgat

SEQ ID NO: 741785 - DNA, 75 bp, Homo sapiens
tctcgcaaatctggaagcggatcgcgtggagtgacggtcacaccgcggcggtcatttaggaaatcgtaaatcatg

SEQ ID NO: 741786 - DNA, 83 bp, Homo sapiens
caaaagccaagaggaggacagttcgctacacagcaatgcatcgaggttgagcaatgtttaaagcgtttgaaaaacatgaattt

SEQ ID NO: 741787 - DNA, 75 bp, Homo sapiens
aaaaatcccaaggtctgcaaaggagacgcaggtcagaatggaaatgggctgcagaccgggcagctattgtcagcc

SEQ ID NO: 741788 - DNA, 75 bp, Homo sapiens
acgtaatccaagagaggctaaaggaagaacaacagatggatcccttcagagatcctgagtcatgtgttccagtgg

SEQ ID NO: 741789 - DNA, 80 bp, Homo sapiens
gtggtgagcctttttgtcactgcgattattggagccggaattggtggcacttcagcagcctattacctgcggcagaaatt

SEQ ID NO: 741790 - DNA, 75 bp, Homo sapiens
gggtgattcacgtgtgcccaggccctgaggtgggccggacctgggagtggcaggacaggaagatgtcacccaagc

SEQ ID NO: 741791 - DNA, 100 bp, Homo sapiens
caattcccagatgcctacgggaaggagacaagcatgagacgaagctgaagggagtcatctatttccaggccattgaggaagtgtactacgaccacctgcg

SEQ ID NO: 741792 - DNA, 90 bp, Homo sapiens
aggaagtggatgagttccacctcattttagagtatcaagcagggaaactgaacagccaagactcctataacaattttaccaacaacaacc

SEQ ID NO: 741793 - DNA, 83 bp, Homo sapiens
tctgataacagaaagtcaagatctaggtcagcatccagtgatttggatcctattcaagctccacattggtctgttagagttcg

SEQ ID NO: 741794 - DNA, 75 bp, Homo sapiens
tggaaagaagcgaccgcggcggctgattcacagtctgagaatgaggcttcaccagtaaaacggccacgactactt

SEQ ID NO: 741795 - DNA, 75 bp, Homo sapiens
ggacaccgacgcgctcatctgctggagcccggagggagccatggatttgctgcgggagctgaaggccatgcctat

SEQ ID NO: 741796 - DNA, 100 bp, Homo sapiens
gtcgactgcccagagtccgcgaatcctccgctccgagcccgtccggactcccccgatcccaggagacccaaacatggcaaacctggaagaaagcttcccc

SEQ ID NO: 741797 - DNA, 75 bp, Homo sapiens
gtcaaggtggcctaccaggaggccaggggtgtcgccatgatcaaacagatgatggaggcagcaacacgacaaatc

SEQ ID NO: 741798 - DNA, 75 bp, Homo sapiens
agtcgtgctctcgccccaacccgcgcgccagggggaaatttgcagtggtgagaaaatgtataaagaaagattctg

SEQ ID NO: 741799 - DNA, 100 bp, Homo sapiens
cattattctatcgattggaaattttggagggaattacaatagttggcatggctttaactgctggtcctgctgatgatgaagcccctgatgctgaaaccac

SEQ ID NO: 741800 - DNA, 98 bp, Homo sapiens
tggagctgagaattcaagagactaccctgacttggcagaagaagcagcacctgtgaaactggaaaaacatctgcacagtgctagatctgaagagggaa

SEQ ID NO: 741801 - DNA, 74 bp, Homo sapiens
ggggacaagtacctttatgaaccagtgtatcccaagcaagacatctgtatagattctgcttcatccgtgagaga

SEQ ID NO: 741802 - DNA, 90 bp, Homo sapiens
gggaaaatcatggaagttgattactcagtctctaaaaagctaaggttgctgctccaagatagccaaaatgtggaagcactgagaatgcag

SEQ ID NO: 741803 - DNA, 50 bp, Homo sapiens
ccagctgtgcatggtgcaagcaactggtgaaaattatctcagtgaacgag

SEQ ID NO: 741804 - DNA, 82 bp, Homo sapiens
tgcaagcttagagcgtctggccaagaatcagaggaagtgggccagcctttattattgccatataagccttctggtagtacca

SEQ ID NO: 741805 - DNA, 82 bp, Homo sapiens
gaaaaattacagcacatctcagtgaatttgcaagtgagtgttgcggagataggaacatgggagagaaacaatctgggtaaca

SEQ ID NO: 741806 - DNA, 122 bp, Homo sapiens
gccagagcctggagtctgcgaaggccgggacccggttccccggcccacagtgggggtgtgcaaacccgagagaactggtaatagttatgcacgagtgcgagctgtggtgatgacccgagatg

SEQ ID NO: 741807 - DNA, 96 bp, Homo sapiens
gcagaagccgcccgctctccggcctctgcgacttgatatcaaaagaaagctaactgctagatctgatcgagttaagagtgtggatctgcatcctac

SEQ ID NO: 741808 - DNA, 83 bp, Homo sapiens
atataagaaagaaataagcaaactttatcaggacatgcagagaaaaggacgtgagcgacagaatagaaaaggaatccctggat

SEQ ID NO: 741809 - DNA, 75 bp, Homo sapiens
ctcagaagctatacactcattatctgatacttgtaatcagtctctgcgatatgataccagctattttgtggagta

SEQ ID NO: 741810 - DNA, 88 bp, Homo sapiens
cctatccagacggctgcccttcaagtaccagcaccatgactcctgtgaggatgcagcactccctggcaggtcagacctatgccgtgcc

SEQ ID NO: 741811 - DNA, 74 bp, Homo sapiens
agccgcgcgcctttgtgcgcgcgccgagagccccacagtcttcgttacaacctcatggtgctgtcccaggatgg

SEQ ID NO: 741812 - DNA, 74 bp, Homo sapiens
atcaccttctgtggaaaggaagctgcacaggaagccgtgaaactgcatgttcaaaagaaagctgcagaatggaa

SEQ ID NO: 741813 - DNA, 100 bp, Homo sapiens
gtaggacagcaggcccaagtctgcacatcccaggagcgtgaggatcatccccggagaggacgggaggatcggcagcacagggaaccatcagaacaggaac

SEQ ID NO: 741814 - DNA, 75 bp, Homo sapiens
cacctggacaccttgttagatggaacctacaagcagaaaaaaccactgtctgcaataataaaggaagtctgtgat

SEQ ID NO: 741815 - DNA, 74 bp, Homo sapiens
gaattcagaaggaacttgcagaaatcacattggaccctcctcccaactgtagggttttttgattaactcaaaac

SEQ ID NO: 741816 - DNA, 75 bp, Homo sapiens
cctacaggaagctgctggaaggcgaggagagcagtctcgaagatatgactccaggaccactatattttctccaga

SEQ ID NO: 741817 - DNA, 75 bp, Homo sapiens
ctccctggcacagcaccccagcgccctgcgcttcctggccgaccatggactcagaattcatgattgaagaaatgc

SEQ ID NO: 741818 - DNA, 74 bp, Homo sapiens
agaaaatctaccagcagagaagtctgctacgaggaacaccggcaagagtatcgccaataagaacatcgccaacc

SEQ ID NO: 741819 - DNA, 97 bp, Homo sapiens
gggcctatccaactgttaaattttatttctacgaaagagcaaaggcatccagtaccctgctgactctgacatgcccccagcctcccccagctctgca

SEQ ID NO: 741820 - DNA, 100 bp, Homo sapiens
gagccacaggactgcgccgctgtcttcgacaagttcatcaggatcactactcttggaatcaaagataaatccaaatactgcatatcagaaacaacaggca

SEQ ID NO: 741821 - DNA, 90 bp, Homo sapiens
ggtgctctccgactactcaccccgagtgtaaagatgctggcatcaccatctacatcaggtcagctgtctcagtttggggcaagtttatac

SEQ ID NO: 741822 - DNA, 97 bp, Homo sapiens
cggaatgccaagaagggcacaggcatcgcagcacagacagcaggcatagccgcagcggcgcagccattgtggatgagaagatcttctgttgtcatgg

SEQ ID NO: 741823 - DNA, 98 bp, Homo sapiens
agacagtgaagatataacaagatcagcaaatctaactgaccaggacatccaggcagaaattgatgcccacaatgacatatttaaaagcattgacggaa

SEQ ID NO: 741824 - DNA, 50 bp, Homo sapiens
caaatgcaaatacttgtgcactgggagagagtctaactagttatgatgtc

SEQ ID NO: 741825 - DNA, 100 bp, Homo sapiens
gcagaatcaccagattattttgtggattttcctgttccattttgtgcctcctggacacctcaggaaactcaagagtatacccgaaatgttgttagatatt

SEQ ID NO: 741826 - DNA, 50 bp, Homo sapiens
aaccaaattgtcgccattaagaaagttcctttggtatcatccacaagtga

SEQ ID NO: 741827 - DNA, 75 bp, Homo sapiens
acagagcctcgcctttgccgatccgccgcccgtccacacccgccgccaggctgaccaactgactgaagagcagat

SEQ ID NO: 741828 - DNA, 100 bp, Homo sapiens
gagattcgggttctgccgcttatcttcaggagcgaagagctgcttctgtatcttaagaatgtgacagtgatgataacatgggtgccaaaaatacttcaat

SEQ ID NO: 741829 - DNA, 80 bp, Homo sapiens
gctcgctctgcgagcctcccggggctggcgggagaccatggcgagcccagggaaagacaattatcgaatgaagagctata

SEQ ID NO: 741830 - DNA, 73 bp, Homo sapiens
gatgacattgaggacgagtccacgggcctgaagaagatttatgttgaaattgagcgtgcgcgactgactaaaa

SEQ ID NO: 741831 - DNA, 75 bp, Homo sapiens
atgccgccacggccctttggggaaatgcgtgcactgcgtccctctagagcctaatagtcccagtgaatattgttt

SEQ ID NO: 741832 - DNA, 50 bp, Homo sapiens
agaaaatctccatcgaagggaacatcgtctcaagggcgaagtgaaatctt

SEQ ID NO: 741833 - DNA, 98 bp, Homo sapiens
taactataatcttcatagtagtgtatttatttggcgctgtgttacagacttatcagatgtagacttcctagatgattcttcaacggagagtttgcttc

SEQ ID NO: 741834 - DNA, 83 bp, Homo sapiens
cccttccccacgacggggcgcctctgcaactcacagagatgggtctcactctgtcacccagactggagtgcagtgagtggtgc

SEQ ID NO: 741835 - DNA, 96 bp, Homo sapiens
ctgtgcccctgaagaagcgcggatacgatgtcaccaggaaccctcatctcaacaagttgatgaaacttctgagcaggaacaaaaacataaagaaac

SEQ ID NO: 741836 - DNA, 75 bp, Homo sapiens
gtaacattggagaagctatccgcgtgattgcagagagaggacttggagaaacgctatcagtcaacgaccccccgg

SEQ ID NO: 741837 - DNA, 126 bp, Homo sapiens
gtcaatgcaaagcacagacttggctggacagcactcatggtggcagccatcaaccgaaacaacaggtaccgcagactcgcccttaagcaccacccgttgaagtcaaatgagccgtcttcagcagag

SEQ ID NO: 741838 - DNA, 100 bp, Homo sapiens
cctgtatatggagcacagcatcctcctcttgacccacggctcaccaaaaagccaagtcatcaaggcatgggacattggggtggctaccatgaagaaagga

SEQ ID NO: 741839 - DNA, 83 bp, Homo sapiens
gtaggagctttcaatgtggggaagcactgcagattaacgtcttcaaggacccagttgctgatcccaacaaaaggtccaaaaag

SEQ ID NO: 741840 - DNA, 74 bp, Homo sapiens
gcagatccactcccgaaagatgaatgtcagggatcatagacggtatttctatgtaaacgaacagtcgggcgagt

SEQ ID NO: 741841 - DNA, 82 bp, Homo sapiens
ctggccttgagggtccacaccgcgagggaagatgcgtgcgcccattaccatggtgaatccgggcagcagctcgcagccgccc

SEQ ID NO: 741842 - DNA, 133 bp, Homo sapiens
aggatgacacttctgtggtgtgtagtgagtctctacttttatggaatcctgcaaagtgatgcctcaggcacattgcaagcaacccgtgccttgatggtggttggcatcctcctgggagtgatagcaatctttg

SEQ ID NO: 741843 - DNA, 100 bp, Homo sapiens
aggaactcgatttatatttggcatactttgtgcatgcagcaggagaccaagacacattccaccccagtggggggtcccataccactcatggatctgaatc

SEQ ID NO: 741844 - DNA, 76 bp, Homo sapiens
cgactgcctggcgcgatacaaaaatgagcgggacggtatgcgggccatcctggggtcctacgacagcgagctgacc

SEQ ID NO: 741845 - DNA, 51 bp, Homo sapiens
cgctgctgctcttctccaggctctgtggtgattttacaacgagatgctgct

SEQ ID NO: 741846 - DNA, 89 bp, Homo sapiens
ggcaggcaacctgttcgtgtggcgcttggctctggttaatggcaaaattcaccctgaaaagcaaaggcctcatctccatggcacaggtg

SEQ ID NO: 741847 - DNA, 100 bp, Homo sapiens
ggcacagtggagcagctctgaagatgcaaagctgtatgttgatgtctcatcttgaggaaccaaaagtaacagaagatgaagaaccacccacagaacaaga

SEQ ID NO: 741848 - DNA, 110 bp, Homo sapiens
caaccattgacgccatgtcgggttattcgagtgaccgagaccgcggccgggaccgaggacctgcctagagctggaacgttacctccagagcgagccctgctatgtttcag

SEQ ID NO: 741849 - DNA, 90 bp, Homo sapiens
aggaagctcagcaagactggagtccctgatggaattatgcagtttattaaggatgctgaaaacgccattcaacagatgggtggccagtgg

SEQ ID NO: 741850 - DNA, 106 bp, Homo sapiens
caggacccgaggccaggagccaggggcccagaaggttcttgattattacagacctctttctgaaaagcccggaattggtacaagccatgtttcccaaactgaacaa

SEQ ID NO: 741851 - DNA, 80 bp, Homo sapiens
cttggactgagtcctgcaggacacagcaagtctggaaaagtttgaaattccagtaaaaattcgtttgagtcctgaaccgt

SEQ ID NO: 741852 - DNA, 90 bp, Homo sapiens
cctgcactcagtgaacaaccccattctgcggaagaggaagttacttggatctgagtgggacatacttttgaaggatgtgcaatgttcaat

SEQ ID NO: 741853 - DNA, 75 bp, Homo sapiens
cgcagccgcaccaagcgctggccttttggcaagaagaacaagactacagtggtagtggaggccgaagcggcggga

SEQ ID NO: 741854 - DNA, 100 bp, Homo sapiens
gtggagtccaacttgcctggaccagcttaatggttctgaaccatatttatttagagtcagaatggagcgatttgtagtaacagcaccacctgctcgaaac

SEQ ID NO: 741855 - DNA, 95 bp, Homo sapiens
gaggacgccttcaacaccaccttcatctccaccatcggaaagagcatctacggtgagcgcttccccgatgagaacttcaaactgaagcactacgg

SEQ ID NO: 741856 - DNA, 75 bp, Homo sapiens
tcggcgtcgcgcggcgtgccctgcttgtcacagggaagtcgagataacatgagtattgtactagtttgcttttca

SEQ ID NO: 741857 - DNA, 82 bp, Homo sapiens
caagcagccaaccatgctcaacttcggtgcctctctccagcagactgcggcgccatgtcagaaccggctggggatgtccgtc

SEQ ID NO: 741858 - DNA, 75 bp, Homo sapiens
tggtggctgcagcggcagcagcagcggtagctgcccaaggaggcaccttggaagttgttttcaaccatatccagc

SEQ ID NO: 741859 - DNA, 100 bp, Homo sapiens
ggaggctttcagccggagaagcgagtttcagctggtaagttctcttctacgctgtatgagactggtggctgtgatatgtcacttgtgaattttgaaccag

SEQ ID NO: 741860 - DNA, 51 bp, Homo sapiens
tcccgattagctgggattacaggacttggatgttgtgggtgatggtatgca

SEQ ID NO: 741861 - DNA, 100 bp, Homo sapiens
aaatcaaagccagggaccgttgctgggcctcatttccgcaacttttcggctccgaactgctggcttcgtgggacacatatgcaacatgcctatgattttt

SEQ ID NO: 741862 - DNA, 83 bp, Homo sapiens
ggaggaacaaaggcgacccaagacacccagagagggacagaccatggtgaatccgggcagcagctcgcagccgcccccggtga

SEQ ID NO: 741863 - DNA, 83 bp, Homo sapiens
tttagaccagctagagaccatacagacctaccggtctgtcagtgagatggcttctaacaaggctgcccccaagtgtaactcca

SEQ ID NO: 741864 - DNA, 75 bp, Homo sapiens
aaaacttcgaggcactcaagtcctggctcagcaagactctcgagcccatgcagtaacagagaagaattttgaaac

SEQ ID NO: 741865 - DNA, 100 bp, Homo sapiens
gttgacacaggaacatatagaggccctattggacaaatttggtggggagcataatccaccatcaatatatctggaggtatctcagatgaagacatcatca

SEQ ID NO: 741866 - DNA, 119 bp, Homo sapiens
tggcagagaccccagacatcaagctctttgggaagtggagcaccgatgatgtgcagatcaatgacatttccctgcaggtcaaaatgcagatcttcgtgaaaacccttaccggcaagacc

SEQ ID NO: 741867 - DNA, 80 bp, Homo sapiens
ggcttatctacgctttttagaattgcacttggaggacaagtgggtcggaagcagttcatgaggtttgagtgggcaaacta

SEQ ID NO: 741868 - DNA, 100 bp, Homo sapiens
cggccccgaggcagcgaggcaagggggagatcactcccgctgcgattcagaaggccacccagaggagaaggccaccccgcctggaggcacaggccatgag

SEQ ID NO: 741869 - DNA, 100 bp, Homo sapiens
ggcgacatgtcgacctgacgctctacacggtgcgcttcccttcccacttcagctctgacttgaaggacctgctgcggaacctcctgcaggtagatctcac

SEQ ID NO: 741870 - DNA, 83 bp, Homo sapiens
attagctagtggagccactttctgtattgttacatggacatatgtgttgccacatctgcaaacttcctgggagagtaatgggg

SEQ ID NO: 741871 - DNA, 99 bp, Homo sapiens
gtcttctaagtcagagacatcaaaacctggaccttctggattacaggccaaattagcaagatccttcaaaccaaaaatgtggtggaagaaagaaaaccg

SEQ ID NO: 741872 - DNA, 100 bp, Homo sapiens
tcatcttcagactctcaagaggctctcacggtgtctgcctcctccccaggaacccctcaccatccccaagattggcagtatggagttactcaggccttcc

SEQ ID NO: 741873 - DNA, 83 bp, Homo sapiens
ggagacatgtccaggcggaaacagagcaacccccggcagatcaagcgcgccatgtcagaaccggctggggatgtccgtcagaa

SEQ ID NO: 741874 - DNA, 100 bp, Homo sapiens
tgcaaaggaggcaaaggatatgctatataagatgctctcagaaaatttcatgtcactccaggttcttctgtgtggcagttcagaatgatggatcaagcta

SEQ ID NO: 741875 - DNA, 99 bp, Homo sapiens
atagttctactccttctacaggtgtgtatgatcacaaacaacatcgacccagtgggaagaatccaaatgcgcacgaggaggacactgcgggggcacctg

SEQ ID NO: 741876 - DNA, 50 bp, Homo sapiens
ccggggacttggggccgcagggaggacacaatgtttgcacgaggactgaa

SEQ ID NO: 741877 - DNA, 74 bp, Homo sapiens
cgaggctagggaggacctcacttccccggggtgtaataatgttaactgagcctactttggggataaaggattat

SEQ ID NO: 741878 - DNA, 51 bp, Homo sapiens
tgatttgcctttagaaggagctaaggcttgacctctgctgcccttgttgcc

SEQ ID NO: 741879 - DNA, 83 bp, Homo sapiens
accgatcttttacatgttccacaagaagtgcagcttataatccaagctattactcagacaatgcagatcttcgtgaagactct

SEQ ID NO: 741880 - DNA, 100 bp, Homo sapiens
cgacaagaccatgctggcaagtctgaaggtcaagtgacttaagagattaaaattaatttggttgctgttggttctgaacaaataatgagttcttttattt

SEQ ID NO: 741881 - DNA, 76 bp, Homo sapiens
cggctccgcgggcggcccacggcgagatataatacattgccaagcagaagaactctgaaaaattcaagattagtga

SEQ ID NO: 741882 - DNA, 100 bp, Homo sapiens
tgactgagaaagatatggaattatttcgtgatatccaagaacaagcactgcaggccactatctaccactggcaccaggccacacaaacagaagaggaaac

SEQ ID NO: 741883 - DNA, 50 bp, Homo sapiens
tgggtgctggtgcctatagcatgagggctaggggcaaggtaaagcattgt

SEQ ID NO: 741884 - DNA, 100 bp, Homo sapiens
ccgccggagaggagtggcctcgcccgcttgagccacctgagctgaagattcccttgagaacaagtactgtcctgtggtttcatggcctttcttccatttg

SEQ ID NO: 741885 - DNA, 100 bp, Homo sapiens
cggtgctgccgcgcgagctctacccagtcgaggaaacattggcaaatttggagcgacagatctatgcttttgagggaagctacctggaagacactcagat

SEQ ID NO: 741886 - DNA, 101 bp, Homo sapiens
agagtagacaagccctcaaggatgcccggtccccatcaccggcacacattgtcgttattcagcttctcaaggctggaaaagcgaaggaagtttcctacaat

SEQ ID NO: 741887 - DNA, 101 bp, Homo sapiens
acatattccgtggtgtatctgtacagcagtttcctcatccctgcagctgtgtttgaacaggtgctggagaatctggtaaaagcaccattgtgaagcagatg

SEQ ID NO: 741888 - DNA, 75 bp, Homo sapiens
gcatctcctcggcccctggctcctgctcctggtacgaattggagcaatgttggcttatacacctctggatgagaa

SEQ ID NO: 741889 - DNA, 74 bp, Homo sapiens
atgaagaccacaataaaagagacctctacttagctcagcaattcttaccttatgccatggacaatattaccagg

SEQ ID NO: 741890 - DNA, 83 bp, Homo sapiens
accagtgacagtggtggcaccacaatctcctaccttccaagaatgatcaagtctcggcctctggattatacctttgttcctcg

SEQ ID NO: 741891 - DNA, 100 bp, Homo sapiens
gcttggaggagggtcactatgtcattgggccaaagatagagattccggtacattatgcagaatccgtctcttgctcaagtgaaaattgaagaagcaaagc

SEQ ID NO: 741892 - DNA, 100 bp, Homo sapiens
agcgagctgagtggttgtgtggtcgcgtctcggaaaccggtagcgcttgcagcatggagtggcaaaattctattcagaagaatgcaggccttgcttttat

SEQ ID NO: 741893 - DNA, 75 bp, Homo sapiens
aaagtgcccggacccaaaacaggaagcaatgaatcgctccctggctaatgtgattcttggaggctatggcaccac

SEQ ID NO: 741894 - DNA, 88 bp, Homo sapiens
cacacagggaatgctggagcaatacttaaatagcctcctgacaaggtgatccgggcgggccccgcaggaattttatcccctcaccggc

SEQ ID NO: 741895 - DNA, 100 bp, Homo sapiens
ggaagaacgctatgacctgaagaccaagctctgtcctgtccccgtatgagaggcagcttaacctggatgccagcgtgcagcacttggaggatggagatgg

SEQ ID NO: 741896 - DNA, 96 bp, Homo sapiens
tcctccttcgccgccgcgcacaaccgcacgtgcaggtcgcgtggggcaggcagtggcgctgcgggccaaggccttcggcttcaacgtgctcttcta

SEQ ID NO: 741897 - DNA, 85 bp, Homo sapiens
gtgctcttctggcaggaccttgaccagccgagggccatcgccttggaccccgctcacggatgcgtctgttactagagtggagagt

SEQ ID NO: 741898 - DNA, 130 bp, Homo sapiens
gggtcccgccctggggccggcgatgtgccaccgaggctgaggatgatggtagattgccagacaatgcagatcttcgtgaagactctgactggtaagaccatcaccctcgaggttgagcccagtgacacca

SEQ ID NO: 741899 - DNA, 100 bp, Homo sapiens
tgttcttaacccagaagtagctgaatgtgttactccattgctgaggagtgagttgctggagaatgtaaccctaatccataaaccagtgtcgttgcaaccc

SEQ ID NO: 741900 - DNA, 98 bp, Homo sapiens
ggctgcgtcgcccgaggcgaggaggagcgctggcgagtggaaatatgcctggaagtagggtcagggtctggtgtagtatctgcattcctagcctctat

SEQ ID NO: 741901 - DNA, 50 bp, Homo sapiens
gaattgctcagccttgccagcagcgtgctcttgctaaaactggagctgaa

SEQ ID NO: 741902 - DNA, 98 bp, Homo sapiens
aaatcagggaaattttgtcagatgataaacatgactgggatcagcgtgccaatgcagtaagaagagttcctgggtcaagtggtcaccttcataaaacc

SEQ ID NO: 741903 - DNA, 100 bp, Homo sapiens
cgagaacagagaagggagctctatagtcggagtggagaactgcaaggtcttctcgtgggcaccctggacgtggtgctggactccagtgcccgcgtggccc

SEQ ID NO: 741904 - DNA, 82 bp, Homo sapiens
atatacgacacatccaggagtttattggagcgcagactgatggcgcaaagggtgctggagaatctggtaaaagcaccattgt

SEQ ID NO: 741905 - DNA, 96 bp, Homo sapiens
gtgttttcttatttagccggagtgagaagcaagaaggccctggacacagcaatatctctgggctttcacagatcaccccatcctgagatctgctgc

SEQ ID NO: 741906 - DNA, 95 bp, Homo sapiens
aaggaaccgctctcgcttcgtcctacacttgcgcaaatgtctccgggctaccttaatgagcagccaggatgccatcatctccgacctgaatgaca

SEQ ID NO: 741907 - DNA, 50 bp, Homo sapiens
gcaggctagaagagctcgatgagagagccataagtgtgatccttggtgac

SEQ ID NO: 741908 - DNA, 82 bp, Homo sapiens
agaaaaatacaaagttggaagcaataccaaacagtggcatggaccacacccagcggaagaaaattcgtccaacatactctca

SEQ ID NO: 741909 - DNA, 90 bp, Homo sapiens
tactcagagtgctacttacagtaccacagcagttacatattctgcccttagagatttgtttgattccatggataaaacttcttccagtat

SEQ ID NO: 741910 - DNA, 97 bp, Homo sapiens
gcccgcccgggccggtcgcggaggccgcgccgggccctgtcgcgaacctccggcgcgctgccccgccggaccgtggatctcactggcatcgaatcta

SEQ ID NO: 741911 - DNA, 100 bp, Homo sapiens
cccaactccatggacactgcaaatacctcacccttcaaagtaccaattttaggtgatgggcaagtcagaaagtcagatggatataactgatatcaacact

SEQ ID NO: 741912 - DNA, 100 bp, Homo sapiens
gaagaaggggacttgggcccagtttatggcttccagtggaggcattttggggcagaatacagagatatggaatcagcctacaaggagaagatgaaggagc

SEQ ID NO: 741913 - DNA, 90 bp, Homo sapiens
gaaaattaagcagatgctccagtttgagaaacctggatctgcgatctgtttgtgattgctcgctgtaagcagctcatctgtgaccccagc

SEQ ID NO: 741914 - DNA, 90 bp, Homo sapiens
ccatacagcaatgggcggcccgctctgcacgcttgccagcgcggtgccgaggcctgcctggagccccagatcaccccttcctactacacc

SEQ ID NO: 741915 - DNA, 82 bp, Homo sapiens
cgcgtctctctgctgcggcgcggggaccgctgtgctctcgttggaatcgaagcctcttaaaatggcagatgacttggacttc

SEQ ID NO: 741916 - DNA, 96 bp, Homo sapiens
cagcaccccagtctttacttgaagacaaaaaggaaccattttctcagattactttctatgaagacaaaaattttcaaggccgtcgctatgactgtg

SEQ ID NO: 741917 - DNA, 82 bp, Homo sapiens
cggaggacgagctgcgggtgcggcacctggaggaggagaaccgagcactgaagtcagtggatctgcatgaatctggaaaatt

SEQ ID NO: 741918 - DNA, 85 bp, Homo sapiens
ggttttgcaggaaatgtgaatctcaggagagagcagccagagtggtagatgtgtgggttatcgaaccacagggactgagatttct

SEQ ID NO: 741919 - DNA, 100 bp, Homo sapiens
agtacctgctggagaagggagactacaaggacagcagcgactttggggcccgtcaccctcaggcacagatatggaaccaaggactgttgagataaacagg

SEQ ID NO: 741920 - DNA, 97 bp, Homo sapiens
catgcagtgacatgttgataaaaaatgatgagtgtgaacatggctacgcctcttcattcccgtccatgccgagcccccgactgcagcattcaaagcc

SEQ ID NO: 741921 - DNA, 75 bp, Homo sapiens
atcactaaaaattatccctactacaggactgcggacaagggctggcaggagaatggggtactaagagaaaagcac

SEQ ID NO: 741922 - DNA, 97 bp, Homo sapiens
tttcatgagagaagaaatacaggatgcctctcagctgccacctgcctttgacctttttgaagcctttgcaaaaaacattaaccaggtggtatttgtt

SEQ ID NO: 741923 - DNA, 50 bp, Homo sapiens
cttgaccttcgagtgtttgccaataatagaacgccagacagaggcaggag

SEQ ID NO: 741924 - DNA, 51 bp, Homo sapiens
aagcaatggatgaaatcaaatcccaagtgctacagcctgctgtcgaggcct

SEQ ID NO: 741925 - DNA, 100 bp, Homo sapiens
aaggattctcgctgtgacagagacaacaccgagtatgagaacatctacttgtttccaaagttatttgggtcagcattttcctccacccaccacttaaaac

SEQ ID NO: 741926 - DNA, 100 bp, Homo sapiens
gacctcctgcatcaccaaccacacgtgcagcaacgtatcctaagaaatccggtaaccaataagaagcattacagattgtatgtgatttataaagttccgc

SEQ ID NO: 741927 - DNA, 82 bp, Homo sapiens
agctacagactttcctgagtcagatcttgatgtggaagaaatggaggactcagaaccaaggatttccaagtgatttcttcca

SEQ ID NO: 741928 - DNA, 74 bp, Homo sapiens
actggatcaacttatgcacctattggagaagttttttccagaaaggaggagtcaaggaagcccttagtgaacga

SEQ ID NO: 741929 - DNA, 75 bp, Homo sapiens
gcaatttgaagatacatgagacagcagccaaacccccagtaccttctccaggcaaattccgttcccctgcagcac

SEQ ID NO: 741930 - DNA, 100 bp, Homo sapiens
aacggccaacttcggcaagatccagatcgggatttacgtggagatcaagcgcagcgatggcattatccaattggtttgctatttgatcttcttgcatcaa

SEQ ID NO: 741931 - DNA, 82 bp, Homo sapiens
tctctgatgcctattattgtaaggagtgcaccatccaggagaaggacgagcttcctggacgatttaacaggtcctcaagcga

SEQ ID NO: 741932 - DNA, 100 bp, Homo sapiens
tgagaatacttgctgaaaaggaagttttctggaatgggttggtcaaagaaaaagtgatgtatgaaaaagaggcaaaacaacaagaagaaaagattgaaaa

SEQ ID NO: 741933 - DNA, 96 bp, Homo sapiens
aggaaaaagaggatgtgattgtcttgtattagagccttcagaaatgattgtgattataagcacaccacagagactaaccagttcaggaagtgttct

SEQ ID NO: 741934 - DNA, 100 bp, Homo sapiens
ataatgaaagtggagagtcacagaggggaacagatttcagtgtcctccttagctctgcagataaactcaagccatggagggattactgcattacatcaac

SEQ ID NO: 741935 - DNA, 93 bp, Homo sapiens
ggggaaactaggtcgatggtcggcggcgcccggatgggcagctgagctctctctcactctcttggagattgtttatgctgagggaagccagct

SEQ ID NO: 741936 - DNA, 75 bp, Homo sapiens
acccatagtcaacgattacatgttatctgactggatcaagattggagatctgacttccaaaaattgtcatctttt

SEQ ID NO: 741937 - DNA, 100 bp, Homo sapiens
cggcagcggcggcggcggctgcagaacagactgtgggcgccgccctgctgcccgaatgaacaaaaggatccttggaggtcggacgagtcgccctggaagg

SEQ ID NO: 741938 - DNA, 75 bp, Homo sapiens
atcacaaaagctggacaagcgaagcccacatatgacagtggacatagaggacaacgcagatatagaacatttctt

SEQ ID NO: 741939 - DNA, 83 bp, Homo sapiens
cagttgaagaagtgaagaaattattggtacctgcatgcctccaaagccattacacctgcagaattcaccttcgtccaatatac

SEQ ID NO: 741940 - DNA, 83 bp, Homo sapiens
gaatccttgctgtgctgaatcctggctgtgtgaccccaagaactgtggctgcaccatctgtcttcatcttcccgccatctgat

SEQ ID NO: 741941 - DNA, 100 bp, Homo sapiens
ccctgtattttgctgatcggctgtatgactccatgaagcttgcaggagggttcctacttgttatctcatgcagcagaagattcttcactcctgatttata

SEQ ID NO: 741942 - DNA, 98 bp, Homo sapiens
gaggagtccctgcgccatgtggatgccagcttcttcttggggaaggtgtgtttcctcgccacaggtggtgatctgtgaaaatggttcgctattcactt

SEQ ID NO: 741943 - DNA, 51 bp, Homo sapiens
gaatgcaggttcctatgcgtcactagatggaggagatgtataagaaagctc

SEQ ID NO: 741944 - DNA, 100 bp, Homo sapiens
agtgtgcgtgcgcgccgagcgctttctcccacgtggtggagaacacggccttcttcggcgatgtggtgctgcgcttcccgaggattgtgcactattactt

SEQ ID NO: 741945 - DNA, 101 bp, Homo sapiens
cctgcttaaagaaatcagtccttcctttccgacttagtcctcgggaagaagtttcagactacaaggttgcttctagaactgctggagttactgtttgacaa

SEQ ID NO: 741946 - DNA, 83 bp, Homo sapiens
ggaggacaaagagcccctcatcgagctcttcgtcaaggtatcgagaaccttccctgcgaacttcagaggaacttccagctgat

SEQ ID NO: 741947 - DNA, 50 bp, Homo sapiens
gtgaaattttttggaacagaagatcagagagcacagaatggggattcaac

SEQ ID NO: 741948 - DNA, 75 bp, Homo sapiens
catgaaggacctgagcctgacgcgggccgcgcgggctgaccggttccctgatgtgttacctgcttctgctactga

SEQ ID NO: 741949 - DNA, 82 bp, Homo sapiens
cgttgtaaatcaggaccccaacaataacttacagggagaaaagatccatgaggacatttttgacatcatagaccgggaggca

SEQ ID NO: 741950 - DNA, 96 bp, Homo sapiens
ttctggtgccgcgcagctttccccggctattttggcattctgctggatatatgttcgtaaataccaaagtcggcgggaaagtgaagttgtctccac

SEQ ID NO: 741951 - DNA, 73 bp, Homo sapiens
gagcactacgttatttagaaacaagacgagaatgtaactccgttgaagcagttacttacagcaagaaaacctc

SEQ ID NO: 741952 - DNA, 96 bp, Homo sapiens
cctgaatttgcctgtatactctcgttctgcgacttataaaggaccagacaaatcaaattagtggttttggtgaccattgtgaggtagatattttgt

SEQ ID NO: 741953 - DNA, 88 bp, Homo sapiens
gccggccagcagaagtggggctgaccctgtgaccagtgtggggaaaagctctgtgggcaccttcgcacgggccctggactgcagcagc

SEQ ID NO: 741954 - DNA, 75 bp, Homo sapiens
gagaactatagcaatctggttttcttggacattaggtatgcatcagttaacttttgcccatagaactcgagctct

SEQ ID NO: 741955 - DNA, 75 bp, Homo sapiens
caagctctgtgagggtttcaatgaggtgctgaaacagtgccgacttgcaaacgagtctcgctctgttgcccaggc

SEQ ID NO: 741956 - DNA, 90 bp, Homo sapiens
ccatcccttccgaggcccgacttcggggtggagcctgagcgaggagcccgcgagctctcctctctcctctgtctccgcggatgacgagtg

SEQ ID NO: 741957 - DNA, 75 bp, Homo sapiens
ctaagatgccaggaccccctgaaagcctagacatggtcctggtgcttgatggtcgaggccatctcctgggccgcc

SEQ ID NO: 741958 - DNA, 100 bp, Homo sapiens
gccaaacatgcaggactctagtaacccgcgaaatgatgggatagcgttgcaaatccttaaaagagtcttaacgaaaatatttacaccagcagctccagtt

SEQ ID NO: 741959 - DNA, 96 bp, Homo sapiens
agaactaagaatattattagcacaagagcaccatactttgaggaactttgccagggttaaaatgcaggtaacaatgtcactatcctccttggtggg

SEQ ID NO: 741960 - DNA, 100 bp, Homo sapiens
gatgagacatttgctacagcatcccacattaagtcaacgtctccctttatggcaagattgtcatgagttatggagtaaaaagcgaagaagacagaagcag

SEQ ID NO: 741961 - DNA, 97 bp, Homo sapiens
tcatggaggaattcaacctcaccactttctaccaggaagctcagcccggagccagaaacgggaggcccgcctggacaaggtgctgtcggacatgaag

SEQ ID NO: 741962 - DNA, 74 bp, Homo sapiens
cacgtcatccgcatcaacaagatgttgtcctgtgctggggctgacaggcgggcagggctgggcagcggcctgag

SEQ ID NO: 741963 - DNA, 83 bp, Homo sapiens
cgccgcgggacctctccgggccatggccattgagacccagagcagcagttctgaagagatagtgcccagccctccctcgccac

SEQ ID NO: 741964 - DNA, 83 bp, Homo sapiens
ggcggggactgttggtctcggccctgcggaagaattaaacaaccaccatgtcgagcaaaaaggcaaagaccaagaccaccaag

SEQ ID NO: 741965 - DNA, 90 bp, Homo sapiens
tgatgcccagttggaagaaagagaacatgcaattgaagaatggaaagagcctgtcaaagaagcacctggaaaacgaaagaaggaaatggc

SEQ ID NO: 741966 - DNA, 80 bp, Homo sapiens
ccggctgggctcggtattccccttcctgctagtcctggtggatctgcagtacgaagatttctcacattggcaaactgaga

SEQ ID NO: 741967 - DNA, 51 bp, Homo sapiens
aaagaccacgcctttgttacctcgaggaactttgtgaaggaagccgaggag

SEQ ID NO: 741968 - DNA, 85 bp, Homo sapiens
caggcacccaagcgggcggcagtttcagctgtgagttcaacatggaggcaaatcagtgccccctggttgtggaaccatcttaccc

SEQ ID NO: 741969 - DNA, 74 bp, Homo sapiens
gagagcgcgaatatcgtcatcgttagaaggcttctattctgctgcttgaagtcagaactgctgatggagacaaa

SEQ ID NO: 741970 - DNA, 109 bp, Homo sapiens
cggaagtgccccttagcgggtgggggaagctggtaggcacgggcggctccgcagtgaccggactcgggggaggaggctgaatgaatgtatttcaccagtagcaaatgag

SEQ ID NO: 741971 - DNA, 75 bp, Homo sapiens
gtggagaggttccttcaggaggatcagaaaccgaagctgaaagactggcatcctcctgggggctttattctggga

SEQ ID NO: 741972 - DNA, 51 bp, Homo sapiens
aaatgagcaatccgcggtctttggaagagagacagagtctcactacgttgc

SEQ ID NO: 741973 - DNA, 101 bp, Homo sapiens
gttcatgtttttccgaagcctgcatttttttgtggagtggtttgaatatcgtaagcgcacgtttaaacatctcaaggctgaggctgaggtggcctccttga

SEQ ID NO: 741974 - DNA, 101 bp, Homo sapiens
aagatccagaatgctgttcactgtactgatctgccagaggatggcctattagaggtggagtttgtccatatgctcaatgctaccatgtgcgccactacccg

SEQ ID NO: 741975 - DNA, 90 bp, Homo sapiens
ggccccgggacatgctatattagtggagttttgaaacaaagttatgtcagatattttcagacctcaatgccacctatcgtacaattcaag

SEQ ID NO: 741976 - DNA, 87 bp, Homo sapiens
cagcgtcaggagccatagtacctacagcagcactccagagcaaatttttcagaacataaaacaagaatatagtcgttatcagaggtg

SEQ ID NO: 741977 - DNA, 75 bp, Homo sapiens
ggagactcctgaccctcagaatggtgtcttcagtgccctgggtttgcctgtgacccaatgcccactgggactgaa

SEQ ID NO: 741978 - DNA, 100 bp, Homo sapiens
aaagtctggagcttagccattggcaacgagttaaatatcacccacgcagtgtttggccagcgcttggatgagactgtggcctatgaacagaaattcggcc

SEQ ID NO: 741979 - DNA, 100 bp, Homo sapiens
gtagatgttcttcgagatggaactggacctgcaggtttacgacttcgcctacttgctgcagggcggcgactggcggcgcgatggacctgaccgggctcct

SEQ ID NO: 741980 - DNA, 100 bp, Homo sapiens
ttaaacctggtgtttggacttcaacttagcatggctagaattacttaaaccattggatattgagtttacaaagcatttgcatgaaaaagtgaatatcatc

SEQ ID NO: 741981 - DNA, 100 bp, Homo sapiens
gttacctgcaggtattgggagatccacagctaagacgccaggacccactggaagcctagaaatgatcattcatcgagatataaaacctgagaatatttta

SEQ ID NO: 741982 - DNA, 75 bp, Homo sapiens
gctcttcagcaccaccccgggagatagggtctctctctctgccacccaggccagagtgcagttgacgcagggcag

SEQ ID NO: 741983 - DNA, 75 bp, Homo sapiens
agatcaagcagtgggccctgagcacgcctcggatgcgcaaaggcccctcttgggacccctgattttagcaggatg

SEQ ID NO: 741984 - DNA, 74 bp, Homo sapiens
acaaaggatgcctccacacctaccactacccgtgtgccagcgatgcagtaagactttgaccccgacgcaggctt

SEQ ID NO: 741985 - DNA, 83 bp, Homo sapiens
cgccccttcgcgtcccctgcaccatgagctggggcaccgagctctgggcaagtgaaccggagcaaacgacttccgatccagtc

SEQ ID NO: 741986 - DNA, 101 bp, Homo sapiens
tttcaagaaagcaggatggactatcattactcctccaacaccaatcatcccagacgccgtccatcatcagggctcggcctcagcaccctccacctccaggt

SEQ ID NO: 741987 - DNA, 96 bp, Homo sapiens
aaaaaaagctacaagaattcaggtgttatcagtgtgaaacagtgtgagctttccagttctcagggaacaatagaaaccagtcttcaggatatcgac

SEQ ID NO: 741988 - DNA, 98 bp, Homo sapiens
catgagtccggcgcgtgtcgggttttgagctgccgcggtcccgggactgagtttgaagaaaacaggtctgaaacaaggtcttacccccagctgcttct

SEQ ID NO: 741989 - DNA, 96 bp, Homo sapiens
tcccagctctactccaggccccgtccgcccgggggcgccgcccaccgcgcctcgctcggttaatttggagtggcccctggagtcagtttcctacac

SEQ ID NO: 741990 - DNA, 71 bp, Homo sapiens
tttgtacctgctacctggcttcttacctcacgaacaaggtgttgacagctcttctaccacaagcagtgctt

SEQ ID NO: 741991 - DNA, 83 bp, Homo sapiens
cacttcctctgcgggagatcatccgtcggctggagggtgtgtccgcagccggccaggtggtatccctgaaggtgtggctgatt

SEQ ID NO: 741992 - DNA, 75 bp, Homo sapiens
ccgggacccacttcactccagtgcctccgacgcctcctgatggaggccgccgagcggctgaattccgtggagccg

SEQ ID NO: 741993 - DNA, 101 bp, Homo sapiens
tttcccagaagttgttctaacgctgcctttgctttaaaacagtattacttgcgccgtgctatcaagactaatcaggaccttctcccagaaactccatggac

SEQ ID NO: 741994 - DNA, 101 bp, Homo sapiens
tgcccagcgccctggccctctcgctgttgctggtctctggctccctcctcccagggccaggcgccgctcagaacgtagccggatcgagctgggagatgtga

SEQ ID NO: 741995 - DNA, 82 bp, Homo sapiens
cgcggcggggctgaggcggccgcggggcccgagcgcaggttcttacatccccgcgtccccaggtttagcctgagcagggttg

SEQ ID NO: 741996 - DNA, 100 bp, Homo sapiens
cacttgataatcttgttacctgtggaaatcagaagagagaatatagtaaaaatacgcagtacagtcccagcccccgcccttgatgtggactggcagaaca

SEQ ID NO: 741997 - DNA, 119 bp, Homo sapiens
gtgagacagatgtggaaaatcatcagattaatccatgtgtgaaaaaagaatatagagatgacccttttcatcaggtaaaaagaacgtattctcatggtacttacagagctggcccaatg

SEQ ID NO: 741998 - DNA, 101 bp, Homo sapiens
cgcaaacctcatcatccacccacttctagatgagcccgtcatctccagcagtattcagctgctggttcaggatctggatgctgcctgtgatcctgccctga

SEQ ID NO: 741999 - DNA, 98 bp, Homo sapiens
tctcatgttcctccatgataaaggaatcatctatagaaaagaggcacagttagatgaagaaggacagtttcttgtcagaataatatatgatgactcca

SEQ ID NO: 742000 - DNA, 100 bp, Homo sapiens
cgagcgcgcgcgcgaaaactccgggcagtgtctttttctgaagaagagaagtatcagctacgaaaatttgtcaataaatcttatctgctggacaagagag

SEQ ID NO: 742001 - DNA, 106 bp, Homo sapiens
tcctgctgccctcaaggtcgtgcgtctgaagcctacaagaaagatcctgactgctgtcatggcgtgccctctggagaaggccctggatgtgatggtgtccaccttc

SEQ ID NO: 742002 - DNA, 90 bp, Homo sapiens
gtgaggattccaagccaaaggcaagctattggtattgaggaacatttggtttacggaaaccatggtatttcccctttactgcctcatatt

SEQ ID NO: 742003 - DNA, 83 bp, Homo sapiens
gaaaaggagggcagcgacctgagaccagtggtcatcgatgggagcaacgtggccatgagggttcgggggtgattaaagctggc

SEQ ID NO: 742004 - DNA, 82 bp, Homo sapiens
cacgggagaagaggaggatgcggctcgtggtggatggcatggggcgctttggcaggtcccgcacagtcgggcatcctggtgg

SEQ ID NO: 742005 - DNA, 75 bp, Homo sapiens
aatgaataacacaggagaatggataaggcaaaacggaggctgggataaggagcacaagtgtcctttgatttgtgg

SEQ ID NO: 742006 - DNA, 75 bp, Homo sapiens
gtcagccgatgcaccgagtccagcccaggaaaatggagaggaatcagagatcattgatttcttcctgggggcctc

SEQ ID NO: 742007 - DNA, 74 bp, Homo sapiens
cagacttgtccacatccccacagagaatagtgacagtggtacaggaaagaaagaaaaagaaaagaaaaacagaa

SEQ ID NO: 742008 - DNA, 75 bp, Homo sapiens
cacattttgcacaagggcagtcaccatgaaagaatcttgacaaaacttttggaagtgtcagatgatccccaagtc

SEQ ID NO: 742009 - DNA, 96 bp, Homo sapiens
gatggtgatggagattttgatgtggatgatgccaaagttttattagagtgtgaacatggctacgcctcttcattcccgtccatgccgagcccccga

SEQ ID NO: 742010 - DNA, 96 bp, Homo sapiens
ctgagggagcctcgccgcccgtccccggcacacgcgcagccccggcctctcggcctctgccggagaaacagttacatggacacagaacagtatgaa

SEQ ID NO: 742011 - DNA, 100 bp, Homo sapiens
gtcgttcggctccttgctgaaataaggacaagcgagtgatagacagccaagcagagaaactgaaggagcttgacaaggagatccggcccttccggcagaa

SEQ ID NO: 742012 - DNA, 75 bp, Homo sapiens
tgctgctaaaaacaagactggggctgctcccatcattgatgtggtgcgatcgattctcacagccacagtggacaa

SEQ ID NO: 742013 - DNA, 101 bp, Homo sapiens
ttcaagaacttcctcgcactgtgacatgtctgatcccttgctcccatccctgcagcatgaacaaggccagatcagaaaagggagctcaggtaccttccaga

SEQ ID NO: 742014 - DNA, 127 bp, Homo sapiens
cctgcaggtattgggagatccacagctaagacgccaggacccactggaagcctagaaatggatgctgaaaacgccattcaacagatgggtggccagtggcttggtggaagacaaatcagaactaact

SEQ ID NO: 742015 - DNA, 76 bp, Homo sapiens
tattcagatcatccaagtggaggttcctacagagattcatatgagagttatggaggagatgttaaagtaacccatc

SEQ ID NO: 742016 - DNA, 90 bp, Homo sapiens
ttctcagaggaggagttccagaagcatgaaggttggatggcaagcatgtggtgtttggcaaagtgaaagaaggcatgaatattgtggagg

SEQ ID NO: 742017 - DNA, 75 bp, Homo sapiens
actgctgctagctgaataccatctgggagcataaaggtgacctgaaggcttctagcagtgcagggaacttgggag

SEQ ID NO: 742018 - DNA, 75 bp, Homo sapiens
cacaaattgatgcacaaaataagctggaaaaatctgaggttgctccttgagggcaggacagttcttatggcttta

SEQ ID NO: 742019 - DNA, 76 bp, Homo sapiens
ctcaggcaacccaaacgtatggactacctccttttggttcgtgagccacacatctccccacaccaagctcctccat

SEQ ID NO: 742020 - DNA, 82 bp, Homo sapiens
acgccaaggaggtcacccgcgtgctaatggtggaaacccacaacgatgccatggacaatattaccaggcagaaccaattcta

SEQ ID NO: 742021 - DNA, 75 bp, Homo sapiens
gcaggaataaggaagcgacctgcaaccgacggaattgcattttgtgaaaaaagaacaagaattttctgcaaggat

SEQ ID NO: 742022 - DNA, 98 bp, Homo sapiens
gtctgacgatagtccaaaaactgaagaagatggtggataagcccacccaggacttaaccaccaccatgtcgagcaaaagaacaaagaccaagaccaag

SEQ ID NO: 742023 - DNA, 75 bp, Homo sapiens
aaatatgttagaggcagttcacacaatccatcaacatgagccatccaaaactctgtttgtcaaaggcctgtctga

SEQ ID NO: 742024 - DNA, 100 bp, Homo sapiens
gcaaaggccaatgttggtgctggcaaaaaggaccggagtaggccctatgatacttttaacttgcactcgttggagaactccttaatggatatgataagga

SEQ ID NO: 742025 - DNA, 101 bp, Homo sapiens
cacccaacttaaaactaggaaattacgaagaagagaaaattgccctgtatctgttaagacagaagccctgcagcagctgcagaaggactctgaggccatcc

SEQ ID NO: 742026 - DNA, 74 bp, Homo sapiens
aggcgggcagcgtgactgccctggtgcagtgtgtcctgcgggccaccaagtgtactaatggtcacttgatgtgc

SEQ ID NO: 742027 - DNA, 75 bp, Homo sapiens
gggcaaggatgtggtcgtggaactaaagaatgacctgagacaatgccatccccatcaaatcctggttcagtgacc

SEQ ID NO: 742028 - DNA, 100 bp, Homo sapiens
ggctccgcatggtcagtgccatttcgcctttatcgtggtggagtccaccctggctgtgatcctggccaatttggagcaaggcttagcagaagacggcggc

SEQ ID NO: 742029 - DNA, 101 bp, Homo sapiens
aggtcccggaccccccggatctgacggggcgggacctggcgccaccttgcaggttgaattctcttacccgcccctgattccaggagatggacatgacagcc

SEQ ID NO: 742030 - DNA, 88 bp, Homo sapiens
atagcaaagtttcatttctttaccttgaaacgtgaaagtaaatcagtgagatcagttaaccccaagaaaggcatcagggttctggagt

SEQ ID NO: 742031 - DNA, 75 bp, Homo sapiens
ctacgacaagggcctcgcttggtaccgcaataccaagaaggagggtgacctgatagctgctcaggctcggctgaa

SEQ ID NO: 742032 - DNA, 99 bp, Homo sapiens
cggtgccgcagctgcgatggccgtggccgtggggagaccgtctacccaacatgagtgaagtttcctgcaagaaacgggacgactatttggaatggccag

SEQ ID NO: 742033 - DNA, 50 bp, Homo sapiens
tgactgataccactataatttagtgttcgaagtcaacaataccattcttc

SEQ ID NO: 742034 - DNA, 100 bp, Homo sapiens
ttctgtataaatacaggtgctataaggtgacctgaaacatatcacgaagctgaaaccttggggcctttttgaggttctagtggagaagtatgagtggtcg

SEQ ID NO: 742035 - DNA, 71 bp, Homo sapiens
aagaaagcatactgcgagccctgctacattccacagtacacgaacctggggctcctgaacagcatggacca

SEQ ID NO: 742036 - DNA, 75 bp, Homo sapiens
cccggcgcgcttgctcgccccttctcccgagaaggggtttcggagggtgctggtcaagataaactaggaatctat

SEQ ID NO: 742037 - DNA, 50 bp, Homo sapiens
gttcatttaccctttggtcggaacggctggagtgcaatggcatgatctcg

SEQ ID NO: 742038 - DNA, 100 bp, Homo sapiens
cggcgatggtaggcgtccctggagcggccgccttccagcggaaatgcaataccttatttccagatgactcctatcagcacttctctctgctggaatgatc

SEQ ID NO: 742039 - DNA, 90 bp, Homo sapiens
cacaggaccgctgttttggatttcattgaagattacttgaaaaaaatttccatcgtgaagcctttaatcatcttacccaaggctctaaca

SEQ ID NO: 742040 - DNA, 98 bp, Homo sapiens
ggcgcgggaagtttggatcctggttccgtccgctaggagtctgcgtgcgaggaccaagaactatatttctttcatgaactcagccctggaagttgctt

SEQ ID NO: 742041 - DNA, 80 bp, Homo sapiens
agctgcatatgcccattttgctgtgtgttacagatgcaaaatcggatggtgattttactttgtaacctgaaacctgcaaa

SEQ ID NO: 742042 - DNA, 100 bp, Homo sapiens
acctggcttagctattcattgcatgcaggtgccttatgcccgctcagaggcccacctcacagagctgctggaggagatatgtgaccggatgaaggagtat

SEQ ID NO: 742043 - DNA, 90 bp, Homo sapiens
accagtgacgttttccacaggcatcaaaatggtgaaaggtgtagcagtcactcggcctacacccacagcatcgaccttgtgaacccagcg

SEQ ID NO: 742044 - DNA, 74 bp, Homo sapiens
ccccccggagcgcggccacggcgcaggagccaaaaacctgtatatcatctccgtgaaggggatcaagggacggc

SEQ ID NO: 742045 - DNA, 100 bp, Homo sapiens
gtgcagctcttggcaggagtagctgatcaaaccaaggatggcctgtcctgggggaacagagaggccctgcggtggctacgggcagtgtgaaggagaaggg

SEQ ID NO: 742046 - DNA, 100 bp, Homo sapiens
agattgaggtgtcggttcgtgctgctgagctgcccaggcttcacggagcgctgttcgggggtcttgtctggattttggttgcctcctccaatgttcctct

SEQ ID NO: 742047 - DNA, 100 bp, Homo sapiens
ggggcgcccgaggtctggaaggcgcagcatttgcaagtgaggaagcagcacaaccctgggttttagataatttctaacagagaggccccagcaattcagc

SEQ ID NO: 742048 - DNA, 85 bp, Homo sapiens
caaggaaaaactggagagcttcatcaaaaatagtgatagctttgataaggaatctggaaacatcaaagctggattagaacatctg

SEQ ID NO: 742049 - DNA, 100 bp, Homo sapiens
ctcttgcttttcctcgctggggtgtacggaaacttggatttaactggccagaagcaggtattcaaagcagagaacaatccctgggtgacccccattgcag

SEQ ID NO: 742050 - DNA, 75 bp, Homo sapiens
atccttctcaaccttgtgggatgtgaaaactctgttactgaagggatcatagacggtatttctatgtaaacgaac

SEQ ID NO: 742051 - DNA, 100 bp, Homo sapiens
ggaagccttccctgggctaaaggcatcatcaagaggttttttgcatgtctgacacccatgactccacctggaccttatggctccacccagaagcaattca

SEQ ID NO: 742052 - DNA, 75 bp, Homo sapiens
gccttctacgttgtgaaaatgctctctgatgtaaaggatggagtaaatcaagcagcacctgcatttggatttggc

SEQ ID NO: 742053 - DNA, 100 bp, Homo sapiens
ccatcgacggtcagtgcgcacgttgtaatcagctgaggccatgtcaggagacggagccacggagcaggtgatgctgaacaggagcttggcccccctccat

SEQ ID NO: 742054 - DNA, 97 bp, Homo sapiens
ttaattttagggtcctttatatagaagggagacctgggttactaggtgtctttcagaagctgattgcatccaaagcaaatgaccaccaaggttttta

SEQ ID NO: 742055 - DNA, 76 bp, Homo sapiens
aaatcccctgctcagggtcttcatccagaaacgagtgttgttaataacagtactggtagtggaagggattgccgtg

SEQ ID NO: 742056 - DNA, 100 bp, Homo sapiens
ccccagcagcccccgaaggccctatcaggacatggagtatgaaagacggtggcgggacaggcttcattgggacagccctaacccagctgctgaatgccag

SEQ ID NO: 742057 - DNA, 50 bp, Homo sapiens
agggttctgcatcttagcctgctggtactttgaactcaagtaaacaaaag

SEQ ID NO: 742058 - DNA, 100 bp, Homo sapiens
attttttcaagaagaggaatagggtgaatgaatctcatcagaaaagcaggtattgatgaagatgaccctactgctgatgataccagtgctgctgtaactg

SEQ ID NO: 742059 - DNA, 115 bp, Homo sapiens
gggaggtgtagacgctgatcaccgtttccagtcattttaaaaattcagggccccctgctgcgctggctcaaggtgaacttcagtgaagccttcattgcctggatccacatcaagg

SEQ ID NO: 742060 - DNA, 102 bp, Homo sapiens
cggagtcggggacccaggagtttcctgtgtccagcgctgccggagccgcctgagaaaccactcagattgaggatcctcgagtacaatggcggcgggagcagg

SEQ ID NO: 742061 - DNA, 74 bp, Homo sapiens
acccatcttgtacagcaactggctgtcaaaggatgaaaactttcggaagagaaagttgcctgtggtaagttcag

SEQ ID NO: 742062 - DNA, 50 bp, Homo sapiens
aaaaaaggaggccaaagacttttatccaataaatggctccatgaacgtgg

SEQ ID NO: 742063 - DNA, 100 bp, Homo sapiens
gctggctacgaatacgtgagcccggagcagctggctggctttgataagtacaaggtgttttagctcacttggaaaggctagagacccaagtgagcagatc

SEQ ID NO: 742064 - DNA, 75 bp, Homo sapiens
ctcccacctccctgcgccccgccccgaggttggggctttgaagaatgcagccggaaatgcactcggtgatggaaa

SEQ ID NO: 742065 - DNA, 100 bp, Homo sapiens
ccgctcggccccgccagcagcactgtggaggccgtcctcggtcaaaatgcagatcttcgtgaaaacccttaccggcaagaccatcacccttgaggtggag

SEQ ID NO: 742066 - DNA, 98 bp, Homo sapiens
gctggggtcccttttgcctcagatactattttgaagaggttggaaagaaccatgactgtattcaggaaggcacatgaactgaagcttctgtcagaatg

SEQ ID NO: 742067 - DNA, 99 bp, Homo sapiens
caaaggccagggacctacgtactggtaaaactgagacctccaagaaacctgcagctcgacctggttgaattcagtgagaaagatcagtctaaagaaaag

SEQ ID NO: 742068 - DNA, 80 bp, Homo sapiens
ctttccaaaatggcgcgggtgctgaaggctgcagccgcgaatgccgtagcaagctgcctcgtacccagccagacggcacc

SEQ ID NO: 742069 - DNA, 75 bp, Homo sapiens
acttacagcttccttgatcggactcagcattcagctgagtcatcactagagagtgggaagggcagcagcagcaga

SEQ ID NO: 742070 - DNA, 100 bp, Homo sapiens
cgcgagctgcatggcgcctggctggcgctgcccttccacgacccctaccggcaactgattcttgctattccaaatcctcttccacgttgacagcccttca

SEQ ID NO: 742071 - DNA, 100 bp, Homo sapiens
gcaacgtgttggaccttccggagcttctcagaagacagagggttttcttttgaggtggatcatccatgccatggagtatgaacttcagatccgtggcgga

SEQ ID NO: 742072 - DNA, 100 bp, Homo sapiens
tgcactttcggagtctgcgcactaagttgtctctgataatgagaaatgaagaagctagtaagcagctggaggtctagagcccttcaggattggaccgtac

SEQ ID NO: 742073 - DNA, 100 bp, Homo sapiens
tttggttgaagttggagaagtatccaatagggatattgtagaaactgtctttaacctgccctgggcatttccagctcgagagttccttcgaaagaagctg

SEQ ID NO: 742074 - DNA, 100 bp, Homo sapiens
cgctggagcggagccggccgtacgcggtgctgcgagggcagaacctgggactatacaggctccaacccaagttccagtggttgtgtctcctaggaatcag

SEQ ID NO: 742075 - DNA, 75 bp, Homo sapiens
cattcaggggaaccgcctcaccgttctgcccccagaactagaaactgattcagcagtacagaaagaacttagaaa

SEQ ID NO: 742076 - DNA, 83 bp, Homo sapiens
gtcagaccagcgcgtcatcatcaagaaagctctgggtgtgcggcagtaccatgtggcctcagtcctgtgccaacgggccaagg

SEQ ID NO: 742077 - DNA, 82 bp, Homo sapiens
gcagaaaatacctcaggaaaggccaacatcagcagaactattaaggttgattatggaagattcccacaagagtaccacgtca

SEQ ID NO: 742078 - DNA, 90 bp, Homo sapiens
acggcctcctgcatctgatgggtgtggccgacgacgatgccctcgctgaggagcgcatgcggagaggccagaacgccctgccagcccagc

SEQ ID NO: 742079 - DNA, 98 bp, Homo sapiens
caagcccatcgactggctcctggaccatattctgtgggtgaaagtctgcaaccccgagaaggatgcgagacagtgttgcccaggctggtctcaaactc

SEQ ID NO: 742080 - DNA, 80 bp, Homo sapiens
ctcagttggaagcagccgatccagcctgcggagcctgtggggcagagaatggatcttggagaatgtctgaaagtccatga

SEQ ID NO: 742081 - DNA, 74 bp, Homo sapiens
gcacagtcgccttttccagtttggagagacgttggcctactgcagtgcatgaaggtggtatggactcagaactc

SEQ ID NO: 742082 - DNA, 74 bp, Homo sapiens
attaacttcaaaattcagccactgagatatcaccttccagaaaagaatttctgcttggacactgcatagctgct

SEQ ID NO: 742083 - DNA, 82 bp, Homo sapiens
ttgggccagaaggttctctggtggaggcgctcttcctggtgtcccgcccagtagctacccttcgaggaactggagtcccaga

SEQ ID NO: 742084 - DNA, 102 bp, Homo sapiens
ccccggcgccgtccgtgcccgcgggacctgacagccgggtcagaggtgagaagccctaccactgcaactgggacggctgcggctggaagtttgcgcgctcag

SEQ ID NO: 742085 - DNA, 75 bp, Homo sapiens
tgcgccatgaaaacatacttggctcgattccttttgtccaaagtgaacccatctcagacacacaataacctgtat

SEQ ID NO: 742086 - DNA, 80 bp, Homo sapiens
gctgaaggccaggttttgcagtggtctgaggttcgagaacttgtcttggacaattgcaaatcaaatgatggaaaaattga

SEQ ID NO: 742087 - DNA, 116 bp, Homo sapiens
gttcttctaaatgaagcagcaacttcgaaaggcgatgttggaaaaagacggagtgaccaagaatatggcccaggtgaccaaagccctggacaaggccctgagcaccatggacctgc

SEQ ID NO: 742088 - DNA, 100 bp, Homo sapiens
tctgattcagaatcctgaaaatgtgatctcccttaaaaagttagaaatcctgtgttctgtcaacattctccagtttatattcattgccttaagactggac

SEQ ID NO: 742089 - DNA, 100 bp, Homo sapiens
gccacctgggtgctctaaaacaatgatagcaaaggctttggccaatgagagtggactgaattttctagctataaagaatgacagcccatatcaaggcggt

SEQ ID NO: 742090 - DNA, 98 bp, Homo sapiens
cgcgcggccgggccccggtgtctgggaccccaactgggacagctatcatggtgaacttacttcagattgtgcgggaccactgggttcatgttcttgtc

SEQ ID NO: 742091 - DNA, 83 bp, Homo sapiens
tggatgatctcctgccttccttgccgtcatcttcacggacagaggactggccgtttgacgatggggcgcccccgcccggcaag

SEQ ID NO: 742092 - DNA, 82 bp, Homo sapiens
ttcgagtgaccgagaccgcggccgggaccgaggggaatgacgttggccggagctcctatggcgccatgcaggtgaagcaggt

SEQ ID NO: 742093 - DNA, 96 bp, Homo sapiens
ctccggaggccggcgtgacaggctctgtcactaaaataggttgtactcagactatctctactttgcaagttcgaataaatccgcggacgacttcca

SEQ ID NO: 742094 - DNA, 110 bp, Homo sapiens
ggctcatcaccaccttccaaaatagcgagtatggaaattccaaatggatgactcttggttatgtaagtgaccattgggcacagtatgtgagccataaccaaggctcagga

SEQ ID NO: 742095 - DNA, 82 bp, Homo sapiens
ttgaatttctctctgtaaaggaggtgtccttaagtttgctcgcttggtcaagtcctacgaagcccaggatcctgagatcgcc

SEQ ID NO: 742096 - DNA, 88 bp, Homo sapiens
ctggagcagcattccagggcctggcaatcttgtgtcgttataatgaggagagtcaaaaacatgcagccttaagcctcagcaaagagca

SEQ ID NO: 742097 - DNA, 75 bp, Homo sapiens
tgaaaaaagagaagaggagaaggaaaaacaagctgaagaaatggcatcagattgatatcagtaaatgccattatt

SEQ ID NO: 742098 - DNA, 99 bp, Homo sapiens
tttggacccaccactggtagccctggataaagatgcaccggttccttttgcagttaagatccttctattctacgtaatattttatggctgcctggctgg

SEQ ID NO: 742099 - DNA, 75 bp, Homo sapiens
tacagagacaattatgacaactgaaatgagacatgcacataatatagagacattttaaatccaaaggatgtgatt

SEQ ID NO: 742100 - DNA, 78 bp, Homo sapiens
gtctcttacgtctgcggaagtgcagctgcctcagttcttagcgcaggaatagcgggttttgcagcaattgttgcatat

SEQ ID NO: 742101 - DNA, 82 bp, Homo sapiens
agaaaattacctaaatgcactctttcgaaagaaaggaagccacttggaggatgtgctttaccaaaatgagggagtaatctga

SEQ ID NO: 742102 - DNA, 82 bp, Homo sapiens
cctctgctgcgtcctgctgaccttcgatgctgtgggccctgagggaaaggatcacagaggcgctgagccgggatggctacgt

SEQ ID NO: 742103 - DNA, 100 bp, Homo sapiens
ggttcagttttcttcagaagaaggacttcggaatgcactacaacaggaaaatcatattatagatggagtaaaggtgaataagtctgatgacacagcagaa

SEQ ID NO: 742104 - DNA, 75 bp, Homo sapiens
aagtaatacagaactgccccatcgatgtgcggcgcccgctgtataaggagtccaaaactacttacctggaagacc

SEQ ID NO: 742105 - DNA, 76 bp, Homo sapiens
ggagcaagtctgtcagcaccatctttctaacatgtctatgaaccagatagaaatgcattacggaggaaagaacgag

SEQ ID NO: 742106 - DNA, 75 bp, Homo sapiens
aagagcattctccttatctcatctgcacaggaagcaggtctaagtttcgccgtgaggaagatgcggaaaaggctg

SEQ ID NO: 742107 - DNA, 75 bp, Homo sapiens
ggaacgtcatggacttcgtggtcgtcctcacagggacccgtcgccatgggccgtgtgatccgtggacagaggaag

SEQ ID NO: 742108 - DNA, 51 bp, Homo sapiens
catgacttcacactgacacagactgcaggtgttcttctctatgggcctcca

SEQ ID NO: 742109 - DNA, 87 bp, Homo sapiens
gaaaattggaggccgaagctgacaaaattggactactgcttgctgcaaagggtttggattcaggatttgttcctagtgtccaagatt

SEQ ID NO: 742110 - DNA, 87 bp, Homo sapiens
atccttggcagaaagtgaggaggaaaacacccccattcacttttccagccattaactccaggctctcgagaatttgaagatgttgta

SEQ ID NO: 742111 - DNA, 100 bp, Homo sapiens
ttcccacttgattacccgttaagtcccccaaagatgagatttacctgtgagatgtttcatcccaacagagcagacgcctccgcctagacctgaagcctac

SEQ ID NO: 742112 - DNA, 80 bp, Homo sapiens
gcctgcggcgcctgggcgctctgaggtagattttcgttccgtcacccaggctggagtgcagtggtgtgaccttggcttgc

SEQ ID NO: 742113 - DNA, 90 bp, Homo sapiens
gtagttgcaagaaaacaagctcagggctcgcactgattttatattatgatgccttcaattaagttgcagagttctgatggagagatattt

SEQ ID NO: 742114 - DNA, 75 bp, Homo sapiens
tcggctcctcccaggtggcctcccgcgtgctggccatgaaggtgacaaccagggcatccccatcatgtccagcat

SEQ ID NO: 742115 - DNA, 75 bp, Homo sapiens
ggcgaccggagcgaacgccacgccgttgggaatcccttggcaccatgtcctgtgtgcattataaattttcctcta

SEQ ID NO: 742116 - DNA, 100 bp, Homo sapiens
taccctgggaccaacctacttagatgacaatgtcaagaaagaaaactcctccttgtacctaggaaaaccaattctgtgtcctcggaggaccacagcccag

SEQ ID NO: 742117 - DNA, 82 bp, Homo sapiens
gtcccaatcccccactctttccgccctaatggaggtctccagtttcggtgtccttaagtttgctcgcttggtcaagtcctac

SEQ ID NO: 742118 - DNA, 50 bp, Homo sapiens
ttgaatatgaaggcacaccactgaaatgaatgccgggacattctgcttcc

SEQ ID NO: 742119 - DNA, 96 bp, Homo sapiens
ggagcggctcaggccggagcctggtaccgtcgaggatttccctggggaaagtcttcactcagagcttcgctgacagccaaggatggcaagcaaggg

SEQ ID NO: 742120 - DNA, 98 bp, Homo sapiens
aaacagatataagggaatggtctaaagtgattcgcctttgccagtctcatctcgtgtctgctttgttaagttccatgatccagactcagcagttgtgg

SEQ ID NO: 742121 - DNA, 90 bp, Homo sapiens
caggctacctcaggggccgtccccaggacactgtccggatcttccctccctggaggaaatgaacacatggatccaggctatctcttccgc

SEQ ID NO: 742122 - DNA, 131 bp, Homo sapiens
cggccaccgcgactccggctctgcgctcggctgcctgacttcttcctgctgctgcttttcaggggtcagcagatccggaagctcatcaaagatgggctgatcatccgcaagcctgtgacggtccattcccg

SEQ ID NO: 742123 - DNA, 96 bp, Homo sapiens
gtttgcgaaaacttgcggaagctggagatcacaggcgtgtcttgtcgggacgtctatgcgaagcatgtcatgggaacagacatgtcttggagaggt

SEQ ID NO: 742124 - DNA, 74 bp, Homo sapiens
tcagtttcctgcttactgcttcattatggattatacaggttatgaagacagtatggagtttccagaccatagta

SEQ ID NO: 742125 - DNA, 90 bp, Homo sapiens
tttgcaagatctggtcaaatttcagccatcagcaaatttgataatgggctgcattaaaagtaaagaaaacaaaagtccagccattaaata

SEQ ID NO: 742126 - DNA, 98 bp, Homo sapiens
gcagctccacgaaaggcagccgcggatcgccgcgctcagcgacaaacaaaacccttaggagaaatcttgagagtggacagcaattgtgaagatcgcca

SEQ ID NO: 742127 - DNA, 83 bp, Homo sapiens
gatgaagaaacccagcttgatatgttggtttgccaataggattatcctgctgccatcatgtcttggtttgttgatcttgctgg

SEQ ID NO: 742128 - DNA, 83 bp, Homo sapiens
gtccagcggacagcggctgcagcgggggcgccggctgggagagacgtctcccacaacctgctccgggcgctggacgttgggct

SEQ ID NO: 742129 - DNA, 83 bp, Homo sapiens
gaggacggtcggactcccgcggcgggaggagcctgttcccctgagtactatactggcaattgctggagaagattttgcaattg

SEQ ID NO: 742130 - DNA, 82 bp, Homo sapiens
aaagaagtgcctaaacagcaaggtcatcatcagatttgaaatatttaaagtggatacaaaactatttcagcaatgcagacaa

SEQ ID NO: 742131 - DNA, 100 bp, Homo sapiens
accgccgcagcctctgcggagccgggctcgggtcgccggagccgcgccccaccccgccagctccagagccaccttccacagcgcggcacctgtacctccg

SEQ ID NO: 742132 - DNA, 100 bp, Homo sapiens
atattccaaggaatttttcaccaaaaaagggtaattcctctcctgcaattacttttggatggaagtatgcccctttctcagtagaagatggtaatcttgg

SEQ ID NO: 742133 - DNA, 82 bp, Homo sapiens
cacgaaagctttcctaggccaaaaagagaacccagtgacttgattgtaaaaatttacagagcggaatcatatgctggtctcc

SEQ ID NO: 742134 - DNA, 99 bp, Homo sapiens
attgtaatcagcttcttaccaaatacagaagggtgccatgactcccggaatccctatctttagtccaatgatgccttatggcactggactgaccccaca

SEQ ID NO: 742135 - DNA, 75 bp, Homo sapiens
tgacatttaattttagggtcctttatatagaagggagaatgcaagtgctgctggaccaggcgggctgctgtatcg

SEQ ID NO: 742136 - DNA, 100 bp, Homo sapiens
ctgagcagaggacgacatgttgcttttcgtggaggtttatggctacaaatgatttgatgacggaactgcagaaagattccatcaagttggatgatgatag

SEQ ID NO: 742137 - DNA, 100 bp, Homo sapiens
ttttcacgtgctcttgctaaagaggtagcaagaaagaaaattagagtgaatgtagttgcaccaggaggctgggatgcagatggaaaaggcccttgtgtct

SEQ ID NO: 742138 - DNA, 100 bp, Homo sapiens
tgcaatgttgggacaggcagaagaagtggtacaggagagaatttgtgatgatgagctgatcttaatcaaaaagactgcatcaaaacatgtaaacaaggac

SEQ ID NO: 742139 - DNA, 100 bp, Homo sapiens
ggtcgcgtcgttgtcctccgcgagcgtccggattgcaggtgagaagccctaccactgcaactgggacggctgcggctggaagtttgcgcgctcagacgag

SEQ ID NO: 742140 - DNA, 50 bp, Homo sapiens
cccgactctttgggccgttatctcacgaaagaccacagcaagattctttc

SEQ ID NO: 742141 - DNA, 75 bp, Homo sapiens
gtcttggtatactacatggcaaaatgggaaagatgagcgtgaagccgtgcagaagaagaccttcaccaagtgggt

SEQ ID NO: 742142 - DNA, 101 bp, Homo sapiens
gaccaggggcttgagagctgggttctattttccctcctcaaactgactttgcagccacggagagggacttccttccccgcggttcaggaatcgtcacccgg

SEQ ID NO: 742143 - DNA, 100 bp, Homo sapiens
ccaggagttcgtctcttacgtctgcggaagtgcagctgcctcagttcttagcgcaggtacaccagaggatcgcttcctggcagaatttgggagctgttta

SEQ ID NO: 742144 - DNA, 75 bp, Homo sapiens
cccaccgcgccgggccccggacgccgcgcggaaaaggagatcatgaatcagacagataaaaatcaacaagaaatc

SEQ ID NO: 742145 - DNA, 76 bp, Homo sapiens
cgcagatacccgcggtgcaccgcctgctgggagcgccgctcaagaaaactttagaaactgttcctttggagaggaa

SEQ ID NO: 742146 - DNA, 99 bp, Homo sapiens
ggcggcggtggcagccatgttgttatcggtttgggcttggccagccaggaagaatacctggttctgtgaatgccatgagagttctgagcacaagtacag

SEQ ID NO: 742147 - DNA, 99 bp, Homo sapiens
agggacagcacctcatcccctggatgggggaccacaagatcctcatcgacagctggagcagatccgcagggacatccgagacttccggtctagcgcggg

SEQ ID NO: 742148 - DNA, 93 bp, Homo sapiens
ctcatccccaaggaggacggcgtgatcacggccagcgaggacagggccggccaaggattgcgaaaaggaccaattccagtgccggaacgagcg

SEQ ID NO: 742149 - DNA, 75 bp, Homo sapiens
tttttgccaccaatcccttcgatcaggatgttggtactccaaagattcaggtttactcacgtcatccagcagaga

SEQ ID NO: 742150 - DNA, 82 bp, Homo sapiens
accgcagtatcatgctggccaagaagatcatcattaaggacggaggcacgctcattgctatggacagtgctatcaccctgtg

SEQ ID NO: 742151 - DNA, 74 bp, Homo sapiens
gggcgagcacgagaaggtggtccagttccggagggaggaggatggagagcgggccgtggctgaactcagtaacc

SEQ ID NO: 742152 - DNA, 101 bp, Homo sapiens
aaagaaatgtttggagaccagaatgatgatactctggtattcaagagacgatatttttacttgacccaacttcctgacggttcatatattctcaattccta

SEQ ID NO: 742153 - DNA, 50 bp, Homo sapiens
ttcccagaagtcagaatccaagatgggggtccactggacggggcctgagc

SEQ ID NO: 742154 - DNA, 83 bp, Homo sapiens
agaagaccggcggccaatcacagtccactttggacaggctggatctccagaactgttctctggaggaccctggtccaaacttt

SEQ ID NO: 742155 - DNA, 82 bp, Homo sapiens
cagatggcagccagtcagtggtggagacaggggcaagtgtccgagtggtgaatcagctacttacagagatggatggtctgga

SEQ ID NO: 742156 - DNA, 74 bp, Homo sapiens
gtgcggttcaaggctcagctgaaggacccgcagggccccgggccaggtatccgttacagcactgatgtgagtgt

SEQ ID NO: 742157 - DNA, 100 bp, Homo sapiens
atctcttctaacatccagaagatcacacagtgttatcaatgtccgagttaccaccatggatgcagagctggagtttgcaatccagccaaatacaactgga

SEQ ID NO: 742158 - DNA, 90 bp, Homo sapiens
ctccattgaagtttcttgcaaaccacactaacatattactggcatcttcaatctggactgaaatgcaactgcagaagcaacatgtgacct

SEQ ID NO: 742159 - DNA, 90 bp, Homo sapiens
ttcgatccaaaccacctatctgcacactccccaaaagttcctgagttagttgagtcagcttattgggactatcttaaaggaatgccatca

SEQ ID NO: 742160 - DNA, 73 bp, Homo sapiens
aaacatatgaggattttgataccaggatacttgagtcactattccaggtcctcaggatatagccgtgacctaa

SEQ ID NO: 742161 - DNA, 80 bp, Homo sapiens
gagcctcagttggaagcagccgatccagcctgcggagcctgtggggcaggtggctcccggctgcctctgctgcagttcag

SEQ ID NO: 742162 - DNA, 80 bp, Homo sapiens
ttatgtgcatggggtctcaggacctgacgaagttatacggaagcgtctcctcattgatggagatggtgctggagatgatc

SEQ ID NO: 742163 - DNA, 75 bp, Homo sapiens
ttggatttggcagcatctcacagaaagagaggaattgaatgatctggcacgggaccctccagcacagtgttcagc

SEQ ID NO: 742164 - DNA, 75 bp, Homo sapiens
acccctacagctactactatcccatggcgaggctgtgagtgtggtgggctttggcgtctttggccagtcttgcgg

SEQ ID NO: 742165 - DNA, 103 bp, Homo sapiens
catagccctcgctgtctacatggggacaggaccttcgcctctgcatttgtccagtaactctggctgtgccggatactgcttgggtaaaacgggcaccccagga

SEQ ID NO: 742166 - DNA, 96 bp, Homo sapiens
agagagcattttactactgagctgcaaagagttctccggggtgctgcaccagtgtcacattttggcctctgagatggtccatttcattcatcagat

SEQ ID NO: 742167 - DNA, 100 bp, Homo sapiens
gaggtgctatctcggagacacatgaaggtggcattttttggcagatctagatactgatgacgatttaaatagcgacgattatgaatatgaagatgaagcc

SEQ ID NO: 742168 - DNA, 100 bp, Homo sapiens
gcacttcttttttgagaaaggaaggaatatatcctgactgattaaaccagcccaaaagacttcctcttttgaaagagaaggatggtggagaatagcatta

SEQ ID NO: 742169 - DNA, 100 bp, Homo sapiens
aatgaggatgaagattcaccaaataagctatatactttggttacctatgtacctgttaccactttcaaaaggctgttgataatcaggtgtatgtggccac

SEQ ID NO: 742170 - DNA, 101 bp, Homo sapiens
taaagaacatcttcttaatttatccccaaatgtagacatctcttcagtggaccccctgataggccggtttgctccaggttcaagtgattcttctgcctcag

SEQ ID NO: 742171 - DNA, 85 bp, Homo sapiens
gggaggggtgcgaggctagccacgcaggcggggccctgggtatctcgggggagctttgtgccttgatggatcaagttcatcatat

SEQ ID NO: 742172 - DNA, 98 bp, Homo sapiens
tggaggagtggactattcctttgaatgtattggtaatgtgaaggtcatgactcagattgatggacaacttttcttaattaagcaccttttgatacttc

SEQ ID NO: 742173 - DNA, 90 bp, Homo sapiens
agcccctgtacttttggtggttggatcatttgaagtggtgtctacacttataaaacagaatcaaattggatatccccaaccttatggcca

SEQ ID NO: 742174 - DNA, 108 bp, Homo sapiens
gaggccaccaacttccctctgcggccgtttgtcattcccttcctgaaggatgccggctccaggagcagcagtggaggtcgggaacgcctcattgtggagcccccgctc

SEQ ID NO: 742175 - DNA, 100 bp, Homo sapiens
gggctcctggttcagtgaattcaagcgtgggaaactgtctacgccttctccgtcggcagacctgctgggtctcggggctgccccccctgcccccgcgggc

SEQ ID NO: 742176 - DNA, 100 bp, Homo sapiens
gctttggaaacgacgtcatgtgttagaatttctgtggaatgtttaatcttctggatccatgactgtctgatacgttggcaatttaaagtccttttgaaag

SEQ ID NO: 742177 - DNA, 97 bp, Homo sapiens
ctcattctcaccaataatagtctcgtggaactgattttcgggccagtgcaaccaatactgaagttcaaaagtatcgaagaagtgataaaaagagcga

SEQ ID NO: 742178 - DNA, 100 bp, Homo sapiens
atttatagctaagactccaggacacccctgaagccgagaaatgttgttgaatgttgggtcacgaagatctcaacctggccaaagaagagaacccagaaag

SEQ ID NO: 742179 - DNA, 101 bp, Homo sapiens
cccacaggaggcaaccacactagtttagccccaggatgggtgagttcaacgagaagaagacaacatgtggcaccgtttgcctcaagtacctgctgtttacc

SEQ ID NO: 742180 - DNA, 100 bp, Homo sapiens
tggagacctcacgtctggtgcaggcaccagtgcagagagacctctctccccaaaagccgtcaaaggatttgaaactgctccacttaccaagaattattat

SEQ ID NO: 742181 - DNA, 74 bp, Homo sapiens
ctgggactacaagtacctgactctgaaagtcaaagctacggagttcgagaagtggaccaagtgaaacgtctcac

SEQ ID NO: 742182 - DNA, 82 bp, Homo sapiens
agccgccaaagaccccgtccgcttgctatggcatcgttcaggtgccaacgggaccctggttctgccggaaatgtgaatctca

SEQ ID NO: 742183 - DNA, 100 bp, Homo sapiens
gttgaaaagttccggcagagaattctggctccctgtaagggtgatgaattagaagacaatggaaagaatttctacgaatctgatgatgatcagaaggaaa

SEQ ID NO: 742184 - DNA, 100 bp, Homo sapiens
agtgccctattccttcacatgtaattcagaaattagggacagcatgatggaagtggttcattgcatgatattcaactgtcattgccatccagtccagaac

SEQ ID NO: 742185 - DNA, 50 bp, Homo sapiens
gtattttggattttcaccattctaatagggggaaatttgcagtggtgaga

SEQ ID NO: 742186 - DNA, 74 bp, Homo sapiens
aagctgcagcggaggaaggcgagcctgcagaattttcttcctgccccttgaactctgatgaagaagtgaataaa

SEQ ID NO: 742187 - DNA, 104 bp, Homo sapiens
cagcgaaatcgagcctggccttgagggtccacaccgcgagggaagatgcgtgcgcccattacaatgcagatcttcgtgaagactctgactggtaagaccatcac

SEQ ID NO: 742188 - DNA, 50 bp, Homo sapiens
gcggaagattgcccgagagcaaaaagggaaaactgcctttgcttctgagc

SEQ ID NO: 742189 - DNA, 100 bp, Homo sapiens
tgtagcgtgctgctggaggcgcgcggccgcgacgactgcctgctgttcgaggccggcacggtggccacgctggatataaaccacagtacttcaggatccc

SEQ ID NO: 742190 - DNA, 75 bp, Homo sapiens
cacgctccactgcaacatcacgaaatcatgaccaccccaggaaaagagaactttcgcctgaaaagttacaagaac

SEQ ID NO: 742191 - DNA, 83 bp, Homo sapiens
attgaagctgactactaaggagaataaggaactgtggctgcaccatctgtcttcatcttcccgccatctgatgagcagttgaa

SEQ ID NO: 742192 - DNA, 75 bp, Homo sapiens
cttgcccgaagccgggcggaggagagctcaagctaagcatgcaatgatgctacctgttctgacccatcatatccg

SEQ ID NO: 742193 - DNA, 88 bp, Homo sapiens
atgttcatagtccctatgaatctactagattgttttaagaaaatggcagacaaaccagacatgggggaaatcgccagcttcgataagg

SEQ ID NO: 742194 - DNA, 74 bp, Homo sapiens
gcaggatggcgtggtgcaccaccacggcctcttccaggcctcttctgaagagctgaaagctgcctaccggaggc

SEQ ID NO: 742195 - DNA, 95 bp, Homo sapiens
aggattatgaagtattaattcttccactgatatctcaaaaggtgatctggacaaaggaacaggtatctcaggtcaagatggaactcttcagtcat

SEQ ID NO: 742196 - DNA, 74 bp, Homo sapiens
ttgaaactaatcctgatattaagccatcaaatgtggaacctatggaaaaggagaatacttatctctggcgcaca

SEQ ID NO: 742197 - DNA, 80 bp, Homo sapiens
gaggagagctgaagagaggagggggaggccgatgacctgggctctgggcctctgaagacaatgcagatcttcgtgaagac

SEQ ID NO: 742198 - DNA, 101 bp, Homo sapiens
taagctcggagcagttgcaacagcatctcaattctcatgatgagaaactagatgtgtttagcaggaaactttgagggaaattttgagtcactggaccttgc

SEQ ID NO: 742199 - DNA, 82 bp, Homo sapiens
aggctttcagccggagaagcgagtttcagctgtgggacacagcaggccaggaaagatttcgaacaatcacctccagttatta

SEQ ID NO: 742200 - DNA, 90 bp, Homo sapiens
gctgcacattaggttgcagtatgtggccagttatttgcctcagtaaaagagttcgagaacttgtcttggacaattgcaaatcaaatgatg

SEQ ID NO: 742201 - DNA, 100 bp, Homo sapiens
tggacgtcttcaccgccccacactggcggatgaagcagctggtggggctctactgcgacaaggaaggatcgagatcgagaccgggatcgtgaagatcggt

SEQ ID NO: 742202 - DNA, 100 bp, Homo sapiens
agtgaggagaccatagctgcacagccaggtgaatcaggtctaggaaaatcgactctcataaacagcctattcctaactgatctgtacccagaaagagtca

SEQ ID NO: 742203 - DNA, 100 bp, Homo sapiens
atgacctaaacttttgagatagatttggctctatgacttctgacagctctctccatggaaggaggcggcggccgcgatgagccttcagcctgccgggcag

SEQ ID NO: 742204 - DNA, 83 bp, Homo sapiens
tcttgcaacaggagacaagggcggcagagttgttatttttcagcgtgaacaagagagacccactgctaaggagttattgaagc

SEQ ID NO: 742205 - DNA, 75 bp, Homo sapiens
gggagccggcgtgggcggcggcaacggggcactgacctgggtgggaggttcccctgaaggatgctaaggaatacg

SEQ ID NO: 742206 - DNA, 99 bp, Homo sapiens
cttctgggacgcacagagaccgtgaagattccaagttcaggagaactcgaccggatgaagcctgctgggagcgtgaatgacatggccctggatgccttc

SEQ ID NO: 742207 - DNA, 100 bp, Homo sapiens
aggggctggtgtactccagcaacttccaggtgcttgtataactgtaaagatattgtattacgaagaaacacagctggaagtctgggcttctgcattgtag

SEQ ID NO: 742208 - DNA, 83 bp, Homo sapiens
ctggtggtggctggttactaccatgccaatgcagctgtgaacgatcagaggaactgtggctgcaccatctgtcttcatcttcc

SEQ ID NO: 742209 - DNA, 100 bp, Homo sapiens
cggtgggcgggagccccggcgggccgcgcctggtgatcggctccttaccagctcacctctcgccgcacatgtttggaggcgatatgagtctcatccagtc

SEQ ID NO: 742210 - DNA, 75 bp, Homo sapiens
aggaaattaactatctgtacttataaggtggtctgtttttctggggggccaccaacacctcccgtgaatctacca

SEQ ID NO: 742211 - DNA, 75 bp, Homo sapiens
ctttgtggtttatctaaaaaccaaagctcctctggtgcaagtgtggtagctattgacaacaaaatcgagcaagct

SEQ ID NO: 742212 - DNA, 133 bp, Homo sapiens
ccattatcctctgtttctctgctgcaccgacctcgacgtcttgcctgtgtcccacttgttcgcggcctataggccatcgaagacggcaatttggaggaaatggaagaggaagtacggcttaagaagcgaaaaa

SEQ ID NO: 742213 - DNA, 101 bp, Homo sapiens
cgggcccggcgccgcaccagcagaacggtgtcagttgtacccgaggcgttctcagcagcagcaagtacctgtggtggatttccaggctgaactgaggcagg

SEQ ID NO: 742214 - DNA, 82 bp, Homo sapiens
ccaggtgtaagcgcagaaagcaggcgaacccgcggcgcaataacggctactgcagcactggggtgtcagttgttggtccgac

SEQ ID NO: 742215 - DNA, 87 bp, Homo sapiens
atttggaaacttacgatcaggagtgttgcaacggttacagaaatgggacgtcggtcatcagatactgaagaagaaagcagaagcaag

SEQ ID NO: 742216 - DNA, 98 bp, Homo sapiens
gaacaaaaacccccatcctgggaaaaatggggaagctgggtgatttcacctggaacagcatgtcaggccgcagtgtacggctgaggtcagtccccatc

SEQ ID NO: 742217 - DNA, 90 bp, Homo sapiens
tggccaactatcggaacacgagcgagattcctctggttctggtgggaacccaggagtgtgaacatggctacgcctcttcattcccgtcca

SEQ ID NO: 742218 - DNA, 88 bp, Homo sapiens
aggcaatggccttacctccctgccgcccaatttggccgtcgcagaacatggaagatagatgataagcctgtaaaaattgacaagtggg

SEQ ID NO: 742219 - DNA, 73 bp, Homo sapiens
aagatgggcacccccagctgcagccgactgtcagaggtgctctacaagctttacaaggacccagcgggaccgt

SEQ ID NO: 742220 - DNA, 74 bp, Homo sapiens
ggaaggttaacagcccccttctcagttttcctggttcagaggtccaaagaggtgacattttatggatagccatg

SEQ ID NO: 742221 - DNA, 83 bp, Homo sapiens
cccggatcgtgctcctgaaggccctagccttcgtgtactaaatgcactcggtgatggaaagagagccactattctgaagaaca

SEQ ID NO: 742222 - DNA, 75 bp, Homo sapiens
ccagaacgtgccatggagacgcttaacgtaaggatggggatgataagaagagacctgtgatcattcatcgagcca

SEQ ID NO: 742223 - DNA, 100 bp, Homo sapiens
acacattcccacaggaaacaagtcgaccttctgtagcaaagcagcttcttgccgttggttgaatctggcgatgtggaacccatggatatggagggctgac

SEQ ID NO: 742224 - DNA, 101 bp, Homo sapiens
ctcccaccccatccagtggaatgcaccacagccatctcacatttccaagtacattctcaggtggagacctcttatgtccctgatgccaaaaatgcacctac

SEQ ID NO: 742225 - DNA, 95 bp, Homo sapiens
cacctggccccgctacagcaaaccaggtggccctcatgacactgacgctcttcccggtccggctcctggttgccgctgccatgatgctgctggcc

SEQ ID NO: 742226 - DNA, 50 bp, Homo sapiens
atgacattgttcgatacagggtgtatgagattcctgacattcagacaact

SEQ ID NO: 742227 - DNA, 50 bp, Homo sapiens
gtaaaagccccgcctctgccttcggatagaacggtggcagccgaagttag

SEQ ID NO: 742228 - DNA, 50 bp, Homo sapiens
aaacaaatgaagcagcgctttgaaaggtttatcggcgggggcttcaggca

SEQ ID NO: 742229 - DNA, 100 bp, Homo sapiens
ctctgtgcggagactgggcggccggccgacccttcctgtcgctgacggcgactgcgggaggccagtgatgccatctgcagttttgtgatctgcaatgatt

SEQ ID NO: 742230 - DNA, 101 bp, Homo sapiens
ctgtccccaccacaatcaatacgattggaaccagcacaagtacaagactttgtttggagaagctgcctatttcttcttctaccagtaatctccatgtggac

SEQ ID NO: 742231 - DNA, 74 bp, Homo sapiens
gaaaacaacttcgagggcagagaacagcatctgttgcagttgcaggtctccttgcagctcttcgaataaccaag

SEQ ID NO: 742232 - DNA, 82 bp, Homo sapiens
gcgcgcagggcctgcagcgggagctggacggcgagcgcgagcggcgcgagaaaatagcagaccccacgttagctgaaatggg

SEQ ID NO: 742233 - DNA, 83 bp, Homo sapiens
cgggagtattatgaaaagatcctgtgagccgtgagctttgaggcggtgggatgtgtcagcagaatgtctcctgcccccgagag

SEQ ID NO: 742234 - DNA, 90 bp, Homo sapiens
ccgaggtgcgggagagcctggctgagctggagctggagctgtcggaaggtttggcagttctctaccagtggaccaatcttttcatccccg

SEQ ID NO: 742235 - DNA, 82 bp, Homo sapiens
agaagacgaagaagcagaagcgtctgctcaggttgcagcaggagagagcgtgagtgcatctccatccacgttggccaggctg

SEQ ID NO: 742236 - DNA, 100 bp, Homo sapiens
aacacagaagaatcctcgtgcaccaatggatgaggcagacgttaaatccgcagcacactcttctcaggatctgagtgggacatacttttgaaggatgtgc

SEQ ID NO: 742237 - DNA, 99 bp, Homo sapiens
ctgcacagccaggcacactgcatcggcttcccggagctggtgctgcctgtggtcctgcaggtgaagcaaatcatggaggaggctgtcaccaggaagttt

SEQ ID NO: 742238 - DNA, 75 bp, Homo sapiens
agatttcatggaggtggtcctgggcaagcttgaccctcagaagccttttctaccctcttctcaaagtagagccga

SEQ ID NO: 742239 - DNA, 73 bp, Homo sapiens
aaagacttcccctcacacttgacatgattgacaaaagattatcaacgcctgatgactgtggcagaaggcatca

SEQ ID NO: 742240 - DNA, 74 bp, Homo sapiens
gtctggtgttcttggcttcccattagctttcttggactccgtactgttggtgtaaccaaggcctggaggtctgg

SEQ ID NO: 742241 - DNA, 100 bp, Homo sapiens
cgtggatcgaggggaaggtggttctgaagacggatctgaggatgggcttcccgaaggaatccatctggctcgtttgacagcaagtttgtttaccagcaaa

SEQ ID NO: 742242 - DNA, 100 bp, Homo sapiens
aaaatgaaagaaaccgctgaggcttatttgggaaagaagctgtcggaaaaggtaacagaagatggaactcgaaatcccaatgaaaaacctacccagcaaa

SEQ ID NO: 742243 - DNA, 82 bp, Homo sapiens
ccgtcctgagcgccatggctcactccccggtgcagtcgggcctgcccggcatgcaggtctgctgagaacagacccagtccct

SEQ ID NO: 742244 - DNA, 75 bp, Homo sapiens
ccatgcatctcctcggcccctggctcctgctcctggctttgaaaagtccagccgcatttcatgagcagagaagga

SEQ ID NO: 742245 - DNA, 50 bp, Homo sapiens
ggaagattggggccttctgattattttgactgaacattcttcacgatctg

SEQ ID NO: 742246 - DNA, 96 bp, Homo sapiens
ttgctgcacaaggggaggtggttcgtaagctaaaagctgaaaaatcccctaagaaccagacgtcctgggtcctctccagcatggcagccctctact

SEQ ID NO: 742247 - DNA, 88 bp, Homo sapiens
taaggattccaacaacaattccgatggcaaagccgttgccaaggttactctggaagaagtcaactcccaaatagccctagaatacggc

SEQ ID NO: 742248 - DNA, 75 bp, Homo sapiens
cgggttattcgagtgaccgagaccgcggccgggaccgaggatggtcatcatgggccagtgctactacaacgagac

SEQ ID NO: 742249 - DNA, 88 bp, Homo sapiens
acaccaacatcgatgggcggcggaaaatagcctttgccatcactgccattaaggatttcttcaagaagttcttatatgagccattgcc

SEQ ID NO: 742250 - DNA, 95 bp, Homo sapiens
ggaggatccactggacgaatgatgctgaaagatggagtctcccaggcgggaatgcaatggtgcgatctcgacttcactgcaatcttcacctcccg

SEQ ID NO: 742251 - DNA, 100 bp, Homo sapiens
aaggcaatcactagggaagcacagatgtggaaagtgaatgtgcggaaaatgccttcaaatcaggttaaatgaatacctgacgaaagggcccacgtttcaa

SEQ ID NO: 742252 - DNA, 74 bp, Homo sapiens
tggccatggtgccccactatggtggcatcaaccgagttcgggggggcatgtgctctgtgtacctgaaggacagt

SEQ ID NO: 742253 - DNA, 87 bp, Homo sapiens
agcatgatgattcttcagataacttctgtgaagctgatgagttttactacccttggatgctgctgttgacatggaaaagattgagga

SEQ ID NO: 742254 - DNA, 98 bp, Homo sapiens
gtggagaaggcacgagatgaaacgaaaaaagctgtgaaataccagagtcaggcccggaaggtcgtgatgtctcgggagtcggatgttgaggctcagca

SEQ ID NO: 742255 - DNA, 87 bp, Homo sapiens
agcttggagaaccaccgcatcaagagcttcaagaacaagggccgcgatgtggaactgtattcttcaggacttgtggaatgtgaggat

SEQ ID NO: 742256 - DNA, 101 bp, Homo sapiens
ctgccggcacgcgactccccccgggcccaaaccttagccccgtgggccccacggagtgagcggcatgcagcacccccgggcctgtccagtgtcctctggcc

SEQ ID NO: 742257 - DNA, 100 bp, Homo sapiens
agggaatgccacagcatcctccagcacctcagcttgaattcggagtgatttaccactgcacagaggagcggctgtacacgggccggcggggtcggggcgc

SEQ ID NO: 742258 - DNA, 73 bp, Homo sapiens
aacgctgcctggaaaggaagtaccaggacttgcacagttggagtcattcgttgcccagtttgcagccaagaat

SEQ ID NO: 742259 - DNA, 82 bp, Homo sapiens
aaggagctaaagcagcgtgcgttcagccctggggtgtgggcaagagcagtttactgttgcgttttgcagacaacactttctc

SEQ ID NO: 742260 - DNA, 75 bp, Homo sapiens
ggcttaacccaggcatttggagggtttctcatttggcctgagtaccaagttcgatccatagcaagtcatgttcgt

SEQ ID NO: 742261 - DNA, 75 bp, Homo sapiens
ttgaagctttgataaatgaaatcttcctaagtataggatgaagagactcggcacagccttgagtgcatccaggcc

SEQ ID NO: 742262 - DNA, 100 bp, Homo sapiens
tactgcccagagaattttgtagacatcaagctccctggaattcccatgccaccaccacctttgggactcccccctctgcagcctcctccgccacccccac

SEQ ID NO: 742263 - DNA, 75 bp, Homo sapiens
cacgaggtcaggagatcgagaccatcccggctaaaacggccccgtggagaattgattccccgaagacccgacccc

SEQ ID NO: 742264 - DNA, 83 bp, Homo sapiens
tggaacttcgttgcttgcttgcctgtgcgcgcgtgcgcggacatggcctcaaacgggagtgcatccgccccaacccttttccc

SEQ ID NO: 742265 - DNA, 90 bp, Homo sapiens
tactccaagttccaggcagggaatggctcatggggatatccgctactgtgtgaagacattcacaggacacagagaatgggtacgtatggt

SEQ ID NO: 742266 - DNA, 75 bp, Homo sapiens
tggccggcagcgtcccggacgaggagcaattaccagctctggctgggtcgccacaacttgtttgacgacgaaaac

SEQ ID NO: 742267 - DNA, 90 bp, Homo sapiens
ataccctagaggaacatccggagacttcactgcccaaacaggaagtctatgatgagtacaatttgcagaaaaaacttcagcatgtgccag

SEQ ID NO: 742268 - DNA, 90 bp, Homo sapiens
tcgcattttggcattgacatttaattttagggtcctttatatagaagggagagtagagtggaagaggaagctgcccagaagaacatggcc

SEQ ID NO: 742269 - DNA, 100 bp, Homo sapiens
atgcctacttgcaacagggttgcaaactgtcttccagccctgccaagcccaaacatgtggaactaaatcttaaaacccctaagaatcttgacagtttggg

SEQ ID NO: 742270 - DNA, 75 bp, Homo sapiens
cccgaggaggcagccaagctcgtggcctgcctctgcgtgcaaaagacaactggcagtgcagagtttagcatttaa

SEQ ID NO: 742271 - DNA, 90 bp, Homo sapiens
ggcttaagaaacacatgccgaaagacagcaacctgctcctggaggacgtcacctggaagtacacaggtcgcatcctgagtctcagctggc

SEQ ID NO: 742272 - DNA, 82 bp, Homo sapiens
ccttctccactttcgccagcccgtgccgcgagcgcggcctgcaggagccaaaacagagtggagtacgagaaaagggtccgag

SEQ ID NO: 742273 - DNA, 88 bp, Homo sapiens
gtctttgaggactccccggcccagtgagggagaccgacaggccaaggcagaggcttcctcaggagaccatcccactgacacagagatg

SEQ ID NO: 742274 - DNA, 82 bp, Homo sapiens
agaacagaagactttgaatatgagatacagtttatgtaacttgatggaagaaaatggaattactccaaaaagacaagtgctc

SEQ ID NO: 742275 - DNA, 75 bp, Homo sapiens
tattgaaaacttacagcaagatggttcatcttttgccctagagcaattgaaggactcgggggactatcctctgac

SEQ ID NO: 742276 - DNA, 75 bp, Homo sapiens
ccggagatattccaggcccactccagggcagatcaccgaagtggccttggagtacaacaactgtcatggggacca

SEQ ID NO: 742277 - DNA, 75 bp, Homo sapiens
acgaaggagtacattgtcaggagcatcatggtccaccatcaggaacaaactcagccaggcaaagcccagccctgc

SEQ ID NO: 742278 - DNA, 100 bp, Homo sapiens
ccctcctgccctctgggttcacaatacggtccaggagagcctcagattattttttgtagaagtgaagctgcacatcaaggagtaattacctggaatcccc

SEQ ID NO: 742279 - DNA, 75 bp, Homo sapiens
atgctacagtataagaaaaaagctgctgcctatatgaagtctttgagaaaggaccctgatgcttggtgtgacctg

SEQ ID NO: 742280 - DNA, 74 bp, Homo sapiens
tgactttcagctatggaatcggctgctgcatctgaagccccccaggatgtgacctacgcccagctgcacagctt

SEQ ID NO: 742281 - DNA, 82 bp, Homo sapiens
ctggcgccgaggcggcggtacgcaaggctggagccgcagcgggagcccccggtcaaaatgcagatcttcgtgaaaaccctta

SEQ ID NO: 742282 - DNA, 82 bp, Homo sapiens
aggaggctccgtgtctgcagctagtgtgtcaactcagcgtttctcctctcgtccctgcaaacggggattcagcgtccgatcc

SEQ ID NO: 742283 - DNA, 103 bp, Homo sapiens
ccagcacttcatccagcagtgcacaggtgaccaagaatatggcccaggtgaccaaagccctggacaaggccctgagcaccatggacctgcagaaggtctcctc

SEQ ID NO: 742284 - DNA, 100 bp, Homo sapiens
tctccctcattgaggattttgggagccttggagagactgtacctaaaaagcaagttgtggccaaggccccagtgaaagcagctaccacccctacccggaa

SEQ ID NO: 742285 - DNA, 100 bp, Homo sapiens
gggaatggccgtcttcgggttcgtcctcttcttggtgctgtggctgatgcatttcatggctatcatctacacagttgtggaaagtaaaaatgtagcccta

SEQ ID NO: 742286 - DNA, 75 bp, Homo sapiens
cggtaatgctggtggtctgcatcaccaccggatcaacttcgacaaataggacagaatgctttttggcccaaatgc

SEQ ID NO: 742287 - DNA, 75 bp, Homo sapiens
aaaaatgtggtcagtgaacctatcgaaggacatgaagactaccacatgatggctggagtgaagtggcacgatctc

SEQ ID NO: 742288 - DNA, 129 bp, Homo sapiens
gcgcaggatgggatccggctcctccagctaccggcccaaggccatctacctggacatcgatggacgcattcagaaggatctagtgaaaagccatttgatgtatgcggtcagagaagaagtggaggtcct

SEQ ID NO: 742289 - DNA, 100 bp, Homo sapiens
catgacagtgctcacgccactaacagagaaggattatgaggggttgaagagggtgctccgttccttacagaacacttcctcgtgggtactgtataacatg

SEQ ID NO: 742290 - DNA, 80 bp, Homo sapiens
tccttcatatgatccatcttagtgaagaattaggatacaggaacaagatcatggtgttggccggacaggaacagttaata

SEQ ID NO: 742291 - DNA, 50 bp, Homo sapiens
tgcgaaacttagagaattactgcttaggctggagtgcggtggcgtgatct

SEQ ID NO: 742292 - DNA, 75 bp, Homo sapiens
tagaccgagaagcagatggaagtgacagtttggagacatatctgaagagatggattaagaatgctttggattaag

SEQ ID NO: 742293 - DNA, 100 bp, Homo sapiens
gtgggagaagagtgtgacttcgaggtcatgtccatcctgttgcatggggatgctgcatttgctggccagggcattgtgtacgagaccttccacctcagcg

SEQ ID NO: 742294 - DNA, 83 bp, Homo sapiens
gcgcgcaggacagcgccttcctcaacgacgcggacatggtcatgagctttgtgaacctggagttatggtgaatggttgcatgg

SEQ ID NO: 742295 - DNA, 75 bp, Homo sapiens
aggaaaccatcacagcactcagagagcaggcagacagtccagaagacatgcacagctggattaaggagattggcg

SEQ ID NO: 742296 - DNA, 76 bp, Homo sapiens
ctgagagctgggaagaggcggcagacagcgggtccttaggataagaccatggccttgagagcatgtggcttgatca

SEQ ID NO: 742297 - DNA, 75 bp, Homo sapiens
ggaaatacaagccttatttaccacttcataccaatggtcgacgatgtactatactggcaattgctggagaagatt

SEQ ID NO: 742298 - DNA, 98 bp, Homo sapiens
tgcacttcgcattttggcattgacatttaattttagggtcctttatatagaagggagagtagaaaatgtggacacagacttgccaggcagcctggggc

SEQ ID NO: 742299 - DNA, 100 bp, Homo sapiens
gactctatgacacggccggacaggtcaaaatgcagatcttcgtgaaaacccttaccggcaagaccatcacccttgaggtggagcccagtgacaccatcga

SEQ ID NO: 742300 - DNA, 51 bp, Homo sapiens
aatgcggtttccaagcacacgggtaggaatgaattgatagccagatacatc

SEQ ID NO: 742301 - DNA, 131 bp, Homo sapiens
gaaatatgctgagatttatggcatttcttctgctcacactttgttgcgggggacactgagatataagtttaaaattggtggtgaatggtggacatggatcgattataaccgcttccaggagctcatccagg

SEQ ID NO: 742302 - DNA, 100 bp, Homo sapiens
ggatcgtgcgggtcgcaaagggaagccgagtgctcctgcggctcccagactgcaaccagatcgtaaagctgaaaattgaaatcatgaaagtagacaggac

SEQ ID NO: 742303 - DNA, 100 bp, Homo sapiens
ctgacacaaaaagttcaagctggtgcctatcctacagaaaagttaagtgggcagaccaacatccacctcagcaaaaacttcttcctgacgaatcgcgcca

SEQ ID NO: 742304 - DNA, 100 bp, Homo sapiens
cgggccgagatgtctcgctccgtggccttagctgtgctcgcgctactctctctttctggcctggaggctatccagcgaagggaaaaggccgaggcatcag

SEQ ID NO: 742305 - DNA, 98 bp, Homo sapiens
ttgtgctgatgtatcttatctacattgtcatcatgaagtccagggatggatgggatcatggtgacctggaaagacaactttgactccttctacagtga

SEQ ID NO: 742306 - DNA, 100 bp, Homo sapiens
actcctggagatcgacccgtacttgaagccctacgccgtggacttccagcgcaggtaccacaacatcagagtatacaagaatactggaagtgtgtgaaga

SEQ ID NO: 742307 - DNA, 83 bp, Homo sapiens
caggggcagaaaatagcacacttttactctacgcaactgttgctttttcatgtgaagtaagaactctgctagagaggaaatgg

SEQ ID NO: 742308 - DNA, 80 bp, Homo sapiens
taagtaaacttttggcttatattaggctacctcttcttgcaccacaggcttgtctggagcgggaaagactactgtgagca

SEQ ID NO: 742309 - DNA, 87 bp, Homo sapiens
taggagcgctctgtggtgcctggggctgaacgcggctttctgtaatccagtccctcatagcactggtgaatgacccccagcctgagc

SEQ ID NO: 742310 - DNA, 103 bp, Homo sapiens
ttaaaagaggagcagcatggcatttcagtcactggtttgcagagtccaggttttaggagaagttttagcacaacttctgcttcttcccaaaaggagattaaca

SEQ ID NO: 742311 - DNA, 75 bp, Homo sapiens
tcgacttctctcaggaggagtgggaatgcctggaccctgctcagagggacttgtcttgagagctgatgacaataa

SEQ ID NO: 742312 - DNA, 100 bp, Homo sapiens
ttcatgagtggaatccatgtttctggacgcggatttttggcctcatactctgttatagataaacaaggttgaaatcacaaagattagacacctttttaga

SEQ ID NO: 742313 - DNA, 75 bp, Homo sapiens
ccatatgctcataagaacccacacaatggacaagtggttgggggccgtcccgctcctaaggcaggaagatggtgg

SEQ ID NO: 742314 - DNA, 75 bp, Homo sapiens
cagcgcctacccgagtgtgcgaagctagccaaggtttggtgcacctcgatttggaggaagtagggcagggccctt

SEQ ID NO: 742315 - DNA, 90 bp, Homo sapiens
ctgtcctccaggttcaaacctcgagtccctgtgatcaagctgtcggaaaaggtaacagaagatggaactcgaaatcccaatgaaaaacct

SEQ ID NO: 742316 - DNA, 82 bp, Homo sapiens
tttttcggcgcctgttacattctctatctgcgcaccttggagtccaagcttgtgctctttgtgtccacaggatgaaatgtcc

SEQ ID NO: 742317 - DNA, 75 bp, Homo sapiens
taagaatagactgcatatatattgggattttaaaccgatcaatggtggagagaagcggcctgcctctgatatggg

SEQ ID NO: 742318 - DNA, 74 bp, Homo sapiens
ggacgggacctgcagttccttcttcgagaaaccaaggttacactcctggcacaccttacaaagtgtcctgttcc

SEQ ID NO: 742319 - DNA, 100 bp, Homo sapiens
gtgactaatactactgtagaggatgagactgaaacaaatgaagttcaaggatttctctttgggaaactaaagttacagtctctagcttcgccatgtacat

SEQ ID NO: 742320 - DNA, 100 bp, Homo sapiens
tgtcattgaccaaggagatgatggagacaacttttatgtcatagaacggcaaagtgtttcatggatttcaaagctggaggcgccttatgtcacattcttg

SEQ ID NO: 742321 - DNA, 75 bp, Homo sapiens
ctctcggcctctgccggagaaacagaaatggtggagtcaatgaagaaagtagcagggatggatgtggagctgaca

SEQ ID NO: 742322 - DNA, 51 bp, Homo sapiens
ggactgcctcactgagcaaccaagacttcaatatccgtacattccccacaa

SEQ ID NO: 742323 - DNA, 83 bp, Homo sapiens
cacagcaactcctttgcaagatgccccgaggctgaggctgcagtggccacccaggagacatccaccgtcaggctaaaggtcag

SEQ ID NO: 742324 - DNA, 75 bp, Homo sapiens
aaaaagaccagaaatacatctttgcagccgttgaggtcaaagtaaactgggcaaccacaccaagtagccagaaaa

SEQ ID NO: 742325 - DNA, 75 bp, Homo sapiens
gcgggaagatggcggctgggttcaagggcaagattcttgccaagagaattaatgtgcgtattgagcacattaagc

SEQ ID NO: 742326 - DNA, 100 bp, Homo sapiens
aggtggtcaggtggaacccatgcctggagcctcaccgcttcaatgacacagaggtagatgatgagctggagatcaaggcctactatgcaggccacgtgct

SEQ ID NO: 742327 - DNA, 98 bp, Homo sapiens
gggtgtgcaaacccgagagaactgggcgcttaaattcctagcgaagtgccgtaagaaaaagaaactatttgctccttggcgaggactccaagaactca

SEQ ID NO: 742328 - DNA, 82 bp, Homo sapiens
cttggaatctactcattggctagaacatattaagaagtggtccaaaggcaaagttcgggacaagctcaataacttagtcttg

SEQ ID NO: 742329 - DNA, 74 bp, Homo sapiens
ttaggactcggtgtaggagatccatcgaaccactcgctcaggaggctgccattcgctgcaaggttgaacacccc

SEQ ID NO: 742330 - DNA, 108 bp, Homo sapiens
accatgtcagacgcagccgtagacaccagctccgaaatcaccaccaaggtggtggtgaagtttattaagaaggagaaggtcttggaggattgttggattgaggatccc

SEQ ID NO: 742331 - DNA, 75 bp, Homo sapiens
aagagcttctgtcgccgctctaggaacaaaatccagtctcatagcagaggagaatataatgtttacagcaccttc

SEQ ID NO: 742332 - DNA, 51 bp, Homo sapiens
cttcttcgtgaggctgctcttcgagcgaaagatggatactatgatgctgaa

SEQ ID NO: 742333 - DNA, 75 bp, Homo sapiens
ctgaccctgagcaacccccagatgtcattggagggtacagataaggagggttcctgcccccaggtgaacattaac

SEQ ID NO: 742334 - DNA, 83 bp, Homo sapiens
ggagctgcccggctcggcagcgggaaggttttaaaatcaaagatgggaaaatcggagaaaattgcccttccccatggccagct

SEQ ID NO: 742335 - DNA, 83 bp, Homo sapiens
tgcttgccggccccaacacggaccttggtcctagaccagaaggagcacaggctggatggccgtgtcattgaccctaaaaaggc

SEQ ID NO: 742336 - DNA, 82 bp, Homo sapiens
ctggaactgggagaagatggctttaaagaatacacttcaagttgattgtacacagcactatgaactctgctccggaaaccag

SEQ ID NO: 742337 - DNA, 82 bp, Homo sapiens
gcccacatgcccgctcacctgcgctgtgatgcctgcagagctgtggcttaccaggtatagtcgtctccccctccaccacggc

SEQ ID NO: 742338 - DNA, 98 bp, Homo sapiens
ggccctagactctacaaatgtagaagctgcttttcagacaattttaacagatatccttggaacagaagatcttattgtggaagtgacttccaatgatg

SEQ ID NO: 742339 - DNA, 114 bp, Homo sapiens
ccccagcagagcaggaatgtatcagggacagtggcggatgtgcactgctacaggactctactatggagagtctggtccagaatctgttccaccaggatctctttcaaatgtctc

SEQ ID NO: 742340 - DNA, 82 bp, Homo sapiens
gcactgcagccagtgaaaccactgagcttccccgggcgctgcctggacaggcctgcctgcgtgctgggacatgtctggcctc

SEQ ID NO: 742341 - DNA, 100 bp, Homo sapiens
ggacattacccaagattttgaagaagcttgtcgagtgaattttgaagattgcaccggtcgacaaaggacagcctatttttccctcgacacccgattcaaa

SEQ ID NO: 742342 - DNA, 98 bp, Homo sapiens
tggaccagtggatcgagcagctgaacgagtgcaagcagctgtccgagtcccaggtcaagagcctctgcgagaaggtgctacagaatattttagaaaca

SEQ ID NO: 742343 - DNA, 50 bp, Homo sapiens
cccggagcacccgacccctgatttccctgaaacctgggctcttgaagacg

SEQ ID NO: 742344 - DNA, 75 bp, Homo sapiens
actaagcccctaaaatgtcgagatttgtacaagcaaaactgttcattgtagaatcaaactcttcatcatcaacta

SEQ ID NO: 742345 - DNA, 88 bp, Homo sapiens
gacagcagattttggtttaatatctgattgggacaacattcagacccatttccagtcatgagtttttggattcaaagcataaaaacca

SEQ ID NO: 742346 - DNA, 90 bp, Homo sapiens
ctggcgaaggccaaggctaaagctgaagctattcgaatcctggctgcagctctgacacaacatttcaaaaggtgatgacctatcaacagc

SEQ ID NO: 742347 - DNA, 75 bp, Homo sapiens
cgcatttttgtttttggaaggagaaggatagacttggctttgaggttcaaatggttgtcctgatcctgatttagt

SEQ ID NO: 742348 - DNA, 89 bp, Homo sapiens
cgggagaggtttggaattgatgatcaagatttccagttaattggccttggtcctcacagctccaaaaagaaacaggatctcgataagct

SEQ ID NO: 742349 - DNA, 74 bp, Homo sapiens
ttaacttttccaatgtggaatcctgggccttcattgaacttacgctggaaaaactccaacagcttcatatggac

SEQ ID NO: 742350 - DNA, 90 bp, Homo sapiens
agccagacgacagtcaggagctcagtatggctcttttccaggtggccgacatgaaaaagaagatggaggacagtgtggggtgcctggaaa

SEQ ID NO: 742351 - DNA, 99 bp, Homo sapiens
cgacttagccctgctccaggaatgggacctcgagtcactgtgcatggaagatggagagaaggaagacaaagacaaagaagaggagcaagctgagtacct

SEQ ID NO: 742352 - DNA, 83 bp, Homo sapiens
acgtatttgtgtgacttgactcttcaaacacaaagaactgccattggatgtccagaatcccctgtagttgataatgttgggaa

SEQ ID NO: 742353 - DNA, 75 bp, Homo sapiens
ggaatcgcccaagtccctctactcgcgagctttcttggactccgtactgttggtgtaaccaaggcctggaggtct

SEQ ID NO: 742354 - DNA, 100 bp, Homo sapiens
tacgcttggtttcggcatccttcttacgtcgggtggttttactggagtattggaactcaggttgcagcattgcaggaagagaaaagtagtttgttggcag

SEQ ID NO: 742355 - DNA, 101 bp, Homo sapiens
tcttgcagttcattatccaaaacctcatcgtcatcatgtagtgctcattctgctaaagtaaataatgccagcctgattggactgggttatactcagaccct

SEQ ID NO: 742356 - DNA, 51 bp, Homo sapiens
gtatgacgagattattgagttaaagaagtttcaggaccacgtcaagacttg

SEQ ID NO: 742357 - DNA, 74 bp, Homo sapiens
tgacaatgtccctcacaccccttccagctacatcgaaacatatcattctctgctggaactgggtgagaagcgta

SEQ ID NO: 742358 - DNA, 75 bp, Homo sapiens
ttaaactccatgaagtatgtggagctttacctcgtggctgattatttagaggtctcacagatttcaagcctggct

SEQ ID NO: 742359 - DNA, 75 bp, Homo sapiens
gcatgccccgctacgagctggctttaatcctgaaagccatgcagcgggccaaatttgagtccctctttaggacgt

SEQ ID NO: 742360 - DNA, 88 bp, Homo sapiens
aaccgagagccaggtccagagcgccgaggagccggtctaggacgcagcaggaggcacgcggacctccagtggccggctccggaggctt

SEQ ID NO: 742361 - DNA, 101 bp, Homo sapiens
ggaatggagacccctgaactcattgagctgaggaagaagaagattgaggaggcgatggacgggcaaggggatcaggcgagtgaagccgaagcgcaccacat

SEQ ID NO: 742362 - DNA, 98 bp, Homo sapiens
aagagcggccagttaaacctgtcgggtagaaacctcagtgaagggaccacgggatcattcgaactctggatttacccatctatgtcacacgggtgaag

SEQ ID NO: 742363 - DNA, 73 bp, Homo sapiens
ggaaacagagtgctcagaaaagagttttaccacggatgataccatcggggaccttaagaagctgattgcagcc

SEQ ID NO: 742364 - DNA, 100 bp, Homo sapiens
gcctgtgcatcaatgcaggctggcgctgcgatggtgacgcggactgtgatgaccagtctgatgagcgcaactgcagtgaatctggattgggaaagtcgac

SEQ ID NO: 742365 - DNA, 51 bp, Homo sapiens
gagagcgtggagcgggctgggccagtgagaactcaacagaggcaaaagcag

SEQ ID NO: 742366 - DNA, 90 bp, Homo sapiens
ccaaacccaggaggagactctccctggaaaacttcccttccctttcgtgctttctcctgctcaagacagccacacgaacacggatctccc

SEQ ID NO: 742367 - DNA, 83 bp, Homo sapiens
cccatcctgccgtccttctccactttcgccagcccgtgccgcgagcgcggcctgcaggaggacaatctatgcaggaagaatga

SEQ ID NO: 742368 - DNA, 82 bp, Homo sapiens
cccctttctcgcccagcgcccccaggccgctcccggggctcacgcccccctcttttgtccaccagcccagcctgactcctgg

SEQ ID NO: 742369 - DNA, 82 bp, Homo sapiens
ctgaaaatcagtagaagaaatacgccacatttattctaccggggaagacagtggagcaatggtggaacaaagcggcaaaaga

SEQ ID NO: 742370 - DNA, 75 bp, Homo sapiens
cgaggggtctggaagccagagaccaacgagatcctgcacatgtcttttgcactcactcttgaggatgagaaaaga

SEQ ID NO: 742371 - DNA, 90 bp, Homo sapiens
tctggtgtaccaggcgaagctggccgagcaggctgagcgatacgacgcccgtggaccgggagcccgtggaccgggagccggtggtgtgcc

SEQ ID NO: 742372 - DNA, 83 bp, Homo sapiens
ggaagataaatgaaggggtctagatgtaaatgtcagtggaaaggagagctaccatcactaagccatcactggtgcaagctata

SEQ ID NO: 742373 - DNA, 98 bp, Homo sapiens
agaaaccagaagaactcctctcttgtgcagattgtggcagtagtgaaaatttttactactggagatgtcaacaaagatgggaagctggattttgaaga

SEQ ID NO: 742374 - DNA, 100 bp, Homo sapiens
ctctcgcgttcattgcagcattattcacagtagccaagatagggaagcaacctaaatgtccatcgatggatcttcaacttgctgctgagcttgggaagac

SEQ ID NO: 742375 - DNA, 100 bp, Homo sapiens
gcgaggcagctgtactaggactgggaacggatttggagcaagaggtggtggtggccttcccccgaagaaatttggtaatcctggggagcgtttgcgtaaa

SEQ ID NO: 742376 - DNA, 100 bp, Homo sapiens
gcttctctgctggaagctcttgattatgatagttcagatgacagtgattttaaagttggagatgcctcaggtcagcagcaaggacaagatggagtaaaag

SEQ ID NO: 742377 - DNA, 75 bp, Homo sapiens
tcaattctttgtgactcctcgatcttcagttgaggatttctatgatgactggattttgaattttgtggaacgctt

SEQ ID NO: 742378 - DNA, 80 bp, Homo sapiens
ctccggaggaaacggagcgctgccctgcagcccgagcccatcaaggtgtacggacagaaacgggcctgaatttgaagcta

SEQ ID NO: 742379 - DNA, 111 bp, Homo sapiens
ctggctgctcagcaccgccaggcctggatgggccccatctgccagctggccttcccgggtgaccatcgggatgaggaggaagagacccacatgaagaagtcagagtcggag

SEQ ID NO: 742380 - DNA, 75 bp, Homo sapiens
atggggagaaggaagcgagactcatacgcaacctcaatggtactccaaagattcaggtttactcacgtcatccag

SEQ ID NO: 742381 - DNA, 50 bp, Homo sapiens
ggaaattaactatctgtacttataagatgtggaaatggaggcccagaaag

SEQ ID NO: 742382 - DNA, 100 bp, Homo sapiens
tgggaagagaccttgaaaggacctctagtttatcctgcaactccagtcaatatcccacttaaatcattccagagatcctgaaacctctgtcatggaaaag

SEQ ID NO: 742383 - DNA, 108 bp, Homo sapiens
caaggcacagcttggagtccaagcatttgctgatgcgttgctcgttattcccaaggtaataatagacgtggatggaatacaactagccagagatattccaatgtcatc

SEQ ID NO: 742384 - DNA, 75 bp, Homo sapiens
cggcgcccctgagccggccgagcggcgacggaccgcgagaaatggtggagtcaatgaagaaagtagcagggatgg

SEQ ID NO: 742385 - DNA, 90 bp, Homo sapiens
cgcactgctcatcttggccatcactatacacaacgttccagacatctaggcttgctgtcaaggcttctgatcaacatgagatgaccgccg

SEQ ID NO: 742386 - DNA, 83 bp, Homo sapiens
cagagaaggaaggatcttctcatgcacagaggcaacaaatggcaactttctgaaagcatccccagacatccagttcaggagat

SEQ ID NO: 742387 - DNA, 80 bp, Homo sapiens
cttagaacctggaatttatgcaggatattttgattggaaggactgcctgcctccaacagcgattattggagccggaattg

SEQ ID NO: 742388 - DNA, 80 bp, Homo sapiens
cgcggagttaccccagacccctcagcgtctggcatctgcaatgcatgaaccattgcaaacttggcaagatgcaccataca

SEQ ID NO: 742389 - DNA, 82 bp, Homo sapiens
cttggtttcgggatctcggtgctgcagacggcgagacctcctgcacaggatgatcggctgaatgtaacagaggaactaacgt

SEQ ID NO: 742390 - DNA, 75 bp, Homo sapiens
cggcgaggtgcacattggaggcgtgatgcttaagctggtggagaaactcggcgtcttggctgcccacaagataat

SEQ ID NO: 742391 - DNA, 100 bp, Homo sapiens
catcctgtttgaggatattttcgatgtgaaggatattgacccggagggcaagaagtttgaccgagagcagcccgacggccatggaggctgaagagacgat

SEQ ID NO: 742392 - DNA, 100 bp, Homo sapiens
caggacctgcttccaatcttttacaaagcatgggagtgcagctgcctgacaacaccgatcacagaccaacaaccatgcccggacgtgtactggttcccac

SEQ ID NO: 742393 - DNA, 100 bp, Homo sapiens
ctgacatggcctcagcagtggctgccatccggacgttgctggagttcttgaagagagataaagctcaccagaacaagctagaagaaatgatcaatgagct

SEQ ID NO: 742394 - DNA, 100 bp, Homo sapiens
cacgaccgggcagaaaacacccagtttgtcaaggacttcttgaaaggcaacattaagaaggagctgtttaaggcttattcaaacctccttagagctaaca

SEQ ID NO: 742395 - DNA, 50 bp, Homo sapiens
ctcggacgtagcccggcttgtattgggattggagaatccatgttgaccaa

SEQ ID NO: 742396 - DNA, 75 bp, Homo sapiens
atttatcactcatcacagtaacttacgctgcagaaccttggcctgaaaatgctacattatatcagcaattgaaag

SEQ ID NO: 742397 - DNA, 82 bp, Homo sapiens
aattacaaacatgttttatcaatgcagctaaggaaatgatttgcagctgagtgaatcaggaagtgacagtgatgactgaaga

SEQ ID NO: 742398 - DNA, 100 bp, Homo sapiens
gtgattgctgaattgtctgggcaggcgtttactgaagcatttgaaagggaactaagaagacataaagttcaagagaatattggacctctaagaatacatg

SEQ ID NO: 742399 - DNA, 101 bp, Homo sapiens
ctgggcagggcgcaccacttgcagctgcagcccttgccttgagtcagtgcgccgctctccagcccgcttgaacggttgaaatcacaaagattagacacctt

SEQ ID NO: 742400 - DNA, 119 bp, Homo sapiens
gtttctgcacaggaatatcgagagcgtcatgaacccgagctatagagaaaggagatgagatcaatgtccgagttaccaccatggatgcagagctggagtttgcaatccagccaaataca

SEQ ID NO: 742401 - DNA, 100 bp, Homo sapiens
caactaagtctacagtaaataaatgggttgctgcttttgctcagaggacatccatgaccctaatggtctttttgttcaagataaagtgattttttgcctt

SEQ ID NO: 742402 - DNA, 50 bp, Homo sapiens
cgacagaagcgactttggtgagactctgggggcagtacccaaaggaaacg

SEQ ID NO: 742403 - DNA, 126 bp, Homo sapiens
acctaagggcggcgactacgacggcgttgatatcggtggtaacgacggcctcagcaggcggggaagatgaaagggattggagaatccatgttgaccaaatgcaccagcacagaagtggaattgaat

SEQ ID NO: 742404 - DNA, 75 bp, Homo sapiens
ttcggccatctttgctcctccctgcaactaactccattcttaattgagaattttcctgacactctcaactgtgca

SEQ ID NO: 742405 - DNA, 73 bp, Homo sapiens
gaaaaccccaaaagtgtacataagtggaatgcagtagccctctgggcctgggatattgtggttgataactgtg

SEQ ID NO: 742406 - DNA, 101 bp, Homo sapiens
aagacttcgagtgggtctacaccgaccagccgcacgccgaccggcgccgggagatcctgggttttaaaatcaaagatgggaaaatcggagaaaattgccct

SEQ ID NO: 742407 - DNA, 100 bp, Homo sapiens
gagggcatcttcaaccacaaagctttcccatggtttggcatggacattgggggaactctagtaaagctctcgtactttgaacctattgatatcacagcag

SEQ ID NO: 742408 - DNA, 83 bp, Homo sapiens
tgaagagttgtcccagctcggcccgcgggggagccccgggagccgcacggttcattttccagacactgaaagagcagaatggc

SEQ ID NO: 742409 - DNA, 100 bp, Homo sapiens
tttgaggatatcaaggattggtccgacctcgtaacgccacaaggaataatgggctctgcagaaggctttaaccaagcagataaggcaataaacaccgctg

SEQ ID NO: 742410 - DNA, 100 bp, Homo sapiens
cgtgctttttcatctgcttctttctttctgaagtatcaggcttcgaaatccccataaatggactttctgaagcttgtgcagacataagagccagttcagt

SEQ ID NO: 742411 - DNA, 100 bp, Homo sapiens
cccaacctagtgggtgtaatacatcatgaactgcaggagttggtcaaacgccatgctggggtgctaggacttggtgcatgtgttctttctagtccttacg

SEQ ID NO: 742412 - DNA, 75 bp, Homo sapiens
ctgaccatagccagagaacagccctccatcttgcagcccagaaggtaacacaagtggcaagacagccgggaaccc

SEQ ID NO: 742413 - DNA, 100 bp, Homo sapiens
ttccaatgctgatgaagaggacattcgcaatgccatcatggccatccgccggaaccgcgtggccctgaagggaagctggagaagcttcgagagaaggagc

SEQ ID NO: 742414 - DNA, 71 bp, Homo sapiens
ctgatgctgcccgagaaattgaggccgttgtacaaccatccagcagaccatctccattgccaaggccggca

SEQ ID NO: 742415 - DNA, 75 bp, Homo sapiens
gcgcgcgcgaaaactccgggcagcatcaagatggtgctcatgtggaccagtggtgacgccttcaagacggcctac

SEQ ID NO: 742416 - DNA, 101 bp, Homo sapiens
agcagagtgcccccacgttgacgtcaactggcaggacagcgaggggaacacagccctaatcacagctgcacaggcagagttgcatgctgagaatttgaaaa

SEQ ID NO: 742417 - DNA, 75 bp, Homo sapiens
ccgggaactccccatcgcgttttgccagcgataatacgcctcagccatccgggtgacctgcataggttcctgcgg

SEQ ID NO: 742418 - DNA, 80 bp, Homo sapiens
agtatctgcccctgtcaaatcattccagtatcctagaaggaaaacatcaccatggctacagaaattggttctcctcctcg

SEQ ID NO: 742419 - DNA, 100 bp, Homo sapiens
ctcaagatgtggagctctccttgcagatcggtgacacagttcacatcctggagatgtacgaggatggggcgcctacccttcttcagcaagatgggaacag

SEQ ID NO: 742420 - DNA, 100 bp, Homo sapiens
ggctgatgcagcaggcatcatccgctatgcaattgggtttgtcccgctggctggaagcctggcagtgacacgattaagcccaacgtggatgacagcaagg

SEQ ID NO: 742421 - DNA, 83 bp, Homo sapiens
ttcctgtacagcctgcagaactagatgggcagtagcgaaccccttcccatcgcagatggtgacaggaggaggaagaagaagcg

SEQ ID NO: 742422 - DNA, 102 bp, Homo sapiens
gaccgtgaccgagagcgtgaccgagagcgcgaatatcgtcatcgttagaagtatgattcatccagccttccagctctgttatttaaagcaagaacacttctg

SEQ ID NO: 742423 - DNA, 101 bp, Homo sapiens
ttgacagctggcctatggtttctgcattttgttaagaagcacctcatgcaagcgagggacctgggactgctcacagccagcaacgcacctcttgctttttc

SEQ ID NO: 742424 - DNA, 74 bp, Homo sapiens
tcattttcacccgcatggaaaaccaagtgataggagcatgctgctatgtggaatgttcagctttaacccagaag

SEQ ID NO: 742425 - DNA, 98 bp, Homo sapiens
ttcgacagctacacaaatctggaacgggtggccgattactgcgagaacaactacatacagtgatatgacaagaacagtggagatttctggggaaggag

SEQ ID NO: 742426 - DNA, 96 bp, Homo sapiens
agtcttcccgcgtccgccgattcctcctccttggtcgccgcgtccttggctggcgtagaagaaatgttcccatgaagcctccagatgaagccaagg

SEQ ID NO: 742427 - DNA, 85 bp, Homo sapiens
gcaggagattcggatgggtcagatggctatgggaggtaactatggccaagatcaatcctccatgagtagtggtggtggcagtggt

SEQ ID NO: 742428 - DNA, 90 bp, Homo sapiens
ggcaaatttctgttccatcagcgtttgtttgggtacttttgacttcagtgacattgctgtctatatattcaataaacctcctattgatct

SEQ ID NO: 742429 - DNA, 100 bp, Homo sapiens
ggcgggcgtgggaacccaggccccgccgaggcggccaggtcacgggatggatagccggcctgccatggccatctttgaactcctggactatattgtgaac

SEQ ID NO: 742430 - DNA, 98 bp, Homo sapiens
tgccatctggagtggatggacacacctggttgctcagacagacaagttggatggcttgaggactggtactaaaaggaaacgtgactgggaggccattg

SEQ ID NO: 742431 - DNA, 100 bp, Homo sapiens
agttccatcccacctttgagtcagattattcttggagaaaccctgtctgtttactgtaaccttttgcactcaaattcctttatcaggaataactacatag

SEQ ID NO: 742432 - DNA, 100 bp, Homo sapiens
aatcgcttcagtctttgttctcagaatgggacaatccagtatttgcccgttatccagaggtgaacggctgtttcctcttattcaagccatgcaccctact

SEQ ID NO: 742433 - DNA, 144 bp, Homo sapiens
ggtgaagtgccatcttcggctaggtcgtcacaggctccggctcatggcatcaagtggcatccatcataagttttcggctttgtgagaaaccttaccatcaaacacgatggccagcaacgttaccaacaagacagatcctcgctc

SEQ ID NO: 742434 - DNA, 80 bp, Homo sapiens
ctaaagttgtcatccgtggagcaggaaaccaggctcagtgtatgcttaatcaggcatggtgcatcagagcgggaaggagc

SEQ ID NO: 742435 - DNA, 100 bp, Homo sapiens
caatcccatggatgtcatacgaacccgtgtgcaggaaacagagcaaatgcagcgttacaatcaaagacttattgaggaattgaaaaacagacagactcaa

SEQ ID NO: 742436 - DNA, 100 bp, Homo sapiens
agtgctggagtgcctggcgtcgggcatcgtgatgccaggttcgaacctctgacatgggtggctatgctacttgccatgacttcactgaggctgtcattgc

SEQ ID NO: 742437 - DNA, 100 bp, Homo sapiens
ggaaccttccccagccatggcttccctggggcagatcctcttctggagaacttgatggagagtttggattcattgctttgtgcagaaggttctgaaagtc

SEQ ID NO: 742438 - DNA, 82 bp, Homo sapiens
ctggtcgcggcgggagtggcgtggcgcagatggagttttaacattgaatgcggagaacactaattatgcctatcaagttcca

SEQ ID NO: 742439 - DNA, 97 bp, Homo sapiens
ttgacctttaggtgcttttatattcatctcaaaaacaaaattctgaactcaggacttggcaacctaattcagtggtttgagacagcaccaagtcgga

SEQ ID NO: 742440 - DNA, 100 bp, Homo sapiens
gaagagtcctggatggcagatggggggaccccggtacggacctgtgcagagatgtggtactggatcttcctctgggctctcttctcttctctgtttgtcc

SEQ ID NO: 742441 - DNA, 52 bp, Homo sapiens
gtaagattgtcttggaaatactaagttggattctttgtgggaaagagattcc

SEQ ID NO: 742442 - DNA, 98 bp, Homo sapiens
cgattacacagttctggatgatgtgggccatggtgtcaagaacattgacatcaccaatttcagcagcagctggagcgatggcctggccttctgtgctc

SEQ ID NO: 742443 - DNA, 80 bp, Homo sapiens
ggaggtcacccgcgtgctaatggtggaaacccacaacggccaaacgtaccaagaaagtcgggatcgtcggtaaatacggg

SEQ ID NO: 742444 - DNA, 90 bp, Homo sapiens
agggagagcaagaccatcatgctgcgcggccttcccatcaccatcacagagagcgatagacgagttgtactgctgtcacaggaaatggac

SEQ ID NO: 742445 - DNA, 96 bp, Homo sapiens
cgcggggagccagcgagcgcgccttcggcattggccgccgcgatgtcagctcagtgctgtgcgggccaggctggagtgcaatggcgggatctcggc

SEQ ID NO: 742446 - DNA, 108 bp, Homo sapiens
ctccctgcctccctgcgtggtggactgtggcaccggagaatggatcttggagaatgtctgaaagtccatgacctggctttaagagcggattatgaaattgcatccaaa

SEQ ID NO: 742447 - DNA, 83 bp, Homo sapiens
tgagaatattagcagctcagcaactcaggtcgaatttacaagcactctcagcaacctttgattacctatgaaaaatatgatgt

SEQ ID NO: 742448 - DNA, 100 bp, Homo sapiens
ggtggtgtgtaacgactgtaatcaggttgtcaaaccgcaggcatttcaatcacattatgaggtaacctgacctctccactgaagggcgtgtggctttctg

SEQ ID NO: 742449 - DNA, 100 bp, Homo sapiens
tcttagcggtagagcaaaattcctgaagacaatttcttcttccaaaatcctcggattctctacttctgctgtgtggtacccacagcccctgaacagcctg

SEQ ID NO: 742450 - DNA, 99 bp, Homo sapiens
agcgaacgcttcccatctaacctggaggttgaagcttcaccacaggcttcaaaattaaacaaccaccatgtcgagcaaaaaggcaaagaccaagaccac

SEQ ID NO: 742451 - DNA, 75 bp, Homo sapiens
caggcgcctcttcttagttgatgatttagttgattctctgaaggcctatggcatgtctgcgttacctttaaatct

SEQ ID NO: 742452 - DNA, 50 bp, Homo sapiens
ggactgggctcatctgcaatgagagcagcctcagtcagagcaccctgaag

SEQ ID NO: 742453 - DNA, 100 bp, Homo sapiens
ttttttggtcatgatatcactcctcagcttatccccaaatcacctgtttctggcccagcttattccagatgcagacagacatgctgaactatctggaagt

SEQ ID NO: 742454 - DNA, 101 bp, Homo sapiens
tacaggcctggctttcagacttggcccaggctgcaagcacaaaggaagtttgctcagtctcagccgaatagtcccagcacaactccagtaaagatagtgga

SEQ ID NO: 742455 - DNA, 50 bp, Homo sapiens
gggacggccgccggagccgcgaggccaattgagcagctgaacagaggcca

SEQ ID NO: 742456 - DNA, 83 bp, Homo sapiens
tcctcaatccaacagcccagtgcttctgtctcgactgcactttgagaagggttcaattaaggaccaattaaaagcatatggcg

SEQ ID NO: 742457 - DNA, 82 bp, Homo sapiens
gaagcacctctccagcggggacctgctccgggacaacatgctgcggggcacagctggtaagcgggcccctcagtgctacccc

SEQ ID NO: 742458 - DNA, 82 bp, Homo sapiens
aagtacctcattttcaccatgagcttgtatatgaatcatgtctcacaagagaacagcgagtacggatcttaagcaactgaac

SEQ ID NO: 742459 - DNA, 100 bp, Homo sapiens
cagcaatcaaaaggactgaagtggggttaagattgctctaggtcgtaaccagcctttgaaaaaggagaaaccaaaatggaaaagcgattatcctatgaca

SEQ ID NO: 742460 - DNA, 115 bp, Homo sapiens
aattgacaagtgggatggatcagctgtgaaaaactctttggatgattctgccaaaaagtttttcagaagaagtgaagtcaagatgaagaaccatttgcttttctggggagtcctg

SEQ ID NO: 742461 - DNA, 75 bp, Homo sapiens
ggccatgctctcagctctcccgccgcgtttctccttggaccaagatgactgatggaaaactctccacctctacaa

SEQ ID NO: 742462 - DNA, 100 bp, Homo sapiens
ccatggctctggtgctctgggaaatgacatctcgctgtaatgcagtgggagttgtcatggatgcactggtagaagatgatatctgtattctgaatcatga

SEQ ID NO: 742463 - DNA, 48 bp, Homo sapiens
tgcagcctcatcctacagccccctagagatgtggtatggtgtattcct

SEQ ID NO: 742464 - DNA, 100 bp, Homo sapiens
gagaacccccgcatcctgtttttcctgagcaaccagagaaaccacttgaccttgcacatatagtgtattgctattaaggagtcagcaaaagtgggtgatc

SEQ ID NO: 742465 - DNA, 83 bp, Homo sapiens
tctgcagccatgaagccaaccgtcccgagtgcagagcagagcgggcggaggaccccgggcgcgggcgcggacggcacgcgggg

SEQ ID NO: 742466 - DNA, 74 bp, Homo sapiens
atggacacatctgaggcaaagctagacatgcgtcgggatgtccaggaaatttttcgcatgaccccccacgagaa

SEQ ID NO: 742467 - DNA, 129 bp, Homo sapiens
cccatctacatccagttctccaaccacaaggagctgaagaccgacagctctcccaaccaggcgggtcctggcggcagagaccacgtcccagcaggagcggctgcaggccatcgcagtgagtttccgccg

SEQ ID NO: 742468 - DNA, 100 bp, Homo sapiens
gaagaatgtctcatgttcgagtctggggctgtcgctgtgctctggcatccgcttcgatcctgaaattccgcaaacactacgactagagtttgctaaggca

SEQ ID NO: 742469 - DNA, 100 bp, Homo sapiens
tcaagtgaagcaaaagccttccatgattacggaaaagagtgcaaattcggaaagcacctcaagctgtttcagatacagttcctgagaggaaaaggtcaac

SEQ ID NO: 742470 - DNA, 82 bp, Homo sapiens
accccgcggccgcaccttcccgccttctcaggtccggacaggccgagatgacgccgagccccctgttgctgctcctgctgcc

SEQ ID NO: 742471 - DNA, 73 bp, Homo sapiens
gtgtctcttctcgccctggcggggaagcaaattgtggctactaatttgccccctgaagatcaagatggctctg

SEQ ID NO: 742472 - DNA, 75 bp, Homo sapiens
gaactacttaagcttaatttgttaaactccggaactgtggctgcaccatctgtcttcatcttcccgccatctgat

SEQ ID NO: 742473 - DNA, 75 bp, Homo sapiens
gagcgagtcgccgctgcagccctagtgactgcggcctgcatcccggggagtaggttgcatctttgttgaaatgat

SEQ ID NO: 742474 - DNA, 75 bp, Homo sapiens
cgcagtggtcgcttcttctccttggttcctcatgagagtgctggactcctacggggatgactaccgggccagcca

SEQ ID NO: 742475 - DNA, 105 bp, Homo sapiens
aaaaatcaaaatggatttagagaaaaattatccgactcctcggaccagcaggacaggttaaacccatccagagtaatggctgcggccttacccaggaccctgggg

SEQ ID NO: 742476 - DNA, 90 bp, Homo sapiens
cttctggagctggccaacgtgcaggaggttcttcacacacccccattcggcgtagtacccagagagctcaagatgtgtggcagttttcgg

SEQ ID NO: 742477 - DNA, 75 bp, Homo sapiens
tggctttcttggcctgatgctgaactctcgaggggtaaaggagctggaagtgcgaaaattgatgcatgtgagagg

SEQ ID NO: 742478 - DNA, 110 bp, Homo sapiens
cccagaccctggagcctcagttggaagcagccgatccagcctgcggagcctgtggggcagagctgaagaagcaggtggagagtgccgagctgaagaaccagcggctcaag

SEQ ID NO: 742479 - DNA, 100 bp, Homo sapiens
aaagcattagcttgttttcgaaatgctatcagagtcaatcctagacattataatgcatgtgttgggtggtgaattcctcaagtacatggaggcctttaaa

SEQ ID NO: 742480 - DNA, 75 bp, Homo sapiens
tggaattgctttcttcagggccttcaatgccattcatcaaagagggagacgagttgtactgctgtcacaggaaat

SEQ ID NO: 742481 - DNA, 95 bp, Homo sapiens
tttgaagcagaaggttgacagcttcagtaagatctcaagagagcgagaagactggaatcaggtcgccgtgagtcaagctgcctccagaacctcag

SEQ ID NO: 742482 - DNA, 75 bp, Homo sapiens
gtggattgtttctcttccactacaagtggaatgcagtagccctctgggcctgggatattgtggttgataactgtg

SEQ ID NO: 742483 - DNA, 98 bp, Homo sapiens
atgctcttggattaggaacagtgattctttcttaaaaatggattggatagctttagtcaaagcagctgctgcagctgcagccaagaacaaaacaggga

SEQ ID NO: 742484 - DNA, 100 bp, Homo sapiens
tatgacccttctttgtcttcgcacctctgatgtgaattacctcattgaagaagctgccaaaatgaagaagatcaagtttcagcacatcgtgtctatctac

SEQ ID NO: 742485 - DNA, 82 bp, Homo sapiens
cttcccgtccgcggcgtggaggctctttcagtctcacatggcaacgaaaacaacttgtatgtcttcacaaggatcagatgat

SEQ ID NO: 742486 - DNA, 75 bp, Homo sapiens
gccggatggacacccacaggtcggccctgcggacccggcaggtgactttggtgtcgtgaaaactacccctaaaag

SEQ ID NO: 742487 - DNA, 51 bp, Homo sapiens
gaaatgtttgggaggcactgtccaggtggagccgccaccaaaatgcagatt

SEQ ID NO: 742488 - DNA, 75 bp, Homo sapiens
cccactgaagacgtctgcgtgagaatagagaccaccgagttttctttttaaaagcggaaggagagttttacatgg

SEQ ID NO: 742489 - DNA, 100 bp, Homo sapiens
cagcaacctgaatctcaaacctggagagtgccttcgagtgcgaggcgaggtggctcctgacgctaagagagccactgacaagactttaagcaagagacgg

SEQ ID NO: 742490 - DNA, 82 bp, Homo sapiens
agacgacactaccagctatccttaatactttgttgacactgcaagaggaagaggagttgtacgcatgtcagagaggttgcag

SEQ ID NO: 742491 - DNA, 95 bp, Homo sapiens
gtgtaccagcagggcgttggctatgtgcccatcacagccggcacagtcttcactaccgtagaagaccttggctccaagatactcctcacctgctc

SEQ ID NO: 742492 - DNA, 100 bp, Homo sapiens
gtccagagctgaggactgcctgtttgcagcagcctcgtcttacagcgtgactgcaaagaaaaagacttttgttttgcaaaagaaaagcagctcggtgact

SEQ ID NO: 742493 - DNA, 55 bp, Homo sapiens
ggaaagaagatcaagctacagatatgattatttgcatgggtgcaaaagaaaatgg

SEQ ID NO: 742494 - DNA, 75 bp, Homo sapiens
gggcagcatcccggccaccaaggtggagatcaccgtgtcctgcagccaaatttgtatcctactgtggggcttcaa

SEQ ID NO: 742495 - DNA, 75 bp, Homo sapiens
tgaaggggtcgtcactgtactggtatagcaatcaaatgaatatcctccgaatcctaaatctagagctccaaggat

SEQ ID NO: 742496 - DNA, 102 bp, Homo sapiens
aagttacgaaggctacgaaggctattacagccagagtcaaggatggaggagatgtataagaaagctcatgctgctatacgagagaatccagtctatgaaaag

SEQ ID NO: 742497 - DNA, 50 bp, Homo sapiens
aataatcaagagttgacatcataccagatgctgacctgacctttgaccag

SEQ ID NO: 742498 - DNA, 124 bp, Homo sapiens
attagaaatgcaacttgagaaacccaaacctgtaaaaccagtgacgttttccacaggcatcaaaatgtttgcagtgttgatgtgggtatttacctatgttggtgccttgtttaatggtctgaca

SEQ ID NO: 742499 - DNA, 136 bp, Homo sapiens
gccagacaaacagcccgcccgaccccgtcccgaccctggccgccccgagcggagcctggagacaatgcagatcttcgtgaagactctgactggtaagaccatcaccctcgaggttgagcccagtgacaccatcgag

SEQ ID NO: 742500 - DNA, 80 bp, Homo sapiens
ccttgcttctaggagataaaaaggcataatggttatgaaagcttctgtagatgatgacgattcaggatgggagctcagta

SEQ ID NO: 742501 - DNA, 74 bp, Homo sapiens
tctctgtatttgaaagctaaccctgagttttcagctattgataagcttggacagaatattgctgtggttggcaa

SEQ ID NO: 742502 - DNA, 99 bp, Homo sapiens
cagttgtactttgcagtaagaagacttttcagatcaccaaacaaggtttgttccaagatgaagattcatgcagtgattgtagctaccgtgataaaccag

SEQ ID NO: 742503 - DNA, 100 bp, Homo sapiens
gcccgacttcgccgccgcctggagccggctggccgcgacctcagccgcccgccgcccgccggggggcgtctctggccgagcctctttttgtggaaaacga

SEQ ID NO: 742504 - DNA, 100 bp, Homo sapiens
tgggactgcccggggtgtctcgcgcacgggccctcaggaagatgatgtctttctacctaaagatattgacctagacagtgtggatatggatgagacagag

SEQ ID NO: 742505 - DNA, 100 bp, Homo sapiens
acgtcgggatcgtccactacgaaggccacctacaaatagcaggacattttctgcactgccccgaggaacgctgagccttcctccctgggtttgtctggac

SEQ ID NO: 742506 - DNA, 96 bp, Homo sapiens
ttcaggactcagggagtacacacttaccagatcacaaaatttgtccaggatagacatagagctagaagaaacagacttcgtaaagatcaacttaag

SEQ ID NO: 742507 - DNA, 99 bp, Homo sapiens
tggcaagcgccgtcgcatgctttcctcttcagatgccatcactcaagagttcatgtctcctacctggatggcaaagggaacctggcacctcaaggatcg

SEQ ID NO: 742508 - DNA, 78 bp, Homo sapiens
gcctccttcagcatcaacttgatacttctgtctccattgaggagaattgattcggaaggccatgcagctaactttgta

SEQ ID NO: 742509 - DNA, 82 bp, Homo sapiens
agccctgctccaggaatgggacctcgagtcactgtgggggatatgagactttctactcggaatatcctgagtgttgcgtgga

SEQ ID NO: 742510 - DNA, 87 bp, Homo sapiens
agccactgacgccgggaccgggaccgccgccgccgccgccaccatgggaagaggaagaacgtctgagaaataaaattcgagctgatc

SEQ ID NO: 742511 - DNA, 90 bp, Homo sapiens
agggagcctcctcaagtgggaaccactgagattaactcattatccgttggcagaacccagtgacttgattgtaaaaatttacagagcgga

SEQ ID NO: 742512 - DNA, 71 bp, Homo sapiens
aggagctgggcctaggtctgcgccctgagacacctatggctgccgatgaaggctcagcagagaaacaggca

SEQ ID NO: 742513 - DNA, 100 bp, Homo sapiens
gctgcgcaccgtgtcctcctccgtcatcgagcagctcttcttcgtccgtttgagaaggaaaaacggtgccctactgtcttcagacgtcgcaaggatcaag

SEQ ID NO: 742514 - DNA, 75 bp, Homo sapiens
cctggatcctaagtcctgacctttcatgaggtgggtttggaggatttgggacaacatctacaactgcaggttctg

SEQ ID NO: 742515 - DNA, 98 bp, Homo sapiens
cagacagtgatgagcagtttgttcctgatttccattcagaaaaccaaccttcccccaaatcctggctcccatcatctttagcacctccatctccaatg

SEQ ID NO: 742516 - DNA, 82 bp, Homo sapiens
tttggacccttattttatgccataatggccttgtttgtatgaagtccagcacatctgtggttgagcttgttatgctgctttg

SEQ ID NO: 742517 - DNA, 75 bp, Homo sapiens
cttcccaaccagctgaggcggctacatgaggcccatgctcaggcttgtagtgaacaggactctgagccaggggcc

SEQ ID NO: 742518 - DNA, 100 bp, Homo sapiens
ccggaatgcatccatgtgatgaggtgttcactgttggcagaatttgtgccagccgtaccagaatttatcataaactgaaacattttaaattcaaactata

SEQ ID NO: 742519 - DNA, 98 bp, Homo sapiens
tggatgaggtgaaagactatgtggccaagatgtattgctgtccttgaatattagcccatttgaaaacgcctgggaagttcagccatcagtatgtccaa

SEQ ID NO: 742520 - DNA, 98 bp, Homo sapiens
tggaaaccctgcattttgggaaactcgactttggagaaaccaccgtgctggaccgcttttacaatgcagctacaaggctttggccgaccaagtgtgta

SEQ ID NO: 742521 - DNA, 82 bp, Homo sapiens
tgggtatggaagctatgggtacggaggcaactcggcgacagcaggctacagaactcctgcgttgcgagctgtgcctgggcat

SEQ ID NO: 742522 - DNA, 75 bp, Homo sapiens
atgccaccaacaaccccatccagcagttccttcaccaaggatggtcttgttaatgtaggatggatggactgtgcc

SEQ ID NO: 742523 - DNA, 50 bp, Homo sapiens
gcctggacagcagctcgtgtctgcccagtggagcaaaatgagagcgcagt

SEQ ID NO: 742524 - DNA, 97 bp, Homo sapiens
gctcttgtcctggcattgcatccacaggaggggcaggaaattctttgaagggaactctaatgatccaggacaaagaagttaccctggagtatgtatc

SEQ ID NO: 742525 - DNA, 100 bp, Homo sapiens
cctgatcctgctggccctcatgacagtggtcatggccgtgtgctccctgcctctcacggtgttccatcttaacataagtcaccaacttctaaacctggca

SEQ ID NO: 742526 - DNA, 73 bp, Homo sapiens
tgggcatgtctctgaccatctggacggtgtgtggggtcctgtcactatttggcatggtctacatggctggact

SEQ ID NO: 742527 - DNA, 89 bp, Homo sapiens
gaaggtctggttagaccccaatgagaccaatgaaatcgccaatgccaactcccgaaccttcagaagtttagtctttttggagacataag

SEQ ID NO: 742528 - DNA, 75 bp, Homo sapiens
gctgctgctgaggagaggagcgtcaacagcagcaccatgggtgtgcaactgaggaacatggctcaagaaactaat

SEQ ID NO: 742529 - DNA, 82 bp, Homo sapiens
ctattgtaagtgcagatggaacacaacaggtgggaccagggagattggatctgctctcaccaggatgtgcatgaggcacaga

SEQ ID NO: 742530 - DNA, 88 bp, Homo sapiens
gtggcttcggaggcaagtttggtgtccagatggacagagttgatcagagactcctaaaggggaactcccctccagctgcgctgggacc

SEQ ID NO: 742531 - DNA, 80 bp, Homo sapiens
cccggggcaggtggctgcatagtcttggcggaggttctggaggacacgtgccggcggcaggacttcaacccctgtgaata

SEQ ID NO: 742532 - DNA, 121 bp, Homo sapiens
gaatgaccaactgatgctcctggaaagagcattcatcgatcctcttggtttaccaggaaagctgttctataggacatagctcgccttttgcaagaaaaggagttacaggaagagaaaaaga

SEQ ID NO: 742533 - DNA, 75 bp, Homo sapiens
actactatattcagtggctaaatggctccctgattcatgagatcctgaaggagctagacgagtgctacgagcgct

SEQ ID NO: 742534 - DNA, 100 bp, Homo sapiens
agggcttcgagttcaacatcatggtggtcgtgtactaatggtcacttgatgtgcgctggctgttttatccacctactagcagatgcccggctgaaggagg

SEQ ID NO: 742535 - DNA, 100 bp, Homo sapiens
gaagccgagcagacggacgaggagctgcgggaggagatccacaaggggccagctggagatcagcagcctggtgcccctggggcccaagtatgtggtgaag

SEQ ID NO: 742536 - DNA, 74 bp, Homo sapiens
cagcaagaacgggaacaaaactctggaagatgttggatccagggttgatgacgtgttccaagcaagctatgttt

SEQ ID NO: 742537 - DNA, 97 bp, Homo sapiens
agagaagacgatctgcacttcgcattttggcattgacatttaattttagggtcctttatatagaagggagagtagcaaaagtactttgactcaggag

SEQ ID NO: 742538 - DNA, 78 bp, Homo sapiens
tttgtcagtgcaaaaacaatgccagagctgtacgaccttgttaacagctttggaatcttctaatgcccacgaagaagt

SEQ ID NO: 742539 - DNA, 98 bp, Homo sapiens
tgaagacttgaacttaatacagcaagaaagaccatcaagtttaccactgtccgtacctggcggtgaaaatcacccctgccatccctgcagtcgctggc

SEQ ID NO: 742540 - DNA, 50 bp, Homo sapiens
cccggagcccccagcgcagcggccgcggatggggagggacgcgcggcact

SEQ ID NO: 742541 - DNA, 76 bp, Homo sapiens
gcttgcacgtggactgaagctgaccttcgattcatccttctcacctaacactggctgtgagtaccagagtgcccac

SEQ ID NO: 742542 - DNA, 88 bp, Homo sapiens
ataaaagggcccctttcgactagcctctgctgaaaggaagaaggtagataatgactataatgcccttcgagaaagactcagcaccttg

SEQ ID NO: 742543 - DNA, 100 bp, Homo sapiens
agccatcagcttcagctccagctccgctctcttcggctgccccaatccccggcagctctctcagtctggctcttgctgattgaattcctttggtgcagtt

SEQ ID NO: 742544 - DNA, 74 bp, Homo sapiens
acttctcactcctgaccaatgtgcccgttcccagtaacaaggagactcaggacctgccagcccgagccttctca

SEQ ID NO: 742545 - DNA, 82 bp, Homo sapiens
ttgggatgagagtcggagccgaataccaagctcggatccctgaatttgatccaggcttgttagcagtggcacaagatcttac

SEQ ID NO: 742546 - DNA, 74 bp, Homo sapiens
ttgaagatccccgagatgcagctgatgcagtccgagagctagatggaaggttctgctgtgaatgggaacataga

SEQ ID NO: 742547 - DNA, 51 bp, Homo sapiens
cctcccaaagtgctgggaatacaggaaatggcccgccagctgctggcagtg

SEQ ID NO: 742548 - DNA, 84 bp, Homo sapiens
gcttcgtcaccccagaccttgccagagacctggcaaatgacatcatgacactgaggctgaggggatctggcggtggagcgctag

SEQ ID NO: 742549 - DNA, 50 bp, Homo sapiens
gcgcccgcggagacgtgaagagaggcacagagctttggcctgctggatcc

SEQ ID NO: 742550 - DNA, 120 bp, Homo sapiens
gttcagcccacctgagcccccgctgagcagcccagccagtcagcacaaaggaggacgtggaaatgtgactggaaacagtaactccacgttcatctccagcgggcaggtgatgaacttcaa

SEQ ID NO: 742551 - DNA, 98 bp, Homo sapiens
tgatggtggagtaggaggcaggtctccgcggccctgccccgctccctgggaaagctgactaagctgaccaacctcaacgtggaccggaaccacctcga

SEQ ID NO: 742552 - DNA, 83 bp, Homo sapiens
cagaaacgtcactatcaagaagagagaaaaggaacagttccgtaagctctttattggtggcttaagctttgaaaccacagaag

SEQ ID NO: 742553 - DNA, 50 bp, Homo sapiens
gggtaccaccagagggaaagctggggcgaaccactcacgaattcttgttt

SEQ ID NO: 742554 - DNA, 100 bp, Homo sapiens
aacggctccatgcaaaatttaaccaaaatagaccctggagtgaaaccattaagcttgtgcgtcaagtcatggatcccaggatgctggtatcctgcataga

SEQ ID NO: 742555 - DNA, 97 bp, Homo sapiens
gctagagcagactcagaatgagctcaccagggagctgaaactcaattgcctgtgtccctggagtgttacacagtgcctcctgaagacaacctggccc

SEQ ID NO: 742556 - DNA, 100 bp, Homo sapiens
aatctctgccacgtccatcttctttgaatctatgccctacaagcggatgaccaccaggctctcatctgggacatccagcaaatgccccgagccattgagg

SEQ ID NO: 742557 - DNA, 80 bp, Homo sapiens
tacttggcagatcactctcttagcagcaaaatgatgcttcaacacccaggccaggtctctgcctcggaagtgagtgcttc

SEQ ID NO: 742558 - DNA, 90 bp, Homo sapiens
tgggctgatccaggagaagctggcacggatggttatgctgcagtatgtaactgagcctgagaaatggaataagattaaactagtggtcac

SEQ ID NO: 742559 - DNA, 100 bp, Homo sapiens
gctcctcatgattttaatactggtgaacttggccatgaccatctggattctcaaagtcatgaacttcacaattcttttaccctacgaaaggaaaacctgg

SEQ ID NO: 742560 - DNA, 51 bp, Homo sapiens
cacggagaaccattaatcatctctaaggaaaagaagcccatctgtgtccag

SEQ ID NO: 742561 - DNA, 75 bp, Homo sapiens
cgggattggaccgacgcagccatggtacaggtttgcagattccgccagcagcacagcaagctctacagatgagtg

SEQ ID NO: 742562 - DNA, 99 bp, Homo sapiens
aagatagatgccctctctcttcatcttcacttgaaataccggatgattttggagggagctcatccgctgtttgaagtggtatatggactgctcagcaga

SEQ ID NO: 742563 - DNA, 80 bp, Homo sapiens
aagatgagatttacctgtgagatgtttcatcccaacattgcatttgctggtctggcctttgcgtccttctacctggcagg

SEQ ID NO: 742564 - DNA, 80 bp, Homo sapiens
gacctgctcctggacccggcctgggagaagcagcagagaaagttacagaatgtctgaaggggacagtgtgggagaatccg

SEQ ID NO: 742565 - DNA, 100 bp, Homo sapiens
tcaaatccgctgctaaattacattggagctgggctatcagtagtaagaaactatgttccaacttcctgtcaacaatcttggcagtttaagaaaagcccgg

SEQ ID NO: 742566 - DNA, 100 bp, Homo sapiens
gtagatcatgtgaccctatactcttgccttggtgctgtcgcagagggcattgtgacatatcactggtccctgcacccagtttcaccagtgatcattaaag

SEQ ID NO: 742567 - DNA, 87 bp, Homo sapiens
gcgctggtgcagccaccctcgctccctctgctcttcctcccttcgctcgcaccatgcggaaggagagttttacatggaagtggctta

SEQ ID NO: 742568 - DNA, 83 bp, Homo sapiens
tgaagagcctgctgatgtcagtgggacccattcagttggaaaatggatataccttatttgattatgatgttggactgaatgat

SEQ ID NO: 742569 - DNA, 112 bp, Homo sapiens
atcatcccgacacccatgtaccgtcctcggccagccaacccagatgaaatcggcaactttataattgagtgaattttgaagattgcaccggtcgacaaaggacagcctattt

SEQ ID NO: 742570 - DNA, 82 bp, Homo sapiens
cagagacgacaacccgggcctccgaggtctcggcgcggaagatggccggcggcgtggacggccccatcgggatcccgttccc

SEQ ID NO: 742571 - DNA, 98 bp, Homo sapiens
ccgcccctgcgccgccgagccagctgccaggatcaactcactatcctgaaggtccattctcccaagaagaggggacagaaagacagatctatttgtaa

SEQ ID NO: 742572 - DNA, 101 bp, Homo sapiens
tgatgatccacttccccttaatgaatagctctcaaaattagagagatgtgtaattgtccaccactgtctaatccagaccctcgattactattcaaactcag

SEQ ID NO: 742573 - DNA, 100 bp, Homo sapiens
ggaggcggaggcagaggtggaggcgctttgaaaggtgtccaaagacaggaggtggtctgtaaaaggttggatgacaactccattgtccagaacaattact

SEQ ID NO: 742574 - DNA, 100 bp, Homo sapiens
cactgtcttctcttcctcctccaccgagtcgtgctctcgccccaacccgcgcgccagggcgtctctggccgagcctctttttgtggaaaacgacagcagc

SEQ ID NO: 742575 - DNA, 100 bp, Homo sapiens
ccgattcctcctccttggtcgccgcgtccttggctggcgtgcacattcaggaccccgcgagccagcggctgacgtggaacaagtccccaaagagcgtcct

SEQ ID NO: 742576 - DNA, 74 bp, Homo sapiens
caactacgaggtggcgttccgcgggatcttgcagaggagaggacacattcagctaacgtattttagcaggtgga

SEQ ID NO: 742577 - DNA, 100 bp, Homo sapiens
ggctcggctcagcctacgggagaagcaggaggaggtccggagactgcagcaggaatcagagatcattgatttcttcctgggggcctctctcaaggatgag

SEQ ID NO: 742578 - DNA, 100 bp, Homo sapiens
tagaagaagacctttctgtggaaatagatgacatcaataccagtgataagtattctaccttgtaaatactgttatttgtatatactgtaaatgatgacat

SEQ ID NO: 742579 - DNA, 88 bp, Homo sapiens
gcagttgaagaagacctactttaacatcctcatcaagcccgagactttggccaagcctctaagaaatatgtctccaaagaacttgcca

SEQ ID NO: 742580 - DNA, 100 bp, Homo sapiens
cactccctgccattgtcttccaggtccgcgggagagctgtggggcttggtgagtgtttcgtggcctctcgggttggtcagcacccccagccagctggccc

SEQ ID NO: 742581 - DNA, 50 bp, Homo sapiens
ccagcagctgtcgccgccgctctcaggtggaagcagggaaaggcctggag

SEQ ID NO: 742582 - DNA, 98 bp, Homo sapiens
ctacactagtcgcgggagccacgcagaggacgccggaacaccctggaagccgagaaatggtaaatgagctggatggtatcccgttgatcctggacaac

SEQ ID NO: 742583 - DNA, 75 bp, Homo sapiens
tacaccgacaccggcttcttagctgaatacctctcctacgactccagtgaccgtcaccctcgagtcctggctgat

SEQ ID NO: 742584 - DNA, 75 bp, Homo sapiens
cttcccagtagctggaactacagctttggctagatcagagtctaagagagatggaggttttaaaaataattggag

SEQ ID NO: 742585 - DNA, 90 bp, Homo sapiens
agatggcggatgccctgcagtacctgcagaaggtctctggagacatcttcagcaggtatgacctggacgcgtgtgacattcaagaaaaat

SEQ ID NO: 742586 - DNA, 100 bp, Homo sapiens
gttcctcctgtcccaaaagaccatcctgctctcaactacaacatcgtttcaggaactgataaatttcaaacggaagagagtggcagcatttagaaagaat

SEQ ID NO: 742587 - DNA, 100 bp, Homo sapiens
ctgtcctgcgcgagtggagctctgaagaagctctgagcggagttgtgttcttccccaggtgaccaagaatatggcccaggtgaccaaagccctggacaag

SEQ ID NO: 742588 - DNA, 100 bp, Homo sapiens
cgtcctgcaggagggcttcaatgagtgcacgatctgattttctggagagatgtgaagaagactgggtttgtctttggcaccacgctgatcatgctgcttt

SEQ ID NO: 742589 - DNA, 102 bp, Homo sapiens
gctgcttatggcggcgctggagagggggcgctgagctgttgggacaatgcagatcttcgtgaagactctgactggtaagaccatcaccctcgaggttgagcc

SEQ ID NO: 742590 - DNA, 100 bp, Homo sapiens
tccgcctcctgggttcaagtgattctcctgcctcagcctcccaagtagctggattacaggctgcacgaagaggagaaaacgggcacaaggatctgccaga

SEQ ID NO: 742591 - DNA, 100 bp, Homo sapiens
gaacagggttacatgagcctcaaggagaaccagaggaagaagaggtggataagatgatggaacagaagatgaaggaagaacaggagagaaggaagaaaaa

SEQ ID NO: 742592 - DNA, 75 bp, Homo sapiens
ctgcagcagaggaactcctataaccaccaccaggtgagaagccctaccactgcaactgggacggctgcggctgga

SEQ ID NO: 742593 - DNA, 82 bp, Homo sapiens
ttattgtagatctagaagtcactttggaagaagtatatgcaggaaattttgtggaacatcctttcctgaaactggccaaacc

SEQ ID NO: 742594 - DNA, 74 bp, Homo sapiens
tacccaccttaccctcccaaagtggtgagattacagcgacatggtatgcttaagcaacaggatctaagtattgc

SEQ ID NO: 742595 - DNA, 106 bp, Homo sapiens
aggaagcggccgccgcggggtccgcggcgcgcccggcccggctgcagccgctccggcctccttgctgttcctgggatacgccacactcagtctggcctcggggcct

SEQ ID NO: 742596 - DNA, 99 bp, Homo sapiens
gttccacgtggagccaggcctgcagaggctgttctacaggggcaaacagattggtgctgaagacatggacggcttccaggcagacacggaggaggagga

SEQ ID NO: 742597 - DNA, 90 bp, Homo sapiens
gtttaataatgatagaatgaagaccacaataaaagagacctctacttagctcagcaattcttaccttacctggttcacctgcgagtgtat

SEQ ID NO: 742598 - DNA, 50 bp, Homo sapiens
aagatactgaaatgtgatgaacattttgtgatggacgcctctgaccccac

SEQ ID NO: 742599 - DNA, 100 bp, Homo sapiens
aagactcgaaggcagcacaggacctggaaaaattacatatcaatgtccgagttaccaccatggatgcagagctggagtttgcaatccagccaaatacaac

SEQ ID NO: 742600 - DNA, 100 bp, Homo sapiens
ccatgacccacttcaacaagggcccttcctatgggctctcggccgaagtcaagaacaaggtgtctggagtagatttgcagaatgcctcacacagcgaagc

SEQ ID NO: 742601 - DNA, 75 bp, Homo sapiens
cggaatgctgctgttcgctggtgggaagaacccttaggagaaatcttgagagtggacagcaattgtgaagatcgc

SEQ ID NO: 742602 - DNA, 98 bp, Homo sapiens
atcaagaaaccccgatcacaaagatacgaatctcttaaggggggccatccaggagagcctcctcaccagcacagaaggcctgtgccccagcgccctga

SEQ ID NO: 742603 - DNA, 149 bp, Homo sapiens
gggcaggaatctggaccttcagcagaaaagtatagcgtggcaacccagctgttcattggaggtgtcactggatggtatgagagaatcgaaatcccaatccatattgtacctcatgtcactatcgggaaagtgtgccttgaatcagcagt

SEQ ID NO: 742604 - DNA, 80 bp, Homo sapiens
acgcccacttcctgaacgtgcagggccggacgctctatgacgtcatcttgtacggcaaattgtggctactaatttgcccc

SEQ ID NO: 742605 - DNA, 125 bp, Homo sapiens
tggcaatggcacaaagttctctcgatcagggcatacatctttcttcgacaaagggtcaaaatgcagatcttcgtgaaaacccttaccggcaagaccatcacccttgaggtggagcccagtgacac

SEQ ID NO: 742606 - DNA, 75 bp, Homo sapiens
acactccctttccaaggaaaagatcgaaaagaaacaatgactatgattcttaaagtcgacttcaatgttcctatg

SEQ ID NO: 742607 - DNA, 90 bp, Homo sapiens
agtctctctgtgtggctgtaacttacgtgtactttaccaacgagctgaagcagagctcgtccgcatggtgctgaatggctgaggaccttc

SEQ ID NO: 742608 - DNA, 100 bp, Homo sapiens
tcagcctcccaagtagctgagattacaggcatgtcccatcccccacctgccgccagagaggacaagagcccatcagaggaatccgcccccacgacgtccc

SEQ ID NO: 742609 - DNA, 74 bp, Homo sapiens
gggaattgacgcagccattgccaatgcttttcgacgaattctgctagctgaggatggatttgtcttcaagatgc

SEQ ID NO: 742610 - DNA, 82 bp, Homo sapiens
cctaagcctgcacagccgcggcggcagcagcagtgagagcaaaagctggcaggctgacagaggcggcctcaggacggacctt

SEQ ID NO: 742611 - DNA, 75 bp, Homo sapiens
gtcttcggtctcctggggtcggcgccgagtgggaggatggcggaaaaaaagcttgtggtgaaggggggcaaaaaa

SEQ ID NO: 742612 - DNA, 75 bp, Homo sapiens
cttcagttaatgagagacctattgggagagagaaacccctcctcgttttgcccagcatggcacgtttgagtacga

SEQ ID NO: 742613 - DNA, 100 bp, Homo sapiens
ctgctggagaatcatcttctgaagctggtggtgagaactataaagatgcagatcgagagcctgaatgaagagctagcctacatgaagaagaaccatgaag

SEQ ID NO: 742614 - DNA, 90 bp, Homo sapiens
gagatcaacaggatcctcttggagcagaagaagcaggaccgcggggagctgaagctgctgcttttggagtgcctggaagagctgggatgt

SEQ ID NO: 742615 - DNA, 100 bp, Homo sapiens
ccaagctggagtttacacaggcaaactgtcagaaaagagtagcctgggctgtctggaaatctgagggatcgcttacacctgagacgaactacagaacagc

SEQ ID NO: 742616 - DNA, 50 bp, Homo sapiens
tggatatctctactcgctccaaaggtcctcagaatggttggaatgaccct

SEQ ID NO: 742617 - DNA, 80 bp, Homo sapiens
atctgtggaaggacctaccaaccaggaagcagttcaggtacttttgaagcattctgcagatgttaatgctcgagacaaaa

SEQ ID NO: 742618 - DNA, 83 bp, Homo sapiens
gtgctcagcatggttctggacagacagagaagtcctcctgcagtagaggcacttctcagaacttctggatgagttttcccaga

SEQ ID NO: 742619 - DNA, 100 bp, Homo sapiens
tctgcggaagtgcagctgcctcagttcttagcgcaggaattcttgtgaaatcatgggcacaaatctttgccacttctaaagcccaaaaattactattccg

SEQ ID NO: 742620 - DNA, 96 bp, Homo sapiens
gcggaccttccgcaagttcacctaccgcggcgtggacctcgaccagctgctggacatgtcctagttcgtgctggccgtgggcagcgccgtctttga

SEQ ID NO: 742621 - DNA, 75 bp, Homo sapiens
caatgaaacagacacacctgcacaggccgcggagctggtgacccagaactgcgaggcttatgaggcccacatgag

SEQ ID NO: 742622 - DNA, 89 bp, Homo sapiens
ctgtggtgaccctccgagaaggacactcactgtcccacagggagctcaaagagtgggccaggtcactctgtgcggtgtgcactgacccc

SEQ ID NO: 742623 - DNA, 100 bp, Homo sapiens
cggagcccctgtggtgactgcgaaggcttcgacgtgcacatcatggacgacatgattaaggacccacgcagccacccagcctcagcactcatctgcgcag

SEQ ID NO: 742624 - DNA, 71 bp, Homo sapiens
cattattgcgcgtggaacggctgcttttggaagaaggtggtcttctgccctgttaaagaagccctggaggt

SEQ ID NO: 742625 - DNA, 74 bp, Homo sapiens
ttccgaactgtgggcaaaaatggcggctggtgggccaccaaaaaaggggaaaccagctgcaccaggaggcgcag

SEQ ID NO: 742626 - DNA, 82 bp, Homo sapiens
ggaacagctacgcatagaagccgggattgagcgcatcaagcgccaagaagagggagggcgagcttacggtggcccagggccg

SEQ ID NO: 742627 - DNA, 100 bp, Homo sapiens
gccgaggtagaggcagtggcgcttgagttggtcgggggcagcggcagggccgttgctccagggagaactgcaaatatcttcatccacccccacatttaaa

SEQ ID NO: 742628 - DNA, 51 bp, Homo sapiens
ggaacggaggccagagctgcggccggatcacctcaacagtcacgtcagaca

SEQ ID NO: 742629 - DNA, 90 bp, Homo sapiens
gaataaacatgcaatgaacccaaaaggacagcagtgaagaccgtttgggtagaaggtttaagtgaagatggttttacctattactataat

SEQ ID NO: 742630 - DNA, 73 bp, Homo sapiens
gagagagaatgagccagagggacacgctggtgcatctgtttgccggaggtgtcatccatgcaccattaccaag

SEQ ID NO: 742631 - DNA, 100 bp, Homo sapiens
cggagaagcgcgcgggcgcgcaggccgcggggagcacctgggtaggtgagctcgtgaaacaatatgaagaggagaaaatagccttttaaggaaattggcc

SEQ ID NO: 742632 - DNA, 74 bp, Homo sapiens
acttcaagacgcggcccaaggtgtcccttggcggcgcgagcaggaagctaagaaacgggacatctatgacaaat

SEQ ID NO: 742633 - DNA, 101 bp, Homo sapiens
agggctcgtacttctgctcgcaggagcaatttttgatgaatctgccaaaaaggatgatgaggtatttcgcactgcggttggtgaccttaaccagaatgagg

SEQ ID NO: 742634 - DNA, 75 bp, Homo sapiens
aaagactcagggagcaggaaatggagcgattgatttctctatgaatcatcatcaagaactctgggagaacttttg

SEQ ID NO: 742635 - DNA, 75 bp, Homo sapiens
cagcgtggtggggcagcagaagctccagagcccagacttgcaggtggcccgaggcagccgggatgacagctctcc

SEQ ID NO: 742636 - DNA, 74 bp, Homo sapiens
gcctccaggccaagagggatccttcacccgtgtctgagagcatcagtgatgtcacgtttggagcaggggtcagt

SEQ ID NO: 742637 - DNA, 105 bp, Homo sapiens
ccttcatatttgattggatttacagtggtttcagcagtgtgctacagtttttaggtcttctttgatgtgaggattggagacaaagatgttggcagaattgtgatt

SEQ ID NO: 742638 - DNA, 83 bp, Homo sapiens
cggcgcccggcgagggcgcgcggctggtgtccgccccgcccgaaaggggcccagaagacacctgctttgagtttggtgttttt

SEQ ID NO: 742639 - DNA, 98 bp, Homo sapiens
ggaagagaatggctgtgctgacttttttatccgtggagagcgactcagggacaaaatgtgttctcaggcgctgtggtctcaccttccactggggcaac

SEQ ID NO: 742640 - DNA, 98 bp, Homo sapiens
tcagactggaagaacagtgtcatcagtggctgcatcacgggaggagctattggtttcagaggtgacagaagcgctctgcggcccagtggactgcggct

SEQ ID NO: 742641 - DNA, 97 bp, Homo sapiens
agattgaggaaaagaggggtgtgttcaatgttcaaatggaggtaatcaaatgagcagccgtctgatgagcatgcgcagtgccaatggattgttgatg

SEQ ID NO: 742642 - DNA, 74 bp, Homo sapiens
ccgcgctgctgtttgctgtccatcctgtgcacaccgagtgtttgatgcggatgaaattaaaaggctaggaaaga

SEQ ID NO: 742643 - DNA, 75 bp, Homo sapiens
gatcgccgcggggcagttcgggccggctgtcctggcgcgcgctttaattgattgtctgataaacccacttcaaga

SEQ ID NO: 742644 - DNA, 98 bp, Homo sapiens
gagaccttagaaaggatcaggactggcgggacctggtgtcaaagatgcttcatgtagaccctcatcagagactgactgctgctcttgtgctcagacat

SEQ ID NO: 742645 - DNA, 74 bp, Homo sapiens
ggtccagaggattacggcgaagaggaacgtcaaggtcgtgggaaataaaaggcagttctacacagactgcagca

SEQ ID NO: 742646 - DNA, 75 bp, Homo sapiens
tattaactgcctttcttctgtgggctgtgattttcagaggggaatgctaagagcacttttctgtagaaggtcagt

SEQ ID NO: 742647 - DNA, 82 bp, Homo sapiens
ggagagagccgtaggcaggaccccgggacaccctggaagccaggaaatggaggcaagtgaggcctatctggttggccttttt

SEQ ID NO: 742648 - DNA, 73 bp, Homo sapiens
gagcaggcattaaacttgtacactgagttactaaacaacagactccatgggtgaaaatgggatggaggattgt

SEQ ID NO: 742649 - DNA, 90 bp, Homo sapiens
cagccttaaacgacttgttctctatcgaacaaaagtagagatcaactggtgagactgcagtcagtgcttttgagattgacaagatgtaca

SEQ ID NO: 742650 - DNA, 101 bp, Homo sapiens
ggaaaagggagaacaagccggatcagaagacgaaaactctgcggaagttctgaatcaagaggagatggctgatcactgggaaactgcacctcgtcacatga

SEQ ID NO: 742651 - DNA, 75 bp, Homo sapiens
caacttaaaagatgccacctctaaggctatgtccaaactgggtcttcggcaggttacaggagttactagagtcac

SEQ ID NO: 742652 - DNA, 50 bp, Homo sapiens
aaacatgaagttcgggactatcttctgcatattgagtatcagtgctgata

SEQ ID NO: 742653 - DNA, 100 bp, Homo sapiens
ctttgagatgatggacgccaaggcgaggcaggactgtgtcaaggagatcggcctcttgaaggttaactacatcctggaatcgcgagctagcactgcccgg

SEQ ID NO: 742654 - DNA, 101 bp, Homo sapiens
gcacactagtctacaaggccagagctttctggaagggggcaagtgagtatattgctccatgtgactgtcggcgggcttttgtctctggattcgatggctct

SEQ ID NO: 742655 - DNA, 106 bp, Homo sapiens
cagattcgcagtggtcgcttcttctccttgagagaagaagaaggaggttcctgctgtgccagaaacccttaagaaaaagcgaaggaatttcgcagagctgaagatc

SEQ ID NO: 742656 - DNA, 100 bp, Homo sapiens
aagtattgattgagaagtatgaacccaacaacagcctcgccagaaaagcaaagaccaccctggggagacagaggttccactggatctgccggctgactcc

SEQ ID NO: 742657 - DNA, 100 bp, Homo sapiens
caatatcccatttttgcagcttcagttccagggtcacccccgagaggacaacaggcatctggaagtgctctctcgccactctgggtgctttactgtctct

SEQ ID NO: 742658 - DNA, 100 bp, Homo sapiens
tgagctgttactaggacaaccaatatttccaggggatagtggtgtggatcagttggtagaaataatcaagatgtcatttgtcagagtgaaccgctgtggt

SEQ ID NO: 742659 - DNA, 96 bp, Homo sapiens
acgaagtgttggacatgctgttcccaaagttcttgaaaggctaccacatactgttgattgtgatgaaatgccagttgaagcacctgtcctgcgagc

SEQ ID NO: 742660 - DNA, 75 bp, Homo sapiens
aggaactggtacttggagtctggacatctgaaacttggctgacgttcctcagggagtgattcgagtgcaagctcc

SEQ ID NO: 742661 - DNA, 74 bp, Homo sapiens
caccagtggaagatgatcacatcccagcttttagtttggatgctgaacagcctgattatgatttggattctgaa

SEQ ID NO: 742662 - DNA, 100 bp, Homo sapiens
ccgctccgcgccgagggctggaggatgcgttccctggggtccggacttatctaaaaacagactggttgaagttccaatggaattgtgccattttgtatca

SEQ ID NO: 742663 - DNA, 100 bp, Homo sapiens
tccacgccagccgcaccatgccgctcctaagcctgcacagccgcggcggcagcagcagtgagaggaatcttgtcgattggcctggctgctgcctactaca

SEQ ID NO: 742664 - DNA, 83 bp, Homo sapiens
gcctctctcctgatacagcaggcgctcaccatgttccctggaggctgaccccgcactacatctacccaccagccatcgtgcag

SEQ ID NO: 742665 - DNA, 51 bp, Homo sapiens
tcgtggtcctgccagtgactgagaacgtttgtctgcctgatgagagccact

SEQ ID NO: 742666 - DNA, 75 bp, Homo sapiens
ggggtcacagacatttcatggggctccactaacagttgctgccaaacaaggtgaatccgacccagagaggaaaga

SEQ ID NO: 742667 - DNA, 82 bp, Homo sapiens
ccgcgctctgggcacagccttggaaagtcaggaccgcgacggcagcagagcaacgccatttggaatgaacaggaaaaggctg

SEQ ID NO: 742668 - DNA, 97 bp, Homo sapiens
acccacttcgagtcctttattgtggagccaaactgattatccaccagacactcagcgtcttagaagatattgtggagaatatctcgggggagtccac

SEQ ID NO: 742669 - DNA, 98 bp, Homo sapiens
tggtagcccccacccctctccgtccatggccccagatgacacttcaggtgtttgtcagcaaagatgtggccaagcacttggggttccagtcagcagag

SEQ ID NO: 742670 - DNA, 97 bp, Homo sapiens
agtgcagtcatgtgcctggaccttgcagcttcctggatgaagtgccccttggacagggtacgcatagctgctaaattcatcactcatgcacccccag

SEQ ID NO: 742671 - DNA, 100 bp, Homo sapiens
ctccgtgcccagatgctcataaggattgtcctctttctacaaaaggtccttgaatgggcaagagggcacatgaagtacggcgtcctccacattcacggcc

SEQ ID NO: 742672 - DNA, 100 bp, Homo sapiens
catgcccatgcgagtacctgaggaagctcctggtggacccatgtggaaatgggacctccagatcccattctgggagtcactgaagcctttaagagggaca

SEQ ID NO: 742673 - DNA, 82 bp, Homo sapiens
tcgtctcagcagtgctcgggcgcagcaaacggggattcagcgtccgatcctttggaacagggactcacgtgaagcttccagg

SEQ ID NO: 742674 - DNA, 100 bp, Homo sapiens
gacaggatgtgcagacacaactacgagctgggcgggcccatgaccctgcagcgccgaggtctggagcccggcactgtggtcataacagagcaggcagtgg

SEQ ID NO: 742675 - DNA, 75 bp, Homo sapiens
tgcgctgcatccgctcgacctcgtgaagatccgcttcgccgcaaatgcagccctgaggatttggctactgcatat

SEQ ID NO: 742676 - DNA, 101 bp, Homo sapiens
ttctttgaaggattttgcctggctggaatcattctcaccttgtatgctttacgtaagaatgattgatgttggctgatattggagtgctcattcacatgaag

SEQ ID NO: 742677 - DNA, 74 bp, Homo sapiens
tacataaaccagtcacccaagtgcattgcctttggaaacgaggtggacccaagtggagagattgtggaactggc

SEQ ID NO: 742678 - DNA, 83 bp, Homo sapiens
caaaattctcgcccatattcaggttattcagcttctcaaggctggaaaagcgaaggaagtttcctacaatgcactagcctcac

SEQ ID NO: 742679 - DNA, 100 bp, Homo sapiens
agtgaagctgcagaccttcgtggtagattggggtcaactggactacttagttgtagacatgccaccaggaactggagatgtgcagttatcagtctcacag

SEQ ID NO: 742680 - DNA, 95 bp, Homo sapiens
ctacttcatattttggaaagcagtttttaagacaagaagatgagaatgtgcctactgctcctgatcctccaagtcaacatttacgtgggcatggg

SEQ ID NO: 742681 - DNA, 49 bp, Homo sapiens
gacagaatcaccagcactggctgaaggtcaaaatgcagatcttcgtgaa

SEQ ID NO: 742682 - DNA, 90 bp, Homo sapiens
ctagattggaggtgaagaccctggagccagagagcctaggcttagtcctagccctgcactgaaggctccctgactggcagtcctcacctt

SEQ ID NO: 742683 - DNA, 81 bp, Homo sapiens
attcttcagacattacgagaaatgttagagaagaaagacagctttgtggaagagatttttgcactgagtggccagccgcac

SEQ ID NO: 742684 - DNA, 100 bp, Homo sapiens
cgaaacaataaagaccggaagctgagtttttatccactcacatttcaagacttcctcctggtgcggtggcaggacagtctgtggcaatcgaaggtggggt

SEQ ID NO: 742685 - DNA, 100 bp, Homo sapiens
cattgagaccatgaagtccaacccagggccaggaaggaatactgggagaatcttcggatagcctcaggccggccatacaacccttcaatgtcaaagccag

SEQ ID NO: 742686 - DNA, 100 bp, Homo sapiens
atgagggcgagatacacaaggatcgagccaaaagctgcaacctcataagtgtatgctgacttgtaaagtgaagaagccagtggtgctgcgggtgttcttt

SEQ ID NO: 742687 - DNA, 98 bp, Homo sapiens
cccaagccgcctcccgccgccccggcccggcgcgcagactggtcttctgaggacctctgccctctacacagcggcctcttcaggtgcagggaggaaat

SEQ ID NO: 742688 - DNA, 97 bp, Homo sapiens
agacgacgagtccgccctcgtcccgcgcccccggggctcgcggagccagggcagcgggtggcatgagacgtgggaacatgggccacctcacacggat

SEQ ID NO: 742689 - DNA, 83 bp, Homo sapiens
aggccatgctgctgtacctgggaggtgaacacagaaaagctgacagcctttgtaaacacgttgaatggcaaagatggaaccgg

SEQ ID NO: 742690 - DNA, 83 bp, Homo sapiens
aagagattgcctgattaatgctgctaagacatccatgtcttccaaaatcattggaatctctcttcagttccccttcaaatgct

SEQ ID NO: 742691 - DNA, 100 bp, Homo sapiens
ttaattacttgagaatttataatggaattggagtcagcagaactgaaatagggctgttgataatcaggtgtatgtggccacagcctctcctgcccgggat

SEQ ID NO: 742692 - DNA, 100 bp, Homo sapiens
tgggaaagaagaaataaatgaagtcaaaggaatacttgaaaacacttccaagcatcctctggtatcacgattccaaaacccccaaagccaccagataagc

SEQ ID NO: 742693 - DNA, 100 bp, Homo sapiens
gaacttctatgaaaacttctaccagcagcaggagggcatggagatggagcccggactcctgggggatgcagagacaagaggagcagcagcggcaccgccc

SEQ ID NO: 742694 - DNA, 100 bp, Homo sapiens
cttaactcatatatttaacccccctccaaaaagagtccgctcagaatttgatcagatcgacacatccaacccaaactgtgtggtaattgcagacgcagga

SEQ ID NO: 742695 - DNA, 97 bp, Homo sapiens
tctacacagagctccccttgctgcccagacaagctgaaggaccacagtctgcagatctccaggggagcccaccagcctagtcaacatggcctcggaa

SEQ ID NO: 742696 - DNA, 83 bp, Homo sapiens
gcgcctgggggcaccgctgccgttccgagaccctctttcccagctgcccgctcctcagcacccgaagattcgcctgtacaacg

SEQ ID NO: 742697 - DNA, 113 bp, Homo sapiens
gcagcagcagctggcgccgctctcgcagtccctacagccctgtgctcagatccttagcccaacacagacaagagattgtggacaagtcagtgagtccatggagcctggagacg

SEQ ID NO: 742698 - DNA, 82 bp, Homo sapiens
gctcgtggccagcggcgccgccgaagcattgatatgaaccatggacaagtatattctgctgccacaaagactgtaaagtgct

SEQ ID NO: 742699 - DNA, 100 bp, Homo sapiens
accagcaccgcagatgttgtcaaggtggcctaccaggaggccaggggtgtcgccatggaactgctgctggagtttgaatcgaaaatgcggaagagggagc

SEQ ID NO: 742700 - DNA, 82 bp, Homo sapiens
agatccatttacactttacagaaagatgaatgggagggctgattttcgagagccgaatgcagaggttccaagaccaattccc

SEQ ID NO: 742701 - DNA, 131 bp, Homo sapiens
ttttcagctcgtttccttttgaagctgcccgtagatttcagcaatatccccacataccttctcaagctcctcagtgggtagtgcacttccacgaagacgctgctgtgcatatattaccattggaatgatat

SEQ ID NO: 742702 - DNA, 78 bp, Homo sapiens
gagattctacttattcatcagtttgttgtgcttgtcaagatcagctagagttgggaagacatcactgattatgtctct

SEQ ID NO: 742703 - DNA, 151 bp, Homo sapiens
ggatcaagcaggttttaaatcaagatttaacattccaacacataaaaattatttatccaacagctcctcccaggacccagatgatgtggtaccagttggccaaagaagagcctggtgttggtgcatgtgctttggactagcatttatgctt

SEQ ID NO: 742704 - DNA, 82 bp, Homo sapiens
ccgcccagtgggcctggagcagctgcggcggctcggggtgctctactggaaggtgacagagctgaatgaacctctctccaat

SEQ ID NO: 742705 - DNA, 140 bp, Homo sapiens
gaaacggcaggatgaagttcgccgagcacctctccgcgcacatcactcccgagtggaggaagcaatacatccagtatgagatggactagaggcttttaccagatttcttaaaactgaattcagtgaagaaaatattgaat

SEQ ID NO: 742706 - DNA, 100 bp, Homo sapiens
ctaggccgtccccgaccttgcctgaacaagaatatgacagatacctagcatctagcaaaataatggcagctgcttaccttgaccccaacttgaatcacac

SEQ ID NO: 742707 - DNA, 101 bp, Homo sapiens
ttcaaaactagtccttattttccaaccacactatgaaacccacgtagtcgaacaccgtgatgcttctcctgcagggcgtgtgatgaggaggcgagcttggc

SEQ ID NO: 742708 - DNA, 75 bp, Homo sapiens
caagaatacctgccctccttgcaagtagctccagaaataattcagtttagacactctgcaatatcaccaaaaagt

SEQ ID NO: 742709 - DNA, 76 bp, Homo sapiens
ctgagacggtgtcccgccgaaagtgaggaggacatgtaccgtgctgcagatgaaatagaaaaggagaaagaattgc

SEQ ID NO: 742710 - DNA, 100 bp, Homo sapiens
atgaaatccaaaggtgaatcttttggttggtgattttgatgatagccacaaagcaagcaggaatatgcttttaaggctattaaccagggtggccttacat

SEQ ID NO: 742711 - DNA, 82 bp, Homo sapiens
caagttcaaggccaagttcctgacagcctggaacaacgtcaagtacgctgtttgcagacaaggtcccaaagacagcaggttg

SEQ ID NO: 742712 - DNA, 95 bp, Homo sapiens
acaacttcattgctgggaaaaggttactataacaacagtaccaaggtggctgtgaaaaccctgaagccaggaactatgtctgtgcaagccttcct

SEQ ID NO: 742713 - DNA, 101 bp, Homo sapiens
gggaaagctgcccggttttcctgtgacatcgaacagctgaaggcccaaatcatgctctgcggagaaagtgatagaccattacaggacttgtcaaataccag

SEQ ID NO: 742714 - DNA, 100 bp, Homo sapiens
ccgccgccggccaagctccgccgcgcccgcggcccgcggccgccgtgattgatatgcccgagcacaaccctggcaatttgggaggaacaatgagactggg

SEQ ID NO: 742715 - DNA, 100 bp, Homo sapiens
aaaaagtcaaaacgggcaataagactctttaaagaaggcaaggagagaatgtatgaagaacagtcacaggacaggagtacaagcgcaagctagccagagt

SEQ ID NO: 742716 - DNA, 97 bp, Homo sapiens
tgaagatgcaattgaaattacaagcgaagaccgttttatacagactggcattgctcgggtaccacttgctggagctgctggaggccctggggttggt

SEQ ID NO: 742717 - DNA, 96 bp, Homo sapiens
gcaggagctgagctgggaggaggctgcccggcgcctggaggtggccatgtaccccttcaagaagggttgtggtctcctgaacagaagtctgtctcc

SEQ ID NO: 742718 - DNA, 100 bp, Homo sapiens
tgccttcgcgtcttctcttccctcgggtgacttgaggcaattcgaagttttcaagtagcccttcacatctatccaatgaaccctgaaatatggaaagaag

SEQ ID NO: 742719 - DNA, 96 bp, Homo sapiens
aaccaagccgggcgcctcttgcaatggagacggttttaaaatcaaagatgggaaaatcggagaaaattgcccttccccatggccagcttgttcatg

SEQ ID NO: 742720 - DNA, 76 bp, Homo sapiens
cttaaactgctacaagctcaggtgtctatgaaccagatagaaatgcattacggaggaaagaacgagaaagaagaaa

SEQ ID NO: 742721 - DNA, 96 bp, Homo sapiens
tggagtgtaggtcatatcgccgcgaaaatgtgctctcactggccagagtaagtcctgtaaacacagaattaaattaggggactcaagcaactatta

SEQ ID NO: 742722 - DNA, 100 bp, Homo sapiens
atctggtcaaaaaaagtcctataccctgcgggtcagggagcatccagagatggggccctatgtacaaggtgaggtttatacatggggcgacaatgatgag

SEQ ID NO: 742723 - DNA, 75 bp, Homo sapiens
ttgggatttaagatcaacttcctttgtaaggttcccgatatggatgatgaagaaggagaaggagaagaagatgat

SEQ ID NO: 742724 - DNA, 98 bp, Homo sapiens
ggacgcttttttccttcctaggagaaatcgaggagctgcggctctaccccccggaattttaggtgatgggcaagtcagaaagtcagatggatataact

SEQ ID NO: 742725 - DNA, 103 bp, Homo sapiens
tactttgactactggggccagggaaccctggtcaccgtctcctcagctgtctgcttttctgtggagactgcgggttgcagacaccagcagccccctattgctg

SEQ ID NO: 742726 - DNA, 87 bp, Homo sapiens
gcagacacagcaggctgagcagctgcaaacccccgaaaaagctgggggctcctatttcatgatctctcgttcactggggccagaatt

SEQ ID NO: 742727 - DNA, 83 bp, Homo sapiens
cccgttcttgcctcaggccagtcgcctccaggccaagagggatccttcacccgtgtctggcctccggtgtggctgtctctgat

SEQ ID NO: 742728 - DNA, 98 bp, Homo sapiens
cctgcagggggactctggccgcggctactacctggagatgctgatcgggacccccccgcagaagacaccattcgcttttcacccaagatgatttgatg

SEQ ID NO: 742729 - DNA, 100 bp, Homo sapiens
gcaacatccgcgagttcctgcgcggctgcggggcttccctgcggctggagatgatgaaccaggtggaagggcagcagaagaaccttgtgcacgccattga

SEQ ID NO: 742730 - DNA, 86 bp, Homo sapiens
agaaacgtcaggccgtagccgaagcctcggaaggagcggcccacggcaaagaagactctgtacctacacctgatgaagtaagcatg

SEQ ID NO: 742731 - DNA, 74 bp, Homo sapiens
gcggccggagcgcagccctgaggcccaggggtcctgaggacaccgtgagccagccaggcctggccgctgggcct

SEQ ID NO: 742732 - DNA, 100 bp, Homo sapiens
acatcaaaacctggaccttctggattacaggccagcccttcccaccccatgaattcttcaactataatccagtggaggacttctcgatgccaccccactt

SEQ ID NO: 742733 - DNA, 100 bp, Homo sapiens
agctccaggagttcgtctcttacgtctgcggaagtgcagctgcctcagttcttagcgcaggtaacagttgacaaatgggaacctttgttgaacaacttgg

SEQ ID NO: 742734 - DNA, 75 bp, Homo sapiens
ctcaagtgaagcaaaagccttccatgattacgcagagatcctacaagaatccaggatgatgatcccagattgcca

SEQ ID NO: 742735 - DNA, 75 bp, Homo sapiens
ccagcaggcggtgacccgctaccggaaggccatcgccaagcatcctccaggacaaatagcaaggaaatacagttc

SEQ ID NO: 742736 - DNA, 100 bp, Homo sapiens
gtgaggcttcccgtcatattccagtgtaaacaggaacatcgataagtagtgtaaaaacttgcacaatgaaatccgaagccaaggatggagaggaggagag

SEQ ID NO: 742737 - DNA, 50 bp, Homo sapiens
gttacactgttggaccaagttttgccagaccaaagagaaccctgtacagt

SEQ ID NO: 742738 - DNA, 80 bp, Homo sapiens
gaagaagccggagccgccgcaagccacacggtcgcctgcgaggccgctggccaggcctgagcctctgccaccatggccat

SEQ ID NO: 742739 - DNA, 75 bp, Homo sapiens
agcgcagccgggagacagatgcgaggcggcggtcagattggccaggtgaaacaggagctgtccagaaaggacaca

SEQ ID NO: 742740 - DNA, 100 bp, Homo sapiens
caagtggctgagtacaccttccgccaggttggattagcttttcaaaacagaaattcttggaaagaattaaatgacattgcatcgaagccctcccaggaac

SEQ ID NO: 742741 - DNA, 74 bp, Homo sapiens
taaatatcagcccaaagttaaataattccacaaggcatatgcccagttggtcgatcttggcactcactaacacc

SEQ ID NO: 742742 - DNA, 74 bp, Homo sapiens
gctgctgggcacccacggagcctccggggctggagtacgtcactaacaagaccaagaagacagaggagctccga

SEQ ID NO: 742743 - DNA, 75 bp, Homo sapiens
cagtgacgggtctggagtgcgtgggggaccggctgttggcgggagagctcaaaggatggctactgacatgcagag

SEQ ID NO: 742744 - DNA, 80 bp, Homo sapiens
atgcctcgcagagcaccaggcccaccgtgaaagaatgctgcctttttatatggtcttggtttggtctacttccattataa

SEQ ID NO: 742745 - DNA, 83 bp, Homo sapiens
cctggaccttggacattcagacttcagaatgcattgagaactgatgtgccttcacaggaaacttggcccgtgtgtttccagga

SEQ ID NO: 742746 - DNA, 50 bp, Homo sapiens
gtttacagtttctggtgatgaacgagagctctctttacgagaaaaggaag

SEQ ID NO: 742747 - DNA, 100 bp, Homo sapiens
gacggagagagcacgagcccatcagattcatgatgttgctatcaaaagttgagaaattgtcagaagaaatcatggagataatgcaaaatttaagtagtat

SEQ ID NO: 742748 - DNA, 101 bp, Homo sapiens
ctctgcgcctcacggccagatcccagtccgtggtggatgactggattgaatcatataaacaagacagggacatcgcacttctggatttaatcaactttttt

SEQ ID NO: 742749 - DNA, 76 bp, Homo sapiens
agttggaagtgtgaaagcattgatggaatgtgctttagaagttaaaaaggactgttaaagattcactccagtcagt

SEQ ID NO: 742750 - DNA, 83 bp, Homo sapiens
cgacccttagctacccacgatgtttcagacagtccccgacacgtcgtcttacatcaaggtttggtgcacctcgatttggagga

SEQ ID NO: 742751 - DNA, 84 bp, Homo sapiens
gcttgtccttgctggtgcatgcgtcgtcggcctctgggcagcagctccataatgggagaagtaaagaacaaagacttaaggaac

SEQ ID NO: 742752 - DNA, 98 bp, Homo sapiens
ccagtgtgaatttggaagggatcgtgtggcatgaaacagaagaaggccgaatacatcaagcaatggtaacatctttaaatgaagataatgaaagtgta

SEQ ID NO: 742753 - DNA, 83 bp, Homo sapiens
aaggaggaagggaaccaacccactttctcggcgccgcggctcttttctaaaagtatactggctttggcactactagtggaggg

SEQ ID NO: 742754 - DNA, 100 bp, Homo sapiens
tcttcctgttgggccagtccgctcgagatgctgagagagccaagatgcagctgtcttctcctcagtgctggcgctctgactacccttcccaaagaaccac

SEQ ID NO: 742755 - DNA, 100 bp, Homo sapiens
ggtcgatggcagccgggacgagctgttccgccggagcccccggcccaagggcgacttctccagccgggcccgcgaagtgttccctgtattgaacactgat

SEQ ID NO: 742756 - DNA, 83 bp, Homo sapiens
cccgaggaggaagacgaatcgttaaacatctgaaagggtcagaggctgggaggcggcagaatgcagccagaggagggcacagg

SEQ ID NO: 742757 - DNA, 98 bp, Homo sapiens
ccccagcccgcctctgtgccactttgcatcccacgccggaggaggcattaacgagaccgggtaaggtatctgagagcaagcagcaatagaaatttcct

SEQ ID NO: 742758 - DNA, 50 bp, Homo sapiens
atttcttttggatagtgatgggaaaagccttgttcgggagtctagcagtt

SEQ ID NO: 742759 - DNA, 50 bp, Homo sapiens
cccagcggcccgccaggtcccggaaatttggtgagcggcctccacctaaa

SEQ ID NO: 742760 - DNA, 75 bp, Homo sapiens
acatatcaagcattggtgcacgatgtactgaggctgataaaataccagtaatgcgtggacagtggtttattgacg

SEQ ID NO: 742761 - DNA, 98 bp, Homo sapiens
ctcgtggggaccttccccttcaactcttttctctcgggcttcatctcttgtgtggggagtttcatcctagcggtgtttctgaaagatctatccagcac

SEQ ID NO: 742762 - DNA, 100 bp, Homo sapiens
tcagtcggccaagaagccctgcccagacatatctgaagagatggattaagaatgctttggattaaggattgtggagcacatttcaatcattttaggattg

SEQ ID NO: 742763 - DNA, 74 bp, Homo sapiens
ctttggcatcactgcagctagtaatttgccttctggattgccgaagaacagttgagaattgttgaagaacaaag

SEQ ID NO: 742764 - DNA, 100 bp, Homo sapiens
ggccgtggtccgcgcccttcctcggcgggccggactggaacacagcagctacactttgacagtagaagcaagagatggcaatggagaagttacagacaaa

SEQ ID NO: 742765 - DNA, 96 bp, Homo sapiens
cctgaacctgcaagagaacggcatccaggactatggtgcagccctgcggggcctgtgcgaagacgccctggaaggcctgctcttcctgctactctt

SEQ ID NO: 742766 - DNA, 83 bp, Homo sapiens
ctgggcttgtccttgctggtgcatgcgtcgtcggcctctgggcagcaggtcccccacggcccttcaggatgaaagctgcggtg

SEQ ID NO: 742767 - DNA, 100 bp, Homo sapiens
tttttaactgaagatagtgcctttcagccctaccaggcccagaataaagagaccagtgttttagctgctgcaaaagtgattgacactaaatctgaagaag

SEQ ID NO: 742768 - DNA, 75 bp, Homo sapiens
tggagatcaccctgttctagtgtgtggaggcttccaccaggagtggcgacatagaccaagtgacaccctccaacc

SEQ ID NO: 742769 - DNA, 100 bp, Homo sapiens
cttggccagcagtggggattgcaaagcgaactacatatggaggagtgtctgtcccttcagtctgaatatgttcattactaaggccttgccactccagtga

SEQ ID NO: 742770 - DNA, 50 bp, Homo sapiens
cttcaagggggaggagtgtccagcagatgccatggacaatattaccaggc

SEQ ID NO: 742771 - DNA, 50 bp, Homo sapiens
tgatcctccacttcagagaacagggtgagctcttctacccaggcgggccc

SEQ ID NO: 742772 - DNA, 83 bp, Homo sapiens
gcttaaggtcttcagcggggcgctccaggaggcactcacaggcaaatcctgatcctaactgttgtcttggagtatttgggctg

SEQ ID NO: 742773 - DNA, 100 bp, Homo sapiens
atgtcagacgcagccgtagacaccagctccgaaatcaccaccaaggtatggcctcacaagtcttggtctacccaccatatgtttatcaaactcagtcaag

SEQ ID NO: 742774 - DNA, 87 bp, Homo sapiens
cggcgacgtggtgtgcaccggctggctgaggaaatcgcctcccgagaagaagttgaggcgctataggttggaaagaaccatgactgt

SEQ ID NO: 742775 - DNA, 74 bp, Homo sapiens
tcagtgtggcaaccagatcggtgccaagtttccaggttaactaaggtctcagctgtaaaccaaaagtgagagga

SEQ ID NO: 742776 - DNA, 51 bp, Homo sapiens
cgtctcccacttccgcttccatatttggggatattccctgcccaaaaaatt

SEQ ID NO: 742777 - DNA, 100 bp, Homo sapiens
attcatatcgagcctgtgtggaaagaagtcattcaagaactggaagaattgggatttggacgtggcagagggagaggggcaggaaggttctcaacccaag

SEQ ID NO: 742778 - DNA, 51 bp, Homo sapiens
ccgctgaggagctgcagtctctgtcaagttttctgaaaatggtaaccagaa

SEQ ID NO: 742779 - DNA, 97 bp, Homo sapiens
ctatctgttgacatggaaaacaaggaaaatggctctgtcggtgtaaaaaagggcgtttgtggtatgctggaccccgggcctggtggttctgctcctc

SEQ ID NO: 742780 - DNA, 71 bp, Homo sapiens
gcctttgaaaatcaacgacaacttgagcacagtgggtgaatttgtaagtgatgtcctgctagttccagaaa

SEQ ID NO: 742781 - DNA, 100 bp, Homo sapiens
cttggtgtcgtttttccttgagctgaacgtcttgcaacagtggccgcacgcataggttttgggatttgagattgacgcggtgaactctgtccagttttca

SEQ ID NO: 742782 - DNA, 73 bp, Homo sapiens
tggtggcatctgcctaacgttcacttcactcacgactagacgcttgaagcaaagctgccatcccagaagacga

SEQ ID NO: 742783 - DNA, 96 bp, Homo sapiens
ggcagatatccgtgaaggctctaggaaaagcttttgacatcacctatgtgcgtctcaagttccacaccagccgcccggagagctttgccatttaca

SEQ ID NO: 742784 - DNA, 100 bp, Homo sapiens
tcagtggatttggaaaagctatgaggatgcccatgtggagttcatacacagtcccccagttggtgctgttacactaccaaactgtcagtgaacccgccgt

SEQ ID NO: 742785 - DNA, 75 bp, Homo sapiens
ggaagcgtagaggcgagagggcgggcgctttacggcgaactcaggtttggtgcacctcgatttggaggaagtagg

SEQ ID NO: 742786 - DNA, 82 bp, Homo sapiens
caggagttcgtctcttacgtctgcggaagtgcagctgcctcagttcttagcgcagttgggagctgaaagtgccgacagcatt

SEQ ID NO: 742787 - DNA, 100 bp, Homo sapiens
ctgctgccgtgtgagatatggctgcttcccgttctgccatgatggacaagggtgtcccccacctgaagacggcaagctgggtcctgagtgatgcccctca

SEQ ID NO: 742788 - DNA, 82 bp, Homo sapiens
ttgaaaagactgggcttgtccttgctggtgcatgcgtcgtcggcctctgggcagcaggccacggaaaggtatgatatatttg

SEQ ID NO: 742789 - DNA, 90 bp, Homo sapiens
attcagattgaactacatttcaggcagaggtgtccaggacctgcctgctcacggttcgtgtcctgcaggcccatcgcctaccctctaagg

SEQ ID NO: 742790 - DNA, 90 bp, Homo sapiens
gctggtttggaatcagacaccgcaatgaaaaaaggggagacactgcgaaagcaaaccgaggaggtaaaatgtcggttccaggaccttacc

SEQ ID NO: 742791 - DNA, 96 bp, Homo sapiens
cgctcgggagcggaaacagcggcagccagaggtgactctgacatcattagaagcatgccagaacagactggtgaaaagtaaaccttttcacctaca

SEQ ID NO: 742792 - DNA, 101 bp, Homo sapiens
cgcgttcccgccggccccagctccagccccgcagcccaccggtgaaaattagttctgctgtgcttaaagctgcggcccatcactatggagctcaatgtgat

SEQ ID NO: 742793 - DNA, 89 bp, Homo sapiens
ctgctggagaagggagactacaaggacagcagcgactttggggcccgtcaccctcagctccgccagcggtttgagctggagatcgagcg

SEQ ID NO: 742794 - DNA, 75 bp, Homo sapiens
agcgcagcaccgattcctctcgggctcttgggcgctgctctgagcaagagtgagccatggagctacgtgtgggga

SEQ ID NO: 742795 - DNA, 100 bp, Homo sapiens
tctgagctccttccagtccgaatcgtgcgatgacaatgctacaaggctttggccgaccaagtgtgtaccatgctgctattgtcatcttccttgaattctt

SEQ ID NO: 742796 - DNA, 100 bp, Homo sapiens
cgcgcctgatgggtcgaggcggacgcgcggctgcgtcaggagactttgaatgtgattgatcctggcttgatggacctaaatgggatgagtgaggatgccc

SEQ ID NO: 742797 - DNA, 54 bp, Homo sapiens
aaccaatgcgagcctgcctcttaaccgaggaattttggggaaattaaaacctgc

SEQ ID NO: 742798 - DNA, 100 bp, Homo sapiens
gaacccttcgctggcgggagcgcggttcggggccgcagaggtctctctgctccctggtgtgtaagtggacatattcagcagagaaaggctgggacgacag

SEQ ID NO: 742799 - DNA, 83 bp, Homo sapiens
taccaggaggcgttggccaaggatggcctctccagaggagaagtgtcaacaagtcttggaacccccttatgatgaaatgtttg

SEQ ID NO: 742800 - DNA, 111 bp, Homo sapiens
gcaggttttgggatttgagattgacgcggtgaactctgtccagttttcaaaccacacagacaatgcagatcttcgtgaagactctgactggtaagaccatcaccctcgagg

SEQ ID NO: 742801 - DNA, 100 bp, Homo sapiens
gtccccagcaggaaggtctcacctgaggtgaaccttcgaccttggacttctcagcctccagaatggagagttcatggagagcctgcaggacccagacctg

SEQ ID NO: 742802 - DNA, 100 bp, Homo sapiens
cagagaccctctaggacaagactgtatgatagtgttagttccacagatggggaggacagtctagagagaaagccaacaaatggaattttcttgagcatgt

SEQ ID NO: 742803 - DNA, 97 bp, Homo sapiens
ctaagacgctgtttcagagcgtttgggtcctctgaggccccttgaccagagagtgtgcaccccagattccttgtagtactcctattgctactgaaag

SEQ ID NO: 742804 - DNA, 74 bp, Homo sapiens
aagcagaaaaccctgtgccagggacaggaaagataggaataccatgtttgtgtggaagtgccccgtgtttgcta

SEQ ID NO: 742805 - DNA, 100 bp, Homo sapiens
cactcctggacaaggatctgcaaattgaagtgcaggacttcctcgttctgcccatcttcctaacaaggctatggctgataacagcagtgatgagtgtgaa

SEQ ID NO: 742806 - DNA, 116 bp, Homo sapiens
cgaagatcttatctgccctatttgcagtggagtcttggaggagccagtacaggcgcagttgtgtagcagttgagtaatgctggttagctgttaaggtggcgtgttgcagtgcagag

SEQ ID NO: 742807 - DNA, 75 bp, Homo sapiens
gtggaggtggcgaaacgaggaggagataacgcggccttgggctctggattacattgcagtgaaggagaagtatgc

SEQ ID NO: 742808 - DNA, 90 bp, Homo sapiens
acaacttattcttcaactctacattcttctggagcatggacaagcgaatttcagtcagtgattttgcctaccattttacagtatttgtct

SEQ ID NO: 742809 - DNA, 100 bp, Homo sapiens
agcctgaattctcaccagtttgctcctggaaaggcccgctcatggaatggaagttggatacactttgtgacttgtacgagacactgaccattacacaggc

SEQ ID NO: 742810 - DNA, 50 bp, Homo sapiens
gtccggagacagagctcactggtcaaaatgcagatcttcgtgaaaaccct

SEQ ID NO: 742811 - DNA, 83 bp, Homo sapiens
cccaggtgtaagcgcagaaagcaggcgaacccgcggcgcaataacgctaatcttccagtaccaacaattgcagcaatagatgg

SEQ ID NO: 742812 - DNA, 83 bp, Homo sapiens
ctgcagtacaggatatgaagaaattgagggttcttgccatggtttactcctggcttgggggcattaggaagcactggaggctc

SEQ ID NO: 742813 - DNA, 103 bp, Homo sapiens
cgaggacttcttcttcaccgccaggacctccttcttcaggagagcgccccagggcaagccccgctccggccaacaaacctttttggcatctaacatggtgaag

SEQ ID NO: 742814 - DNA, 98 bp, Homo sapiens
gaaaatttgaactgccttggccatttaagcactattattcatgaggcaaatgaggaacagggcaatagtatgatgtcaccaaaggcttcgtgtacagc

SEQ ID NO: 742815 - DNA, 98 bp, Homo sapiens
agttcctgttgcttcagacaatggatgagcaatcacaaggaatgcaagggccacctgttcctcagttccaaccacagatcctgacattgatgctgcca

SEQ ID NO: 742816 - DNA, 100 bp, Homo sapiens
gtggaagacacaaaagatggcatctggctggttcaggttgtactggtcagtggacatctggacagctgggatgttgggcagggtgccatggatgatggcg

SEQ ID NO: 742817 - DNA, 73 bp, Homo sapiens
gaagaggaggttgcccagaagaaaaagatgcaccagcaaggaatactgaagaccgatgatctcataacaaggt

SEQ ID NO: 742818 - DNA, 75 bp, Homo sapiens
atttgctccagcaacagatccagattgttgtaggagataaagttgttttgatgcctgtgaatgcagggcagccac

SEQ ID NO: 742819 - DNA, 100 bp, Homo sapiens
tgtggtggtctactctgatgtcaatcttgagggctaggtaataatatctcactatagacatgttttgggtgttccactggatgaccgaaaagctatcaac

SEQ ID NO: 742820 - DNA, 51 bp, Homo sapiens
cctctcagtaccaacaaccccacgaggtcagcaatctgaagatggtcttac

SEQ ID NO: 742821 - DNA, 50 bp, Homo sapiens
cctgcagaccatgcagcaggacatgatagtggtggacttgctttgtgaag

SEQ ID NO: 742822 - DNA, 100 bp, Homo sapiens
caagctggatttcctcccggacatgatggtcgagggccgcctgctcgttcctgacagaatggatgatccaccaacacattctcagccagacagtgatgat

SEQ ID NO: 742823 - DNA, 74 bp, Homo sapiens
cttattaaagtggataaagtgaaaattgtagcctgtgatggtaaaactggccaaatttcgcagtctcctgtgca

SEQ ID NO: 742824 - DNA, 92 bp, Homo sapiens
atagctgctatcagtgcccgctttgttcagctgcagcatggagagatagataaacggttacatcatgctgatgacagcttcctggtcctcac

SEQ ID NO: 742825 - DNA, 51 bp, Homo sapiens
gaacaatgccgcagaagaggttgaagagctcatggggcattcagaatggga

SEQ ID NO: 742826 - DNA, 100 bp, Homo sapiens
gattatcgagcaaaactttgggcttgcaacttttgttaccaaaggaatcagcagcagtgttgtactgctacttctataaacggacagccgtaagactagg

SEQ ID NO: 742827 - DNA, 83 bp, Homo sapiens
tctccccagaagagattcagccaaaccccccatcctctgggatgcttgatttgggaatggatgatgaaggagatgatgaccca

SEQ ID NO: 742828 - DNA, 100 bp, Homo sapiens
gccaccgcaggtcgaggacggtcggactcccgcggcgggaggagcctgttcccctgagctccataatgggagaagtaaagaacaaagacttaaggaacag

SEQ ID NO: 742829 - DNA, 100 bp, Homo sapiens
ttggtggaaacctggattccaaaggctatggcatcgcaacacctaaaggatcctcattaagattctgaaggaagatttccattaggtaatttgtttaatc

SEQ ID NO: 742830 - DNA, 100 bp, Homo sapiens
gtgatgaccgtactgtgcgtatctggcgtcagtatctaccaggcaatgaacaagattcatgatgttgctatcaaaagttgagaaattgtcagaagaaatc

SEQ ID NO: 742831 - DNA, 74 bp, Homo sapiens
gggcagatgctgatgggcaaactaggatcaagcaccccaacattgtagccctggatgacatctatgagagtggg

SEQ ID NO: 742832 - DNA, 75 bp, Homo sapiens
aagaacaacatcacagggacatatgttgcctcagactggagctcgaagataaaaattatatccagatcgagagac

SEQ ID NO: 742833 - DNA, 100 bp, Homo sapiens
tgggaacctagctgatgataggggggttccatctcccaacttgtccatgtctcttgcagctgaatggggtaaatatggaatgcgattcaatgtgattcaa

SEQ ID NO: 742834 - DNA, 100 bp, Homo sapiens
ctggccgctggcctactctggaagttcactgccactgcagagccccgccatggaagacacgccgttggtgatatcgaagcagaagacggaggtggtgtgc

SEQ ID NO: 742835 - DNA, 89 bp, Homo sapiens
atgcagattatatcgcatcctatggctcaaagaaagatgattatgaattgaatgatctggcacgggaccctccagcacagtgttcagca

SEQ ID NO: 742836 - DNA, 75 bp, Homo sapiens
ctatggtgaaacaccactgaagcattgccaagctttccagagtgttgaatcttccaccagaaaacttgatcacat

SEQ ID NO: 742837 - DNA, 82 bp, Homo sapiens
caagaggaggaatcacgctcggaaacaatgggttttaaaatcaaagatgggaaaatcggagaaaattgcccttccccatggc

SEQ ID NO: 742838 - DNA, 75 bp, Homo sapiens
cagaagtccagagctgaggactgcctgtttgcaggggtattccctcagcggatactacacccatccatttcaagg

SEQ ID NO: 742839 - DNA, 122 bp, Homo sapiens
tgacctatagcagggctggggtgtctgtctgggtgcaggctgtggagatggatcggacgctgcacaagatcaagataaccatctcttagagaaggctgagctgctggacaagttctcaaaga

SEQ ID NO: 742840 - DNA, 90 bp, Homo sapiens
tcaagaatttcaagaacaaaggccgcgacttggaggaactgcaagcacatgttgaccagataactgaaatggcagcagtaatgaggaaag

SEQ ID NO: 742841 - DNA, 83 bp, Homo sapiens
gtcacgacgacgtgcggacgcagcggcgggggcgttatttggaaatagcggtgcttgcagcgcttgcggacagtcgattcctg

SEQ ID NO: 742842 - DNA, 97 bp, Homo sapiens
cagcctcccaagtagctggtactacagagctcctgaaattattcttgggttaccattttgtgaagctattgatatgtggtcactgggctgtgtgata

SEQ ID NO: 742843 - DNA, 96 bp, Homo sapiens
cggatcccgcagatcggagacggggcctggaggagtatgctgctgctgttccgctttgcgtcctcgctacaaacgcctggtggacaacatattccc

SEQ ID NO: 742844 - DNA, 82 bp, Homo sapiens
ggaggaatacacttatttatgaagtgctggagaatctggtaaaagcaccattgtgaagcagatgaggatcctgcatgttaat

SEQ ID NO: 742845 - DNA, 50 bp, Homo sapiens
gaagctgctaaaccgggatatccaggcctatgaaaggaggttccctacat

SEQ ID NO: 742846 - DNA, 82 bp, Homo sapiens
ctgaggacggcgtacggagtgtggtactatactggcaattgctggagaagattttgcaattgttgcttctgatactcgattg

SEQ ID NO: 742847 - DNA, 76 bp, Homo sapiens
gctggatcaacaaccgccttgtggcaacatggctcaccctacctgtgaatgccagaggattcaacatgagcatacc

SEQ ID NO: 742848 - DNA, 101 bp, Homo sapiens
gccgccatccgggaggcccagggaagaacccagtgacttgattgtaaaaatttacagagcggaatcatatgctggtctccaagagtttaaagcagccatag

SEQ ID NO: 742849 - DNA, 98 bp, Homo sapiens
gctgacactaaagactttgtagccatcaacccgagtgcagtttcgatggaaaatgaagagcgggaacagcttccacgtgttcgaccagggccagtttg

SEQ ID NO: 742850 - DNA, 74 bp, Homo sapiens
gcacaatgtcacgcacacctacgctgccccaggaccctcactacgtccagcaggcgctgaccaacgtcttgctg

SEQ ID NO: 742851 - DNA, 90 bp, Homo sapiens
agagaatcctgtctggataatcatggagctgtgcacacttggagaggagccagatgaccaagatgctccagatgaacatgagtcgcctcc

SEQ ID NO: 742852 - DNA, 82 bp, Homo sapiens
gctttggtgggatgtgtatgaccttcacctcattaacacccagagcctgaccacctgcgaggtctgcggtgcctgctttgag

SEQ ID NO: 742853 - DNA, 101 bp, Homo sapiens
gaaaaactggaaatcccaaagcctcgaatggctgccactcagaaacttgttaaagacattattggctttggaggagaagatacggaccacggagacacagg

SEQ ID NO: 742854 - DNA, 90 bp, Homo sapiens
cactttctcggcgccgcggctcttttctaaaagtatcctcagacagattctaagcctcctgagggattgttaggattccacacagactgg

SEQ ID NO: 742855 - DNA, 100 bp, Homo sapiens
cacagttggagaaaatcggcagctgagacggccttggccgattgctctggaagcagccaaagcactggatgacaagaactgctgggaaaagctgggagaa

SEQ ID NO: 742856 - DNA, 101 bp, Homo sapiens
accaggcgaagctggccgagcaggctgagcgatacgacgggtctcacttgtcacccaggctggagtgcagtggcacaaacatgggtcactgcagcctcgac

SEQ ID NO: 742857 - DNA, 90 bp, Homo sapiens
cagattcgcagtggtcgcttcttctccttggaattatgggcccaccgtgttagtgcaacaggaggcactcaagcggggctgtgaacaggt

SEQ ID NO: 742858 - DNA, 100 bp, Homo sapiens
gtaccgcatcgcccagctgtacatgatacaggcattggaggtgatccttttaatggaacagattttattgactgcctcgaaatctttttgaacgattctg

SEQ ID NO: 742859 - DNA, 89 bp, Homo sapiens
gcagcacccgccaccgtcgccggccgcccgcacgtccgtccggtgaaaggtgtagcagtcactcggcctacacccacagcatcgacctt

SEQ ID NO: 742860 - DNA, 75 bp, Homo sapiens
acagcatggtggagtcgcctctgatctgcaaagaaggagaaagcgtgcaggcaaagcagagagcagaggttcttc

SEQ ID NO: 742861 - DNA, 76 bp, Homo sapiens
caggatccgtgctttgcccaaggagatggtctcattaagggtggtatttccaacattttggaggaactggttgtcc

SEQ ID NO: 742862 - DNA, 75 bp, Homo sapiens
aaggtctttgtgtcccgacactctgccaccttctccagcattgtgaaagtggaatgcagtagccctctgggcctg

SEQ ID NO: 742863 - DNA, 76 bp, Homo sapiens
ctggatgaggctactagtgccctagatgtgcagtgcgagcaggccctctttgacctcatctaccgcgaggagacgc

SEQ ID NO: 742864 - DNA, 50 bp, Homo sapiens
gtcaaggacccgccctccaacttccacttcaccatcggatgtttgccact

SEQ ID NO: 742865 - DNA, 82 bp, Homo sapiens
tcgcctgcagctgctcgcctgtctccgtcggaagggagcccaagctttgcagaggagaacgtatttaccgggcagtcaaaga

SEQ ID NO: 742866 - DNA, 101 bp, Homo sapiens
ggggtattcttgaaccaggtcatgctccaaatgtatattgaagcaagtcaaagattacattaaacagtgtagcaaatgccaggagaaactagatcgatccc

SEQ ID NO: 742867 - DNA, 90 bp, Homo sapiens
acgacgactccgggggcgaacttggcacacagggaggaagggaaaggtgagaaagatcagtctaaagaaaaggagaagaaagtgaaaaaa

SEQ ID NO: 742868 - DNA, 100 bp, Homo sapiens
gaattcagaaggaacttgcagaaatcacattggaccctcctcccaactgtaggatccagtttatggaaaaggaaaacttggagaaatccagggacttatc

SEQ ID NO: 742869 - DNA, 75 bp, Homo sapiens
cccagctccatcaacctcacgctgcacctggatgcctgtgaggagccaccaacatttgaagctatggagctcatt

SEQ ID NO: 742870 - DNA, 80 bp, Homo sapiens
gccggcgaggatcaaaatcttcgaaggagggtctataagggagaattccaactacctgactttcttaaagaaaaaccaca

SEQ ID NO: 742871 - DNA, 137 bp, Homo sapiens
cttctacatcagtattagctacattagctgccttagctgaagcatctgctccattgtccaattcttcagaaactccaggatttgattgccttatgtgacaagcccaagatctgtgacagttggagctcaaactaggc

SEQ ID NO: 742872 - DNA, 100 bp, Homo sapiens
ggaagcaacctccacccccgagatctccttggaagcagaacccatagaactcgtggaaactgctgagctgactgctgcccactttggaggaggcggtggg

SEQ ID NO: 742873 - DNA, 129 bp, Homo sapiens
cacgaattcgtcctgcagaatcacgcggacatcgtctcctgtgtggcgatggtcttcctgctggggctcatgtttgaggccctgggaggagcggggacactgaggacctctctccaaattggcctctca

SEQ ID NO: 742874 - DNA, 82 bp, Homo sapiens
gtggcagtcctcatcgccaactccctgaatgacgacatcagcctctacaagtgtccctacctgcaccggacgacgggggaca

SEQ ID NO: 742875 - DNA, 100 bp, Homo sapiens
cagcgccatggcccagattctgccaattcgttttcaggagcatctccaggtgatctttagacagtgactgagtatggatcatttgaacgaggcaactcag

SEQ ID NO: 742876 - DNA, 83 bp, Homo sapiens
ccgtccgccgccaccacccactccggacacagggtgcggggggcaatggcactgcagctctgggccctgaccctgctgggcct

SEQ ID NO: 742877 - DNA, 75 bp, Homo sapiens
ggacagttcgctacacagcaatgcatcgagattcagaatggacagtttagaagaacctcagaaaaaagtctttaa

SEQ ID NO: 742878 - DNA, 100 bp, Homo sapiens
aacagaagcggaacagccacagcagcctcccaaggagtctgcaagttggtaaatattgcaacttcagcaacttcaaatattgaatatgcccacgttcctc

SEQ ID NO: 742879 - DNA, 115 bp, Homo sapiens
gaatctgggcttatgggatacagctggacaagaagattatgacagattacgccccctatcctatccgcaaacagaggaggaagccaagaatctggtgagcgaagccatcgcagct

SEQ ID NO: 742880 - DNA, 99 bp, Homo sapiens
ggactgcacgtagcccggcgctcggcatggctctcctggtgctcggagcttactccacgggaacagcctctagataatctgagttgttgaaaatacgaa

SEQ ID NO: 742881 - DNA, 100 bp, Homo sapiens
cagagttcaaggaggccttccagctgtttgaccgaacaggaagtggttacctggaaggaaaggagctgcagaacttgatccaggagctccagcaggcgcg

SEQ ID NO: 742882 - DNA, 76 bp, Homo sapiens
catcatttgcagcaaactcagcactgtactaggttttgacaagcttgcatcatgcgtgagtataagctagtcgttc

SEQ ID NO: 742883 - DNA, 83 bp, Homo sapiens
ttctacaacacatggtggaatgtatccgggaggtcaacgaggtcatccaggcatctgggaacaaagtcagtcgccagtcagtg

SEQ ID NO: 742884 - DNA, 100 bp, Homo sapiens
atccggaagcagcacatggtgaatgccacacccttcaagattgctcgaggccagattgctgacagaactggaatctcctgcttggtggccctttagctcc

SEQ ID NO: 742885 - DNA, 80 bp, Homo sapiens
cgcacagctgctcccttcgccttcgccctttccacctcgcggcagttcgtttttgaaatcatgaatcctgtttatagtcc

SEQ ID NO: 742886 - DNA, 88 bp, Homo sapiens
tcgtgctattcctggtctacatcctgcgggtgcctttgaaaatcaacgacaacttgagcacagatttccacaagacggcaccctatgt

SEQ ID NO: 742887 - DNA, 50 bp, Homo sapiens
gaccctgaggtccttcacagcctgcagcatggcctgtatgagaagaaaaa

SEQ ID NO: 742888 - DNA, 98 bp, Homo sapiens
atcatgaagcgggctggcggcgctgccgctcccgggcggccgcgggcggtaagactttgaccccgacgcaggcttcagtgattgccgcggatcagaag

SEQ ID NO: 742889 - DNA, 119 bp, Homo sapiens
agaggtcatcccagctccagacgtggacacattttcttccaatggaaccagtgaccttccgggatgtggctgtggactttacccaggaggaatgggggcagctggaccctacccagagg

SEQ ID NO: 742890 - DNA, 101 bp, Homo sapiens
acaacgtcccgataacttgcagactgtggcgcaactggtcttggtagcggaggcacccgaatgctgcccgggtgagggtgtggatgaatggaacatagctc

SEQ ID NO: 742891 - DNA, 83 bp, Homo sapiens
acatccaggagagaatgctgacagtcctgcagtctccctttcctggtgatgatgaagaggaagtttttgacagtattgtaaat

SEQ ID NO: 742892 - DNA, 99 bp, Homo sapiens
ggatgctgctcaaaatcagcctacatgccatctttggtgaccaagaatatggcccaggtgaccaaagccctggacaaggccctgagcaccatggacctg

SEQ ID NO: 742893 - DNA, 75 bp, Homo sapiens
aatagatgcaatggatgttcagcagctttcacaaatagtaccaaagatagagaagcagaggcggatagaacggat

SEQ ID NO: 742894 - DNA, 90 bp, Homo sapiens
gcggagagcacgccatgaaggcctcgggcacggagtctcgctctcagtcaaaatctccaacgggaactcctgctcgtgtaaaatcggaga

SEQ ID NO: 742895 - DNA, 83 bp, Homo sapiens
cggtactcttcagggatgagtcatgtggcagtggaaaatgcgctcgggctggaccagcagactcagtcacatgcccactcgaa

SEQ ID NO: 742896 - DNA, 80 bp, Homo sapiens
gcgcgtttcccgcctgagcgcaactagcggcgggtcgtgggcacctccagatgatgtctttctacctaaagatattgacc

SEQ ID NO: 742897 - DNA, 51 bp, Homo sapiens
cagcctcccgagtagctggaattacagttggtccaggcgcaatgttcagcg

SEQ ID NO: 742898 - DNA, 87 bp, Homo sapiens
ggttcagaaactgagcaagtggttgatttttcagatagagaaaaccatgagctgttttccaagagcttcatctccatggaagtgcct

SEQ ID NO: 742899 - DNA, 100 bp, Homo sapiens
taaccgaggcacggacaacatcaccgtgaggcagggggacacagccatcctcaggtaccagaggtttgaaaaggcatttctcctagctgttgacgttggt

SEQ ID NO: 742900 - DNA, 96 bp, Homo sapiens
agcaaaccccagcaagatgcggaggctgcctcggcggagcagaggaaccacacgctgatcatgagctcatctcctgtcctgggtgtgaacgagtat

SEQ ID NO: 742901 - DNA, 101 bp, Homo sapiens
gcggagcctgcccctgggcgccaggtgtttcggggtgcgggtctcgccgaccggggagaaggtcacgcacactggccagatatacatctatgacgggaaga

SEQ ID NO: 742902 - DNA, 106 bp, Homo sapiens
tgaggattctgccaccatggaagggctcctgtctccgatgaggacgaagacagcccacctgaggatattgaccataaggactcatatctcattacaagaagcatca

SEQ ID NO: 742903 - DNA, 50 bp, Homo sapiens
gggaagtgaaaagagatctgttttcagattagtgatgatgaaccaggtta

SEQ ID NO: 742904 - DNA, 98 bp, Homo sapiens
catctacaaccttcgatctcctgacgaagagatcaatgtcttattgtgatgagtctcgactgtcaaatcttcttcagaggatcacccgggaaaacgac

SEQ ID NO: 742905 - DNA, 89 bp, Homo sapiens
gcttaagttccgtgaactcagtactgatgcccagtggggcattcgtcttggtaaacttggtgccccttcacagatgtagtcactacaaa

SEQ ID NO: 742906 - DNA, 100 bp, Homo sapiens
ctggttcctgtgtgcctgcgccgcgctgcagaagagcaggcacctcctggaccaggtgagcacctgcggatctgtccccagggctacacctgctgcacca

SEQ ID NO: 742907 - DNA, 90 bp, Homo sapiens
atgttggatatgggatttgctgatcaagtggaagagattttaagtgtggcatacaagaaagcggaaattctagaattggccggcaatgcc

SEQ ID NO: 742908 - DNA, 50 bp, Homo sapiens
gtggacacgctgttcctctgcttctaatctccagccaagtcctccgtgct

SEQ ID NO: 742909 - DNA, 90 bp, Homo sapiens
aaggagtgattttctctgagagggacatttgctgtgaaaggcgaactttctgaccaagtatacaactacccagagggcctaggagaagtg

SEQ ID NO: 742910 - DNA, 82 bp, Homo sapiens
gctcgcgctactctctctttctggcctggaggctatccagctgtgagccactgccccatgttgtgttgatgccaatctgcca

SEQ ID NO: 742911 - DNA, 98 bp, Homo sapiens
ggcaagagtaacagcagcgccgtcccgtccgacagccaggcccgggagaaggccaaaagagaaacattggctactttgacaaccttaaagcggactcc

SEQ ID NO: 742912 - DNA, 100 bp, Homo sapiens
cgtcatccttgtgcagaaacttcagtctccagacatgggaggcaatgagtccagcatctacttaatgctgtccagtttcaacgagtggttttggcaggac

SEQ ID NO: 742913 - DNA, 51 bp, Homo sapiens
tgaagatttagccgaggcccatggctaattcacctaaataagattgatcct

SEQ ID NO: 742914 - DNA, 90 bp, Homo sapiens
gaaggaggaggaggagccggaggaagaggctcgtggtcccaagaagcatctgaagcgggtggcagctccaaagcattggatgctggataa

SEQ ID NO: 742915 - DNA, 96 bp, Homo sapiens
ccggcactggctcttcagtcccttcaagaactgttgacattcagggatgtgaccatagaattctctctggaggagtgggagtttctgaaccctgct

SEQ ID NO: 742916 - DNA, 83 bp, Homo sapiens
ccatattgtgtcttccccggccggtccctcgcctcccggccgagctgacggagcatcagatccatgctgctgctgactcggag

SEQ ID NO: 742917 - DNA, 83 bp, Homo sapiens
tgctaatgctctgggtctctgatcatggaagggaagtggttgctgtgtatgttactggtgcttggaactgctattgttgaggc

SEQ ID NO: 742918 - DNA, 100 bp, Homo sapiens
ctcacagcagggatgctggaccaacctggctttcccgactgctccatcgaggcagccatggtgaagacgccacaggtcatcatctggatcatcccattct

SEQ ID NO: 742919 - DNA, 100 bp, Homo sapiens
tctatgtgctgtattgtgtggccactgggactttgcagacatgatggtgataaggagcctgagaataatgcatatactgccatgtcagattcctacttac

SEQ ID NO: 742920 - DNA, 101 bp, Homo sapiens
ccggaagccagcagtcaaaaaagaagtgaaggaagaggagccaggggctccaggaaaggagggagctgctgagggttgccgatatggagctgctgagccac

SEQ ID NO: 742921 - DNA, 95 bp, Homo sapiens
gaaggtgcaatttctcaagtcgcctgttgtttacatgatgatgattatgttgctgtagctaccaggaggccaaacctgatgggttggtgactgat

SEQ ID NO: 742922 - DNA, 100 bp, Homo sapiens
caaaattctgaactcaggacttggcaagctcccagccaacctctgataaaccctcccagcggccatcagagagcacaaattgtagccctacccggaaaag

SEQ ID NO: 742923 - DNA, 74 bp, Homo sapiens
atgaatctctgttccaaatgctttgctgcatctactacaagccttagtgggtctgatagtgagaccgaggggaa

SEQ ID NO: 742924 - DNA, 100 bp, Homo sapiens
ttcttcttacccagggcttagaaagtaacgattttgaaatgctaaatcccaataggggcacaaaacgtccccgggatgatgaagaggaggagcagaagat

SEQ ID NO: 742925 - DNA, 75 bp, Homo sapiens
aaaataatgagagaaaaggccaaagagaggtgttctgaacaagttcaaggtactagcaaaggccagacgtcttac

SEQ ID NO: 742926 - DNA, 82 bp, Homo sapiens
tggaggagctgtgcagccgcgaggaggcgcgggaggtgttcgagaacgaccccgagacgcatgatgccttcttctgtagagt

SEQ ID NO: 742927 - DNA, 50 bp, Homo sapiens
gaaaatggaatcattcaccatgtggtctaccatcacggcaacagtgcgac

SEQ ID NO: 742928 - DNA, 98 bp, Homo sapiens
caagatggagccaggaggagagcccacaggtgctaaagagagcagtaccctgatggagtcccttgcagtggacaacctggaccccaacttccagagcg

SEQ ID NO: 742929 - DNA, 73 bp, Homo sapiens
tgcagccgcacctggccaagggtcaccaaggaagaaggattggccttggcccgagaattcagctgtccctttt

SEQ ID NO: 742930 - DNA, 100 bp, Homo sapiens
gccgccagcgcctattacaacccaggcaatcctcacaacgtctacatgcccacgtgattgccgagctgcctcccaaagtgagcgtcttcgtcccaccccg

SEQ ID NO: 742931 - DNA, 100 bp, Homo sapiens
ggccgctgcacatcgtcctgtggacgcgtatcgccagcacgatcccaccgcacgttcagaagtcggattttaccaaatgttgcaagaactctggagttct

SEQ ID NO: 742932 - DNA, 100 bp, Homo sapiens
tacagcctactggtgactcggctgcagaaattgcaggtgctgcagtgtctgaaatttccgggcctttctcaacagaggatgtagccagcaactgtgtccc

SEQ ID NO: 742933 - DNA, 97 bp, Homo sapiens
gaaggacgtggccactgtggccttctgcgacgcgcagtccacgcaggagatccatgagaaggagtctcgctgtgtcacccaggctggagtgcagtgg

SEQ ID NO: 742934 - DNA, 100 bp, Homo sapiens
acggcgtcatggaggagatccggcggcagggcaagctgtgcgacgtgaccctcaagtctgaaatggttgtgacaaataatctcttggatctgccgccccc

SEQ ID NO: 742935 - DNA, 100 bp, Homo sapiens
accattgaagttaaccggtgtaggagaagaaatccgcagaagcttattaaagttaagctccagcggcgccatgagcaaatgaaaaagaatttggaagcac

SEQ ID NO: 742936 - DNA, 100 bp, Homo sapiens
ggccaaaaaggatgagagttggcagggcacagctccctgtttcttgaagtgaaagagctcttcctggcagctgtgcggctggaccctacctccattgacc

SEQ ID NO: 742937 - DNA, 60 bp, Homo sapiens
caaaggagtcagggatggctcttcctcaggctggagtgcaatggcgtgatctcagctcac

SEQ ID NO: 742938 - DNA, 100 bp, Homo sapiens
gcttcgcagtctggaaagctttaggagttcacagtcatgcatatgcgctagaacttctatttgatcagttgcatgaaggagctaaagctcttgatgtagg

SEQ ID NO: 742939 - DNA, 88 bp, Homo sapiens
ttagtgtgctctgagggagggtccgagccagccgctgttttgccggaggagcccctcaggccttctctttcaacatgttcgaccaccc

SEQ ID NO: 742940 - DNA, 82 bp, Homo sapiens
gaaagaagctgcagcggaggaaggcgaggtataagtgtgctagcggagtgtctagattgtcctgaattgaaagcaactgcag

SEQ ID NO: 742941 - DNA, 82 bp, Homo sapiens
gggattcccagccatggcagattcctccgggcagcaggcttcctgggtctgcaggtccagccggctggcaccctccatgtac

SEQ ID NO: 742942 - DNA, 75 bp, Homo sapiens
gggcttggtaccgtgctgcccagaatgcccttcgggagctctgcttatgataatgtcaacaaagttcgagtagct

SEQ ID NO: 742943 - DNA, 90 bp, Homo sapiens
aaaagggctatgaacgattaaaagaagaactcgcaaaagctcagaggtattctaccttgtaaatactgttatttgtatatactgtaaatg

SEQ ID NO: 742944 - DNA, 83 bp, Homo sapiens
ccaagactgcctttctatttattttacctcagtataacattagcgtgcctacagcaggttgcaaaagcttctcatttcagaga

SEQ ID NO: 742945 - DNA, 75 bp, Homo sapiens
gtgcacatgctggtgccttccagctccagagcatgggacacctggctgaccacagcatggcccagaccctgcagg

SEQ ID NO: 742946 - DNA, 75 bp, Homo sapiens
ggaaaaccccgaaaacgcaagaagcgtgtgtttatctcagtggatgatctggaacccccggagccccaggaccct

SEQ ID NO: 742947 - DNA, 89 bp, Homo sapiens
ctaactccagaatcccccattgatttggtgcttccagatgtgagttatcaggtggaatccagtgaggaggatcagtctcagactatgga

SEQ ID NO: 742948 - DNA, 82 bp, Homo sapiens
ctgtacaccctcaacaaacaccagcgctttgggcacaacttcctgaatggaccatgactcccaccaaagatccctgtctctg

SEQ ID NO: 742949 - DNA, 103 bp, Homo sapiens
ggaggcgtcgggatgccggcaggaccctgcgcccgagggggctgaagccgacgtagcttctctgaacagacgcatccagctggttgaggaagagttggatcgt

SEQ ID NO: 742950 - DNA, 100 bp, Homo sapiens
cttcccggcgtctaggggagcgaaggctgaggtggcagcggcaggagagtccggccgcgacaggacgctcattgctatggacagtgctatcaccctgtgg

SEQ ID NO: 742951 - DNA, 100 bp, Homo sapiens
ccgggttttctcccaacgtcaggcccgatggctcggcttccccaggtgacagagctgaatgaacctctctccaatgaagatcgaaatctcctctctgtgg

SEQ ID NO: 742952 - DNA, 83 bp, Homo sapiens
catcctgctcctgaacttcctgcgctcgcactggcctctccttccgatgaaaagagaaaggaagaatggactacagccaccaa

SEQ ID NO: 742953 - DNA, 100 bp, Homo sapiens
gttgcagcctgtcaagaccttttggatcctgattcagccatccatcgttattaggcttctgggaacttggcagacgcagcttagagagactcaccagcga

SEQ ID NO: 742954 - DNA, 100 bp, Homo sapiens
cgctcctcagcggatgtggcagccccgagccatggctctcgccgtccgagtcgtttattgcgagcagctgatgcagctgtacagtgcgcgccagcggcgg

SEQ ID NO: 742955 - DNA, 75 bp, Homo sapiens
atgcagttcatcacatcattcatgattttcagcatgttggcagataaattgaacatgactccagaagaagctgaa

SEQ ID NO: 742956 - DNA, 96 bp, Homo sapiens
gagtctcccgcgcgcacctcagccgcctcctagcggcgcggcgctcgctcctacgttgaatggatcgcagcagttaccattgctgctgggacagct

SEQ ID NO: 742957 - DNA, 100 bp, Homo sapiens
cgctgtcaccgccatggctgccccgtgtttgctgcggcaaggacgagccggggcgctgaaggttcagaaaagagaccctcgtgactggactgcacagttc

SEQ ID NO: 742958 - DNA, 50 bp, Homo sapiens
gcagggcgatgatggcagtgaagggggtattcgagatgacattgaagagg

SEQ ID NO: 742959 - DNA, 90 bp, Homo sapiens
gaaaaatatcaccaagtgtccctgttttataatgagcttcattatgtggaaaaagctgctgcaggaattctcctactttcaaatcatttg

SEQ ID NO: 742960 - DNA, 100 bp, Homo sapiens
gggacagcggcgagacgcgcgtgtgtgagcgcgccggaccaagcgggcccagaagcggaacctgagagccagaagcaacaaagatgccaaggatccaacg

SEQ ID NO: 742961 - DNA, 75 bp, Homo sapiens
catatatttgccaggaagaatgtaaggaatctgtcttgaactatcgtttcgatcctctcggcattgttgatggtt

SEQ ID NO: 742962 - DNA, 98 bp, Homo sapiens
agaacttggcaagtctcactagataccttcaatcatcattttgagctcaaagaccaactcttgcgtaaaaagagaagaatttttatccattcagtggg

SEQ ID NO: 742963 - DNA, 98 bp, Homo sapiens
gagaccgtgaccgagagcgtgaccgagagcgcgaatatcgtcatcgttagaagattttgtacagcagcaatttcttactctctctgcaagttttcttc

SEQ ID NO: 742964 - DNA, 82 bp, Homo sapiens
cttcccctgcatcgtgccctcactgagctcttcttcgtcaccgagaaccgtgcccaggaatgggtaccacagaccatgtcat

SEQ ID NO: 742965 - DNA, 80 bp, Homo sapiens
agatccaaaacaagtggctgcggccgtcgcccaggagtcatcggacgccagaatctgctttgctgtctgcatgccgacat

SEQ ID NO: 742966 - DNA, 100 bp, Homo sapiens
agtataatcggcacaagccccccaagcagatccttttatcctgccacaccagcaggttgataaaggagccatcaaatttgtactcagtggagcaaatatc

SEQ ID NO: 742967 - DNA, 100 bp, Homo sapiens
aagaagtaccttcgccggtcaccggctcctgcagggtcctatggcagcgtatacaaagctattcataaagagaccggccagattgttgctattaagcaag

SEQ ID NO: 742968 - DNA, 83 bp, Homo sapiens
gcaccatgcccagtgccagtgactggattggcatcttcaagctggagaagcgactggaggagtggttggggaggacattgcct

SEQ ID NO: 742969 - DNA, 100 bp, Homo sapiens
aggagaccggcacccagacaggtggcgaaggcagaggacttgctgagcgagagcgagaagcggcccttcgtggaggaggcagagcgccttcgcgtgcagc

SEQ ID NO: 742970 - DNA, 100 bp, Homo sapiens
cagagcctggagtctgcgaaggccgggacccggttccccggcccacagtgggggtgtgcaaacccgagagaactgggtgcatcatttctggcatggcttc

SEQ ID NO: 742971 - DNA, 98 bp, Homo sapiens
aggaacgaggcaaggagctaaagcagcgtgcgttcagccctggggtgcgcgcggagccatggttatcatgtcggagttcagcgcggaccccgcgggcc

SEQ ID NO: 742972 - DNA, 75 bp, Homo sapiens
agcgcggcctgggatgcgcttgggctccctgttgctggatttgtgcgactcggtgaaggatgatgcccggagggt

SEQ ID NO: 742973 - DNA, 75 bp, Homo sapiens
ctgcacgtagcccggcgctcggcatggctctcctggtgctcgaagacacagtctgtccagcacaaagttacttag

SEQ ID NO: 742974 - DNA, 100 bp, Homo sapiens
aatacttggattctatccctcctggtcagtacatggattcttcacttgttaagacttgtgcaccatggacaattttgctgagggagatttcactgtggcg

SEQ ID NO: 742975 - DNA, 82 bp, Homo sapiens
cgaaagctggtgaggctgggctgcggtggagcctcggcagagggaacgaattggtagggtgcccccctttttcacagagaac

SEQ ID NO: 742976 - DNA, 76 bp, Homo sapiens
acgccgactcggaggtgggtccggggagcccgactcggaccgcggaggaaacttggatttaactggccagaagcag

SEQ ID NO: 742977 - DNA, 96 bp, Homo sapiens
gctctggctgtgctgcgcggcccccgcgcatgattgacgagatgcctgaggctgccgtgaaatcaacagccaacaaataccaagtcttttttttcg

SEQ ID NO: 742978 - DNA, 82 bp, Homo sapiens
acccttggcgcctgcccctgcaacgggagttcaaatctgaacatcaatgatgtactagggaactactcattgactcttgttg

SEQ ID NO: 742979 - DNA, 100 bp, Homo sapiens
tggatggatcagggagaaagacaatgacttgcactgggaaccaatcagggacccagcagaaattgacattgaacgctgtgtgagagaatctatcaacctg

SEQ ID NO: 742980 - DNA, 83 bp, Homo sapiens
tagaagctccttccattcagatccaggttctgcacttttaaaagaaaagcaaaggcatcgattacataagttcttgtgtctca

SEQ ID NO: 742981 - DNA, 73 bp, Homo sapiens
ggatctttccggatcaatccagatggcagccagtcagtggtggagagttttgggactggaattaaataaagac

SEQ ID NO: 742982 - DNA, 75 bp, Homo sapiens
gacagaaaaatgcaacaacacaaacagtcccaagtggaagcaaccccttacagtatcttgagccagatgattgtg

SEQ ID NO: 742983 - DNA, 83 bp, Homo sapiens
agcagcatcatccagacgtgcagcggcaacatccagcggatcagccaagccagctacttcacccccctcaacaccccacagag

SEQ ID NO: 742984 - DNA, 50 bp, Homo sapiens
cgcggggtgagaatgcccctggatatgagggaaggcaccattggagatat

SEQ ID NO: 742985 - DNA, 83 bp, Homo sapiens
aaggatcatgtctgcgagccaggattcccggtgaagccaaaaaccttccctcttacccggggccgagcaagatgagggattgc

SEQ ID NO: 742986 - DNA, 50 bp, Homo sapiens
acaaggcactgctttttcatgacgctgcatatctatgtgagactgaattt

SEQ ID NO: 742987 - DNA, 100 bp, Homo sapiens
attcagaagaatgcaggccttgcttttatcgaacttgtcaatgaaggaaggaacacctgattgagaatgaagtgtcaatactgcgccgagtgaaacatcc

SEQ ID NO: 742988 - DNA, 100 bp, Homo sapiens
gggcccgtagctgggctctgcgagtggcccaccctcaggaccctcaccacccatcagagaagcctgtcattcactgccataaatgtggggagccttgcaa

SEQ ID NO: 742989 - DNA, 75 bp, Homo sapiens
cgacatcgacgccgcctggcaggccctgcgcaccaggtttctctactcggacgaggtgcagattggcccggagac

SEQ ID NO: 742990 - DNA, 100 bp, Homo sapiens
cagcgacgacgcggaggcagagaagggaacgcccggcccagcccccctgtgcctactacactggcacaagtggatagagaaaagatctatcagtggatca

SEQ ID NO: 742991 - DNA, 83 bp, Homo sapiens
tacaggtagccccgccgccgcgcacctgccttcgctcccgcaccggatctgtctggctccattgatgacctccccacgggaac

SEQ ID NO: 742992 - DNA, 83 bp, Homo sapiens
ctgcagcagagggagcttgccttgaaggacaagaacagcgccgtcaccagcagggggatatgagactttctactcggaatatc

SEQ ID NO: 742993 - DNA, 100 bp, Homo sapiens
cgcgcccagagccgccgggcgatccggggatttctttcacggtttgataatgtccttcccgtcagcctggcatttgacaaatgtacagcttgttcttcca

SEQ ID NO: 742994 - DNA, 100 bp, Homo sapiens
ctgctgtggaggctgaggaggcggcggcggagatctggtgatcacatggaaaatgtgtatggctatttaatgaagtataccaaccttgtcactgggtggc

SEQ ID NO: 742995 - DNA, 78 bp, Homo sapiens
agtgatggaccttcagtctctgcattaacaaatggttttgacactccagaagagagggccaattcctgtccccccagc

SEQ ID NO: 742996 - DNA, 75 bp, Homo sapiens
ggaggacacccctggtggcctgcttggtgctgggcgtcctcttctttgccatagcctgcttcttatacaagcccc

SEQ ID NO: 742997 - DNA, 75 bp, Homo sapiens
cggggggcttggcggcttttctcctcagttttctggagtgctttggaggagaggattaatacccctcgaagacaa

SEQ ID NO: 742998 - DNA, 75 bp, Homo sapiens
atgccaaggaaaaactggagagcttcatcaaaaatagtgatagctttgataaaccagagcagataatcagctcaa

SEQ ID NO: 742999 - DNA, 100 bp, Homo sapiens
agaactgaatgtgcaacttgcaagggaactggagacaatgaaaatcttgtcagttactccacaggatccgctgaacataggatgttgccacaaaatctac

SEQ ID NO: 743000 - DNA, 74 bp, Homo sapiens
agaagagccaaggaataaacatgcaatgaacccaaaagggagccggtgaaacctgaagaaggcagagatatggc

SEQ ID NO: 743001 - DNA, 75 bp, Homo sapiens
gaaaattctcttcattctcttggactgaacttaaatactgatagctccaaatgagaagatgaagcaagtgttaaa

SEQ ID NO: 743002 - DNA, 90 bp, Homo sapiens
ctggggccacgtggagctgctggagggtgaggagccggaagaggaaccgaaagtgaaaacccagtggccgaggtctgcagatgagcctgg

SEQ ID NO: 743003 - DNA, 96 bp, Homo sapiens
tggggagcagaggacagaggcactcacagaagcagagctccttcaatacgggaatatgaatggattcattcccaaaccaaaagattgaagttcaac

SEQ ID NO: 743004 - DNA, 75 bp, Homo sapiens
gcaaaagatgattttacatccattattgggaaatgtcaaggacagagcgggatgccaccagcttgtccaaaggga

SEQ ID NO: 743005 - DNA, 98 bp, Homo sapiens
tgccaaggaaaaactggagagcttcatcaaaaatagtgatagctttgataagtatggatcctggcgggagccagtcaacccctattatgtcaatgccg

SEQ ID NO: 743006 - DNA, 75 bp, Homo sapiens
atggctgaatgtgcgcatttccattatgagaatgttgagttcggcagcatacagacagagtcttgctttgttgcc

SEQ ID NO: 743007 - DNA, 97 bp, Homo sapiens
cccggaccaggggcgagggctacccgctctttgccgtgacaacaccgttcccccagccgggctggtctgcagcttcactcctgaagccagcgagacc

SEQ ID NO: 743008 - DNA, 88 bp, Homo sapiens
cggcagaggagaaattcagacggctcccgagggaagctgaagagggaactacccttttcattccgatcaattaatacgagagaaaacc

SEQ ID NO: 743009 - DNA, 97 bp, Homo sapiens
aggtggtggcaggggaggccgaggaggaggaagaggaggaggtggcagaggtggtggcagaggcggttcgcatggctctgaaaaaggccgaaaaaga

SEQ ID NO: 743010 - DNA, 50 bp, Homo sapiens
tcaacatcgcggtcatcaagtactgtgatgtgtccaatctagatcccaac

SEQ ID NO: 743011 - DNA, 51 bp, Homo sapiens
ctcggaggttcctgatctgtacaccaggtagagacggggtttcaccctgtt

SEQ ID NO: 743012 - DNA, 103 bp, Homo sapiens
cagccgccgcccacggcacggcagccaccatggcgctcctgctgtgcttcgtgctcctgtgcggagtagtggtgttaatgtaccgcggtgaggctcttgaaga

SEQ ID NO: 743013 - DNA, 100 bp, Homo sapiens
ggcctatcgctaccctccgaagtccgaatttcgctaaggagtttgtgatcagtgatcggaaggagctggaggaagatttcatcaagagcgagctgaagaa

SEQ ID NO: 743014 - DNA, 100 bp, Homo sapiens
agactcagagtgtgagaaaaaaataaactcctatttgtttatggcaagggacttgccatgaggtgttgaagccttgtttcactgagttggagagactgga

SEQ ID NO: 743015 - DNA, 75 bp, Homo sapiens
ggatgtgatgcctgctagccaaaagggtgactctcctattccatctgtttcttcgggatcatcttcacctctttc

SEQ ID NO: 743016 - DNA, 74 bp, Homo sapiens
tgaagggcataggatccggcaaagtcctgaagagagttcctatcagactgagattgggcagaccctggacctcc

SEQ ID NO: 743017 - DNA, 100 bp, Homo sapiens
caaggaagcaagtggatgccctggggctgacaggaatcttctggtgtactctttttatgaaaagggatgagtatttccgcatgaagctgcagtggaaatc

SEQ ID NO: 743018 - DNA, 100 bp, Homo sapiens
tgcaactttcgacatctggaagttcagaaaagatatgtgaacttttgcaaagcggagccataatgaataaattttaccagcctcatgaagcgcatattcc

SEQ ID NO: 743019 - DNA, 100 bp, Homo sapiens
ctccagagactgctgaaaagctggcccgtgacctgaaggctgtcaagtatgtggagtgttctgcacttacacagaaggtagaagatagcaccatgccgat

SEQ ID NO: 743020 - DNA, 83 bp, Homo sapiens
agaagatattcacagacatgcggaatttgagacaacatctggggaagatgtacgagacttcacaaaggtacttaagaacaagt

SEQ ID NO: 743021 - DNA, 90 bp, Homo sapiens
cagatttatgtaatgtcaactttactgagaattttccacctcctgacacaacaccactcagcatcgagcccacaggcaacatggtgaaga

SEQ ID NO: 743022 - DNA, 50 bp, Homo sapiens
ggggtgccagaaggaaagcataggaaagagcatctacggtgagcgcttcc

SEQ ID NO: 743023 - DNA, 98 bp, Homo sapiens
aagatcatgcatccaacgtcaagtacaccatgcacaaggtcttccagtttctgaacctagcatgatggaagtggttcattgcatgatattcaactgtc

SEQ ID NO: 743024 - DNA, 100 bp, Homo sapiens
ctttctcctacacggcaccgaggtaccagaccaatccgtgcattggactggggcagcacctactccgtgtcagtggtggagaccgactacgaccagtacg

SEQ ID NO: 743025 - DNA, 74 bp, Homo sapiens
ctgtgaggggattcacttgtgtgcggaactcctcggaaccatgcgtgagtgcatctccatccacgttggccagg

SEQ ID NO: 743026 - DNA, 75 bp, Homo sapiens
ctcctgagtagctgagactacaggtatgaacatgctaatgatgataagagcagtttgaaatcagatcccgaaggg

SEQ ID NO: 743027 - DNA, 82 bp, Homo sapiens
gccggacttcaatgcccagtccccagctcgccagcacaatgcagatcttcgtgaagactctgactggtaagaccatcaccct

SEQ ID NO: 743028 - DNA, 82 bp, Homo sapiens
ctcggttatttcacagacactgatgagctgcaattggaagcagcaaatgagacgtatgagggaaaacccctgatcctaaaat

SEQ ID NO: 743029 - DNA, 82 bp, Homo sapiens
agacaaacagcccgcccgaccccgtcccgaccctggccgccccgagcggagcctggaggtgctggagaatctggtaaaagca

SEQ ID NO: 743030 - DNA, 101 bp, Homo sapiens
cttcaaggtggggttggcatcccccacatacgttcagggcgacagctcagtgaagtcttcattcagttaccttcaaggaaagaattaccagaatactatga

SEQ ID NO: 743031 - DNA, 82 bp, Homo sapiens
gaaatcagaggagatgtaactatcggggtaccaaagtctgatctcttgcacaccaaatcattaaggggccataaagactgct

SEQ ID NO: 743032 - DNA, 83 bp, Homo sapiens
cgtcagcatcccagccgtgctcacgggtggcccagttgaaatccttcccttcctctaccttggaagtgcctaccatgcatcca

SEQ ID NO: 743033 - DNA, 98 bp, Homo sapiens
gaagggaagctgatcatgggcattggtcaccgagtgaagtcgaatgcctcggctggggtggagcgcctcttgctggggaacaaatgtgacatggaggc

SEQ ID NO: 743034 - DNA, 100 bp, Homo sapiens
tgaaaaccagtgacatcaaggagttgaatattgttttgcctgaatttgagaaaacccacctagagcatcaatggagtctcactctgtcacccaggctgga

SEQ ID NO: 743035 - DNA, 82 bp, Homo sapiens
agctgtcgacccggcctggcgccggactaggtttacccaaggtccagcctagcccctaggcaccatgtcggacagtgatcta

SEQ ID NO: 743036 - DNA, 100 bp, Homo sapiens
cacaactgtagagcagctgtatagcatcttcactgtaaaggagcctcagcaccccaatcagatgaaggctctgatattgactctgaaccagatttaccac

SEQ ID NO: 743037 - DNA, 82 bp, Homo sapiens
tggctaccagactctgaaaaacctaagtcctttagccacccgtgggaaactgttacaacagctgcaatgcagaaatacccaa

SEQ ID NO: 743038 - DNA, 96 bp, Homo sapiens
gaggacagagatggcgagcgcccggattggggatgagtatgcggaggacagctctgatgaggaggattgtcagtggcttcgccccgaggagagctg

SEQ ID NO: 743039 - DNA, 152 bp, Homo sapiens
gtgacagatgaccacgacagagagttttcagtcgcagacctctcggttcagatattcacggttccttcacttgtatgtgaggagcagcgctgtgaggaggaagtcttccccctggccatgaactacctggatcgctacctgtcttgcgtccc

SEQ ID NO: 743040 - DNA, 98 bp, Homo sapiens
tgaccattttcttcagcctccttgtcctaggcggcttggatgtgaagtctcaggaagcagctcttcgggcagcgcctgacatcctcatcgccacccca

SEQ ID NO: 743041 - DNA, 74 bp, Homo sapiens
ctccatctacctaggcctctcacaagtagattggggtcaactggactacttagttgtagacatgccaccaggaa

SEQ ID NO: 743042 - DNA, 100 bp, Homo sapiens
cctcaaggagctggctaagatgtgtatcctggccgactgcacattgatcctcgcctggagccccaaggcgtggaagccagacttgaccccaagacctctg

SEQ ID NO: 743043 - DNA, 75 bp, Homo sapiens
ttcccctctccatccccaccaaccgcctcacccagcgcatcatccccagtgacaaccatgagtggaaaaaactaa

SEQ ID NO: 743044 - DNA, 100 bp, Homo sapiens
ccaaaggtgtatttcaccgcgacctcacatccaagtgcatcaccaacagtgcccgggaaaggaagatcaactcatccctgcagctcccagaccgcgtgct

SEQ ID NO: 743045 - DNA, 50 bp, Homo sapiens
tactcttggaaagcacatcctaaggtcatctaatacatgggagaaacatg

SEQ ID NO: 743046 - DNA, 100 bp, Homo sapiens
taatgtatgggatggtgatagagagtgctcaggaatgagaggatacagaccacaattactatatatctcgaatatatggtccatctgattctgccagccg

SEQ ID NO: 743047 - DNA, 100 bp, Homo sapiens
ttcacaggcttaactccaagactgtgttcgggagtccttggaactgtggtccatggtaaagttttacagaagtcataaggacgaggctccgggaagaggg

SEQ ID NO: 743048 - DNA, 101 bp, Homo sapiens
gtgcaatctgacgagctgcttcacagtaaacactcccacccacttgactcaaatcagacttcagatgtcctcagctcgttgtgcagaagggattggtggct

SEQ ID NO: 743049 - DNA, 139 bp, Homo sapiens
gtccctgccagcaagccggagcctgccagagccaaggccaagctctccaagttcagcatccccaagcagggggaggaatacttggacctcagccaacctctcgaacagtattcacctagttaccctgacacaagaagtt

SEQ ID NO: 743050 - DNA, 101 bp, Homo sapiens
attcccagaggactttggagaccagtttgctaatccagactttacacaacctatctcagaagttgtagatgaagtaattcagaattgtcctattgatgtca

SEQ ID NO: 743051 - DNA, 97 bp, Homo sapiens
tggatgcagtcattccagcaccaacaggatccaaaacaatatgatgcgtttgtgaagtttacgcatgatcaaataatgcgacgatatggagaacagc

SEQ ID NO: 743052 - DNA, 101 bp, Homo sapiens
gcacagaatcaaagtcctgcggaatggcagctgatggctgaaacaggaaatcactgaccaggacatgtttggagatgccagcacgagtctggttgtgccgg

SEQ ID NO: 743053 - DNA, 100 bp, Homo sapiens
acgagaagattctgagagattttttattcgttactatgtggatgttccacaggaagaagtgccattcaggttctgtggacaatcacaatgggaatccaag

SEQ ID NO: 743054 - DNA, 82 bp, Homo sapiens
aagcaaagcaagttaccaatgtctcttctccatgatcgaatccggcctcatccttgggacaataatgcagtctgtgcagacc

SEQ ID NO: 743055 - DNA, 98 bp, Homo sapiens
aaagagattccttgcagagacagctcaacacggcacttccacaggcgtactttattgtcggcttccaaagattactaacttttatctgtatcactaag

SEQ ID NO: 743056 - DNA, 100 bp, Homo sapiens
ctgggacagcttctccgcctggctgcactgcgtgtgtgtggtgggcttcgacctggagctgggccaggccgtggagaaagcaaggagatggccaccaagg

SEQ ID NO: 743057 - DNA, 75 bp, Homo sapiens
gcggcagcgaggggctcggagaggtgctcggattctcgtagctgtgccgggtatttgacctgtccaaagacgact

SEQ ID NO: 743058 - DNA, 90 bp, Homo sapiens
tcctggtgcgcatcctgctgctggctgcccttgtctcctttatcttgattttgccagccttgctcgaggttttgccctgctgaggatgcc

SEQ ID NO: 743059 - DNA, 100 bp, Homo sapiens
gccagaaacatgctgagcctttgacagtgatgtttatccatgcatcgttgagacttcggaacctcaagaacaaactggagaataaaatggaaggaatagg

SEQ ID NO: 743060 - DNA, 82 bp, Homo sapiens
aaatgatctcgtcactcctttctttgtggtcttcatttgtgaatacatagattgtgataccattcttcagtctcttaatcaa

SEQ ID NO: 743061 - DNA, 51 bp, Homo sapiens
cgagtcctcaaagagtacaaagatgtgaattacatgaatgacagtcttcga

SEQ ID NO: 743062 - DNA, 101 bp, Homo sapiens
cctacttcaaggataagggcgacagcaacagctctgccggctggaaggctacaacccatttgccccattgaaggtcgactgggtggagcccgcactcaggc

SEQ ID NO: 743063 - DNA, 50 bp, Homo sapiens
ctcaacaaaaccagccgacagcagatggacttcaaggatgttgaagccgc

SEQ ID NO: 743064 - DNA, 97 bp, Homo sapiens
ggcaccgtccgcgactgctatgaggggagacgtacgaggaggaccgggagtacgagagccaggccaagcgtctcaagaccgaggagggggagatcga

SEQ ID NO: 743065 - DNA, 75 bp, Homo sapiens
acatgagcgatgaagttggctgcgttaatgggaagaaggagaaagggccaacccctgaagaagcaatacagaaac

SEQ ID NO: 743066 - DNA, 74 bp, Homo sapiens
tccgatggcagcaccacttcgaccagcttcatcctcagacaggggccacctacagatgctcctgcagtggacac

SEQ ID NO: 743067 - DNA, 75 bp, Homo sapiens
ccagccagcgcccatccccaataacaatccaagttcctggtagagttacacagttgtgccgccagtatagcgaca

SEQ ID NO: 743068 - DNA, 87 bp, Homo sapiens
cgaggcgggcagccggggcgtccaggagcagcagccaagctggacagatgacctgcctctctgccacctctctggggttggctcagc

SEQ ID NO: 743069 - DNA, 76 bp, Homo sapiens
agaaggaccaaaaagacctgcaggggctgcgtattgtcagtttatggacatgctgttccctggctccattgccttg

SEQ ID NO: 743070 - DNA, 50 bp, Homo sapiens
ctggggcagtatcaacggagtctccgggattcccaaatgctggaaaatcc

SEQ ID NO: 743071 - DNA, 90 bp, Homo sapiens
gcggatggcaacctgctccagcgatcagagcgttaaggccaaatttgagtttcatcatggtgactatgaaaaacagtttctgcatgtact

SEQ ID NO: 743072 - DNA, 90 bp, Homo sapiens
cgaaggcggcgcttggctggtggggcccgcggcgggattttcccgggcggcgagagcgttacagcaagctgctgaagtttctcagctgcg

SEQ ID NO: 743073 - DNA, 88 bp, Homo sapiens
tggcacagacaggctgtgtgcatgcaccaaagatcttagcaaagcaatgtctcaagatggtgcttctcagttccaagaagtcattcgg

SEQ ID NO: 743074 - DNA, 91 bp, Homo sapiens
tagtctggtggccatcagcaagcccaggtctatgaaattgacagtccaaccaatgttgtcactgatcgagtgactgaagacacagcaactg

SEQ ID NO: 743075 - DNA, 99 bp, Homo sapiens
tgcactcattcagaaaactactactccagtgaccccatggatcaggtgtattgcctaagtgtaatcttgaacatgggcggtgctgtgagtgctggtgaa

SEQ ID NO: 743076 - DNA, 82 bp, Homo sapiens
cctacgaaaaacagatctttttaaggtgaaaggtgtagcagtcactcggcctacacccacagcatcgaccttgtgaacccag

SEQ ID NO: 743077 - DNA, 82 bp, Homo sapiens
gaagccagggcagctgaaagacagagaccttcagaaccccgaccaagaacagatgccgggcccccagtcgctgccccatcaa

SEQ ID NO: 743078 - DNA, 100 bp, Homo sapiens
aaagaatattatattccaagacagagcacctaggattaaattggtttcctaagtttttagaacttcagccataaaaatgggcagaattttccttgatcat

SEQ ID NO: 743079 - DNA, 100 bp, Homo sapiens
ggcaacagaataatgttcagagtgatgatgatgatgacaacgacagaactaacagaagagaaagcatatctcctcagcctgctgattcagcatgttcttc

SEQ ID NO: 743080 - DNA, 74 bp, Homo sapiens
aggccttccagtacacagacgagcatggggaaggtctggccagcatgacccagaacttagagccacttctgaag

SEQ ID NO: 743081 - DNA, 83 bp, Homo sapiens
ggccgtctcgctctgggtctccaggcccgcgaccgtccgccagtcgtcccgaggctccataaaaatacagactcaccagttcc

SEQ ID NO: 743082 - DNA, 51 bp, Homo sapiens
tgggtgtaatacatcatgaactgcaggtggaatgcagtagccctctgggcc

SEQ ID NO: 743083 - DNA, 100 bp, Homo sapiens
tgcagctgcctcagttcttagcgcaggaatgggtaccacagaccatgtcatcgtcctggcgtccacgaaccgagctgacattttggacggtgctctgatg

SEQ ID NO: 743084 - DNA, 90 bp, Homo sapiens
ggcggccttcgaggaggtgatgatggacatcggctccacccgggtggaggatctcctggccacattggagaagagtggtgctggtgtccc

SEQ ID NO: 743085 - DNA, 76 bp, Homo sapiens
gcttaaggaagtaaaatggcggacctggcgaacgaagattcctcttctcctgtaaatgaccacagaggaagacaat

SEQ ID NO: 743086 - DNA, 74 bp, Homo sapiens
cttcacccgcaccatgatcgttatgaatgatcagaatgtactcaagactgatcttctaagttcactggaaatga

SEQ ID NO: 743087 - DNA, 89 bp, Homo sapiens
ccaaaacccctcgcctggctcggacccacggagccggcagcccagcactccgatgccatggacaatattaccaggcagaaccaattcta

SEQ ID NO: 743088 - DNA, 101 bp, Homo sapiens
acttatatttttatcacgttcagtgtgctgggatgaggttacgagtagccatgtgccatatgatttatcggaaggatgaactggacctcacagacaaacac

SEQ ID NO: 743089 - DNA, 75 bp, Homo sapiens
gagtcttctgctggaggttccttcactgtgcgtgctgaccatgggcaaacttgaagataaatcttttgactccag

SEQ ID NO: 743090 - DNA, 100 bp, Homo sapiens
catggacgggattttagacgccatcgcgaaggagggctgcagcggtttgctggaggaggtcttcctggacctggaggcagcagagacaacaggagaagta

SEQ ID NO: 743091 - DNA, 82 bp, Homo sapiens
gcgtctcggaaaccggtagcgcttgcagcatggggttgtgtccactgtggtccccgactctgcccacaagctgttcatcggg

SEQ ID NO: 743092 - DNA, 90 bp, Homo sapiens
ctggagggatgacttgggggaccagagaggaagagcaggattttttatcaagcagaaatgcatcgaacaacgagaatcaagatcactgag

SEQ ID NO: 743093 - DNA, 75 bp, Homo sapiens
gagcgcagggccctggaacgcaaggccgcagagctggaggaggagctgaagaggccccaggtggagcaagttggc

SEQ ID NO: 743094 - DNA, 98 bp, Homo sapiens
gagagatcaccacactggccaacaaccagtgcatggctacagagagcgtggaccatgaaggggaaatttgcagtggtgagaaaatgtataaagaaaga

SEQ ID NO: 743095 - DNA, 90 bp, Homo sapiens
tgcagaaccagatccgggagcacgtcatcgccatcgaagacttaattcagtgcacaaatgagatgaatgtgaacatcccacagttggcag

SEQ ID NO: 743096 - DNA, 100 bp, Homo sapiens
cctgttccaccttcagagcgtcacggcgtacgccctcatggggaaaatctccccggtgactttcaggatctcctgtatcgaaggtctaggtcactagtgg

SEQ ID NO: 743097 - DNA, 98 bp, Homo sapiens
gtttccctcggcgtgctactgtgcgctcgatccagcaccatggggaagcgggacaatcgggtgaagtccatataatgcttgatggcctgttacctcct

SEQ ID NO: 743098 - DNA, 90 bp, Homo sapiens
tctttggtcaaaagatatggcgccatatcagggatgacccctccggcgaaggtgtcctgccctcggcccgcggcccagccaccttcctcc

SEQ ID NO: 743099 - DNA, 100 bp, Homo sapiens
cttcgaggcactcaagtcctggctcagcaagactctcgagcccatggagactcatgcatctgtatgccgtgtgcgtggactgcctggaaggggttcacaa

SEQ ID NO: 743100 - DNA, 101 bp, Homo sapiens
gtccgacccgcgaacccctctgggatccccgccgctctgtctacaacccgagcaaatatttccatggttcaagctgcttcagcaggacccccatctctgag

SEQ ID NO: 743101 - DNA, 82 bp, Homo sapiens
gcgttgcgtgccctacttcaaggataagggcgacagcaacagctctgccggctggaagatctgaagaagacacttgaatcat

SEQ ID NO: 743102 - DNA, 82 bp, Homo sapiens
catctttacccgactctttcagaaactaatctggattcactccctctggttgatacccactcaaaaaggacacttctgatta

SEQ ID NO: 743103 - DNA, 75 bp, Homo sapiens
catatgaggaggcccacaaggccctctgcatcctgcctggagtgggcaccaagatgaacacagtatagagcatga

SEQ ID NO: 743104 - DNA, 98 bp, Homo sapiens
cggcggcagcggagagcgagagaggggagcagtgtgatttggtacttgatgccgcacatgagaaaagtacagaatccagttcggggccgaaacgtgaa

SEQ ID NO: 743105 - DNA, 98 bp, Homo sapiens
acctgggtgaactttcacggacaacctcagaggacaacgaagtgttcggaaacagagcaaatgcagcgttacaatcaaagacttattgaggaattgaa

SEQ ID NO: 743106 - DNA, 75 bp, Homo sapiens
actggtcattcaagattatgatgctggatccaaacttctacagcaaaaacttacttcttttaggaaagacatact

SEQ ID NO: 743107 - DNA, 75 bp, Homo sapiens
cagcgcccgaaggccgacacgctggccctgaggcaacggctcatcaggtggaaactaattctaagccagactgct

SEQ ID NO: 743108 - DNA, 88 bp, Homo sapiens
gctctcgggcggggcggcggcgacgcggacctgcggactagcgaacccggagggaaggtggccatccagaaggaggacttgcagaagt

SEQ ID NO: 743109 - DNA, 100 bp, Homo sapiens
ggacctttgtcgagtacctcaacgctgtgaccgagaggcattggccgctggaccaacccccagtaccggcagttcatcaccatcttggaagcaacacatc

SEQ ID NO: 743110 - DNA, 100 bp, Homo sapiens
cggcgcggtagcgaaggccgccgaacctgcctggctagccggcgacttgagtgacgaaatcatgtcaaccctgccatggacttcacgcagactccacctg

SEQ ID NO: 743111 - DNA, 75 bp, Homo sapiens
cggtgatgccgcaaagaatcaagttgcaatgaaccccaccaacacagtttttgccacggactttacgttgaaggc

SEQ ID NO: 743112 - DNA, 100 bp, Homo sapiens
tcagagcgtcacggcgtacgccctcatggggaaaatctccccggtgactttcaggagagaagaccaagaggtcggagaagaggtagaaaatgtggcagag

SEQ ID NO: 743113 - DNA, 100 bp, Homo sapiens
gatggcaacggccaacttcggcaagatccagatcgggatttacgtggagatcaagcgcagcgatgtctgaacaacccagtcctgccagctccagctccag

SEQ ID NO: 743114 - DNA, 75 bp, Homo sapiens
tccctgaaccactccactgcctttaaccctcagcctcagagtcagatgcagggtttggtgcacctcgatttggag

SEQ ID NO: 743115 - DNA, 75 bp, Homo sapiens
gcaaccagaaccggagcatggaggcgcacaacatcctcaggcagcttcggtcacctctctgtccaacctggcatg

SEQ ID NO: 743116 - DNA, 83 bp, Homo sapiens
cgccaagatcccagtcacaattatcaccgggtatttagggggatatgagactttctactcggaatatcctgagtgttgcgtgg

SEQ ID NO: 743117 - DNA, 80 bp, Homo sapiens
cacgtcccccagcgccgacaccaacaagcgcaagagagacgaagggtttggaaatcccttgtctccaggttgctgggatt

SEQ ID NO: 743118 - DNA, 98 bp, Homo sapiens
gcttagattaaatgcgttgttgagagtgattgactgcctggaggatgagaaggcaaccctcaccttggccatggctgactggctgcgggactatcagg

SEQ ID NO: 743119 - DNA, 100 bp, Homo sapiens
ggaatgcttactgttgcgtggttcgttattaacagagacattttaaatcctaaggatgtgatcacaactcgctttgagaattcctatcctagcaaagatt

SEQ ID NO: 743120 - DNA, 75 bp, Homo sapiens
ccattgattatgatagcagtgggcttttcacagtgggctttactgtgttgagaaaactgtggatttagttactcc

SEQ ID NO: 743121 - DNA, 83 bp, Homo sapiens
ctccataaaaacaagtgtgtgcatctggctgttagaagaattcatgctcatccgggtttttgagtcatgatgcaagaatctgg

SEQ ID NO: 743122 - DNA, 111 bp, Homo sapiens
aaaagctgccctgagacggtgtcccgccgaaagatgccttcaattaagttgcagagttctgatggagagatatttgaagttgatgtggaaattgccaaacaatctgtgact

SEQ ID NO: 743123 - DNA, 100 bp, Homo sapiens
cctttatccacctttttcagatcttctcctgaagacagtcccatcattcccgaaacacagggagtgaactactttatgtccaagggtatcctggatgatt

SEQ ID NO: 743124 - DNA, 82 bp, Homo sapiens
cttaaatacttgctttactggaaagacccagaatatgccaagtatctaaagttaaagtattgcacaatcagctggtcctttt

SEQ ID NO: 743125 - DNA, 83 bp, Homo sapiens
aggtgctgcaggcacagcccgagaaaccgcagcactacacggcgaccattgacgaggtggagacggacgtggtggagattgag

SEQ ID NO: 743126 - DNA, 75 bp, Homo sapiens
gttcattgatcgtaagagctctctcctcacagacaatcccactccaggaattgtgatcaacaggcccaatggcac

SEQ ID NO: 743127 - DNA, 75 bp, Homo sapiens
tttcccccggtcttctctacatcctcagcactaatgttctctatgggccactccacaccaagcaggcagtgagca

SEQ ID NO: 743128 - DNA, 74 bp, Homo sapiens
tacaggtgtttgtctcagaaatcgtatacatagacggatctcaatggaggatattggtgctggaaaaggcaaat

SEQ ID NO: 743129 - DNA, 75 bp, Homo sapiens
acagacagaatccctgctaccagtctagatgttgatggaatatatcgagttagtggcaatctggcaacaatacag

SEQ ID NO: 743130 - DNA, 75 bp, Homo sapiens
ctacaaacaagaaatgggaaaactcgaaacagattttttcccattctgtgatggggctcacacaaaacataacga

SEQ ID NO: 743131 - DNA, 98 bp, Homo sapiens
agagaggctgctgctggtgcagacgggctccagctccccgtgcctcgacctcagcccgtggaccgggagcccgtggaccgggagccggtggtgtgcca

SEQ ID NO: 743132 - DNA, 98 bp, Homo sapiens
ccactgctgggccctgaggctgcaccaagtggcgaaggagccggctccaagaataccctctaccatctgctttggtcagggtgccgctcgaggattta

SEQ ID NO: 743133 - DNA, 100 bp, Homo sapiens
gctggcgcagggcacggtgggcgcctacctgagctttcattgttgaggttcctcagtgctgaactaacaagagggtacttccttgaacataatgaggcca

SEQ ID NO: 743134 - DNA, 50 bp, Homo sapiens
caatcacacctctaatcagcaccaaggtcataactccatgcaggaagctc

SEQ ID NO: 743135 - DNA, 75 bp, Homo sapiens
ccgctacccaggaggcggagcggacaaggctccggcctgcgaggagctgtggaaatacaaagaactctgaatcaa

SEQ ID NO: 743136 - DNA, 100 bp, Homo sapiens
gttgggttcagttttcttcagaagaaggacttcggaatgcactacaacaggaaaatcatattatagatggagtaaaggtcggccctcctccacgctgact

SEQ ID NO: 743137 - DNA, 135 bp, Homo sapiens
ggtcctggtgcttgatggtcgaggccatctcctgggccgcctggcggccatcgtggctaaacaggtactgctggcgtctgaccaaacacaccaagttcgtgcgggacatgattcgggaggtgtgtggctttgccc

SEQ ID NO: 743138 - DNA, 111 bp, Homo sapiens
aaagatgcggcaccgggaggaggaggagatcgtcaggctggcccaggaccgggaggagatgaagacatgacaatggatgaagtccgagaatttgaacgagccactcaggaa

SEQ ID NO: 743139 - DNA, 88 bp, Homo sapiens
tcggcagtccacccaccgccgccgcctcccaggaattgactttaaaattaggaccatagagctcgatggcaagagaattaaactgcag

SEQ ID NO: 743140 - DNA, 50 bp, Homo sapiens
agcctctggagtagctaggactacagtggagatggggtttcaccatgttg

SEQ ID NO: 743141 - DNA, 99 bp, Homo sapiens
ggacagggggatttggaaatgtcatccgatggcacaatcaggcatgttatttgaaagcaattgagacgcaaccgaactttgcagtagcttggagtaatc

SEQ ID NO: 743142 - DNA, 50 bp, Homo sapiens
cggcccccgcagacgctcggcaggtgtcgtgaaaactacccctaaaagcc

SEQ ID NO: 743143 - DNA, 83 bp, Homo sapiens
ccggaatcgtgtgctgggctggtcccccttgttctgcctcctgggggcattgctggcccccatccgagtgcttctggccttta

SEQ ID NO: 743144 - DNA, 90 bp, Homo sapiens
aaactgatcagacgaactacgaacccctggacgggagagtctgccggcggagaatataaggcagcagaagaggatgaaacacaaaaccag

SEQ ID NO: 743145 - DNA, 100 bp, Homo sapiens
gttgaatctcccgctcccttgaggctggggttgcgtctgttgacgcggccgactacaatcccgagaggccagctccaccagggcaagggtttttccctgc

SEQ ID NO: 743146 - DNA, 100 bp, Homo sapiens
ggtggaacggggctcccaggacctccactaatcaccagaacaaaatgtgcagggaggtggggaagacagggctccagctaccacaggacgggctctgggt

SEQ ID NO: 743147 - DNA, 83 bp, Homo sapiens
ccgcggccgcaccttcccgccttctcagatcatggaagggaagtggttgctgtgtatgttactggtgcttggaactgctattg

SEQ ID NO: 743148 - DNA, 75 bp, Homo sapiens
gcaacacgtgatgtgtctacttatcagggatggaagatgctaattctgaaaagagtataaatgaagaaaatggag

SEQ ID NO: 743149 - DNA, 82 bp, Homo sapiens
gggaaccctggtcaccgtctcctcaggctttccatctgatggtcccctggtgtgtgccctggaacaggagcgaaggctccgc

SEQ ID NO: 743150 - DNA, 46 bp, Homo sapiens
agctgccaaaagtgacatgcagagttatgcccagccaagtcttcag

SEQ ID NO: 743151 - DNA, 50 bp, Homo sapiens
agaatttactacagcatgtgatttcagaatcttatggcaagggccttata

SEQ ID NO: 743152 - DNA, 103 bp, Homo sapiens
ccggctgtatgattaggccacaatcttcaatgagtaaacatattcctgcataatcaccagcaacacccgggacaataatacgggggccacctacccccacctg

SEQ ID NO: 743153 - DNA, 74 bp, Homo sapiens
tttcttcactcctcttcacttcttcaatggtatagctgcatgctgggaaagaaatgcagcctggcgcctctgaa

SEQ ID NO: 743154 - DNA, 98 bp, Homo sapiens
tgcggagtccataccggagcgcaatggcgtccaaccccgaacggggggagattctgctcacggaactgcaggtatgcaaccactcatgtattcggttc

SEQ ID NO: 743155 - DNA, 100 bp, Homo sapiens
ttttttcacctcgtctgaaatggctgcctcccagtgtctctgctgctcaaaatttctcttccaggtcctcttcctgatggatgggaacaagccatgactc

SEQ ID NO: 743156 - DNA, 90 bp, Homo sapiens
gagcagacgctgcagttggagcaacagtccaagctcaaaaggccagtcaccactgcacattttgggacaatatggcaaggagaatgcagc

SEQ ID NO: 743157 - DNA, 90 bp, Homo sapiens
gagatgtgtacatatcccacgtgaggaaggagcacgggaaggaagtcctggctgagcaaggttggaagccctagttctcgcattgaccgc

SEQ ID NO: 743158 - DNA, 100 bp, Homo sapiens
ttgtggctgtgcttgccaggcctggctccagtgaagatggagctggaaaaacaagcttaataagaaaaattcagggaatagaggagtataagaaaggaag

SEQ ID NO: 743159 - DNA, 98 bp, Homo sapiens
gttcatgcagagagatgtgtacatatcccacgtgaggaaggagcacgggaagaacaagtaagaagtttgcgacagagcactattgccaagcgttcaaa

SEQ ID NO: 743160 - DNA, 82 bp, Homo sapiens
caaacaaatccttgaaagaagaagatggagaagaaatagttacctatgatctggccaacagtgttgcaaacaggaacccgag

SEQ ID NO: 743161 - DNA, 100 bp, Homo sapiens
tggactggtgtctggaccagctagagaccctacagaccaggcactccgtcagtgagatggcctccaacaaggagtcttttagtcctgctatacagctgca

SEQ ID NO: 743162 - DNA, 78 bp, Homo sapiens
gcggagtagcgagtcggcaacccggagctgatgtagcccagcagttccagtatgctgtgcgggtgattggcagcaact

SEQ ID NO: 743163 - DNA, 100 bp, Homo sapiens
gctaatagtagctggccatcacaactggattgtagctgcatatgcccattttgctgtgtgttacagaatgcctcggctggggtggagcgcctcttgctgg

SEQ ID NO: 743164 - DNA, 98 bp, Homo sapiens
cggagcgccgctcgccgcagacttacttccccggctcagcagggaaagcttggctgaagaggaaataaaaacagaacaggaggtggtagagggcatgg

SEQ ID NO: 743165 - DNA, 100 bp, Homo sapiens
catcaagtatcggaagaatgaggtgttcttggacgtcatcgagtctgtcaacctcttggtcacagtcaaagtgcctcagaagaactcataagaatcatgc

SEQ ID NO: 743166 - DNA, 100 bp, Homo sapiens
ctcggcagtcgcgaagcagcaaccatgagcccctgtagccattggagttgcagccatgtccacagctgagatgctcacgtcaggcctgaagggaaggggc

SEQ ID NO: 743167 - DNA, 100 bp, Homo sapiens
tggactctagggaccctgctgaatagctggggctacaggcgtgtgtcactgcgcccagcctccttctgaagaaataaaaacaggtgaggatgaagatgag

SEQ ID NO: 743168 - DNA, 109 bp, Homo sapiens
ccttaacccaaggaagtgactcaaactgtgagaacttcagtcttaggaaaagtcctcagtgctgtgggcagtgcccagctactgatgtcccagaaattccagcagttcc

SEQ ID NO: 743169 - DNA, 50 bp, Homo sapiens
agtggagtggtggatcagaccaaagatggaagaagactgcataaactggg

SEQ ID NO: 743170 - DNA, 75 bp, Homo sapiens
tggatgaatcccttgaagaccctgaaacacttgtagattttcagtggaaactgggtatggctgtgagctcagaca

SEQ ID NO: 743171 - DNA, 50 bp, Homo sapiens
ttattggaaaaacatttcttacgatatgggtctgcaggatggagttcttc

SEQ ID NO: 743172 - DNA, 74 bp, Homo sapiens
agaaacaaaatgtcaacaaattgatggctgaagacttacagtgagaaactggacaaagagcaagcagccctcga

SEQ ID NO: 743173 - DNA, 50 bp, Homo sapiens
ccgagaccgcggccgggaccgaggacctgcgaccgcatcaagcagtccgc

SEQ ID NO: 743174 - DNA, 75 bp, Homo sapiens
ccgtctaccgggaaaggtggccagcagatgtgtcgggcctggtgagagggtacctaaaacagatccaggacctgc

SEQ ID NO: 743175 - DNA, 74 bp, Homo sapiens
ggggaaactaggtcgatggtcggcggcgcccggatgggcagctgagagagaagaagaaggaggttcctgctgtg

SEQ ID NO: 743176 - DNA, 96 bp, Homo sapiens
cctcttctgtgatgaagtgagacaggtgtcatggagaaactccagctgggcccagagattctgcagcgggaaaatccaaggcttatttatgccagg

SEQ ID NO: 743177 - DNA, 100 bp, Homo sapiens
ctgcctgcctgcctggcatctctctctcccgagagatgaacgtcttcaaggggaaaccctggatcagcagctgggcagggtcctaggagaagtggctccc

SEQ ID NO: 743178 - DNA, 100 bp, Homo sapiens
gaacctccctcctctgtcagtcatggagcaaaaggcagctctggacggatcaatgcaagccagacgatgaccagttgtggccagcagtccttgaacgtgc

SEQ ID NO: 743179 - DNA, 83 bp, Homo sapiens
cgccaccgcaggtcgaggacggtcggactcccgcggcgggaggagcctgttcccctgaggttgtgaccgagattcccgacgag

SEQ ID NO: 743180 - DNA, 117 bp, Homo sapiens
ttttcaaaatctatgaatgaaagcatgaaaaatcaaaaggagttcatgcttatgaatgctcgacttcaggccccttcacagatgtagtcactacaaatcttaaattgcgaaatccat

SEQ ID NO: 743181 - DNA, 100 bp, Homo sapiens
agcatcgaaagcgttggagaggtgttaccggaacggcggcgacaagggtgttcccgaactagagtgggtaaaataccatgaagattttgaaaaaacaaag

SEQ ID NO: 743182 - DNA, 84 bp, Homo sapiens
gcccccatcgagaaaaccatctccaaagccaaaggctgccccctcggtcactctgttcccgccctcctctgaggagcttcaagc

SEQ ID NO: 743183 - DNA, 100 bp, Homo sapiens
ggcggcggccaggtccctgctgaatcacacgccgccatccgggaggcccagggaaggtgtggccgacgacgatgccctcgctgaggagcgcatgcggaga

SEQ ID NO: 743184 - DNA, 103 bp, Homo sapiens
cagcggcaccgccagacggccagaaagttccgccatgagctggggcacggagctgtggcctctacggcagacacatgcaggccaacccagaaccaccgaagaa

SEQ ID NO: 743185 - DNA, 98 bp, Homo sapiens
aagaatatttattccaggccaaggatgaggatgaagcctgctgggagcgtgaatgacatggccctggatgccttcgacttggaccggatgaagcaggt

SEQ ID NO: 743186 - DNA, 87 bp, Homo sapiens
tgcccggcctggcgcccgtcaacttctgcgacgaagaaaaaaagagcgacgagtgcaaggtcgagtttgagtggctgaggcagtttt

SEQ ID NO: 743187 - DNA, 98 bp, Homo sapiens
aaaatatccaaagaacccaaaggatgcatctttttggattcctgtacaggagtggtgcagagttttatggacgaggagccccctacaatgccttgacg

SEQ ID NO: 743188 - DNA, 75 bp, Homo sapiens
tctacaaccttcgatctcctgacgaaacatccatgatagcagtcttctgtaaatcgaacttttcaagaattctct

SEQ ID NO: 743189 - DNA, 75 bp, Homo sapiens
tgaagaaggtgaagaagcggatgagattagtgatgatgaaccaggttatgaccttgatttattttgcatacctaa

SEQ ID NO: 743190 - DNA, 90 bp, Homo sapiens
gtgtaatgctagaagtcctagaagaaatttggagtgtgcgtgcgcgccgagcgatctgggcacgaaagcttctctctgtcccttggcttc

SEQ ID NO: 743191 - DNA, 100 bp, Homo sapiens
catccccaaggaggacggcgtgatcacggccagcgaggacaggtttaagaaaatctacgaagaaacgcagtgagtctccacctgctgagctccccagttt

SEQ ID NO: 743192 - DNA, 100 bp, Homo sapiens
ttcatgatgtgaggctttcattattacagcgttattttaaggatgatatgggccctcacattttccaaacctgtccatctgctaactattttgactgcag

SEQ ID NO: 743193 - DNA, 82 bp, Homo sapiens
cgtggaccacatagacatttacgcggatgtcggcgaagagttcaaccagctcttttgaaacagatggtcaccatgtttagat

SEQ ID NO: 743194 - DNA, 82 bp, Homo sapiens
gccatggatggccgggaacctgaatcccgttctgcttccagaagtggaagtgctcacggatcggggaaatctgcaaggcata

SEQ ID NO: 743195 - DNA, 75 bp, Homo sapiens
tggcaaaccagatatatgacttggctggaggcaaagctggaaaggacagtgggaaggccaaggctaaggcagtat

SEQ ID NO: 743196 - DNA, 82 bp, Homo sapiens
gctgaactccctgctgatcctgctggaggcggccgagtacctggagcgcagggatcgagacaatgcagatcttcgtgaagac

SEQ ID NO: 743197 - DNA, 97 bp, Homo sapiens
gcttggcagcagaaggatttggcaacagactttgtttcttggagtccacttccaattccaagaaagcggcagcccagaatctcgtgttaatgcgatc

SEQ ID NO: 743198 - DNA, 82 bp, Homo sapiens
cgacgagcaagcagcgggtcctggacgaggaagagtatatcgagaacaatgcccagcgccttggggtctcccagtctactca

SEQ ID NO: 743199 - DNA, 51 bp, Homo sapiens
aggactggaaatggaaggatgggagtatcctgtggagcacccagacaaatt

SEQ ID NO: 743200 - DNA, 100 bp, Homo sapiens
cggacggatggacagacgctggggaccctccactccatatggaaagctgacagcgtttgtcacaaaatgctttggccaagctcagaaattcatcttcatt

SEQ ID NO: 743201 - DNA, 98 bp, Homo sapiens
ttaaataccctcaagaggagcaacctcgtcagcagcgaggaaggaaacagcgggaagaagatttcttagttgtctcttcaactggaatatcaacttca

SEQ ID NO: 743202 - DNA, 101 bp, Homo sapiens
tctgcctgacttggaccctggaaaacctggccctcttcaatttctgacaaaaggctcatgcacaattagttcgagaagttgatgtggagaaggtgtctgct

SEQ ID NO: 743203 - DNA, 75 bp, Homo sapiens
ctgtgagctgggagaaagcggggcccgaggaggccaaggcgccagtgagaggcgttgtgaatgggagagttcaca

SEQ ID NO: 743204 - DNA, 75 bp, Homo sapiens
ccgaagctaagagcccccttcagtcgcagcctcactctaggtggacacgcatcccaactgaacacctgctccggg

SEQ ID NO: 743205 - DNA, 100 bp, Homo sapiens
tgctccagctgttcgaaggtgatccagaggcatggctattgcaccttgggagaagcctttaatcggttagacttctcaagtgcaattcaagatatccgaa

SEQ ID NO: 743206 - DNA, 75 bp, Homo sapiens
tactgacgaagcttggaagttgcagaaggacatgaagaatgcaaccctctccctgaattctaatgacagtgagcc

SEQ ID NO: 743207 - DNA, 75 bp, Homo sapiens
ccctggagaagctcaaaggcaaagacctggagtggaagatcatttatgttggctcggctgagagtgaggaatttg

SEQ ID NO: 743208 - DNA, 90 bp, Homo sapiens
gaaaacctcaccaaggaccagcaactgcagtttctgcagcaaaccatgcaaggcatgcagcaggagctgactaaggctttggaacagaaa

SEQ ID NO: 743209 - DNA, 100 bp, Homo sapiens
caactccaaccctgctacctcgcccgggggcatcaggtttttctcccgctccagaaaaagttattcagcttctcaaggctggaaaagcgaaggaagtttc

SEQ ID NO: 743210 - DNA, 75 bp, Homo sapiens
agcggagcacgatgattgataggtcaccggattgaaactgtctcaggaccttgatgatcttgccattctctacct

SEQ ID NO: 743211 - DNA, 83 bp, Homo sapiens
tccgagtgctcccactggccccctgggaccccctggtcatggccaaaccctggactatgttaggtcttaatggtgggaggacg

SEQ ID NO: 743212 - DNA, 128 bp, Homo sapiens
tgagtgtctgtccccagagcctcagtttgtgcaggacaccgacatggaacagggactcactggggccctaccacttatgtcttggatgaagatgaacctcgattccttgaagaagttgattacagtgc

SEQ ID NO: 743213 - DNA, 82 bp, Homo sapiens
ccagagtcacacacggtcctaagagctgggcaccaggaagcgaaggctggtgaccatggaggaagaagatgagtctcgaggg

SEQ ID NO: 743214 - DNA, 99 bp, Homo sapiens
ggcaaatgaggaacagggcaatagtatgatgggaggtggggaagacagggctccagctaccacaggacgggctctgggtatagccgttccagtcaggga

SEQ ID NO: 743215 - DNA, 89 bp, Homo sapiens
cccagaaaggattgtgacatatcgttggacccagaattgagctccagtgatccacaagctcagaaatacatcgcggaaagtaaatgttt

SEQ ID NO: 743216 - DNA, 88 bp, Homo sapiens
ggggcgaagaggacgagggggccaaggcttcctccgggctgaactagatgcagagcacgcccagaaggtcctggaaatggagcacacc

SEQ ID NO: 743217 - DNA, 100 bp, Homo sapiens
cggccgcctctcggtgatgggctgcgatgtactcaaaggtcgcgtggggcaggcagtggcgctgcgggccaaggccttcggcttcaacgtgctcttctac

SEQ ID NO: 743218 - DNA, 73 bp, Homo sapiens
atctgcgtgtgcggggtgcgtgggtgcctggagatgaagctggaaaggtcgccatgggctactcacactcctt

SEQ ID NO: 743219 - DNA, 71 bp, Homo sapiens
ctgcgtgccaggccttggagaacagcacgtccccgctgagtgatcttagcaaagcaatgtctcaagatggt

SEQ ID NO: 743220 - DNA, 98 bp, Homo sapiens
ggcctgggcctgagcatcgttgggaaacgatacccagaaagcggtactctagaaatgaatgtcaaggatcttagaccacgagctagaaccattttgaa

SEQ ID NO: 743221 - DNA, 83 bp, Homo sapiens
caactgcccagcgtgaccagtggccacctctgcagtgtcttccacaacctgggatatgggccctcacattttccaaacctgtc

SEQ ID NO: 743222 - DNA, 90 bp, Homo sapiens
ctatgtagacagccacaaatgggaagcaagagaaaaagaacattactgtcttggcagcctgcttctgcaaagtggtacgatcgaagggac

SEQ ID NO: 743223 - DNA, 99 bp, Homo sapiens
ggaaatatgtgtctcagtattatcctaagcttagagtggacatcagattgatgatggtctccagctgtcaaagaagattgtggttgccaagagaaaggt

SEQ ID NO: 743224 - DNA, 90 bp, Homo sapiens
ggccgagggctgctcggccgccgcagcctcgccgcgctgggagccgcctgcgcccgccgaggcctcggaggaggaaggtgaggacggcga

SEQ ID NO: 743225 - DNA, 82 bp, Homo sapiens
caccggcaagaccaccttcatcagcaaaatgatgcttcaacacccaggccaggtctctgcctcggaagtgagtgcttctgcc

SEQ ID NO: 743226 - DNA, 101 bp, Homo sapiens
aaaacagagcttcctgctgctattgcagaatttttgactggagactatagtagatgagctcacagtgcctgcactttaccccagtagccctgaagtgtggg

SEQ ID NO: 743227 - DNA, 100 bp, Homo sapiens
cggctccccagccccaggccgggagggtttgccttcccggattgggcctacaagccagagtcgtcccctggctcaaggcagatccagctgtggcacttta

SEQ ID NO: 743228 - DNA, 75 bp, Homo sapiens
tgggtctctctgcctgaggccctggagggagagaaggccaagtcctgtatctgccatgtctgtggcgtccacctc

SEQ ID NO: 743229 - DNA, 75 bp, Homo sapiens
gtcacctggaaaataatatgtacacaatgagccattattatcttcttaatgaagaggataactcagaatcatcgg

SEQ ID NO: 743230 - DNA, 104 bp, Homo sapiens
tcacacagtggcttctgctcaccaacagatgaagacagatgcaccaacgaggtgtggatgaggtcaccattgtcaacattttgaccaaccgcagcaatgcacag

SEQ ID NO: 743231 - DNA, 75 bp, Homo sapiens
ctttctcccatcgaaccttctagttgcttattgcagggctcattgtcatccccaagccaggccagttctccaggt

SEQ ID NO: 743232 - DNA, 83 bp, Homo sapiens
tcctgaagatgatgctgccattaccttggaatggaagttggatacactttgtgacttgtacgagacactgaccattacacagg

SEQ ID NO: 743233 - DNA, 106 bp, Homo sapiens
ccttctcacaatgaggctccctgctcagctcctggggctgctaatgctctgggtctctgaactcccccactggaaaggattctgaaagaaatgaagtcagccctca

SEQ ID NO: 743234 - DNA, 75 bp, Homo sapiens
ggatctgaagagctatggtgaaacaccactgaagcattgccaagagtacaggggctcaggtccaggtggcagggg

SEQ ID NO: 743235 - DNA, 100 bp, Homo sapiens
aacccctgaagggatcaccagagggcatgtcagagacctttgagacattacacaacctggtacacaaaggggtcaaggtggtgatggacatcccctatga

SEQ ID NO: 743236 - DNA, 75 bp, Homo sapiens
gcacgacgagtactggcatgcgcacgtggacaaggtgaagatcccggatctgttttgtggcctagagattgtccc

SEQ ID NO: 743237 - DNA, 100 bp, Homo sapiens
cgctaagaggagaccaagaggcgggggctgcacttgacaaccagcatgccgagatgggaaatcctcattgacgattcaatttgttgaaggccaatttgtg

SEQ ID NO: 743238 - DNA, 82 bp, Homo sapiens
ataaatgcagataaggatggagatggaagaatatcctttgaagaattctgtgctgtttccaagctagactcagtcgccttca

SEQ ID NO: 743239 - DNA, 100 bp, Homo sapiens
gtcagggatatgaggaaggcctggtggatgaggccatggagatgttccagttctccgagagccagatgggactgtttagttgcaggagaacaagctcagg

SEQ ID NO: 743240 - DNA, 98 bp, Homo sapiens
ccagcaggaaggtctcacctgaggtgaaccttcgaccttggacttctcagcctccagaatgtgtccaggaggagcatttacacccaatatgcgaacca

SEQ ID NO: 743241 - DNA, 90 bp, Homo sapiens
ctatgtcaactgcttctcaggtagcaagtacatggggaggtacaggtttgcagattccgccagcagcacagcaagctctacagatgagtg

SEQ ID NO: 743242 - DNA, 87 bp, Homo sapiens
aaggaaaaatcgagcagaaagaatgtctttcagggagatgcagttaaagacttgatgcttcgctttctgggtgaaaaagctgcagca

SEQ ID NO: 743243 - DNA, 50 bp, Homo sapiens
atagataccgaattcttatcacaaaggacacattcagctaacgtatttta

SEQ ID NO: 743244 - DNA, 75 bp, Homo sapiens
ggaaattggtacccctataatgggcagtgtctaccagatattgccctattacttatgcctgggaaggtggaaaat

SEQ ID NO: 743245 - DNA, 50 bp, Homo sapiens
tcctttggaaatgtgctcacactgaaataatgaagatgtttcattttcaa

SEQ ID NO: 743246 - DNA, 83 bp, Homo sapiens
ggagaaactcgctcgccttcagaagacaggcattcccatcaagagcaccatggacaaccccaccaccacccagtatgccagcc

SEQ ID NO: 743247 - DNA, 74 bp, Homo sapiens
atctggcgatgacctacaaacagaggttgcagatattttattccaaactgcccaaaatgcaggcatcagttttg

SEQ ID NO: 743248 - DNA, 83 bp, Homo sapiens
acgccaggacccactggaagcctagaaatggttaatgttcgtgaagaaattgaagagttttttccaagaatgtggaagataaa

SEQ ID NO: 743249 - DNA, 101 bp, Homo sapiens
tgatttccctcccggggcccctggtgaccaacttgctgcggtttttgttcctggggctgagtgccctcgaattggggggttctatgctctttccccatacc

SEQ ID NO: 743250 - DNA, 117 bp, Homo sapiens
gatctcctgtgctgcgaccactgcccggctgccttccacctccagtgctgtgggcatccccaccatcagatggtgcggggcagagggggactacaacgtcatggtgatggagctgct

SEQ ID NO: 743251 - DNA, 75 bp, Homo sapiens
gagagctctggggtcgacacggaggttgtggctcactggattgctgaaagccgcattgccattgagaagatccgc

SEQ ID NO: 743252 - DNA, 83 bp, Homo sapiens
agaggacccggcgggcggcctcgcgggtcagacaatgcagatcttcgtgaagactctgactggtaagaccatcaccctcgagg

SEQ ID NO: 743253 - DNA, 90 bp, Homo sapiens
gatagctcctccaagaagacaaagtctagttcagaggagagtagatccgagatatatgctgctgtgacttactcgaagcctcgattggcc

SEQ ID NO: 743254 - DNA, 90 bp, Homo sapiens
ggatgatgccaaagttttattaggggaagaacacccacccgcaaagccccgtagggctggaccctacgttagcctgccctgctcggggtt

SEQ ID NO: 743255 - DNA, 100 bp, Homo sapiens
agcgcttggggatggatgccctggttgctgaagaggaggcggaagccaaggcatgttatttgaaagcaattgagacgcaaccgaactttgcagtagcttg

SEQ ID NO: 743256 - DNA, 80 bp, Homo sapiens
acgcaaaccaaggatctggggatcttcgcactatcccaagcagttggaattgatcacaccttttcagttgtacttcaatc

SEQ ID NO: 743257 - DNA, 82 bp, Homo sapiens
gagagcatccccaaggactcgctccggatggccatcatggtgcaggtcaaaatgcagatcttcgtgaaaacccttaccggca

SEQ ID NO: 743258 - DNA, 101 bp, Homo sapiens
ggcatcatggactgtgcgcccaagggtccagattttggctatgtaactcgagggccccaaacagggggtatcagtggactggactcctttgggaacctgga

SEQ ID NO: 743259 - DNA, 100 bp, Homo sapiens
ttcatccgagacagcctggagaagagcgaccagctcactaagaacatggagaccctcctgttcttaactgtgggcgatgagaaaggtggtggactcttct

SEQ ID NO: 743260 - DNA, 60 bp, Homo sapiens
ggcttatgaaagtgtgatgttcgcgtatttcttgacagcggtcacctttgtcccggtgtc

SEQ ID NO: 743261 - DNA, 100 bp, Homo sapiens
aaggacagagtcagtgatttccataaattgaagcaaaggtacaggcatccttcacctgctattgttgcaagaacagtcagaattttacatacactactaa

SEQ ID NO: 743262 - DNA, 100 bp, Homo sapiens
caattacttacctggcccaggaggatgggcccgttgtggccaaacgtaccaagaaagtcgggatcgtcggtaaatacgggacccgctatggggcctccct

SEQ ID NO: 743263 - DNA, 50 bp, Homo sapiens
cgcccccgggagcgggcgcccagagacctgatggccaaaagaaaggaaga

SEQ ID NO: 743264 - DNA, 100 bp, Homo sapiens
cgggcactgttgctgctgcgggagttttgatgaagcaagaacacagagaagagattgatttgtcttcagttccatctttgcctgtgcctcatcctgctca

SEQ ID NO: 743265 - DNA, 100 bp, Homo sapiens
ctccaccggggctgacggactgacggccagcacagccggctccgggatgagcgcacggacggggttcaggataagtttgaggtgctgaattacacaagca

SEQ ID NO: 743266 - DNA, 100 bp, Homo sapiens
ccctgatgggcagtcaacagctaaaaccttcctcaccgtgtactatgggtttcagcccagcagaagcattatctttgccagttggagtgctggagacttt

SEQ ID NO: 743267 - DNA, 100 bp, Homo sapiens
gacccatctttatgcaaagccagcgttacagtaatgttccagacataaccagtgcggtgcaatccaagcgaagaaaatccaagtaaacaagcaggactgc

SEQ ID NO: 743268 - DNA, 75 bp, Homo sapiens
gtttgccgtggtttttatcaccacacgactgggtatatttcctctctgcggaagatccatccaaaagctatgtga

SEQ ID NO: 743269 - DNA, 98 bp, Homo sapiens
cgagaagcctgaaaagtcgcagcgagctggagccgccggagttttgagtatccgaggagcccaggaggaggaacccacagacccccagctgatgcggc

SEQ ID NO: 743270 - DNA, 83 bp, Homo sapiens
gagcgagctgagtggttgtgtggtcgcgtctcggaaaccggtagcgcttgcagcatgaatatcatcacccttgcagaaactgg

SEQ ID NO: 743271 - DNA, 98 bp, Homo sapiens
actcgtctgccaccatcccattggatgaccccactttgctctttgccaatgcaggcatgaaccagtctctgttggatgaacccaatcccaatagtcca

SEQ ID NO: 743272 - DNA, 82 bp, Homo sapiens
ggcgacctgacgctactatgggccgagtggcagggacgacgcccaggcgtgcaatggaattgagttttgccctggtaaatgg

SEQ ID NO: 743273 - DNA, 100 bp, Homo sapiens
ttctgccatcattgtggcgcagtgggaccggtttgccactcctaagcaccggcagacaagagcagactgctagatttggttgttcagcctgtcccccggc

SEQ ID NO: 743274 - DNA, 83 bp, Homo sapiens
cggcggggctgaggcggccgcggggcccgagcgcaggagtattttatacagaaatcttgtgaaaccactgcccaaccagagca

SEQ ID NO: 743275 - DNA, 98 bp, Homo sapiens
gggaggtggaacgggccgaactgcagctagatgaggaagaggagcgaaggaaaaggcgccgggagaagaacaaagtcgcagcagcccgatgccggaac

SEQ ID NO: 743276 - DNA, 132 bp, Homo sapiens
caaaaaaattcctggaaaaagaagtccaagaagcaaaaaagggactgctaagaagataccaccaggtactaggttttgacaagcttgcatcatgcgtgagtataagctagtcgttcttggctcaggaggcgt

SEQ ID NO: 743277 - DNA, 75 bp, Homo sapiens
cgaggagtgcgtcaaggactccccgcgcttcagctctaagcgaaagacatgaggcctcagcctgaaatgaggttg

SEQ ID NO: 743278 - DNA, 97 bp, Homo sapiens
taacggcgagcgcgtggggccaagaaaggctccaaccaggaatggagacgccattggatgttttgtccagggcagcatctctggtgcatgctgatga

SEQ ID NO: 743279 - DNA, 100 bp, Homo sapiens
aaaagagcttgttaatgatgatgagagtcctgatagttctggtgctgacatctcagagtacaggttggaatggggagaagatgaagaatccttagaactc

SEQ ID NO: 743280 - DNA, 75 bp, Homo sapiens
gcaccggtccgtactccagcgagcttcggaaccaaaaagaagcttcccagagccggggccaggagccccaagcgc

SEQ ID NO: 743281 - DNA, 83 bp, Homo sapiens
tacttcctacacagacattgctgacctcatggatgctgggaacaaagccagaacattactactggatggaaatccattccgag

SEQ ID NO: 743282 - DNA, 96 bp, Homo sapiens
atccggagcggagctgcagcagcgccgccttttgtgctgcggccgcggagcccccgagactcctttctacgaaaccgttcaagttctgaccatgaa

SEQ ID NO: 743283 - DNA, 88 bp, Homo sapiens
atcgccggtgtgccttgaatgaagatttgcagctcaccttgtgaagatgaaatatccaagaatctgtattctagatggtggcattaat

SEQ ID NO: 743284 - DNA, 83 bp, Homo sapiens
gaaatgtttggatatatgaaattacatccagaggattttcctgaagaaggagatacaactcgtcaacgaatcaaattcagtga

SEQ ID NO: 743285 - DNA, 100 bp, Homo sapiens
cgccgaggcaccgaggcactcagaggaggaagatgatccctatgatcttgaagatgtttctgcacagaaatgagggaaatacaaagaaccaaatacagtt

SEQ ID NO: 743286 - DNA, 83 bp, Homo sapiens
ctctgatgtcaccgcgcggctgcgacggcccaggagcgcgtctcggcgggagcctcaggaaggaagcagccaccctcgccatg

SEQ ID NO: 743287 - DNA, 100 bp, Homo sapiens
agctgctgcttgtgctgccatgtccgcaccggcaccatcctgctcggcgtctggtatctgacaatgcagatcttcgtgaagactctgactggtaagacca

SEQ ID NO: 743288 - DNA, 100 bp, Homo sapiens
cagatgccagcgtagctgaatccagtaccaaaaacgtcaacaacagttttacggtggttgtgtcaaaccgattggtgacatctccatgctgtattgtcac

SEQ ID NO: 743289 - DNA, 90 bp, Homo sapiens
attgtctttctggtggactgtgcagatcattctcgcctcgtggaatccaaagttgagcttaatgaggaagaacgtgcaaaacgtgaggag

SEQ ID NO: 743290 - DNA, 89 bp, Homo sapiens
tgagggcacgtgtttgcggttcagccctttgatgaccgcagcagaaggacagaataacgggctcccagattcacaagccccaccaagag

SEQ ID NO: 743291 - DNA, 99 bp, Homo sapiens
atttcaagcgactgacatgtgagatctccacaaggggtacatcagatgaatttaagtgccccattaaggaagagattgctctgaccagcggtgaatggg

SEQ ID NO: 743292 - DNA, 100 bp, Homo sapiens
cggctcaagagtttagccttgcgactggcccagtatccaggtcgaggttctgcagaaggttgtgactttagtatacaatgcggtggtgctagaatttgtt

SEQ ID NO: 743293 - DNA, 90 bp, Homo sapiens
ggaccgggaccgggatcgtgaccgtggagggttttgtagtgcatccctgagcatgagcacagaatgaagcggcgtttggatgaccaggag

SEQ ID NO: 743294 - DNA, 148 bp, Homo sapiens
caaacagcactgccaaatagcagaagaataccatgaggtcaaaaaggaaatcaccctgcttgagcaaaggaagtaaacactacacgtgaagagtggtgaaagggaacattgattactgaagtgccctggagagggaaagcactggtca

SEQ ID NO: 743295 - DNA, 100 bp, Homo sapiens
aattttatgaagaaaatgggtttctagtaatcaaaaatcttgtacctgatgccgatattcaacgctttcgtcagaaaaagtggacagggcagtgctgaag

SEQ ID NO: 743296 - DNA, 75 bp, Homo sapiens
ctcggtcgcgagtatctccgtttcctggatgtgaacactctgatgccagtatggactggagatgatgggagccag

SEQ ID NO: 743297 - DNA, 98 bp, Homo sapiens
ccatgggtggtctgggctcagggtatggaaccggccttctttcagccaacagacattcactcatgcatttttttgagataactgatgaccaattcgac

SEQ ID NO: 743298 - DNA, 100 bp, Homo sapiens
agaggacagaggctatatgaaaagaaatctgaaatagagtactatgctatgttggctaaaactggtgtccatcactacagtggcaataatattgaactgg

SEQ ID NO: 743299 - DNA, 100 bp, Homo sapiens
ggaaggagctggagacggtcgtagctgcggtcgcgccgagaaagaatattccaacccgggaccggctagagggcatggcagccttcagggagaagcggac

SEQ ID NO: 743300 - DNA, 90 bp, Homo sapiens
caccaccacagccgcccacttctggaaggttccatcccctgcagtggcacctatcactctcgagatgagagtacagacagtggactaagc

SEQ ID NO: 743301 - DNA, 100 bp, Homo sapiens
gaatcacgttattgaagacatcaagggaaaatggggtgaggaagattttgaagacaatcgtcacttatacaggtcccgcagcccccggaagccaatagac

SEQ ID NO: 743302 - DNA, 75 bp, Homo sapiens
gcagctccgcctcctccgccgcgcagggatccttccatgaagactgaggcaggcggagctgctaagagcctgctg

SEQ ID NO: 743303 - DNA, 75 bp, Homo sapiens
gccacatactatccgtttgttcaggaaccaccagtgacagacactctggcccccagaagcttctccacattgccc

SEQ ID NO: 743304 - DNA, 74 bp, Homo sapiens
acagtgggggtgtgcaaacccgagagaactggttaatgtgttaagagccattgacatttgaagatcatcagaag

SEQ ID NO: 743305 - DNA, 99 bp, Homo sapiens
tgtggggcctccgcgccgcggccgttagtcatgtcgggtatgaaagtatcatcgccactctgtgtgagaacttagactcgctggatgagccagatgctc

SEQ ID NO: 743306 - DNA, 90 bp, Homo sapiens
atttctctagctattgccttattttttctcatggatgttcttcttcgagtatttgtagaaggctactcccgagcccggagaggacccacg

SEQ ID NO: 743307 - DNA, 75 bp, Homo sapiens
cccaggtgtaagcgcagaaagcaggcgaacccgcggcgcaataacgctacaccaaaattgcattgagccaaactt

SEQ ID NO: 743308 - DNA, 115 bp, Homo sapiens
agctaagtccccagattggaggaggctggctctggtcttcgatgcacaggagtggccgttatggaacgcagttggtagctggcagtgttgtgatggcttttgaagaagtatgccc

SEQ ID NO: 743309 - DNA, 82 bp, Homo sapiens
caagctaccgttggccaagacagtttcaaaatggaaacgtatgcttgagaaataatcctctttatcatgctggagcagttgc

SEQ ID NO: 743310 - DNA, 90 bp, Homo sapiens
aaaggattttaggagagtggaaaatgcttatcacatggaagcagaggttgatgaaaagcccagaaccttgatgacagattgtctggttat

SEQ ID NO: 743311 - DNA, 98 bp, Homo sapiens
gacaagcacacactatggcgctgaaacggattaataagttgtcatggatgcactggtagaagatgatatctgtattctgaatcatgaaaaagcccata

SEQ ID NO: 743312 - DNA, 51 bp, Homo sapiens
ggcagcatgatggtctgagatggcccacctgtagatccagatgaagactct

SEQ ID NO: 743313 - DNA, 50 bp, Homo sapiens
cctctaggaagcgctagacacatgtcaccggattgaaactgtctcaggac

SEQ ID NO: 743314 - DNA, 95 bp, Homo sapiens
gaaggaacgaggcaaggagctaaagcagcgtgcgttcagccctggggtgctggcaaaaccccgactctgggtggcggcttccacgtgaatctggg

SEQ ID NO: 743315 - DNA, 51 bp, Homo sapiens
aacgattttgaaatgctaaatcccctcacaaatactatattggatttcggt

SEQ ID NO: 743316 - DNA, 114 bp, Homo sapiens
aggtggacacgcccatccttggacttcctgaaaatgacccaggtgccctacgagacgctgaacaaacgctttcgcgccgctcagaagaacattgaccgggagaccagccacgtc

SEQ ID NO: 743317 - DNA, 85 bp, Homo sapiens
agacatccttacttttatgccccggaactccttttctttgctaaaaggtatagggcgcggcacggtccaggcgctgcacgcgacg

SEQ ID NO: 743318 - DNA, 94 bp, Homo sapiens
tgatgacagaccgacttaagttcggattcggcttccaccgcttcttagtgatgatgataattccgaagaaggcttccacactattcattcagga

SEQ ID NO: 743319 - DNA, 75 bp, Homo sapiens
ccaagctcatggcctgccactgcgtgcgtaggatccatgccaaaagagcttctgggggaaagctcatcttctatg

SEQ ID NO: 743320 - DNA, 90 bp, Homo sapiens
aagtcatttagcgctatggaagatgaccagaggactagacctgaagtttcaaagacagagtttcactcctgttacccaggctggaggaca

SEQ ID NO: 743321 - DNA, 75 bp, Homo sapiens
caggatgactactgtgtcaaatgtgaatttggacattggctctggacatgacacatgtggagaaacatcttcaga

SEQ ID NO: 743322 - DNA, 100 bp, Homo sapiens
ttatattcctccaatggcacagccaggactgccaccagtaccaggagcaccaggaatgcctccaggcctgagacctgggaggaagctggagaaaagatgc

SEQ ID NO: 743323 - DNA, 100 bp, Homo sapiens
cagccggttcaccagcctggacaaaggagagaatgggactctcaggcatgaattgctggaggaagcccggagacaaggtttaccttttgcccaatgggac

SEQ ID NO: 743324 - DNA, 106 bp, Homo sapiens
tcagtgttaaaggaacctctacaacgaaggtgaagccacggaagataagggatgtttcagcagcccctgagaaggaagaggaggaagctgagggcccgctgagggc

SEQ ID NO: 743325 - DNA, 100 bp, Homo sapiens
gcaatgttcaaagtactcaagatgaatttgaggtgcccctgggcgctgggattgctctagcctgtaagtataatggaaaagatgaggtctgcctgacttt

SEQ ID NO: 743326 - DNA, 88 bp, Homo sapiens
ggaatggtgcaggcaggcgctgagaaggacgcgcagtccatctctctcagacccaacatgagtgaagtttcctgcaagaaacgggacg

SEQ ID NO: 743327 - DNA, 75 bp, Homo sapiens
ctttctgccatttttaacaaaccctaatacaggagatatgtatactccagtaataaaagactagtggccttagtg

SEQ ID NO: 743328 - DNA, 96 bp, Homo sapiens
aaagaaactggagccaccatcaagctgtctaagtccaaagatttttacccagatgtcatccgtgggtctttaagcctcaccaacctttcgtcttcc

SEQ ID NO: 743329 - DNA, 96 bp, Homo sapiens
attgaggtgtcggttcgtgctgctgagctgcccaggcttcacggagcgactccaagaatgaaaaggctctgggccgcaaaataaactcctgggaat

SEQ ID NO: 743330 - DNA, 82 bp, Homo sapiens
aggagtctcagtcagcaccagtccagaaaaatgactcagttgtttctgtggggagaaaacaacttacggccaaggaaaaaag

SEQ ID NO: 743331 - DNA, 90 bp, Homo sapiens
ccaccccttccacgtcatccgcatcaacaagatgttgtcctgtgctggggctgacaggaagtggccatgcgcaagctggtgcgctcagtg

SEQ ID NO: 743332 - DNA, 82 bp, Homo sapiens
ttgctttctgtggtactatagagttagaatatcaacttgcaaggccttctgatgcaaacagaaaggaaatgttgtttggaag

SEQ ID NO: 743333 - DNA, 83 bp, Homo sapiens
cagaaattctggaacacctatatggttcgtgctggccgtgggcagcgccgtctttgatgccatgttcaacgggggaatggcca

SEQ ID NO: 743334 - DNA, 80 bp, Homo sapiens
ccacatagcagttctggcttcctcgattctgcatgatcatggggttgacagcagcattttccagaatcctaaaaagcttc

SEQ ID NO: 743335 - DNA, 75 bp, Homo sapiens
gtacaagatttaaaaagcatcgtagagctgtgcggtcagagaagaaacgccttaggaagccaagcaagtggcttt

SEQ ID NO: 743336 - DNA, 50 bp, Homo sapiens
cagcttttcgaggagcttggaaagtgctggagaatctggtaaaagcacca

SEQ ID NO: 743337 - DNA, 74 bp, Homo sapiens
agacatccctgaatcttggtgtttggacataggagacaatgcagatcttcgtgaagactctgactggtaagacc

SEQ ID NO: 743338 - DNA, 100 bp, Homo sapiens
ctggtgaccagtggagtgtacgcttggtttcggcatccttcttacgtcgggtggttttactggagtattggaactcagttcaaaagaatgctgaaccggg

SEQ ID NO: 743339 - DNA, 100 bp, Homo sapiens
cttatgtagtggtctccagcctcatcagctgctggttttctcccagacacttcgtgtatgatcatgtgttcgctgagaagatcacttccttgcaaggtca

SEQ ID NO: 743340 - DNA, 75 bp, Homo sapiens
cgggctggagccggacgagctgtcgggcatcaagcatgatggaaccatgtgtgatacctgccgccagcaaccaat

SEQ ID NO: 743341 - DNA, 75 bp, Homo sapiens
aactccaacacgatcccggggctcaagtggcttaacaagctgtttgtttattccaaccctgtccacagttatggg

SEQ ID NO: 743342 - DNA, 74 bp, Homo sapiens
agcagcagatgagagtgcaccccagagggttctattgcccacacaaaaagatatgatgatgcctatagatttgg

SEQ ID NO: 743343 - DNA, 75 bp, Homo sapiens
gacaggttaagggactcccaggaatatcagatcctttcccggagttcagttatgggtgtgagaggtttgcaagga

SEQ ID NO: 743344 - DNA, 82 bp, Homo sapiens
ctgggctcgagcctgcacatgaagaatgtttctccatcccagagagatgaagtaattcaatggctggccaaactcaagtacc

SEQ ID NO: 743345 - DNA, 50 bp, Homo sapiens
cagggctactgttttccaatcctcagatgggtgagtcaagtgaagacata

SEQ ID NO: 743346 - DNA, 75 bp, Homo sapiens
ttgtaatgtgtttaacaaagccacgaataacctataatggactggaatgtcacgtggaataccagcaaccccgac

SEQ ID NO: 743347 - DNA, 51 bp, Homo sapiens
aaaattctgaactcaggacttggcaagattcgctaaatattgtaatggatc

SEQ ID NO: 743348 - DNA, 75 bp, Homo sapiens
gcggcggggaggcgcggcccgggaacgcgggatcctggggagtctctgctttctatccgtcaagatgataaagtc

SEQ ID NO: 743349 - DNA, 50 bp, Homo sapiens
ctctgagcgctcagactcagaccaagaggctgggaggcggcagaatgcag

SEQ ID NO: 743350 - DNA, 50 bp, Homo sapiens
tctccaccttttggtgattatgcacagataaacaatcagattctgtatgg

SEQ ID NO: 743351 - DNA, 110 bp, Homo sapiens
aattcactgtcaagaaaactcagcaagtttggatccatacgttataagcaccgctacagaataagacaggcttcatctcagcctagaagggaatatcaacctaaaccacg

SEQ ID NO: 743352 - DNA, 75 bp, Homo sapiens
ttgccgcttctttcacttcaggaggcctgcactgcccaaagtcttggaaacttgctggatatgatgtaccgggag

SEQ ID NO: 743353 - DNA, 83 bp, Homo sapiens
cactccctttcctctgctgccgctcggtcacgcttggaactgtggctgcaccatctgtcttcatcttcccgccatctgatgag

SEQ ID NO: 743354 - DNA, 98 bp, Homo sapiens
gtaccaagaaggggagtgcccgcggcaggtctcagccttagatccaaggacagtccaaggaagtcctaagaccatggagttggtgatctgggatctgg

SEQ ID NO: 743355 - DNA, 75 bp, Homo sapiens
agcctttcacttattcatctgtccagcatgactcatccccgggagtgttgacttcaaggttactgactttttatg

SEQ ID NO: 743356 - DNA, 95 bp, Homo sapiens
tggtggtctactctgatgtcaatcttgagggctagaattatatccagatcgagagacagaagattctgaaagggttcaatgaaatgagagtcatc

SEQ ID NO: 743357 - DNA, 100 bp, Homo sapiens
cacacaactccagtgctaactcaacagatgccatggacaatattaccaggcagaaccaattctacgatacccaagtcatcaaacaagaaaacgagtcagg

SEQ ID NO: 743358 - DNA, 78 bp, Homo sapiens
gccgccatgggggcctgcctgggagcctgctccctgctcagctgcattagcctgaggcctgctcagtcgttcctaatg

SEQ ID NO: 743359 - DNA, 100 bp, Homo sapiens
agaggttgatgagtcgtcgtcaccacagcaaggttcccgatatggatgatgaagaaggagaaggagaagaagatgatgatgatgatgaagaggaggaagg

SEQ ID NO: 743360 - DNA, 100 bp, Homo sapiens
ccgcgcgcacctcagccgcctcctagcggcgcggcgctcgctcctacgacaagttggatggcttgaggactggtactaaaaggaaacgtgactgggaggc

SEQ ID NO: 743361 - DNA, 89 bp, Homo sapiens
aacctatcgttagagtcttcctgcccaacaaacagaggacagtggtggcatttttctgaagttgttcattaagacttcccagcattcct

SEQ ID NO: 743362 - DNA, 75 bp, Homo sapiens
aagtccttcagcttcgactattcctactggtctcatacctcagctccccaaaaaggccacaaagacagccccacc

SEQ ID NO: 743363 - DNA, 78 bp, Homo sapiens
acacatatctagtctcatcaaactctccaaggcatgcttcggaaactggacatcaaaaacgaagacgatgtgaaatcg

SEQ ID NO: 743364 - DNA, 100 bp, Homo sapiens
ccatcattgaggaagacaagaattcctacactccctgcctcaaccatcaccaggagactaaagtccatcaaaaacatccagaaaattaccaagtctatga

SEQ ID NO: 743365 - DNA, 97 bp, Homo sapiens
agctgaaggtggaggcgccgcaagcgctgaggggatgtggagacgctggtagcggggccaggaaggctccggacggagcaggttttctggaccacag

SEQ ID NO: 743366 - DNA, 100 bp, Homo sapiens
gagaagacgatctgcacttcgcattttggcattgacatttaattttagggtcctttatatagaagggagagtagggttcattccatgatctgctccgtag

SEQ ID NO: 743367 - DNA, 80 bp, Homo sapiens
tctcggcgccgcggctcttttctaaaagtttgtaggacagtcccatctggacagcaacattgagaatcaagagattgtca

SEQ ID NO: 743368 - DNA, 101 bp, Homo sapiens
tgtttccgtcagtacgcgaaggatatcggtttcattaaggttttgatggtacagtccaggtctatgatgccacatcttgggatggaacacggagccaagat

SEQ ID NO: 743369 - DNA, 75 bp, Homo sapiens
cgtcgacggcgagcccttgggccgcgtctcctttgaggccctgggaggagcggggacactgaggacctctctcca

SEQ ID NO: 743370 - DNA, 51 bp, Homo sapiens
tccagttccaaggactccacgggtctggaagaattcaaaatgaaggaagaa

SEQ ID NO: 743371 - DNA, 115 bp, Homo sapiens
tccacaaacaggccttcgagtacatctccattgccctgcgcatcgatgaggatgagaaaggaaatggaaaggtcagtagttgcacagctgctgagggtagtttcacatctctcac

SEQ ID NO: 743372 - DNA, 50 bp, Homo sapiens
gtatttttatgtcagtgccgagcaaggaaggtgtcttgctgcaggtaact

SEQ ID NO: 743373 - DNA, 100 bp, Homo sapiens
tcctggagaatatatccctactgtgtaagaatcaggccttattggagacattcaagcaaaggttggacaactacttttccagaacagaaaggaaactcat

SEQ ID NO: 743374 - DNA, 100 bp, Homo sapiens
ctattgaagaatcttccaatgggagtctctcagtagaatttcgacatttggaatgcctgaactagatgaatacaccatggagagggtcctagaggaattt

SEQ ID NO: 743375 - DNA, 100 bp, Homo sapiens
actatcatttcttatctggatcttgaagatattgccaggctttgtcaaacatcacacagatttgcaaagctggttatattctgggcactaaatgaaggcg

SEQ ID NO: 743376 - DNA, 75 bp, Homo sapiens
gattcttggataccacagtatcataaaattcctctaaatgcaaggcaaatttctggagatgtgcaatgatctctt

SEQ ID NO: 743377 - DNA, 87 bp, Homo sapiens
tggcagcagcacggcacagcacgctcgacttcatgctcggcgccaaaggtcctccagcagcctgacctgagtgggttagtgatccag

SEQ ID NO: 743378 - DNA, 100 bp, Homo sapiens
gactttacaagaatatgaattcgaaaagcagttcaacgagaatgaagccatccaatggatgcaggaaaactgatgccttcaattaagttgcagagttctg

SEQ ID NO: 743379 - DNA, 100 bp, Homo sapiens
ctgccgcagatcgctgtagtgggcggccagagcgccggcaagagctcggtgctggagaacttcgtgggccgtccagggccaaggcttgtgttcaatcgtg

SEQ ID NO: 743380 - DNA, 100 bp, Homo sapiens
ctcggaagagcgctcccaggagaaacaaggtggaagaccaacacacacctccccagacagcccagcacgccagaaacggccacccgcaggccctgccagc

SEQ ID NO: 743381 - DNA, 75 bp, Homo sapiens
ctgtgagttagtggtggacctgtttgtgcgcacagtgctggtctgcctgacatacctgctttcaaatatcgtcat

SEQ ID NO: 743382 - DNA, 100 bp, Homo sapiens
tgctgctcttcccttacgatgactttcaggagtccttcaataatgttaaacagtggctgcaggaaatagatcgttatgccagtgaaaatgtcaacaaatt

SEQ ID NO: 743383 - DNA, 50 bp, Homo sapiens
actgtggagcctcttctgtaaccaagacttgttcagaccccaaatctaag

SEQ ID NO: 743384 - DNA, 75 bp, Homo sapiens
tcacattttgagcactactgctttaaggatttgaactcagaggatcaaaaagccttcagtgttgaacatacaagc

SEQ ID NO: 743385 - DNA, 74 bp, Homo sapiens
cgttgctggtgcgagtccttagtacccaaaggcaagtggaacagctctaatggggttgaagaaaaggagacttg

SEQ ID NO: 743386 - DNA, 99 bp, Homo sapiens
cagatcctggaggatgtgcggggtgcgccggcagaggatccagtgttcaccatcctggccccggaaggatctcacttgcttatctgaagaagattgtcc

SEQ ID NO: 743387 - DNA, 139 bp, Homo sapiens
ggtaccctcgctcctcgatcgaggacgacttcaactatggcagcagcgtggcctccgccaccgtgcacatccgaatggaaattgcaggtgctgcagtgtctgaaatttccgggcctttctcaacagaggatgtagccag

SEQ ID NO: 743388 - DNA, 88 bp, Homo sapiens
ggtaatccgctgcctgggctggaactttgacttctccattttcaataagcacggatgccagcatccctgtgcatatcaacaacatctg

SEQ ID NO: 743389 - DNA, 99 bp, Homo sapiens
ccccttcccacaggctctctccgctcgattttgtcaccgttatgtgggaagcgaatccactctgtcagctgcagagaaggatgcacacactgtggcagg

SEQ ID NO: 743390 - DNA, 83 bp, Homo sapiens
gacagagccaggatttgaaaccagtctgatcatcggatatcatggagtctggcaagacggcttctcccaagagcatgccgaaa

SEQ ID NO: 743391 - DNA, 101 bp, Homo sapiens
ttccagtccatgatgacaggagggaaacactactatgaagtatcctgtcatgaccaagggttatgcagggtcgggtggtctaccatgcaggcctctttgga

SEQ ID NO: 743392 - DNA, 101 bp, Homo sapiens
cctgtggactgcagcctcggcggtcagcaggtgatcctgaaggacctggaggtgctggcagaaatcgcttcctcccccgcaggccagacggatgacccagg

SEQ ID NO: 743393 - DNA, 96 bp, Homo sapiens
tgtacgtggttttacaagggggacaaagacaataagtatgttccctactcggagagcttcagccaagttttagagttgcatttgctggtctggcct

SEQ ID NO: 743394 - DNA, 75 bp, Homo sapiens
cacgccttctacagactgcagccactgcggcccagtgttctacgcagaaatagaagagctgaaactggtgtatcc

SEQ ID NO: 743395 - DNA, 100 bp, Homo sapiens
cagttgctgttcgaaagcatcttgagaggaacagaaaggagacggcatgatacccatgtagggaattccccaaagcagggcttgccatacctggaccccg

SEQ ID NO: 743396 - DNA, 78 bp, Homo sapiens
tttatgaccatattaatgcagatgaggcgttctttgacagccgctcaggaagcaatcttgcatgcgtctggaaatggc

SEQ ID NO: 743397 - DNA, 90 bp, Homo sapiens
agaacagactgtcacagtggaggaaggcaagattgtggcagagcgtcctggcactaactcaacaggccctgcacccatggcccctccaag

SEQ ID NO: 743398 - DNA, 90 bp, Homo sapiens
cgggaaccaggtggccacccggtgtcgtacagctttatggcggtcatccactttgcggggctcaaggccgtgggcgagtcggtgcagaag

SEQ ID NO: 743399 - DNA, 100 bp, Homo sapiens
agtaacaacaaacttggatcattaccagaagagataggtcagctcaaacagttaatggagctggccaaagaactgccaactctgaaagataatgatttca

SEQ ID NO: 743400 - DNA, 74 bp, Homo sapiens
tgggtcgaggcggacgcgcggctgcgtcaggaagagagaagggcacagttacctaagtatcaacgtaatcttcc

SEQ ID NO: 743401 - DNA, 100 bp, Homo sapiens
caccgcaatgcaaatacctgcttgcaaaatgttgtgttgatctcagcaagaatttccattcaggaaatgccagctgcaggacgtggtcactcagcccgaa

SEQ ID NO: 743402 - DNA, 88 bp, Homo sapiens
gctctggaattttggcatcaaggacaaacccaccttcatcaaaggggagtacgaccccagcaaagcgacctttgtgaaggtggtgcca

SEQ ID NO: 743403 - DNA, 75 bp, Homo sapiens
gccactccagaaatccaggagattgttgataaggtgtttaatgaacgctgccgaattcacttcaagcctccaaag

SEQ ID NO: 743404 - DNA, 100 bp, Homo sapiens
agcatctcaatcttttggaagaagactattttggtctagccatttgggataacgcaacctctaaggttaaatggaagctgatcggcgttcacatggaatc

SEQ ID NO: 743405 - DNA, 101 bp, Homo sapiens
aggtgtggcaggtgctgaagacccaccccggagacccccgcttccagtgcagggccaagaccagcttcaagtctccatggtaccagaaaacaacaacctca

SEQ ID NO: 743406 - DNA, 96 bp, Homo sapiens
tttgtcagagcccaacttttatgacacgataagcaagattcgtttaagacaacaactggaaatgtattccatttgaatgatatggcaaaatcatga

SEQ ID NO: 743407 - DNA, 96 bp, Homo sapiens
gggtcgaggagagaccccggggagtagagagagagaaactcactccccgagtccccgaccctccccaagcaagacccaacatgagtgaagtttcct

SEQ ID NO: 743408 - DNA, 100 bp, Homo sapiens
gcgggatgtggagcgggagggcctggactgggacctcatgcctcaggcccaggcccaaggccaagtgagagagcccaggccacaggacatgctgccattc

SEQ ID NO: 743409 - DNA, 97 bp, Homo sapiens
tggaaatattttacagatctttttgactatcttcctctcactgccttggtggatgggcagaagtctgggccaacggtcacaaaagttgtcactgttg

SEQ ID NO: 743410 - DNA, 82 bp, Homo sapiens
aggcaatgaatgatatcagacccagtgccatgagggaaatagcaattgatgtcccaaatggatctggacaactctcctctgt

SEQ ID NO: 743411 - DNA, 80 bp, Homo sapiens
gaagaggaacagttaattgaattaatagaaaaatatggtgtcgtcctcatcaccgggggcatcgtggccacagctgggcg

SEQ ID NO: 743412 - DNA, 100 bp, Homo sapiens
cagaaacacctaggaagggagaactggttttaaccacattctgccttatttctacataatttatttcaccatgttgcttgtccaccgagaagctcgtgac

SEQ ID NO: 743413 - DNA, 96 bp, Homo sapiens
gccggaagctagcatggcggccgccggggctgcggctacacacctagagtgcaaattcacctgcaccagtggtaaatgcttgtatcttggttcgct

SEQ ID NO: 743414 - DNA, 100 bp, Homo sapiens
atttaagaattaaaagatgatgagaaataaggacaaaagccaagaggaggacagttcgctacacagcaatgcatcgaggccaaatcccagcaagacaaac

SEQ ID NO: 743415 - DNA, 51 bp, Homo sapiens
cagatggcagccagtcagtggtggagatggcctgatatgaaggagtcacgc

SEQ ID NO: 743416 - DNA, 75 bp, Homo sapiens
tgtgcacctgcacacgcccccggcacctgtgtgccgtgcaggtgaagctggagctggggcaccgcgcccaggtga

SEQ ID NO: 743417 - DNA, 90 bp, Homo sapiens
agttaggacctggaaatgtacagaaagaagtctcatcttcctttgaccacgttatcaaggaggtacttccggaacctgtgctcagatgac

SEQ ID NO: 743418 - DNA, 101 bp, Homo sapiens
ccggcgctctgcgggaacggcttcgtggaagcgggcgaggagtgtgactgcggccctggccaggtcaccctcgagtcctggctgattcttttcctggcagt

SEQ ID NO: 743419 - DNA, 122 bp, Homo sapiens
tactttactggtggtaggggacaattcgcctgcagttgaggctgtggatgaatttttagatgtgatctactggttccgacagatcattgctgtggtcctgggtgtcatttggggagttttgc

SEQ ID NO: 743420 - DNA, 100 bp, Homo sapiens
aaaatctgggctaagtgctggcaagagcgatgtctactacttcagagcagcccgacggccatggaggctgaagagacgatggaatgccttcaggagttcc

SEQ ID NO: 743421 - DNA, 50 bp, Homo sapiens
tgcgtcaatcagagcgtcctgtgcgcattccttcctagtagcttctgtat

SEQ ID NO: 743422 - DNA, 50 bp, Homo sapiens
accgaatacagctgtgacctggagacaaatacaacgacttcatcgaggcc

SEQ ID NO: 743423 - DNA, 96 bp, Homo sapiens
ggagtcacaatcaaagaactggatctttatctggcttactttgtccacactccggagccaaggattgtcaccagtgaagaggtcattattcgagac

SEQ ID NO: 743424 - DNA, 80 bp, Homo sapiens
attggaagctgtacacagcaagacgttgagttacatgttcagaaggtggcagtagagaagagcatcacagaagttgctca

SEQ ID NO: 743425 - DNA, 96 bp, Homo sapiens
cggttcttgaggaagatccacgaggaggaggaagaagaacctttgcctactaaaaagtggccaactgtggatgcttcctattatggtggtcgaggg

SEQ ID NO: 743426 - DNA, 100 bp, Homo sapiens
atagagtggctcacttgcatgtatttggaacaaaaaaaggagatgcctggcagccccgctctctgcagttgagcttcagcgacagcgagagtgacaacag

SEQ ID NO: 743427 - DNA, 75 bp, Homo sapiens
agcgcgaatggcacgagctggagggagaatttcaagaactgcaggaagatgagaatgtgcctactgctcctgatc

SEQ ID NO: 743428 - DNA, 75 bp, Homo sapiens
attgaaatggacagtggagatgaagcctaagaatatgatcaggcctgtatccggtgtccgaggcgaactcagtaa

SEQ ID NO: 743429 - DNA, 82 bp, Homo sapiens
atactgacctgtaaatcatcctttagaacatacatatgatagttgagaaagacacatattctgatcatgaagaaataaacac

SEQ ID NO: 743430 - DNA, 102 bp, Homo sapiens
cttttggcaaaccatgaatcgagaatggaaaggaatagacaggctacgcctggacaaatactatatgttaactctgctgtttgctgcatgctgcatgagacc

SEQ ID NO: 743431 - DNA, 50 bp, Homo sapiens
cgaatatcgtcatcgttagaagcaattaccagctctggctgggtcgccac

SEQ ID NO: 743432 - DNA, 75 bp, Homo sapiens
cctgggtatgggctacaaagagaacggccctcagtctccgaggaggatctcaaggtcctgttttccagcaatggg

SEQ ID NO: 743433 - DNA, 90 bp, Homo sapiens
acagcggcgagcagaactacggcgagcggtgagggagataaatctgcaggacatcaaggaagatttagaattggatccagaggaaaacag

SEQ ID NO: 743434 - DNA, 75 bp, Homo sapiens
cgcggcggcaccgggaggccgggccgagcgcctgcctgctccaggctgagctggtaaactatgaacgagtcaagg

SEQ ID NO: 743435 - DNA, 78 bp, Homo sapiens
cggggcttacgacctccgcatcctggacagcgcgcccaccgtttgtcagggagccactggtgatgtggatggggcaca

SEQ ID NO: 743436 - DNA, 100 bp, Homo sapiens
tcttgtccgagaaataacatttgaaaatggagaggtgtgaaatctaagaatcccctgccaactcttgagggctcaatccagaatgttgaattgaagtact

SEQ ID NO: 743437 - DNA, 87 bp, Homo sapiens
agcttctggcggttcgggcggtcggcgaagcggccggcagaggtcatgacgccagtcagatcacactagccttgggcacagctgcct

SEQ ID NO: 743438 - DNA, 100 bp, Homo sapiens
agaaataccagtccccagtgagggtgtacaaatacccctttgaattaattatggctgtgtgcaactgaggaacatggctcaagaaactaatcacagccaa

SEQ ID NO: 743439 - DNA, 82 bp, Homo sapiens
ggaaagactgttccaaaaacagtggataattttgtggccttagctacaggagagcccaagaagatgaaaggattgttcttgt

SEQ ID NO: 743440 - DNA, 98 bp, Homo sapiens
gtttagtgccctcctgagtgactgcgtcaggcatctcaatcatgtaggagagaagtttgctgaggaatgccttcaagcacaaagtgatgaatgactgc

SEQ ID NO: 743441 - DNA, 80 bp, Homo sapiens
gagccaaggaataaacatgcaatgaacccaaaaggggattaacatctgctcgtgcagctgagatcctggcgcgagatggt

SEQ ID NO: 743442 - DNA, 90 bp, Homo sapiens
gacttcatctcattgctcagcgcggacctagacctggaatcgcccaagtccctctactcgcgaggaaagaccacagcaagattctttcat

SEQ ID NO: 743443 - DNA, 100 bp, Homo sapiens
gctcagcaagctgcgccgcgccgcagtcggtcgtccgctggacaagcacgagggcgcgctcgagacgctcctgagaccccagcagcgaccgccacggccc

SEQ ID NO: 743444 - DNA, 100 bp, Homo sapiens
atatgaacatatcactcttgcttattctgaggtcttgagagctgatgacaataacatgggcaatggctgctctcagaagctggcgactgctaacctcctc

SEQ ID NO: 743445 - DNA, 82 bp, Homo sapiens
agctgacaatggctttggtccccagcgcagtgaagtggtgagcctttttgtcactgtttattgagagaacattcaattgatg

SEQ ID NO: 743446 - DNA, 74 bp, Homo sapiens
gggctatgaacgattaaaagaagaactcgcaaaagctcagagggcatcattcttaacaaagaagttaaatattg

SEQ ID NO: 743447 - DNA, 74 bp, Homo sapiens
ggtcagggtcaagtcgtgttctgatcactactgacttgttggccaagtttcttcctaacagtggtgattctact

SEQ ID NO: 743448 - DNA, 83 bp, Homo sapiens
ggatacatgggctgcacttcacagaagagccaaagactgtgcaagtgctggagaggcattttggatcagtctgctgtgtgggt

SEQ ID NO: 743449 - DNA, 75 bp, Homo sapiens
tctcagtatctgagcacagccggttggaaggcgcaatggcgaggaagttatctgtaatcttgatcctgacctttg

SEQ ID NO: 743450 - DNA, 75 bp, Homo sapiens
catgagtgttcctgtggtctctgcacctcctttcttttttggctttcacccccaaccagtgaccaaagacttgac

SEQ ID NO: 743451 - DNA, 50 bp, Homo sapiens
gaggaggagcgcagcccggcctcgattcgcttcaagctcagcttatcaat

SEQ ID NO: 743452 - DNA, 100 bp, Homo sapiens
ttcgctggactgcaaaccgagctcccgtctgccttgcagcggtcacctttgtcccggtgtccaaggtgagcgggcaggcagaggtggacgacatcctcgc

SEQ ID NO: 743453 - DNA, 100 bp, Homo sapiens
ccagagaccacttctccacatgaatattctgttttgctgcccgaagcttgatggctgagagctagcaaggaaaactcaggaccatgatggctcagtttcc

SEQ ID NO: 743454 - DNA, 50 bp, Homo sapiens
tagacggccagccagtcatcaaacggctacttctacaagtccgaacagcc

SEQ ID NO: 743455 - DNA, 75 bp, Homo sapiens
cgctgctgcttcgtgttcctggtgcagggtagcctctatctgggccaattcctgtccccccagcagcatggcatc

SEQ ID NO: 743456 - DNA, 80 bp, Homo sapiens
gcgaggtggccggagccgtgtggaccaggaggagcgcttgtgaagcctcagtttaggtcatctggtggttcagaacactc

SEQ ID NO: 743457 - DNA, 50 bp, Homo sapiens
taccatcatgtacagttgctggcatgaggatgaaaactttcggaagagaa

SEQ ID NO: 743458 - DNA, 100 bp, Homo sapiens
gtccgagcatgcattgccattatctgtgaactagaacatgtttgggttgtggaagcctatggtattcttggctattgcagctgtggctctgtatgtgtta

SEQ ID NO: 743459 - DNA, 88 bp, Homo sapiens
cacaaagcccatggtaacttctgcttgtaatggaacacggaatgtggccccttcaggagagcagccgagaccgacccgcccgcccgcg

SEQ ID NO: 743460 - DNA, 100 bp, Homo sapiens
ctcgcgcctggcctggcgacccggtggactcggcccgcggcggcgcgctcacccgccccgttcagagtcagcgaccacatggacctggggccctcagagc

SEQ ID NO: 743461 - DNA, 100 bp, Homo sapiens
ccaacccttgtgggcatttgtggtgagggaaccgagtctgtgcaaagcctcctgcttgaggaggaaggtgaggacggcgatccatcgtcagggcccccag

SEQ ID NO: 743462 - DNA, 101 bp, Homo sapiens
gagaaatatgaagaagtgctacataatttggaatttgccaaggagcttcaaaaaaccttttctgggttgagcctagatgttttactcaagtgaacatgaat

SEQ ID NO: 743463 - DNA, 50 bp, Homo sapiens
gacgagggcaagtgcgcttacatccgagatatgatcattctgtttcaaat

SEQ ID NO: 743464 - DNA, 100 bp, Homo sapiens
agaagatatttatgataaaattaaaacaggcttggctggtcttgaaatcggcatcttaggtcccagaacagttttcttctgggctccaattatgaaatgg

SEQ ID NO: 743465 - DNA, 100 bp, Homo sapiens
caattcgttttcaggagcatctccaggtgacagagctgaatgaacctctctccaatgaagatcgaaatctcctctctgtggcctacaagaatgtggttgg

SEQ ID NO: 743466 - DNA, 74 bp, Homo sapiens
ccgccgattcctcctccttggtcgccgcgtccttggctggcgtgtatgaacgctgccgtccgtgccgtggtgcg

SEQ ID NO: 743467 - DNA, 100 bp, Homo sapiens
gggaaatcggcgccatccttcagaatgcagacagacctcggctgcccgacaactacacgcaggacacgtggcggaagctgcacgaggcggtgcgggccgt

SEQ ID NO: 743468 - DNA, 100 bp, Homo sapiens
caactcaaatgcaagtccaagaggaggaggaggcggaggtccaagcggaaagatatggatcagaaactttcgaagttggtagaagagctcacaacttcag

SEQ ID NO: 743469 - DNA, 126 bp, Homo sapiens
ggcgactacatggcccaggaggacgactgggaccgggacctgctgctggacccggcctgggagaagcagcagcgcaaggttccatgtaaacctgctgtgcggggaggagcagggctccgatgccgc

SEQ ID NO: 743470 - DNA, 75 bp, Homo sapiens
cgggccacctccaggagggaagctgataggaagatgtcttcaggaaatgctaaaattgggcaccctgcccccaac

SEQ ID NO: 743471 - DNA, 76 bp, Homo sapiens
aataagtctcctgaggccaaaccattgcctggaaagctaccaaaaggttggcgctgtacgtttatgagtacctgct

SEQ ID NO: 743472 - DNA, 74 bp, Homo sapiens
acgatgccggatacaggagggacgtgcaccagatgggctatgtgcgggagtatattctgtgggcagcgtctaaa

SEQ ID NO: 743473 - DNA, 78 bp, Homo sapiens
tctgagccgtctgtcctgcgccaagggcgtctctggccgagcctctttttgtggaaaacgacagcagcagcagtggcc

SEQ ID NO: 743474 - DNA, 75 bp, Homo sapiens
cttcaatatttgcaggacaaaatgatcccttgaaagacagttacgagtgtgaacatggctacgcctcttcattcc

SEQ ID NO: 743475 - DNA, 100 bp, Homo sapiens
agatgttattaaggcagctcacctttgtgctgaagctgccctacgcctggtcaaacctggaaatcagaacagtccacaggaagaggttgaactaaagaag

SEQ ID NO: 743476 - DNA, 101 bp, Homo sapiens
gttggggaggaggtggacgcagagcagctgatccaggaagcctgtcggagctgcctggagcaggaatgtggcctgctgcggaaggggacagtgctactggc

SEQ ID NO: 743477 - DNA, 100 bp, Homo sapiens
cttctgtgccgtgggcgtggcctacgggagccgcatcgcagtcggaattgagatgggcgattggcaggaagtctgggatgagaacacgggatgttattat

SEQ ID NO: 743478 - DNA, 100 bp, Homo sapiens
gaagcggcgctatcgcttcctagcagagaagcacctgctactttccaacaccttcctgcagttcttcggccggcaagagtgagccatggagctacgtgtg

SEQ ID NO: 743479 - DNA, 100 bp, Homo sapiens
gtgaaaatgtgtgtcaagaacgagatgctgacccagacaccttctttgcgaaggtaaaaaacttgttgctgcaagtcaagctgccttaggcttataacat

SEQ ID NO: 743480 - DNA, 96 bp, Homo sapiens
ctcacccaccccatgaaaacctctcaccccgtcgttgcctccacttggcccgtccatagagccagaaattgttgccaaggtcagagaagtctccca

SEQ ID NO: 743481 - DNA, 75 bp, Homo sapiens
tgtgtggactcggagaaacgcgggtttggtgcacctcgatttggaggaagtagggcagggcccttatctggaaag

SEQ ID NO: 743482 - DNA, 75 bp, Homo sapiens
gatggctaagtttgcatgaaaactgcactttattgcaagtgaccctggcagcaaccccaacaaacgccagaggca

SEQ ID NO: 743483 - DNA, 88 bp, Homo sapiens
aacttttgatctctcatcagagagatcatactcccaagaacaggctttgacccttctttaaaagagaacacctgttcccagcgctgaa

SEQ ID NO: 743484 - DNA, 75 bp, Homo sapiens
gcgccttcggcaaggtttacaaggcaggagggagccaaagtttctctgatgtctcctgatcagcttcggaacaag

SEQ ID NO: 743485 - DNA, 50 bp, Homo sapiens
ggactactatgactctgaacagcatgcatatcattctgtttcaactcccc

SEQ ID NO: 743486 - DNA, 90 bp, Homo sapiens
catctgccagaatcagaaagaattcatcacactgtccgtgctatcaagactaatcaggaccttctcccagaaactccatggacgcacatt

SEQ ID NO: 743487 - DNA, 100 bp, Homo sapiens
atccaaaggtgaatcttttggttggtgattttgatgatagccacaaagcaagcagggatactgtagttgctctccaagctcttgccaaatatgccactac

SEQ ID NO: 743488 - DNA, 50 bp, Homo sapiens
aacaagtgcgacctctcagatattaggtttccaatacttatctacaggaa

SEQ ID NO: 743489 - DNA, 75 bp, Homo sapiens
tggagcatggacaagcgaatttcagtcagtattcgccatgaagtcagcgtaaataatgtaacacataaactgtgc

SEQ ID NO: 743490 - DNA, 100 bp, Homo sapiens
ccaccatgttccagaacctgttcccctccatcaacgtgcacaaggtgcgctcccctggggccccagggcccctgactctgaaggaggtggaggagctgga

SEQ ID NO: 743491 - DNA, 100 bp, Homo sapiens
tcggcgcccagcaatcacagaagccgacaaggcgttcaagcgaaaacatgaccgctgagcccatgagcgtgagcatggtgaagagaagacggagccccgc

SEQ ID NO: 743492 - DNA, 83 bp, Homo sapiens
tcgtcagcccccaggaggccttgccgggccggaaggaacagacccctgtagcggctccagaaacatgacaaggaggactttcc

SEQ ID NO: 743493 - DNA, 75 bp, Homo sapiens
cggagacccttctctccccatcagggcactgtgtttagtcttgagtcagaggaggaggaataccctggaatcact

SEQ ID NO: 743494 - DNA, 89 bp, Homo sapiens
tttgtggatcgctgtgatcgtcacttgtggtgggtacgggcacctcgctggcgctctcctccctcctgtccctgctgctctttgctggg

SEQ ID NO: 743495 - DNA, 100 bp, Homo sapiens
gagctgggctgcatcaactcggctgtgagaagacatttatcacagtgagtgccctgttttcccataaccgagcccacttcagggaacaagagctcttttc

SEQ ID NO: 743496 - DNA, 75 bp, Homo sapiens
atgtagctaatgaccgtggttcccactgagcttcttggacacttaatgattgttggcaagaaatgtgctgctgat

SEQ ID NO: 743497 - DNA, 82 bp, Homo sapiens
acggcgcggcgctggcgctgccggagctgtcgacccggcctggcgccggactagaccatggtgaatccgggcagcagctcgc

SEQ ID NO: 743498 - DNA, 96 bp, Homo sapiens
cagccggctctggtgctcccagaagagatccagacatctcaagaagatgactgaagagtatccagcccttccccaaggagcagaagcctctctacc

SEQ ID NO: 743499 - DNA, 100 bp, Homo sapiens
ctgatattgatcgtgaagaagacctgtggaaataagagtgaatttcctactgaagcagatctggaagacttcacagaagcagctgtggatgaggatgatg

SEQ ID NO: 743500 - DNA, 101 bp, Homo sapiens
ctggctgtcatgctcattgttctgaactccacggtagtgtgccagtatttgaaaaatcccaatgtatctgattcactgctgctgcagaatattttccaagc

SEQ ID NO: 743501 - DNA, 75 bp, Homo sapiens
cccagaacggatagctccctcctggaaaagggagttctgggaaatcgttcattcatttacagatgaacagaaaag

SEQ ID NO: 743502 - DNA, 95 bp, Homo sapiens
ttgagaactcaggaaggtgggaaaattcatctggaattactacccaatcaaggaatgctgatcaaacaacattctggaagacagacctgaaaata

SEQ ID NO: 743503 - DNA, 83 bp, Homo sapiens
gagcgacaagccgctggcagccgcggatctcaccgccgctcagggcactgccgccctgcactgtagcagatgcctaaataaag

SEQ ID NO: 743504 - DNA, 74 bp, Homo sapiens
atttaattttagggtcctttatatagaagggagagtaggatttacaaaaggtgcaggtatgagcaggtctgaag

SEQ ID NO: 743505 - DNA, 100 bp, Homo sapiens
gggaatctcaccggacggagggaaagcactgagaacaggaagctgcttcacccgagagttccttggtgccctttccgtgtcatggagaaactccagctgg

SEQ ID NO: 743506 - DNA, 74 bp, Homo sapiens
ccaaagaccaagcatctcagagaagaggaggaagaaggcgagaagcacaggtactgtgactagtggctgcccct

SEQ ID NO: 743507 - DNA, 96 bp, Homo sapiens
agtatcaaccagacaattcctaatgaacggaccatgcaattgctgggacagctgcaggttgaaggtcgaggagctggaaggcgagcggagtcggct

SEQ ID NO: 743508 - DNA, 83 bp, Homo sapiens
cgaaaattggatgtgaaaatgaagccagaccgagaacgtgttacgagtcagtttttagtgaaaaaacattgagctaggagcca

SEQ ID NO: 743509 - DNA, 82 bp, Homo sapiens
tttggtttctttttttgatgcatctctacctggaactttgccgacccaacatgagtgaagtttcctgcaagaaacgggacga

SEQ ID NO: 743510 - DNA, 85 bp, Homo sapiens
gcgtcatcgagtgtgacgtggtgaaagacttcccaagtaagaagcggaagaggagccgctggaaccaagacacaatggaacagaa

SEQ ID NO: 743511 - DNA, 75 bp, Homo sapiens
cctgatgatcagactcagaaaattttggaaagagaagatgctcggctgatggaggccttacatcgggaacaaatg

SEQ ID NO: 743512 - DNA, 102 bp, Homo sapiens
gccgggccatgggcgcccgcgctgcctatatctacatccgaggggaattctacaatgaggcctccaatctgcaggcacaggtttagccccaacatgactgag

SEQ ID NO: 743513 - DNA, 75 bp, Homo sapiens
ctgaccctacatgatgagaggtttgagaaggtagatgatgagctggagatcaaggcctactatgcaggccacgtg

SEQ ID NO: 743514 - DNA, 80 bp, Homo sapiens
gaagtgtgctcttgtcaggcacaaatttaacaggcttcctaggtctatcagccacagtctctgcaagtttccaagagcag

SEQ ID NO: 743515 - DNA, 100 bp, Homo sapiens
cccacttcaaggtggatctggatgtagcagctggcaaaactcaaggctcagaaactgcagggcccccaaaaaagaaaaggaagaaaacacaaaagaaatt

SEQ ID NO: 743516 - DNA, 100 bp, Homo sapiens
ccggggtgtaataatgttaactgaggtataagtgtgctagcggagtgtctagattgtcctgaattgaaagcaactgcagatgactttattcatcagcact

SEQ ID NO: 743517 - DNA, 100 bp, Homo sapiens
tctccgtttatgcagaagcttggctttggtactggggtaaatgtgtacctaatgaaaagagtctgaagaagaagtagaggaacctgaagaaagacagcaa

SEQ ID NO: 743518 - DNA, 51 bp, Homo sapiens
tggcgtcgtctgcgaccgctgccttctcggactaaatgtgttaaatgggct

SEQ ID NO: 743519 - DNA, 83 bp, Homo sapiens
cactgaagccacccaggtgtaccccaagctgtacttgtcacctcgaattgagcagtttttagaacttcagccataaaaatggg

SEQ ID NO: 743520 - DNA, 75 bp, Homo sapiens
tgcaagtgtcatcctggttatgctggaaaaacctgtaatcaagggttcataggaccccgaggatccaaaggtgca

SEQ ID NO: 743521 - DNA, 100 bp, Homo sapiens
gggccagaggaggcgacccttcgcacttccacgcggtgaacgtggcgcagcccgttcgcttcagcaggcaggattctgggaaggttgtgatctggaatat

SEQ ID NO: 743522 - DNA, 82 bp, Homo sapiens
ccgctgtgtggttgcaacggagataaattcccggaaccgcgattcggcgtgtcagaaatgagccgtcagactgctacagcat

SEQ ID NO: 743523 - DNA, 78 bp, Homo sapiens
aggaagtgtcacacagcagtcaagtatgtcccaaacgtctaggaatgttacggcatccggagtcatccctcagatttc

SEQ ID NO: 743524 - DNA, 50 bp, Homo sapiens
aaattaactatctgtacttataaggagccagatgaccaggatgccccaga

SEQ ID NO: 743525 - DNA, 75 bp, Homo sapiens
gcgacccggtgtgtggcgcgcccagagccccgcgtttcagccctagggaaggtgtggacactgccagcggctgca

SEQ ID NO: 743526 - DNA, 100 bp, Homo sapiens
aggcggttttggtgaataacatcaccacaggtgagaggctcatccgagtgctgcaagaaggtctgaagaaaaccctgcgggatgagatcaatgccattct

SEQ ID NO: 743527 - DNA, 75 bp, Homo sapiens
taagattcctcaatcctgagagagagaattaaagtctaactctccaaatattgttgtgtccactgtatcctggct

SEQ ID NO: 743528 - DNA, 99 bp, Homo sapiens
ctacatcggaagagtcttcggcatcgggcgacagcaggtcacagtggacgaggtgttggcggaagtgacagctatattgtgcgtgtcaaggctgtggtt

SEQ ID NO: 743529 - DNA, 115 bp, Homo sapiens
ctttatataggtgctgggagtccctacagaggatacttggccgggagtctccaagctacctaactacaatccagatatttagcttcctgtggtatactgatgagcagaactcttc

SEQ ID NO: 743530 - DNA, 100 bp, Homo sapiens
ctgccaaggactgcagctatggggctgttactagtccaacctctacccttgaaagcagagatagtggcatcattgctcttcagagaagtaagaataatga

SEQ ID NO: 743531 - DNA, 98 bp, Homo sapiens
ctggacttcagcccaaaatgcttgttctgaacatggtgctactcttgctgtcattgattctgaaaaggacatgctggctggaggcgtgatcctgggtg

SEQ ID NO: 743532 - DNA, 98 bp, Homo sapiens
ggcattcggccggcctttatgtgctatgtgcccagcccggtgctggcttccgtgggagacacagagggagacgctgttgcggcagctggagacgaacc

SEQ ID NO: 743533 - DNA, 75 bp, Homo sapiens
gatggaatgcttgacagagatgagtttgcagttgtacagacagtgtttgtgtgttcctgttgtggctaactttaa

SEQ ID NO: 743534 - DNA, 100 bp, Homo sapiens
caacctggaacccctagtctcaagagatcctccagcctcagcctccctgagatcctgcatattttgatgaaaattggctaaacagaatcaaaactgaagt

SEQ ID NO: 743535 - DNA, 100 bp, Homo sapiens
aaataaatagggaagatggagacaccctctgggggtcctctctgagtcaaatccagtggccgccgactcgaagcgtgagcagttccggaggtacttggag

SEQ ID NO: 743536 - DNA, 118 bp, Homo sapiens
tttgtcacgagtgaattgttctcagtttctcggtttatgtgctcttccagcttgtactcccagagtacctcatccacgctttcttctgtgtcatgtttctttgtgcagcagagtggct

SEQ ID NO: 743537 - DNA, 50 bp, Homo sapiens
ccgggaagcagctatttgaccaggcgggctggtccgagtctctgttttgg

SEQ ID NO: 743538 - DNA, 100 bp, Homo sapiens
tttcccttccttcatatgaggaagatcagggatcaaaactcattcgaaaagctaaagaggcaccattcgtacccgttggagagacaggctggaaaccgag

SEQ ID NO: 743539 - DNA, 100 bp, Homo sapiens
aaaaaaccttctggccccagggcagtgtgcagcctggattttctttgctaaggtgttttcacagtcctgtgtttggtatggagagtgtggaattgcatat

SEQ ID NO: 743540 - DNA, 83 bp, Homo sapiens
caactcttttctagcacattggtggtgtgagctaccacgccttgcctgagttgatcttctacaagagttcaaacaaaaaacag

SEQ ID NO: 743541 - DNA, 82 bp, Homo sapiens
ctgagtacgacagcctcaaacaggagctggagcagctcaaagaggtcctttctgaaagatctgctactgaagtagacaacaa

SEQ ID NO: 743542 - DNA, 75 bp, Homo sapiens
ataattttgggcaaacaccctgtcaattattaaagtaacaatttggacaagacagcaaatgctattgtcgaagtt

SEQ ID NO: 743543 - DNA, 73 bp, Homo sapiens
gaacacatgcattctcgaagagtcatgcatagaggtttaaagttctagctaaccaatacaaatctatataccc

SEQ ID NO: 743544 - DNA, 75 bp, Homo sapiens
aatgactgcaagcacctattatggtttcccaggcagctgcagacttgaaacagttctgtctgcagaatgctcaac

SEQ ID NO: 743545 - DNA, 100 bp, Homo sapiens
tcattggaggacactggaagatgggaagaaagaagcagctgccagggatacccacccaccatcccagggtctacaacatccacagccggaccgtcacccg

SEQ ID NO: 743546 - DNA, 82 bp, Homo sapiens
tggtttgatactgacctgtaaatcatcctttaggaggagatgttaaagtaacccatcttgcaggacgacattgaagattggt

SEQ ID NO: 743547 - DNA, 97 bp, Homo sapiens
aagtcaccacaaaaacctatcgttagagtcttcctgcccaacaaacagaggacagtgaatgacaattctaggtacaacttttggcatggttttttct

SEQ ID NO: 743548 - DNA, 97 bp, Homo sapiens
gagtcagcctgaaaggaacaggccgaactgctgtatgggctctatctaccttctgagatatcatccttcttcagggagataaggaaaaaaagccaca

SEQ ID NO: 743549 - DNA, 96 bp, Homo sapiens
caggctctggactcctaaagctctggagcgaagctatggagatattttgcatagaatgaaggatctctgcagatacatgaacaactttgatagtga

SEQ ID NO: 743550 - DNA, 96 bp, Homo sapiens
tgctatacggtctttagggttacgtgaagtcaagtaaaatcgcacactgatttcaggaaaccttactgtgccttggattacagggtgttctagaaa

SEQ ID NO: 743551 - DNA, 73 bp, Homo sapiens
tagcttcgcagtctggaaagctttaggagttcacagtgtgacaactgttgatagatttcaaggtcaacagaat

SEQ ID NO: 743552 - DNA, 101 bp, Homo sapiens
tggaatctgttcttcttttgcatcctacgtaaccagaccaagctgtgggtcttcccaagggattgttgaagaaacttctgaagagggaaactctgtacctg

SEQ ID NO: 743553 - DNA, 98 bp, Homo sapiens
tgcaggaggaggaggaagaagagaagctggacgctctgcaggggatcctctctgctttcctggctctgtgtgctccgggatggagcaggtgtgcagag

SEQ ID NO: 743554 - DNA, 82 bp, Homo sapiens
cgcgctgacaggggggcctggccgcgcagccggggagcttttggaagagtcccagatggaagcgaccaggctccggcagaag

SEQ ID NO: 743555 - DNA, 82 bp, Homo sapiens
gagtcgcagttatggcaccccagaactggatgaagatgatttagaagcagatgagttatcaccaccttgttctgaacaacac

SEQ ID NO: 743556 - DNA, 100 bp, Homo sapiens
gtggcctcctacgtttacaacggctacagcgtggtttttgtggggactaagagtggcaagctgaaaaagagtaatcaagtcagaggattatatgactttt

SEQ ID NO: 743557 - DNA, 100 bp, Homo sapiens
atggactgcttgtgaagcaggaagacagtgacatattaggttctgctatgcaaaatatacaaaatctcctccagatgccatatggctgtggagaacagaa

SEQ ID NO: 743558 - DNA, 89 bp, Homo sapiens
catgtttgtgcttctgcccaacgacatcgatggcctggagaaggtacaggtttgcagattccgccagcagcacagcaagctctacagat

SEQ ID NO: 743559 - DNA, 126 bp, Homo sapiens
aaagcctccggaatctaaaaagccctcagtaccagagacagaagcagatggattcgtccttttaggtcacatgtgccaatttaacgaacggtggaaagtcagaacttctgaaatcaggaagcagca

SEQ ID NO: 743560 - DNA, 102 bp, Homo sapiens
gatcctcctgcctcagcccccaagtagctgggacctacagatcttgacagaacaagtatgtactcaggtcgtacacaaaccacatccagagccagattctac

SEQ ID NO: 743561 - DNA, 75 bp, Homo sapiens
tgaattacaagtttgaaagtggaacttgtatgaatcaaatgcaacaggaaaaagagctaacagaaaacattttga

SEQ ID NO: 743562 - DNA, 82 bp, Homo sapiens
taaacgtgccctactctgccccgggggagagggggatatgagactttctactcggaatatcctgagtgttgcgtggatgtaa

SEQ ID NO: 743563 - DNA, 90 bp, Homo sapiens
aggacatggagtatgaaagacgcatgaaaaagccagcacgcctgttctgaaatccagcacaccaacgcctcggagcgacatgccaacgcc

SEQ ID NO: 743564 - DNA, 75 bp, Homo sapiens
agtcatatatccttcatatgatccatcttagtgaagaattaggatacagctgttctaaagaaatccaaatggcag

SEQ ID NO: 743565 - DNA, 98 bp, Homo sapiens
gaagcaagaaggccctggacacagcaatatctctgggctttcacagaagagtcaagtaccattggccaggatcaaacgcttatggaacgtgatacaga

SEQ ID NO: 743566 - DNA, 98 bp, Homo sapiens
taagactccacttcctccagaattagctgatgttcaggcataaggttgtttacaggtatcactggacaggccatggctccacggtcccggcgacgaag

SEQ ID NO: 743567 - DNA, 96 bp, Homo sapiens
cgctaaggatacagtatgtgtgtgaacagaataaggcagagattgtcaagaggctgaatgctatctgtgcacaagtcattcctttcctgtcccaag

SEQ ID NO: 743568 - DNA, 82 bp, Homo sapiens
gacgaggaggagacgtaccggctctggaaaatccgcaagaccatcatgcaggtgagaagccctaccactgcaactgggacgg

SEQ ID NO: 743569 - DNA, 96 bp, Homo sapiens
cccacctcgtggggtgtgtgagggccgagtgaaatcgtgcatttgcgttccacagaaacagacacttccagttgctcccagaactcgaacttctca

SEQ ID NO: 743570 - DNA, 75 bp, Homo sapiens
agcatctccaagcaatgttcattttactccgcccagaagacaacatcaggctggccaggcacggtggctcatgcc

SEQ ID NO: 743571 - DNA, 82 bp, Homo sapiens
cttgtttgcctacatctacttctccacgcaagtccattggaatattaagcccaggagttgctttggggatggctggaagtgc

SEQ ID NO: 743572 - DNA, 83 bp, Homo sapiens
ctctccctgcgctctccgcaccgcggcttaaatgatgtattttgtgatcgcagcgatgaaagtattaaaggtggaagaaggtc

SEQ ID NO: 743573 - DNA, 100 bp, Homo sapiens
cgatgtgccggccaactccatgcggctcaagtaccagcacaccggcgccgtcctggactgcgccttctacgaacagatggagtcggataactgttcagga

SEQ ID NO: 743574 - DNA, 83 bp, Homo sapiens
tcttccacggcaccctggccctcgcccccatgctggaggtggctctcaccctggaatgggcaaagaagtggggaatctgctac

SEQ ID NO: 743575 - DNA, 59 bp, Homo sapiens
tttttagttaatcacgatttctctcctcttgagctgccattaggccgacagtgtgtgga

SEQ ID NO: 743576 - DNA, 100 bp, Homo sapiens
tcagatttcatggcctatgacattgtctccggagtagagatgaagagagaatttctaaacctggggctgtctcaactcctgtaaagcatgctgatgatca

SEQ ID NO: 743577 - DNA, 73 bp, Homo sapiens
tggtgatgatgaaaaccctagcgcctattatagtgatatgactacattgcaattggagctgatgaggaagaat

SEQ ID NO: 743578 - DNA, 100 bp, Homo sapiens
gaacgccctgcgctacgatgccatgcttggtcgggaggaacctgccatgtccatggatgccaatggaaagataatttgggccaagcattcagaagtccag

SEQ ID NO: 743579 - DNA, 78 bp, Homo sapiens
ggcctacgaggaggtgcgcgagaagtacaaaggcagcaagagcaactcaccaccagccttgggcccagaagcatgccc

SEQ ID NO: 743580 - DNA, 92 bp, Homo sapiens
tgcagcgggagctggacggcgagcgcgagcggcgcgagaaagtgaacttcacggtagaccagatccgcgccatcatggacaagaaggccaac

SEQ ID NO: 743581 - DNA, 74 bp, Homo sapiens
ggcgcgttctcaagggcttgcagctgaatagcctaacatggcagaccagagacagcgctcactgtctacctctg

SEQ ID NO: 743582 - DNA, 103 bp, Homo sapiens
ttaattttagggtcctttatatagaagggagagtaggtgtattacctgactgcttaaccgatggctctgatgtggtcagtgaccttgaacacgaagagatgaa

SEQ ID NO: 743583 - DNA, 75 bp, Homo sapiens
tgtctgacagccctgtgtgacaccaagataagtaacgtttttctttggactcagggaaaggtattgtttctaaag

SEQ ID NO: 743584 - DNA, 82 bp, Homo sapiens
tctgggagaaacctcgtggcctggtctccattatttgagatgagttacatcttggagattacaacagcagtgaattgaaaac

SEQ ID NO: 743585 - DNA, 50 bp, Homo sapiens
ccgcagtggcgtcctggagccctcctcagccacataaagaagatccctaa

SEQ ID NO: 743586 - DNA, 100 bp, Homo sapiens
gtttcccacttgattacccgttaagtcccccaaagatgagatttacctgtgagatgtttcatcccaacagttggcatcactctcttcactgtgtctcata

SEQ ID NO: 743587 - DNA, 75 bp, Homo sapiens
aaaagattgggttggtatattcaagttgacgaaggatcagagattggtgtattcgggcagactgcttcccgatca

SEQ ID NO: 743588 - DNA, 98 bp, Homo sapiens
tcagagacctcattggctgtctccagaagctgctgtttggaaaggtggcaaaggatagcagcaggtgtggttacagaggaggctacatggaggtgatc

SEQ ID NO: 743589 - DNA, 100 bp, Homo sapiens
aggaatcatcgaggcatgggggtccacactgcaatgtttttgtggaacatggtcacacagcggcagtgataaagagcacagggatgtggagagatctcaa

SEQ ID NO: 743590 - DNA, 89 bp, Homo sapiens
gtctgcacgaaataaagctcctgggcaaggggacgtctgcagctgagttgttcccacagcctggaagtctcttccctgacttgttccac

SEQ ID NO: 743591 - DNA, 90 bp, Homo sapiens
aagattccgaacaatcacgacagcgtactacagaggagccatggctggagcattggatttgctaaaggagcttaagaatattcctatgac

SEQ ID NO: 743592 - DNA, 100 bp, Homo sapiens
atgatttgaagatattagcctaacaagatggaagcaggtttaaaattttacataagaagttacctttttcaggcattgatgacggggagccttcctggct

SEQ ID NO: 743593 - DNA, 98 bp, Homo sapiens
attgtccagaagactcagtcaacaatatttgcagtaactctcaggagccttctccgcagttggcttcctcggtagcttccacacggagcatgcccgag

SEQ ID NO: 743594 - DNA, 82 bp, Homo sapiens
gctgctggacgaagagctctcctccttcttcctcaactatctcgctgacacgcagtcgtgagatggagaataaagaaactct

SEQ ID NO: 743595 - DNA, 100 bp, Homo sapiens
aagtttggtgtccagatggacagagttgatcagtgacctgagggtggacagccagaagcagaggcacccgtccggcggcgtctctgtgtcttccgagatg

SEQ ID NO: 743596 - DNA, 100 bp, Homo sapiens
tccgcctcccccggctcagcccccggccgcggcgggacccgagctggagaccatggccaaaatggaggtgaaaacctcacttctggacaatatgattgga

SEQ ID NO: 743597 - DNA, 97 bp, Homo sapiens
gcggatcccgtggagtgaaggtcgcaccgcggcggtaatgcatgtccatggtacacaaattcacaaggtttgtaaatgagaaaagacgtgaggttcc

SEQ ID NO: 743598 - DNA, 85 bp, Homo sapiens
ttggacatgcacaccaaaccctgggttagagcaaggccttgctgtctctaaccctgatctgatctcctgccttgagcaaataaaa

SEQ ID NO: 743599 - DNA, 100 bp, Homo sapiens
atggtacctaccatcagtgaatgacctgttgcagtgctttcattgaagtgttcttcgttccctcagcaatatgattgacacagagcacagccaagacctg

SEQ ID NO: 743600 - DNA, 82 bp, Homo sapiens
cttctctcccctccactttctcccggggccaattcctgtccccccagcagcatggcatcgtgtgctgaaccctctgagccct

SEQ ID NO: 743601 - DNA, 90 bp, Homo sapiens
cgcaccacggagagcacgagagacccgagttcatcgcctacccccatctccgcatcaggaccaaggtgaagatggttctggtaaaacaac

SEQ ID NO: 743602 - DNA, 101 bp, Homo sapiens
gttgaccggtttggttgaagttggagaagtatccaatagggatattgtagaaactgtctttaacctggttttgcgtgtgaagctgtgtggaaatgtgaaat

SEQ ID NO: 743603 - DNA, 118 bp, Homo sapiens
atatcgacgtcgtgatccagaagtccagagctgaggactgcctgtttgcagtatgagcccagaggacctggtcggcccttgtaccaaagaagaatctcatctagctcagttcaacctt

SEQ ID NO: 743604 - DNA, 100 bp, Homo sapiens
gaaagaccgctttccatggagagtaaaggccggctggaaagtccccaagcgctatatcgagaagtttactgactttcttcggctctttgtgagtgttcac

SEQ ID NO: 743605 - DNA, 100 bp, Homo sapiens
ggtcatttcgtacatatgagagggttgccttttcgtgcaactgaaaatgacattgctaatggtgtacaactatgagcctttgacacagctcaagaatgtc

SEQ ID NO: 743606 - DNA, 50 bp, Homo sapiens
gctgcagccgcacctggccaagggatgcccaccccctcctcctgtcctgg

SEQ ID NO: 743607 - DNA, 100 bp, Homo sapiens
ttcgaagagttggatactcagcgtcgctggcagccgctgtacttggtactaggttttgacaagcttgcatcatgcgtgagtataagctagtcgttcttgg

SEQ ID NO: 743608 - DNA, 78 bp, Homo sapiens
ttccccccaaactgcaataagccgccttccaaggatcaactcactatcctgaaggtccattctcccaagaagagggga

SEQ ID NO: 743609 - DNA, 82 bp, Homo sapiens
tcatcctggttctggaatcctcagttcaagcccgtggaacacagagcattcctaatgacagtcctgcccggggtgagggcac

SEQ ID NO: 743610 - DNA, 153 bp, Homo sapiens
gaatcataaaatactgtctttgatccaggaggcttgtgtcatctgccagcatttatgaaactgtgctccaagtagggtttcttcttgaagggctcaaggaatgaagcatcccacaaaatgatcctgctgaataattgccagatgctgctggcc

SEQ ID NO: 743611 - DNA, 98 bp, Homo sapiens
cagaaacggagtctcggaagtgtagaaaataccagtgggaaaaggaagtgctggaatacaaccagttctgtgtaatagaagaagcatccaaagcaaat

SEQ ID NO: 743612 - DNA, 100 bp, Homo sapiens
aagagagtggtccagtgtaatgcggtgtgtagcagtctttgttggtataaatcatgccagtgctggcttggcaactcttgtgaaatttcatagatctcgt

SEQ ID NO: 743613 - DNA, 87 bp, Homo sapiens
ttatctgatgatgatgaaagttacacaggttatcctgaatacatgtctaacaattttccttgcaacgttagctgttgtttttcactg

SEQ ID NO: 743614 - DNA, 129 bp, Homo sapiens
gagaatgcagccgtgtgacagtaactgaacattggtctaaagtctttccaaaaggtcaaggttcacaaggtgtcatggagaaactccagctgggcccagagattctgcagcgggaaaatccaaggctta

SEQ ID NO: 743615 - DNA, 82 bp, Homo sapiens
agtggaactgaaaagatctcaaaatctggacttgaaaagatgaagacactgaggctcagagaggttaagtgactcagccaag

SEQ ID NO: 743616 - DNA, 102 bp, Homo sapiens
cgcggcgacaagtacatcgccaagtttcagggagaagacacggtcgtgatcgcggcaaccacacctccaaatcaaggaaggccagattctcctgtctatgct

SEQ ID NO: 743617 - DNA, 75 bp, Homo sapiens
cgcgcccagagccccgcgtttcagccctagggaaggtgcagtacagaaggtttctaaaaaattagaaatgcacgt

SEQ ID NO: 743618 - DNA, 75 bp, Homo sapiens
cagccgcggatctcaccgccgctcaggccgctgccatggcccagacactgcagatggagatcccgaacttcggca

SEQ ID NO: 743619 - DNA, 50 bp, Homo sapiens
ctttacctcgtggctgattatttagaggagctggagtggctgctggagat

SEQ ID NO: 743620 - DNA, 75 bp, Homo sapiens
aaggattccaagtaactcttatttgagcctaacccagatggagagggagaagattgtttgggagtttgagcagct

SEQ ID NO: 743621 - DNA, 90 bp, Homo sapiens
ttcatgtgtctcttctaagctgaataaagctgttttggaactgtcaggtacctcaaagcgctaaggcagctggataagcacagccaggcc

SEQ ID NO: 743622 - DNA, 90 bp, Homo sapiens
cttcaagcaccgccgggcccgcttcctgcacgaaaccggcctggctatgatttatggagtgatttgggccccgatgttggctatgaagct

SEQ ID NO: 743623 - DNA, 74 bp, Homo sapiens
gagaggagcactttgaggacatggcctccgacgaggacatatcgacgacatcgcggatggcgccgtgaagcccc

SEQ ID NO: 743624 - DNA, 83 bp, Homo sapiens
caccatctccatcacccaccaacaacaccacaataatccacagccaagaatcatttgctgtttcaaatagagaactgtgcgat

SEQ ID NO: 743625 - DNA, 75 bp, Homo sapiens
agtgagctcctggattctgctggcctaccttctggctggatactattacactgccaccggcaactacgatatcaa

SEQ ID NO: 743626 - DNA, 90 bp, Homo sapiens
gagatttattcgtaatgcgactcaaagctgcacggcagtctgtttatgaggcaacagctgtttaccaagcgaaggagaaactcaagtcaa

SEQ ID NO: 743627 - DNA, 50 bp, Homo sapiens
gtgggcggcagagagcggggcggcggcagcttgccttgcgccatggactg

SEQ ID NO: 743628 - DNA, 101 bp, Homo sapiens
tttttggaccttttttcatttccatttctaccttgtatgcctcaatttgctggatttaagcactgctgcactttatgagcatgccaatgaagatgtggaaa

SEQ ID NO: 743629 - DNA, 100 bp, Homo sapiens
caaaagccaagaggaggacagttcgctacacagcaatgcatcgaggcagaagctcctcctggggtagagacagatcttattgatgttggattcacagatg

SEQ ID NO: 743630 - DNA, 90 bp, Homo sapiens
gtcctttatatagaagggagagtaggccacaattgctgccagtcggcaggccagctccccaaacaccagcactacacagcagcagactac

SEQ ID NO: 743631 - DNA, 75 bp, Homo sapiens
ctcaccaggaactacctcaaacaaggcttcatggaaaagactgggccaaaggcctgcaagaccccccaaagccag

SEQ ID NO: 743632 - DNA, 100 bp, Homo sapiens
tcgtcatagctggaaacagtcagagccaccagccaatgatcttttcaatgctgcgaaagctgccaaaagtgacatgcagacaaatttacatgtattggag

SEQ ID NO: 743633 - DNA, 114 bp, Homo sapiens
caagtttgcagatcgggagcgcaaggtcgccctcaaggccatgatcaaaacgctgaaactgccgccaaccggatctgtaaggtgctggctgtcaaccaagagaacgagcacctg

SEQ ID NO: 743634 - DNA, 100 bp, Homo sapiens
gaagctctaagtacactcgtcttgaatagggcaattgaaggaacagactaaaaatcgtgtcctggaaggaaactacaggtactaccagggattttcagtc

SEQ ID NO: 743635 - DNA, 100 bp, Homo sapiens
ctgtgcggagactgggcggccggccgacccttcctgtcgctgacggcgactgcgggaggccagttcatcagagaagatatgaaatataaagatgctacta

SEQ ID NO: 743636 - DNA, 101 bp, Homo sapiens
agttcctcctggggaacccgttcagcacaccagtggggcagtgcctcgtgtaaacaggaacatcgataagtagtgtaaaaacttgcacaatgaaatccgaa

SEQ ID NO: 743637 - DNA, 75 bp, Homo sapiens
aaggagccagcctggacgatctcattgacagctgcattcaatcttttgatactgaagtactctttcccagtggga

SEQ ID NO: 743638 - DNA, 51 bp, Homo sapiens
tggtcagatagcgagtttgaatggcagggatgaattgtaaaagcaacatca

SEQ ID NO: 743639 - DNA, 88 bp, Homo sapiens
ggggactactggagtattttaagtctcaacagatcaccccccaacttgcccttcaagttctacttcagtttgataaggctataaatgc

SEQ ID NO: 743640 - DNA, 75 bp, Homo sapiens
ggagctgagcctgccacgccgaggacgtgggtgctggagaatctggtaaaagcaccattgtgaagcagatgagga

SEQ ID NO: 743641 - DNA, 75 bp, Homo sapiens
cttatcccagcgactatgatatgcacacagttattgccttgtctgtcaagatccgcagttatgaagaacacttgg

SEQ ID NO: 743642 - DNA, 83 bp, Homo sapiens
cgctttctcctctcctaaccgttaagtgcgctaaggagccttcacgtaaatgggtccagtcatgcctcccagtaagaagccag

SEQ ID NO: 743643 - DNA, 74 bp, Homo sapiens
gacgtgaggccgtggatgcaggcattaagaatgtgacagtgatgataacatgggtgccaaaaatacttcaatag

SEQ ID NO: 743644 - DNA, 83 bp, Homo sapiens
gtagcgcccatcgagcgggtcaagctgctgctgcaggacacctgctccacttcaccttttgccatgagtaaaagctccctgag

SEQ ID NO: 743645 - DNA, 87 bp, Homo sapiens
tggtagagaaataccgcattcttatcacaaagttcacagaaccccaaagtccaagctcttcttgggatttcctaccttctggaatca

SEQ ID NO: 743646 - DNA, 100 bp, Homo sapiens
acaggatgggcactgctggaaaaatcattgccactgcggtttgccacaccgatgcctataccctgagtggagctgatcctgagggttgttttccagtgat

SEQ ID NO: 743647 - DNA, 100 bp, Homo sapiens
gtgcatatttcaggagtgtcaactgctctagaggacaaaatcccagtccttggcacaaactcaggaaatggaagccggagtctgttttttgtggggctgc

SEQ ID NO: 743648 - DNA, 88 bp, Homo sapiens
cacggagctgcagccggttgggccggtgtactttcccggtgctatgcttacatttgaaaagatttcattggacagcatatttaagaaa

SEQ ID NO: 743649 - DNA, 75 bp, Homo sapiens
actctgtttacgttattatcaacacaggaccagatatgcacccaatgtccagggagcgtgcaaaatttgtcaaaa

SEQ ID NO: 743650 - DNA, 78 bp, Homo sapiens
atgagaatgttgagttcggcagcatacaggcagagattgtcaagaggctgaatgctatctgtgcacaagtcattcctt

SEQ ID NO: 743651 - DNA, 50 bp, Homo sapiens
ttgtttgatgagacctttgaatttgctccctaccctcacctcaagacgac

SEQ ID NO: 743652 - DNA, 97 bp, Homo sapiens
ccacactgcaatgtttttgtggaacatgatggcagtgaacgtatactcaacgtcagtgaccagtgataacctaagtcgacatgacatgctggcctgg

SEQ ID NO: 743653 - DNA, 99 bp, Homo sapiens
tgcagtactcttggcccatggacctgaaggagaagcacctgaaaccaggacgtggaccacgccagaagtgaccagccccccaccatccccaagaacatt

SEQ ID NO: 743654 - DNA, 90 bp, Homo sapiens
ctctcagtccacactcccaaaagggaaaggcataatgattataaagtggtttctcctgctttgcgagctgtgggaaacattgtcacaggg

SEQ ID NO: 743655 - DNA, 100 bp, Homo sapiens
aagaatcctgcaaaaatgtctctctatccatctctcgaagacttgaagggaagctgccaaagaatgtcgacgtcgaaagaaagaatatgtaaaatgtctg

SEQ ID NO: 743656 - DNA, 83 bp, Homo sapiens
catcctcatataactgtttggccttcacatgttgactggtcgaattgacaaatcttaccctacagtatgtggccacacaggac

SEQ ID NO: 743657 - DNA, 80 bp, Homo sapiens
cgcagaccagacttcgctcgtactcgtgcgcctcgcttcgacgaagggaacgtcatcgtttggaaagcgtcgcaataaga

SEQ ID NO: 743658 - DNA, 100 bp, Homo sapiens
ctctcgtcttcgatgtggagcttctaaaactggaatgacaggaatggcctcctcccttagctccctgttcttgggaatcattgacatagagtaactccac

SEQ ID NO: 743659 - DNA, 74 bp, Homo sapiens
gactagtggaccagctggtgaaggcagacagcgagtggcgacgatgtctcctctgagcctccggcctccataag

SEQ ID NO: 743660 - DNA, 83 bp, Homo sapiens
cggataaataacagtttatctgagttgagaagacttgtgccaactgcttttgaaaaacaagttatttggaaatagcggtgctt

SEQ ID NO: 743661 - DNA, 75 bp, Homo sapiens
gttgagagacagaggcaccccggacagagacgtgaagcactgaatgtactccaaagattcaggtttactcacgtc

SEQ ID NO: 743662 - DNA, 83 bp, Homo sapiens
gccaagtccagctaatgaggaaaaacctgatgttgttgttaaacgacaagaagctttagcagctgctcgactgaaaatgcaag

SEQ ID NO: 743663 - DNA, 88 bp, Homo sapiens
cagtactctatatgaacaatccgtctggatcacggatgtaggaagtgcaatcagccatgactgcctttgcactgtccatgctctcagc

SEQ ID NO: 743664 - DNA, 100 bp, Homo sapiens
gattcatttttcaaggagaagagcctgcaaatggccaatgaaggaggtttgaagatgccgcatttggattggatgaattccaaattctgcttgcttgctt

SEQ ID NO: 743665 - DNA, 75 bp, Homo sapiens
cttgcaggattgggaccagacagttgagacagcacaaaggtggtggggggctttgaccgagtactgctggatgct

SEQ ID NO: 743666 - DNA, 76 bp, Homo sapiens
aaaatggagcccttcaccaatggattcactggcaaaatttgctggcagaaaactgaaagactgtggagaagatctt

SEQ ID NO: 743667 - DNA, 98 bp, Homo sapiens
acttgctctaattaaaaaatattatggaacgaaagatcctgttccaggctattctgttccagcagcagaacacagccattcatcggaacagcccccgt

SEQ ID NO: 743668 - DNA, 101 bp, Homo sapiens
tatccttagcaaagtaacgcaggaacagaaaaccaaacaccacatgttgtctcttagaagtgggagctgaacgtgacctgtgtgaccttgcgctgttgaag

SEQ ID NO: 743669 - DNA, 74 bp, Homo sapiens
attttctctaagtttacaattttcctacagagagtgaagggaaatgaggcaagttatcctttggaaatgtgctc

SEQ ID NO: 743670 - DNA, 75 bp, Homo sapiens
tccttctcttcctcagggctcccgtgtctgctcgccctccgacgctgctcagatggagtctagttctgtcgccca

SEQ ID NO: 743671 - DNA, 98 bp, Homo sapiens
caggagtccactgagtaccggagacaggtgcagtccctcacctgtgaagtggatgcccttaaaggaaccgcatggcaagccggctgctcgggccctca

SEQ ID NO: 743672 - DNA, 74 bp, Homo sapiens
accgaagcgctgcagctgctcaagcgacaactggcggagaccaaggcacccagattggctgaaaacttctgtgt

SEQ ID NO: 743673 - DNA, 76 bp, Homo sapiens
aatttcaacactccactatttttccaaagtggtggatgaggttcttgggtgtctctggggagtccctgggccagac

SEQ ID NO: 743674 - DNA, 97 bp, Homo sapiens
tcattcgagagcagacagaaggggagtacagctctctggaacatgaggtgctggacgtcattgctcctccttatacctctgacttcgtgcaactttt

SEQ ID NO: 743675 - DNA, 83 bp, Homo sapiens
gggaaccctggtcaccgtctcctcaggaaaaccagtagattcccagacatcgcgaagtgaatctgaaattgtgccaaaagttg

SEQ ID NO: 743676 - DNA, 90 bp, Homo sapiens
cagcggcctggctaactcctgccaggcagtgcccttcccggagcgtgccctcgccgctggccgacttaacattacctatcccatgctgtt

SEQ ID NO: 743677 - DNA, 80 bp, Homo sapiens
gctcctacctcctggacggcaagccgctcagcaagctccacatccccgtgatgtacggagcgcaagaggacggcagcgtc

SEQ ID NO: 743678 - DNA, 80 bp, Homo sapiens
ctccttgaaaaactgggatacatggatctggcctcaagactggtgtttcagacccaaagtttacgcctatcagacctaca

SEQ ID NO: 743679 - DNA, 90 bp, Homo sapiens
attgaccccaaagttgcatttcctcgtcgagcgcaacccaagatggatgatgatgacgacgacgatgacgtaggagatcatgacgatgac

SEQ ID NO: 743680 - DNA, 96 bp, Homo sapiens
tctcagtgaaggaaatgaagtccgcccagtgcccgagccatggcactgcctcggacgctgggggagctgcagctgtaccgggtcctgcagcgcgcc

SEQ ID NO: 743681 - DNA, 75 bp, Homo sapiens
atgaacggatggatgtgatgcctgctagccaaaaggtggtatgtgtgcaacagagagaaattatgcgaatcactc

SEQ ID NO: 743682 - DNA, 78 bp, Homo sapiens
agattcacctgggagcctaacttctggaccaagcagctagcttctcttggtgacttcatggtcatgacgattttcttc

SEQ ID NO: 743683 - DNA, 76 bp, Homo sapiens
ctcatctccatcgtgaccaaggagaagggatcgaatcatcaatttagttgttggcagcttaacatccttattgatt

SEQ ID NO: 743684 - DNA, 83 bp, Homo sapiens
ctcccgcagcctgcctttccttccccctcggaaaatggttcccactgccgggcgagatggtcagtaggacagaaggtaacatt

SEQ ID NO: 743685 - DNA, 82 bp, Homo sapiens
ctctaattcaccgcaggatttccgaaatttaaaagcctgttgattcaagaactttctaaagtatttccggaagacatggcta

SEQ ID NO: 743686 - DNA, 98 bp, Homo sapiens
ggctgcggggcttccctgcggctggagatgcctgtgaggagccaccaacatttgaagctatggagctcattggtaaaccaaaaccctactatgagatt

SEQ ID NO: 743687 - DNA, 50 bp, Homo sapiens
gaaagctgccaaaagtgacatgcagacaatgagttacaaggcactaatag

SEQ ID NO: 743688 - DNA, 75 bp, Homo sapiens
gacccacaacctttaagcagcagaggagcacgaggatcgtgggagctaagaaggttctgagcaaggttcaaccag

SEQ ID NO: 743689 - DNA, 82 bp, Homo sapiens
ctgaggctgccccggccgcctgcgcacccggcagcaccatgacaggtgtcgtgaaaactacccctaaaagccaaaatgggaa

SEQ ID NO: 743690 - DNA, 101 bp, Homo sapiens
gaaaaagctgtggaaggctctggataaggaccagtacctgcccaggaaactggcgacatcattgtccacgtggaaccacaaggatttatgaaaattctggg

SEQ ID NO: 743691 - DNA, 83 bp, Homo sapiens
cgagctctcctctgatggcaggacctgccaagcaagagtgagccatggagctacgtgtggggaacaagtaccgcctgggacgg

SEQ ID NO: 743692 - DNA, 100 bp, Homo sapiens
gaggaatggcaggacgaagatcttcccaggtgaacttcacggtagaccagatccgcgccatcatggacaagaaggccaacatccgcaacatgtctgtcat

SEQ ID NO: 743693 - DNA, 90 bp, Homo sapiens
ggccgaccctatcgcgacaccgcggcctatcggtaccttgtgaaggctttccgtgcacatcggctcaacatcctggtggatacaggcagc

SEQ ID NO: 743694 - DNA, 90 bp, Homo sapiens
caaatacacttctatataccagtcaattgagtggtgttaaagcatttttcagttgaaggacagttggaattcagagcccttctatttgtc

SEQ ID NO: 743695 - DNA, 83 bp, Homo sapiens
cgcggattcgccgaggcaccgaggcactcagaggagagccccacagtcttcgttacaacctcatggtgctgtcccaggatgga

SEQ ID NO: 743696 - DNA, 75 bp, Homo sapiens
gtggcatcgacaaaagaaccattgaaaaatttgagaaggaggctgctgagatggggaagggatccttcaagtatg

SEQ ID NO: 743697 - DNA, 76 bp, Homo sapiens
ggggaccgcgctcaagaggctgatggccgagtacaaacgagattacctggggcaattgatgttatcggtcagacta

SEQ ID NO: 743698 - DNA, 82 bp, Homo sapiens
tgaaggacatgaaagtgctgtacaccaaccgagcccaggtgaatgaaaactttgccattgatttgatagcagagcagcccgt

SEQ ID NO: 743699 - DNA, 75 bp, Homo sapiens
gtgctgggctggtcccccttggccgttcatattctgtgtgttctccaagaatgcttaatcagtgtctggagtcct

SEQ ID NO: 743700 - DNA, 58 bp, Homo sapiens
ccatcttcaaatttgtggaagcttatatgcatttttgtagaagcattttgaggatgaa

SEQ ID NO: 743701 - DNA, 100 bp, Homo sapiens
ctcttccccacctgcccggtgcccgaggaggcagccaagctcgtagcctgccactccgtgcgaaacttggctgtaacttcaaaagaagatttgattcttt

SEQ ID NO: 743702 - DNA, 96 bp, Homo sapiens
cgtcgccgccgtcagagccgccctatcaggtaatgaggagtacctgatcaatctgatagactctccaggacacgtggacttttcctcagaagtatc

SEQ ID NO: 743703 - DNA, 90 bp, Homo sapiens
acttgaatgctagtgtggtgaatattgatacttctacagaaatcaaaggtgaccctgagagtgtggctggggagtatgggcggcactccc

SEQ ID NO: 743704 - DNA, 100 bp, Homo sapiens
cttccccctcgggctccactgccagtcttgctggaggtttgttaaatttatttatcttttcaaaaaccagatccttggctgggtgtggttgcccacacct

SEQ ID NO: 743705 - DNA, 50 bp, Homo sapiens
gcgaggagctctccgagaagcaatgaggacgcaaatcaatttcacagtgg

SEQ ID NO: 743706 - DNA, 98 bp, Homo sapiens
ggattttatggagcattttttgtagaaaacaggatttcaatatgtacagaattcatggatggtcatcagactagtgctgagtcttggggtactggcag

SEQ ID NO: 743707 - DNA, 89 bp, Homo sapiens
cggccgcaggtgaccccttagcccagctccagtgggcgggtggcagtgaataaccctataccttccaatttgaaatcagaagcaaaaaa

SEQ ID NO: 743708 - DNA, 90 bp, Homo sapiens
tttccggggaccacaatgaacaacttgctgtgctgcgcgctcgtgtcacagaagatcttattagacggaatgctgaacacaacgactgtg

SEQ ID NO: 743709 - DNA, 75 bp, Homo sapiens
cacaaaggagagctccgtggagagaaggccagcattgaaacaggggaccgtgtctggaggatgcctctcttcgaa

SEQ ID NO: 743710 - DNA, 98 bp, Homo sapiens
ttttggaaaatgtgataaaaacaaggtggaagattcttccaaggaaccagtgcgaaggacctgagggcactcgctttgctcctgtcagtacacactcc

SEQ ID NO: 743711 - DNA, 100 bp, Homo sapiens
tgtcattatcagcatggacatattaactcttacctgaagcccatgttgcagcgggactttattaccgctttaccaggggtacaggctcgggagaagcagc

SEQ ID NO: 743712 - DNA, 75 bp, Homo sapiens
gacagggacgtcctcattgtcctcgagcctgagaaattggtgcatcatattctccaggatatgtacaaaaccaag

SEQ ID NO: 743713 - DNA, 82 bp, Homo sapiens
cccgataccatcggacaggatttctccgcctcagcccaacggggaggtgacttaagagattaaaattaatttggttgctgtt

SEQ ID NO: 743714 - DNA, 97 bp, Homo sapiens
aagcagtgaaggagtgcagaggcatcacctgaaaggtaccccaagaagctagtgcagacttattcagtgtttccctaccaggacgagatgagcgacg

SEQ ID NO: 743715 - DNA, 98 bp, Homo sapiens
tccagacccctgtggaccagctcctgcaggacgggctccagctgcgctcctgcacattccagtgagtgagatcattggccgagacctgagtggcttcc

SEQ ID NO: 743716 - DNA, 83 bp, Homo sapiens
aagagcacctgaaccagggcaggccccacctgtcgcccaggccacccccaacaggagccttcacgtaaatgggtccagtcatg

SEQ ID NO: 743717 - DNA, 75 bp, Homo sapiens
agcggagagatgctgggcgtggcggccgggatgacccacagtttctgtagaaaatgtttcctgactgcaatgagg

SEQ ID NO: 743718 - DNA, 117 bp, Homo sapiens
attacgtggctattgtctttgaaagcaacagctcctaccttggacgggagcaaacggggattcagcgtccgatcctttggaacagggactcacgtgaagcttccaggaccagctccc

SEQ ID NO: 743719 - DNA, 100 bp, Homo sapiens
tggtcgagagactcagagagaatatccctgccgtaagatacgaccctatattttaaaatgcttaaaacatcttaacccattgcactggttccaattaaag

SEQ ID NO: 743720 - DNA, 74 bp, Homo sapiens
tgggaaaagccaacctggccctgaagaactacagtgtggaagaagccatggatttaataaatagagaaacaatg

SEQ ID NO: 743721 - DNA, 50 bp, Homo sapiens
aaacaaggactctctgtataagttgtcgccgtgatcctgaaggcgctgac

SEQ ID NO: 743722 - DNA, 100 bp, Homo sapiens
tactccagcagggagggcctgttggctttcagccttaccgccgacctttaaattttccactcagggtccttgaatgggcaagagggcacatgaagtacgg

SEQ ID NO: 743723 - DNA, 73 bp, Homo sapiens
aagctgatctccctgctaaatgaaaaagggcaagatactgggacgaaactggaaaatggccttcattggaaaa

SEQ ID NO: 743724 - DNA, 74 bp, Homo sapiens
gctctcggcggcctgatggagtaagaggggttggctgtgaattattctaccttgtaaatactgttatttgtata

SEQ ID NO: 743725 - DNA, 83 bp, Homo sapiens
tgagctcagacctgccaatttaccagagataattgataacaccctgtaacagctgagatagagagatgaactaccaacagaat

SEQ ID NO: 743726 - DNA, 80 bp, Homo sapiens
acagcgcgaggcggcggcagcgagccgggtcccaccatggccgcgaatattggctgcaatgccgtcagctgggcccctgc

SEQ ID NO: 743727 - DNA, 100 bp, Homo sapiens
gaccccgtcggacccatggtttccagtgcagcgcggagtgggcgatgccagcgtgccagattcatgatgttgctatcaaaagttgagaaattgtcagaag

SEQ ID NO: 743728 - DNA, 100 bp, Homo sapiens
ggtccttggagctcatctccacagccgccaaccactccaatgctgccattcggaaagtgtgacttttttgaacgaaccattctgtgcaacagccttgtgt

SEQ ID NO: 743729 - DNA, 100 bp, Homo sapiens
cctcgccctccccaccgacatcatgctccagttcctgcagcaatgcagcaagtcttggaaaaccttacggagctgccctcgtctactggagcagaagaaa

SEQ ID NO: 743730 - DNA, 80 bp, Homo sapiens
gctgctccacctgaaggaccagtgtctgatcagctgctgcgtgctcagccccagagcagatggggtcttcttatgttgcc

SEQ ID NO: 743731 - DNA, 80 bp, Homo sapiens
ccctggaggagattctggggcagtatcaacggagtctccggggatcagtggtcaattggtcaggacagggactacagaaa

SEQ ID NO: 743732 - DNA, 51 bp, Homo sapiens
agcaaatcaatctctgaggttggggatacagcaggccaggagcgatttcac

SEQ ID NO: 743733 - DNA, 100 bp, Homo sapiens
gcccccgagtgagcgcgggcgccgagacggagtctccttctgtcgcccaggctggagtgcagtggcgagatctcggctcactgcaagctccgcctcccgg

SEQ ID NO: 743734 - DNA, 50 bp, Homo sapiens
ggagcgttacaaggccttctacattaccgccccccgaatccaagcccaac

SEQ ID NO: 743735 - DNA, 73 bp, Homo sapiens
gccatgcagggtcgaacggactgcatccgagccctgatgctagcagattccactgtgtaaagtaattagattc

SEQ ID NO: 743736 - DNA, 100 bp, Homo sapiens
atcctcaagaagaagaagttgcgaaggatccccaacggggaggccaacgtgaagaaaaaaggagaacaacttcccgccactgcccaagttcatccctgtg

SEQ ID NO: 743737 - DNA, 100 bp, Homo sapiens
cgagctgctgctggattgaactcagagaagccgggggagcagctgcccaccctgacagtgaggagcagcagcagcggctgcgggaggcagctgaggggct

SEQ ID NO: 743738 - DNA, 74 bp, Homo sapiens
tgacaatgatatggaaagaaaaaaagtcttggatgatctaaccaagcctgagacctcagatcattgttccctcc

SEQ ID NO: 743739 - DNA, 74 bp, Homo sapiens
cacattgccaagccaggctggaaggtatcacctgattttgatacagcagcaggaagcttgttcccagcctacca

SEQ ID NO: 743740 - DNA, 100 bp, Homo sapiens
ctgctgtggaagggctccttcaagcccagcgagcatggtggcagagcgagctctctattactggaataatgaatacatcatgagtttaatcagtgacaac

SEQ ID NO: 743741 - DNA, 82 bp, Homo sapiens
ctgtgcgccttcctctcgctgtcctggtacgcggcactcagcggccagaaagaacccagcgggtgccgcttctccacccgag

SEQ ID NO: 743742 - DNA, 75 bp, Homo sapiens
atggcagcagttactcgcacaaccccagttaagctgcgctccgggaggtcccgcagcccccggaagccaatagac

SEQ ID NO: 743743 - DNA, 100 bp, Homo sapiens
cttcattcccatgcagtttgggatcatccagaagcatctgaagaccatggatcacaaccggaaccgcaggctctacgtggccacggaggccatcctcatt

SEQ ID NO: 743744 - DNA, 87 bp, Homo sapiens
agaatctcaaagtgaaaggaccagttcgaatgcctaccaagcttggagttatgacctacagtgatacagggaaactaagtccagaaa

SEQ ID NO: 743745 - DNA, 117 bp, Homo sapiens
acatgcaggactctagtaacccgcgaaatgatgggatagcgttgcaaatccttaaaagagtcttaacgatcagaccccaacaccaacaagattcttgaaaaactgtgaagaagtggg

SEQ ID NO: 743746 - DNA, 75 bp, Homo sapiens
gaagagcatgcattgtgggttactggaggaacccgacatggattccacaggtatggacctgtctgccaatcagga

SEQ ID NO: 743747 - DNA, 83 bp, Homo sapiens
ggaaaaggaatcgtatcgtatgtccgctatccagaacctccactctttcgatgcttcaggactgccccaaggcccgcagggag

SEQ ID NO: 743748 - DNA, 100 bp, Homo sapiens
cgcgaaccgagcgggcggcgggcgcgcgcaccatgggggagaaacccgggaccagtccagggaccttgacccagcccctctcagcagacgcttcatgata

SEQ ID NO: 743749 - DNA, 100 bp, Homo sapiens
ggagaattcaacacaggtgtgctgcctcctctcctgccaggtgtgtggctgcacaggagtcttgctgatgtaagagatgctaaaaaccttgtacctatgg

SEQ ID NO: 743750 - DNA, 100 bp, Homo sapiens
aggtgttagccaccagtacaaaacatgttcacatgagagatcctaataatcaacttcacgtaattaaaaatttgaagatagcagtaagcaacattgtcac

SEQ ID NO: 743751 - DNA, 90 bp, Homo sapiens
ggcaacatggtgcggtcggggaataagaatctgtccttcttcctgactccaccatgtgcacgatgggctcagctttcagaagtgctgagt

SEQ ID NO: 743752 - DNA, 83 bp, Homo sapiens
gagagaggtacctctccttttccctctccctttccctaaggctgcctgctgtttcccggggagatcatgaaacgaggtcgcct

SEQ ID NO: 743753 - DNA, 90 bp, Homo sapiens
gccgccgcggcctcggacgactcgccttcagaaggcaagggggtacctgtctttccttattccctcatccttagtggatcatttgtatct

SEQ ID NO: 743754 - DNA, 90 bp, Homo sapiens
atcaaaatcaccagcaagtttcgaggcaaatacctctccattatgcccctcgatgtttccattcctgaaaaacccaagcttagatttatt

SEQ ID NO: 743755 - DNA, 80 bp, Homo sapiens
atgatgaggaggactacgacctgggcaggctttctattttaaaagtctgtacaaaaaccatgccaatagggcctgatgtc

SEQ ID NO: 743756 - DNA, 75 bp, Homo sapiens
cctaaagcagctctcatttgcaggtatccatcatcccacgtggcaaaggactaggttatgctcagtatttaccaa

SEQ ID NO: 743757 - DNA, 75 bp, Homo sapiens
tccagttgcacatttcctgcaaggactccaaagtggtgagctcatgggcctcctgagtgacccagaattaggtcc

SEQ ID NO: 743758 - DNA, 100 bp, Homo sapiens
cattgcatgattctccagtatatttgtacaaattatttggctcgacttctagtttttgtcttatttcaggcagctctgtccagtggagtgacccgttgcc

SEQ ID NO: 743759 - DNA, 74 bp, Homo sapiens
cctcctgcataactgggactacagcaagaaggccctcaccagatgccagcaccttgacattggactttccagcc

SEQ ID NO: 743760 - DNA, 100 bp, Homo sapiens
gcctcagcctctccgtgcctgccacgcgccagattggccgcgtaatccaggttgctgctgggagcagcaacctcaagagagtgaccttggagctgggggg

SEQ ID NO: 743761 - DNA, 100 bp, Homo sapiens
gcagtgcatagtgggcatcttgagggtgtccgcaatgttgccagtgtctgtctgcagattggctacccaactgttgcatcagtaccccattctatcatca

SEQ ID NO: 743762 - DNA, 100 bp, Homo sapiens
cctggttctgccttctggacaatctttccggaatcatctgctgcagtttgctttagagtcaccagccaaatctcctgcttcttcctcttcaaagaatctt

SEQ ID NO: 743763 - DNA, 75 bp, Homo sapiens
ctgtcgctgacggcgactgcgggaggccagatcgtcagtatttaaacagatcacatcatgcgtgagtacaagcta

SEQ ID NO: 743764 - DNA, 100 bp, Homo sapiens
cgacaagcccgggagacacagtgtcagaattacaaggtgagatcagccgcccggccaagctatcttctcgctagcagggttttggccaaattgggcgagg

SEQ ID NO: 743765 - DNA, 100 bp, Homo sapiens
tatctcagctctgtcatgcaggccatcttcagcatcccagaattccagagagcctacctgacttacatcaagctatcaacggcaatcaagcgtaatgaga

SEQ ID NO: 743766 - DNA, 98 bp, Homo sapiens
tggtgtgaaggttggcctgacaaattatgctgcagcatattgtactggcctgctgctggcccgcagggatgaaaactttcggaagagaaagttgcctg

SEQ ID NO: 743767 - DNA, 97 bp, Homo sapiens
tgtggacatgctgagtgaattagtccaggtgcactacatcctccaggaggtggtgatgggtgggatggtgttggaaacaaacatgaatgaaatcgtg

SEQ ID NO: 743768 - DNA, 75 bp, Homo sapiens
ctctgaacgcggccaaggtgccggccgacaccgggacacctgtgaaccgcatccccatcatggccaaacaggtcc

SEQ ID NO: 743769 - DNA, 100 bp, Homo sapiens
tttccagcagggacggcgcagtgttggcctgcatgcctgactgccacacacctccagaatcaggtgtctgaaaaatgatagtgtcgaaccaagtggaaca

SEQ ID NO: 743770 - DNA, 74 bp, Homo sapiens
cgcagtggtcgcttcttctccttgccgggcccctcagatgagagctgcacccaggccagcaccagtcgctcagc

SEQ ID NO: 743771 - DNA, 100 bp, Homo sapiens
gtggaactgctccgctctcagctcatcctgaagcttcggcagcactatcgggagctgtgccagcagcgagaggctaagtttggtgcgaacgccattctgg

SEQ ID NO: 743772 - DNA, 74 bp, Homo sapiens
tagaactcgcgtttccacttcagagatctggagaatggtgttgaacgcgtgtgtcctgagagcctgctgcagtc

SEQ ID NO: 743773 - DNA, 98 bp, Homo sapiens
gtgctgggcgcgcaccgtggccaccctgtgggcctggcgctggaggcagcggtgcacgtgcaggtatttcccaggtggtgaaggaccacgtgaccaag

SEQ ID NO: 743774 - DNA, 96 bp, Homo sapiens
ccacgagcccagagggacagcccaaggtccaccgagcccgcaaaaccatgtccaaaccaggaaatggacagcgagaattagaactgcagcgtcagc

SEQ ID NO: 743775 - DNA, 59 bp, Homo sapiens
ggacgctgcacctcccgcgccgcacggtggacgagttgaggagctcaagcttgggaaaa

SEQ ID NO: 743776 - DNA, 80 bp, Homo sapiens
ccactttcgccagcccgtgccgcgagcgcggcctgcaggagggcctcccagagtgaaggctgtgaagtcgtcagaacaca

SEQ ID NO: 743777 - DNA, 100 bp, Homo sapiens
tgtttgaaagctctcagcgggacaatgctgacccaggttttcaaatggaacattttgatgcatcacttagtacctatttcaaggcattgctaggccctcg

SEQ ID NO: 743778 - DNA, 108 bp, Homo sapiens
gagagtttaaacagccaaaacagttcattcatattcagcgacccaggaccacccccaccttctccattactaggtttgaaaccactgcagttattagaagtgaaagca

SEQ ID NO: 743779 - DNA, 60 bp, Homo sapiens
accgcgccccgagaaccaatcagcagccgcgttagtctattatcctcccagtccacaacg

SEQ ID NO: 743780 - DNA, 82 bp, Homo sapiens
tccacaggatcagagtggactttaaggtccccccggggggtaataagacgcagtatgatgagattggcattcccgtggccct

SEQ ID NO: 743781 - DNA, 100 bp, Homo sapiens
caccaagaggcccgggctgcgggcgctgaagaagatgggcctttccgttccgaacgtccacggcgccctggcccccctggccatcccctcggcggcggcg

SEQ ID NO: 743782 - DNA, 73 bp, Homo sapiens
actataggattggaaaagtgacatcagaggaggtttggagtccgccctctgcctaaacgccagatggttctga

SEQ ID NO: 743783 - DNA, 96 bp, Homo sapiens
gatatgatccagttaaactttttaccaagatctggaatcgatgtgtgaaaccaagttattatctctaaagaaggaagtttatgaaatagaattatg

SEQ ID NO: 743784 - DNA, 100 bp, Homo sapiens
aaacacaaaaaacaggataaaatcttatgattatgaggcatgggcaaaacttgatgtggataaaatggaccagttgctacagatgctgcaaagtacagac

SEQ ID NO: 743785 - DNA, 100 bp, Homo sapiens
gagacccagcacatcgccgaccaggtgtcccgacccaggctaagcttgagcatggctgagcaggagcccacagccgagcagctggcccagattgcagcgg

SEQ ID NO: 743786 - DNA, 50 bp, Homo sapiens
ggcgttctggatctcaaagcggagcggttggttccccgaggcgtacgtga

SEQ ID NO: 743787 - DNA, 100 bp, Homo sapiens
tgacactcaacaggattcccgatgacttcaaacctgcttctattgacacttcttctgaaggataccttgaggttggtgaaggtgaacaggtgaccataac

SEQ ID NO: 743788 - DNA, 95 bp, Homo sapiens
cagatttcagatactctgactccacctttacttttacctacgttggcggccccagaagggtctcactgtgccacccagctggagtatagtggtgc

SEQ ID NO: 743789 - DNA, 82 bp, Homo sapiens
tcccaaggaacacctgggcaacagaatattggtcaagttgctgaccttgaacaaacggggattcagcgtccgatcctttgga

SEQ ID NO: 743790 - DNA, 90 bp, Homo sapiens
ccgctgcatcctgggacagccatcccactggaacgggcccctgcccgtgtgtaaagtaggagagaagtttgctgaggaatgccttcaagc

SEQ ID NO: 743791 - DNA, 80 bp, Homo sapiens
acagaagtggggagaagcggaggtgtgggcccatcgctggatggatctgtcagaacacggctttgggctggccctgctca

SEQ ID NO: 743792 - DNA, 82 bp, Homo sapiens
gaaggaattcctggatgacttgttcagcttcatgcagaagcgaggaatactcccccagttgcaagaggcgcaggaccgtgga

SEQ ID NO: 743793 - DNA, 78 bp, Homo sapiens
agtcccacttcaaacattcgtctcggaaaccccgcctcttacagtcacgaggtggtcgttctcgttaccggaccactt

SEQ ID NO: 743794 - DNA, 50 bp, Homo sapiens
tctccctgttggttctgattagctgctgtatgtttccaggaaacttctag

SEQ ID NO: 743795 - DNA, 75 bp, Homo sapiens
catctacaaccttcgatctcctgacgagtctgaagaactgttgcccaattcaacagtgccagcattccaactttg

SEQ ID NO: 743796 - DNA, 88 bp, Homo sapiens
gagtcctcgccatgccggcccggcggctgctgctgctgctgacgctgctgctgcccggcctcgggattagaagcccaggacccaggaa

SEQ ID NO: 743797 - DNA, 75 bp, Homo sapiens
cccgctgccgtcgccgccgccaccatgcccaagagaaaggatgaatttcatcctttcatcgaagcacttctgccc

SEQ ID NO: 743798 - DNA, 75 bp, Homo sapiens
caggatagtatcttggccagggaactcaaacagcagatgcaggtttgttggagactgaaccgttgcaaggaacag

SEQ ID NO: 743799 - DNA, 75 bp, Homo sapiens
tttcctgcttttggtttccctggcaggggttgaactgtggagtgtgtggacttagaaggttttgactccgtggta

SEQ ID NO: 743800 - DNA, 116 bp, Homo sapiens
ggctgcctataatcaagtaaaaacaatagctcaaggaaacctttccaacacagatgtccaagctgccaagtctctaattaacagaagatggcaaagcccagccacagcagctatgt

SEQ ID NO: 743801 - DNA, 101 bp, Homo sapiens
cgcggggcgctgctgctggcgctgctgctggctcgggctggactcaggaagccgggcatcaagcatgatggaaccatgtgtgatacctgccgccagcaacc

SEQ ID NO: 743802 - DNA, 100 bp, Homo sapiens
aagtgattggtgcttctgtggattctcacttctgtcatctagcatgggacagtgatccccccacaggcctcgctggtctttcacgtcctcctgattgacg

SEQ ID NO: 743803 - DNA, 75 bp, Homo sapiens
tgcgagttacaccaaccaggacagaaatcattatcttagccaccagtttgtgaatagcacaatggaagaagctgg

SEQ ID NO: 743804 - DNA, 89 bp, Homo sapiens
cgcctactccaaagcggccgggagtcgcgcttcttccccactcccgagacaggaaataatgcaaaaggtgtcccaaggctcctgaccag

SEQ ID NO: 743805 - DNA, 98 bp, Homo sapiens
tcacgcagctccacagacagccccagctcggtgttcctcaggttattcacatcgaactcctttgatgtgatcagtgatgatgcttttattggtcttcc

SEQ ID NO: 743806 - DNA, 90 bp, Homo sapiens
cccactggcgaagagaagctacaaaatatgctcgatggatagcattcactggaagtgcccctgctgatgacgcccccaccaccaccgttc

SEQ ID NO: 743807 - DNA, 83 bp, Homo sapiens
agaagctgtctctgatccgcaagcatgctcagaccttcattgctctgtgtgccaccggagccttcacgtaaatgggtccagtc

SEQ ID NO: 743808 - DNA, 82 bp, Homo sapiens
ctttgcgtacagctcccaggagaaggcttgccgagggttttcagagaaagatgctgatgaggtgaaaggaatttttgtagat

SEQ ID NO: 743809 - DNA, 75 bp, Homo sapiens
caaacagagatatcatttgtcagagcttcatagcaagtgaagtactcaagttgttcagtcttaaaaaggagccaa

SEQ ID NO: 743810 - DNA, 100 bp, Homo sapiens
gagaagagggggaaaaaggaagtttgtcctgtcctggatcagtttctttgtcatgtagccaagactggagaaacaatggtgataaaagaaaatgtggctg

SEQ ID NO: 743811 - DNA, 90 bp, Homo sapiens
ttctagtactttaaatttagtggttgctggagcacctaaaagtcagattgaccttagctggatctccaaaatacaagtgaatcacccggc

SEQ ID NO: 743812 - DNA, 100 bp, Homo sapiens
ccttataggcgtcagcgggggaacagctagcggcaagaccctgcacttgatggaccagctggcaccacccagatcaataaactggcttatttgaatttgc

SEQ ID NO: 743813 - DNA, 100 bp, Homo sapiens
tgagccttcagacttctgtacagcagctgaaagaccaggagtagaggattagagaaggggacaccggagccactcccaagggaatgaaggctttctgaac

SEQ ID NO: 743814 - DNA, 83 bp, Homo sapiens
ccagcctggagctgtgccagcctgacatggaaaccaaggtgtatgttggtaacctgggaactggcgctggcaaaggagagtta

SEQ ID NO: 743815 - DNA, 88 bp, Homo sapiens
aaacaggatgcctgcaaaggctccacctggtgatgaagggacagatatggcttttctaaagactgctttggaaatggcaagaacagca

SEQ ID NO: 743816 - DNA, 101 bp, Homo sapiens
cttatggcagtgatagtcaagtgtatcacgccgtgaagtcaactgtttggcacggcatatcttcccaaagatcttggccactatggactacgatctttatt

SEQ ID NO: 743817 - DNA, 83 bp, Homo sapiens
gggccgccgccacccgcctcccaccatggctctgaagagaatccacaaggtgtcagttgtacccgaggcgttctcagcagcag

SEQ ID NO: 743818 - DNA, 98 bp, Homo sapiens
tggactcttaggtgttctgcggttaaatcttgatttcagccttccaagttctgatgtaacaaacaacttaaaacccagtcttcatccacagatgaact

SEQ ID NO: 743819 - DNA, 83 bp, Homo sapiens
agaatatgatccagatgatcatctgatagaagagagccctgcgctgggttacgcctcagatgctgtgtgtccctgttaatgaa

SEQ ID NO: 743820 - DNA, 100 bp, Homo sapiens
cttccctttggatgtagcaaggaagaaattgttcagttcttctcaggcaatggatcacttggagtcctttattgctgaatgtgatcggagaactgagctc

SEQ ID NO: 743821 - DNA, 75 bp, Homo sapiens
gttggagttttgcccacgcgttgtaattaagcctcgcacaatatgacaaatttacatgtattggagaccagacca

SEQ ID NO: 743822 - DNA, 78 bp, Homo sapiens
aaggcaaagcgaaattggtcattctcgctaacaactgcccagctttgagattgatcagggaccatgaaaagaaacttg

SEQ ID NO: 743823 - DNA, 98 bp, Homo sapiens
gagcccattatgaaactgaaggtagccgaggggcagtaaaagcatctactgggggacatcctgttgtgaagctcttcgagagaacctgtcgccagtat

SEQ ID NO: 743824 - DNA, 100 bp, Homo sapiens
caaagatttacagattggaacaactctccggagtctgaaagatgcacttttcaaggaaaatcctgccttgcttcgttgggcctatgcaagaacaataaat

SEQ ID NO: 743825 - DNA, 75 bp, Homo sapiens
cctctctacattccagtaacccaggttacagattatgccattgccaggcgcatagtagatttgcattcaagaatt

SEQ ID NO: 743826 - DNA, 95 bp, Homo sapiens
agccaacatgcagttacaacagcatacagcatttctcccaccaggtgattttacaacgagatgctgctctccatagggatgctcatgctgtcagc

SEQ ID NO: 743827 - DNA, 75 bp, Homo sapiens
ttggttgggacgcagtctcttaaatatgataatcagggtgttgaaagcagcaggggcctagaagacattaaaccg

SEQ ID NO: 743828 - DNA, 82 bp, Homo sapiens
cgagccagcccgccagcatgccccagtccaaaggctcttctcaaccatctgtgagtccaggggaaccgtctccaccatccat

SEQ ID NO: 743829 - DNA, 74 bp, Homo sapiens
ggagcacgcagacccgcttttaaagcagcagtgttgtactgctacttctataaacggacagccgtaagactagg

SEQ ID NO: 743830 - DNA, 100 bp, Homo sapiens
ctggccggagcctgctggagtcgccgggactcaccagcggcagcgacaccccgcagcaggacaatatccttggaacagaagatcttattgtggaagtgac

SEQ ID NO: 743831 - DNA, 75 bp, Homo sapiens
gcggcttccaggcgcactaccgcgctgtccccgccctactccggaccgccccaaagactccatgggatggacctg

SEQ ID NO: 743832 - DNA, 74 bp, Homo sapiens
ccgcttcgtcctctgcagtcaagacgctgggcgcgtcgaggactgggtgagccctattcccagaggcaggtggt

SEQ ID NO: 743833 - DNA, 74 bp, Homo sapiens
cagcctcccaagtaactggaactacagtttgaacaaaaaagtggtgcagtttttgatgaaattgtagagaactg

SEQ ID NO: 743834 - DNA, 100 bp, Homo sapiens
aaaggccggaagcggccgggctggatcaggatgaggagtatgctgtgaactgccatgtgatcacctgggagaggattatcagccactttgatatttttgc

SEQ ID NO: 743835 - DNA, 100 bp, Homo sapiens
cgatacgggagctcaaagtgtgccttctcggggcttcaacggaccacaccaaaatgccatctcaaatggaacacgccatggaaaccatgatgtttacatt

SEQ ID NO: 743836 - DNA, 74 bp, Homo sapiens
tggacatgaaggcaaaggcagcattctttctttccttaggaaaaaggagcatgataaagatccagaaagctttt

SEQ ID NO: 743837 - DNA, 51 bp, Homo sapiens
tgtctgtctgctgcaaggagaggaaacctcacatcttgctgttccggcgcc

SEQ ID NO: 743838 - DNA, 75 bp, Homo sapiens
cagcataacatggggcttcagctgagcgtggtgacaagggatggttgattgtacacagcactatgaactctgctc

SEQ ID NO: 743839 - DNA, 82 bp, Homo sapiens
agtggctctgccacaagagcatctttgctggattatcttcaatgcttaaagcttttcaagccaggccaagaagctgtgaagt

SEQ ID NO: 743840 - DNA, 75 bp, Homo sapiens
ccaaagacaaaagacacagaagaaaaagtgggactgaagtacactgaagcaggaaaagaatacttgagatccatt

SEQ ID NO: 743841 - DNA, 74 bp, Homo sapiens
ggatctctagcctacaggatggcttggccttgcacataaggtccacgctgcttttatgagctgtaacactcacc

SEQ ID NO: 743842 - DNA, 75 bp, Homo sapiens
tgcagctgcctcagttcttagcgcagctctaagcgaaagacatgaggcctcagcctgaaatgaggttgttttgag

SEQ ID NO: 743843 - DNA, 50 bp, Homo sapiens
aatgggtagtgaagacccatgtcagctttgggacatccggaagaaagcag

SEQ ID NO: 743844 - DNA, 96 bp, Homo sapiens
gatgataaccacccaaggcccaaaagcgtcaaactcaccaaaaacaacatctttccagaaagagttactaaaccaaggagatttaactgaaagacg

SEQ ID NO: 743845 - DNA, 90 bp, Homo sapiens
tgatgcttctgggccaccatttgccagggcctcgctcgaggttgaaatcacaaagattagacacctttttagataggtgttcttcagcac

SEQ ID NO: 743846 - DNA, 101 bp, Homo sapiens
cctgtctcccggaggagcgcgcacctttaaaattggtggtgaatggtggacatggatcgattataaccgcttccaggagctcatccaggaatatgaagata

SEQ ID NO: 743847 - DNA, 98 bp, Homo sapiens
cagggggcatagacttcaaccagcctttggtcatcaccaggggtatcactgggatacatcagattggatgccaagcgttcctctgccggacatacaag

SEQ ID NO: 743848 - DNA, 75 bp, Homo sapiens
aaagagttgattgaaattatctctggtgctgcagctctgccgaggacgatgatcccgccgggggagtgcacgtac

SEQ ID NO: 743849 - DNA, 82 bp, Homo sapiens
gagtcaccagtggccctggaggaggccaagaagctgccagtaactcagattctagccatgaaggtcaagaggaatcttcaaa

SEQ ID NO: 743850 - DNA, 75 bp, Homo sapiens
ttcctttagcaacgccaaatggagatgttttgatccgagaccttaattttgaatgtttcctgaggttataggcgg

SEQ ID NO: 743851 - DNA, 76 bp, Homo sapiens
gttgtagaagacatgtggtgtatataaagtttgtgatcgttggcggacattttgatcctgtttgaccaaactcaga

SEQ ID NO: 743852 - DNA, 82 bp, Homo sapiens
gtcgtgatccagaagtccagagctgaggactgcctgtttgcagctctaagcgaaagacatgaggcctcagcctgaaatgagg

SEQ ID NO: 743853 - DNA, 82 bp, Homo sapiens
tccgagccccttcctgagaagatcccagacttcccagactcccggccagccatcgaggacctcaagtactgcctggagagga

SEQ ID NO: 743854 - DNA, 100 bp, Homo sapiens
gagtcttctggcaaacagtgtttgcctctggttcagctcatacaacagcttcttaggaaccgcggggaaaggcgaatgggtgcttttgaatgtgttcgta

SEQ ID NO: 743855 - DNA, 97 bp, Homo sapiens
aaggaaaaataagcttgaagaaactttccctgcctatttacaatatttgtgtggaagtaatcgaaaagacaacatatttattgatcctggataccaa

SEQ ID NO: 743856 - DNA, 94 bp, Homo sapiens
gcctcgcctttgccgatccgccgcccgtccacacccgccgccaggggatttgggagcagcttgtcttacacaaggacgaaggaaaaggtcaggg

SEQ ID NO: 743857 - DNA, 50 bp, Homo sapiens
gtccaaaggggatcccactgctaaaaaggctcagcttgtcaatcggaaac

SEQ ID NO: 743858 - DNA, 82 bp, Homo sapiens
ggaatctatagttaatcttggcgacattgacaatgatggctttgaaggatccatgctgcagaatggtgtctctgattttgag

SEQ ID NO: 743859 - DNA, 75 bp, Homo sapiens
catccagagagaggctctttgaactttggatgctttattgtacaaagccatgaagatggacctacagctaaaaaa

SEQ ID NO: 743860 - DNA, 100 bp, Homo sapiens
ggaagggcgagactggagcagagccgctgggcgccggagccgaggcgagcgccgcgcgcaccactgataacggcaaaagcttctatcatttttgttactc

SEQ ID NO: 743861 - DNA, 125 bp, Homo sapiens
tggcattgacatttaattttagggtcctttatatagaagggagagtagctttcaccaacaatcaccagtggtttacacaacattgcaaggagcattgaaactcgaaactactcagaaggattgac

SEQ ID NO: 743862 - DNA, 100 bp, Homo sapiens
cgactgatgacttcagggatgctacacctttctctcctgcctgggcaagcctcgatcatggaagggaagtggttgctgtgtatgttactggtgcttggaa

SEQ ID NO: 743863 - DNA, 101 bp, Homo sapiens
gacagtctcgccagcgtctcctctgccaaaacccagggctggaagatgtggcagccggccacggagcgcctgcaggtgtgggccatgtttgaggattgccc

SEQ ID NO: 743864 - DNA, 100 bp, Homo sapiens
cctctccgccccccaggaggggcgagagggagccgcagctgatgtcagggtgtgtccgcagccggccaggtggtatccctgaaggtgtggctgattgacg

SEQ ID NO: 743865 - DNA, 100 bp, Homo sapiens
gacagctgctccatgctctaccgcctgcagatggaagacgatcctacacctgccacctccgatggatccactgcctctgtgcctgcctgtactgccgatg

SEQ ID NO: 743866 - DNA, 82 bp, Homo sapiens
attggaccctcctcccaactgtaggatgaacttactgctgtgaatgtaaagcaaggcttcaataatcagccagccttcactg

SEQ ID NO: 743867 - DNA, 118 bp, Homo sapiens
agccccccagctgaccctacagctgtacataagtgtcatgcagcaggacgtcactgttggaagaatcactcaagactgcttgcaactgattgcagacagtgaaacaccaactatacaa

SEQ ID NO: 743868 - DNA, 96 bp, Homo sapiens
atacttacaccatgccctcaagtgcctttgaacccttgtgcactttttagttagatctttattaacatgctatgccactgcagggagggagcagga

SEQ ID NO: 743869 - DNA, 83 bp, Homo sapiens
cttgccctggtcttgctcggccgatgaagtgcagaggtttttttctgaatggtgaggttctggagaattgatgaggattatcc

SEQ ID NO: 743870 - DNA, 75 bp, Homo sapiens
atggtgcggctcatcttcgagaggcagtaccaagaagcaagagagacctatcttgatctggatagtaaagtgagg

SEQ ID NO: 743871 - DNA, 75 bp, Homo sapiens
agcctcccaaagcattgggcttacaggccatcaagccctgtcgtcctatgaccaacaatgctggcagacttttcc

SEQ ID NO: 743872 - DNA, 82 bp, Homo sapiens
tgtgtagaaagtgaaatcagaggagatgtaactatcgaatgccagctgatgaagaccgagaggccgcgacccaacacctttg

SEQ ID NO: 743873 - DNA, 98 bp, Homo sapiens
ttgggtttatgtctttatttgacgaaaacggaattacatgaatgacagtcttcgaaccaatgtgtttgttcgatttcaaccagagactatagcatgtg

SEQ ID NO: 743874 - DNA, 75 bp, Homo sapiens
atttgttaaggattccaagtaactcttatttgctggtgctcaagaccgaatcggctgggcttttggcctaggatt

SEQ ID NO: 743875 - DNA, 75 bp, Homo sapiens
gggggaccggtgctggcgagacctcacctgcatggacttccactatgagcgctgataaagcagtttgtgtccgac

SEQ ID NO: 743876 - DNA, 100 bp, Homo sapiens
ggagcggccggggcctggggctgcctgccgggcggccgggcgcggcgagcccaggaacttaaaaggagtctagaaaatccagcagaaaggaaaatggaag

SEQ ID NO: 743877 - DNA, 98 bp, Homo sapiens
gggtcctcgctgtggggcaatccgggcttgcagacgagactgtgccctgtccacggtgcctcctgcatgtcctgctgccctgagctgtcccgagctag

SEQ ID NO: 743878 - DNA, 75 bp, Homo sapiens
tgaacgggtcgagatgccgacaaaatccattcctcgctgccgaagaattaacaggatgctctccaatgaatccct

SEQ ID NO: 743879 - DNA, 97 bp, Homo sapiens
agtgttgaaggagtccttgactgctaaggagcagagggctgccatcctgcagactgagtttgtgaagaaatatgggaacctttttagcttggagctt

SEQ ID NO: 743880 - DNA, 83 bp, Homo sapiens
agcctcatcacccggctgctggagggacatggatttgattgacatactttggaggcaagatatagatcttggagtaagtcgag

SEQ ID NO: 743881 - DNA, 100 bp, Homo sapiens
gcctttgtccgtgttcggtgaccgcagcactggggaaacgatccgctcccaaaacggttgagtgaacccaacatggcttccatcagtgggcagctggagg

SEQ ID NO: 743882 - DNA, 77 bp, Homo sapiens
ccggagacatgtccaggcggaaacagagcaacccccggcagatcaagcgggacggcaaaacagaacagaaaggcgga

SEQ ID NO: 743883 - DNA, 75 bp, Homo sapiens
cttggagaggcgggttaggaaggcagttgtgaaaaacttcaggacaaaaatgtttcatttaaggacttgtgctgc

SEQ ID NO: 743884 - DNA, 100 bp, Homo sapiens
gggggcgggaagcggccccttcgtgtgcgcttgggcgaggccgggcggcgcttctgtcctcctactcggacccgcagactgcttttcaggaagccttgga

SEQ ID NO: 743885 - DNA, 90 bp, Homo sapiens
gctgagtttaaatgaagaagaaatacgtgcaaatgtggccgtggtttctggtgcaccacttcagggggtggatgcccggagcataccagt

SEQ ID NO: 743886 - DNA, 50 bp, Homo sapiens
gccgggacacgcctagcgcgggctccagtttggcaatgaggagcagcagc

SEQ ID NO: 743887 - DNA, 75 bp, Homo sapiens
catttggagatcttgacaaagcctcttctgtttccaatgggatgttcctcctgctgatcaagagaagctttttat

SEQ ID NO: 743888 - DNA, 88 bp, Homo sapiens
gacagcggcgctcccggcggggcggccccggggggacccggcttccgcgcctgagaactacgatgacccgcacaaaacccctgcctcc

SEQ ID NO: 743889 - DNA, 82 bp, Homo sapiens
gtggaggtcgtggacctggtcctgaaacttcgtgagaagctgggctccagcaagagcttcccatgtggctcggagcacctgc

SEQ ID NO: 743890 - DNA, 100 bp, Homo sapiens
gaaatagttcagttctttcaagcaccggtttctgttccccttctttgactcagcctatcagggcttcgcatctggaaacctggagagagatgcctgggcc

SEQ ID NO: 743891 - DNA, 75 bp, Homo sapiens
tcaaattgaagagagcagttgaagaagtgaagaaattattggtacctgcagagtcttttagtcctgctatacagc

SEQ ID NO: 743892 - DNA, 75 bp, Homo sapiens
gctggagcgaccccttgttctttggtggcgctggatactgtcatgaagcagacacatgctgacacacctgttgat

SEQ ID NO: 743893 - DNA, 88 bp, Homo sapiens
tattgtggcattgcgccgtacattcgagagtttgagggagtggacatccgccataacaaggaccgaaaggttcggcgcaaggagccca

SEQ ID NO: 743894 - DNA, 50 bp, Homo sapiens
atctgaattggctcaatgatgaggtggttgaacagggtatgtttgtaaag

SEQ ID NO: 743895 - DNA, 90 bp, Homo sapiens
ccagcctgccgagcgcagggccagctggaaccacctgatatggaccaagatgcccaatcccatgccagtgtctcctgggttgtggacccc

SEQ ID NO: 743896 - DNA, 96 bp, Homo sapiens
tgctgcctcccctccaacagccacagctattggatttcccacccagaatctttaggtaaatgagagttggccaccctgttcaagggcttaggagaa

SEQ ID NO: 743897 - DNA, 83 bp, Homo sapiens
gcgcggggggtaattcggggtctgggttctggtgccgcgcagctttccccggtgtgtgtctggggaagagacttacagaagtg

SEQ ID NO: 743898 - DNA, 50 bp, Homo sapiens
agatcatctacgacgagaaccgggtggtgaagcagtattttccaatttga

SEQ ID NO: 743899 - DNA, 72 bp, Homo sapiens
gatgttcatgggcagcaccatcgagccagaagcagtatttgtcctggtagcagcaattgcagagacagatga

SEQ ID NO: 743900 - DNA, 100 bp, Homo sapiens
ctgagtggttgtgtggtcgcgtctcggaaaccggtagcgcttgcagcatggtgttttagctcacttggaaaggctagagacccaagtgagcagatcccgt

SEQ ID NO: 743901 - DNA, 74 bp, Homo sapiens
tgcggaaccgccatggccgagccggcttcgtttggaaattttagcattcaggtgccaggaatgcagatgggaca

SEQ ID NO: 743902 - DNA, 100 bp, Homo sapiens
cgtgggaggaggaagatggcggccggcaagagcggcggtagcgcaggggagattacttttctggaagaaatgcactcggtgatggaaagagagccactat

SEQ ID NO: 743903 - DNA, 90 bp, Homo sapiens
tgaggaactgaagacgagaggatttggaggaaactatggtccaggaggcagtggaggaagtgggggttatggtgggaggagccgatactg

SEQ ID NO: 743904 - DNA, 76 bp, Homo sapiens
gctgcaaccccaagatgtcggagacacggtggaaacgcttatggtgttcaggcgcttcgtggaggttggccgggtg

SEQ ID NO: 743905 - DNA, 100 bp, Homo sapiens
tctcctggctcccttctgccccagctccgtctcggcggcggcgggtgttttagctcacttggaaaggctagagacccaagtgagcagatcccgtaaacag

SEQ ID NO: 743906 - DNA, 82 bp, Homo sapiens
ccaaggaaaagctggcacagaccgccacggaaatgcgtgtactgccggaagcggatgaagaaggtgtcaggtgcctgtatcc

SEQ ID NO: 743907 - DNA, 75 bp, Homo sapiens
gaggtacctctccttttccctctccctttccctaaggtcccgtggctgtcatcagtggtgaggaggactcagcca

SEQ ID NO: 743908 - DNA, 100 bp, Homo sapiens
ctgccgaagtcagttccttgtggagccggagctgggcgcggattcgccgaggcaccgaggcactcagaggagttagttgaatccatggacatgaaaccca

SEQ ID NO: 743909 - DNA, 75 bp, Homo sapiens
cagacagctcaggctgcccagatggtggctcccggagtccaggacatggcggactcccgccgcatcaatgccaac

SEQ ID NO: 743910 - DNA, 96 bp, Homo sapiens
caggaagttttgtcttggaggtggcattgttgggagcgctgttttcgtgatcttcagaccccaggttctttggtgtcagttgtacccgaggcgttc

SEQ ID NO: 743911 - DNA, 89 bp, Homo sapiens
gtgcctcccagcaccacagtccttctgcagtccctcgtccagccacccccaggagcgagagagggtttgggacacgtacagtggcctgg

SEQ ID NO: 743912 - DNA, 90 bp, Homo sapiens
cgttggtgctgtttgcggatgctgatgcagcttacagggcccttccattattgaatgcacggcttctggcatctgggacagagcgccacc

SEQ ID NO: 743913 - DNA, 100 bp, Homo sapiens
ctcgctcgccttcagaagacagattgtcagaagcttcagttctggtaaaagagaaggtggggactttgtttgctgtgccctctctccccgtggtgaatgg

SEQ ID NO: 743914 - DNA, 83 bp, Homo sapiens
gctgctggtcaccctgagcttcctgcggagcgtcgtcgaggcgcagatctattccagaggggagcttcaccacttcattgacg

SEQ ID NO: 743915 - DNA, 78 bp, Homo sapiens
tttggatgcagaagaattacctcctattttggttgatctcctagaaaaatctcagaggacccacaggcatgaattatt

SEQ ID NO: 743916 - DNA, 75 bp, Homo sapiens
gaaagagctggtgcatgatgacgagcctagtatcagaaggccaggcgagactgcaacactgctcatcaccccgcg

SEQ ID NO: 743917 - DNA, 100 bp, Homo sapiens
tggtctcatgtctcctgggataattccaccaacaggactatacaggctccaacccaagttccagtggttgtgtctcctaggaatcagcagttgcatacag

SEQ ID NO: 743918 - DNA, 98 bp, Homo sapiens
ccaagacccttgtgctcgttgtcgccgcggtcctgctgttgtgatgtcttggcattgcccattttcaagcaggaagattccagccttccattggatgg

SEQ ID NO: 743919 - DNA, 100 bp, Homo sapiens
taagaagcagatcctgaaacacctgtcccggggcagaggcctggcctccaggggtttgtcttaaatatgtcgggggagaccaatttggacatgtgaacat

SEQ ID NO: 743920 - DNA, 109 bp, Homo sapiens
aaatgggccagtggtctagtcagcattgggaaatgaagatgatgagatcctgtaactcggaaaagatatcagagggacctggtgtgaattattcagggtgtcagatcac

SEQ ID NO: 743921 - DNA, 80 bp, Homo sapiens
cccaccatggacaagctgctggcagacagcaagacggctcagacttcacagagaatgcagttgtcttgacttcaggtctg

SEQ ID NO: 743922 - DNA, 100 bp, Homo sapiens
gtgagaggaagctgagttacccagactggggaagcggatgctatcagagttcacatgagactctgaatatagtggaggagaagaagcgggcagaggttgg

SEQ ID NO: 743923 - DNA, 100 bp, Homo sapiens
tctactggctgctgtcaccctcctgggagtcctgctgcaagttcacagtacagagccagttgtccaggagaatggggacgaagctggggaggggagagag

SEQ ID NO: 743924 - DNA, 82 bp, Homo sapiens
gtggatgaagttgttcattgtttgtcaccacaaaaaggacagatccgtatcagatcctgggcccgaccagcagtcgcctagc

SEQ ID NO: 743925 - DNA, 75 bp, Homo sapiens
caggtcctgagcctcgagccgcagcacgagctcaaattccgagccaaatttgtatcctactgtggggcttcaaac

SEQ ID NO: 743926 - DNA, 83 bp, Homo sapiens
atccagctgaacccggcccccgacggctctgcagttaacgggaccagctctgcggacatcagaagagctaacaattgctggaa

SEQ ID NO: 743927 - DNA, 90 bp, Homo sapiens
gtgagccagaggccgttggacagtccaggggacgaagacagaagaagtagagaggcagggccgtggaaagaccacagcaagattctttca

SEQ ID NO: 743928 - DNA, 98 bp, Homo sapiens
caaacttgggccaaaggacagttagaagacagtagctgccagagtctctcctggaggcggatcttagctttctgtctctggaagttcctactccaccc

SEQ ID NO: 743929 - DNA, 82 bp, Homo sapiens
tcaaagtgcacagcttccccacactcaagttctttcctgccagtgccgacaggacgggcgcactgtgtgaggagaacatgcg

SEQ ID NO: 743930 - DNA, 83 bp, Homo sapiens
gtccggacagccgcgcgctgagggtctcggggcgggcgccgcgggacctctccgggccatggatcttcgtgaagactctgact

SEQ ID NO: 743931 - DNA, 97 bp, Homo sapiens
cccgtggattccagtgggcccgacagcgcaacaggaaatatgttcaagtttgtgtccagaatttgtcagaacttgactttcagctgtcagatagtta

SEQ ID NO: 743932 - DNA, 74 bp, Homo sapiens
aaggtcccggtgctcacttggacatgacaggtgctctagttcacagctataggggaacaggtggaatatttgaa

SEQ ID NO: 743933 - DNA, 100 bp, Homo sapiens
gaaggcagtgaagcgaagaaaaggatcccagaaagtttcaggttgtggcagcactgcctgaaggtatgagaccagattctaatctttatggttttccatg

SEQ ID NO: 743934 - DNA, 50 bp, Homo sapiens
gcggcgaggaaggcgtctcccgggactgcctccaagtggaagttggcagg

SEQ ID NO: 743935 - DNA, 83 bp, Homo sapiens
ggtcgatggtcggcggcgcccggatgggcagctgaggaaggtgggagtcaatcattttgacaagtctcctgaaaggaacagct

SEQ ID NO: 743936 - DNA, 100 bp, Homo sapiens
gagagcaagctctataagattcttcaaggtggggttggcatcccccacatacgggattgtgtgcacactctgcattccagggacacgtggctgaagaaag

SEQ ID NO: 743937 - DNA, 50 bp, Homo sapiens
gtgggcccgaccgcggggaccctcttccaggatctcaaccagttctctca

SEQ ID NO: 743938 - DNA, 100 bp, Homo sapiens
ggtggggaacaagtgtgacctggaggacgaacgtgttgtgcctgctgaggatggccggaggctcgccgacgaccttgcctggagtgcaatggcacgatct

SEQ ID NO: 743939 - DNA, 100 bp, Homo sapiens
ctacgacctcattttctgctggaactgtgaatttgggtggtttgaaggatcacataaaggagatccagagatgccggcgtttgattcttattgcttgtgg

SEQ ID NO: 743940 - DNA, 100 bp, Homo sapiens
caccactgcagccatgatctccttaacggacacgcagaaatgtggcagatcagattgcatttcaagctgctggtggattaacagcccttgaacacatcct

SEQ ID NO: 743941 - DNA, 75 bp, Homo sapiens
attccctaaagtaggaggaaaaatgaccatgtccaagatcagcaagttgctcggatggaaaaactagctggtttg

SEQ ID NO: 743942 - DNA, 58 bp, Homo sapiens
ttatccgaaaccgcctcactgggaattgaatgatctggcacgggaccctccagcacag

SEQ ID NO: 743943 - DNA, 96 bp, Homo sapiens
tggagacaggcagcccacaacaagggtgctccagtgaaccacccagggaatgacgaggtggcgagtgaggatgaagccacagtaaagcggcttcgt

SEQ ID NO: 743944 - DNA, 100 bp, Homo sapiens
tgctgctgccgccggcgaaggaggaggcgttgccggttttcagataactattatcgtgcagaaatgattgatgccctggccaactctgttacacctgcag

SEQ ID NO: 743945 - DNA, 100 bp, Homo sapiens
tgcacccgcaacaggcgttttgcaatgcagatgtaggacccttgaacatctgtgaagaaatgactattctgcatggaggcttcttgctggccgagcagct

SEQ ID NO: 743946 - DNA, 100 bp, Homo sapiens
cgagactctgcggcgcatggaggaggaggaggacttgatcatcttccctgacgactgtgagttcaagcgggtgccgcagtgccccagcgggagggtctac

SEQ ID NO: 743947 - DNA, 83 bp, Homo sapiens
agtaagagaaaccgaagtcctcaccactcaacagtcaaagtgaagcaggactgggcacttggagtcctgcatgccaaaatcat

SEQ ID NO: 743948 - DNA, 80 bp, Homo sapiens
tatttaagaaagaagatgttaactttcagggatctctcaatgctatttgccttcattagcttgctcgttatgcttcccac

SEQ ID NO: 743949 - DNA, 100 bp, Homo sapiens
cttcctttagctgtccattggcaccatacagcctccaagtctctgacttgtgcttggcagcaacatgaagatcattttgacaccattcgcttttcaccca

SEQ ID NO: 743950 - DNA, 100 bp, Homo sapiens
gttcggaatcctataattgaaaaacagtaaagatggaaaaccagttattgaatatcaagaggaggagttgttgacagtcttgcactgtttcctaggctgg

SEQ ID NO: 743951 - DNA, 82 bp, Homo sapiens
tcccgccaccggccgcttctgtcctcgggcgtgatggtgggcatgggtcagaaggattcctatgtgggcgacgaggcccaga

SEQ ID NO: 743952 - DNA, 75 bp, Homo sapiens
cctgcagaagcgtgtcgttctgcaccagcgccttgatcgagtacttgagaacatccagtcatggataaaaatgag

SEQ ID NO: 743953 - DNA, 82 bp, Homo sapiens
gtgattctgtccgttcagtgtggaactcttctgcctcatgtttataactactgtactagtgttcaccagtcaaaccaagcac

SEQ ID NO: 743954 - DNA, 51 bp, Homo sapiens
cagtgggtggacgagatcagtttgtaagcaaatgcagccctgaggatttgg

SEQ ID NO: 743955 - DNA, 100 bp, Homo sapiens
gattgctgtaaaaaatttcaggattggtactacaaggacccctcgtccagtcattgtggaacccatggagcagtttgatgatgaagatggcttgccagag

SEQ ID NO: 743956 - DNA, 98 bp, Homo sapiens
attctacgagcagatgaacgggctcagtcggggaatattcagagcacagtgatgttagacaaacagaaagagcttgacagtaaagtcagaaatgtgaa

SEQ ID NO: 743957 - DNA, 75 bp, Homo sapiens
atgttggaaatgcacaagctggagcccaactgataatccttgaacatggggcaacaccctccactaaagagtcaa

SEQ ID NO: 743958 - DNA, 74 bp, Homo sapiens
tccctacagacagagccacaaggttgctcgtgggggccccgcgggcagaagcgcttccactgcagagagccaac

SEQ ID NO: 743959 - DNA, 50 bp, Homo sapiens
agggcaacctccgcgtccactacaaaggcaggggaaatggaaggtgatgc

SEQ ID NO: 743960 - DNA, 100 bp, Homo sapiens
tcaaaactggagaggcagatggctcagtgctgttccctcgtcacaccaatgccagtgctcgagacaacaccatcaacctgatccacacgttccgggacta

SEQ ID NO: 743961 - DNA, 109 bp, Homo sapiens
agagagggaagagattcagccagcacactcctcgcgagcaagcttaagatctccttcagcgagacagccctggagaccacgtaccaatacccctccgagagttcggtac

SEQ ID NO: 743962 - DNA, 90 bp, Homo sapiens
aacagtttacagcccttccagatacagctaccagggcaaacttgaagataaatcttttgactccagctctttagaggatctaaagtgacc

SEQ ID NO: 743963 - DNA, 98 bp, Homo sapiens
cgagtggaggtcggctgcccctgggaaaccagagagtcggagggagtccatctggagcggccaatgccccgactcggcttgcaagcaggacctgctgg

SEQ ID NO: 743964 - DNA, 100 bp, Homo sapiens
tagccccacggacctggcgactccaccgtgttcgggtctcataacaacaaactgcagtctacagcttcttaaagttcagcgtgttaacctaacataaaac

SEQ ID NO: 743965 - DNA, 101 bp, Homo sapiens
cccactggtctagaacccggctctgagggcactggcctagttcccgacttgtttctcagacaggggcaagtgtccgagtggtgaatcagctacttacagag

SEQ ID NO: 743966 - DNA, 101 bp, Homo sapiens
agcttggtggagcaggagcggctgggcatcctcctgagactccggggtcagacgcccactccaggcaggtgacaaacattaccaccccagctgtgcacgat

SEQ ID NO: 743967 - DNA, 100 bp, Homo sapiens
gaagagtcttgtgatttgggagacaggtcttcaatgaaatttatccagtatggacttactcttacctggtgctactgtttcctgtgttccttgccacaga

SEQ ID NO: 743968 - DNA, 109 bp, Homo sapiens
tccacagccagtatgctcccctgctggaagtgaaggaactcctaaagatttggagtcaaaatatggacctgagaaaatatctccagaaaatgatatttttgaaataaat

SEQ ID NO: 743969 - DNA, 139 bp, Homo sapiens
ctgccgcggctgtcaactcgctccggagcgcggcgccgagcgcagggatacggcgcccagcgggcactattcctgatcagagaactccagttgcttcaacacacagtatcagtagtgcagccaccccagatcgaatccg

SEQ ID NO: 743970 - DNA, 74 bp, Homo sapiens
tgcgccggaggcctgactctgggagcacgcagctgttcaggtcttcctgcagcagtcagggctgcaagccctgg

SEQ ID NO: 743971 - DNA, 101 bp, Homo sapiens
gcgtgatttggaacaattaatggaatgtaagaaacagtgctttctgaaacaacaaagccaaacttccattggtcagcacttttccagccattaactccagg

SEQ ID NO: 743972 - DNA, 75 bp, Homo sapiens
taaaaacaagactggggctgctcccatcattgatgtggtgcgatcgtttcagctcctggcatcagctctattcaa

SEQ ID NO: 743973 - DNA, 100 bp, Homo sapiens
gcttgtgatgatgccaaacaagatatttgttcagtcgaatcaaggtgaagaggaaacaacaagaatttcatattttacttttattggtactccagtccag

SEQ ID NO: 743974 - DNA, 80 bp, Homo sapiens
agaaccagatttgtgtaccatttgtctgacctaataactgaagtgaagtgatggactccgatttggagagtagtaagacg

SEQ ID NO: 743975 - DNA, 89 bp, Homo sapiens
ttattttatgtttctaatataaagatagaagttttcagaaaagccctgctgacgacacggattcccagtcatggcgcagccccttgaaa

SEQ ID NO: 743976 - DNA, 48 bp, Homo sapiens
tgcagaggaagaatttttctatgaggctgacgtgatggcagacagggt

SEQ ID NO: 743977 - DNA, 88 bp, Homo sapiens
tggccgagcaggaggcgccatcatggccccgtggagaattgattccccgaagacccgaccccgctgcaccctcagaagaggggttgag

SEQ ID NO: 743978 - DNA, 96 bp, Homo sapiens
tggccctctacgtggcttctcactacaaggcatgatggctcgcgcctgtaatctcaacactttggaaggctgaggcagggggattgcttgaggcca

SEQ ID NO: 743979 - DNA, 80 bp, Homo sapiens
acatcaccgatgagatgaagcgcatgtttaaccagctctcaggttcagattgaaggagattttttgccatgttccttctc

SEQ ID NO: 743980 - DNA, 98 bp, Homo sapiens
gaatacctggcattgacctctcagatcccaaacaactggcagaatttgctagttaaaggcattaggatttcctgaaggacttgtgatacaagcgtatt

SEQ ID NO: 743981 - DNA, 98 bp, Homo sapiens
gcccacctcatcagccctctgccctcccccacgggaaccatcagacaggggcaagtgtccgagtggtgaatcagctacttacagagatggatggtctg

SEQ ID NO: 743982 - DNA, 100 bp, Homo sapiens
ctcacagcctgaaaatgaaaaggaagcttcaggtggagacagcccgaagttgctgaacctgtttgcatgagttgctcctgacggccctttaggatacttc

SEQ ID NO: 743983 - DNA, 82 bp, Homo sapiens
cggcagggaggatgacggagctgcagtcggcactgctactgcgaagacagctggcagggaaatcctcattgacgattcaatt

SEQ ID NO: 743984 - DNA, 97 bp, Homo sapiens
tccactccgtgacatcgctccaggacccgctgcagcagggctgtgtgagctcagctgcagaaccttggcctgaaaatgctacattatatcagcaatt

SEQ ID NO: 743985 - DNA, 76 bp, Homo sapiens
gcggaatgacagcggcgaggagaacgtcccgctggatctgacccgagacatgcagtgagaagagtaccaacttgca

SEQ ID NO: 743986 - DNA, 82 bp, Homo sapiens
cgactcgcttctttcggttctacctgggagaatccaccgccatccgccaccatggtgtctcccagtctgctaaagccctaag

SEQ ID NO: 743987 - DNA, 75 bp, Homo sapiens
cgagaatacaccatcaacattcacaagcgcatccatggagtgtctgctgctaccagctagtccaagccaccacca

SEQ ID NO: 743988 - DNA, 75 bp, Homo sapiens
cagtactctatatgaacaatccgtctggatcacggatgtaggaagtggatctgcctacaaactggtttgctactt

SEQ ID NO: 743989 - DNA, 97 bp, Homo sapiens
ggcggaagccttttttctccctttcgtttacctcttcattctactctaaaggcatcgttattaggtgtcatggagaaactccagctgggcccagaga

SEQ ID NO: 743990 - DNA, 87 bp, Homo sapiens
ccgctgagacctgccgtgctgggtggtactccaaagattcaggtttactcacgtcatccagcagagaatggaaagtcaaatttcctg

SEQ ID NO: 743991 - DNA, 74 bp, Homo sapiens
tatgcctcaatttgctggatttaagcactgctgcactttatgagttttcggctttgtgagaaaccttaccatca

SEQ ID NO: 743992 - DNA, 76 bp, Homo sapiens
ccggcctgccttccttccttccgcccgcccgccggcccgccctaagagttgaggaggagtctgctactagtcttat

SEQ ID NO: 743993 - DNA, 100 bp, Homo sapiens
gagccgggtaccggccgtggaagcggccaccgactactgtcagcagctgtgccaggtctcattcaggaacgtcgcctgataacactgcaccaccacctcc

SEQ ID NO: 743994 - DNA, 82 bp, Homo sapiens
cggctccttcggagacatctatctcgggggatatgagactttctactcggaatatcctgagtgttgcgtggatgtaaaaccc

SEQ ID NO: 743995 - DNA, 88 bp, Homo sapiens
cactcccaaaaaagatttctcgatagaagaagtcagagatgccatggaaaatgaaatgagaacccagcttcgccgacaggcagctgcc

SEQ ID NO: 743996 - DNA, 83 bp, Homo sapiens
gaaaactaaggcacggtcaactatcaagcaagcgtggtgtcgaccttagagcaggtactggtagttaactctcaaggagaaat

SEQ ID NO: 743997 - DNA, 50 bp, Homo sapiens
ctactttaggcggattcgcgaagattttgggaaccagtaggacattgaca

SEQ ID NO: 743998 - DNA, 82 bp, Homo sapiens
tgctaaaggagttgggattttgtgttcatgtcaagcatcctcataaggaatggcatcaccagctgccggatgcggactgaga

SEQ ID NO: 743999 - DNA, 82 bp, Homo sapiens
gattttctgcagaagatgaagctttgagtaacattgccagagaggtcatcatcagatttgaaatatttaaagtggatacaaa

SEQ ID NO: 744000 - DNA, 100 bp, Homo sapiens
tgtttctcctcctaccttctccatttttctagtccctgcagatatctccggagcatttggataatgtgacagttggaatgcagtgatgtcgactctttgc

SEQ ID NO: 744001 - DNA, 75 bp, Homo sapiens
tgtttctatagaaactgggttggaagtcagagctgcacaaagggaaaggcctcctgacaaggtgatccgggcggg

SEQ ID NO: 744002 - DNA, 75 bp, Homo sapiens
ctggctcagctgacaacagctgtcgtctctgggactgtgaaacaggatgttttgagcagtgacattataattctg

SEQ ID NO: 744003 - DNA, 75 bp, Homo sapiens
cagatgtccttctaggctcaacagaatattccacctgccttgacatgtgggatcacatgcagtggtctaaggaag

SEQ ID NO: 744004 - DNA, 76 bp, Homo sapiens
gtcatttctgttccgcacaggcctgctgaactgggtgctttatataggcgcattttggaggaccaggaggaaaacc

SEQ ID NO: 744005 - DNA, 100 bp, Homo sapiens
gatattccagattgcccctgtggtgccaagagaatattggaattccagtactatactggcaattgctggagaagattttgcaattgttgcttctgatact

SEQ ID NO: 744006 - DNA, 96 bp, Homo sapiens
aagacctaaaaaaccccaacaacagctcccttagatacttggagatgaagttcaacttttttcacttgatgaagaatttgattatgacaatgtgat

SEQ ID NO: 744007 - DNA, 50 bp, Homo sapiens
caccttctaaaactctacagtgacaggttgctatcaagatcatagataag

SEQ ID NO: 744008 - DNA, 50 bp, Homo sapiens
ccatggggttccccagagcccgcgcgctctgaaaattggaaaaccaagaa

SEQ ID NO: 744009 - DNA, 78 bp, Homo sapiens
tgagcctgttggaggaactggcccggaaacaggaggacatggtcatcatgggccagtgctactacaacgagaccatcg

SEQ ID NO: 744010 - DNA, 90 bp, Homo sapiens
gggaagccctggtcggagcgagccgatgtcagtattgaatatggtggtgaggcgtgaccctggcaacactgaacctgtgaaagccaagga

SEQ ID NO: 744011 - DNA, 75 bp, Homo sapiens
cctgcctcagcctcctaagtagctgggactacaggtaaggctggcctctctgcagtcagaggtctgagctctgcc

SEQ ID NO: 744012 - DNA, 100 bp, Homo sapiens
agataattataatgaagaagtggctgacttaaagactttgagaatcactacaagaaaaactccttgtggtgaaggttctaagacgtgggatcgtttccag

SEQ ID NO: 744013 - DNA, 140 bp, Homo sapiens
catcgcgagcctcgtggtgtggtgtatggccgtgggcatctcctacattagcgtctacgaccaccaaggcttcagtgtcatttgaggacgtgactgtggacttcagcaaggaggagtggcagcacttggaccctgcccag

SEQ ID NO: 744014 - DNA, 98 bp, Homo sapiens
attctgaaacttcttgacaatttgcttgcgcttataaggtactgtgtgcagaaatgtgattgagattcaagtcagggcctctctgcccttttccctcc

SEQ ID NO: 744015 - DNA, 106 bp, Homo sapiens
tctcaatatctgtcttcggtggactccttcggcagtccacccaccgccgccgcctcccagaacatgaaaggctcccggagcagcgctgactcctccaggaaacact

SEQ ID NO: 744016 - DNA, 71 bp, Homo sapiens
cgatgcttgtgaccctgcagctcctcaaagttcgatacaagaggctgttttcctagcgtggcttgctgcct

SEQ ID NO: 744017 - DNA, 74 bp, Homo sapiens
aaggatgaacattctgccgaagagaacaagacgtgtgaagactcaggatcaagacttcaaatcccaaaagaact

SEQ ID NO: 744018 - DNA, 75 bp, Homo sapiens
ctttttctaagaagagatgtgagacttcccttggaagttgaaaaacagactcatgtagacaaagcctgcaagctt

SEQ ID NO: 744019 - DNA, 100 bp, Homo sapiens
gccacacctggaccagaccccaggaaagacctttctggatgacagcggctccctcaactgggagatctactactggattggcggggaggccacactcgac

SEQ ID NO: 744020 - DNA, 82 bp, Homo sapiens
gggcgccatcgagccttggcggcggacgtgcagactgattcttgctattccaaatcctcttccacgttgacagcccttcaga

SEQ ID NO: 744021 - DNA, 88 bp, Homo sapiens
ctactacaacacggctgtcaagctggcgcgccagagcggcatcgagacaatgcagatcttcgtgaagactctgactggtaagaccatc

SEQ ID NO: 744022 - DNA, 100 bp, Homo sapiens
gggaaaatggcggacgggaaggcgggagacgagaagcctgaaaagtcgcagcgagctggagccgccggaggcgtccgagctgggccacagcctgaacgag

SEQ ID NO: 744023 - DNA, 75 bp, Homo sapiens
ggcaagaatattaaggctctccgtacagacgtgagggtcccgatgtcctggtgtacagcttggactttggtgggc

SEQ ID NO: 744024 - DNA, 120 bp, Homo sapiens
aagaacttgaaattgcaactttcaactttgaataatgctggacccccagacctcagtccaagtttgcagccatcggccccactacggctcgcgcgctggccgcccagggccttcctgtaa

SEQ ID NO: 744025 - DNA, 90 bp, Homo sapiens
gaacaaccgttgtttaatggaagatttcgatcagttaggatgtggacgagtgctcactagcagaaaaaacctgtgtgaggaaaaacgaaa

SEQ ID NO: 744026 - DNA, 100 bp, Homo sapiens
tcagtgatatcattaagtccagatctggacccagatgatgtggtaccagttggccaaagaagagcctggtgttggtgcatgtgctttggactagcattta

SEQ ID NO: 744027 - DNA, 97 bp, Homo sapiens
cagcgatgggcaacacggtgcaccggaccctgccagatcacctctgcagcctgcacagccgggcctttggactcctggatgctagagtgacctgggc

SEQ ID NO: 744028 - DNA, 74 bp, Homo sapiens
tcccctaccagatgtaccttggaagcaggagccatgacttttcagggcataaggaaatggtggcaggcacttcc

SEQ ID NO: 744029 - DNA, 74 bp, Homo sapiens
tcttttcacctataggggagagactgggctgggaccccaaacctggagaagattactgacagccctgtcctagg

SEQ ID NO: 744030 - DNA, 100 bp, Homo sapiens
cagacggcagacggtgcccggcgcccacgggacaccattcgcttttcacccaagatgatttgatgtcttataaaactctgatgaaccatgatggctacac

SEQ ID NO: 744031 - DNA, 82 bp, Homo sapiens
ctgagatctatgatcccacatctggaatctggaatgaaatcttccaagtccaaggatgtgagattacatgcttgatgcaaag

SEQ ID NO: 744032 - DNA, 83 bp, Homo sapiens
ccttctccagcatgggctcgcctgtcaacgcgcaggacagctaacccccgcatcggtgacgtgatccagaagctggccccctt

SEQ ID NO: 744033 - DNA, 50 bp, Homo sapiens
ggattagctaggtggttggtggaagggaactctaatgatccaggacaaag

SEQ ID NO: 744034 - DNA, 74 bp, Homo sapiens
atgagcagctcaagagggagaagctgagagtacacaaggccagtccacaggtcctggctaccctgggaagagac

SEQ ID NO: 744035 - DNA, 75 bp, Homo sapiens
atcggtggtaacgacggcctcagcaggcggggaagatgaaaggtttttggctttcacccccaaccagtgaccaaa

SEQ ID NO: 744036 - DNA, 75 bp, Homo sapiens
ccggaattctccctagttttagacttggtgtcagttgtacccgaggcgttctcagcagcagcaagtacctgtggt

SEQ ID NO: 744037 - DNA, 90 bp, Homo sapiens
cgacacggtgccgctgacagcagccatcgaggcgagccagagcctgcagtcccacacgggaactctaatgatccaggacaaagaagttac

SEQ ID NO: 744038 - DNA, 98 bp, Homo sapiens
gtttttcggatgatgccttcaatactacctttatttccaccataggcaagtatatcgcgtcaacacagcgacctgacgggacctggcgcaagcagcgg

SEQ ID NO: 744039 - DNA, 74 bp, Homo sapiens
caacagtcagtgaggttggatgacagttttgtccgggaatcccgttctgcttccagaagtggaagtgctcacgg

SEQ ID NO: 744040 - DNA, 99 bp, Homo sapiens
cacatcacaaaggcagaaaaagacttcatttaggtgtcacagatttatcagagcattgagttttctcgtttgacttctttggttccttttgttgatgct

SEQ ID NO: 744041 - DNA, 75 bp, Homo sapiens
gaaggcgaaaacatcgggtttgagattatccacgtgtgtaaggctggtgattctcatctaaatgttcaagttagc

SEQ ID NO: 744042 - DNA, 80 bp, Homo sapiens
ggctgatttgccttaaactccctaaaatctccgcagctctggttcctgttgcggccgacaatgcagatcttcgtgaagac

SEQ ID NO: 744043 - DNA, 87 bp, Homo sapiens
agaacaccggcacaaagaacacaagaaggagaaggaccgggaaaagtccaagcatagcaacaggtcttggatgtgctggatctgtgt

SEQ ID NO: 744044 - DNA, 75 bp, Homo sapiens
tctagaagcctgtcgaaaaatgggggtgcctgagaacccagcgggtgccgcttctccacccgaggcttccacctc

SEQ ID NO: 744045 - DNA, 100 bp, Homo sapiens
ttgagtgcttacaaaaccttatctggtcgtccagcccaccccggtgccttgctctggaaggctgaaaatctattgttagatgccgatatgaacattaaaa

SEQ ID NO: 744046 - DNA, 89 bp, Homo sapiens
caggaattctcctgccaccgcgtggtgcttgccgcagccagcaactatttcagaacctctaaaatgcagacctccagctctagatctgt

SEQ ID NO: 744047 - DNA, 82 bp, Homo sapiens
agagggtggacgaccccgaactccaggacagcatccaggcctcattggacagcattcgagattatgattttggagatgtgtt

SEQ ID NO: 744048 - DNA, 75 bp, Homo sapiens
ctacttttaaaagtctccagcagatcatgaacagcctgatctagttgaatctgaagatgtggacctgctgatgaa

SEQ ID NO: 744049 - DNA, 100 bp, Homo sapiens
ccagctctctcttcagaacagagccaatggcttggaatgaggatcaaaattgcttcagaaattggagacatatttgatttaaaaggaaaaacttgaacaa

SEQ ID NO: 744050 - DNA, 83 bp, Homo sapiens
ggaagattcccagttctttcctactatcatcaagataaggaggttggccttggggaggcactattagaggctgaaactattga

SEQ ID NO: 744051 - DNA, 76 bp, Homo sapiens
ctacaaccacatatcgtctgtattgaaagactgtgggaggattcagctgacacctgctgtccgtcgggatggataa

SEQ ID NO: 744052 - DNA, 126 bp, Homo sapiens
ctcctgaagcacaagtgatccacctgcctaggtgacccaaagtaatgggattacagagctggactggccattatggaggaggagctgcagcattcccattgtgtgaattgtgtcagtagacggtgc

SEQ ID NO: 744053 - DNA, 82 bp, Homo sapiens
agctgtgcgggcgggcggtgagcgcccatatgggggttctggagagcggggtgtggggatgatcggctgaatgtaacagagg

SEQ ID NO: 744054 - DNA, 82 bp, Homo sapiens
gagggcagccggcgggaggaacgctcactgtcagcgcctggaaacttgctcacggcgtgatggtgggcatgggtcagaagga

SEQ ID NO: 744055 - DNA, 50 bp, Homo sapiens
cggagaggagagcggtgcggaggactgagatttaaggaacagtgacaccc

SEQ ID NO: 744056 - DNA, 76 bp, Homo sapiens
cgaacagtctcgttgctgcctctgtgtacgctgaggggggagagccctgaggatgatgacaggaaggtccgaagga

SEQ ID NO: 744057 - DNA, 75 bp, Homo sapiens
cctaggacttcatgtctatatatttccccattcactggtgagaagccctaccactgcaactgggacggctgcggc

SEQ ID NO: 744058 - DNA, 75 bp, Homo sapiens
ctcagcctcccgagtagctaggattacagttcagagaagccgaactgggattaccatgcagaaatacaagctttt

SEQ ID NO: 744059 - DNA, 100 bp, Homo sapiens
cttattaatctcagggaactggatgtcagcaagaatgtgatgatgaaaacacatttaaaatattagttgcaacagatattcatcttggatttatggagaa

SEQ ID NO: 744060 - DNA, 75 bp, Homo sapiens
tttggggtcaaggaccgaggcgccggcctgctgcagtcaggcacctacaaaggcagcacctaagcaaaagattgt

SEQ ID NO: 744061 - DNA, 75 bp, Homo sapiens
tagatacaaatttttggatgatgatggatccatttctcctattgaggagtcaactgagggagactctgatgtgga

SEQ ID NO: 744062 - DNA, 100 bp, Homo sapiens
acgggatcctccagttcctgcacatctaccacgccgtcaaggaccggcacaaggacgttctcaagtggggcgatgagacttatgcagagatggaccccac

SEQ ID NO: 744063 - DNA, 100 bp, Homo sapiens
cggtctctgccagtataaatgcagtgacgccttgttgtcctcctggtgcgaagagctcggccgcctgctgctgctccgacatcagaagagccgccagagc

SEQ ID NO: 744064 - DNA, 75 bp, Homo sapiens
tggggagagcttttgtgacaaggtcatcgtattgaggaagttcctgaacttcctttggtagttgaagataaagtt

SEQ ID NO: 744065 - DNA, 75 bp, Homo sapiens
caaaatgttctttactactaagcaccgttggtatcctcatggacggaactctccggagtcctttctgtattgttg

SEQ ID NO: 744066 - DNA, 100 bp, Homo sapiens
gagggcaccaccaaaagtgaggtcttctacccaggaaggcgaagtagttgctgtcagtggtggaacatccgaagaagaagagagagcatggcacagtgat

SEQ ID NO: 744067 - DNA, 100 bp, Homo sapiens
caggagcagcggccgggagcccttagggaggcaggaagaagaaattgtcgagacgaataacatgaggtcatatagaatcccacttttggtgatttcaagt

SEQ ID NO: 744068 - DNA, 112 bp, Homo sapiens
ccccgcgctggtgcagccaccctcgctccctctgctcttcctcccttcgctcgcaccatggattttttatcaagcagaaatgcatcgaacaacgagaatcaagatcactgag

SEQ ID NO: 744069 - DNA, 51 bp, Homo sapiens
agacatgtaagcagcatcatggagaaacgtgatgaacgcacactgaaaaac

SEQ ID NO: 744070 - DNA, 100 bp, Homo sapiens
ccacaaggccaagggcaagtgatttgacagatggaggagatgtataagaaagctcatgctgctatacgagagaatccagtctatgaaaagaagcccaaga

SEQ ID NO: 744071 - DNA, 100 bp, Homo sapiens
cagcagatggcggatgccctgcagtacctgcagaaggtctctggagacatcttcagcagcattttgaaagcgaagcagaagccgtagaatcagcggcgag

SEQ ID NO: 744072 - DNA, 100 bp, Homo sapiens
agtgaagctgttatcgcccagttctaccacagccctgcggacaacaagcgggctctgaagcggaagccagatttgttcctgtgtgaacgattggatgtca

SEQ ID NO: 744073 - DNA, 74 bp, Homo sapiens
gaacagcgtcctggaaaacttcaccatcctccagattttcagctgaactctcatctctcaacactggcaaatat

SEQ ID NO: 744074 - DNA, 51 bp, Homo sapiens
ctgaagagggaagacacgcggaaacaggatgttcaagatccttcagtattt

SEQ ID NO: 744075 - DNA, 96 bp, Homo sapiens
attgaaatcatgcagggcactggggaagagatccggcactccacccagagcctctttgagtacatgaagggcattcagagcgacccgcaggccctg

SEQ ID NO: 744076 - DNA, 100 bp, Homo sapiens
aggagaaagcgcagtcctgaaagtcaggtcacgattatgggcccacaccttcctccagattctggctacattggagattggttgctttctaaaactgaag

SEQ ID NO: 744077 - DNA, 95 bp, Homo sapiens
cgagccttcttcccggggcgccataaacgcccccaatttcccagctgctaaaggaagaggaaggtgagcgagtgctgtgctttcatgggcctctt

SEQ ID NO: 744078 - DNA, 100 bp, Homo sapiens
agagggctctccagctccatccacagcataaccgggctcttttcaatctggggaatctcctcaagaagctgtagagaaatatgaagaagtgctacataat

SEQ ID NO: 744079 - DNA, 90 bp, Homo sapiens
gcgccccgtcaaaatccgaaagattcgggccagagacgacaacccgggcctccgagacctgcctagagctggaacgttacctccagagcg

SEQ ID NO: 744080 - DNA, 98 bp, Homo sapiens
cccacatcttggaggggactctcttggagcctacaaggagaagatgaaggagctgtcggtgctgtcgctcatctgctcctgcttctacacacagccgc

SEQ ID NO: 744081 - DNA, 80 bp, Homo sapiens
ctccccaccaccaccatctccatcacccaccaacaacaccacaataatccacagccaagatgaagcccggggcaagaact

SEQ ID NO: 744082 - DNA, 82 bp, Homo sapiens
ggcgcagcggcggcagcggagagcgagagaggggagcagatatgaagatcaatgatgcagactgatggttttgatgaagctg

SEQ ID NO: 744083 - DNA, 74 bp, Homo sapiens
gccgcgcggctcggagccctggaagcagcagctcaccgaggacggggactcgtggccagcatcgaaatgttcag

SEQ ID NO: 744084 - DNA, 90 bp, Homo sapiens
ggaatcttgaaaatctgtgacattgcaagggaaaaagtaaataaagctgctgtttttgaagaggatggtcgtttgaagccaggagatcaa

SEQ ID NO: 744085 - DNA, 112 bp, Homo sapiens
tccggcatggccgggatcattaagaagcagatcctgaaacacctgtcccgagactctgacctgtttttgttggacacccgtgtagtatgggcctcagaagaaggctggctgg

SEQ ID NO: 744086 - DNA, 80 bp, Homo sapiens
cagagagcgaagagatcgcccagctgctgtctgggtcctccacccgctgccccgacgagtcggaactataccgagatccg

SEQ ID NO: 744087 - DNA, 83 bp, Homo sapiens
tttccgccctaatggaggtctccagtttcggttgcacgatgggaacacaagacccgcaagctgagcagggccttcggatcccc

SEQ ID NO: 744088 - DNA, 87 bp, Homo sapiens
tggtttctacagggattatgacattccatttactcaggaaattaagtgttaaatccattacgaaccctcgatacctggacagcctgg

SEQ ID NO: 744089 - DNA, 82 bp, Homo sapiens
gaagaagtcaagccgatcttgcagaaattgcagttggtagctggcagtgttgtgatggcttttgaagaagtatgcccggaca

SEQ ID NO: 744090 - DNA, 100 bp, Homo sapiens
gatagtacatgcttttgacatggaggatttgggagataaagctgtgtactgccgttgttggaggtccaaaaagccgtttccctggggagatggtaaccat

SEQ ID NO: 744091 - DNA, 98 bp, Homo sapiens
tcagcctcccgagtggctgggattacagggaagagaaggaacggtggatccgtgccaagtacgagcagaagctcttcctggccccgctgccctgcacg

SEQ ID NO: 744092 - DNA, 100 bp, Homo sapiens
ctgagcagcccagccagtcagcacaaaggaggacgtggaggaagacagcgaacccctcccaccacaggatgcccagacctctgggtcactgttgcactac

SEQ ID NO: 744093 - DNA, 90 bp, Homo sapiens
catgcttcaggcagctgtctgtgaagacctgagggcactcgctttgctcctgtcagtacacactcccaaacagttaaacccagctctaat

SEQ ID NO: 744094 - DNA, 100 bp, Homo sapiens
cgcggccaccgccccgggacccgcgccgctgccctccggctccgcgggcggcccacggcgaggactttgtgttttatgccccacgtctgagaatcaacaa

SEQ ID NO: 744095 - DNA, 74 bp, Homo sapiens
gtgcctccatgaggagtataggagcaagggcgtctttgtgcagggtaagaaggtggatggctctgtaaatgcct

SEQ ID NO: 744096 - DNA, 98 bp, Homo sapiens
tcttctgtgtggattcttcagaaagtgaacttggcattttagatctaattcaagtgacagatcagtcagtgaaagcatttgctgaacactgtcctgag

SEQ ID NO: 744097 - DNA, 71 bp, Homo sapiens
cctcaaactgactttgcagccacggagaggattacggggcgctgaaagacatcgtgatcaacgcaaacccg

SEQ ID NO: 744098 - DNA, 74 bp, Homo sapiens
ctataaaatgcttcaagtagtcctgtgctcaacattgcttatcgtgcctacaccaactaatgttacaattgaat

SEQ ID NO: 744099 - DNA, 83 bp, Homo sapiens
tcgcagcgagctggagccgccggagcttaaagaaagtggttattgtacaggtcatgaaccagattccctggagttcagtactg

SEQ ID NO: 744100 - DNA, 98 bp, Homo sapiens
gccaatcccccctcacccaggcccctgtcaagaaggtgccggtggtgcgagtcttcggagcgaccccggcagaacactgatatttgcatttaatgggg

SEQ ID NO: 744101 - DNA, 127 bp, Homo sapiens
gatggggagaacttgtcagtcttcatccttccccacaagtatactgaagccaggacagctgtgcagcgcattgctgagtctcacctgcagtctatcagcaatttgaatgagaaccaggcctcagagg

SEQ ID NO: 744102 - DNA, 100 bp, Homo sapiens
ccctccccgccaaggcccgtgcgaggtacaccaggggttggaaaaaccacactaggcaaagaacttgcgtcaaaatcaggactgaaatacattaatgtgg

SEQ ID NO: 744103 - DNA, 100 bp, Homo sapiens
ccttctccactttcgccagcccgtgccgcgagcgcggcctgcaggaggtggggcaggagaccctgtaggaggaccccgggccgcaggcccctgaggagcg

SEQ ID NO: 744104 - DNA, 90 bp, Homo sapiens
cgctccgtggccttagctgtgctcgcgctactctctctttctggcctggaggctatccagcggtgactatgaccagagcaggaccaaagt

SEQ ID NO: 744105 - DNA, 83 bp, Homo sapiens
ggtgtgtggcgcgcccagagccccgcgtttcagccctagggaaggtacaatgactcttcttgcttttcacctaagttgaataa

SEQ ID NO: 744106 - DNA, 80 bp, Homo sapiens
ctcgacgtcttgcctgtgtcccacttgttcgcggcctatagattcccaacttcttctggagcctggggatcggtcacact

SEQ ID NO: 744107 - DNA, 100 bp, Homo sapiens
gggaaagcgtcttggatgatgaattacatgaatgacagtcttcgaaccaatgtgtttgttcgatttcaaccagagactatagcatgtgcttgcatctacc

SEQ ID NO: 744108 - DNA, 51 bp, Homo sapiens
gcctctcaagtagctgggactacagaatgtcctcatttaaactttttttta

SEQ ID NO: 744109 - DNA, 74 bp, Homo sapiens
cctggcgcaggatgtgactggggccttggaagatgcccttgccaagggtgaccatcgggatgaggaggaagaga

SEQ ID NO: 744110 - DNA, 98 bp, Homo sapiens
gtggccgtggaggcagaggtggcatgggatgcaccagcaaggaatactgaagaccgatgatctcataacaaggttctttcgtctgtgtactgaaatgt

SEQ ID NO: 744111 - DNA, 51 bp, Homo sapiens
ccggaccggagactttggggcctaactagagtctcactttgtcacccaggc

SEQ ID NO: 744112 - DNA, 98 bp, Homo sapiens
ggaaaagttggcccctgagccagagctccagcagccttgttagggcgtggcctgaggcttggataagtggggaaaccatttctggacggctaaagacc

SEQ ID NO: 744113 - DNA, 51 bp, Homo sapiens
catccgagcgaaagagaaagagcaacaggtgtgccctggggctatgaagag

SEQ ID NO: 744114 - DNA, 90 bp, Homo sapiens
tataaaacttcaaaaattaccattttatgatttactggatgaactgataaaacccaccagtctagattttcagctgaactctcatctctc

SEQ ID NO: 744115 - DNA, 90 bp, Homo sapiens
gagcggttccagagcatgcatgcctcctactaccacaaggcccacgcctgcatcatggtgctggagaatctggtaaaagcaccattgtga

SEQ ID NO: 744116 - DNA, 90 bp, Homo sapiens
agaagatggacagtttcagtgcattacagatttgaacatggaattcaatccttcagatcatcctcgggccagcacaatattcctcagtaa

SEQ ID NO: 744117 - DNA, 75 bp, Homo sapiens
aaagctgccctgagacggtgtcccgccgaaaggtgatttgatgaaggctgctgcaggagagttcgcagatgatcc

SEQ ID NO: 744118 - DNA, 90 bp, Homo sapiens
gaagaaagtcatcgccatcgccactggctccctgcactgtgtgtgctgcacagaggatggttttgtagtgcatccctgagcatgagcaca

SEQ ID NO: 744119 - DNA, 95 bp, Homo sapiens
agcctcacttctttgattgaatacttacataatgcattggaacatgacatgagattaaggtaaatatttaccgcttagttacaaaggggactgtg

SEQ ID NO: 744120 - DNA, 98 bp, Homo sapiens
acagataatcgtccacgtaatccaagagaggctaaaggaagaacaacagatggatcccttcagttctactcagtgaatgtggattacagcaagctgaa

SEQ ID NO: 744121 - DNA, 90 bp, Homo sapiens
gtggccaggcggatggtgagcaatgcaaaattctgtggcatctctggaatactacctgagaatttttgtgtgccatgtcgaagaaacgca

SEQ ID NO: 744122 - DNA, 74 bp, Homo sapiens
gtctcagacgctcattgatttgaacagggcagatagttggttgccactttaggtctattccagtgaatgaaaaa

SEQ ID NO: 744123 - DNA, 75 bp, Homo sapiens
ctgagatctcagccctccggttcctgggcagagagaaagatggcctgatatgaaggagtcacgcctcccgcctcc

SEQ ID NO: 744124 - DNA, 98 bp, Homo sapiens
aagaatgaagaggccctgcaagacggggtctggctctgtcacccaggctggagtgcagtggcacgattatggctcattgcagcctcgacttctcgggg

SEQ ID NO: 744125 - DNA, 124 bp, Homo sapiens
gtggactcctgcgcctccatgtacagccgctccatccagggccaccatgtctgcctcctggtgaaaaagcgtccgtctccaagagagtatgaagagagtgcgtctgtagggcagggaagatggc

SEQ ID NO: 744126 - DNA, 80 bp, Homo sapiens
gcagactccattgccccatttcagcccagcccgagttcccggacgccgcgggactggagtgccagccggtgttggacgtg

SEQ ID NO: 744127 - DNA, 83 bp, Homo sapiens
cgagacttttctcagatgttggatatttgcttggaaaaacgtgtgggtacgaccttgaacctaaaggcagacccagaagagct

SEQ ID NO: 744128 - DNA, 50 bp, Homo sapiens
gtgacctcagcagggcatccaggtttactcctggcttgggggcattagga

SEQ ID NO: 744129 - DNA, 75 bp, Homo sapiens
tatatgtgatgccattccagcactggactcatggaggctgagcatttattcagtccacagatcctggtccctaca

SEQ ID NO: 744130 - DNA, 90 bp, Homo sapiens
attatgaaggggtggcctgcccctccacatctgtgggatatctcatcagggagaagaagtgggtgactgtgggtgacacgtccctgagga

SEQ ID NO: 744131 - DNA, 75 bp, Homo sapiens
gtacaacgtgctggagagaccccgcggctgggcgttcatctaccacgctttcgtatacgtaggtaacctttccag

SEQ ID NO: 744132 - DNA, 98 bp, Homo sapiens
tcctcctgctagaatgagcaatgtggtcgagcctgcagctactccagttgttccagtccctccgcagggtgtatgccatgtacaattccgtaaaggga

SEQ ID NO: 744133 - DNA, 90 bp, Homo sapiens
ctggttggaaacttgtcaaatttcatcaggcacgcaggctgaagaaagtcccttcgtgggcaacccagggaatatcacaggtgcccgggg

SEQ ID NO: 744134 - DNA, 82 bp, Homo sapiens
gtgcaagagtccacaaagggacctgatgaagcgaagatcaagccctacctgaacccatccttccatccctccaaaaaattta

SEQ ID NO: 744135 - DNA, 101 bp, Homo sapiens
tgagggtggaagctgggaaacccacaggaggcaaccacactagtttagctctagaggacaaaatcccagtccttggcacaaactcaggaaatggaagccgg

SEQ ID NO: 744136 - DNA, 50 bp, Homo sapiens
caccatgtcagcaaaacttcttttgggacaccattcgcttttcacccaag

SEQ ID NO: 744137 - DNA, 100 bp, Homo sapiens
gggacgtcggtttgctatcgggactcggcgaggacggctggacgtaaagaaagaagtgatgcactcaattctgcaatagataaaatgaccaagaagacca

SEQ ID NO: 744138 - DNA, 83 bp, Homo sapiens
gaagtggaaggagcagaacgtgagggtgtaacttacaaaaagctacgagttccagggagctctgtcctggtgaccgtgcccgg

SEQ ID NO: 744139 - DNA, 50 bp, Homo sapiens
tagcaaacgtccgcggcctctcagcatgggtggtaaagtaccacctgcta

SEQ ID NO: 744140 - DNA, 90 bp, Homo sapiens
ccagctgctggggcggccgcgagcagaggtgcatctgtgtcgtttcccacggtgcccaggcccgcagccttcaggccgtgcctaggctgg

SEQ ID NO: 744141 - DNA, 75 bp, Homo sapiens
ttcagtcagaagaaggctgctattgaaagagagtatgcacaggtactactaaccaataacctgcttggctcaaag

SEQ ID NO: 744142 - DNA, 100 bp, Homo sapiens
tggatctttttacttcatttatttcattgtataacacatctatgaagtaatccttcccctctaccaccggatatggctcctgggcagagttatcaacccc

SEQ ID NO: 744143 - DNA, 100 bp, Homo sapiens
ctctgtcgagcagcggacgccggtctctgttccgcaggatgtcacagccctttcagacaacataaaaccaaagacaagcatgaaattgaccgaatgacac

SEQ ID NO: 744144 - DNA, 98 bp, Homo sapiens
gaatggctatgtgaccatgtcggtgggaaaagtctttcaccctgtgctccagcttttctgcagctcacccaaggctgctctccgctatgctgctgttc

SEQ ID NO: 744145 - DNA, 82 bp, Homo sapiens
acggctcagacgagcaaggctgtcgtgaaatgacaatggatgctctgttggctcgattgaaacttctgaatccagatgacct

SEQ ID NO: 744146 - DNA, 90 bp, Homo sapiens
ttggtggaaagctcgttctgccgatgatcaaggaacacattatgcaaatgcttcaaaatctgactgtgaagtgctgaccacactcacccc

SEQ ID NO: 744147 - DNA, 100 bp, Homo sapiens
ctcatggcgttggaataccggctctcagcggctatggagatcttataacaatttttgatagttctgacctttcctttgcaattcagtgcagtaggatact

SEQ ID NO: 744148 - DNA, 87 bp, Homo sapiens
aagacagtatgcaaggccacgacccacgagatcatggggcccaagaaaaagcacctggactcatgcagccagtaaagatcccagaga

SEQ ID NO: 744149 - DNA, 75 bp, Homo sapiens
ctgcccgcagctgccaggcggcggcgcccagctcgagccttgggcacagaagtgattcaactcttccccgagaaa

SEQ ID NO: 744150 - DNA, 101 bp, Homo sapiens
gtgtctcgggtcatcacttggacaacagaacccaaaagttctgatgttcggaaggccatcagacatgagggagtgttggttgctacggtgatggggctcag

SEQ ID NO: 744151 - DNA, 76 bp, Homo sapiens
atattcaacagcttcgggtagaagaagatgtctacactcataacattgaagctgtcagttgtgatgaagcgctggt

SEQ ID NO: 744152 - DNA, 82 bp, Homo sapiens
tatgcttataagagtggaacagggggatatgagactttctactcggaatatcctgagtgttgcgtggatgtaaaacccattt

SEQ ID NO: 744153 - DNA, 100 bp, Homo sapiens
actgtgcagaatctacaaattttgctactgtcagatggattgactatggaaaagttgccaaattggtattgtccttcttgtaaaactgattccagtgaag

SEQ ID NO: 744154 - DNA, 83 bp, Homo sapiens
ttaggaggacaagcagctggagaccgtgggccccaagggagacagatcagttggaggaagaaaaagcagagctggagtcggag

SEQ ID NO: 744155 - DNA, 100 bp, Homo sapiens
taagaggcagcaggcgatgccctccacaggtatggcagtctcttgcatggcaccaagaatgttaccaattcaagcagtttaagattgccaagacaaaata

SEQ ID NO: 744156 - DNA, 100 bp, Homo sapiens
ggaatgatggctttgatgacagaatgagagatggaagaggtgaaatccgagaacagaatggagacagtcttgtccatgctgcttttgtagcagaaagtgc

SEQ ID NO: 744157 - DNA, 89 bp, Homo sapiens
cacgcagggaaaacatccttgtaatgcgactagcaaccaaggaacaagagatgcaagagtgtactagtgaagtaattgggaaactgttc

SEQ ID NO: 744158 - DNA, 51 bp, Homo sapiens
ggtgtagctcgtccggttaccttcaggtataataagcctagtgaaacggtc

SEQ ID NO: 744159 - DNA, 96 bp, Homo sapiens
cagcattcctgtgacctctgcctaccatccataaaatactcattcccctctcagacttcaccataagggaaagaagagagccttgttggacactga

SEQ ID NO: 744160 - DNA, 75 bp, Homo sapiens
ctcccatccctgcagcatgaacaagcgtggagattggtgaaagcgtgagaggggaagatgtctacatcatccaga

SEQ ID NO: 744161 - DNA, 90 bp, Homo sapiens
caagcctgcctgcttctgcatcgacagatagccgtcttcagcttgagccccatcactagtctgatgccaatgcaagttacttaagagcag

SEQ ID NO: 744162 - DNA, 82 bp, Homo sapiens
ctacttagttcatcctcggctccaacaaaatctggaactcacgctcatttacagaaattgatgtctgataagaagtgttctg

SEQ ID NO: 744163 - DNA, 98 bp, Homo sapiens
gcacaggtcacagtaaggccaaaaatgtgcatactcacagagttagagagagggatggtgctgtcgcctggttgggcccggaaatgggacgtcgcgct

SEQ ID NO: 744164 - DNA, 90 bp, Homo sapiens
acaaaatggaatgtgaagagcaaaaagtctcagatgagctcatgagtgaaagggtttttaatgaccacaacaagcaagcatgcagcttac

SEQ ID NO: 744165 - DNA, 88 bp, Homo sapiens
gtcgcagcccccgccgtagccgcctccgagcccgccgccacatcctctgagtgagacggtttaagcggaagcatcttactgccattga

SEQ ID NO: 744166 - DNA, 100 bp, Homo sapiens
gggaccaaccagacggaggaactggacaatcttctgacccaaattcagaatggacagtttagaagaacctcagaaaaaagtctttaaggctcgaaaaacg

SEQ ID NO: 744167 - DNA, 88 bp, Homo sapiens
gttagggcgtggcctgaggcttggataagtgggatgctgtaatggactgtgttggttggcctccaggcaggaagtggcacttggaaaa

SEQ ID NO: 744168 - DNA, 116 bp, Homo sapiens
ctgaaggctgaattggagctcgtactgagaaaatacaaggagctggacatcgagcctgagggaggggaaaggcgcagggcgtcacaatgtagcagggaccccaggcgtcgtgctca

SEQ ID NO: 744169 - DNA, 90 bp, Homo sapiens
ggcgtggggcgggacagcggccccctggagggggcagtcccgggagaacctgcggcggccggagcggcagcacacttctgcttttgttcc

SEQ ID NO: 744170 - DNA, 75 bp, Homo sapiens
ccctggaagagaagagggtggctaatgattaaggaaactacccagctctgctgggggagctgcacacagaaaagg

SEQ ID NO: 744171 - DNA, 96 bp, Homo sapiens
gaaaacatttaaagttgatgatatgttatcaaaagtagagaaaatgaaaggagagcaagaatctcatagtttacaggagagccgaccattttcagt

SEQ ID NO: 744172 - DNA, 101 bp, Homo sapiens
gtgctcatttactgtggactgtaagcatgagtgaattctggttgtgtttcaactgctgtattgcagaacagcctcagccttttgatgccgaccgcgatgag

SEQ ID NO: 744173 - DNA, 50 bp, Homo sapiens
tcagcgcagtatattactgcagtgattcgcctttgccagtctcatctcgt

SEQ ID NO: 744174 - DNA, 100 bp, Homo sapiens
ttcagaatacttcaagaatagcagaggagcagagtttcgctgttgttgcccaggctggagtgctggagtgcaatggcatgatctcggctcaacgcaacca

SEQ ID NO: 744175 - DNA, 88 bp, Homo sapiens
tttttctctgcatggatatgtttacttctccatgcctaggaaccttctccatctcattgtacttcttcctgccctctctcccaccatg

SEQ ID NO: 744176 - DNA, 100 bp, Homo sapiens
tacacacagaaacaggcaacatttggacacatctcttaggtacctagtcgatagtcgctggttcaaacagtggaaaaaatatgttggctttgacagttgg

SEQ ID NO: 744177 - DNA, 76 bp, Homo sapiens
tagaacaacttctaaatcatcgtgaggcaacatcagatgctgacctgaaagaacatatggttggaatcatattcag

SEQ ID NO: 744178 - DNA, 97 bp, Homo sapiens
aagctggaccagaccattgctcgcaagcggatggagatccaggaggccatcaaaaagcctctgacattccctgacatcgtggagttctgcgaggcca

SEQ ID NO: 744179 - DNA, 82 bp, Homo sapiens
accggggaggagaccctggtcctgttcctagggaaagcaggcaggatgggagagtcgccgatagaaccacctcttccctgcc

SEQ ID NO: 744180 - DNA, 75 bp, Homo sapiens
tccaaagcagtttgtgcctgctgtagaaaaggataatgttgtctgtctgtctccaaaactggcacaaagcctggg

SEQ ID NO: 744181 - DNA, 100 bp, Homo sapiens
acagaatgaagtaatgaaaaatggctgtgaatctaaagagctggtctacctcgtgcagattgcttgtcagctgctgggcatgctgtgtgcttgcatcgtg

SEQ ID NO: 744182 - DNA, 51 bp, Homo sapiens
agtgcctccaaaggttgctgagatgtgcactgggaactacacctttgttcc

SEQ ID NO: 744183 - DNA, 100 bp, Homo sapiens
gctgcattgacctggtcaatggctaccagtgcaactgccagccaggcacgtcaggtcaaaatgcagatcttcgtgaaaacccttaccggcaagaccatca

SEQ ID NO: 744184 - DNA, 100 bp, Homo sapiens
cagccagagggccgagagccgcggggagaaggccatcacccaggtcagcaagggcacctgcgagcaagatttttgcactgagtggccagccgcactggac

SEQ ID NO: 744185 - DNA, 98 bp, Homo sapiens
tggtgccgagagggacaggcttctccggaaggaacagattttagctgtggccaggctcccgctggtgtccctggagcatgggaggctgctgagcgtga

SEQ ID NO: 744186 - DNA, 100 bp, Homo sapiens
aggggcgccggctggggtgtgtgctcctggtcaaaatgcagatcttcgtgaaaacccttaccggcaagaccatcacccttgaggtggagcccagtgacac

SEQ ID NO: 744187 - DNA, 100 bp, Homo sapiens
ggcgtcccgggggcgcagggaaggagggcgtccgagtcaacaaccgcttcgagctgatgggggctccggaggtggcgcccaggctctgagctaccctagg

SEQ ID NO: 744188 - DNA, 83 bp, Homo sapiens
aaggatatcgacgtcgtgatccagaagtccagagctgaggactgcctgtttgcagaaatgttcttttggggccagagtctggg

SEQ ID NO: 744189 - DNA, 83 bp, Homo sapiens
gccgactgacactcgcagccccctcgggaggcccgacgcgactgggcccctcagctgtttgcagacaaggtcccaaagacagc

SEQ ID NO: 744190 - DNA, 74 bp, Homo sapiens
ggctcggccgcgcggactgaaggagactgaagtgggtgggaggacgctactcgctgtggtcggccatcggactc

SEQ ID NO: 744191 - DNA, 90 bp, Homo sapiens
ggtgccgaggaataggccatatccgtggtccacgttattcgggacatcacaggacttgtgccctggggctgcctggcatctgggggcctc

SEQ ID NO: 744192 - DNA, 75 bp, Homo sapiens
tgttgtgatcgcagtgggcgagggagtcagcgaccgcaaggtgagaagccctaccactgcaactgggacggctgc

SEQ ID NO: 744193 - DNA, 75 bp, Homo sapiens
gtctcttacgtctgcggaagtgcagctgcctcagttcttagcgcaggtaagaatgattgatgttggctgatattg

SEQ ID NO: 744194 - DNA, 100 bp, Homo sapiens
ccagaccctggagcctcagttggaagcagccgatccagcctgcggagcctgtggggcaggccgatacaaagcaggggaaaaggagccagatcccaagacg

SEQ ID NO: 744195 - DNA, 98 bp, Homo sapiens
ggatagcgttgcaaatccttaaaagagtcttaacgtagtggccacagaagaagtagttactgcagaatctgtggatggtgccattcagcaagtagtta

SEQ ID NO: 744196 - DNA, 100 bp, Homo sapiens
gtggggccaccatttgcccagggcctcttggggctctggttttagaagagcactccagcgaccaggtcttgggcgtctttggtactggcttttttagggg

SEQ ID NO: 744197 - DNA, 76 bp, Homo sapiens
gtgtgcaccgcgcgctgcccgaggcgcgaggagatgttaaagtaacccatcttgcaggacgacattgaagattggt

SEQ ID NO: 744198 - DNA, 82 bp, Homo sapiens
ccgaggacgaaggggtagcgggagtgatgtctgtggggccgccggcggcccggcttcaggaccactccgagaatgccattgg

SEQ ID NO: 744199 - DNA, 83 bp, Homo sapiens
cgtcttccgtgggcaacgtggccgacagcacagatcatggaagggaagtggttgctgtgtatgttactggtgcttggaactgc

SEQ ID NO: 744200 - DNA, 100 bp, Homo sapiens
atgtgttttggaggcaccgtctctccctgggaccagctggagctctcaaacactgctgtcctgcaccagatgcggcgggaccaggtgacagacacgtgcc

SEQ ID NO: 744201 - DNA, 75 bp, Homo sapiens
agctggagcgcccagaggcgagccctggtggaggaagaggtgcccattcctgcacagaaccacaggggacactga

SEQ ID NO: 744202 - DNA, 90 bp, Homo sapiens
ggaggccaggaagaaggttctcaaacaaggacattgttgcctcaaccttgaagctcccagctaacaaggtcatgtgccatgtaaggcgtg

SEQ ID NO: 744203 - DNA, 100 bp, Homo sapiens
gcctccccagcagccgccacccctgcgttcagagccgggcacactgggctctgcagcctcatcctacagccccctagataggagtgtcaggcctctgagt

SEQ ID NO: 744204 - DNA, 86 bp, Homo sapiens
ctgcgcctccgcggctgccctgcgccagacaatgcagatcttcgtgaagactctgactggtaagaccatcaccctcgaggttgagc

SEQ ID NO: 744205 - DNA, 74 bp, Homo sapiens
gggaggcccggcctggcttagtggggacccagggcatcagacacaggtgtccggctttgctggcccagcaagcc

SEQ ID NO: 744206 - DNA, 75 bp, Homo sapiens
cttcaccactggaacaagcacaagcccttagagatttgtttgattccatggataaaacttcttccagtattccac

SEQ ID NO: 744207 - DNA, 82 bp, Homo sapiens
actacaacagaggtggaatgcccaacagagggaactacaaccagaaagcttatagcttcattgcaccatgtgtggcatttgg

SEQ ID NO: 744208 - DNA, 100 bp, Homo sapiens
aggacctgtctgacgatagtccaaaaactgaagaagatggtggataagcccacccagatgtggatgttgttgatcctgatgaaaagtccatcatgaccta

SEQ ID NO: 744209 - DNA, 75 bp, Homo sapiens
aggaggggcaggaaattctttgaaggaccccaggagcaagcacaagttcaaaatccacacttacggaagccccac

SEQ ID NO: 744210 - DNA, 73 bp, Homo sapiens
cggaagctggagccacctgcggggacattagtcatgagtgccgagtgtgcggggtcacagaagtgggtctttc

SEQ ID NO: 744211 - DNA, 78 bp, Homo sapiens
agcgcgagagcttcgagcggactcaggagccaaaaacctgtatatcatctccgtgaaggggatcaagggacggctgaa

SEQ ID NO: 744212 - DNA, 95 bp, Homo sapiens
aagcgagcgatcgagcgagcgcgcgcgcgaaaactccgggcaggtgtcgtgaaaactacccctaaaagccaaaatgggaaaggaaaagactcata

SEQ ID NO: 744213 - DNA, 50 bp, Homo sapiens
ctcagttacagttatattgccatgaacactctgctccagccaaggtggtg

SEQ ID NO: 744214 - DNA, 75 bp, Homo sapiens
cagcctggcatttgacaaatgtacagcttgttcttccaaagtaatgaatttgggcatcctgaatggttagacttc

SEQ ID NO: 744215 - DNA, 100 bp, Homo sapiens
cggacctccagtggccggctccggaggcttggtgactccagtggcccagatgcggacctgtccgtcaccgaagccagcagctccgacagccgaggagaga

SEQ ID NO: 744216 - DNA, 74 bp, Homo sapiens
ggcgatccgggcgctcgagacttaccagagccacaaggctccaaagactgatattcttgtggaattacctactt

SEQ ID NO: 744217 - DNA, 98 bp, Homo sapiens
cggagtggagctcagccaggggcagccggctctggtgctcccagaagaggagaagtacagcatcggggagcccacagtgccatccaccctggcagagg

SEQ ID NO: 744218 - DNA, 82 bp, Homo sapiens
tttaggcgacgtcgtcatcgacttgtacaccgaagaacggccgcgtggagcttcagagagacatagagaagcacagtacagg

SEQ ID NO: 744219 - DNA, 100 bp, Homo sapiens
ctggagtatactccaggagagcatgaatatggattatttccagcgcccattcatgttggaggagaatgaagtcactgagttctttgtgaccctggagaag

SEQ ID NO: 744220 - DNA, 100 bp, Homo sapiens
cggagacagcccaaatatcctcggaagagcgctcccaggagaaacaagaatcagagatcattgatttcttcctgggggcctctctcaaggatgaggtttt

SEQ ID NO: 744221 - DNA, 82 bp, Homo sapiens
caggccgagctctttgccctttacccatcagtggacgaggacagagcgggatgccaccagcttgtccaaagggaagttccag

SEQ ID NO: 744222 - DNA, 72 bp, Homo sapiens
aaagaaccattgaaaaatttgagaaggaggctgctgagatttagctcagcactaccttatgcgggccaatat

SEQ ID NO: 744223 - DNA, 50 bp, Homo sapiens
ccacaggtcccacctactcagcaggtgacaccgggtctaggagtggtggc

SEQ ID NO: 744224 - DNA, 100 bp, Homo sapiens
agaccctctcctttccctttgagaccgtgaagagaaagatgcagtcagaaattggctttggaaaaatggaaacctacatcaaattggaaaagcttggaga

SEQ ID NO: 744225 - DNA, 100 bp, Homo sapiens
acctcatgggcaagaccatgacggaggatgatgacatcactaccggaggccagtgctgctgaggaagcagatgtgcacgtagctgtggtggtgagaccag

SEQ ID NO: 744226 - DNA, 98 bp, Homo sapiens
ggagggcgagtgcctggagttgctccgcagatacttggagaatgggaaggagacgctacagcgcgcaggaccagtccatgggcaattggcagatcaag

SEQ ID NO: 744227 - DNA, 75 bp, Homo sapiens
gcgtctacaaccgcgcggccctgctggtcttcgccttgatcgtgttctcctgcatctatggtgagggctacagca

SEQ ID NO: 744228 - DNA, 100 bp, Homo sapiens
cagtaaagcaaaacagagtcggagtgaaaagaaggcacggaaggaaccactcgttttgactattattttatcactctttgtgaaacttcacaatgttcgg

SEQ ID NO: 744229 - DNA, 75 bp, Homo sapiens
gcccgggctacgctcctccatcacgtggaccgtataatagacgctggccccaaaggaaactactctcgatttatg

SEQ ID NO: 744230 - DNA, 100 bp, Homo sapiens
tattggagcaaggaaaagagccctggatggtgaagaaggagggaacaagaggcccatgccctggctcttctcaaccatctgtgagtccaggggaaccgtc

SEQ ID NO: 744231 - DNA, 100 bp, Homo sapiens
ctgcccgacagtcctagctaaacttcgccaactccgctgcctttgccgccaccatgcccaaaacggggtaggttcaaggtggtggtcagtgtcctgtctg

SEQ ID NO: 744232 - DNA, 98 bp, Homo sapiens
aaccacattgtccaggccttcgccaacagcggcaacgccatcaagcccgtctccttcatccgagacctgaaaaactgtaggaagaggcagagctctac

SEQ ID NO: 744233 - DNA, 125 bp, Homo sapiens
aaggagctgaaagaacatggtccagaaaacattgtaatggccatcgctggaaacaagtgcgacctctcagatattagatccaggatgagaagactgataaaagaagaagctagctgaacagctgt

SEQ ID NO: 744234 - DNA, 82 bp, Homo sapiens
agttggtttggaaacaaagactttcaggccctacctatactagctaggaactgtggctgcaccatctgtcttcatcttcccg

SEQ ID NO: 744235 - DNA, 78 bp, Homo sapiens
tgaacacagcttaaatcaaaagtctatggacagcttaatgaagacaaactgaaggggaaactgagatccttagaaaac

SEQ ID NO: 744236 - DNA, 100 bp, Homo sapiens
gccttattttttctcatggatgttcttcttcgagtatttgtagaagggtaaaaggcccaggcattgggcttttgggcatttctctaggagctgatatttg

SEQ ID NO: 744237 - DNA, 98 bp, Homo sapiens
atgtgtgctgtgttaaattcagcccctcttccagataccatttggctttcggctgtgcaggacttgcaattgtgaccaaatatattacaaagggctgg

SEQ ID NO: 744238 - DNA, 124 bp, Homo sapiens
ggtttagtggatttttactcctttccgctgcaaaggagtgcaaaagaggaatgtctctaacactagattgtagaaggcatgaaacaaaaaatgtggagtattgaaaatattgccttcggttctg

SEQ ID NO: 744239 - DNA, 100 bp, Homo sapiens
gaagatgaacagggttcctggggcatcgacgatctccatatttcattgcaaggaatcctatccatcttcttcaccgatatggtttgtggattctgaagac

SEQ ID NO: 744240 - DNA, 82 bp, Homo sapiens
tcatggatcgtcatgacaatagggcaaagcttcgagggatcagagtacaggggctcaggtccaggtggcaggggatatgcta

SEQ ID NO: 744241 - DNA, 90 bp, Homo sapiens
atggtacagcccagaagagatggttactttgaagcaaatccagtttgctgatgacatgcaggagttcaccaaattccccaccaaaactgg

SEQ ID NO: 744242 - DNA, 100 bp, Homo sapiens
cggttcgctgcccggtccgcccgcggtgagaggcagtgttgtaagcacggggacagagacgtacgtgagcagatggaacccccgaagacctgcagctgtc

SEQ ID NO: 744243 - DNA, 75 bp, Homo sapiens
gggatcttcgcactatcccaaggactcgctcagcagcagcctgaaaacttgctacaagtatctcaatcagaccag

SEQ ID NO: 744244 - DNA, 90 bp, Homo sapiens
ccacggtcaacgtggtatactcgcagacaacccaaccggtatacaatggcaccccctgtaatggcctatcctgctactacaccaacaggc

SEQ ID NO: 744245 - DNA, 83 bp, Homo sapiens
ctgctacaggactctactatggagaacatccatgatagcagtcttctgtaaatcgaacttttcaagaattctctgaaggaacc

SEQ ID NO: 744246 - DNA, 74 bp, Homo sapiens
ggacaccccggaagctgggaaatgtgaaagccctgtgtaaggaatgtgtagtagaacgttgtcgcatattgcgt

SEQ ID NO: 744247 - DNA, 74 bp, Homo sapiens
ccatgagcaccaagcagatcacttgcagtcagatgccctggatgcagctagaggatgattctctgtacatatcc

SEQ ID NO: 744248 - DNA, 100 bp, Homo sapiens
cgggcccgtagctgggctctgcgagggaagatcagttttcctgccatccaggctgctccctccttcagcaactcattcccacagatcttccgagacagga

SEQ ID NO: 744249 - DNA, 100 bp, Homo sapiens
gaaatgttccaccaggacttgatgaatataatccattctcggattctagaacaagcaacttgctgagcttcgtcaggaatttcttcgacaagaagaccag

SEQ ID NO: 744250 - DNA, 100 bp, Homo sapiens
gatgccactggtcaagtccttagatatgggcaggacttttgcctggggataacaggaggatttgacaacaaaatggaatgaccatacctgaagaagacgc

SEQ ID NO: 744251 - DNA, 82 bp, Homo sapiens
tgggcgaccaggaggtgccggtggccgcgctcggacccgggggaaatttgcagtggtgagaaaatgtataaagaaagattct

SEQ ID NO: 744252 - DNA, 99 bp, Homo sapiens
agagggtgcatcaattcttcgacaggaaaaaaatttgctggatattgatgcgccagtcactgacaatgcagatcttcgtgaagactctgactggtaaga

SEQ ID NO: 744253 - DNA, 100 bp, Homo sapiens
tccacgaggcgttcatcgaggagggcacattccttttcacctcagagtcggtcggggaaggccacccagacaggtgcagttcaggagcagatgagatcca

SEQ ID NO: 744254 - DNA, 89 bp, Homo sapiens
atcctgaaagccatgcagcggggactttgaacatgtcggggatcgccctcagcagactcgcccaggagaggaaagcatggaggaaagac

SEQ ID NO: 744255 - DNA, 98 bp, Homo sapiens
ggaagtaaccccttccgggagcctagatcctgtgctttactctgaagactcgttgtgtgtcgcagccctgtcggtgaataacttctgtgacaaccgcg

SEQ ID NO: 744256 - DNA, 122 bp, Homo sapiens
gggagcgccgagcgtcgccgccgccgccgccatgaacaactcgggcgccgacgagatcggggggggccctcagcctcttggccttgaacgggctgttcatcttgattcacaaacacaacctg

SEQ ID NO: 744257 - DNA, 98 bp, Homo sapiens
tgaaagtattctgtctcatgcatctaatactttacttgtgaatgaagattcattatgagagatctggttggagttggagggtgagagaaaatgaattc

SEQ ID NO: 744258 - DNA, 100 bp, Homo sapiens
aacgattcaacccgggggagctcaggcagagatcctacaagaatccaggatgatgatcccagattgccagcgcaggttggaagccgcatatttggatctt

SEQ ID NO: 744259 - DNA, 100 bp, Homo sapiens
cgcagctggctggcttcagtggaccagtaatttcatctgtgccaaagcctccagaggacaagccagaagatgtacatacaagtcatccattaaaacaaag

SEQ ID NO: 744260 - DNA, 100 bp, Homo sapiens
tcagcacggatggaaagatggagatgaacctctaacacagtggaaaggaaccgttctggatcaggaaacctatgagaatatcccaggccagtcaaagatc

SEQ ID NO: 744261 - DNA, 99 bp, Homo sapiens
gccagcgacccaccatggagacccgctacaacctgaagagtccgggggaagaggctgctgggggtgacaggctcatccatgagcaggacctggagtggc

SEQ ID NO: 744262 - DNA, 75 bp, Homo sapiens
ggcgtgcatattgtagggggtgaactggaagaagaagaggacagtgctccagtgaaagtggaagaacaaaggaag

SEQ ID NO: 744263 - DNA, 74 bp, Homo sapiens
ggccatccagctcatcgctcgcatcgctgccgccaacggggatcagcagcaggctcgtcagtctcagcttgctc

SEQ ID NO: 744264 - DNA, 100 bp, Homo sapiens
aagggggctctttatataatggtcaagaaagatcttaagactggtcattcaaaggggtttggctttgttcgttttacggaatatgaaacacaagtgaaag

SEQ ID NO: 744265 - DNA, 145 bp, Homo sapiens
ggccatgtagaagttgatgaatcaagaggaatgcacatctgtgaagatgctgtaaaaagattgaaagctgtagagttggctttgtgggacacagctgggcaggaagattatgatcgcctgaggcccctctcctacccagataccg

SEQ ID NO: 744266 - DNA, 75 bp, Homo sapiens
gccgtgctgcttatggcggcgctggagagggggcgctgagctgttgggcgcttctctgaagtagctttggaaagt

SEQ ID NO: 744267 - DNA, 80 bp, Homo sapiens
ctgcagacactgaacgaggagccagtggaatatattaaaggaatctgtgaacctgaactagaagaaagagaatgttaccc

SEQ ID NO: 744268 - DNA, 100 bp, Homo sapiens
tataacactgcccagtcaccaagtgctctccagcagagtcgggtttctccattcaaggacatgattttatgcttctctgaagaggattggtcccttctag

SEQ ID NO: 744269 - DNA, 98 bp, Homo sapiens
ggggatagtggagctgcccactctagaggagctgaaagtagatgagatcatggaagggaagtggttgctgtgtatgttactggtgcttggaactgcta

SEQ ID NO: 744270 - DNA, 100 bp, Homo sapiens
gaattgaatagatgtctccctattggtcggaagtctatgcgtcagtctacagctgagcatacacgacaaacgttccttcgggtacaggagaggcagggcc

SEQ ID NO: 744271 - DNA, 75 bp, Homo sapiens
ccgggagttcgacggcatcggcgcggtcagcggcggcggggatgaaaactttcggaagagaaagttgcctgtggt

SEQ ID NO: 744272 - DNA, 90 bp, Homo sapiens
gtgaaatacctgctcttcttcttcaacatgctcttctgggtcatgttggcagcttcctattggtctcttctggccccagcagttgagatg

SEQ ID NO: 744273 - DNA, 75 bp, Homo sapiens
atccgttctgagacatacaaatagtgcagcggaactgctgcctgacgctctgcaacttcagcatccccgaggagc

SEQ ID NO: 744274 - DNA, 100 bp, Homo sapiens
aggagatctacgaccttcagagcaaatgtcagggtctcggaagggtgctgacctggaccgggagaagaaggctgccgagtgcaaggtggacagcatcggg

SEQ ID NO: 744275 - DNA, 75 bp, Homo sapiens
ccctgggctggaacgaccctgatgcaggacagctggagcacacattgatgaatcattgttccctgcagctaatat

SEQ ID NO: 744276 - DNA, 100 bp, Homo sapiens
tcattgggcaaaaacttgtgagggcgaaggtcgtattgaatggtgttgtagggctggatacagtgaactggaggaatagcggggagaattgccaatactc

SEQ ID NO: 744277 - DNA, 76 bp, Homo sapiens
ctgtgtgatgatagtattggcatttataatactgaactatggacctatgaggtgtactggtccgttagcaaattct

SEQ ID NO: 744278 - DNA, 90 bp, Homo sapiens
gagaagacggccgccaagatggagaagaaggtgtctaagcgctcgcggaaggaggaggaactgtggctgcaccatctgtcttcatcttcc

SEQ ID NO: 744279 - DNA, 75 bp, Homo sapiens
gttctaggtgctcagatggagttataaaactagccacctgtatagaaatggtgacatcactggcatatactcatc

SEQ ID NO: 744280 - DNA, 99 bp, Homo sapiens
caagatttggagtccggctctaacaccttccaccatgaccacctcagcaagttcccacttaaataaaggcatcaagcaggtgtacatgtccctgcctca

SEQ ID NO: 744281 - DNA, 83 bp, Homo sapiens
tcctgcggcagaagccgagttcaacatcctcctggccaccgactcctacaagtaaatacctgggcacaggacttcaaagcaaa

SEQ ID NO: 744282 - DNA, 75 bp, Homo sapiens
ggtggcaagcaagtttaatcagacctgctcacacttcagaatagagaaggcttttcagtaagtggtatgcctggg

SEQ ID NO: 744283 - DNA, 100 bp, Homo sapiens
cttcctgtttgtggataagacagtcccacagtccaggtagctacagcaagctgggtagcaggcagatccaaaggatatcatgaagtttccagggcctttg

SEQ ID NO: 744284 - DNA, 99 bp, Homo sapiens
gctgagtgctaaactgtgtggggcgcggatgggatccagctgttagtcggaagaagacgtaaagcaggctaccagcaattttgagaacttgcaaaaaca

SEQ ID NO: 744285 - DNA, 102 bp, Homo sapiens
agaagataagggaatttcttaaaaagatgggaataactgggaacacaagtccatttggacagccctttagtcaagctggagggcagccaatgggagccactg

SEQ ID NO: 744286 - DNA, 100 bp, Homo sapiens
ttagaaagaacacgtcagcgaaacccatctgatcgacatgttattatctccatccagttcctggtgtacaggcgcagcaccgccgcctcggagcttgagc

SEQ ID NO: 744287 - DNA, 100 bp, Homo sapiens
gccattctcaggatgtcctgcgtgataaggtcaatgaggagatgtacatagaaaggttatttgattctgcgggccaggcatcgacatccgcaacgactat

SEQ ID NO: 744288 - DNA, 74 bp, Homo sapiens
gcggaattccggcggctgccgtgactccagtgcaactggtagcagtgtttgatgagcaggatccacatcacgga

SEQ ID NO: 744289 - DNA, 80 bp, Homo sapiens
cgaccaggtcatcctgctgcgggcaggaatactcccccagttgcaagaggcgcaggaccgtggaagacttcaacaaattc

SEQ ID NO: 744290 - DNA, 97 bp, Homo sapiens
gaggacctggaggtggacggtcagaaagttgaagttccacagccactgagttggtgtcatggagaaactccagctgggcccagagattctgcagcgg

SEQ ID NO: 744291 - DNA, 118 bp, Homo sapiens
cccagaccctggagcctcagttggaagcagccgatccagcctgcggagcctgtggggcagagctgcggtgcaaccctgggcagtttgcgtgtcgcagcggcaccatccagtgcatccc

SEQ ID NO: 744292 - DNA, 100 bp, Homo sapiens
ccttgcgcctgcctctccaggatgtctacaaaattggtgagaactcagattgcacagagctagactcgggcagccagagcggcgagctgagtaacagggg

SEQ ID NO: 744293 - DNA, 75 bp, Homo sapiens
ggaaaagggacgtaggaagaagggcaggacctgggcggaggccgccaagacgagtaccaagtatggtgtccttgg

SEQ ID NO: 744294 - DNA, 82 bp, Homo sapiens
ttctctgctagatgttgtggttgaaaataatctagatattgatggctttgctgaataccactagaaacatacctgtaaccag

SEQ ID NO: 744295 - DNA, 98 bp, Homo sapiens
caccaccatcccggaatacctggagttgcacacagtggtatgaatcctaggacccagaataaggattctctagaggacagtgtttctacctctccaga

SEQ ID NO: 744296 - DNA, 74 bp, Homo sapiens
ttgcagccctagtgtttgccggagccatggaatttgctgaagaagaacatgagctgcctgtggacatggaaacc

SEQ ID NO: 744297 - DNA, 83 bp, Homo sapiens
ttgatgactttgcacattatgaaaagcgtcaagaagaggaggaagccatgcgtagggtaatttgcattgtatatagatgatcg

SEQ ID NO: 744298 - DNA, 101 bp, Homo sapiens
catttaggagctctgctcaaagccagacgaccgctgccatgaagggggtcagtcctacaagattggtgacacctggaggagaccacatgagactggtggtt

SEQ ID NO: 744299 - DNA, 98 bp, Homo sapiens
aaggattggattggcatctttagagtcttcgccttgatcgtgttctcctgcatctatggtgagggctacagcaatgcccacgagtctaagcagatgta

SEQ ID NO: 744300 - DNA, 98 bp, Homo sapiens
tgtttgcttttggcagtgccctggctcaggcccggctcctctatgggcacccagaggcctccattcaggctgttttttcagatgcccaaatgcatatt

SEQ ID NO: 744301 - DNA, 108 bp, Homo sapiens
cgagccagtggcaatgacccagacccggacgacccccattgctgagccagcggagctgcttgctccagtgtgctgctctgctcgttacaacttagcaattttggcctt

SEQ ID NO: 744302 - DNA, 90 bp, Homo sapiens
ccggatgctgcggcgcccgctggccgggctggctgcggccgccctgggccgggccccaccggacggttgagccggaccctgaggctggga

SEQ ID NO: 744303 - DNA, 100 bp, Homo sapiens
cacgattctatactgcagaagtagttcttgcattggatgcaatccattccatgggttttattcacagagactaaggtgtcagtatgttcttcaagctgct

SEQ ID NO: 744304 - DNA, 75 bp, Homo sapiens
gactttggggcccgtcaccctcagagagtattatgagggaggccgaggacttcatgctccggacagagaaacggc

SEQ ID NO: 744305 - DNA, 90 bp, Homo sapiens
aaaatagaagccatgtttcgaagacctgtattacagtgaataccagggcctggtgaagcacacaggaggctgccactgtggagcagttcg

SEQ ID NO: 744306 - DNA, 100 bp, Homo sapiens
cacagccaggcgggacgcgcacagtccctccacgcggaaagaagtaccttcgccggtcaccggctcctgcaggtactatactggcaattgctggagaaga

SEQ ID NO: 744307 - DNA, 90 bp, Homo sapiens
cctggatggagctatatccagcagtcagcactgatgtccgctttgccaacatgctgggccagccggttgtgtgacttcattgagacacat

SEQ ID NO: 744308 - DNA, 98 bp, Homo sapiens
ctaccggctggagaagacgctgggcaaggggcagacagcggagctggagtttgttcagatcatcatcatcgtggtggtgatgatggtgatggtggtgg

SEQ ID NO: 744309 - DNA, 98 bp, Homo sapiens
ctgcgatcctgggtaccacgcgggccccgagggcacctgtgacggacagagcgggatgccaccagcttgtccaaagggaagttccaggagctcctggt

SEQ ID NO: 744310 - DNA, 90 bp, Homo sapiens
gattcttacctctttgatctcgacaataagttgccaccttccagagaagaggtacgagatgacaagacaaccataaagtgtgaaacctcc

SEQ ID NO: 744311 - DNA, 75 bp, Homo sapiens
agacgttagcgtgagtgatcactctcaatcccgggcatccgtgggctctgagaagctctttgcgccgggaaccga

SEQ ID NO: 744312 - DNA, 83 bp, Homo sapiens
cagaagctggtcagtcaaatgttcttcccaggagactctgccggccttttccccaccagccccagcttggccatccctcaccc

SEQ ID NO: 744313 - DNA, 73 bp, Homo sapiens
gaaatcttggagaagggtctaaaggtgctggaggacggccggcagtggtggaagctgcgcagccgcagcggcc

SEQ ID NO: 744314 - DNA, 76 bp, Homo sapiens
caccgtgcgctgttgcgatctggaccccgagaagaggcctataccattcaaggacagtatgccattccacagccag

SEQ ID NO: 744315 - DNA, 71 bp, Homo sapiens
ttgtcttgaccaccaaagagttcatgagacagaacgtgaagctcttggagcaatttgtctgcgcccacacg

SEQ ID NO: 744316 - DNA, 100 bp, Homo sapiens
ccaggtccctgtctgagccagtcgcgtctccttcttcacctcggggtccgagaacctacaccgcgtggagaaggtccactggggcacccgttacgccatc

SEQ ID NO: 744317 - DNA, 95 bp, Homo sapiens
ctgcaggggtcagtgatggagctgcttcaggtctgatgaatacatgtaaagcttattgagcctcagaactctaactacagggtttcaatagcaca

SEQ ID NO: 744318 - DNA, 100 bp, Homo sapiens
ggacaatggcaagccctatgtcatctcctacctggtggatttggacatggtcctcaaatgtctccggattgtcagtggcttcgccccgaggagagctgac

SEQ ID NO: 744319 - DNA, 83 bp, Homo sapiens
cgccgccgcgccgccatcatggacaccagccgtgtgcagcctatcaagctggccaggtattggtaaaggttttcaaggtgtca

SEQ ID NO: 744320 - DNA, 83 bp, Homo sapiens
gctgcttcgggctgccgaggaccttctgggcccccacattaatgagactggtcgaattgacaaatcttaccctacagtatgtg

SEQ ID NO: 744321 - DNA, 100 bp, Homo sapiens
gtcgaagcgagggtctgaagttcacgactactagaaggggaggggagtggaaaggctctcagtgaaaaaggggtaaattccttcctcgtgtacatggctt

SEQ ID NO: 744322 - DNA, 50 bp, Homo sapiens
gaaagatgggacctcccggcccaggtggtgctccaaattactaccccaac

SEQ ID NO: 744323 - DNA, 75 bp, Homo sapiens
ccagggtccctgaagagggaagacacgcggaaacagctggagttggccacggccaagaacgacatgaaccggcac

SEQ ID NO: 744324 - DNA, 97 bp, Homo sapiens
ggatgaggatgaggaggaggggacggatgaggacgacttggaggctgatgatgacctgctgttgactggtctgagtgtctccaatggaaaggaccaa

SEQ ID NO: 744325 - DNA, 99 bp, Homo sapiens
gcgacacactctgcgtcctcgcctcaccaggtcatgtttactggtgaaaatattcctgttcatcctcatgtttatagcaatggtcatatctgtttatcc

SEQ ID NO: 744326 - DNA, 80 bp, Homo sapiens
ccaaatgtctgactctgactctcggactgagaaacgcaaggaatactcccccagttgcaagaggcgcaggaccgtggaag

SEQ ID NO: 744327 - DNA, 50 bp, Homo sapiens
gcgctttgtttccagcagtgataggactggaatgtcacgtggaataccag

SEQ ID NO: 744328 - DNA, 83 bp, Homo sapiens
cgcgcgctgagggtctcggggcgggcgccgcgggacctctccgggccatggattgtcactgctgttccaagggcacacgcaga

SEQ ID NO: 744329 - DNA, 90 bp, Homo sapiens
cttgacctatgtgcagctcctgggggaaagacactagcgttgcttcagactggctgttgccgagaggaaggcaagcctgagattaatcag

SEQ ID NO: 744330 - DNA, 90 bp, Homo sapiens
ccgggggcgcgggcggcggcgccggcaggaaggtaattggtacgcctcagagaccggcagcgtcaaacaccctggtggtaggaagcccac

SEQ ID NO: 744331 - DNA, 52 bp, Homo sapiens
ctgaggatcgaggaacgttgtctgccttgccaacattccactaacccccgag

SEQ ID NO: 744332 - DNA, 100 bp, Homo sapiens
cagaagcatgtgtcttccccagctctgcagccacatactatccgtttgttcaggaaccaccagtgacagaaaccatatttatttagagtcagaatggagc

SEQ ID NO: 744333 - DNA, 51 bp, Homo sapiens
ctctcaggcattaacaccatcataaatcttcttgacagagacacattttct

SEQ ID NO: 744334 - DNA, 88 bp, Homo sapiens
ccgaagaagcatcgttaaagtctctcttcaccctgccgtcatgtctaagtcagagatgccttcaattaagttgcagagttctgatgga

SEQ ID NO: 744335 - DNA, 100 bp, Homo sapiens
gaggaaacccaaagtccttgggcccaagccttgtcagtactgtaacataattgcagcatttattggtaccaagtgtcagcgttgcacaaattcagaaaaa

SEQ ID NO: 744336 - DNA, 82 bp, Homo sapiens
gcaacagctcacgggagcaagaacgccttcctaacaggctccggcaggcgttagggccttcctaagtgctacccgaatgcgt

SEQ ID NO: 744337 - DNA, 73 bp, Homo sapiens
ttcaaataaagccacagctgctgattcattgtttgaccgacagggttgtctttctactcgggacactcttcct

SEQ ID NO: 744338 - DNA, 98 bp, Homo sapiens
cagtgaccgcagcagcctcaacaagtttaattggttggggtcagataagaagaggagtgacaatcaagccaacagtagatgatgactgaagaatacca

SEQ ID NO: 744339 - DNA, 90 bp, Homo sapiens
ctcatgttttggctttggggctagggaaatctgaaatagagtactatgctatgttggctaaaactggtgtccatcactacagtggcaata

SEQ ID NO: 744340 - DNA, 88 bp, Homo sapiens
ccaagaggcagacctaggaaatgggaaagaccacagcaagattctttcattcgtctcctcctagcctgggggaccaggctcgaactga

SEQ ID NO: 744341 - DNA, 74 bp, Homo sapiens
tcttggtagcggaggcacccgaatgctgcccgggtgagagcctggagaaagttcttgtggaattcagtcacaag

SEQ ID NO: 744342 - DNA, 100 bp, Homo sapiens
tccacatgagtgcctctcccagcagatccaggcctgctggtgggtacccttgatgttgtgttggactccagcgcccgggtcgctccttaccgaatcttgt

SEQ ID NO: 744343 - DNA, 96 bp, Homo sapiens
ggaagttaaagaagtgggtgacccagccactccttaaattaagctcaaagcttggattctgccgtgccactcacgaatggcgacacagaagacgat

SEQ ID NO: 744344 - DNA, 98 bp, Homo sapiens
cgacagcagcagcagcagccagtattcgggaaaggcagacagatgatttcaagctttttagatcagcaagccatcctgtttgtggacactgctgatcg

SEQ ID NO: 744345 - DNA, 96 bp, Homo sapiens
ctgctgtgcgcggtcctggcgctcagccatacagtatgacatgatgggaagaaatcagactgctgtgagagaagagatgattctcctggcaaacta

SEQ ID NO: 744346 - DNA, 100 bp, Homo sapiens
ccctgctctgggacacacctccattggatttaaaagacagtcctcgtcagcactgactttcagctatggaatcgtgatgcttttgacatacaatatggag

SEQ ID NO: 744347 - DNA, 98 bp, Homo sapiens
taatatccagaggagaataatttggaagactgttgtggggctggttgatatgtgaagagccaacctgtcgcaatcgaactcgtcaccttccccttcaa

SEQ ID NO: 744348 - DNA, 100 bp, Homo sapiens
taatatatatgaactcaggtcttaccaactccgatgcttagatgagtacgaagatgatgaagcagggcagaaagagcggaaacgagaagatgcaattaca

SEQ ID NO: 744349 - DNA, 97 bp, Homo sapiens
gatgtcgtcagtaatgcctggaatgatgatgtctcatatgtctcaggcttccatgcagcctgccttaccgtgccctcccgaagcctcctattctacg

SEQ ID NO: 744350 - DNA, 100 bp, Homo sapiens
tcaattccagggagataactttcgtatcacaaaagcagatgctgctgaattctggagaaagttttttggagacaagtcaccatggggacagccgccctgg

SEQ ID NO: 744351 - DNA, 118 bp, Homo sapiens
gaccatggagaccctcacggagctgggcgacgagctgaccctgggagacatcgacgcaagagtgagccatggagctacgtgtggggaacaagtaccgcctgggacggaagatcgggag

SEQ ID NO: 744352 - DNA, 98 bp, Homo sapiens
cgtcagcaccaggagcagcgaggcactcatcctgcacgccggcgagtgccagcggtccctggatggccggttgcaggtgtcccatcggaaggggctcc

SEQ ID NO: 744353 - DNA, 83 bp, Homo sapiens
cggagccgagagccacactttcaagtaaaccaggcctccggtgtggctgtctctgatggtgtcatcaaggtgttcaacgacat

SEQ ID NO: 744354 - DNA, 89 bp, Homo sapiens
agacgatctcggagacgagtggtgggagaaccagccgactggagcaggcagcagcccagccaatggagatcttcgtggatgatgagacg

SEQ ID NO: 744355 - DNA, 51 bp, Homo sapiens
aaggtcaacctgggagtgggagttcctggtccagaactttacacagaaaag

SEQ ID NO: 744356 - DNA, 98 bp, Homo sapiens
tggacccagccctgcgtgaggccgcggagcgccagctcaatgaagatcaaaatggtttcaatcccagaatactatgaaggcaagaacgtcctcctcac

SEQ ID NO: 744357 - DNA, 95 bp, Homo sapiens
tcaggcagacctggtgtctccagctgatgatttgtccctgtctgaaggtgatgatgaacagtctacacagatggctgcaagttgggaagatgata

SEQ ID NO: 744358 - DNA, 88 bp, Homo sapiens
aattcggggcgagccagagagggcccacacgactagaaggacgactgcctggcgcgatacaaaaatagacaaagcatggaggacacaa

SEQ ID NO: 744359 - DNA, 50 bp, Homo sapiens
gttgaccagtcaattctcacaggagccagcaccgctctttgaccttgcca

SEQ ID NO: 744360 - DNA, 50 bp, Homo sapiens
cctacagagagatgctgtcccgtgggtggcaagtgcaggcagctgtcccg

SEQ ID NO: 744361 - DNA, 100 bp, Homo sapiens
ggggctcagagatccaagtgcgcgccctggcgggtccggaccaaggttccgagaagtaaagctttggaggtcacaaaattagcaatagaagctgggttcc

SEQ ID NO: 744362 - DNA, 99 bp, Homo sapiens
tacacacttcgagctgaagcacctctccagcggggacctgctccgggacaacatgctgcggggcacagccagccccagtcggcgccatggcgtctgccg

SEQ ID NO: 744363 - DNA, 110 bp, Homo sapiens
gacgatctgcacttcgcattttggcattgacatttaattttagggtcctttatatagaagggagagtaggaatgatgagaagacagcagctgattacaagattttaggtg

SEQ ID NO: 744364 - DNA, 83 bp, Homo sapiens
cgggtctgctcgggggtctacttcgaggatcacacgcgctgcaacgtgtggattctggatggagacttgtaccacaaaggcct

SEQ ID NO: 744365 - DNA, 100 bp, Homo sapiens
ggaagctggttctctcggggttcttggccagcgaagagatctacattaaccagctggaagccctgttgctggagatctattgggaaactgattataacca

SEQ ID NO: 744366 - DNA, 100 bp, Homo sapiens
ttggggatggctataatgggtatggaggaggacctggaggttactcctggatggagcacctctgatagcaatccacaaagccaggtattacaagaggaaa

SEQ ID NO: 744367 - DNA, 100 bp, Homo sapiens
tcattatgaattggatatcaagccagagaagtgcccgaggagagttaacagtactatactggcaattgctggagaagattttgcaattgttgcttctgat

SEQ ID NO: 744368 - DNA, 51 bp, Homo sapiens
cgcaatcttctcctctggggatgacctggactctcagcgttctcatctctc

SEQ ID NO: 744369 - DNA, 140 bp, Homo sapiens
gctgttgcggggtccgcggggaagtcttggcggtggagccatggtcggccaactgagcgagggggccattgcgccagcagaaaactgagcttccggtcacagagaacgtgcagacgattcccccgccatatgtggtccgc

SEQ ID NO: 744370 - DNA, 100 bp, Homo sapiens
cgaaaacggaagcgcagggagaaggaagaggtgtttgaaaagttgcaaccgccaacccaggaaagtgcctgtcgtgcacaaactcaacattcactttcac

SEQ ID NO: 744371 - DNA, 98 bp, Homo sapiens
tgcgatagctgcaaggaaggtggagatctcctgtgctgcgaccactgcccggctgccttccacctccagtgctggcgatcgccagctcgagtgcagat

SEQ ID NO: 744372 - DNA, 98 bp, Homo sapiens
gcccggccggacccgggcccgagctgcagcatatcgtgagtgatgagatctgtgtgcaggtgactgacctttacctggcagaaaataataatggggcc

SEQ ID NO: 744373 - DNA, 100 bp, Homo sapiens
ggcgtgagctaccacgcccggccctaggctccacaactctaagaagctttggtatcccacgttcatcgatgccctgcgggacctggacgatgccctctcc

SEQ ID NO: 744374 - DNA, 75 bp, Homo sapiens
caaagaaacaagagtgcttatcccagctaagctccaggagattgagaatttatcacaagttgatggtcctcaagt

SEQ ID NO: 744375 - DNA, 74 bp, Homo sapiens
tttcattggcaagccacaattatgggacctgggcaagattcttgccaagagaattaatgtgcgtattgagcaca

SEQ ID NO: 744376 - DNA, 100 bp, Homo sapiens
tcactttgttataaactgctgaagaagattaatgattcatcaagggatagttgtacttgtctcgtgggaatcacttcatcatgcgaaatctgaaattatt

SEQ ID NO: 744377 - DNA, 100 bp, Homo sapiens
gcagtatctgccgtcccagtcccagcagaggtaccagccgcagcagatgggcaccagttgcgtcttgaagtgccatcagctgtaaccaaagttccacatc

SEQ ID NO: 744378 - DNA, 75 bp, Homo sapiens
cagccgcggagcagtagccgccgtgggagggagccatgaagcattacgagatgccttcaattaagttgcagagtt

SEQ ID NO: 744379 - DNA, 83 bp, Homo sapiens
cgccgaatctccggccgaagagcggcggcggcagcggcgggaaggaacgtcccagggatggaagtgcttggatgcggtgctgc

SEQ ID NO: 744380 - DNA, 100 bp, Homo sapiens
gtgcatcctacaacaacaagccattcatgggccggttttatgagtgggaaccatttgcagaagtggagtcaaccagccccagtctgctaaccactgacaa

SEQ ID NO: 744381 - DNA, 98 bp, Homo sapiens
gttggtgagggcactgctccagcgagaggccagcaagtgaaacaaagagtcctcttcgtggaaaagaaaaaaatacgctccctttaaacggtggattg

SEQ ID NO: 744382 - DNA, 100 bp, Homo sapiens
ccggggctcaagtggcttaacaagtgtgccatgcggagctgaatgccatcatgaacaaaaattcgaccgatgtgaaaggctgtagtatgtatgttgcctt

SEQ ID NO: 744383 - DNA, 133 bp, Homo sapiens
cctcgcgtcgcgcccgggaggaaggaacgaggcaaggagctaaagcagcgtgcgttcagccctggggaatactcccccagttgcaagaggcgcaggaccgtggaagacttcaacaaattctgcacctttgtct

SEQ ID NO: 744384 - DNA, 82 bp, Homo sapiens
tctgggagcttctcagccattttccacagatcagccctgggcgctgcctatggcacagccaagagcggtaccggcattgcgg

SEQ ID NO: 744385 - DNA, 74 bp, Homo sapiens
aatgaagatggaacatggccaaggggtccttctactcctaattgtatcacggactgattcaccgagcccaaccg

SEQ ID NO: 744386 - DNA, 73 bp, Homo sapiens
cgaaatgatccgcctgcctcagcctccaaagtagctgagactacagtaacaaattccaaagcccttaaataaa

SEQ ID NO: 744387 - DNA, 127 bp, Homo sapiens
cgaaaacgtagggaccacatcaaagacagctttcacagtttgcgggactcagtcccatcactccaaggagagaaggataagttctgaacgtcgaaaagaaaagtctcgagatgcagccagatctcgg

SEQ ID NO: 744388 - DNA, 98 bp, Homo sapiens
ctgggaagacagatgctaatagcaattcctttttctggatatgccgcagaaggatccgtgccagaagcaagcctgtgagatacagaaatgtttacaag

SEQ ID NO: 744389 - DNA, 101 bp, Homo sapiens
gagagagtcagctgcaacaggaagacccaatggatagatacaagcaactgcagaacagcttgatggactttggagaaccgtggaaaatgaacccaggagat

SEQ ID NO: 744390 - DNA, 88 bp, Homo sapiens
ggacaactttggaggtggaaacactgcctgggaggaagagaatttgtccaaatacaaagacaggaagcccagtgaatatattgccgcc

SEQ ID NO: 744391 - DNA, 101 bp, Homo sapiens
ttggaccccgcggcgcccctcggcctcggagcaacgagcgcagcgccgagtttatgtggccgaggcagacaagtggaattaggccttgctgcaggggactt

SEQ ID NO: 744392 - DNA, 83 bp, Homo sapiens
cgctccggcccggtgaaactgaacttataatcgtcactggattattaagtattggagccatgggaataaaggttcaacgtcct

SEQ ID NO: 744393 - DNA, 82 bp, Homo sapiens
cgtacctgtggtccctggatccagtgctactgctacaaataagacaggggcaagtgtccgagtggtgaatcagctacttaca

SEQ ID NO: 744394 - DNA, 75 bp, Homo sapiens
gggagcttccgggagggcggctcgcagccctgggcgctgcctatggcacagccaagagcggtaccggcattgcgg

SEQ ID NO: 744395 - DNA, 75 bp, Homo sapiens
gagaactggttctacacgcgagctgtcctcatcaccgggggcatcgtggccacagctgggcgcttcacccagtgg

SEQ ID NO: 744396 - DNA, 83 bp, Homo sapiens
gcagcaggaattgggatcgtgtcgctgcgggcagcccaatggatccaatggtgatgaagagacctcagttgtatggcatgggc

SEQ ID NO: 744397 - DNA, 100 bp, Homo sapiens
tttcttggtcttgaccagcctctctcatgcttttggccagacagattggggtggagcatgtggtggtgtatgtgaacaaggctgacgctgtccaggactc

SEQ ID NO: 744398 - DNA, 97 bp, Homo sapiens
gttcgtcatccacaaccatgcggacatcggcttctgcctggtgctctgcgtcctcatcgggcttatgttcgaggttgcttatggaaccacagagaac

SEQ ID NO: 744399 - DNA, 82 bp, Homo sapiens
ccagccctgacgtgaactcattttatctgccacgacccagaagatgctgttcatgcaatattagcatacagtcaaagtgcag

SEQ ID NO: 744400 - DNA, 98 bp, Homo sapiens
gaacctgctcaaagccctgggtcgcttggaagaagccaaggcattcaactcagaaacagacagtttcaagctggcctatggagggcaccagtatcacg

SEQ ID NO: 744401 - DNA, 75 bp, Homo sapiens
ccggagaacacgggctacacgtatgcgctcagaacccttaggagaaatcttgagagtggacagcaattgtgaaga

SEQ ID NO: 744402 - DNA, 50 bp, Homo sapiens
ggccctgggagctggaggaaccgcgcaaagccaacccaagtctgccagtg

SEQ ID NO: 744403 - DNA, 75 bp, Homo sapiens
tacacggatgaggcccggcggtcgcgcctcaaccggctgtacggaatccaaggttcaagagattctcctgcctca

SEQ ID NO: 744404 - DNA, 100 bp, Homo sapiens
tgcgagggtcccacgactcccgcctggttttttgcatgtctgacacccatgactccacctggaccttatggctccacccagaagcaattcagcccaacag

SEQ ID NO: 744405 - DNA, 100 bp, Homo sapiens
ttactcagtctctaaaaagctaaggcgtgagattcaacattttggggtgaaaatcagcatagttgaacctggctacttcagaacgggaatgacaaacatg

SEQ ID NO: 744406 - DNA, 100 bp, Homo sapiens
aagatggagccaggaggagagcccacaggtgctaaagagagcagtaccctgatggagtcccttgcagggagtgcatccgccccaacccttttccccctcg

SEQ ID NO: 744407 - DNA, 75 bp, Homo sapiens
caactttgaagagatcgactacaaggagatcgaggtggaagaggacaggcgacactaacaggtgaagatctcggg

SEQ ID NO: 744408 - DNA, 100 bp, Homo sapiens
gcaaatactacgtcaaggagaggtctaaggctgctgtggtgccatctgcccagacccttaaaattactgactttagcttcagtgactttgagctgtctga

SEQ ID NO: 744409 - DNA, 97 bp, Homo sapiens
gagacttttggggggaaactaggtcgatggtcggcggcgcccggatgggcagctgagttacagaatgtctgaaggggacagtgtgggagaatccgtc

SEQ ID NO: 744410 - DNA, 74 bp, Homo sapiens
ctcaccgttctgcccccagaactaggtgaccaagaatatggcccaggtgaccaaagccctggacaaggccctga

SEQ ID NO: 744411 - DNA, 100 bp, Homo sapiens
ggaaaacctggtagaggagtttgagatgaaggaggacgagccgtggtacgaccaccaggacctccagcaaggttgccatggagtcgtggccccctcttct

SEQ ID NO: 744412 - DNA, 82 bp, Homo sapiens
caagatgatccaccagcggttccatcctacacttgggaattgaatgatctggcacgggaccctccagcacagtgttcagcag

SEQ ID NO: 744413 - DNA, 98 bp, Homo sapiens
cagcctcggggctggcagccctggccaagaactccaagctggaggccgcggtggcccagtctgagcagcagggtgaggcggccctcagtgatgcccgc

SEQ ID NO: 744414 - DNA, 90 bp, Homo sapiens
gaggacgcgccgcggccaggcagggaggagaccggcacccagacaggtggcgaaggcagaggagtgtgcaactgaggaacatggctcaag

SEQ ID NO: 744415 - DNA, 100 bp, Homo sapiens
agtggcacctgcgcgaagctggccaaagcctgcccagacggctcacctgtgcgggatggaacaaaagccaagacaatgcaaactccagtgaacattcccg

SEQ ID NO: 744416 - DNA, 100 bp, Homo sapiens
cggcgggaacctcttctgccgtctcagcctgggcgtcgctgaagctgtgtctgcggggaggcagcggaaggcggcaggtgactcacaaccaagagaacgt

SEQ ID NO: 744417 - DNA, 73 bp, Homo sapiens
tctgacagccctgtgtgacaccaagataagtaactgtgtaatgctgtgtcatggagctaaaatcggatttttc

SEQ ID NO: 744418 - DNA, 51 bp, Homo sapiens
gctataatgggtatggaggaggacctggagatccaaaattaacgggacagg

SEQ ID NO: 744419 - DNA, 73 bp, Homo sapiens
tgatatccatcacttcatcatgggatctgaaggaactctttgctgaatttggaacgctgaagaaggcggctgt

SEQ ID NO: 744420 - DNA, 75 bp, Homo sapiens
gctctcatgaacatgcaatgagaagactgatcaatctgattgagaggatccagaatccagatctctggaatagct

SEQ ID NO: 744421 - DNA, 83 bp, Homo sapiens
aaaagccccgcctctgccttcggatagttgttgcgaagctctttggtgaataatagaactcaggccaaggtagcggaggagct

SEQ ID NO: 744422 - DNA, 105 bp, Homo sapiens
tgactctgctgaaagtggtcttcagtttctccatagtggtgcttccgtcctccagatgtgtgcattgcaatgttgtgtactctgatgtggctgctctgaagtctc

SEQ ID NO: 744423 - DNA, 50 bp, Homo sapiens
gcgtccgcttttctctaaggaacccgatcctgggtttgagcagtttaaaa

SEQ ID NO: 744424 - DNA, 99 bp, Homo sapiens
gcagctctgtcagcatgaacaccttctccgacagcagcacacccgaatggaagttggatacactttgtgacttgtacgagacactgaccattacacagg

SEQ ID NO: 744425 - DNA, 100 bp, Homo sapiens
gtggcggcggtggccggggagcccatggcgtacagtcaaggaggcggcaaaaaaaaagtctgctactactacgacggtggtttgctctgttagaggttca

SEQ ID NO: 744426 - DNA, 100 bp, Homo sapiens
gggagccatggcggctgacagtcgggaggagaaagcttcaaactcgtttccttacgtgaagaagaggattcctattaactgtgaacagcagattaattta

SEQ ID NO: 744427 - DNA, 82 bp, Homo sapiens
catcaacaaccagacagggcagcacgccgtcattgacatcaatgccttcccaggtttacccaaggtccagcctagcccctag

SEQ ID NO: 744428 - DNA, 75 bp, Homo sapiens
aacctttgacaagattttcaatcagaaaattgctatgaagacggccaagtgggagatgcaaatattaatacacaa

SEQ ID NO: 744429 - DNA, 101 bp, Homo sapiens
atttaatggaaaatcgcttggttaaaacctgacacttttaacagtgtaaacaggaacatcgataagtagtgtaaaaacttgcacaatgaaatccgaagcca

SEQ ID NO: 744430 - DNA, 82 bp, Homo sapiens
tcttgcctgtgtcccacttgttcgcggcctatagagaacctggaccatgacgcagggcctgatgccagcttcactctggatc

SEQ ID NO: 744431 - DNA, 99 bp, Homo sapiens
caaccgcttcgtgcaactctccgggcggccgcacctgccagatgatccagatcctgatgatggatttaactataaacagatgatggttagagatgagcg

SEQ ID NO: 744432 - DNA, 100 bp, Homo sapiens
ctctgaccagctcggccaggcagtgggccagcagcctggtgcctcccagggtactgaagatttaccccccaaaaaaaattgtcaatgagaaataaagcta

SEQ ID NO: 744433 - DNA, 74 bp, Homo sapiens
caaagatctcgtacaagatccttctttggcaagactggagagttaaatcagcttttaaatgcagttaaatcaat

SEQ ID NO: 744434 - DNA, 74 bp, Homo sapiens
gcatgttttgtacccaaggaaaagtaatactcttttgagagattatccagctccaggtcccacaggggctcttc

SEQ ID NO: 744435 - DNA, 90 bp, Homo sapiens
cagccgctggttccggccatcagatacttcctttccatgaaagcagcaaggattcttgtaaaaatgctgcagacctattcacagacttgg

SEQ ID NO: 744436 - DNA, 101 bp, Homo sapiens
cccaatggcagccagtttggattttcactggacttccacaaggacagccatgggagggcgccctgcgtccggcagaggaggcgagcatcccgctcaggtga

SEQ ID NO: 744437 - DNA, 75 bp, Homo sapiens
gagaatgcgctcttcaagcggatcttggtttggtgcacctcgatttggaggaagtagggcagggcccttatctgg

SEQ ID NO: 744438 - DNA, 75 bp, Homo sapiens
agcctgcagcctgaagattttgcaacttattactgtcccagcatttgagggtgatgatggattctgtgtgtttga

SEQ ID NO: 744439 - DNA, 83 bp, Homo sapiens
tgttccgacacccagctttcatcagcccggcattcggcaggtggatccataaagaacccagccaacccgcagagggaggggag

SEQ ID NO: 744440 - DNA, 82 bp, Homo sapiens
gggcggcgaccggggcctgggtccacgccgagggcaggacgaacttcaccaggctgtctgtccccagaccccagagcacgtc

SEQ ID NO: 744441 - DNA, 90 bp, Homo sapiens
ttgagaaaatggacgctgacatcaatgtcacaaaagcggatgttgaaaaggtttttgccaatccagaagactgtgtagcatttggcaaag

SEQ ID NO: 744442 - DNA, 75 bp, Homo sapiens
gctgtcattggtggtggcttgttggttgaatctggcgatgtggaacccatggatatggagggctgactatataca

SEQ ID NO: 744443 - DNA, 100 bp, Homo sapiens
attgcctggcatggtttatatttgactacattcaactcaggggtgtccagatggagtcttgctgtgtcacccaggctggagtgcagtggctcaatctcag

SEQ ID NO: 744444 - DNA, 89 bp, Homo sapiens
gttaggtttttatccaaaatgtttcatccaaatgatgcaactgaagatgacatgcttgcgaggacctttagcagagggagctaccagga

SEQ ID NO: 744445 - DNA, 100 bp, Homo sapiens
tcgccgtggccaacatcgtcaactctgtgaagcagcggcctctccaggcctacaagccggatcaggcctttgtgacactaaccacaaacgatgcctacgc

SEQ ID NO: 744446 - DNA, 90 bp, Homo sapiens
cttaagtagtgatatttctcttttgtctgcccctattgtaagtgcagatggaacacaacagaatcttagtatcaattggtgaatcattcg

SEQ ID NO: 744447 - DNA, 98 bp, Homo sapiens
gctgtttctatcgtttacgagtttactgcatcagtgatggaggacagagtgcggacgtggccgctttggagagtcagcctttattaggattcactgtt

SEQ ID NO: 744448 - DNA, 75 bp, Homo sapiens
agctgttggagctttgcagctgacctacatctcgaagagagaaccagggctccggggtccctgtgtcgggcccca

SEQ ID NO: 744449 - DNA, 72 bp, Homo sapiens
gcacccagaggccggggaccttgccaaccctcccaagaagttcagagatcaatgtccgagttaccaccatgg

SEQ ID NO: 744450 - DNA, 149 bp, Homo sapiens
ccaccccaagaatcctcatgctcctactatccatttcaactacagatactttgaagtagaagaagctgatggagacggtggctcagggagtaaaggaaggccagttgagcaaacagaagtgttcctctgcatttcaaaaccttcttcct

SEQ ID NO: 744451 - DNA, 100 bp, Homo sapiens
ttcatcgctgaggttcccataatagagttgaagtattgataacaccaaggaactctatcacaatttgaaaagataagcaaaagtttgatttccagacact

SEQ ID NO: 744452 - DNA, 75 bp, Homo sapiens
ttcgggacaagattcgcttctatgagggcacagaaaactgaatctgtagataacgagggagaatgaattgtcatg

SEQ ID NO: 744453 - DNA, 98 bp, Homo sapiens
gtggctggaaggagaactaaatgggagaagaggaatgttccctgacaatttcgttaaggtccagcaagactatgaatctctgttccaaatgctttgct

SEQ ID NO: 744454 - DNA, 100 bp, Homo sapiens
gagagagtggtattatggtgtaaacaacgattctttggagattattcttggagaaaccctgtctgtttactgtaaccttttgcactcaaattcctttatc

SEQ ID NO: 744455 - DNA, 126 bp, Homo sapiens
aacagagcacccaagatgaagatgctgttagcctttgcagtctcgacataagtgtactccaaagattcaggtttactcacgtcatccagcagagaatggaaagtcaaatttcctgaattgctatgt

SEQ ID NO: 744456 - DNA, 75 bp, Homo sapiens
gcctacatgttgttttatcggaaatcccagttgcagagaccccctgaaggttgctccttgagggcaggacagttc

SEQ ID NO: 744457 - DNA, 97 bp, Homo sapiens
acaggcggcgccatcttcgaacttagacttccggaaggactttggcgagggtcgcctgcgaggccgctggccaggcctgagcctctgccaccatggc

SEQ ID NO: 744458 - DNA, 50 bp, Homo sapiens
caggaaaattgtgaaaataatcagcaaccatacgtaggtaacctttccag

SEQ ID NO: 744459 - DNA, 98 bp, Homo sapiens
gttacataactcagttcctggtagattgttatggacctcaaaggccaaatgatctacattgttgaatccagtgcaatcttgtttttggggtcaccctg

SEQ ID NO: 744460 - DNA, 75 bp, Homo sapiens
cggctctctggtccgcagcggcaacagtaacgaaaaacagggctcgtctgcttctgcgctttgcctgggagaggc

SEQ ID NO: 744461 - DNA, 100 bp, Homo sapiens
cgggacgtgtacagcactgactactacagggaaaaatgccagctgtgggacaaggagtgcaggccgcacaacctcggcaggcaccggggggatgtggcga

SEQ ID NO: 744462 - DNA, 74 bp, Homo sapiens
gaatagtctacaaaggaagacttgtaacctggagaagaggtggagccgccaccaaaatgcagattttcgtgaaa

SEQ ID NO: 744463 - DNA, 75 bp, Homo sapiens
agcagattcaggagtactgggagctggtggaacgggcaattgaaggaacagactaaaaatcgtgtcctggaagga

SEQ ID NO: 744464 - DNA, 83 bp, Homo sapiens
aaaataatgggaaggaagaagtatccaagtccacaagaatcggaatgtcagttaatgctattcgcaagcagagtacagatgag

SEQ ID NO: 744465 - DNA, 100 bp, Homo sapiens
ctggtcgtagagaggagtaaagtcacacccaaaggcatacacatccctgtgatcatgagtctggctcaaagccaatttatagcaaatcatccatttctgt

SEQ ID NO: 744466 - DNA, 90 bp, Homo sapiens
tggctccacgccctgctgggtcctacctgtcagagccccaagagctcacaatgtctctctgcaccaagctccatgactcaggatttgcct

SEQ ID NO: 744467 - DNA, 74 bp, Homo sapiens
gcagactcgagtgcgaagcgcgcagtcgccggggctctagatcgggtgtgagtggtggctctcgaagcctcaac

SEQ ID NO: 744468 - DNA, 100 bp, Homo sapiens
aatactgttctggaggagatctccgaaaggctcaaaaactgcagatccttgctgttacggtcacacccagtttcatctgttacctgacaaattaagaagg

SEQ ID NO: 744469 - DNA, 75 bp, Homo sapiens
aatatttcaaatacagtaatgaaagtaaagcagatcctgggcagaagaacatgttcttcaagtatacatggaata

SEQ ID NO: 744470 - DNA, 100 bp, Homo sapiens
gacaaggcgttcaagcgaaaacatgaccgctgagcccatgagctaaacatgaattcagctccaactttcatcaactttcctgcaaaagggaaacccaaac

SEQ ID NO: 744471 - DNA, 100 bp, Homo sapiens
agtaaaggtggaaacataatggaacagaattttgaggttcttccaggggacccagccccctaaccatgggagctcaggacactctccctgttgcagcagc

SEQ ID NO: 744472 - DNA, 98 bp, Homo sapiens
ctccccgcggtagagccggttattcacagagaggaggtcctggatcagcaagaggcgttcgaggtgcgggagtatgagttaagaaaaaacaacttctc

SEQ ID NO: 744473 - DNA, 74 bp, Homo sapiens
gcgtggctctccggcaccggtccgtactccagcgaggcatggaagaggagatggttcgtgttacgcagtggccg

SEQ ID NO: 744474 - DNA, 90 bp, Homo sapiens
tcctcaaacaggatttgctgatattcagggacacccgttcttccgaaatgttgattgggatatggtcaaaatgcagatcttcgtgaaaac

SEQ ID NO: 744475 - DNA, 82 bp, Homo sapiens
gaaggcagagcgtgtggcatctccacctcaaggctttctgaggaagagaaaattcagcgctacagcatcctctccgagctct

SEQ ID NO: 744476 - DNA, 100 bp, Homo sapiens
attttagtttactttcatttggagaggaagctgaggaagaagaggaggaagtaaatcgagttagtcagggtgctgataagactgtgaaaggcccagatgg

SEQ ID NO: 744477 - DNA, 100 bp, Homo sapiens
ggctgaggcggcgcggcagcggagggacggcagtctcgcgcgttcctccgtgtcacaaagcagtacctgccccacgtggcgcgcctctgtctgatcagca

SEQ ID NO: 744478 - DNA, 51 bp, Homo sapiens
gggagcctcatcattggttatgccagtgagaaagatcagtctaaagaaaag

SEQ ID NO: 744479 - DNA, 95 bp, Homo sapiens
ttactaacctgctgtcaaaagaattcatagatttcagtgatacagggtctttttggagttcctgagctgagtgccccagaaggatttcatattgc

SEQ ID NO: 744480 - DNA, 90 bp, Homo sapiens
ggcgaagccttgggtttctttcttaaaggactgatttttagaactccacatttgagttgtcactcagcccagtccatcagtttctcagcc

SEQ ID NO: 744481 - DNA, 97 bp, Homo sapiens
agccacgaaccgggaactccactttgtggcaccgtgagattctccagtgcatactccttccacgttactgcagacggtcagatgcagcctgtccctt

SEQ ID NO: 744482 - DNA, 98 bp, Homo sapiens
ggccaagaacccccaggagcagaagtccttcttcgccaaatacgccaccccagcagacatgtttgccaaggcctttcgggtcaagtccaacacggcca

SEQ ID NO: 744483 - DNA, 88 bp, Homo sapiens
ggagatggaacaggcccagaaggccaagaacccccaggagcagaagtccttcttcgccaaatacagtctcgctctgtcctccaggctg

SEQ ID NO: 744484 - DNA, 50 bp, Homo sapiens
ggggcggcggccacgccaaggacgggatttttagactctgaggagcagtt

SEQ ID NO: 744485 - DNA, 75 bp, Homo sapiens
ctggcgtcctcttgttctcttccaggatgatcggctgaatgtaacagaggaactaacgtccaacgacaagacgag

SEQ ID NO: 744486 - DNA, 100 bp, Homo sapiens
tcttgcgccccctgctggtttcctgccctgtctgacacattcagctaacgtattttagcaggtggagtgaggttgaagattcctgtgacagcgatgccat

SEQ ID NO: 744487 - DNA, 74 bp, Homo sapiens
ccgatgaagtgcagaggtttttttctgtgaatgatttgggaggggacttcaaaggagttggtaaaggctcctta

SEQ ID NO: 744488 - DNA, 82 bp, Homo sapiens
cctacaccaggcagcccccaaatcccggcccagggcgaactttctgaccaagtatacaactacccagagggcctaggagaag

SEQ ID NO: 744489 - DNA, 50 bp, Homo sapiens
gccgggcccacctccccaccaaggaagatgggggctccggaggtggcgcc

SEQ ID NO: 744490 - DNA, 100 bp, Homo sapiens
tttttcagggacgtagccatccagaggcatggaagaggagatggttcgtgttacgcagtggccgtttaactggagatccagatgttttggaatattacaa

SEQ ID NO: 744491 - DNA, 136 bp, Homo sapiens
ctccgcttcctcaacggctgcgtgcccctctcgcatcaggtggccgggcacatgtacgggaaggacaaagtgggaattgagtgatctacagcgcgatccacctgctcactgttcagctggacctgtgggagatgac

SEQ ID NO: 744492 - DNA, 90 bp, Homo sapiens
tcttcagataatcagagtggaggaagtacagccagcaaagttgattcaagtcagttgagacgccagttgtgtggaggaagtcaggccgcc

SEQ ID NO: 744493 - DNA, 51 bp, Homo sapiens
agctgaacatcactcaggataaggaaggaatgcagctcatttcagaaaagc

SEQ ID NO: 744494 - DNA, 97 bp, Homo sapiens
gtgcattgcctttggaaacgagtgcatagtatgggactgggactccaatggcaagcatgacttcattggagaattcacctcgacattcaaggagatg

SEQ ID NO: 744495 - DNA, 75 bp, Homo sapiens
agatccagaaaaactaggatccctttttgttaaacacgatgaaaactttcggaagagaaagttgcctgtggtaag

SEQ ID NO: 744496 - DNA, 51 bp, Homo sapiens
gacatcccggcgtgactgagcaggtatgctgttgtgaaatgttctaagtct

SEQ ID NO: 744497 - DNA, 50 bp, Homo sapiens
accagatccattgacaagtagagctcagccgccgccatgtctgcgcatct

SEQ ID NO: 744498 - DNA, 90 bp, Homo sapiens
cagatctgaagacctattttactgataagaaaacacatctttacacactaagttcttccaggttggaaagagaatatgctggagagctgt

SEQ ID NO: 744499 - DNA, 75 bp, Homo sapiens
gttctggctaacactgacaggggtcgcttgttcctgtgcagtggggacttcactgaggatgtcaactgtgctttt

SEQ ID NO: 744500 - DNA, 123 bp, Homo sapiens
accggacccaggccctggatgggactgtctatgatgtcatgtttgtcagcacagtaagactttgaccccgacgcaggcttcagtgattgccgcggatcagaagcctgagcactttggctcgag

SEQ ID NO: 744501 - DNA, 75 bp, Homo sapiens
gccaagtatccgccagtcaataggaagtacgagtgttgggagccacgtgtaccagtgtgtgttgatcttggcttg

SEQ ID NO: 744502 - DNA, 82 bp, Homo sapiens
gagggtgtagaccgcgcccctggagacaatgcagatcttcgtgaagactctgactggtaagaccatcaccctcgaggttgag

SEQ ID NO: 744503 - DNA, 75 bp, Homo sapiens
tctgctctgtgtgccatggacgggttttggctacgggcctccacctccaccgccagatcagtttgcccctccggg

SEQ ID NO: 744504 - DNA, 82 bp, Homo sapiens
ggccagggaaccctggtcaccgtctcctcaggccagcggaagcctgccacctcctatgtgcggaccaccatcaacaagaatg

SEQ ID NO: 744505 - DNA, 80 bp, Homo sapiens
acaacacccccagcggccgccggctcccccacgagtcaggatggctaaaggtgaccccaagaaaccaaagggcaagatgt

SEQ ID NO: 744506 - DNA, 100 bp, Homo sapiens
gcagcagtcggcttctctacgcagaacccgggagtaggagactcagaatcgaatctcttctccctccccttcttgtatgctattgcggcagcacctcccg

SEQ ID NO: 744507 - DNA, 75 bp, Homo sapiens
ccaattgagccgcgcagggagctgctgacacagccctgcaggcaggtcttgcgagattcacggatccaccatctc

SEQ ID NO: 744508 - DNA, 75 bp, Homo sapiens
gcggcgagcgcggtcgagatcgccatgcctacccgtggggaagaaaacatgacagaaacagatgccttctataaa

SEQ ID NO: 744509 - DNA, 100 bp, Homo sapiens
gctgtcatcacaaaagagttgattgaaattatctctggtgctgcagctctgggatgtcccactcttgttcaagcattgccaggccctagcacacaagtca

SEQ ID NO: 744510 - DNA, 100 bp, Homo sapiens
cgaggagggagaggacggagcccttgatgacgagggccacagtgggattaaaaagaccactgaggagcaggtgcaggaacccaagacagaccaggatgag

SEQ ID NO: 744511 - DNA, 110 bp, Homo sapiens
tccgagctttgccctcgcatcctgttccaacgcggagctgccaaggccatgtctgttccatcatcactgagccagtcggccattaatgccaacagccacggaggccccgc

SEQ ID NO: 744512 - DNA, 101 bp, Homo sapiens
tctactcctgctatgaagagttcatcaacagctattcccttcagcaagctcaagctttttatacgtttccatttcaacaactgatggctgaagctcctaat

SEQ ID NO: 744513 - DNA, 101 bp, Homo sapiens
tgaagactaacattttgtgaagttgtaaaacaggttgttgatgagcgtgaattttttgagatcatgcccaattatgccaagaacatcattgttggttttgc

SEQ ID NO: 744514 - DNA, 100 bp, Homo sapiens
gctgctgccgcctctgctgctgctgctgctgctgcgcgtcccgcccagccgcagcttcccaggtctcctcatgaccatatccctgttgtccattgtgtat

SEQ ID NO: 744515 - DNA, 92 bp, Homo sapiens
cagcgagactccgtgggcgtaggaccctccgagccagcactctggttatggattcctataagtgtatcctgttgaagtttgctgagctcctt

SEQ ID NO: 744516 - DNA, 95 bp, Homo sapiens
gagaaggacttcagcagcatgaagaagtactgccaagtcatccgtgtcattgcccacacccaggggctgcttgctctcggtgactacatgaatgt

SEQ ID NO: 744517 - DNA, 100 bp, Homo sapiens
tttcctgaggcctccccagccatgctgaactgtaaacgctgcatttctacaacagccacctgtgcaggccctgcatgctctgtaacctggggatttggtc

SEQ ID NO: 744518 - DNA, 100 bp, Homo sapiens
ctcaatgagagcctcacagacccagccatcgttaaggacagctgggaagtggtggaaggactgaggggggagatgaattacacccaggagccaccagttc

SEQ ID NO: 744519 - DNA, 99 bp, Homo sapiens
attttgtttggaagatggaccaaagcgatacaacctccttaactacgtgttttgctcaagaaacttttgggaaacagtacaaacaaactataggactgg

SEQ ID NO: 744520 - DNA, 100 bp, Homo sapiens
cagcctttcaaggacaaactagaggagttcttccaaaaaggtgtcatggagaaactccagctgggcccagagattctgcagcgggaaaatccaaggctta

SEQ ID NO: 744521 - DNA, 100 bp, Homo sapiens
aaagaggaggcgcgccgtgcactggagacaccctcccctgcaagaagcctcaagcctgagcgtgcagcaggggcccaacttgctgcaggtgaggcagggc

SEQ ID NO: 744522 - DNA, 88 bp, Homo sapiens
gcaccacgtctctaccgagcacaaactccacgaagccaacgcccagatttccatggagaatgattatctgggacctcgaagaattgag

SEQ ID NO: 744523 - DNA, 98 bp, Homo sapiens
agaaaagggaaaaataaatgtgtctgaatatacatacagttttggtatctgccctcacatgacagaagacaataaagatttgatacagggcaaggact

SEQ ID NO: 744524 - DNA, 126 bp, Homo sapiens
cgccaagctgtcatcacaaaagagttgattgaaattatctctggtgctgcagctcttactctgggaccgagtgcactgaagacgataggaagttcagcatcagtgaaacgaaaagaatcttcccag

SEQ ID NO: 744525 - DNA, 83 bp, Homo sapiens
ttgcagcggcggcagcagcaccaggctctgcagcggcaacccccagcggcttaagccatggcacaatgcagatcttcgtgaag

SEQ ID NO: 744526 - DNA, 80 bp, Homo sapiens
cgctgctggaggaaacacctcaggacacggcctacaacaccaagaggaacctagaaagattgtacaatgaatggtgattc

SEQ ID NO: 744527 - DNA, 90 bp, Homo sapiens
gcgattttcctgtctcagcctacaaagttgctggaactctagtgtggcaaaggagcagagaactttgacaagttcttcacacgaggacag

SEQ ID NO: 744528 - DNA, 75 bp, Homo sapiens
gcactattattcatgaggcaaatgaggaacagggcaatagtatgatgcaatctggagtgccgttagctaaaggaa

SEQ ID NO: 744529 - DNA, 75 bp, Homo sapiens
cgccgctctcccctcccagccccagcacccccaaccacaggttcgtcttggcaccagacataaggcagttcaaca

SEQ ID NO: 744530 - DNA, 118 bp, Homo sapiens
ggccatcttcccactctctcttcgcatcatcttccctctgaaggcgaccggcagcctcgggcaggggagacaggactgtatgtcagagaagagacggcgcttggacgccaggaatcct

SEQ ID NO: 744531 - DNA, 51 bp, Homo sapiens
acaccagtggggcagtgcctcgagtacatccaagccattatgatgatggag

SEQ ID NO: 744532 - DNA, 100 bp, Homo sapiens
cggctccgggcggcgcgaagcgctggtggcgggcccgggctgcggcgtgtgcgcgcccgccagctgctccggagatacgagagtgattgactgcctggag

SEQ ID NO: 744533 - DNA, 98 bp, Homo sapiens
agctagaaggtccaccggaggcaaatgcagatcctcttggtgttttgataaacagtgattctggttcaaaagatgtcgtgataaaggcacaggtttta

SEQ ID NO: 744534 - DNA, 100 bp, Homo sapiens
tcggttgagcggcggcgaacatgcgcttttgacacattggagattctggaacttttcaaagcctgactctcttcttgaaacagtggagcatcatacagag

SEQ ID NO: 744535 - DNA, 75 bp, Homo sapiens
aacctcctgcaaaagtggaagcgaagccgaaaaaggcagcagcgaagatcaaagacatcttaaagccagaaataa

SEQ ID NO: 744536 - DNA, 75 bp, Homo sapiens
caaagttgggtgactcccacgacctgcagcgcttccttagcgatttccgcacatttcagttggactgcgatgcag

SEQ ID NO: 744537 - DNA, 100 bp, Homo sapiens
agctgcttgtagtgtatggggctgaccctggctcccctgatgttaatggccgcacacccattgactatgccagtcatgatgctatggactcctactacga

SEQ ID NO: 744538 - DNA, 51 bp, Homo sapiens
caatactggatttggtgctgttggttcgaaagctgtatgtgatggcttctg

SEQ ID NO: 744539 - DNA, 100 bp, Homo sapiens
ataacagcgagtgtgttgcaaacatgaaagggtgataaaagaaaatgtggctgaagttacccgaagttcagcttgcagtgtaattcagaagagttaagac

SEQ ID NO: 744540 - DNA, 50 bp, Homo sapiens
ttagtagctggaaccaaatgtgacaagaccgagtctcagtctgtcaccca

SEQ ID NO: 744541 - DNA, 101 bp, Homo sapiens
acctttcggcttctgagacggcggcagcagcggcattcaggaagccagcagacctgcagaacttggctcccgggacccacccaccatttataactttcaac

SEQ ID NO: 744542 - DNA, 75 bp, Homo sapiens
aagagaagcaagagatgcttcaaactgaaggcagccagtttcttgcagaacataaattattaggaaacattaaaa

SEQ ID NO: 744543 - DNA, 83 bp, Homo sapiens
agaatgaagccgtggaccctcacggtcaaaatgcagatcttcgtgaaaacccttaccggcaagaccatcacccttgaggtgga

SEQ ID NO: 744544 - DNA, 75 bp, Homo sapiens
ctcggggacattattgcgcgtggaacggctgcttttggaaggaaggatgcctgtggccctcggagagcacagtgt

SEQ ID NO: 744545 - DNA, 82 bp, Homo sapiens
ccggcgggaaggaaaaccgcgcagagagagctggaagtcgagtgtgctactcaactcaggagatttggagacaaactgaact

SEQ ID NO: 744546 - DNA, 101 bp, Homo sapiens
acagagacaagctgagcttgccgcacaaaaagctagagaggttcaaaccttgtactactcagctgatcacaagctgcttgatgggaacctactagatggac

SEQ ID NO: 744547 - DNA, 101 bp, Homo sapiens
ggcgcgggagccagtgagcggcggctcggcgcaagcctgacgagcaggagccgagctcagcaggtccggggctggttgatatgtgaagagccaacctgtcg

SEQ ID NO: 744548 - DNA, 100 bp, Homo sapiens
gtgctatgatataatacctgaaactttactctctttcaccatgcctggatcacttcctttgaatgcagaagcttgctggccaaaagatgtgggaattgtt

SEQ ID NO: 744549 - DNA, 76 bp, Homo sapiens
caaggacaaggccacagagtcggggtcttcacgagcttggggcttccttggtcgcacccaccacctgcctgcccac

SEQ ID NO: 744550 - DNA, 90 bp, Homo sapiens
aacattttgaggaaaatccagctataatttctgacttaacaggttgtttttgagcacgttcactctcgcagtgtcagctggggctgtttt

SEQ ID NO: 744551 - DNA, 51 bp, Homo sapiens
aagatgaagaaacccagcttgatatgttgggccgttgctccagggagaact

SEQ ID NO: 744552 - DNA, 75 bp, Homo sapiens
ctgcctcgtgccgctgagcctggcgcagatcgatgatagtatttctgctgcaagtacttctgatgttcaagatcg

SEQ ID NO: 744553 - DNA, 100 bp, Homo sapiens
gcaattgttgataccaatggaatcacggtttttggaacaaggattttggatgaagaagtttttgagactcccaggaaggaaattacaagtcagaagtcaa

SEQ ID NO: 744554 - DNA, 75 bp, Homo sapiens
cagacattcaacatgattgcatttgaaaggcggggtttcaccatgttgcccagactggtcttgaactcctgagct

SEQ ID NO: 744555 - DNA, 83 bp, Homo sapiens
ccctgctcagctcctggggctgctaatgctctgggtctctgaaagcataacccctactgtagaactaaatgcactgtgcatga

SEQ ID NO: 744556 - DNA, 75 bp, Homo sapiens
aaaagagccctgcaatttgaagatacatgagacagcagccaaacccccagatgcaaataatacggcactccgaac

SEQ ID NO: 744557 - DNA, 75 bp, Homo sapiens
gaggactttaaaactgctgttgtaatgctgtttgggtacaagccctccaaggaaaatgatgctgctgctctatga

SEQ ID NO: 744558 - DNA, 90 bp, Homo sapiens
gaagatgggagcctctgccttgtacagttcccatcacgagtggacgcttctcttgtgagccagctggaggtcttacctctttgactgaac

SEQ ID NO: 744559 - DNA, 75 bp, Homo sapiens
caaagcctcttctgtttccaatgggcaattctgtggtgttcttggtcacacatttatggagtttctgaagggcag

SEQ ID NO: 744560 - DNA, 82 bp, Homo sapiens
gggcgagattatgagtacaacagatacagagactattacagacaatacaatcgggatattctcattcagattgtggatgcct

SEQ ID NO: 744561 - DNA, 90 bp, Homo sapiens
ggacagccagccaccacaatgaaaggtgtgctgggcatcaaggtgaagatcatgctgccctgggacccaactggtaagattggccctaag

SEQ ID NO: 744562 - DNA, 76 bp, Homo sapiens
tatgggcgggaaccactcccacaagccccccgtgtttgacgagaatgaggaagccattcaaactcctccccacgac

SEQ ID NO: 744563 - DNA, 74 bp, Homo sapiens
ggaagggcttcaagttggtggcgctgaagctggtgcaggaagccatcttcgacaagagcacagggaaggttgtt

SEQ ID NO: 744564 - DNA, 75 bp, Homo sapiens
atttgaagaatcttttcagcaaatatgggaagttaatgaaggagttcccccttctgagtatgttcaatatccatg

SEQ ID NO: 744565 - DNA, 82 bp, Homo sapiens
cagattcagaaggagcaggattaccaaaggctcctgggctataacgaaaagccaataaatctacaaatgtttattgggacag

SEQ ID NO: 744566 - DNA, 96 bp, Homo sapiens
aaaagatgactacaaacataggatgttttggcgagagatgtattcagtggaggaagctgaacttgatagcccagaagagttagggaaaaagcgtat

SEQ ID NO: 744567 - DNA, 98 bp, Homo sapiens
tgcagatgaacctgtacgccacctgggaggtggaccggagctcgtccagctgcgtgcctaggaccgagtctcctgccattccgagcaggcctggtatg

SEQ ID NO: 744568 - DNA, 101 bp, Homo sapiens
ctaaaattggccttctcccagttcctgctacctgcagttgttgacctcctgtactggagagacattaagaagactggagtggtgtttggtgccagcctatt

SEQ ID NO: 744569 - DNA, 75 bp, Homo sapiens
ccggtcgcggcggagcctgggcgctgagccacctccccgtgcaagatcctcaagtgcaactctgagttctggagc

SEQ ID NO: 744570 - DNA, 100 bp, Homo sapiens
ccttacattacctgctatatctgtaaagggtatctgatcaagccaacaacagtgacggaatgcctccatacatggaaatgatcttcattggttagcatgt

SEQ ID NO: 744571 - DNA, 100 bp, Homo sapiens
tcatattggagactacaatatggatggctatccagacgctctggtcatactaaagaacacatctggaagtgacattgatgtttgggtaccagaaccagac

SEQ ID NO: 744572 - DNA, 101 bp, Homo sapiens
ctccgccaccgtgcacatccgaatgggtgaatctggattgggaaagtcgacattaatcaactcattattcctcacagatttgtattctccagagtatccag

SEQ ID NO: 744573 - DNA, 90 bp, Homo sapiens
catttagtaagaagaattccagtcttataaatgccttcgtgcatcgctgcggtcgcacagctcgcattggccacgggggcagcgctctgg

SEQ ID NO: 744574 - DNA, 82 bp, Homo sapiens
agcagagctcggaatcttcctcttcctccaccaccaccacctagagggggtagacccaaatgatttgtacattgtagaaccc

SEQ ID NO: 744575 - DNA, 100 bp, Homo sapiens
caatacaaggacctgtggaatatgagtgatgacaaaccctttctatgtactgcgcctggatgtggccagggcctgctttcttccccgggcgatgtgcaga

SEQ ID NO: 744576 - DNA, 124 bp, Homo sapiens
gcagacagtggccccacagcaacagaggcacagcttcaagggggaggagtgtccagcaggccaagctataacatcagaaatggtgaatgaatacaagaaaattcttttgctgaaaggatttgag

SEQ ID NO: 744577 - DNA, 100 bp, Homo sapiens
ttggcaacatctttcgagtgtgtaaaactttccaaatggcagaatacctgaaactggagtttatcaagagctggaagtcgagtgtgctactcaactcagg

SEQ ID NO: 744578 - DNA, 82 bp, Homo sapiens
tgaagcccagttcccctgccagcaagcctgatggattatgatgacatttccaatcagatagacttcatcatctgcctggggg

SEQ ID NO: 744579 - DNA, 75 bp, Homo sapiens
gacggtatgaatttctaagtaagacttatgggagaacagctgggaaatgttgccagaggaataaacattgccatt

SEQ ID NO: 744580 - DNA, 88 bp, Homo sapiens
ctggatgaaggccgtcaccttaccttaaaccttttaagcaaggaaattgaactaagaaatggagagactatcaagatctccacttagg

SEQ ID NO: 744581 - DNA, 82 bp, Homo sapiens
ctggggttctgagactccctgtcccggaccgcaggcctggcccttcccagatgtgctggagtgctgcctcgtcctgcttctc

SEQ ID NO: 744582 - DNA, 75 bp, Homo sapiens
ggagccccagattcaacccgtgtacgtgcctgtgcctaaagtggacagtgtagtggctgctgagtatgagctgga

SEQ ID NO: 744583 - DNA, 75 bp, Homo sapiens
ggcaatacttgttggtttagtgctgttattcagacaagttggatggcttgaggactggtactaaaaggaaacgtg

SEQ ID NO: 744584 - DNA, 82 bp, Homo sapiens
tcaggacatggagtatgaaagacgcattttgaaagcgaagcagaagccgtagaatcagcggcgagcctgttgaaagaaccca

SEQ ID NO: 744585 - DNA, 100 bp, Homo sapiens
ggacagagactctaagaaggatgaagaggatgaacatggtgataagaagcctaaggcccagtttgagatgccttatgtggtacggctgcacaacttccac

SEQ ID NO: 744586 - DNA, 100 bp, Homo sapiens
tctcaagaaaccccttcgggttgacctcatcctcgagaacacatccaaagtccctgcccccaaagaatgcacaccggctgcaccatgtcagcagcctggc

SEQ ID NO: 744587 - DNA, 100 bp, Homo sapiens
gggggaccccggtacggacctgtgcagtgttgaattcaactgaaggcgaggaatgttggtgatgaagctgagttcaggactcggtggaccctttgggaat

SEQ ID NO: 744588 - DNA, 100 bp, Homo sapiens
gttggaccttccggagcttctcagaagacagagggttttcttttgagatggagtcctcctctgtcacccaggctggaacgcagtggtatgatctcggcta

SEQ ID NO: 744589 - DNA, 101 bp, Homo sapiens
cggagcccgagggcgacccgagaagcggcggggcggcgggccggcgggcggggcgcagagccaggcagcgcaggtgctggagaatctggtaaaagcaccat

SEQ ID NO: 744590 - DNA, 85 bp, Homo sapiens
aaaccttgtcataaactgtgaagtcttcgaccctcaggcctgcagagatttcctcatgttagcccagacccatagtaaaaaatgg

SEQ ID NO: 744591 - DNA, 71 bp, Homo sapiens
aagtttgtctggattttcctgtagaactgagggcaggactggccgaagcactggaaggccaagctcaagag

SEQ ID NO: 744592 - DNA, 98 bp, Homo sapiens
ttcacggccctccgggtctggggagtggggaatgaggcgggggtcggcccggggctcggagaatgggcagctattgacctgaaaagtggttctggaaa

SEQ ID NO: 744593 - DNA, 100 bp, Homo sapiens
aaagatggaaaaccagttattgaatatcaagaggaggagttgttggctctgtgtgctccgggatggagcaggtgtgcagagggtgagaacccagctctgg

SEQ ID NO: 744594 - DNA, 100 bp, Homo sapiens
cttcctggcccgaaaggagagcctttaagtgggcagaccaacatccacctcagcaaaaacttcttcctgacgaatcgcgccagggagcgctcagacacct

SEQ ID NO: 744595 - DNA, 51 bp, Homo sapiens
aaggggatgcagctgctgcgggagatctttgtagaatttgatggctgtaac

SEQ ID NO: 744596 - DNA, 108 bp, Homo sapiens
gtggactaagaacgcattgccgccggtcctgaccaccgtgaacggacagtcccccccagctcattgctatggacagtgctatcaccctgtggcagttccttcttcagc

SEQ ID NO: 744597 - DNA, 100 bp, Homo sapiens
gtttactgtggattggatattctcaaggaaccacacatgtattaagatttgaaataagcgggttttgaaaacaaaaaaaagaaggagtggaagagggggc

SEQ ID NO: 744598 - DNA, 101 bp, Homo sapiens
cgttctacctttttgcctgtgtttggggcacattcattctcatctctaaaagatgttggtttaaagcgattttttcctaagagtttactggattctgtcaa

SEQ ID NO: 744599 - DNA, 76 bp, Homo sapiens
gcaggagaggacctcggccacactcaccgtcagggttctcgaggctggacagtccaagatcaaggtgcctgcatct

SEQ ID NO: 744600 - DNA, 132 bp, Homo sapiens
ggcgaagcacgagcagatcctggtcctcgatccgcccacagacctcaaattcaaagaggcaatgagtgcatataatagtcatgaagagggcagattagtttaccgatatggaggagaacctgttggatcctt

SEQ ID NO: 744601 - DNA, 96 bp, Homo sapiens
tgcagccttctggtataccatcgtcaccatgacaacactagggaaacccagcgtttgctggcagaaccagttcctggcatcaaagccgaaccagat

SEQ ID NO: 744602 - DNA, 75 bp, Homo sapiens
cttggatcaacacctttaacttcaagaagacaggttgcaatgaatgtgtatgagttatcatcagctgccggatta

SEQ ID NO: 744603 - DNA, 83 bp, Homo sapiens
acccgtgacctggggatcgctacggaccttaaaatacccgcaacagccccttcgtcccaaccccagtggacaggaaagctaag

SEQ ID NO: 744604 - DNA, 99 bp, Homo sapiens
ggatatcgggtggcggctcgggacggaggacgcgctagtggggatatgagactttctactcggaatatcctgagtgttgcgtggatgtaaaacccattt

SEQ ID NO: 744605 - DNA, 100 bp, Homo sapiens
gccgccgcgaaggacagcctttccgcgcgggactccggggcgccacgggggccatgtaagcaggtttaccaaagatgcaggtcattaggaactattctgg

SEQ ID NO: 744606 - DNA, 90 bp, Homo sapiens
agacggcggaagcggagagcaacagcgcgccgcttagaccatgctcagcctccaagcagccttgtcatcgacaaagaatctgaagtttac

SEQ ID NO: 744607 - DNA, 82 bp, Homo sapiens
agatcacccggaccaaggaggaggccctggagctgatcaacggtgctggagaatctggtaaaagcaccattgtgaagcagat

SEQ ID NO: 744608 - DNA, 98 bp, Homo sapiens
gcagccactctaggcagcagagtcccgtcaacccagacccagttgcactaggaaaacctcacagcacgggtagctctgaacggattcagctctcagga

SEQ ID NO: 744609 - DNA, 82 bp, Homo sapiens
gttggaagcagccgatccagcctgcggagcctgtggggcaggaagacggaagaaagtgccgggaagaaagaaaaccccgtcc

SEQ ID NO: 744610 - DNA, 100 bp, Homo sapiens
agagctcggaggggcgctgtgtgtacatcacccccatggaggccctggcagagcagctggacacagagtatagaaaaaaatgggatgccctggtaatcaa

SEQ ID NO: 744611 - DNA, 103 bp, Homo sapiens
ccgggacccacttcactccagtgcctccgacgcctcctgatgaactgaagcgctgcggcatggcgcgcgcctgcctccaggccgtcaagtacctcatgttcgc

SEQ ID NO: 744612 - DNA, 51 bp, Homo sapiens
gctcaaagaaagatgattatgtactgggcctaatcgctacgtgcctctttg

SEQ ID NO: 744613 - DNA, 88 bp, Homo sapiens
gaagtgtgtgccactgtttataccaggatgggtcatcagttaaggaagttgaaacctaccaccggacacgtgctttaagatctttgag

SEQ ID NO: 744614 - DNA, 90 bp, Homo sapiens
ccagctacagccgagagaagtgcggggtccccttctcctgctgcgtgccagatcctgcggtatgcccaagaggacagagaacgaatgcac

SEQ ID NO: 744615 - DNA, 82 bp, Homo sapiens
atacttcctggcgctgaccttctttgtcgcagcgttccatgattttttatcaagcagaaatgcatcgaacaacgagaatcaa

SEQ ID NO: 744616 - DNA, 100 bp, Homo sapiens
ccaggccccgtgcccgggcatccaccataccgagtgggcacgcctggcgctcttcgacttcctgttgcaggctttcaccagttctcaggatgcccatagg

SEQ ID NO: 744617 - DNA, 100 bp, Homo sapiens
accgtcactctcactgccattgccgagagtcctgttattgaggttactatatcaacaactgataggagaaacaataaactcattttcaaagtgaatttgt

SEQ ID NO: 744618 - DNA, 100 bp, Homo sapiens
gggaatccgggtgtccctgtacctgcagctgctgcagctgctgcacagaaattaatgcgaacagacagacttgagagagctgtagtacacatggatgaac

SEQ ID NO: 744619 - DNA, 88 bp, Homo sapiens
ccgctctagcggccgggactctgaactatggcgttttcggctttgtgagaaaccttaccatcaaacacgatggccagcaacgttacca

SEQ ID NO: 744620 - DNA, 98 bp, Homo sapiens
gcggaagaggccaagaggcggttgaaggagcagtctatctttcgcattaaagcagagaaggccgaaatcacgaggttcttccagaaaccaaagactcc

SEQ ID NO: 744621 - DNA, 100 bp, Homo sapiens
cggagacgatgcctgagatcagagtcacgcccttggggccactgtgcatgtgcgggtcaacgatgtgaacgagtttgccccagtgtttgtggaacggctg

SEQ ID NO: 744622 - DNA, 75 bp, Homo sapiens
cccgcccaggccagccccagcagcaacagcagcacagctgcagcaaaaaattattcctgatcaggaccaactgat

SEQ ID NO: 744623 - DNA, 75 bp, Homo sapiens
gactgccaagagaagcttctgagagaggtagacgtttttaaggagaaacactcaacaccagtcaccactcgtcct

SEQ ID NO: 744624 - DNA, 98 bp, Homo sapiens
gcgctgcccgggccgcgaggacgaggcggcgccgccgggctgtggaggaaagaccacagcaagattctttcattcgtctcctcctagcctgggggacc

SEQ ID NO: 744625 - DNA, 101 bp, Homo sapiens
tgccaattaagaatcatagggaagagggagagtcacaccgggacagctcatgtcctatattcagctcttcaagaacaacctcaaagctctaatgaatcatt

SEQ ID NO: 744626 - DNA, 100 bp, Homo sapiens
acccagcttaaagagctccacattcaggggaaccgcctcaccgttctgcccccagaactagggtttgaaagtattcttgaagggctgtttggacctgcat

SEQ ID NO: 744627 - DNA, 100 bp, Homo sapiens
tcttcagctcttgggtttagcaaaagttcatctccttctgcatccttaactgagaatgaggatttttttcccaggaagccatcccgtcagaggggttcaa

SEQ ID NO: 744628 - DNA, 89 bp, Homo sapiens
tcggaggaggagcgggccaccaggctggcggagctgcaggagcagttgcagtaccatgcaggactagcatctggccttttaaatcagca

SEQ ID NO: 744629 - DNA, 50 bp, Homo sapiens
tggcaagttcgaccagattgccaaggccaacgagtgcatgcgaatcaaga

SEQ ID NO: 744630 - DNA, 50 bp, Homo sapiens
ccacccccgacagggcggagcaggcgttttaaggatgaacagattgacat

SEQ ID NO: 744631 - DNA, 50 bp, Homo sapiens
aggtcaagatcagctctggctagactccctgccctcggaccctgtacagc

SEQ ID NO: 744632 - DNA, 49 bp, Homo sapiens
aagagaccactagaatctggaattgaggctccttgaagttcgtggaagg

SEQ ID NO: 744633 - DNA, 90 bp, Homo sapiens
ctccctacagagagatgctgtcccgtggtaatggaggggaaagttccagtcgcagcgctgagaagcgatcagctgaagaagaagctgccg

SEQ ID NO: 744634 - DNA, 80 bp, Homo sapiens
ccttctccactttcgccagcccgtgccgcgagcgcggcctgcaggaggcagcctgcttctgcaaagtggtacgatcgaag

SEQ ID NO: 744635 - DNA, 75 bp, Homo sapiens
ctttggttggtggaggctgtggcaatggaacaggcttgagaaacaggtgttggagagcacaatggctgaacaagt

SEQ ID NO: 744636 - DNA, 74 bp, Homo sapiens
gagcccgtccgtccgccgccaccacccactccggacacagagctggaagtcgagtgtgctactcaactcaggag

SEQ ID NO: 744637 - DNA, 75 bp, Homo sapiens
ggagatttcagtgcattgcctcccctgggtgctcttcatcttgggcgaaagggcgtgtggttgcgcctgaggaag

SEQ ID NO: 744638 - DNA, 80 bp, Homo sapiens
agaacggtgaatttcccccgcagtgaggagttgggggagttcatggagaccaaaggtgccagcagccctgggattctcgt

SEQ ID NO: 744639 - DNA, 98 bp, Homo sapiens
gcagatgtggacttgaaagaagctgcagcggaggaaggcgaggtagcccgggaccctcgctttgatgatctgtcaggggaatataatcctgaggtgtt

SEQ ID NO: 744640 - DNA, 99 bp, Homo sapiens
aagaagaggacgacgacgacgaggaagaggaggtttctgaggtgcacttacagagtgctacgatgaactggggaacagatatcagcttccagtgtattg

SEQ ID NO: 744641 - DNA, 100 bp, Homo sapiens
agcacaaagagcttgctccctacgatgagaactggttctacacgcgagctgctttatcttcaagccaggatgaagggagactgggcaagactcttacgcc

SEQ ID NO: 744642 - DNA, 50 bp, Homo sapiens
ggcacattcattctcatctctttgtggacatcggatacccaaggagacga

SEQ ID NO: 744643 - DNA, 100 bp, Homo sapiens
aggagctgctgctgaaacagctggctgagggacgacaggctcaggttggcagttggaagaatcctcactatggatgggctcattgaggacattaagcatc

SEQ ID NO: 744644 - DNA, 100 bp, Homo sapiens
cagctctcctgggaccctccaagagcactagtgtctagaaggcactaagggctcgtggtcccaagaagcatctgaagcgggtggcagctccaaagcattg

SEQ ID NO: 744645 - DNA, 97 bp, Homo sapiens
ggcaccatgagcgacgtggctattgtgaaggagggttggctgcacaaacgagtaagactttgaccccgacgcaggcttcagtgattgccgcggatca

SEQ ID NO: 744646 - DNA, 100 bp, Homo sapiens
atttgaagttggtgctgtttgactccaaagattcatgatgttgctatcaaaagttgagaaattgtcagaagaaatcatggagataatgcaaaatttaagt

SEQ ID NO: 744647 - DNA, 90 bp, Homo sapiens
ctggccgcctggacggctcgggcgctggagggaactctaatgatccaggacaaagaagttaccctggagtatgtatcaagcctggatttt

SEQ ID NO: 744648 - DNA, 74 bp, Homo sapiens
cttcgatgttgagaaatcggagattcagactttccacctgcaggtcagagccctatgtgaccagcctgctcaag

SEQ ID NO: 744649 - DNA, 85 bp, Homo sapiens
cttgcagccctatgagcatctcatctgcggcaagaacgccaatggccccttcacagatgtagtcactacaaatcttaaattgcga

SEQ ID NO: 744650 - DNA, 83 bp, Homo sapiens
ttgttgattccaggactggctactgcgtacatccacaggttcactaacgggggcaaggtcaaaatgcagatcttcgtgaaaac

SEQ ID NO: 744651 - DNA, 95 bp, Homo sapiens
gacgcctccgccgccgcctgaggaggcgagctagccgggagttacaccgccaccgccagactttgagcaaagcatggtcctggttgcctgtggac

SEQ ID NO: 744652 - DNA, 82 bp, Homo sapiens
gagcgcgagcggcgcgagaaaccatatcctgcaaatgagagttctaaacttgtctctgagaaggtggatgactatgaacatg

SEQ ID NO: 744653 - DNA, 97 bp, Homo sapiens
agatcattttattgacattgctgaagtggagacagcttcctcatcgtcctggtctgcctcatcttcagcgtgctgtccaccatcgagcagtatgccg

SEQ ID NO: 744654 - DNA, 80 bp, Homo sapiens
tgggaagccaacgaccacacgcagttctgggccggagaaggggcgacgttcgggcaccccccgaatggacaatctttcct

SEQ ID NO: 744655 - DNA, 73 bp, Homo sapiens
tcaggaccccagatgtctgacagccctgtgtgacaccaagataagtaacattgggaaaatgaggtacgttagt

SEQ ID NO: 744656 - DNA, 97 bp, Homo sapiens
cgtgccagagtgcatacggatttcacgccaagtccctatgacactgactccctcaaaatcaagtctcctttagcattggaaacaccaaatcgggtat

SEQ ID NO: 744657 - DNA, 75 bp, Homo sapiens
aatgaatgacagcactgtagaacagctttatgaaacagcttgcttcctacaggtttgatatacgtttgatgaaag

SEQ ID NO: 744658 - DNA, 101 bp, Homo sapiens
gctcctggagatgagcacgccctttacctgcgtttcctggatgctcttaaagtgtttgctttcacaaccaaagttctgggccattcagacatcagccttga

SEQ ID NO: 744659 - DNA, 87 bp, Homo sapiens
tggcatgaaaggacgtgttcttgccctctgtggcctcgtctgcttccaggacatgaaccatacgaattcatatgggatcatcagagg

SEQ ID NO: 744660 - DNA, 75 bp, Homo sapiens
catccccccagatgaaatggatgagttcggtctctgcaagattctgtcatgacctgcctggcgatcattaccgtg

SEQ ID NO: 744661 - DNA, 100 bp, Homo sapiens
gggacacacaaattaaagaccatcacggggaattctgctgctggtgaagtgtcagactctgacagcaacagctcctcttccagttcagattcagactctt

SEQ ID NO: 744662 - DNA, 97 bp, Homo sapiens
cacatccagcagaggaggcgggggcagccgctgagacggtttttcacaagatattcgggacagtgggggtcccaaaccagtgatggtgtatatccat

SEQ ID NO: 744663 - DNA, 75 bp, Homo sapiens
attatttactcgatgatggaactctggtggtttcaggaaggcgcattctacattctaaaggggagctcagtgaag

SEQ ID NO: 744664 - DNA, 100 bp, Homo sapiens
ggcgatgtgtgattaccatggcgaggagtctctgtccgggggcctggctaaggaaaccctattacctccaggccgagacgcatccagagctttcgtgacc

SEQ ID NO: 744665 - DNA, 75 bp, Homo sapiens
tccagagagacaagatggtgaaggaactgagcctgatgaaggacagtcattttgtttactcattcagccctgttg

SEQ ID NO: 744666 - DNA, 75 bp, Homo sapiens
ataaagttaaaaaaaagtatttttctggccaaggaaagctcaggaaggagacccccttcccacagaaagccgact

SEQ ID NO: 744667 - DNA, 90 bp, Homo sapiens
ccctcacaccagacctacggagggagctggaaattcctgacgttcattgatctggtgctgttacactaccaaactgtcagtgaacccgcc

SEQ ID NO: 744668 - DNA, 100 bp, Homo sapiens
gaagcaaaagcctttcatgattatcatccagagctgctgttggcggattgtacccacggggagatgattcctcatgaagagcctggatcccctacagaaa

SEQ ID NO: 744669 - DNA, 83 bp, Homo sapiens
acaacacgcgctacggatctcaagaaccttttcagcaagtatgggaagggcgcaaaccagaagaagagggtgtggaagataac

SEQ ID NO: 744670 - DNA, 90 bp, Homo sapiens
gggacatgctgggagagctccccagacacccctgatgccatcattttctgcaccttcaggaacaggatgaatttacaggaattgaaccct

SEQ ID NO: 744671 - DNA, 75 bp, Homo sapiens
acatcataattgcaccctccgacatggactcagcgaatgctctctacaccaaatgcctccagcagcttctgaggg

SEQ ID NO: 744672 - DNA, 75 bp, Homo sapiens
gacccttttgtgcctgaccctactggagcacgaacttccaggagccggtgcagccgctgacacagcagcaggtgg

SEQ ID NO: 744673 - DNA, 98 bp, Homo sapiens
cacatgatcagggatatacagaccttactatcccggatggagatccgaattcgagatccaaaccaaggaggaaaggatatcacagaggagatcatgtc

SEQ ID NO: 744674 - DNA, 82 bp, Homo sapiens
atagctggattaggtcctcatgctgctgtggtcattgctggtcatctttgggttgcagataagctcccccggcccaacctcc

SEQ ID NO: 744675 - DNA, 93 bp, Homo sapiens
cgcaccatgccgctcctaagcctgcacagccgcggcggcagcagcagtgagagagacgtctcccacaacctgctccgggcgctggacgttggg

SEQ ID NO: 744676 - DNA, 82 bp, Homo sapiens
ttggaacttgccccaagcgcttcggtggtactgttgccagaagcccgaaagatgagatcaatacaggaaaccctgggagagt

SEQ ID NO: 744677 - DNA, 130 bp, Homo sapiens
ggcatggcacagggcctcgcctcactatggcagcagcacggcacagcacgctcgacttcatgctcggcgccaaaggttcaattttggaatggtgtttggcgtaattgccatgtttagctcattttttctc

SEQ ID NO: 744678 - DNA, 119 bp, Homo sapiens
tgggatctctgttttctaaaatgtacgtggatattggatatgtagatctaaggtgccttcaccagggatggaagaggcaggctgcagcagagagatgcagagttctttcacacgtcgtg

SEQ ID NO: 744679 - DNA, 100 bp, Homo sapiens
cttagcttgtcggggacggtaaccgggacccggtgtctgctcctgtcgccttcgcctcctaatccctagccactatggccagctaaataaagacatgacc

SEQ ID NO: 744680 - DNA, 145 bp, Homo sapiens
gacagaagagcggggtcggggccggctgaccaggaacctgggcgagcagcggcgggggcccgagggatgtggaagatgtcaagtttgtgatcaactatgactatccaaacagctcagaggattatgtgcaccgtattggccgaac

SEQ ID NO: 744681 - DNA, 74 bp, Homo sapiens
ccatccatcacgaccacatttgtcatgatgacagtgacaaggttgccaagctgttctgcctttctggaatggtg

SEQ ID NO: 744682 - DNA, 74 bp, Homo sapiens
ccttggagtacggagcctgcagagggtcccacggtggaagcgagagaggaggcttgccttgcgccatggactgg

SEQ ID NO: 744683 - DNA, 95 bp, Homo sapiens
ctgccagtacaactagacccggcgtctggcgtccccggtgcccagcattctgcggggcaggcgtcaaaccggcacgatgtccaggcaccagaacc

SEQ ID NO: 744684 - DNA, 100 bp, Homo sapiens
cggtacgccgccgcctcgcacccgcagcctcgcgcccgccgccgcccgtccccagctctttcagtctcacatggcaacgaaaacaacttgtatgtcttca

SEQ ID NO: 744685 - DNA, 100 bp, Homo sapiens
cagcagacttccttcaaaaccaaagcctatatataaagcagatctgataccgtatcaggacagtcctgaaggtccagaccattcttctgcttcatctggg

SEQ ID NO: 744686 - DNA, 83 bp, Homo sapiens
gcgcgcagattctcgcaaatctggaagcggatcgcgtggagtgacggtcacaccgcggcggttctggcctataggaacaagac

SEQ ID NO: 744687 - DNA, 100 bp, Homo sapiens
gcgggggtggcgctgggagcaacgggagtgtcctggacccagctgagcgggcggtcattcgcatcgcagatcaggatcctcatgaccagccaaagagaag

SEQ ID NO: 744688 - DNA, 50 bp, Homo sapiens
ctgggatctccaagtgaaccaccacaggctcatgagaggctagaagattc

SEQ ID NO: 744689 - DNA, 75 bp, Homo sapiens
cacaacatcatctcagctagacagagagggttccaacaaagtgaatgaagctcttctgcaaagaataaacagtgc

SEQ ID NO: 744690 - DNA, 75 bp, Homo sapiens
gcccggggctccccacgaagtaaccctgtgcgcttgctcttttcttcaggagcccttcagactcggactcccaag

SEQ ID NO: 744691 - DNA, 75 bp, Homo sapiens
aagaaattagacaagaaacattggaaaagaaatcctgataagaactgctttgtcctggatgcctcatcccttagt

SEQ ID NO: 744692 - DNA, 82 bp, Homo sapiens
ttcgagcgtacagcaagtaaacgggcgtcccggagcctcgatggaggatcaatatggaaattatgtaatccaacatgtactg

SEQ ID NO: 744693 - DNA, 82 bp, Homo sapiens
gccggaggaaacgctgtcactgtggaaacggtctcagccttagatccaaggacagtccaaggaagtcctaagaccatggagt

SEQ ID NO: 744694 - DNA, 89 bp, Homo sapiens
tctcgcaaatctggaagcggatcgcgtggagtgacggtcacaccgcggcggtgagcgacctgtgagagtttatgccgatggaatatttg

SEQ ID NO: 744695 - DNA, 100 bp, Homo sapiens
atccccttagcagcagcctctggtaagtggaggtatacttcgaatttttccagaaggcaaagcccagtttgctgacattgaacccaaatttgatagactg

SEQ ID NO: 744696 - DNA, 98 bp, Homo sapiens
caggaataaggaagcgacctgcaaccgacgatgtccagctcgccgctgtccaagaaacgtcgcgtgtccgggcctgatccaaagccgggttctaactg

SEQ ID NO: 744697 - DNA, 101 bp, Homo sapiens
gaaggggcgtctgcggctctccgccgtccccagccctgcctctccctgggctctgggcaatgacatcattgcagcagccaagcgcatggctctgctgatgg

SEQ ID NO: 744698 - DNA, 101 bp, Homo sapiens
tatgtacgcagagttttcatcatggataactgtgaggagctaatccctgaatatctgatcttgtttctggcgctggagacatcaagcttactaaagacaca

SEQ ID NO: 744699 - DNA, 100 bp, Homo sapiens
tcagcggatttcaaccaagaatgaagaggtcttctttgtgatccgcctcattgctggccctgctgccaactccctgcctcccattgttgatcctgatcct

SEQ ID NO: 744700 - DNA, 97 bp, Homo sapiens
gaagtgtttggacgacagcgagcgggagaagcggggtcaaaatgtcaagctgtcagctgaggtggagccatttattccccagaagaagagtcctgat

SEQ ID NO: 744701 - DNA, 101 bp, Homo sapiens
cacagagaacgaagaagaacttttcctcatacaggatcagcagggcctcatcacactgggctggattcatgcaattaagttggaatatgcaaggttggtta

SEQ ID NO: 744702 - DNA, 75 bp, Homo sapiens
cctggccttcaaccccgagccgctggtgctacaggaacatcatttacagcgagcaatttcagcacagcaagtgtt

SEQ ID NO: 744703 - DNA, 100 bp, Homo sapiens
atgaacagaaacacctaggaagggagaactgggtttccaggcctgaggtgcccgccctggccccaggagaatgaaccagccgcagaggatggcgcctgtg

SEQ ID NO: 744704 - DNA, 83 bp, Homo sapiens
atcatgtctgcgagccaggattcccgggagtgcatccgccccaacccttttccccctcgtctcctgtgagaattccccgtcgg

SEQ ID NO: 744705 - DNA, 90 bp, Homo sapiens
gcacgcgcaattccgcagtctctcccagattgtgcaagaaccatgggaggggcgtcaggatgggtgctgcagacaatatatataaaggac

SEQ ID NO: 744706 - DNA, 100 bp, Homo sapiens
cggggttcagcgctcgggtgaggagctggtggcgtcggcaggttcgaggcgattcgagatttggtgcttccagatgtgagttatcaggtggaatccagtg

SEQ ID NO: 744707 - DNA, 74 bp, Homo sapiens
cctgatctaacccctagaaacaggtgagcagtaggtcatccagtcccagtgtcagaatgattactacctcagga

SEQ ID NO: 744708 - DNA, 100 bp, Homo sapiens
aggacacgaccttcctgcccttcacgctccaggagctagaagtctgggccaacggtcacaaaagttgtcactgttgtgacaaccaaaaaagcagttgtgg

SEQ ID NO: 744709 - DNA, 97 bp, Homo sapiens
tgaaccgcttcctgggggactatgtggagaacctgaacaagtcccagctgaagctgggcatctggggcggcagaggtggaggagacactgaagcgac

SEQ ID NO: 744710 - DNA, 100 bp, Homo sapiens
tttaaacagaaatcaccttcagctgtttcctgagttgctgtttcttgggactgcgaagctatacaggcttctgtgatcaaaacagggcgactgctaatca

SEQ ID NO: 744711 - DNA, 96 bp, Homo sapiens
tggcctctttatatctgtgatgatggtgcggtcatattttataggacaatggcccacctgtacggggaccctgagtggtcgcagagggacctggag

SEQ ID NO: 744712 - DNA, 76 bp, Homo sapiens
tatagatggacaagagacgatcattctgcaagcaggcaacctgaatacaggtctattctggataagcaggttttgt

SEQ ID NO: 744713 - DNA, 90 bp, Homo sapiens
ttcgacatcatcatcttttcttgaaatccaacttagaaataatgtttcattcaagataaggctcgtggcttaggagattgtgacctggct

SEQ ID NO: 744714 - DNA, 100 bp, Homo sapiens
ccagctcttccaggactttgagccagtccagaccctgctgctgtcttcaaagaaggctgaccccgcactacatctacccaccagccatcgtgcagcccag

SEQ ID NO: 744715 - DNA, 75 bp, Homo sapiens
gcgagcggctgtgtggatgtcggcgaagccgcgggcgagggttgatccattttctaagaaagattggtatgatgt

SEQ ID NO: 744716 - DNA, 118 bp, Homo sapiens
ttattaaatttaaatagattagtaactggcatagacaactatgggcagatggactagaggcttttaccagatttcttaaaactgaattcagtgaagaaaatattgaattttggatagc

SEQ ID NO: 744717 - DNA, 50 bp, Homo sapiens
gtaaagcagatcctgggcagaagatttctgagagagcagacaccatctta

SEQ ID NO: 744718 - DNA, 100 bp, Homo sapiens
ccgatgcaccgagtccagcccaggaaaatggagaggacctctacctggagcgcctgctgctgtgtgtgcaggctctggtgtctgtgtgtcatgaggactg

SEQ ID NO: 744719 - DNA, 100 bp, Homo sapiens
caagccaggtaccttgttgaaaaccagcccctcaccagagcgatcgctattgctgaaatggaagaaggagaaagggccaacccctgaagaagcaatacag

SEQ ID NO: 744720 - DNA, 78 bp, Homo sapiens
tgcccttgtgcccgaggcccaggacagccaggtcaccagcaccaagagcctccatgaagaagtggactattctgagaa

SEQ ID NO: 744721 - DNA, 100 bp, Homo sapiens
gcaagagcctgagaatgctggagaaactggtcaagaagagggcttcgtgggacacatatgcaacatgcctatgatttttacaagcctgatatgctatctg

SEQ ID NO: 744722 - DNA, 100 bp, Homo sapiens
aaaataaagaggagtccgttaactatctgttatccagaatacacagaaaccatcatagcctttgcctgggaaccaaatggaagtaagtttgctgtgctgc

SEQ ID NO: 744723 - DNA, 90 bp, Homo sapiens
ccagacatccaaaagactgctgagatagtttatgcagccaccaccagtttgcggcaagcaaatcagggtgtccaagtcacacagagccac

SEQ ID NO: 744724 - DNA, 82 bp, Homo sapiens
agacgatgataatattctcttcagagattctgcaaatgcgacaagcctcccagtacaaccttggaaaagcttgaagttgcag

SEQ ID NO: 744725 - DNA, 90 bp, Homo sapiens
ccaacatgaagctgctcgcagcaactgtgctactcctcaccatctgcagccttgaagagagcgataattgtgaggatacaccagaggcag

SEQ ID NO: 744726 - DNA, 98 bp, Homo sapiens
ggggcgctgtgtgtacatcacccccatggaggccctggcagagcaggtggccttggataagggctgctcccaattccgcctggccgtcctggactgga

SEQ ID NO: 744727 - DNA, 100 bp, Homo sapiens
cacagttcctaccttatgagctcggttttcttatgcttataagagtggaacaggaccatggccaacctggagcgcaccttcatcgccatcaagccggacg

SEQ ID NO: 744728 - DNA, 82 bp, Homo sapiens
ctggacggcgagcgcgagcggcgcgagaaagcagttgtgaaaaacttcaggacaaaaatgtttcatttaaggacttgtgctg

SEQ ID NO: 744729 - DNA, 100 bp, Homo sapiens
ccccatgcacccctcgggctgcagaatgatagacgagctcaacaaaacgctggccatgaccatgcagaggctggaaaggaaacatcccagttatctggac

SEQ ID NO: 744730 - DNA, 75 bp, Homo sapiens
ggggtgtgcaaacccgagagaactggacttgccttcaaggtgtgcaagtaaggacttatctccagaaaagaacac

SEQ ID NO: 744731 - DNA, 75 bp, Homo sapiens
atcttggaattcccaccgtctagaactgatttaaatgtggatgaatttgaggaaatattcaagacaaaagcccaa

SEQ ID NO: 744732 - DNA, 100 bp, Homo sapiens
cttttccaatgtggaatcctgggccttcattgtacttcctcgcgtattgctaaaggaggagttgaccacaccaaaatgagtctacatggtgctagtgggg

SEQ ID NO: 744733 - DNA, 106 bp, Homo sapiens
cagcccggccggggcctgcgggcgcccagagccgcgccgtccgcgccgcccgttctgacaatgcagatcttcgtgaagactctgactggtaagaccatcaccctcg

SEQ ID NO: 744734 - DNA, 100 bp, Homo sapiens
cgagggccccgcccagtgtcccaaggatgtcacatgtacttcagtttgaggataaaagcagaaaagtgaaagatgcaagcatgcaagactcagatacatt

SEQ ID NO: 744735 - DNA, 82 bp, Homo sapiens
agataaggaaagtgaagtatctccgtcaagaagaagaaaaatgtcccccttgtgattacagtggcgagatcttgaacaactg

SEQ ID NO: 744736 - DNA, 90 bp, Homo sapiens
cattttttgaaatttttaagacacgctgcaacaaagcagataacaattggtgtatatgatccctgtaacttagcccagtaccctggatgg

SEQ ID NO: 744737 - DNA, 100 bp, Homo sapiens
aagtccaagaggaccttctgattagtccacagtcttcctctatagaatttcagaggcaggaaagtgtccggtcccagcataaaggtatccagttatatga

SEQ ID NO: 744738 - DNA, 80 bp, Homo sapiens
gcaggagacacaagaagcggatccagaaggacagaataacgggctcccagattcacaagccccaccaagaggatcacccc

SEQ ID NO: 744739 - DNA, 75 bp, Homo sapiens
gaacaaaaaaaggagatgcctggcagccccgctctctgcacattgatatgaaccatggacaagtatattctgctg

SEQ ID NO: 744740 - DNA, 51 bp, Homo sapiens
gtttgagccatcggatctaagatccaaaagaactgagagaagatggtttcc

SEQ ID NO: 744741 - DNA, 51 bp, Homo sapiens
gaggatggcggagtcggggctcctgacgattgtggtggtgccatgcagcaa

SEQ ID NO: 744742 - DNA, 100 bp, Homo sapiens
gcgagatcctggcgagcctgcaggatggcgcggccgagtccccgtacggccacccggcgggctcttgtcaggatggtgaagctgttcatcggaaacctgc

SEQ ID NO: 744743 - DNA, 50 bp, Homo sapiens
ccctttgccaccattccttcaaatgaggactatggcaaggagtctcaggc

SEQ ID NO: 744744 - DNA, 100 bp, Homo sapiens
aggtcctgcaggtggagctccggcagccgccctgcatgctacaagtgaaaactgatgagaaactgaatgtgtctgatgagaatacagcaagttgcccttt

SEQ ID NO: 744745 - DNA, 101 bp, Homo sapiens
aggcctgtgacgaaggtgctaccatcgtgagagtaagttaaccatgtgactgagtgccctgtggaatcgtgtgggatgctacctgataaaccaggcttctt

SEQ ID NO: 744746 - DNA, 100 bp, Homo sapiens
ggcccgagacagacagcatactgaagtggtttgcaacatccttcttctggataacactgtacaagctttcaaagtcaatctgtgattgggttattatacc

SEQ ID NO: 744747 - DNA, 95 bp, Homo sapiens
gctcggctgcgggaaatcgggctgaagcgactgagtccgcgatggagggatcatagacggtatttctatgtaaacgaacagtcgggcgagtctca

SEQ ID NO: 744748 - DNA, 100 bp, Homo sapiens
ccggcttctcccctacgcgctacacaagtggagctccttttcctccacctaccttcccgagaactgcaagcacatgttgaccagataactgaaatggcag

SEQ ID NO: 744749 - DNA, 96 bp, Homo sapiens
ccaaatgcgattagttgatgtggcctgcaaggtcaatgagctgaaggagaaaggcaacaaggccctgagcgtgggtaacatcgatgatgccttaca

SEQ ID NO: 744750 - DNA, 75 bp, Homo sapiens
gcccttcagtactgttgtacggtcatactccctgtcacaaactccagctgaactaacttggaggaggatcttccc

SEQ ID NO: 744751 - DNA, 75 bp, Homo sapiens
cgacttcggttcgggtgcgctgctcaaggacacggtctacaccgacttcgacgatcacggatacacgactctagc

SEQ ID NO: 744752 - DNA, 102 bp, Homo sapiens
gttgaattcgccataatcaaggaaaccttttccgggtggggatctctgaaattactcagcttttcggagactgggaagcccaactgcgaagaataatgaagc

SEQ ID NO: 744753 - DNA, 74 bp, Homo sapiens
cttcgaccttggacttctcagcctccagaatggcacagttggcgggcagctcccaggtctccatgagtacggcg

SEQ ID NO: 744754 - DNA, 85 bp, Homo sapiens
tgttcgtgctgaataagaagaacaaactgacgcagagtaaggcaagctttgttgcttctgaaaacaggacagatatttctttgga

SEQ ID NO: 744755 - DNA, 50 bp, Homo sapiens
ttcagttgtagccaacgaaattccagactttgagaatcactacaagaaaa

SEQ ID NO: 744756 - DNA, 100 bp, Homo sapiens
gggcgctaggctgccccggggaggcgctgcggaccggcggcccaggcacggagaggcggcgagaccgcaggtaccggtccgtagtggatctcatgaagtc

SEQ ID NO: 744757 - DNA, 82 bp, Homo sapiens
caagcaatcatcaagcacctcctcggtcctactgctctgttggctcatgaaataggttttggaagtaaagttacaacacacc

SEQ ID NO: 744758 - DNA, 51 bp, Homo sapiens
gactcatcaagattggctctggtcaaaatgcagatcttcgtgaaaaccctt

SEQ ID NO: 744759 - DNA, 74 bp, Homo sapiens
tacatacaggaaaaactttccagccattgagaggctactctgcccggcacgaggtccgccagttccacttcaca

SEQ ID NO: 744760 - DNA, 82 bp, Homo sapiens
ggagcaccaggatctcgggctcggaacgagactgcacggttttagatggagcaggattagatattgatttccatcttgcctc

SEQ ID NO: 744761 - DNA, 100 bp, Homo sapiens
tcccacgctgctactgcctgggggctgaggatgacaaaaaagccttcatagtcaaggcggataagaaggcggcacaagaaaagatgatccagcaggagca

SEQ ID NO: 744762 - DNA, 83 bp, Homo sapiens
ccagaagtccagagctgaggactgcctgtttgcaggaggctgaaccgtctgagcccagaagtgctgaggtgacgaggaagccc

SEQ ID NO: 744763 - DNA, 105 bp, Homo sapiens
accacctctttaataaccatgcttaatgcaaaagaccttctacaggacctgaagttgccgaggagcccaagtagaagaaatatggagtttagagcctgagaattt

SEQ ID NO: 744764 - DNA, 80 bp, Homo sapiens
tcaaggccaacatcacgcccttcggcgccgaccaggcaatggatttagaagtaccggtattggccaggaacatccccggg

SEQ ID NO: 744765 - DNA, 100 bp, Homo sapiens
tgataaaatttcatggagaagaaggccttgactacggaggggttgccagactggtcaagcccagcattccagcagctctcaggagtaacacagacctgca

SEQ ID NO: 744766 - DNA, 82 bp, Homo sapiens
cgagagggtcaaactgctgctgcagtgaaacagattcagatagttcaagttcatcgtcttcctcttcatcttcctcatcgtc

SEQ ID NO: 744767 - DNA, 90 bp, Homo sapiens
ggagatttaccaacaaccatgggaggacctcttcctccacatctggctctcaaagcagtcgtgcattgaggcccatgagaaggacatgga

SEQ ID NO: 744768 - DNA, 86 bp, Homo sapiens
attgtaaatgcaccaatcagcatgctgtgtctagctcaaggtacaccaggggttggaaaaaccacactaggcaaagaacttgcgtc

SEQ ID NO: 744769 - DNA, 100 bp, Homo sapiens
gactgagtgaagaagaacagctcgagagagcattacaagccagcctctgggaccgaggtggaaccgtcccaaaatgtcccttgctcagaagaaggatcgg

SEQ ID NO: 744770 - DNA, 75 bp, Homo sapiens
cgtcctgaggagcctcctggcctgcagcttctgtgtgctcctgagagacagacaccaaaccagtgcagatgatga

SEQ ID NO: 744771 - DNA, 98 bp, Homo sapiens
gaagaacttcaagacacttacgggtttcttctgtttgatactgaaaagcaggatcctgttcccagtgggttttctgcaggggaagttctgattccctt

SEQ ID NO: 744772 - DNA, 96 bp, Homo sapiens
ggcctcgccatgtcctgctgcccgtggaatgcagtagccctctgggcctgggatattgtggttgataactgtgccatctgcaggaaccacattatg

SEQ ID NO: 744773 - DNA, 82 bp, Homo sapiens
gagcagcccatcgtgcttaaagaaggagatcctgaaggagctagacgagtgctacgagcgcttcagtcgcgagacagacggg

SEQ ID NO: 744774 - DNA, 73 bp, Homo sapiens
ggaagtggatggcgtggagatatggcgcaactgcggcgcgatgaccgagtgggagacagcagcaccagcggtg

SEQ ID NO: 744775 - DNA, 99 bp, Homo sapiens
gctggggtttttgtccgcacgccaaacgggtttggaggaccctcttcgccttcggagagcagagtcaacacggaggtttccacttgagcggcacagtga

SEQ ID NO: 744776 - DNA, 83 bp, Homo sapiens
aatatggctggttccccaacatgcctcaccctcatctatatcctttggcagctcacagactctgtttgctggctacacggaca

SEQ ID NO: 744777 - DNA, 75 bp, Homo sapiens
cacagatccattacgcacatttaaagataccatctaccttactcagattctttcttgtggagaagttattcatgt

SEQ ID NO: 744778 - DNA, 100 bp, Homo sapiens
atcaggtgcagagctgtgggtctggttccaagacactgtcactgaccgtggtccttcagcatatctctgtgctgcagacaacacaccttcctgatggagg

SEQ ID NO: 744779 - DNA, 90 bp, Homo sapiens
catccacccagcccaagatgaccggctctgacgcccgctctgcggcttcggtgtttgaacaggccacagtccaggagcgcttacattcag

SEQ ID NO: 744780 - DNA, 90 bp, Homo sapiens
ggaaaaacctgtatgtggaaccacctcaggaagaaccggacccggcgaacctggaagtggaccatgatttcttccaggacaaggtgtggc

SEQ ID NO: 744781 - DNA, 80 bp, Homo sapiens
gattgctggctacagcttcagaagaccgaagcgttcgtatctggaagctgcctgtggaggaaccgattgtgtccacagat

SEQ ID NO: 744782 - DNA, 95 bp, Homo sapiens
aaagagcttgctccctacgatgagaactggttctacacgcgagctgattttggaggcaacatcaacgtggagaccatcagtgcctttattgacgg

SEQ ID NO: 744783 - DNA, 100 bp, Homo sapiens
cccaatcccactgatgaggatcagcccatgtgatatggagaatgcagaaaacattctcacagtgatgagagatgccggaattgagcctggtccagacaca

SEQ ID NO: 744784 - DNA, 100 bp, Homo sapiens
gaaggccgtgccaatgggcagaggtctgggagacatatctgaagagatggattaagaatgctttggattaaggattgtggagcacatttcaatcatttta

SEQ ID NO: 744785 - DNA, 90 bp, Homo sapiens
acgatcgccagcaaatacgtgataacattgtggaaggaataattcggtctccagatttagtgagtggctgcagctcagacgactccagga

SEQ ID NO: 744786 - DNA, 100 bp, Homo sapiens
tggcaaatgctggacccaacacaaatggttcccagtttttcatctgcactgccaagactgagtgaagttaaagtctgacacggctgctgcagctgtgcgc

SEQ ID NO: 744787 - DNA, 82 bp, Homo sapiens
ctggatcatggctgccgcgccgccgctacgggaccgcctgagctttctacaccggaccatggtgaatccgggcagcagctcg

SEQ ID NO: 744788 - DNA, 75 bp, Homo sapiens
tttccggacagcttcgtgctggattatggtgacaagctgaacatggagctgagtgagaaatacaagctggacaaa

SEQ ID NO: 744789 - DNA, 90 bp, Homo sapiens
tttgagaactatgtggcagatatcgaggtggatggaaagcaggtatctgtgcctaggtttgctgtggggattgtaataggaagaaacggg

SEQ ID NO: 744790 - DNA, 100 bp, Homo sapiens
aacagcactgccaaatagcagaagaataccatgaggtcaaaaaggaaatcaccctgcttgagcaaaggaaatgatgctgtgtatctggacaatgagaaag

SEQ ID NO: 744791 - DNA, 82 bp, Homo sapiens
gcagatggcggatgccctgcagtacctgcagaaggtctctggagacatcttcagcagacgagccaaactcaggctgtacctt

SEQ ID NO: 744792 - DNA, 88 bp, Homo sapiens
ttgtttgtgtccctgtgggtggacgtggttggtgattggcaggatcctggtatccgctaacagatcaccccccaacttgcccttcaag

SEQ ID NO: 744793 - DNA, 51 bp, Homo sapiens
cgggcgcctgggcgggaggaggcgccagagatggggtttcgccatgttgcc

SEQ ID NO: 744794 - DNA, 129 bp, Homo sapiens
aaagcttctggcaagaggtgctgatatcaacacggtcaacgtggacggcttgacagccctgcaccaggaattgaatgatctggcacgggaccctccagcacagtgttcagcaggtcctgttggagatga

SEQ ID NO: 744795 - DNA, 76 bp, Homo sapiens
gagatgtgtgcgtcacctgaccagaggaatctccgtatgttatgatgaagaaaaatcatgaaatgcttgaaggcaa

SEQ ID NO: 744796 - DNA, 100 bp, Homo sapiens
gcgcagtgagcggccccccatctttgagatccgaatgtatgatgcccagcagcagcaagggcatacaaaaccattgaggatgaggacttgaagttccccc

SEQ ID NO: 744797 - DNA, 91 bp, Homo sapiens
gcgcgctcccgaggaagagtgagggcgcgacgcgcaccaacggtggaggtcaccgacgatgagggcgcacctgctgtcctggagcttccga

SEQ ID NO: 744798 - DNA, 90 bp, Homo sapiens
ctgcttgatggggacatgccccacactgcaggagcagtgcacagagctgtggggaccagatcctgataacttaagtgactctctcttttc

SEQ ID NO: 744799 - DNA, 50 bp, Homo sapiens
ctggccgagcaggaggcgccatcatggccatgaagtacttgtcatacctg

SEQ ID NO: 744800 - DNA, 75 bp, Homo sapiens
cgtggggaccatggaggcaagtgaggaattacgagcaacccaccaaagatggcattgaccacagtaacattggca

SEQ ID NO: 744801 - DNA, 83 bp, Homo sapiens
ggcacagagagggcctgggagcttgctgcagcttcaggagggtgtgaagacagagaatgaccacatcaacctgaaggtggccg

SEQ ID NO: 744802 - DNA, 104 bp, Homo sapiens
gcctccagagtgcccagcccacggaaggccaggtgcataaggcaaatccaatacgcaagtaccagggtctggagataaagtcaagtgaccagcctctgactgtg

SEQ ID NO: 744803 - DNA, 82 bp, Homo sapiens
attctataagcagttaggatctggaggtgatgatgaacagtctacacagatggctgcaagttgggaagatgataaagttaca

SEQ ID NO: 744804 - DNA, 100 bp, Homo sapiens
acctcttacaaattccaccagagctcggtaattgtgtaaacttaaggcgccgcagcaaatgggaccaaccagctccagccccacttctcttcctcccgcc

SEQ ID NO: 744805 - DNA, 100 bp, Homo sapiens
ttctctcttctttcatgtccctgctggattactggccctcttcaccctcagacatcacaaatatgtggattaatccctcacctcctgggcgatgtggttt

SEQ ID NO: 744806 - DNA, 85 bp, Homo sapiens
aaagcaagcagcaggagctggaggccgtgcggaagggtcttcttgctcagtcacccaagctggagggtagtggtacagccatggc

SEQ ID NO: 744807 - DNA, 98 bp, Homo sapiens
ataggcaggttaccatcactggatctgctgccagcattagcctggctcaatatctaatcaatgtcagcctttctgagaaaagtctacagcattctttc

SEQ ID NO: 744808 - DNA, 98 bp, Homo sapiens
aagcaaagaaaatgatatcaggactacagacgaagttatacggaagcgtctcctcattgatggagatggtgctggagatgatcggagaattaatctgc

SEQ ID NO: 744809 - DNA, 75 bp, Homo sapiens
gtcatacgggaagagagagtaagaggtgctacagctcgagagggcagagccacagtccctggacggcgtggactg

SEQ ID NO: 744810 - DNA, 98 bp, Homo sapiens
aggagcgggcgagaagctgccgccgaacgacaggacgttggggcggcctggctccctcagggtgtttgtgaaccgaagtttagcaatggaaaagataa

SEQ ID NO: 744811 - DNA, 100 bp, Homo sapiens
aagcttgctttcactctggaccacgagaccggattgcctcaaggatgtcatatctatgagtaccgcgagagcaacaagaagtaccaccaagaacagggaa

SEQ ID NO: 744812 - DNA, 145 bp, Homo sapiens
attgtcattgcaagcactattggcagctgcagagccagatgatccacaggatgctgtagtagcaaatcagcttcctgcctgacacagctcacttcaagaagtgcacaatgtcagaacgtggaattaagtgggcttgtgaatattg

SEQ ID NO: 744813 - DNA, 74 bp, Homo sapiens
aaaggaagacttgtaacctggagaagaggagtggagtcggttcttatacaactatgggctgaaaccatgaggcg

SEQ ID NO: 744814 - DNA, 100 bp, Homo sapiens
caacttactaccaaacagcacttcctggcaatgatagatacatcagtgtgggaagccaagcagatacaagtacactgaggaggggacggctccgtcttca

SEQ ID NO: 744815 - DNA, 119 bp, Homo sapiens
gcgggttatctgcgaacacagtagtggaagatgtaaagcaatatttcgagcagtttggcaaggtggaaaatgaggttgatcgcagcattcagaaagtgtataagacctacaatggaacc

SEQ ID NO: 744816 - DNA, 100 bp, Homo sapiens
tgacctgagacctggtgacaggagccatgaggggccaggcctcaggtcccacaggaaagcgtggacttgggagagatcatgttctccctttgctacctgc

SEQ ID NO: 744817 - DNA, 100 bp, Homo sapiens
caagtacaaccgcttcgagaagcgccacaagaacatgtctgtacacctgtccccctgcttcagagacgtcttgagtgaagatgaaaatgacaagaagcaa

SEQ ID NO: 744818 - DNA, 100 bp, Homo sapiens
tattgacctcgactcccatgcgtggagcacatgatccagaagaaccaatgtctcttcaccaacacccagtgtaaggtttgctgcgccttgcttatttctg

SEQ ID NO: 744819 - DNA, 101 bp, Homo sapiens
gttgatttttaaagcttcaaaatcctaagactcagcactgttgcgggagcctgtgtggtgcccctatctccttgttccaagggcctctcttgccttgaaag

SEQ ID NO: 744820 - DNA, 50 bp, Homo sapiens
ttatgatattggcaacgacccccaggagtcagggctaaaggtcaaccagc

SEQ ID NO: 744821 - DNA, 99 bp, Homo sapiens
acgggagccagtgggtgaaagctcatgaactcaaggagcacaacggacacatcacaggacttgaactgccatgtcctctgaagaaggaaagctcttcgt

SEQ ID NO: 744822 - DNA, 100 bp, Homo sapiens
ccaagatgcccatcctggggttgggtacctggaagtacctggttgactgtgatgaagtgatcttcatgaaagagggctgtattacggaaagaggcaccca

SEQ ID NO: 744823 - DNA, 90 bp, Homo sapiens
tacaagtacttctacgccatctccaacatcgaggtcatcggcaggtgaccttgggaaaggtgttgaaagtgatcgtcgtcatgcggagcc

SEQ ID NO: 744824 - DNA, 50 bp, Homo sapiens
aactctcagttcgagagtaaaggacatggatttgattgacatactttgga

SEQ ID NO: 744825 - DNA, 96 bp, Homo sapiens
gcgcagatcggcgcccagcaatcacagaagccgacaaggcgttcaagcgaaaacatgaccgctgagcccatgaggatgtggtaccacagattgtcc

SEQ ID NO: 744826 - DNA, 90 bp, Homo sapiens
ctgtcgcgagaagtggcggcatcgagaccatcgccaatgagtacagcgacaggtgtacccccacttcaaatgcttcaccttcagaaggcg

SEQ ID NO: 744827 - DNA, 87 bp, Homo sapiens
aaacagtagagatggcagcccacccctcccactggggactctgtcccatcacaggtaatggagagtgaagagttcatgttgcttcca

SEQ ID NO: 744828 - DNA, 75 bp, Homo sapiens
cagggagtgcaagcttagagcgtctggccaagaatcagaggaagtgggaattatctgtatgaccgttcgctctgg

SEQ ID NO: 744829 - DNA, 76 bp, Homo sapiens
gaagaaattattggtacctgcaatcagtgtactgttacccggacatacctattccttcacaagttctggttcttca

SEQ ID NO: 744830 - DNA, 50 bp, Homo sapiens
ctggaagcttggtttgctttcctgtacaagaatattccacagatgtcctt

SEQ ID NO: 744831 - DNA, 108 bp, Homo sapiens
ttcctgatgccgtgggcaaatgtcgaagtgctggaattaagggtgttgctatgttgcctagatggaatgcagtggcatgatcacagctcactgcagcctcgacctcct

SEQ ID NO: 744832 - DNA, 75 bp, Homo sapiens
gcccggtttctcggcgaatgacagcacagattttgcaagaacgaggctcaaggatgtgagggacacagtattgac

SEQ ID NO: 744833 - DNA, 100 bp, Homo sapiens
cgccgctgccgccgccgcagctgccaaaatataaccagttcaggatgtccatcctggaacgactggagcagatggagaggaggatggccgagatgacggg

SEQ ID NO: 744834 - DNA, 100 bp, Homo sapiens
ggcttccgttgcgtgcccggaggtgtcatggagaaactccagctgggcccagagattctgcagcgggaaaatccaaggcttatttatgccaggctgagtg

SEQ ID NO: 744835 - DNA, 100 bp, Homo sapiens
gctgctgatgctgaagctgtgcaccgaggtccgtgtggccaacgagctcaacgccaggcgccgctcctttacaggcgtcacaatgtagcagggaccccag

SEQ ID NO: 744836 - DNA, 100 bp, Homo sapiens
tggccgacaaggaagtgaagaaggcgcatcactcccagctgcgcaaagcttgcgaggtggcgttaggttactataacaacagtaccaaggtggctgtgaa

SEQ ID NO: 744837 - DNA, 82 bp, Homo sapiens
gggtggcggctcgggacggaggacgcgctagtagcctggcagagagcaggtgtgtgatacacgtcgtcaggtgactgaccga

SEQ ID NO: 744838 - DNA, 100 bp, Homo sapiens
aaagccagctggcttctcgggaaatggatgtcacaaaggtgacaaacagcatgtttggtgcttcaagaaagaagtttgtagagggggtcgacagtgacta

SEQ ID NO: 744839 - DNA, 74 bp, Homo sapiens
gcaagaggtgtcggaggtctcatctttgaactactgccggagcttctgccagtgccaggtggagctcaacagga

SEQ ID NO: 744840 - DNA, 90 bp, Homo sapiens
ggaggaggagactctgtccttcatccgagacagcctggagaagagcgaccagctcactaagaacatggcggcctgagcacgctcactgac

SEQ ID NO: 744841 - DNA, 50 bp, Homo sapiens
taccactgctcctccttcatctcccaagatgcctgtcttagatgtcaagc

SEQ ID NO: 744842 - DNA, 74 bp, Homo sapiens
tacctcactgcagaggtgctggagctggcagacggctttttttcgccaacatggatgcacagccaatgatgcca

SEQ ID NO: 744843 - DNA, 100 bp, Homo sapiens
tctaccggaaagacctggcggacactttggtatggaacccttcagatcaaagcttaccaataaattcagtatgtagaacagattaacgtagttgaaatga

SEQ ID NO: 744844 - DNA, 100 bp, Homo sapiens
aggtgttaccggaacggcggcgacaagggtgttcccgaactagagtggtgtcccagaagcttttgttgacaattccagtttccgaacaaaacatttcggc

SEQ ID NO: 744845 - DNA, 83 bp, Homo sapiens
tgtcacaggccatgctctggcaaaaaccttgataaagatgacatggtatacatggaagcatatgataaattgttggagtcctg

SEQ ID NO: 744846 - DNA, 50 bp, Homo sapiens
gaggcctccccaaccatgtgcaattccatcgactacagtgacagcgccat

SEQ ID NO: 744847 - DNA, 90 bp, Homo sapiens
gcaagtccgatggagaggctaagcgtatcactcctccttgcttcaatctctttgccctcttcgatgctcaggcccaagtctggttgcccc

SEQ ID NO: 744848 - DNA, 84 bp, Homo sapiens
tggtggggactcgctctcggcttgaccgcattcttcctcccagcaaccatgtccaagggacctgcagttggtattgatcttggc

SEQ ID NO: 744849 - DNA, 82 bp, Homo sapiens
ggtcacccgcgtgctaatggtggaaacccacaacgagatgccctgtatccaagcccaatatgggacaccagcaccgagtccg

SEQ ID NO: 744850 - DNA, 80 bp, Homo sapiens
cctggaaggccttcgccaggctgaggccgcggtgccgcatgagttcaaatctgaacatcaatgatgtactagggaactac

SEQ ID NO: 744851 - DNA, 75 bp, Homo sapiens
caaggattggagcacagaggctcagaagcaagtccaggaattgcattttgtgaaaaaagaacaagaattttctgc

SEQ ID NO: 744852 - DNA, 75 bp, Homo sapiens
aattgagacggagctaagagatatctgcaatgatgtactggaatgatgagaagacagcagctgattacaagattt

SEQ ID NO: 744853 - DNA, 96 bp, Homo sapiens
gacgaaggggccgacctcctaggagcagcagccaagctggacagatgacctgcctctctgccacctctctggggttggctcagcctccaaccgcag

SEQ ID NO: 744854 - DNA, 98 bp, Homo sapiens
gcagttcaaccgcatgaagcagctggctaaccagaccgtgggcagggggacttgatctcatcttcatgccaggccttgggtttgacaaacatggcaac

SEQ ID NO: 744855 - DNA, 100 bp, Homo sapiens
cagggagcaggtgcagagactcatagcagagcaacccccacacctgacccccggcataagtgagcagtagccaacatgtcagggtgggagtcatattaca

SEQ ID NO: 744856 - DNA, 119 bp, Homo sapiens
ctgggagcaacgggagtgtcctggacccagctgagcgggcggtcattcgcatcgcaggccaagaataaggagacgggtgctttggctgcggccaaagtcattgaaaccaagagtgagga

SEQ ID NO: 744857 - DNA, 82 bp, Homo sapiens
gtcgtgtccttcgtcgtcgggggcctcgtggagacctttggcgacttggcctttggcgacatcttcctccacctgctcacgg

SEQ ID NO: 744858 - DNA, 100 bp, Homo sapiens
gaattaaaagatgatgagaaataaggacaaaagccaagaggaggacagttcgctacacagcaatgcatcgagagccctgaggatgatgacaggaaggtcc

SEQ ID NO: 744859 - DNA, 82 bp, Homo sapiens
cattggtgagccgatgagcatggaccatagaagggctcaatgtagaagagaccgatcagaaaggatttcttaactggcactg

SEQ ID NO: 744860 - DNA, 98 bp, Homo sapiens
tggcatctccgacaccatggtggcccagctcgtgcagcggctccagagatattctctaagccgctttcatcatgggagaaatagagcagaggccgacc

SEQ ID NO: 744861 - DNA, 100 bp, Homo sapiens
caggtcctttgctgccagcatgatgtcgtatttataatatgtggaggagagagagctcaccatgctcagatctgttacctaaagcaataaaaaatggcca

SEQ ID NO: 744862 - DNA, 75 bp, Homo sapiens
gcccgtggagtcggctgagggaaaagcgaggcaaggcaggcgggtaagaatgattgatgttggctgatattggag

SEQ ID NO: 744863 - DNA, 110 bp, Homo sapiens
cgatctgtaccgcggggatccgaagtatgcttatccagaacctgacgacccggcgacggcgacgtctcttttgactaaaagacagtgtccagtgctccagcctaggagtc

SEQ ID NO: 744864 - DNA, 106 bp, Homo sapiens
gagttcaaagccttttatggagacacattagttacaggagttcatgatcaagtgttgcccacaccaaatgcttcatccagagtcatagtacatgtggatctggatt

SEQ ID NO: 744865 - DNA, 100 bp, Homo sapiens
agaattgaagcctataatatttgtcacctgaactacttcacattttccccaatatatgagaatgtaactggtcactacatttccccctttcatgatattc

SEQ ID NO: 744866 - DNA, 100 bp, Homo sapiens
agagccaggaccggcaactgaaaatcgtcgtgctgggggacggcgcctccgggaagggctactacaaagttctgggaaagggaaagctcccaaagcagcc

SEQ ID NO: 744867 - DNA, 82 bp, Homo sapiens
cggttttgcttgatgaccccaaccagcgtttttgagaaggtgtcttcagtgccctgggtttgcctgtgacccaatgcccact

SEQ ID NO: 744868 - DNA, 100 bp, Homo sapiens
agaaacaaatggaagcctttagagtcaccaggagactaaagtccatcaaaaacatccagaaaattaccaagtctatgaaaatggtagcggcagcaaaata

SEQ ID NO: 744869 - DNA, 98 bp, Homo sapiens
gaggaactaaagtcccagccagagcccctagtggtcaagttttccagatttaggagacttcagaaaggtggggcagatagaatggagatggcaaagat

SEQ ID NO: 744870 - DNA, 100 bp, Homo sapiens
tccagcagccaagatggtgaagcagatcgagagcaagggccgcgttcgcaccaaaaccgtgaagaaggcggcccgggtcatcatagaaaagtactacacg

SEQ ID NO: 744871 - DNA, 96 bp, Homo sapiens
gcgattccagagagcggcggaaaggataagcctcgacttagaagctaccgagttaccctaagaaagggtgttttgaatgctgtatcaaatgcctgg

SEQ ID NO: 744872 - DNA, 80 bp, Homo sapiens
agccctccttcgtgtcgtacgtacgccctgaggtgagaagccctaccactgcaactgggacggctgcggctggaagtttg

SEQ ID NO: 744873 - DNA, 100 bp, Homo sapiens
aacgaagttaaaggaagtgttccccacggctgcgctcatgccagcctcagacgatacagcagactctcaagaggacactgcagtattatgaacatcaagt

SEQ ID NO: 744874 - DNA, 104 bp, Homo sapiens
ctcggcgccgccaaacagcccagctcgcgcttcagcgtcccggcgccgtcgcgccactcctccgagtaagaatgattgatgttggctgatattggagtgctcat

SEQ ID NO: 744875 - DNA, 90 bp, Homo sapiens
caaagatactaccttgcctgcttcagctagaaaagttaagtcttcggaatcaaagctgcctcaagggctacgtcaaccacagcctgtccg

SEQ ID NO: 744876 - DNA, 96 bp, Homo sapiens
gctgctcagagttggttttgaggctggaggcctagagcctcaggcttttcagctctgtgatcagcagctgcccgggcctgctctacctcaacctgg

SEQ ID NO: 744877 - DNA, 51 bp, Homo sapiens
aaagaaaagtctcgctatttggcaaaagttttcaaaaagctccagaaagaa

SEQ ID NO: 744878 - DNA, 100 bp, Homo sapiens
ccgccgccgccgccgccaagcgcccgtcggacggggaggaggagcaggagctggaggaggagccgccgccgccaggtcttcaaagcttcacctttctcca

SEQ ID NO: 744879 - DNA, 90 bp, Homo sapiens
ccagttattgaatatcaagaggaggagttgttggacttgccggagcagccttacttgcagcctccactcagcatcttggtgattgagcgc

SEQ ID NO: 744880 - DNA, 50 bp, Homo sapiens
cctgcatcctgaggcttccaagaaggcttttggttactccccttcccacc

SEQ ID NO: 744881 - DNA, 101 bp, Homo sapiens
aaggattccaagtaactcttatttgggcttcaagatgggctgcgctccagttccaacagccgcagcgggagccgggagcggcgagaggaacagaccgacac

SEQ ID NO: 744882 - DNA, 74 bp, Homo sapiens
aggaccctctggaagcctagaaatggtaagaatgattgatgttggctgatattggagtgctcattcacatgaag

SEQ ID NO: 744883 - DNA, 100 bp, Homo sapiens
cgccacctaccacagagccatcaaaatcacagtggatgggccccgagaacctcgaaggctccttggtaatgaccagtctaagggattaggaccagcatca

SEQ ID NO: 744884 - DNA, 97 bp, Homo sapiens
ttcttcccctggatgggaaaacatctcaagacgtccacacggaagctgtccaggcggctctggccaaacacaaagagcggaagatggcagtgcctat

SEQ ID NO: 744885 - DNA, 111 bp, Homo sapiens
agccggtgcagcagccttcagcttttggcagcatgaaagttagcagtgctggagaatctggtaaaagcaccattgtgaagcagatgaggatcctgcatgttaatgggttta

SEQ ID NO: 744886 - DNA, 100 bp, Homo sapiens
caaaaatgcaaaagactgctaaagtgagagtgaccaggcttgttctggatccctatttattaaagacgcagaccaaactggagcatgcccgcattaagga

SEQ ID NO: 744887 - DNA, 75 bp, Homo sapiens
caagaacttcacatctctcaggctacatgttgcaaaggttaaattccagaaatcagtgtttactgcagagaacac

SEQ ID NO: 744888 - DNA, 100 bp, Homo sapiens
ccaggcttctgcgcagaatgcttctcagcagcaacatccccaaacagcggcgtttcacggtggcacatacatggtaaaacttccttttcctgtagatcaa

SEQ ID NO: 744889 - DNA, 74 bp, Homo sapiens
ggatcatgtctgcgagccaggattcccggtctggcccacgccctgcgactgagggaaggacagagccgctgtga

SEQ ID NO: 744890 - DNA, 73 bp, Homo sapiens
gtgaccgagagcgtgaccgagagcgcgaatatcgtcatcgttagaaggaggaacgagaatgaatatgactcaa

SEQ ID NO: 744891 - DNA, 100 bp, Homo sapiens
tgttcgtatacagatctgcagctcatcaatgctgaggagcagacgagtggccaggcttctggggctgactcaactggaggattctctatgggaggatgca

SEQ ID NO: 744892 - DNA, 83 bp, Homo sapiens
tcatccgcatcaacaagatgttgtcctgtgctggggctgacaggaagcaattttggaggtggtggaagctacaatgattttgg

SEQ ID NO: 744893 - DNA, 100 bp, Homo sapiens
aaagaggctgtcagaaagctggcttatcagacaacaaaggaggctttgaaaatgttttagaagaaattgctgaacttcgacgtgaagtttcttatcagaa

SEQ ID NO: 744894 - DNA, 87 bp, Homo sapiens
gtagaatgggaaactaatagagatggaaacgaggtaactgatggacagccgaggcagccccttaggcggcttaggcctcccctgtgg

SEQ ID NO: 744895 - DNA, 75 bp, Homo sapiens
acttgcagcatattacctatcaggagaggagcctcttctgaaacagtctccctggagcaaccatcagagcagtgg

SEQ ID NO: 744896 - DNA, 75 bp, Homo sapiens
agaacccccaggagcagaagtccttcttcgccaaatacgtgatgtgtccaatctagatcccaacttctcatttga

SEQ ID NO: 744897 - DNA, 100 bp, Homo sapiens
ccgccgacgatgccgcggggccgccccccgaagcccagggagagcaaggcgcgcggcgactccggtactacctctgcttgcagttgcgagatgacatcgt

SEQ ID NO: 744898 - DNA, 51 bp, Homo sapiens
attactgagagtcttccgttactagggctctctgtcccgccgactcctgcc

SEQ ID NO: 744899 - DNA, 74 bp, Homo sapiens
agatggggagcgtcctggggctgtgctccatggcgagctgggtgatccgcaggggctggctgaccatcaacaac

SEQ ID NO: 744900 - DNA, 100 bp, Homo sapiens
aggaactggagaggaccaacaaattcatcaaagacgtaatcaaagacggcaacgcgcttatcagcgctatgagaactttctctcctttgaaaacactaag

SEQ ID NO: 744901 - DNA, 99 bp, Homo sapiens
catcactgtttttggctttgcctattctcagctggctctggatatctacggagggaccatgcttagctcaggatccgtcaaacgcttcagagaaccaaa

SEQ ID NO: 744902 - DNA, 75 bp, Homo sapiens
gcgccactgcagagcctgtccgtcagtccctaggtatccgcactgctcagggatcttaccaatatatttgagtcc

SEQ ID NO: 744903 - DNA, 78 bp, Homo sapiens
gaaaatcgagcaggagctgacggccgccaagaagcacggcaccaaaaacaagcgcgatccagaaattcaaacttcgag

SEQ ID NO: 744904 - DNA, 75 bp, Homo sapiens
gttgagttctgcagttgatcatgggtggagttttgatgaaacagtgactcatttcatctatcaagggcggccaaa

SEQ ID NO: 744905 - DNA, 50 bp, Homo sapiens
caccaccgggaagcagctatttgaccagggaggagtctgctactagtctt

SEQ ID NO: 744906 - DNA, 98 bp, Homo sapiens
accaagcgcctctactacctctggatgtgtcgtggccgcccacctacagagccgctgcccgacgggtggatcatgacattccataactctggagtccc

SEQ ID NO: 744907 - DNA, 100 bp, Homo sapiens
tgcagctgaaagcactaggaattgacaatgtcctcaggttccacttcatgtcgttttacatggacggatggcaaattaaacagcagtaacttggtaattc

SEQ ID NO: 744908 - DNA, 98 bp, Homo sapiens
atgacacttacaaggtggacaggcatgattattgggccaccaagggattcgctaaatattgtaatggatcaaggagatacacctacactagaggaaga

SEQ ID NO: 744909 - DNA, 75 bp, Homo sapiens
gggcagcaacaacgatgccggatacaggagggacgtgcaccagtgccctctggtggtcagaagatgctgtgctgt

SEQ ID NO: 744910 - DNA, 96 bp, Homo sapiens
ggcgagaatggaactgcagcagttaatttctgtgtggattcaagctgtctctgggtgtgacactttgggagctttttgacaatgccgcacagccgt

SEQ ID NO: 744911 - DNA, 100 bp, Homo sapiens
gcggaagtgcagctgcctcagttcttagcgcaggggaacgcccttttgcttgtgactggcagggctgcgacaagaagttcgcccgctccgacgagctggc

SEQ ID NO: 744912 - DNA, 73 bp, Homo sapiens
caagacctggtccttggagaccattagtcaagccagcctgccaggagtgaagaaagctttgggcaaatatggt

SEQ ID NO: 744913 - DNA, 75 bp, Homo sapiens
atttggatcaacactcccgagttcaaaatgagcctgtttggaacaacctcaggttttggaaccagtgggaccagc

SEQ ID NO: 744914 - DNA, 100 bp, Homo sapiens
cctatgtagacagccacaaatgggaagcaagagaaaaagaacattactgtcttgaacattctagtatgccagtagaaaaaaatatcactttagaaaggcc

SEQ ID NO: 744915 - DNA, 100 bp, Homo sapiens
atcaagatgaccctagtcaacggaaccagcagcccaggtggtccataaggctgtgcttgatgtatttgaggagggcacagaagcatctgctgccacagca

SEQ ID NO: 744916 - DNA, 80 bp, Homo sapiens
agaacccggatgagggcgagaagctcccctttgaattggagatttactacattcagcatgttatgctctacgtggtaccc

SEQ ID NO: 744917 - DNA, 98 bp, Homo sapiens
aatgccagaggcggaggagaacaaacagatcatccgcaaacacgcgcagaccttcgttgccctctgtgccacagccactgaggcggctcccagctgcg

SEQ ID NO: 744918 - DNA, 83 bp, Homo sapiens
ggacatggaatcctggctgaccaaccgggaacagatgcagaactttgacaaactcattatcaaattatagtgatttgaagaaa

SEQ ID NO: 744919 - DNA, 100 bp, Homo sapiens
cctggagtctgcgaaggccgggacccggttccccggcccacagtgggggtgtgcaaacccgagagaactgggcaacaatttgggatgaatcccaaagaca

SEQ ID NO: 744920 - DNA, 74 bp, Homo sapiens
cactttagaccctccacctaattgcaggcgcggatcaagaagatcatgcagacggacgaagagattgggaaggt

SEQ ID NO: 744921 - DNA, 111 bp, Homo sapiens
cgacgtgaaggagaaattcgactatggcaacaagtacaagcggcgggtgccccggttggaatcgaagcctcttaaaatggcagatgacttggacttcgagacaggagatgc

SEQ ID NO: 744922 - DNA, 83 bp, Homo sapiens
tgactccattgcatgtgggaccttcagccgtgaactgatagcctgggctggaagctcttctacgtcacaggctgcctgtttgt

SEQ ID NO: 744923 - DNA, 80 bp, Homo sapiens
ggcggaggcgcccgcgggtcccctacagccaaggtgagaagccctaccactgcaactgggacggctgcggctggaagttt

SEQ ID NO: 744924 - DNA, 101 bp, Homo sapiens
tatgtttgtaaatgtgagtggaagccatgaggccaaaggcagttgtattgagaatggactctctctgattttgtttggtttgactcaagaagagtttttaa

SEQ ID NO: 744925 - DNA, 50 bp, Homo sapiens
agtcaagtcagacttcattacagaaaggatcttacacatttgttccatgg

SEQ ID NO: 744926 - DNA, 98 bp, Homo sapiens
cgaggaggagcagaggagcacacagatgaagcagggtatgatgtgattgctcaagctcagtcaggtactggcaagacagccacatttgctatttccat

SEQ ID NO: 744927 - DNA, 100 bp, Homo sapiens
ccccggtgcaagaggcgcaaacaagccaatcccaggaggaaaaacgagtgaagtcaccctgctgagaaatgaagtggcacagctgaaacagcttcttctg

SEQ ID NO: 744928 - DNA, 50 bp, Homo sapiens
atcctacatttttgtgcaagagacgttggacctctcgaacaaccagctga

SEQ ID NO: 744929 - DNA, 74 bp, Homo sapiens
cagcggtgggcagtcctagtccgaggtgccaccgtggaaggacagaatggtagatcatgccactaatcgtaccc

SEQ ID NO: 744930 - DNA, 76 bp, Homo sapiens
acctacaacaagcacattaacatcagcttccacagaatggactgctgaattatgaagtatttcagacccagtagta

SEQ ID NO: 744931 - DNA, 100 bp, Homo sapiens
cggcgtcgagaatttcaactggttttggagccctctcttaagtcagaactctgtcccaaaaatcttctgagtgtcatctcaggactttggttatactcat

SEQ ID NO: 744932 - DNA, 74 bp, Homo sapiens
actaaacaaattcatcccagaaatctaagaggttaatgttcgtgaagaaattgaagagttttttccaagaatgt

SEQ ID NO: 744933 - DNA, 100 bp, Homo sapiens
gttcgtgctcaagggggacgcgacgcacaaccaggcgatggtgcactggacgggcgagaacagcagcttccctgtattgaacactgatatacaaggaatg

SEQ ID NO: 744934 - DNA, 75 bp, Homo sapiens
gtacgatttctggtacagttagatgactacaggttgaaaggattgttgacaaaaggaaaaataaaaaagggaaga

SEQ ID NO: 744935 - DNA, 101 bp, Homo sapiens
aagaaactttgctacagcctcctttgaccagatccatgactgttggtggttcagccgtctgtatatctccccagatacctgaaactgaccacctgagtacg

SEQ ID NO: 744936 - DNA, 90 bp, Homo sapiens
gtcccaacttcgcttctctgctgaccctctctcgtcgccgctgccgccgccgcagctgccaaaatgattttgcctaccattttacagtat

SEQ ID NO: 744937 - DNA, 101 bp, Homo sapiens
ggacattctgacccttcaagcagcgtggacaaagaaaggatcctcttaactattcaggatgtgatgtacgaattggagcaatgttggcttatacacctctg

SEQ ID NO: 744938 - DNA, 100 bp, Homo sapiens
agcccgacgagcaaaacgcatgagagcagaggtaaaataccatgaagattttgaaaaaacaaaggggagaggctttactcccgtcgtggacgatcctgtg

SEQ ID NO: 744939 - DNA, 98 bp, Homo sapiens
ctcaaaacctcgctccggaaaggggacacctgctgtgaaagttgtgtagatttactgtttgtgagaggagctggaaactgccctgagtgtggtactcc

SEQ ID NO: 744940 - DNA, 83 bp, Homo sapiens
ttgggatccggagggaggaagctgggacacccgggagtcaggaaatgccgagccgctgccgctcatggatttgtgccgtcgct

SEQ ID NO: 744941 - DNA, 101 bp, Homo sapiens
cctggaccagccagaggacgcgggctctgaggatgagctggaggagggggtcctccacagcctgtgaatccccctagacctttcaagcatagtgagcggag

SEQ ID NO: 744942 - DNA, 75 bp, Homo sapiens
tatgaatctctgttccaaatgctttgctggacaaggaagatggggagccaaagaccaagcatctcagagaagagg

SEQ ID NO: 744943 - DNA, 50 bp, Homo sapiens
gacaagacatatcactgcaaaggactgatcctttgaaatactccagccat

SEQ ID NO: 744944 - DNA, 100 bp, Homo sapiens
gtttcttctatgtgtcattcttttctacactgtgtactatgtgtccctgagcatgggctgcgtgatgtttgagctgtggaaaatctctgttctcacaaag

SEQ ID NO: 744945 - DNA, 50 bp, Homo sapiens
gactgtgggctggtgtgtggaactggcagcggaggaggaaatggcaggtc

SEQ ID NO: 744946 - DNA, 100 bp, Homo sapiens
agccagaaagagatcaagaaagcctattatcagacctgtgaccgcatcaagcagtcagcagctggcaccaagcgtcgggtgtttatcattgagactatgg

SEQ ID NO: 744947 - DNA, 75 bp, Homo sapiens
gaacgattgggctgagcagaggacgacatgttgcttttcgtggagcttttcctccgcaaccatgtctgacaaacc

SEQ ID NO: 744948 - DNA, 112 bp, Homo sapiens
ggcggccgtggacaacatgatggtcagaaaaggggacacggcggtgcttaggaaaattctcagtctcccttgaagaagtgaagcctccttctttatgcactggccactgtct

SEQ ID NO: 744949 - DNA, 100 bp, Homo sapiens
tccaggcaatgagatttaccgcaagggcaccatctccttctttgagattgatggacgtaagaacaagccaagacaatgcaaactccagtgaacattcccg

SEQ ID NO: 744950 - DNA, 100 bp, Homo sapiens
cagatcaacctggagctctacgcctcctacgtttacctgtccatggtggctattatcatggaaaactaatttttcccagagaatttcctttcaaacctcc

SEQ ID NO: 744951 - DNA, 75 bp, Homo sapiens
ggcgcggattcgccgaggcaccgaggcactcagaggagatctgcgagtgaagagggacgagggaaaagaaacaaa

SEQ ID NO: 744952 - DNA, 76 bp, Homo sapiens
tgcaccctatcaagcagagcggtttcgaagacttggtgagggccccaaggctgttgcagctcctcgacctgatcgg

SEQ ID NO: 744953 - DNA, 97 bp, Homo sapiens
tcccttgaaaccggcactgggacttctcgatctctggaggcacctgttgcaagtgacagcattagtgccagcagtagttcccaagggctgtctcagc

SEQ ID NO: 744954 - DNA, 75 bp, Homo sapiens
ccagaggcgagccctggtggaggaagaggattttgaagccttaactccaaacttgctggccaggactgtagaaac

SEQ ID NO: 744955 - DNA, 80 bp, Homo sapiens
tgggaacaagactacctcctcctttaccccagaacctcctttacacagtatcagaacctgtgagtaccagagtgcccact

SEQ ID NO: 744956 - DNA, 73 bp, Homo sapiens
accccagcacttaagcaaacgggaattctcgcgtctcctctgagcctccggcctccataagacccaaaacaga

SEQ ID NO: 744957 - DNA, 75 bp, Homo sapiens
cgggcggcccctggagatgattgagccgcgcacgctacagtacaagggagtggttttcagagacatttcagaaag

SEQ ID NO: 744958 - DNA, 83 bp, Homo sapiens
caaaccaggagattgcgagggagcgatgcggtgcagcgcggttttacacatccataagtagacctttttggagcctcaccagc

SEQ ID NO: 744959 - DNA, 75 bp, Homo sapiens
tttcgtggcctgaccaaggacctccaagttccacaggcgcatgggccacgtttccagtgcttggtggccatgtgg

SEQ ID NO: 744960 - DNA, 51 bp, Homo sapiens
caagctcgtagcctgccactccgtgcatgttaactcattccagcaaactac

SEQ ID NO: 744961 - DNA, 76 bp, Homo sapiens
ccccaagcaacttagaatgcagcttcagcagaggctgcagggccagcagcagaccttgggacctgtgagcgctgca

SEQ ID NO: 744962 - DNA, 98 bp, Homo sapiens
acggagctggacccccagagccgcgcggcgccgcagcagctgaaacagaaccgcatgagggaaagaggaaagtggaatctctgtggcccatcttcagg

SEQ ID NO: 744963 - DNA, 83 bp, Homo sapiens
ggtgtcttctccctcgccagctggatctacgaactgcgtgtgatggagaccaaacccgacaaggcagtgtccatcattgagtg

SEQ ID NO: 744964 - DNA, 90 bp, Homo sapiens
gtcagaagaacaaaaggatgattctgatctatttgcttccagtaaaaatgctattggtcccactctatgaccagtgggaggatgtgatga

SEQ ID NO: 744965 - DNA, 100 bp, Homo sapiens
ggcaacctggagataaccagcattgagcacaaccgggacctctccttcctgcggaagaaagccagccgccacataaaaggtgaagacaagaataaagcca

SEQ ID NO: 744966 - DNA, 75 bp, Homo sapiens
tcatggggacagcctcccaagctgaaggaaggggcaagtgtccagagaatggctgggatgaaagtacacttgaac

SEQ ID NO: 744967 - DNA, 101 bp, Homo sapiens
gacgaggaatcagctttgaagtgggagcccagttggaagcccgggaccgtttaaaaaactggtgaatggaagagaatccgaagaagaaaatctcaataaat

SEQ ID NO: 744968 - DNA, 101 bp, Homo sapiens
actagagacagtacaaggagggagagaggtataatacttctccacgtctgcttcaggaagaaagtgcctgccattcttatcatttctaagcaggttcatgc

SEQ ID NO: 744969 - DNA, 101 bp, Homo sapiens
ctgtcagtggctctcttggccctcctgaaatggttttagatggagcaggattagatattgatttccatcttgcctctccagaaggcaaaaccttagttttt

SEQ ID NO: 744970 - DNA, 100 bp, Homo sapiens
gctcggccgagaccccgccacccgtccctgcccccggctcgccggtcagcggctcgtcgccgttcgccacccaaggaatttatgcaaatattctcatgag

SEQ ID NO: 744971 - DNA, 75 bp, Homo sapiens
agacagagcgctactcctggcagtgcgtcaatcagagcgtcctgtgcgctgccactgcagagccccgccatggaa

SEQ ID NO: 744972 - DNA, 73 bp, Homo sapiens
gtcaccgtgcatgcaaggacactgacaactctgagggaggaaggtgggagtcaatcattttgacaagtctcct

SEQ ID NO: 744973 - DNA, 101 bp, Homo sapiens
tgttactttgccacttcttcacggaccagtttcagttcgccgatgggaaacccggagaccaaatccttgaagacccttttgaggacttctttgggaatcga

SEQ ID NO: 744974 - DNA, 99 bp, Homo sapiens
tctctcgagaaaattataaagatcattccatggctccaagtttaaaagaactacgtgttttatccaacagacaaaagctgaccgtatgtcctatcatca

SEQ ID NO: 744975 - DNA, 101 bp, Homo sapiens
gatcaactcagtgttcaacaagtactgtgtcaacatgcaaggccaggacacgtcttctgggggcccagcacgtgcttatccagttggtggcctttgctatt

SEQ ID NO: 744976 - DNA, 83 bp, Homo sapiens
ccaagagggtgttcgactgctagagccgagcgaagcgtgggaggaggagctcgccaagcgcatgaaccttcagaccatggtgg

SEQ ID NO: 744977 - DNA, 96 bp, Homo sapiens
tcccagaggaaactgacggagacgcagatgtggacttgaaagaagctgcagcggaggaaggcgaggaacagcccccaagcctgtgtcggtggcctg

SEQ ID NO: 744978 - DNA, 97 bp, Homo sapiens
gccggtttgcctcggcagccaaggagggcatcatgtttgagaccttcaacaccccagccatgtacgttgctatccaggctgtgctatccctgtacgc

SEQ ID NO: 744979 - DNA, 90 bp, Homo sapiens
cgcgggggctatggaggtgatggacgtgttctccactgatgacctcaccggatttttacaggttgcagcattgcaggaagagaaaagtag

SEQ ID NO: 744980 - DNA, 90 bp, Homo sapiens
accatggaccatcctgctggtcagcactgcggctggaaatctactttcttcaatgtgttaaccaatagtcaggcttcagcagaaaacttc

SEQ ID NO: 744981 - DNA, 75 bp, Homo sapiens
gccacaaggtccacctgttgttgtgggtttttgggtgaccagtctgaaccggacggcttttctcatttccacttg

SEQ ID NO: 744982 - DNA, 96 bp, Homo sapiens
cttcgataacccgggtggccaaattccgtcctggctcattaactgggccgccaaggaatacatgcaccacctgctcgccctggagcatcgcgctga

SEQ ID NO: 744983 - DNA, 74 bp, Homo sapiens
ctgatcaacaactatgacatgatgctgggtgtgctgatggagcaggacccaagccctgaggcagcagattcagc

SEQ ID NO: 744984 - DNA, 75 bp, Homo sapiens
ttgggactgagctggattttccttttggctattttaaaaggaacttgctactaccagcaccatgccctaccaata

SEQ ID NO: 744985 - DNA, 100 bp, Homo sapiens
cctcaaaggggaccgggaagcgaaggaagaagcgtccctccaggagccaggaaggactgcctccgggcctgccaggagcagatcgaagccctgctggagt

SEQ ID NO: 744986 - DNA, 80 bp, Homo sapiens
cacatactatccgtttgttcaggaaccaccagtgacagattgctggatttgtgcgactcggtgaaggatgatgcccggag

SEQ ID NO: 744987 - DNA, 96 bp, Homo sapiens
atgtgaacgtcttctgctttacctctattgccatgaattaagtattgaattccaggagcctgttcctgcttcggaaaatcctgccttgcttcgttg

SEQ ID NO: 744988 - DNA, 74 bp, Homo sapiens
aggaaatccaccccgctgcacttcgccgcaggaattttcaacgtccggttcatctaatacagacactggtaaag

SEQ ID NO: 744989 - DNA, 98 bp, Homo sapiens
tgacagcacaggtcacagtaaggccaaaaatgtgcatactcacagagttagagagagggatggtggagtttggatcataatacaagagaagcacaggg

SEQ ID NO: 744990 - DNA, 90 bp, Homo sapiens
tcaaccagatgttttcccattgttcaaggacaaaggtggcccagaattttccagtgccctgaaaaataatgatccctctgataagccacc

SEQ ID NO: 744991 - DNA, 75 bp, Homo sapiens
cagacctcggagatcatcacgtttgccgagtcaggagaagggagcactggctttgctttcatcaggccaaagatg

SEQ ID NO: 744992 - DNA, 75 bp, Homo sapiens
ctacagtatgcacttaatgtccctgatctaaaatgtccactgaggcacaaagagttgatgacagtccaagcacta

SEQ ID NO: 744993 - DNA, 100 bp, Homo sapiens
ccatgagagactggggcatcgagcagaagtggatgtctgttctcctgcctctgctgctactttacaatggaaaatgtttcaacgtgcgcaagagttgcgg

SEQ ID NO: 744994 - DNA, 100 bp, Homo sapiens
caaatctcagcaacccctgtgcttctccccaggtccagccaatgcattcagaagccaaaatggtaattattcgaggtggaggacatattttaccctatga

SEQ ID NO: 744995 - DNA, 75 bp, Homo sapiens
tatacatcttccactatggaattctcactacggatttttctggggtgcacttgatctatctgatgtacattctcc

SEQ ID NO: 744996 - DNA, 75 bp, Homo sapiens
atggcttcccttccgttttcgcgtggttcttttgcaagcattcctgggagatggtcgggaagaagaagggagtct

SEQ ID NO: 744997 - DNA, 100 bp, Homo sapiens
aaaattggtattgttggattgccaaatgttggaatacagattctgttcatcttgctctgaaattaaataattctgaactcatggggagaaaactcagagt

SEQ ID NO: 744998 - DNA, 74 bp, Homo sapiens
catgaagcagttcctggacttcggccattttcgaccagagtttattcgtccaccgcctccactccacatttgtg

SEQ ID NO: 744999 - DNA, 75 bp, Homo sapiens
gtccatttggggaaatccttcggatggtgaactcattagaagttgggggccgtcccgctcctaaggcaggaagat

SEQ ID NO: 745000 - DNA, 98 bp, Homo sapiens
agcaacgtgcggtgggaccacgagagcggaagtgttcgccagttactacatgaaaagataagagatgcttatactcacccacaatttgtgaccgatgt

SEQ ID NO: 745001 - DNA, 100 bp, Homo sapiens
gagggccccgggccctcagcctctcttataattcagcattggcgtatttgcttgtcccaatacaagaatgccaaaggaggaaacaggaaaaattgccgtc

SEQ ID NO: 745002 - DNA, 83 bp, Homo sapiens
ccgtggtttaaggttccatacccataactgataaatttcaaacggaagagagtggcagcatttagaaagaatctaattgaaat

SEQ ID NO: 745003 - DNA, 114 bp, Homo sapiens
atagaaggggaggggttacagactgtggtgcctacccccatcactgcttccctcagccataacagggcagccactgatcacaatgtggataatacaacagaaatattcagggag

SEQ ID NO: 745004 - DNA, 75 bp, Homo sapiens
ggatgaccattattctccagatagagacaggtgtgaaatctaagaatcccctgccaactcttgagggctcaatcc

SEQ ID NO: 745005 - DNA, 90 bp, Homo sapiens
agaacttggacgatgtattggagaaggccaatttggagatgtacatcaaggcatttatatgagtccacagcaagatgaagagcgacgtcg

SEQ ID NO: 745006 - DNA, 75 bp, Homo sapiens
gggcgtcctctcaggaggcaagcagactatcgagacagcggttcctggctcagagtttgaggggcacaaacggat

SEQ ID NO: 745007 - DNA, 50 bp, Homo sapiens
gatgttttactcttggtagaaaaagggagttgtaggacagtcccatctgg

SEQ ID NO: 745008 - DNA, 100 bp, Homo sapiens
caggagctcatggttgagtgtacgaagaaatggtaatgtttgaaacttaccagttttccggtgtatatgtagccatccaggcagttctgactttgtacgc

SEQ ID NO: 745009 - DNA, 75 bp, Homo sapiens
tctctagataacagtctgcactttcacccgtttcagctgaagacttacagtgagaaactggacaaagagcaagca

SEQ ID NO: 745010 - DNA, 82 bp, Homo sapiens
tttgacgcacacggcaccaaactcgtgagtgcatctccatccacgttggccaggctggtgtccagattggcaatgcctgctg

SEQ ID NO: 745011 - DNA, 83 bp, Homo sapiens
tgtggcgcaactggtcttggtagcggaggcacccgaatgctgcccgggtgagggggatatgagactttctactcggaatatcc

SEQ ID NO: 745012 - DNA, 50 bp, Homo sapiens
acgacactgaattcaaccaggagggatgttctgttcttgaaggactgtgt

SEQ ID NO: 745013 - DNA, 49 bp, Homo sapiens
tgaagggggactacaggttcgagaagactctccaacatgtgccttctga

SEQ ID NO: 745014 - DNA, 82 bp, Homo sapiens
cggagagctccagtgagtccagctcctctgacagcgaagactccgaaacaggtatcgagaaccttccctgcgaacttcagag

SEQ ID NO: 745015 - DNA, 100 bp, Homo sapiens
ggcatccgttctgatgtctgtcagggttacacatcattttggaatgactgtatatcatctggattacgtggctgtatgttaattgaattagcattgagag

SEQ ID NO: 745016 - DNA, 78 bp, Homo sapiens
ggggtcattctctatggtccacctggcacagggcttcgtgggacacatatgcaacatgcctatgatttttacaagcct

SEQ ID NO: 745017 - DNA, 100 bp, Homo sapiens
gtaggcaagacctgcctcctgttccgcttctcagaggacgccttcaacaccaccttcatctccaccatcggtgtttgcacttgtgacagcagtatgctgt

SEQ ID NO: 745018 - DNA, 89 bp, Homo sapiens
cgcgcggggcgggtgctgcttgctgcaggctctggggagtcgccatggctgaccggttccctgatgtgttacctgcttctgctactgat

SEQ ID NO: 745019 - DNA, 96 bp, Homo sapiens
tccagaacatccacggagctttcaatgctctcgggggagcagacagactcacctccaaccggccgcgatgggcctcttggaacattggtgtgttca

SEQ ID NO: 745020 - DNA, 75 bp, Homo sapiens
aggcgcctacatcctaactcgatttgcttgagaaagatcagtctaaagaaaaggagaagaaagtgaaaaaaacaa

SEQ ID NO: 745021 - DNA, 75 bp, Homo sapiens
gttacagactgtggtgcctacccccatcactgcttccctcagccataacagcttggattagaagaacaagaaaga

SEQ ID NO: 745022 - DNA, 100 bp, Homo sapiens
agatgaattgaaggaatgttttcttaaccaaacggatgaaactctgagcaatgttgaggtgtttatggaagaggagcaggacttggatggtgagaagggg

SEQ ID NO: 745023 - DNA, 100 bp, Homo sapiens
atacccgcaaaatcaacaacagtttcctgcgcgaccacagctatgcgaccgaagacagaaacagtctccgccagtcaagaaaccctcaaaagtattttgc

SEQ ID NO: 745024 - DNA, 95 bp, Homo sapiens
gccagagcgccggcaagagctcggtgctggagaacttcgtgggccgaaggatatggccctgaagccacatgagcggaaggagaagtgggagcgtc

SEQ ID NO: 745025 - DNA, 98 bp, Homo sapiens
tccaaccaggttctgatcaagaccttaggcactaagcgaaatagtacccatgagagctcccccatccaggaatccactgctcccgagctgccttcgga

SEQ ID NO: 745026 - DNA, 75 bp, Homo sapiens
aaataatttaacagaagataatccaaatctttctgtgaacacagcaggtgtgagatgtcatcttggaagacaggc

SEQ ID NO: 745027 - DNA, 92 bp, Homo sapiens
acgctgctggaggaaacacctcaggacacggcctacaacaccaagaggattttttatcaagcagaaatgcatcgaacaacgagaatcaagat

SEQ ID NO: 745028 - DNA, 50 bp, Homo sapiens
gcttcggcccccaccagagactcggtcctaggcctacttacaagcctcca

SEQ ID NO: 745029 - DNA, 100 bp, Homo sapiens
atatgtagattaggttgttggaccttaaaggccatcgaagacggcaatttggaggaaatggaagaggaagtacggcttaagaagcgaaaaagacgaagaa

SEQ ID NO: 745030 - DNA, 83 bp, Homo sapiens
ggcgaactggaacccactcggggactctgccttttaccggattatattccatcacaacaagatattctgcttgccagaagacc

SEQ ID NO: 745031 - DNA, 74 bp, Homo sapiens
gatcttgctgagaccaggagcatctgatttaacaggaagtttcaggtattctctactgccgctgatggtcaaac

SEQ ID NO: 745032 - DNA, 100 bp, Homo sapiens
cttcactggtgtagggacattggggttgatgaaacttacctctttgaatctgaaggtttaggagcatctttccttgaagaagtacattattgacattgtg

SEQ ID NO: 745033 - DNA, 96 bp, Homo sapiens
cgacatcagtggagaacctcagcattcctgggagatggtcgggaagaagaagggagtctcaggccagaaggatggtggccagacggaatccaatga

SEQ ID NO: 745034 - DNA, 75 bp, Homo sapiens
ggcgtggccaccgtcaaggccaacatcacgcccttcggcgccgaccaggtcgatccagtgtttacaagggaagtg

SEQ ID NO: 745035 - DNA, 99 bp, Homo sapiens
ctcagcgttcccctctggcgcctttgctgctcctctctctgcacgcactcctgtaggaggcctgctgatggcatttcagaagtactctggtgagactgt

SEQ ID NO: 745036 - DNA, 101 bp, Homo sapiens
gcagctgtatgccagtatgctgcatgaaaggcgcatcgtgattatctcgagcaaattaagcactgtcaaaatgcagatcttcgtgaaaacccttaccggca

SEQ ID NO: 745037 - DNA, 82 bp, Homo sapiens
tgcaatggtctcaatctctggaaaaacttcttgccaaccaaattacagcaattggaacttgcacagatacagcatagagacg

SEQ ID NO: 745038 - DNA, 100 bp, Homo sapiens
ccgcgagccccgcactctctcgatgagtcggagaagtccctgagacggtttaagcggaagcatcttactgccattgactgccagcatttggctcggagtc

SEQ ID NO: 745039 - DNA, 75 bp, Homo sapiens
gatgtagagaaatggcgtgtgaagaggaaggtgtcttgctgcaggtaactaatgaagaagtggtcaaccacagag

SEQ ID NO: 745040 - DNA, 110 bp, Homo sapiens
gagaccctgcgagaaggagtagtgtcgacttggtcccgtcagccggaccccacctggacggctggggccacttgtggtcgccgggaggaaacctcgacctgtctcccagt

SEQ ID NO: 745041 - DNA, 90 bp, Homo sapiens
ggccaagatgagactgatgaccggcctgaatgtccctatggaccatcctgttataggacagaactgtaccgctctctttttggccagctc

SEQ ID NO: 745042 - DNA, 90 bp, Homo sapiens
atccgcgtcgccaatgttcccaacaccagcctgctcgtcaacatcccacaggtgactccccggacagctcaacaccaaagctttcgcggg

SEQ ID NO: 745043 - DNA, 75 bp, Homo sapiens
cgagaactgatcctggacctggagaagaatgaacatttgaagacagtgatttgttccatttgattggtgttatct

SEQ ID NO: 745044 - DNA, 100 bp, Homo sapiens
cctgatgggagcacgctgagaacatttggcaggacttctgcacggacctggccgtctccagtgccaacttcattcccacggtcactgccatctcgaccag

SEQ ID NO: 745045 - DNA, 100 bp, Homo sapiens
gtcgagcagcggacgccggtctctgttccgcaggatggtggacctcccccacacggcgatccaggaagcctccaacaagaagaaattcgaggatgccttg

SEQ ID NO: 745046 - DNA, 87 bp, Homo sapiens
cccctgcgttgtaccatccgcctgtgggacacctaccagataagggcctcgctctgttacccaggctggagtgctgtggtgtgtttg

SEQ ID NO: 745047 - DNA, 98 bp, Homo sapiens
ttcaacatgattgcatttgaaggcagcccaatggatccaatggtgatgaagagacctcagttgtatggcatgggcagtaaccctcattctcagcctca

SEQ ID NO: 745048 - DNA, 83 bp, Homo sapiens
ggactggactcttttcttgacttagctaccagcttaacaaacaacagttgcagttactgaaagaacggttccaggccttcctc

SEQ ID NO: 745049 - DNA, 75 bp, Homo sapiens
ctcgacctgctaacagaactggaccttttcgatttttgcagctcaagtggcagtcctcctttccagcccatcaaa

SEQ ID NO: 745050 - DNA, 75 bp, Homo sapiens
ggcttcgggaagcagggattccagtgccaagacctaatctgggagcctgcaagtgacaacagcctttgcggtcct

SEQ ID NO: 745051 - DNA, 51 bp, Homo sapiens
ctcccaaggtgctgggattacagcattccaggatgccttgaagattttctg

SEQ ID NO: 745052 - DNA, 74 bp, Homo sapiens
cgagtggactaagattcaacaaactatttttgaatgaagatgatcaacagtacaaattctgaagtttgtaaact

SEQ ID NO: 745053 - DNA, 74 bp, Homo sapiens
atttgatctggaaccgggctcagtcctgtccaacaatgacagtcatgtccctttccagggacctcaaggacgac

SEQ ID NO: 745054 - DNA, 106 bp, Homo sapiens
gagaccatggctgactacctgctgtacaccctcaacaaacaccagcgctttgggctcctcctggtcaccagcctggtggttgtgctgctgtgggaggcaggtgcag

SEQ ID NO: 745055 - DNA, 99 bp, Homo sapiens
ggggcaacctgatctcggctgtcggagtgggtgtcctcaagaaaggtgacttggtcctcgcggacgccagtagggacggggtttcaccatgttagccag

SEQ ID NO: 745056 - DNA, 83 bp, Homo sapiens
gttcgtctcacttaggccaagaagtcaccttgtgtggatggattcagtaccgaagaacatacatatgatagttgagaaagaca

SEQ ID NO: 745057 - DNA, 76 bp, Homo sapiens
gaaggaccccaagcaaaggatcatccccttcctcccagccggaagtcggtgcagcccacctcagaggagcgcatcc

SEQ ID NO: 745058 - DNA, 100 bp, Homo sapiens
aattgggtgatgattccctgcctgcagagggttacatgggctttagtctcggagcgcgttctgccaggaagcattcaaagctgtggaagatattcacggg

SEQ ID NO: 745059 - DNA, 75 bp, Homo sapiens
cctccagctggtcacccagatgacatcagagacactcatgaggaccatgatacttccactgagaatacagacgag

SEQ ID NO: 745060 - DNA, 100 bp, Homo sapiens
gccctctagaatacagacagttcctgctctaagaggccatctgtgaggctcagtctcccaacacctctgatgtcatccatactgtagggccaatagccag

SEQ ID NO: 745061 - DNA, 100 bp, Homo sapiens
aggtgaagctgcagatctgggacacagcggggcaggagcgcttccgcaccatcacctccacgaaggtggtgaggcgggtgagcctaacccagcgcaccga

SEQ ID NO: 745062 - DNA, 75 bp, Homo sapiens
gcggaggcagaggtggaggcgctttgaaaggctgagtcatcactagagagtgggaagggcagcagcagcagagaa

SEQ ID NO: 745063 - DNA, 76 bp, Homo sapiens
ttccagataccatttggctttcggctgtgcaggcacagtaaccttggtgcacgaccgaaagggctgtctactctgg

SEQ ID NO: 745064 - DNA, 101 bp, Homo sapiens
agcagacagagaagctgctgcagtttcagaacacacgaggagatgccacagagcatcgtggaggccacctctaggcttaagaccttcaacttgatcccggc

SEQ ID NO: 745065 - DNA, 82 bp, Homo sapiens
tagcagccagttccggcccgaggacaccgactaccagcagtttggtgccctggttgtcagatgttggaaagcagtaggacgg

SEQ ID NO: 745066 - DNA, 75 bp, Homo sapiens
cactacgacagtgagaaaggagatacaaactggactctcaggacaaaacgacaccagccaaaccagcagcccctc

SEQ ID NO: 745067 - DNA, 101 bp, Homo sapiens
acctccaccatatgataggggtgactatggcccccctggaagggaaaatgggaagtccctctgcctaaagtacgtgcccagggagaaacagaagtattaaa

SEQ ID NO: 745068 - DNA, 100 bp, Homo sapiens
agcagacacagactatgcagatgggaggaccaccaccctacggtcacgaccacgagatggaatactgtgcagacttgcctcctccatactcccccacccc

SEQ ID NO: 745069 - DNA, 100 bp, Homo sapiens
cgcgtccgccgattcctcctccttggtcgccgcgtccttggctggcgtagctccaggcccggattcgaacttacaatcagcattacaacaacctgctacg

SEQ ID NO: 745070 - DNA, 90 bp, Homo sapiens
tcagttggagttggaatttgtgcaatgtttagccaacccaaattaccttaattcatcaaacacttggcttgttccagaaactaaaggagc

SEQ ID NO: 745071 - DNA, 75 bp, Homo sapiens
ggaagacctccagtctataagcccaggaagccgtcttcgaactcaggagaagcggttcctggctcagagtttgag

SEQ ID NO: 745072 - DNA, 100 bp, Homo sapiens
ctggggccagccccaaagagtcaactaatccagagaaggcccatgaggtgcccaacaaccagcatgtgaaggtgcgcttcaaattcttctacctgctgga

SEQ ID NO: 745073 - DNA, 76 bp, Homo sapiens
gtccgcgaagatggcgggccggggctcaagggttcttgttgatgcacgagataagcttggcattccttggcagtat

SEQ ID NO: 745074 - DNA, 80 bp, Homo sapiens
ccaaagaatgccacagaatcaggggaggcatgcttcagatcatctcaggccacctcagtgtatactcttccatttgacaa

SEQ ID NO: 745075 - DNA, 128 bp, Homo sapiens
tcaggaaggattcctgagattccaggaggaagtactggcgaagtgctccatgccctgattgagtccctcaaccagaaaccacagactgccggtgaccaacccccacccacagacacaacccatgccac

SEQ ID NO: 745076 - DNA, 75 bp, Homo sapiens
ctgctccgaggggtctggaagccagagaccaacgagatcctgcacatgtcttttgctctggtctggggtctctct

SEQ ID NO: 745077 - DNA, 83 bp, Homo sapiens
gtttgcagatcgggagcgcaaggtcgccctcaaggccatgatcaaaactgctccctaccctcacctcaagacgaccatggcca

SEQ ID NO: 745078 - DNA, 95 bp, Homo sapiens
ctgaaggctgcgcaggaggagtatgtcaagcgagccctgaaagatgtgccggatggggtgaaagagctgtcagaaggttcagaagaaagcagtga

SEQ ID NO: 745079 - DNA, 100 bp, Homo sapiens
ctgtactccagacacaacccggccatcgaggccctgctgcacgacctcagctcccagaggatcaccagcgtggattttcagctgaactctcatctctcaa

SEQ ID NO: 745080 - DNA, 100 bp, Homo sapiens
catcaccaaggatgctgaggtcaccatagcatttgattatgagtatagtaactggctatttagcagacatgacccacaagcagaagaagcattagcaaag

SEQ ID NO: 745081 - DNA, 90 bp, Homo sapiens
gtccgcggccggcacgggaaagccagaagatacctgaaattcctgcagatgttgtgggtgcccttctgttcctggaggattatgttcggt

SEQ ID NO: 745082 - DNA, 100 bp, Homo sapiens
attcagtggaaccatcacacaaaagcacacaaagacctcctcctccacaggggagacagaggcagcagaagatgtcgttttcattggacctgacacacat

SEQ ID NO: 745083 - DNA, 75 bp, Homo sapiens
ctactactatggaaaattcatgcctgtaggtttaattgcaggtgccagacagtactactggtatgacgagcgggg

SEQ ID NO: 745084 - DNA, 88 bp, Homo sapiens
aattctcagtccaagtttaaagttaagacattccacttcttccatctattacatctctgagtctaaatgaaaatgaagagaagaccgg

SEQ ID NO: 745085 - DNA, 97 bp, Homo sapiens
gcgggaaggcgtgaccgccatgcacaagctctttgactgggccaataccagccggcgcgggtgtggatgtggaagcagccaagcgggcagaagagga

SEQ ID NO: 745086 - DNA, 96 bp, Homo sapiens
aaatggagtgcttggaggcatatgtggcttttgctgctctcaccaacagcttgccctatacacagagaagtttgaggagttccagaacacactttc

SEQ ID NO: 745087 - DNA, 100 bp, Homo sapiens
ataggtgtatcaagtaatggtgcaaagcctgaagtgtttggagaagagggattgaccctgaatcttgaagacgttcagcctcatgacttaggaaaagttg

SEQ ID NO: 745088 - DNA, 87 bp, Homo sapiens
aatatgggaaaaacatcaaattcttgaccaatctaggtgtaaacaggaacatcgataagtagtgtaaaaacttgcacaatgaaatcc

SEQ ID NO: 745089 - DNA, 101 bp, Homo sapiens
aaaaagagcgttgagctcagagaagagcaactcggagttttgggggtgtgctttgtgagcctgaatttaaatacattgggaatatgcatgggaatgaggct

SEQ ID NO: 745090 - DNA, 74 bp, Homo sapiens
atccctgaatctgcgcaaccgctacgcgggcgagggattgtcaatgaggcagatcagattccgatttgacgggc

SEQ ID NO: 745091 - DNA, 101 bp, Homo sapiens
ggcttccgtttgttggtggaggaggtggcaggcctcggcgttagagatgtttatgattacttccgagctgtcctgcagcgtgatgaaagaagtgaacgagc

SEQ ID NO: 745092 - DNA, 90 bp, Homo sapiens
cggaggacttgcaacactccgaggccaggaacgctccgtctggaacggcgcaggacttgaaagaggagattgatattcgactctccaggg

SEQ ID NO: 745093 - DNA, 96 bp, Homo sapiens
cggggccggggtccgcaaggccggagaaggccgccgggcccgggcatggtggtctggggcaacgcggaagctggtggatagcgaggtggtcatgct

SEQ ID NO: 745094 - DNA, 88 bp, Homo sapiens
ggagcgggagcggccggaggagccatggactgcagcctcgtgcggacgctcgtgcacagatacgatgctgatatgctaactggtgatg

SEQ ID NO: 745095 - DNA, 100 bp, Homo sapiens
agaaggacaagcgcttctcgggcaccgtcagaaaaatggctacaaacttcctagcacatgagaagatctggttcgacaagttcaaatatgacgacgcaga

SEQ ID NO: 745096 - DNA, 75 bp, Homo sapiens
cagatccaaagatcacctaacaggtggagctcagtattctggaagatgaccttgaatgatgccatgaggaacaag

SEQ ID NO: 745097 - DNA, 75 bp, Homo sapiens
ctgttttctgccggctgtaaagtcatcacctcctgggatcagatgtgcattgagttcctggtccagaactttaca

SEQ ID NO: 745098 - DNA, 83 bp, Homo sapiens
cgtggccttagctgtgctcgcgctactctctctttctggcctggaggctatccagcacctcgcgacctgtgtcagcagagccg

SEQ ID NO: 745099 - DNA, 82 bp, Homo sapiens
ccgcccaccagttcgcccgtccccctgccccgttcacaatatgccatggacaatattaccaggcagaaccaattctacgata

SEQ ID NO: 745100 - DNA, 90 bp, Homo sapiens
ggccgagcaggaggcgccatcatggaagagcagcgggcagcaccagaatgacaaaggcaagaacgtccgccagaggaactcttcctgagg

SEQ ID NO: 745101 - DNA, 100 bp, Homo sapiens
ccaatggtatcagagccaattcatatacacaggaagtctccacttccaagatctaggaagacggctacaaatgatcctcaagtactacagccttccagca

SEQ ID NO: 745102 - DNA, 75 bp, Homo sapiens
ggagagaggaggaggagtgcggcgcggcggccccgggaccaaggaggtttggtgcacctcgatttggaggaagta

SEQ ID NO: 745103 - DNA, 100 bp, Homo sapiens
ggaaagtcaatcgtaggaagaacacagtacagagaggtgagagacttcagaggctgccctttcttttcatctgctgcttgtgaaaggaaaacatcttggg

SEQ ID NO: 745104 - DNA, 100 bp, Homo sapiens
agaccattcagatgggatctttccggatcaatccagatggcagccagtcagtggtggaggagccaggtgagaatttcaaggattatcgacttcatattgc

SEQ ID NO: 745105 - DNA, 50 bp, Homo sapiens
agatgtattcagtggaggaagctggtcttaacccatatttaactttgaac

SEQ ID NO: 745106 - DNA, 100 bp, Homo sapiens
aaggagttggagctcaagttggagacagcgaggagaaacctgccatagccagggtgtgtctttgatcctcttcagctgaagaataagttcatgaaaaaat

SEQ ID NO: 745107 - DNA, 90 bp, Homo sapiens
tgccttcgtcatttcctgccggccggtcggtttccggatgaaacgaggagccagacctggaatggccaaatatcaaggtgaagttcaaag

SEQ ID NO: 745108 - DNA, 90 bp, Homo sapiens
ggacgccgccgaagaagcatcgttaaagtctctcttcaccctgccgtcatgtctaagtcagaggaatgtatcctgtcaggtataatgtca

SEQ ID NO: 745109 - DNA, 100 bp, Homo sapiens
ctctttcctttccgtctggcggcagccatcaggaccatggccaacctggagcgcaccttcatcgccatcaagccggacggcgtgcagcgcggcctggtgg

SEQ ID NO: 745110 - DNA, 98 bp, Homo sapiens
ctctccggcaggcagtcacaagcagcagaacttcgggtttttctggcccccaaagacaaaccaagtggagacacagcagctgtatttgaagaaggtgg

SEQ ID NO: 745111 - DNA, 77 bp, Homo sapiens
actgccagtgtggctgccttcgagggtcaggtgtgtgggcagggggagaaggactcagaattgaaccagaagcggcc

SEQ ID NO: 745112 - DNA, 50 bp, Homo sapiens
gttctcctttgacttcactagggaacagcatctggcgaggccccaatgtg

SEQ ID NO: 745113 - DNA, 100 bp, Homo sapiens
taaagtgactgagctggaagacaagtttgatttactagttgatgccaatgatgtaattctggagagagtggcatcttgacagcagtagcaatgagcgtcc

SEQ ID NO: 745114 - DNA, 100 bp, Homo sapiens
agctgtctatgaaaatgccagggaaaaattttttagaaccaaagaactaattgcagagctattgctctggccatgagccgggatggctcaagcgggggtg

SEQ ID NO: 745115 - DNA, 100 bp, Homo sapiens
cacctggttcttcatcgaccttattgctgctctgccctttgacctgctttacatcttcaacatcaccgtgttaaatccagatgtgaatgttttccaacgg

SEQ ID NO: 745116 - DNA, 78 bp, Homo sapiens
gtaaaggtgctggtaagatttcttctggtatccgttacagcactgatgtgagtgtagatgaagtaaaagctttggctt

SEQ ID NO: 745117 - DNA, 89 bp, Homo sapiens
agatttcagtgtcctccttagctctgcaggtgctggagaatctggtaaaagcaccattgtgaagcagatgaggatcctgcatgttaatg

SEQ ID NO: 745118 - DNA, 99 bp, Homo sapiens
aagaaccgccggcgccggcccagcagctgcagccgcagcctgtggctgtgcagggccccgagccggcccgggtcgagcagcgtgcagggtcaaagacag

SEQ ID NO: 745119 - DNA, 74 bp, Homo sapiens
acttgtctttcaagaaaggagagaagatgaaagtcctggaggatatttagcgtggactacaatgatgaactgga

SEQ ID NO: 745120 - DNA, 137 bp, Homo sapiens
agacagatcgccggggaggcagcgcgggatcccagcctcaggcgtgcgcggacggtgtgcgggtctgaatttcctgctgctgttcacaaagatgctttttatctttaactttttgttttccccacttccgaccccgg

SEQ ID NO: 745121 - DNA, 75 bp, Homo sapiens
gaccgagagcgcgaatatcgtcatcgttagaagcttttccttccctccatgagaaagaagccagctctgtctgac

SEQ ID NO: 745122 - DNA, 90 bp, Homo sapiens
acgccgcgcactcggagccggcacggctcggcgggcagatgattctggaccagatgaagcctgaggagccttccagctctaagatagcag

SEQ ID NO: 745123 - DNA, 74 bp, Homo sapiens
cgcagggcgctcggggaagcaaacggagtgtggaaatacgacctgacccctgtggtgctcccattcaagtttcc

SEQ ID NO: 745124 - DNA, 100 bp, Homo sapiens
cttaaactccctaaaatctccgcagctctggttcctgttgcggccgatgaacgggaccgggttcagaagaaaacgttcaccaagtgggtcaacaagcact

SEQ ID NO: 745125 - DNA, 100 bp, Homo sapiens
gctgtcccagagggagaagcagctagaaccagtaccatgcaggatgaaacattaaattcttccgttcagagtattagagagacctctctccccaaaagcc

SEQ ID NO: 745126 - DNA, 125 bp, Homo sapiens
tggaaacatggacaaatttgtggggctgggagtatttgtagacacctaccccaatgaggagaagcagcaagagatgcagacagacatgctgaactatctggaagtccactgaaaagcaaaagcac

SEQ ID NO: 745127 - DNA, 100 bp, Homo sapiens
gacagcgaggaggagatgaataagtgggttcgttgtatttgtgacatctgtgggtttaatccaacagaagaagaattagaagtgcgtctcaccaaccagc

SEQ ID NO: 745128 - DNA, 100 bp, Homo sapiens
acatgcaactaatagcccttgaacagctatgcatgctgcttttgatgtctgacaacgtggatcgttgttttgaaactgatggagatgggcaccaggacag

SEQ ID NO: 745129 - DNA, 100 bp, Homo sapiens
cgctggggaagagtgtgactgtggtactccaaagtgtgtcatagctaccatagcttttggaatgggcattaataaagctgacattcgccaagtcattcat

SEQ ID NO: 745130 - DNA, 100 bp, Homo sapiens
tgtccatcgtgtgcctgatgatcacgcagctggctggcttcagtggaccagtgataacgtggtgctggaccagacctacctgtggcagggtgttcgagtg

SEQ ID NO: 745131 - DNA, 90 bp, Homo sapiens
aaggaacatggcgaaggtggagcaggtcctgagcctcgagccgcagcacgagctcaaattccgaggtggtttttccccatcatcggccac

SEQ ID NO: 745132 - DNA, 83 bp, Homo sapiens
tatccgtttgttcaggaaccaccagtgacagagataatttcttgagaggagataactcccgtaaagttcagcaccagcagcag

SEQ ID NO: 745133 - DNA, 100 bp, Homo sapiens
gacagcgcgccggtcgagctgattctgagcgatgaacacagatatgtagaactcttcttgaattctacagcaggagcaagcggtggtgcttatggtagcc

SEQ ID NO: 745134 - DNA, 100 bp, Homo sapiens
cttttagaagctggggcagatcctaatgcaactactttagaagaaacgacaccattgtttttagcccaacctcagcgcttgcctcagcttcagacttcag

SEQ ID NO: 745135 - DNA, 74 bp, Homo sapiens
tttcaaacagtgtcaatacaaagatactctccccaagatgcctggaatgatgtcgtcagtaatgcctggaatga

SEQ ID NO: 745136 - DNA, 82 bp, Homo sapiens
ggacagccgaactggaatctggatgagcagctcaagcaggtcaaaatgcagatcttcgtgaaaacccttaccggcaagacca

SEQ ID NO: 745137 - DNA, 100 bp, Homo sapiens
cctcacccaggcccctgtcaagaaggtgccggtggtgcgagtcttcggagcgaccccggcagactttgacccctggtggacaaacgactgtgagcagaat

SEQ ID NO: 745138 - DNA, 100 bp, Homo sapiens
acctgaagttgttgtatccaggtgcatgttacagatgatcagtagaattgaatatgtgcatacaaagaattttatacacagagacattaaaccagataac

SEQ ID NO: 745139 - DNA, 101 bp, Homo sapiens
cggcctgggcaatggtcccggctgccggtcgacgaccgccccgcgtcatgcggctcctcggctggtgacgtccttctatggccgcttcaggcacttcttgg

SEQ ID NO: 745140 - DNA, 75 bp, Homo sapiens
caccatggctctgaagagaatccacaagctatgctaagaaggaatctgatcttaatggcgcccagatcaagcttc

SEQ ID NO: 745141 - DNA, 100 bp, Homo sapiens
gtgattggctaccttctcccatcaccccagctgaattcttgccgccaggatggggaaacagaacagcaagctgcgcccggaggtcatgcaggacttgctg

SEQ ID NO: 745142 - DNA, 60 bp, Homo sapiens
tccctgtgctgcgctaacgacagatattgtgcatcatgggcttcatcagcaaggagcgag

SEQ ID NO: 745143 - DNA, 74 bp, Homo sapiens
ttttcagaaagtggaaagaagccatggcaaggttggtcttcctgcaaaatctggagttgctgggggcattcttt

SEQ ID NO: 745144 - DNA, 75 bp, Homo sapiens
caaacggcgcacattggtatgatgtggaaggcattggaatggatacttgtgtcattcctttgaggcacggtgggc

SEQ ID NO: 745145 - DNA, 90 bp, Homo sapiens
gcttccttgtgacttctcatcctgcattttgaaagcgaagcagaagccgtagaatcagcggcgagcctgttgaaagaacccacaggtgca

SEQ ID NO: 745146 - DNA, 100 bp, Homo sapiens
agcttgtgctagagtcatcacttcccattgggctgaggacatgaagcctttattacaaatgattttggactggtttgtacagatatgtttggccctgaaa

SEQ ID NO: 745147 - DNA, 75 bp, Homo sapiens
cagggaaggagggcgtccgagtcaacaaccgcttcgagctgagtcgtgtcccaaatgcgaacatcctcgtgctta

SEQ ID NO: 745148 - DNA, 100 bp, Homo sapiens
ggcggcggcggcggcggcggctgctgctgctgctgcccgcgtccgaggctcgcgggcggcgggcccggataaaataccatgaggagtttgagaagagccg

SEQ ID NO: 745149 - DNA, 87 bp, Homo sapiens
accccagtcggtgctccggggaggtcacctgacgaggagtgtgaagcctcagtttaggtcatctggtggttcagaacactcaacaga

SEQ ID NO: 745150 - DNA, 117 bp, Homo sapiens
tcttgcaagatggagggctgcaggtggtggaaaagcagaaccttagcaaagaggagctgatagcggagctgcaggcatatactagtgtctcaaaggcttcacttggccttgcagatc

SEQ ID NO: 745151 - DNA, 100 bp, Homo sapiens
gttcctgttacctctcatcattgtgttaatggtgaagcacagcgattccccgcgcagggaccatgtcggcggagaccgcgagcggccccacagaggacca

SEQ ID NO: 745152 - DNA, 74 bp, Homo sapiens
gtttggtcccgattccggaaaaggtgccaagagcttagttgaactccttgtccaccgggcatacttagtatctt

SEQ ID NO: 745153 - DNA, 137 bp, Homo sapiens
gtttaacagctttgtctgccatagcaatcagcagaacgcctgttctcatgaacttcatgatgagaggctcttgggtgggtctaaaattcccaggactccacagctttgcaccagataagcctggaggaatactaatg

SEQ ID NO: 745154 - DNA, 87 bp, Homo sapiens
tgccacctgctgcacccacgaatctgcccacccctcctgtaacccagcctgtttcacttcttgggttcagcaccacccccttctcca

SEQ ID NO: 745155 - DNA, 100 bp, Homo sapiens
gtaattgagcattatttgaaaatcaaaggtctcactcgaggtcaagctgtggttcactgacacttcctccatggcccatctatcgccggcatcctctcaa

SEQ ID NO: 745156 - DNA, 100 bp, Homo sapiens
tcagggaagactgaaaattacaaagaatatgataaaatcttacttcaggaacaaagctacgtttttccaggtgccgtgagcgatgtggagatgcaggaac

SEQ ID NO: 745157 - DNA, 83 bp, Homo sapiens
gacgggttggggatggcgtgcagcgcaaccacgagacggccttccaaggtgtcgtgaaaactacccctaaaagccaaaatggg

SEQ ID NO: 745158 - DNA, 100 bp, Homo sapiens
gcggtagggccgcatcccgctccggagagaagtctgagtccgccaggctctgcaggcccgcggaagctcgttaccggtattgtaagaacaagccgtaccc

SEQ ID NO: 745159 - DNA, 51 bp, Homo sapiens
agttgcagcatggaacaattacagatggagtctcattcactctgtcaccca

SEQ ID NO: 745160 - DNA, 75 bp, Homo sapiens
aaatttagagaaacctcggcagaaaatgcatccgatgcagatttatggctcctgaacagttgcactgtaaaaaac

SEQ ID NO: 745161 - DNA, 75 bp, Homo sapiens
gtctggaagccagagaccaacgagatcctgcacatgtctttctgctacaggagctgagagaccctaccctcactt

SEQ ID NO: 745162 - DNA, 90 bp, Homo sapiens
gagagtcaggagccccagagccaagtgcgagcccagcgggagaaaatcaaggagctggtcctatagtacccctcctcaggaatgtctccc

SEQ ID NO: 745163 - DNA, 93 bp, Homo sapiens
gccctcaccacccctatccagacggctgcccttcaagtaccaggcttccgttacaagatgaggtctgtgtatgctcacttccccatcaacgtt

SEQ ID NO: 745164 - DNA, 100 bp, Homo sapiens
gcatatgttcgactggctcctgattacgatgctttggatgttgccaacaaaaaaactgcccttcaattctaatctcacctcaaaaacagaatgaggaaac

SEQ ID NO: 745165 - DNA, 100 bp, Homo sapiens
gttacagaccacttactctaaacttcacaaatggttctgaagagtatggagcctacgtagattcataaggcatgtcgggccccaggcctgtggtgctgag

SEQ ID NO: 745166 - DNA, 75 bp, Homo sapiens
gctaccactgcggctactgcgattccaaggagggcaaagcgtcctgcgcatcaagatggtgctcatgtggaccag

SEQ ID NO: 745167 - DNA, 82 bp, Homo sapiens
gcaaaggcaagaaggcaacgacgttccatctgtggaaggacctaccaaccagaatttaattccttttcgaccttcaatccag

SEQ ID NO: 745168 - DNA, 73 bp, Homo sapiens
ttgcccccgctgccgcggctgctgcagagtgatcagcagctggactgtgccttggacctaatgaggcgcctgc

SEQ ID NO: 745169 - DNA, 50 bp, Homo sapiens
cagcagcattgggactcctccagaagattgcagagggaatggcatacatc

SEQ ID NO: 745170 - DNA, 100 bp, Homo sapiens
gtgacctggggatcgctacggaccttaaaatacccgcaacagccccttcgtcccaagatcaacactctgtggtaggccagaacacaggccccagtccaag

SEQ ID NO: 745171 - DNA, 83 bp, Homo sapiens
cgatccgggcgctcgagacttaccagagccacaaggttgtgaccgagattcccgacgagagagactgaggggaagagaggaag

SEQ ID NO: 745172 - DNA, 50 bp, Homo sapiens
ttatgatgggaggccggtattataacaggcagcacacttctgcttttgtt

SEQ ID NO: 745173 - DNA, 128 bp, Homo sapiens
ttaaaccatttcttccctttcctcttgacactgcagctgcagtcaacctcttccccaatttcaatgcgatctgaacagaattaagacgaacgagctttcacaattgcagcagatgaagatccattggt

SEQ ID NO: 745174 - DNA, 100 bp, Homo sapiens
ggccctgggctttaccatctttgtggctgtgcttgccaggcctggctccaggaccaagacaaagcatgggacatgaaattaagagtgaacttcttatggg

SEQ ID NO: 745175 - DNA, 100 bp, Homo sapiens
tatgtttgaaaacaagcggaacgccgtccacgtgaaggggcccttctcggtggaggccgacccatccagatgaaatgtggcaactgtggtgagatttcgg

SEQ ID NO: 745176 - DNA, 97 bp, Homo sapiens
gcttgaacaagaatttaatcaaaagagagcaaaatttaaggagttatatttggctaaagaggatcagtgtactgttacccggacatacctattcctt

SEQ ID NO: 745177 - DNA, 95 bp, Homo sapiens
acgcggacctccagtggccggctccggaggcttggtgactccagtggcccaggctgctgagaactagccctagacctctgcgtgagggttcttct

SEQ ID NO: 745178 - DNA, 100 bp, Homo sapiens
accaccggatcaacttcgacaaatagtattacatcaaataccaataacggatctatggtggtccacagtagttacgacgagattgaaggaggtggcttat

SEQ ID NO: 745179 - DNA, 100 bp, Homo sapiens
cagaaatccaactctgcaaaatggcccctaccaagctgcagaaaagcatttcatctttttggagagtgtgaacatggctacgcctcttcattcccgtcca

SEQ ID NO: 745180 - DNA, 100 bp, Homo sapiens
gttaaggattccaagtaactcttatttggatgcacatgatggggaagtcaacgctgtgcagttcagtccaggttcccggttactggccactggaggcatg

SEQ ID NO: 745181 - DNA, 75 bp, Homo sapiens
tccggactgctcgggaagctccatccgaatgtgtctgccccccagaagtgtatgctgacttgtaaagtgaagaag

SEQ ID NO: 745182 - DNA, 106 bp, Homo sapiens
tgtaccctcagtacgccacctactattacccccagtatctgcaagccaagataacgaaggaggcccaacttcattcaataaggagcctgacggatttatcccagac

SEQ ID NO: 745183 - DNA, 75 bp, Homo sapiens
tgaggaatttgaagtgaccaaaacagcagaggatgtcacccccatcccctctgacagcactcgcaggaagggggg

SEQ ID NO: 745184 - DNA, 90 bp, Homo sapiens
ggtgatattgtagaaattgctgcatttaaatcaaacggtattgagatggattgggttatgaaacataatggtccaaatgacgctagtgat

SEQ ID NO: 745185 - DNA, 100 bp, Homo sapiens
tcctcttgctgccagtggtagcgctcgtctggcggagctggtttcaccagtgatcattaaagaatgggcagcttacaaaggaaagtctcctcaaaccccg

SEQ ID NO: 745186 - DNA, 87 bp, Homo sapiens
cggagaccatgttccgagcggcggctccggggcagctccggcgggcggaggtgctaatgatgctggataactatgtaagagatttca

SEQ ID NO: 745187 - DNA, 75 bp, Homo sapiens
tatggcgtggggacttgtggacccagaggattttatggcacatttgcgacatctcgaatcagcgatgcacacttg

SEQ ID NO: 745188 - DNA, 83 bp, Homo sapiens
ccgaagctcaccgcttacctgccggctatgtcggaagacgacgaggactgctatggcaatggctccttcacctaccaaacgca

SEQ ID NO: 745189 - DNA, 74 bp, Homo sapiens
caagcggagcccctacaactacctgcaggtcgcctacttcaaggatgactttgacaacgatgtggatgctctgc

SEQ ID NO: 745190 - DNA, 83 bp, Homo sapiens
ggaaaagaaaacagcaacacagttacatagtaaaaggaggcctaagccctgggaggagcggggacactgaggacctctctcca

SEQ ID NO: 745191 - DNA, 100 bp, Homo sapiens
agaacaaccgctgccacatccatgaggccccctcttctctcctggaggtcagccggccccttgtggctctcaggccagctggaccaagtctcagaacccg

SEQ ID NO: 745192 - DNA, 101 bp, Homo sapiens
ccgcggacccagctgtcaggcaaggtaaattcaactggaagggaactattaaagcaattctgaaacaggccccagacaatgaaataaccatcaaaaagcta

SEQ ID NO: 745193 - DNA, 109 bp, Homo sapiens
aaattgtggggccatgacacacaaaaagaaagactgctttgaggtcgacatttataactcagaccccctgatctgccgggcagggctgaaggtgtgcttcggcatccaa

SEQ ID NO: 745194 - DNA, 75 bp, Homo sapiens
gttctgctggagcattctgtgaagaaggcagtacattttgggttaccgctgctggagtatgagccacgctcaggg

SEQ ID NO: 745195 - DNA, 97 bp, Homo sapiens
ggaggcgaggaggaagaggaggcggccatgtatgaggaggagatggaaagggaaggagagaagatgactgaggaggaggtggagaccgttctggcag

SEQ ID NO: 745196 - DNA, 101 bp, Homo sapiens
cgccgagccgggccgcggcgccgagtcgaacggggagccgagctggagctgccgcggcgcagccagatgttccatttaagcagacctcttccatagctgta

SEQ ID NO: 745197 - DNA, 100 bp, Homo sapiens
accgagaccaccggggacacagagattattatgacaggcactgggaatctgaagaggtgtctgtggccagagtaaagccagagtgtggccatctaaaggg

SEQ ID NO: 745198 - DNA, 74 bp, Homo sapiens
gctctcaaagaaaaacttgatggtggaatagaaccatatcgacttccagaggaagctgtgctgaatggtttggt

SEQ ID NO: 745199 - DNA, 78 bp, Homo sapiens
actcagctcctcgacatttccacacccagacccaaagtttgcaacaatcagtcagtttcactcttgttgcccaggctg

SEQ ID NO: 745200 - DNA, 75 bp, Homo sapiens
atggaaaccaaaaattctggctctgattcaccttataaagcaaagtatctgcccaaactggaacttatgctgtag

SEQ ID NO: 745201 - DNA, 75 bp, Homo sapiens
gcctgaaggacctggaggaggaccacgcctgcatccccatcaaggtgcgggagtatgagttaagaaaaaacaact

SEQ ID NO: 745202 - DNA, 100 bp, Homo sapiens
actggacatcagaagacagtggatctctctggacaaggtgacctcacagtgactcaagctaccacttactgttgattgtgacgaaatgccagctgaggca

SEQ ID NO: 745203 - DNA, 100 bp, Homo sapiens
cgaaggcccgcggcgccccgtgctgcagctcagagtcaagatctccactgaagttggcatcacaaatgttgatctttccaccgtggataaggatcagagc

SEQ ID NO: 745204 - DNA, 100 bp, Homo sapiens
tggaatatccctcagcctggtgagggtgatgttcgggaggaggccttgtccacagggaaaccatctttgtatggcagcctgacttgtcaaggaattggcc

SEQ ID NO: 745205 - DNA, 75 bp, Homo sapiens
tgcatctttgacaagtttgagtgttgctggaacggttcggatagacttcccaagtaagaagcggaagaggagccg

SEQ ID NO: 745206 - DNA, 147 bp, Homo sapiens
gtcggcttctctacgcagaacccgggagtaggagactcagaatcgaatctcttctccctccccttcttggaaagtttcagcatcttggactctggtatttatcgtatcattagtagtagaagaggcagtcagtcagatgaagactct

SEQ ID NO: 745207 - DNA, 82 bp, Homo sapiens
cccgataagcctgccactcagtgtatttcagacggcaaggggatggtatgaatgcatatgtagcctacaaagttacaacaca

SEQ ID NO: 745208 - DNA, 95 bp, Homo sapiens
gtctccagcgggcctggactgtgggctggtgtgtggaactgcatttgacattgtgcagcaaagaaatggttatggagaagcccagtccgctgctt

SEQ ID NO: 745209 - DNA, 74 bp, Homo sapiens
tgaaagtggcggtgcggatacgacccatgaaccggcgaggcatttcgtgtcctgtctgaaccaattggtccaga

SEQ ID NO: 745210 - DNA, 75 bp, Homo sapiens
gaggattcagggaataggagctggggagcccttctgcgccacagatgacagtcatgtccctttccagggacctca

SEQ ID NO: 745211 - DNA, 115 bp, Homo sapiens
cgccatcctgccgcagctggcgcagcccacgctcatgatcgacttcctcacccgcgcctgcgacctcgacatgctgctgctgaagaaacacacggaggacatcagcagcgtctac

SEQ ID NO: 745212 - DNA, 82 bp, Homo sapiens
ttttcgggtagtggaaaaccaggatattagaaatggctactccccagtcaattttcatctttgcaatctgcattttaatgat

SEQ ID NO: 745213 - DNA, 100 bp, Homo sapiens
cctgtccctgctgctaatggagcaatacgtttccattgtgatcccaccttctgggcaaagaatgtagtcaatttaggaactatcgtgagcataggtgacc

SEQ ID NO: 745214 - DNA, 80 bp, Homo sapiens
acggggcgggacctggcgccaccttgcaggaagtgctctctggcgtggtggtcatatcgagtaaggattcagtccaacac

SEQ ID NO: 745215 - DNA, 100 bp, Homo sapiens
ccctgctccctctcagcacctgggcggacgttttgggaggtcatcagtgatgagcatgggattgaccccactggcagttaccatggagacagtgatttgc

SEQ ID NO: 745216 - DNA, 75 bp, Homo sapiens
gagagagagcttggttaacttgggagaaagtttcatctgtggatggagtattggggcactatgaacgaagaggag

SEQ ID NO: 745217 - DNA, 90 bp, Homo sapiens
cgctgcgctgctgaggccgggccggccgcccagacgctgcccgcgggcccggccacggcggagccaaggccggtctaattgaagccaacg

SEQ ID NO: 745218 - DNA, 98 bp, Homo sapiens
acatgcaggcccgtatcttccagcccacaccacctggggcacgaaagctctgcctcctcctccatctcccttcagggaccagcgtcaccctccaccat

SEQ ID NO: 745219 - DNA, 90 bp, Homo sapiens
gtaccatattgatgaagaagtgggctttgctctgccaaatccacaggtgaccaagaatatggcccaggtgaccaaagccctggacaaggc

SEQ ID NO: 745220 - DNA, 95 bp, Homo sapiens
aacatacaaatactacgttggacgcaaggctatgtttgacagcgattttaagcaagtctcttcaggacagaaagtcatgttctatgtctcctcag

SEQ ID NO: 745221 - DNA, 97 bp, Homo sapiens
agacaacgacacatagctgggtgtcaggctgagggttagtgagcaggttacaactgatggaaaaccaaaaatcgttgatatcattgatacaacagga

SEQ ID NO: 745222 - DNA, 100 bp, Homo sapiens
ctttaagtcgtacaagggtcgacagattatcggaccatttcagaggttcaccgccatcattggacccaatggctctgatatcaatgatgtcaaacggctg

SEQ ID NO: 745223 - DNA, 100 bp, Homo sapiens
ctcaccagccctcgcctcccgagtcactgcagccaacccttcagcaagaggtggggctggtgtccgagcacttctcgcaggccccgcagaggctgtcctt

SEQ ID NO: 745224 - DNA, 75 bp, Homo sapiens
aagttgagaccgagaatgtggaaacagagtgggtattaaggacattgctggtatccatttgccaacaaatgtgaa

SEQ ID NO: 745225 - DNA, 115 bp, Homo sapiens
taatcatctcagttttgatcccctggcatcatttattctccgtactgatcactacatcatggaaatgggtcctgatgaatatgaagagatggaagaagaggaggaggaggaagag

SEQ ID NO: 745226 - DNA, 100 bp, Homo sapiens
gctgctgctctccggcctcgtcctcggcgccgccctgcgtggagccgccgccggccacccggtgaagatagtgatccggggagacaggaacacgggcaag

SEQ ID NO: 745227 - DNA, 100 bp, Homo sapiens
cggatgaggaccggagcggaaaaccttctgaagctaagtcctatcagccatggaaacaccattgctctcttcttccggtcactgttgccaaactatacca

SEQ ID NO: 745228 - DNA, 100 bp, Homo sapiens
agcagccggtagacttaggtctgttagaggaagacgacgagtttgaagagttccctgccgaagtccccacagagaccacctatcacacgctggaggaggg

SEQ ID NO: 745229 - DNA, 98 bp, Homo sapiens
tggactatccttatgcctctaactttttacagcctttgcctgcttggcctatcaagacgtttgatgcaaatgatttgtatcaggggcagaattttaac

SEQ ID NO: 745230 - DNA, 97 bp, Homo sapiens
ctcgtggaatttgaagattctacagataaatcagaattaagaaatcagtctcttgaaagcgaacaggacatgagggatagatgggattatgtggact

SEQ ID NO: 745231 - DNA, 100 bp, Homo sapiens
tccccggtggcccaggcctcggactccgcggccggcccggcgcggcccagcgccctcagtttctgtgtttgaagaacatacgcaccttcctgaaagtctg

SEQ ID NO: 745232 - DNA, 82 bp, Homo sapiens
ggagccaccagcctctccctgatttgttgttggggatagataaggaaagaagaaaaaggctctggtgagaaacccattgtac

SEQ ID NO: 745233 - DNA, 83 bp, Homo sapiens
tctacgacgccaccaggaaccgttggtttgagggacagctgaaggtcaaaatgcagatcttcgtgaaaacccttaccggcaag

SEQ ID NO: 745234 - DNA, 100 bp, Homo sapiens
ccagctggaagtaaccccttccgggagcctagatcctgtgctttactctgaagactcgtcgtcaaagtcctacattttagctttcagtgctgaacttcct

SEQ ID NO: 745235 - DNA, 98 bp, Homo sapiens
aggagacggaggaccagaactacggcatgcgcacatggcacagcactcaagcctacggccccaccagtgtagccagtgcagctttgcctccaagaaca

SEQ ID NO: 745236 - DNA, 95 bp, Homo sapiens
ctggctgtgtgtgctgcaaaccgagacaagttcaccccgaagtctgccggaaatctggcattttttaaagtttgcgccccacaaagaggaaatat

SEQ ID NO: 745237 - DNA, 100 bp, Homo sapiens
gttctgtttgcctgttttggatagcaatgatcccaatttccagatgccttgttcaacaggtaagaatgattgatgttggctgatattggagtgctcattc

SEQ ID NO: 745238 - DNA, 100 bp, Homo sapiens
gaatgtagagagaaagtacttcaagttttagttactatccagcagaaaacttgatagagtacaaatggccacctgatgaaacaggagaatactatatgct

SEQ ID NO: 745239 - DNA, 75 bp, Homo sapiens
ttgcctgaaaatggctcggccaagttcaaagcactgcagcctgtggtgttgaggctcacagcgatgccatccagc

SEQ ID NO: 745240 - DNA, 75 bp, Homo sapiens
cttttcaagacaccaagtgagaggccaaccagtcttccgtgtgtgctaagatcgtgcagctcctggggcagaatg

SEQ ID NO: 745241 - DNA, 100 bp, Homo sapiens
gaaggaagaggtgtttgaaaagccctccaagccacaaaactgtggtgaatggaaaagaatgtataaacttcgcctcatttaattttcttggattgttgga

SEQ ID NO: 745242 - DNA, 100 bp, Homo sapiens
gcccaaggaccaaaccgtggttgggcctgccctcgcggtggatcaatcttcctgtcctacaactgacaaaggatcccctaaagacccctggaaggctgga

SEQ ID NO: 745243 - DNA, 101 bp, Homo sapiens
agcgtcgaggaggcgcaggagactgaccgcaacggcaggattcatttctggcttccagtcctgaaaatgattaggaagaagcaaatggacatggcaagtgc

SEQ ID NO: 745244 - DNA, 87 bp, Homo sapiens
ccaaggacaactgcaagggggaagtagagagataacaaaagctgctcagagtctcaatgaacttggccaagattgacagacacctaa

SEQ ID NO: 745245 - DNA, 100 bp, Homo sapiens
caatgaggtgctgaaacagtgccgacttgcaaacggagccctctggcacaaatggaagaagaaagaagggagcaagtagctaaaattaagaagatggaga

SEQ ID NO: 745246 - DNA, 75 bp, Homo sapiens
gctcagaacagctggatcttgctcacactctttcaagagaagcttccttggaggagccattggatgaaagctcag

SEQ ID NO: 745247 - DNA, 98 bp, Homo sapiens
ctccttatgcaaacggtgaccctcatgttggacatgctttaaataaggaatcagagatcattgatttcttcctgggggcctctctcaaggatgaggtt

SEQ ID NO: 745248 - DNA, 101 bp, Homo sapiens
gccctttccacctcgcggcagttcggtccacaactcccaggcctgttgcagatctccaactcctgctttgtgtgaccccccagcatgctctctgccggtgg

SEQ ID NO: 745249 - DNA, 90 bp, Homo sapiens
ctgctccacaagcggcgccgcgccctcggcctgcacgggtgacgttatattcctattcgaagaccaagagctcaaaacatcattcctccc

SEQ ID NO: 745250 - DNA, 100 bp, Homo sapiens
cccaaccgggagcggctcacggcggaggacgacgcgctcaaccagatcgcgcgggagctgacgaagaatttgatgaactatgttttgaatttggtctgga

SEQ ID NO: 745251 - DNA, 98 bp, Homo sapiens
gcaggatgggatccggctcctccagctaccggcccaaggccatctacctggacatcgatggacgcattcagaagatacttgccagaactaatacagct

SEQ ID NO: 745252 - DNA, 119 bp, Homo sapiens
ccgaggctcaatagtgaaaaggtggagatggcgttagaaggcgctgtggatagatacttctcaagacatcacacagcgtgagtcaatcaaggagggaagccacaagcagactgacaacg

SEQ ID NO: 745253 - DNA, 100 bp, Homo sapiens
tttggagaattacgaaccatgttcaagtcaaaactgcagctgctaccatggcaatctgcacatcgtgctgccacacgaggcttcattcgttatggctggc

SEQ ID NO: 745254 - DNA, 116 bp, Homo sapiens
ctggctcgagaacgaagtaggccgtctcgctctgggtctccaggcccgcgaccgtccgccagtcgtcccgagcagtcctgcgttaactgcggccgggaggctatgagcgagtgcac

SEQ ID NO: 745255 - DNA, 82 bp, Homo sapiens
cggctcccgcaccatggaggaggacgacagctacgtttgctggcctagacctgaactcttcagataatcagagtggaggaag

SEQ ID NO: 745256 - DNA, 75 bp, Homo sapiens
ctgtattcagctcaggaccaggcaccttctgtggaaggtgattttacaacgagatgctgctctccatagggatgc

SEQ ID NO: 745257 - DNA, 74 bp, Homo sapiens
ctcatattagtagccaatgcaattgtgggtgtatggcagaatctgaattatccagaacagaaagttgtgactgt

SEQ ID NO: 745258 - DNA, 100 bp, Homo sapiens
ccctgagcccggcgagcaggagaggaggtcttccgggccgcggcctccgagcgcgcgggatttgcaggtgatgatgaaggaatccaggagacagcagaat

SEQ ID NO: 745259 - DNA, 85 bp, Homo sapiens
gattcgtagctgagactccgctacacccctgaagtggggaaatggactggacctcactgtgggaacaacaagatcaacaagagga

SEQ ID NO: 745260 - DNA, 75 bp, Homo sapiens
tctctctgttcaagggaattttgatctaaataggaagaggatcacctagcccgggtagaagaggcaatcacccgt

SEQ ID NO: 745261 - DNA, 90 bp, Homo sapiens
gcaaacaaaagcattgtaaatcaggtttttctaagagaacttagtgatttggcccgtgaccctccagcacaatgttctgcaggtccagtt

SEQ ID NO: 745262 - DNA, 76 bp, Homo sapiens
gtcgtcaccacaaatccagtgaacaacgatggcattttgaaaacagcaaaggatgaaaactttcggaagagaaagt

SEQ ID NO: 745263 - DNA, 96 bp, Homo sapiens
gaatcatgaagctactaaccagagccggctctttctcgtttacagacaaggatcagcagccctctggaagtgagggagaggatgatgatgcggagg

SEQ ID NO: 745264 - DNA, 50 bp, Homo sapiens
cattattggtaattgtaataatcaggccctgttaaacctggcagagcgac

SEQ ID NO: 745265 - DNA, 51 bp, Homo sapiens
tgttaaggattccaagtaactcttatttgagcccattgaggatatttcaca

SEQ ID NO: 745266 - DNA, 100 bp, Homo sapiens
tcttcaaaccctgagtatctcagtgccagtgatgatgccatcagcgctgcgaatccccgggttatcgacgacagcagagcccgcaagctctccacagatc

SEQ ID NO: 745267 - DNA, 98 bp, Homo sapiens
gatttcctgcagaaagacttgaaggcgtatacaggaacaatattgatgatgtagtaagacattgcctaagatactgagccatatcgccccagcatttt

SEQ ID NO: 745268 - DNA, 98 bp, Homo sapiens
gcagttcctccacgcaggggctccggaatcgcccgaccgcacacgttgccaccctgaggcagcggaggaggagaaagagatggacctcccggactcgg

SEQ ID NO: 745269 - DNA, 76 bp, Homo sapiens
cagcattcggccagagcccccttgctggattatatctacagggtgaatgaaaactttgccattgatttgatagcag

SEQ ID NO: 745270 - DNA, 73 bp, Homo sapiens
ggctcctgtgacttcaagtgtcggttttgagaacagagtgctgttttagagctggcagcagcatctcagccca

SEQ ID NO: 745271 - DNA, 83 bp, Homo sapiens
cgaccggttccaggtgcccaccgcgcactcggagatgcagccgctgggccgcgatgggcctcttggaacattggtgtgttcat

SEQ ID NO: 745272 - DNA, 74 bp, Homo sapiens
tgagatcttgcagcagcacaagctgaagatggagtgtggccatctggggccgtgtggtatttgccactcaggag

SEQ ID NO: 745273 - DNA, 97 bp, Homo sapiens
aacaggcctgcgccggcggcagagaggatatcttgggcgggggatgtgagcgctgagcccttggcagatgaccgcacctcgagcaggagtggggatg

SEQ ID NO: 745274 - DNA, 74 bp, Homo sapiens
ttcagccgaggccgccgccgcctctccttgctgcagccatggaccctgggcgctgcctatggcacagccaagag

SEQ ID NO: 745275 - DNA, 75 bp, Homo sapiens
cagtacattcttcgaagcacaggatgccctctcagctcttacccggctctacaaattactgaagtccactgatag

SEQ ID NO: 745276 - DNA, 100 bp, Homo sapiens
gcagtggcacctgcgcgaagctggccaaagcctgcccagacggctcacctgtgcgggatggaacaaaagctccttgctcggattgaacgtatggaaaggc

SEQ ID NO: 745277 - DNA, 100 bp, Homo sapiens
tcagcgccgcctccctgcttcttaacaggtgctggagaatctggtaaaagcaccattgtgaagcagatgaggatcctgcatgttaatgggtttaatggag

SEQ ID NO: 745278 - DNA, 109 bp, Homo sapiens
tagagcggagcctggcgggcgtgggaacccaggccccgccgaggcggccagacaatgcagatcttcgtgaagactctgactggtaagaccatcaccctcgaggttgagc

SEQ ID NO: 745279 - DNA, 89 bp, Homo sapiens
cctgcacatttgtgatgatagccagtcccgagagccagataaactcaagccatggagggattactgcattacatcaaccctgcacacgc

SEQ ID NO: 745280 - DNA, 74 bp, Homo sapiens
cttggactgagtcctgcaggacacagtgtactgctgctgctgcttggccaacgtttcactgcctggcatcgggg

SEQ ID NO: 745281 - DNA, 100 bp, Homo sapiens
tgatctggaaaaggagatgcagaaaatgaatccatacaagattgatataggcgcagtatattctcacagagactcagaattcatgattgaagaaatgcag

SEQ ID NO: 745282 - DNA, 74 bp, Homo sapiens
acaaatcacacgcataatggatgaaaggaaccgacaggaggaagaaggcacctacgatcaaactctggagttcc

SEQ ID NO: 745283 - DNA, 100 bp, Homo sapiens
caagaacattctacagtgggagtcacctgcttttgccaaagggaacctgactttcacagctcagtacctaagggctctctaaatacgtacagattctgcg

SEQ ID NO: 745284 - DNA, 75 bp, Homo sapiens
aaattacttgttcagctgaaagttgccactccccacctgtcctgcctttgtgtgcctctgtgtctttgctgggtg

SEQ ID NO: 745285 - DNA, 75 bp, Homo sapiens
caagcatgcagcttactgcttgaaagggggccagtctttcttcagcaggaaggattccatccgcaccatctatac

SEQ ID NO: 745286 - DNA, 100 bp, Homo sapiens
cccggggcccaggcgccgcggcccggcaccccgtggaagagccgcgcgtacagcccgggcatccaggggtgagacatggaatccattaaaattgcattat

SEQ ID NO: 745287 - DNA, 90 bp, Homo sapiens
tctacaccaccgccacactcatcatagccttcacctctgcagctgagagcagcaccaacaccacccaggatgagcagcgcaggtggccag

SEQ ID NO: 745288 - DNA, 100 bp, Homo sapiens
tctgccttcaagctggatttcctcccggacatgatggtcgagggccgcctgctcgttcctgacagaatgacatgtattcctctgagaaaccttggacagc

SEQ ID NO: 745289 - DNA, 75 bp, Homo sapiens
tgggtctgcacgccctttctgcactgaaagagccccagtgacccttcacctcgacgggatcgtgcaggtcctaaa

SEQ ID NO: 745290 - DNA, 75 bp, Homo sapiens
tcatcaaggctggaggccgctacctgggtggagccgccaccaaaatgcagattttcgtgaaaacccttacgggga

SEQ ID NO: 745291 - DNA, 100 bp, Homo sapiens
ggcaggaagacccttactactgtccaagggatcgctgatgattacgataaaaagaaactagtgaaggcgtttaagaaactttccagattgttacattgca

SEQ ID NO: 745292 - DNA, 90 bp, Homo sapiens
aaaagtgcatcatgaattccggagttgccatgaaatatggaaacgactcctcggccgagctgagtgagggaccttgctgcaagaaactgc

SEQ ID NO: 745293 - DNA, 100 bp, Homo sapiens
tgacagactgatgaaaaatagagctgatcaccgttccagccccaacgtagcaagtcaacctggactcctacacgcgggagcacaccaaggacaacctgca

SEQ ID NO: 745294 - DNA, 100 bp, Homo sapiens
ctacgccgaggacgagacagatgtggaggggacggtgaacggcgtcaccctcaccagctctgatccagacatttaatgtggatgcaccatgccagaccgt

SEQ ID NO: 745295 - DNA, 111 bp, Homo sapiens
tcttgtggatattatggctaataacacaacaagtttagggagtccatggccagaaaacttttgggctggtcctgccgctgctgtgttgagagagctgcgttgcgtttgttt

SEQ ID NO: 745296 - DNA, 50 bp, Homo sapiens
gatgacgacaatgatcctgagaatagtcaggatttgcatgaagatgtcga

SEQ ID NO: 745297 - DNA, 98 bp, Homo sapiens
gaggcgatccgctggcgctagtctgaccctccgccaggcaaaaggaagtgtcaaatcaacagtgccttgacatctttccacactgctttggaacttgc

SEQ ID NO: 745298 - DNA, 50 bp, Homo sapiens
tggaggagctgagcgctgatgagaaagctgacttcatgagaccgaggatc

SEQ ID NO: 745299 - DNA, 75 bp, Homo sapiens
tgtgttttggggttgccatcggcccgtagtatgtgaaaagatcataaaaggattcctctgtactagcacactccc

SEQ ID NO: 745300 - DNA, 100 bp, Homo sapiens
gtcatcaagaagaatgacgatgagaaatccaagaccagtgacttatcaattccatccaaatttagattattacaaagcacgaggagcagacctcatgaat

SEQ ID NO: 745301 - DNA, 82 bp, Homo sapiens
ccagctgctcctccgtcttctcaggagaccagctggtccaaccttcatcactggtccagctgtaataccagggtacttctcc

SEQ ID NO: 745302 - DNA, 75 bp, Homo sapiens
ctgcccgaagcctgacccgactgcctctctcagtgagatggagaacttaatgttctggatgatattttaactgaa

SEQ ID NO: 745303 - DNA, 80 bp, Homo sapiens
cgggacaacatgctgcggggcacaggtttttcgttggaatatacgttgcacatttatggcgattctgagtgtgagggcag

SEQ ID NO: 745304 - DNA, 100 bp, Homo sapiens
aagctacttccattccagaaagatggcatcatttttgccctcaaaagaaatggcagggtatgagtattatagaacaattagaccctgtatcttttagcaa

SEQ ID NO: 745305 - DNA, 100 bp, Homo sapiens
gcatctacagtgtcatgatccagaaggacactcccagttgccgggatgacctgctgagtgactacttccgaaaggccagcgatcccccagccatcggagg

SEQ ID NO: 745306 - DNA, 50 bp, Homo sapiens
aaataaactcctatttgtttatggcaaggccaacagagattttgagaaac

SEQ ID NO: 745307 - DNA, 100 bp, Homo sapiens
cggaggacggggccgggcgacctgggcaccagcaggacccgaggccaggagccaggggcccagaaggtgtcatggagaaactccagctgggcccagagat

SEQ ID NO: 745308 - DNA, 96 bp, Homo sapiens
ggccgctgtccaggagctctgctctcccctccaggacggcatcagaattaatgtaactacactgaaagatgatggggacatatctaaacagcaggt

SEQ ID NO: 745309 - DNA, 75 bp, Homo sapiens
cttcaggttatgtacgcttctacactgagaatacagattctgttcatcttgctctgaaattaaataattctgaac

SEQ ID NO: 745310 - DNA, 82 bp, Homo sapiens
tcagcatgaacttgggaatgttttcttaaaattcgaaagccatcaccaagtcgggcctccagcacctggccccccctccgcc

SEQ ID NO: 745311 - DNA, 101 bp, Homo sapiens
atgccaagaaaggagactaccagaaggcttatgaggatggctgcaagactgtcgacctaaagcctgactggggcaaggtagaacaatctccatctagcagc

SEQ ID NO: 745312 - DNA, 100 bp, Homo sapiens
tcagctggcatccctctggtacccacattgcagctggttccatagactacattagtgtgtttgatgtcaaatcagtgtgtgctgacttgataagaggcgc

SEQ ID NO: 745313 - DNA, 83 bp, Homo sapiens
cttgcagaaagaacctggaagacagaggctggagtgtaaggagaggatgaggcccgtgaaaaaggcactgaaacagctcgaca

SEQ ID NO: 745314 - DNA, 99 bp, Homo sapiens
aatttttgtagactttgccccattcctatctcgtacacttcttggcagtcatggacaagagctattgatagaagagtgtgaacatggctacgcctcttc

SEQ ID NO: 745315 - DNA, 80 bp, Homo sapiens
agggcaacttctgaagacttcaacaagcttctcttttaaaaggactaaaacatgctaacatagtgctacttcatgacatc

SEQ ID NO: 745316 - DNA, 87 bp, Homo sapiens
agttgtccaaaagtgaaattttacgaactcagatattcttactgattctccgggctctgcagctcttgacccggctggtattgtctc

SEQ ID NO: 745317 - DNA, 50 bp, Homo sapiens
ccgggccaagcagtgggccgagtgaagatagtgatccggggagacaggaa

SEQ ID NO: 745318 - DNA, 90 bp, Homo sapiens
cagatgactacccagggagaggaattacgggaacagaaagaaaagtccgaaagagctggccgtcgctttcgggttctctcatcgcttcgt

SEQ ID NO: 745319 - DNA, 88 bp, Homo sapiens
tcgggatctcggtgctgcagacggcgagacctcctgcacagcgccaagaagagggagggcgagcttacggtggcccagggccgtgtga

SEQ ID NO: 745320 - DNA, 75 bp, Homo sapiens
tggaaacatgagcattcagtttcttggtacagtggtgctgtacttctttgcagtatacaaggactagcagttaat

SEQ ID NO: 745321 - DNA, 75 bp, Homo sapiens
agatcaccgtgacatccgaggtgcctttctccaaaaggttgatccaaggattagttttggatcatggtgcccgtc

SEQ ID NO: 745322 - DNA, 98 bp, Homo sapiens
gcaacttgtgattggcggtgaccggatattcagttgcacatccccacatcaatgcactgccaatggtggatttgtttaaaaagagtcttctgttgatt

SEQ ID NO: 745323 - DNA, 75 bp, Homo sapiens
gcggacaggcgacagcgacctgcggcagaaatcttcccaaggctgcagacaccgacggatttgctttgggagcca

SEQ ID NO: 745324 - DNA, 75 bp, Homo sapiens
ccaatgtcctgcccctgtttctgtcctgtagcacttaggatcgggtgctaccaaggttttgcttttgcatggaaa

SEQ ID NO: 745325 - DNA, 80 bp, Homo sapiens
aaatcaccgaactgaagtttccatcaataaatcatgactgatcttgtagcgaggaattttgttgtcagagaataaaagga

SEQ ID NO: 745326 - DNA, 100 bp, Homo sapiens
cagaccataataaccatttgaccagccgagaactactgatgaagggcttctataagaggaccccagactacgttcagattcgagaatggaagaggacagg

SEQ ID NO: 745327 - DNA, 83 bp, Homo sapiens
cccctggtgtgcggctcagccgtgggctggtctgggctgccacgacaggcagcagcccggcccgtcggagcacatagagcgcc

SEQ ID NO: 745328 - DNA, 75 bp, Homo sapiens
gaactgttctcaggactcattattttaacatttgggagaaacacagccagaagagagctttgcttcccaaatttc

SEQ ID NO: 745329 - DNA, 101 bp, Homo sapiens
cccggccctgagcgcactctggagggattctggcatcagggaggctttcagccggagaagcgagtttcagctgggcctattccctggtggattccagtcaa

SEQ ID NO: 745330 - DNA, 100 bp, Homo sapiens
cttttcattcctagtcattctctgtaaaggcaggatgacgcaaaacacggtgattgtgaatggagttgctatggcctctaggccatcccagcccacccac

SEQ ID NO: 745331 - DNA, 100 bp, Homo sapiens
aagacaatgagaagtaatctagagcttggattccttagcaccaccacagctcagccagaacagaaggcctcgaatctcattggcacataccgccatgttg

SEQ ID NO: 745332 - DNA, 125 bp, Homo sapiens
gtggaaatgaacttcacaagttcctcatctgggacactgctggtcaggaacggaatccagcaagctaaagtgcaaattcttcccgaatgtgtgttgccttcaaccatgtctgcagttcaattaga

SEQ ID NO: 745333 - DNA, 75 bp, Homo sapiens
caggagtcctccacttgccactgggtggttcagaatctggggagccttatattccaggtgtctttttcagacagt

SEQ ID NO: 745334 - DNA, 82 bp, Homo sapiens
ggacaggatttctccgcctcagcccaacggggagtaagactttgaccccgacgcaggcttcagtgattgccgcggatcagaa

SEQ ID NO: 745335 - DNA, 50 bp, Homo sapiens
taaggaccagtacctgcccaggaaactgcgatatctggtttatgccatac

SEQ ID NO: 745336 - DNA, 75 bp, Homo sapiens
aggggctcatactcatcttatgggagagaatcaaacttacagggttgccaccagattgcttccaagtatgatcat

SEQ ID NO: 745337 - DNA, 50 bp, Homo sapiens
gtcggcgctcaccatccagttcatccaggattgaaagaaggtggcaagag

SEQ ID NO: 745338 - DNA, 99 bp, Homo sapiens
ccaattccggacacataacaagcagcagtgaggacaccaaagtaacaaatgtggcaattattttggatctatcacctgtcatcataactggcttctgct

SEQ ID NO: 745339 - DNA, 82 bp, Homo sapiens
taaagctgcgggatacaaagtcagcccaggcagacctccagattcgggaactggagcctctcctctgtcacagtgacaatcc

SEQ ID NO: 745340 - DNA, 74 bp, Homo sapiens
gtctctgttcgtcaggaacgtggccgacgacaccagaactgataaatttcaaacggaagagagtggcagcattt

SEQ ID NO: 745341 - DNA, 82 bp, Homo sapiens
tttttcaagaactgccgtcttctttgcctgcactaatggcatattctcaagatgcctacctgaaaggcaacgaagcttatag

SEQ ID NO: 745342 - DNA, 100 bp, Homo sapiens
aggacagtggccacgggatcctcatgttcactacccttcatgcatgaaagacaaagctactcagctcccctcccacccggtcactccgtccagcaagcac

SEQ ID NO: 745343 - DNA, 75 bp, Homo sapiens
cttagccctctacttttcaagacaccaagtgagaggccaaccagtttccagagtgtggattctttggcatgtatg

SEQ ID NO: 745344 - DNA, 100 bp, Homo sapiens
ggtttgggcgaccaggaggtgccggtggccgcgctcggacccggatgggaaggccattgtgactatgtggtgattacagttgtcttactactgagtttcc

SEQ ID NO: 745345 - DNA, 100 bp, Homo sapiens
gagtttgtacggaaagaagatatgacctatgcagttcgaaaactggataacactaagtttagatctcatgagattaaaagaccttactttcatgtgaaac

SEQ ID NO: 745346 - DNA, 82 bp, Homo sapiens
ccgctcctaagcctgcacagccgcggcggcagcagcagtgagagccgcttacaaacacgcagatggcaagaagattgatggc

SEQ ID NO: 745347 - DNA, 82 bp, Homo sapiens
gggaggtgttcgagaacgaccccgagacgcggaatcggacatgtccaaaccaccgtgttacgaagaggcggtgctgatggca

SEQ ID NO: 745348 - DNA, 76 bp, Homo sapiens
agattacttggggaaaactgtccaaggttatgtcctcacagttggattcatgagttttgcagtatgttacaagtat

SEQ ID NO: 745349 - DNA, 100 bp, Homo sapiens
ctcacagcctgaaaatgaaaaggaagcttcaggtggagacagcccgaagatcatggaagggaagtggttgctgtgtatgttactggtgcttggaactgct

SEQ ID NO: 745350 - DNA, 97 bp, Homo sapiens
caagaccctgtgcacctctcagcaggcctttgctggacagatgaagagtgacttgtttctggatgattctaagagatgaggccacactgcaaaaggg

SEQ ID NO: 745351 - DNA, 87 bp, Homo sapiens
aaggatccaacgatttgaaattccagaacttcagtctgccaaaaaacaggatcactactcttggaatcaaagataaatccaaatact

SEQ ID NO: 745352 - DNA, 83 bp, Homo sapiens
ctcacctgcgctgtgatgcctgcagagctgtggcttaccagggcttgagaccatctctacagccacagggcggaaactgctgg

SEQ ID NO: 745353 - DNA, 89 bp, Homo sapiens
gcgaccaggaggtgccggtggccgcgctcggacccgactctgctaacaccagatagtggaaagaaaccatgtgctgaaatgtttgacga

SEQ ID NO: 745354 - DNA, 100 bp, Homo sapiens
ctgttttagagctggcagcagcatctcagcccaagagaagctgagatctgtatctgtggacctgaatgttgatccctcgcttcagattgacatacctgat

SEQ ID NO: 745355 - DNA, 90 bp, Homo sapiens
ggaaaatgtgtgggaccaagcacttgctcttgtccttctggttggagtgggaaacgatgcaacacacatttgtcccatcagatgaaaaga

SEQ ID NO: 745356 - DNA, 128 bp, Homo sapiens
ggcttcccccctgtctccacaccgaagagccaagtcactggacaggaggtccacggagccctccgtgacggatcccaaaatggctgggcgaaaacttgctctaaaaaccattgactgggtagcttttg

SEQ ID NO: 745357 - DNA, 75 bp, Homo sapiens
ctccttcggcagtccacccaccgccgccgcctcccaggttaaaaataagaagttggttgagctgctgagaaggaa

SEQ ID NO: 745358 - DNA, 101 bp, Homo sapiens
ggcggatgccctgcagtacctgcagaaggtctctggagacatcttcagcagatgtggacgagtgctcactagcagaaaaaacctgtgtgaggaaaaacgaa

SEQ ID NO: 745359 - DNA, 98 bp, Homo sapiens
tgagggagagcagcggcggcggggagcgaccgggagcggcggcagcggcggcgcggaggcggctgaggtgcgagccgagacccccctgaccttagccg

SEQ ID NO: 745360 - DNA, 75 bp, Homo sapiens
tctgcaatgtcaccttgaactctgcacagcaagcccaggctcattatcagaaactccccaacttttaaatcattt

SEQ ID NO: 745361 - DNA, 100 bp, Homo sapiens
acagctggagtataaactggtagctggagaacatggtttaattattcgagtgaaaggatttaaccacaaactacctccattcaacaaagacagttatgga

SEQ ID NO: 745362 - DNA, 101 bp, Homo sapiens
ccagaaagcggcttatcgaacagagccgggagttcaagaagaacactccagaggtctgccatcatggatgttctcgcagaagcaaatggcacctttgcctt

SEQ ID NO: 745363 - DNA, 82 bp, Homo sapiens
ccgggccttgaagcgcaccgcagagagagagctgctgatgggagtgcatccgccccaacccttttccccctcgtctcctgtg

SEQ ID NO: 745364 - DNA, 128 bp, Homo sapiens
ggagtggagcttggtttcgggatctcggtgctgcagacggcgagacctcctgcacagtgtaaacaggaacatcgataagtagtgtaaaaacttgcacaatgaaatccgaagccaaggatggagaggag

SEQ ID NO: 745365 - DNA, 98 bp, Homo sapiens
ctggaatgaagatatagaagcatttgaaatgatggagaaggatgagctatgacttgctaaacaatctgttgattcttggtgccaccattgagaactcc

SEQ ID NO: 745366 - DNA, 75 bp, Homo sapiens
ggagcctatttgttcatcatttctcgtgttcaaggttttgggcggaaagacgtagttgaatatttgcttcagaat

SEQ ID NO: 745367 - DNA, 75 bp, Homo sapiens
cagctaacatgttgtacctggaaaacaatgcccagactcaatttagtgagttacttcctccactgaagtcttgaa

SEQ ID NO: 745368 - DNA, 75 bp, Homo sapiens
cttcggcctagtgcgccagggcctcaagtgcgatgggagtgcatccgccccaacccttttccccctcgtctcctg

SEQ ID NO: 745369 - DNA, 123 bp, Homo sapiens
ggaagatggcgctggccggatggaaatcctaatgacagtctccaaattcgcctccatctgtaccatggatctagttcaggttcaaaattaaaagatcctgaactgagtttaaaaggcacccag

SEQ ID NO: 745370 - DNA, 100 bp, Homo sapiens
ctcgtgacttgaatcggatggaggtgattgatatgcccgagcacaaccctggcaatttgggaggaacaatgagactgggaataagaagaactgttttcaa

SEQ ID NO: 745371 - DNA, 74 bp, Homo sapiens
gaacggctgaaggccctacgggagaaaaccgggcgcaaggaatcccagtcagaagttccagcctgccactgttc

SEQ ID NO: 745372 - DNA, 75 bp, Homo sapiens
cacatagacatttacgcggatgtcggcgaagagttcaaccagctatttgcatgcaaagaacatcatccatagaga

SEQ ID NO: 745373 - DNA, 75 bp, Homo sapiens
cttgaaggttaaaccactagcccatttcacaggacagtcattttgtttactcattcagccctgttgcaggtccca

SEQ ID NO: 745374 - DNA, 90 bp, Homo sapiens
tcagcttcccgagtaactggggctacaggtaaagatgatgattcttttgatcggaaatcagtgtaccgaggctcgctgacacagagaaac

SEQ ID NO: 745375 - DNA, 50 bp, Homo sapiens
cttgctcgggcttttgttcccagaaactgcagtacagcaatggcgatcag

SEQ ID NO: 745376 - DNA, 100 bp, Homo sapiens
gtggccttttgtccctttgcctcatcccaggttgccttggaaaatgccaacgccgtgtctgaagactgaaactgttgaggagcccatggaggaagaagaa

SEQ ID NO: 745377 - DNA, 51 bp, Homo sapiens
caaagttgaaaacaaagtgctgtttgcagaaaaaacttcagcatgtgccag

SEQ ID NO: 745378 - DNA, 98 bp, Homo sapiens
tttaatccagatggatatttttgggctataattcacttactctgtgtaggcatggattccgtgaaggaacaacacctaaacccaagagggcagctgtt

SEQ ID NO: 745379 - DNA, 88 bp, Homo sapiens
gattcgcagtggtcgcttcttctccttgttaactagtggagctgtgtgggttcagtttaatgatgggtcccagttggttgtgcaggca

SEQ ID NO: 745380 - DNA, 90 bp, Homo sapiens
gccatagctcagcctagcgccgccaaggccgacggccctcagcctctgccatggacttcgaggacgaaatctagttcatatgattgaaca

SEQ ID NO: 745381 - DNA, 90 bp, Homo sapiens
acttcgtatgcagggtacattgaagaccttaagaagtttctaaaacttgtatatgaacacagatcaagattagagaaatccttgcaaaaa

SEQ ID NO: 745382 - DNA, 100 bp, Homo sapiens
cccagctgggtcacccgcactgagtcaacagactgagcgcgtccaggcctgacagctctgcggctcgggccctgagatgtgagaagggtgttatgtctct

SEQ ID NO: 745383 - DNA, 90 bp, Homo sapiens
gcagtggcagaagattttaattagaatcggcaatgcctggcccactcctgagagctctagttttctagttttccatttccagattgcgcc

SEQ ID NO: 745384 - DNA, 75 bp, Homo sapiens
gtggacaatttaaccaagaaaaattaccgagccagccagcaggaaatacagcatcaaattgacttctttaaatga

SEQ ID NO: 745385 - DNA, 74 bp, Homo sapiens
atgagagtcaccatgctcaaagtgaatatattaagcctttagaagaagccacactctctgaattaaaaactgtc

SEQ ID NO: 745386 - DNA, 99 bp, Homo sapiens
cgcctgcattacacctggcgggagctctggtcaggtatccgttacagcactgatgtgagtgtagatgaagtaaaagctttggcttctctgatgacatac

SEQ ID NO: 745387 - DNA, 89 bp, Homo sapiens
ctgctggctgcccttgtctcctttacgaaggggaggaccaggctggcgatgaagatgaagatgatgaatgggatgactgagtggctgag

SEQ ID NO: 745388 - DNA, 100 bp, Homo sapiens
tctgattttaaaaacttcggatgagaaagaaagtaaaagatgtcattgctttggagtttaacccttctgccaatccagaggcaagcacaatattccagag

SEQ ID NO: 745389 - DNA, 97 bp, Homo sapiens
tggtcacggccgcaggtgaccccttagcccagctccagtgggcgggtggcaggtacatgttgggacttgcagcagttccggcggttatacagttttt

SEQ ID NO: 745390 - DNA, 80 bp, Homo sapiens
gatgggatctttccggatcaatccagatggcagccagtcagtggtggaggtgctgatattgatgcgttgtgtgttgcacc

SEQ ID NO: 745391 - DNA, 100 bp, Homo sapiens
ctaccttctcccatcaccccagggtgtacaactatgagcctttgacacagctcaagaatgtcagagcaaattactatggaaaatacattgctctaagagg

SEQ ID NO: 745392 - DNA, 100 bp, Homo sapiens
aggccacccacggcacccccgcagcgctgaggacgctccggagcccggcgaccgcggtaccgcgcgccactaacaggtatcagtttttggaagaagcttt

SEQ ID NO: 745393 - DNA, 100 bp, Homo sapiens
ttggatcactgaaggaagtaatgacgtgtgggaaccgctgagcagaacaccctcccccagcgggaaatccgggacacgcaggagcctcagtgaatccgac

SEQ ID NO: 745394 - DNA, 103 bp, Homo sapiens
tgggaacattatcacaaagctatcatcctgccaaactccaggctcagatgtcacaggtacttccgaagatcccagtttacagcgatcagtttcggttgcaacg

SEQ ID NO: 745395 - DNA, 83 bp, Homo sapiens
ctggaggaatgtcagcaccagaccaactatcatggtgaacttacttcagattgtgcgggaccactgggttcatgttcttgtcc

SEQ ID NO: 745396 - DNA, 90 bp, Homo sapiens
gcttgttctgtatccagagggcattcagactaaaatctacaaccttctcattcagacacacggtgccttagctggaccaattattgtgga

SEQ ID NO: 745397 - DNA, 155 bp, Homo sapiens
ctgccccccgcccccaagccgcggccatggacctggcggatccggcctgccctggcccagctcaacacctgatttcgatgagagtccctacactaaatccgccagccagacaaagccgcctgatggagcgttggctgtgaggagacagagcatcc

SEQ ID NO: 745398 - DNA, 100 bp, Homo sapiens
ctcctccatggctgaccgctccagccgcctgctggagagcctggaccagctggagctcaggcgaagagcctttctcctatggctatggaggcactgggaa

SEQ ID NO: 745399 - DNA, 82 bp, Homo sapiens
ccccaagcaacttagaatgcagcttcagcagaggctgcagggccagcaggatattaatgcacacgcctgtgttactggtaaa

SEQ ID NO: 745400 - DNA, 75 bp, Homo sapiens
catggggaccctcttcacattcaggtaaacgcaaagcactgaagttgaattttgcaaatccacctttcaaatcta

SEQ ID NO: 745401 - DNA, 101 bp, Homo sapiens
gacgcaggactacgagtgcaggagccataatgtcgacctgccggagtcgaggattccagggtcgaacactcgggccgcccaataactccagtatacacggt

SEQ ID NO: 745402 - DNA, 116 bp, Homo sapiens
ggaaatgaattttgaaacttcacggtgtgccaccctacagtactgccctgacccttacatccagcggattatttatgaggatggcctgtgcaaaaagacacccagagatttcatgc

SEQ ID NO: 745403 - DNA, 75 bp, Homo sapiens
cccccattcattctggattggtggatctgaagtacaaaatattttccagattactcagaagtatcaacttcatga

SEQ ID NO: 745404 - DNA, 95 bp, Homo sapiens
aaggctattccatggaatatttgtcccggcactggctcttcagtcccttcaagttcaagaacatgaagactcgggtgactcagaagtggagaatg

SEQ ID NO: 745405 - DNA, 49 bp, Homo sapiens
tcttgggcagcatgcagtgctttctggagcttactcacatagcatattg

SEQ ID NO: 745406 - DNA, 82 bp, Homo sapiens
aaacttatcccagagctttgctacattggaacagggccgcctctcaaggttgcccccaagtttcctggcagtgtgtgatact

SEQ ID NO: 745407 - DNA, 100 bp, Homo sapiens
agagccctgcaatttgaagatacatgagacagcagccaaacccccagtggttagcaggaagaagatgagccttaagtctgaacgccgaggaattcatgtg

SEQ ID NO: 745408 - DNA, 95 bp, Homo sapiens
ggggatagtggtgtggatcagttggtagaaataatcaagcgagaactttcaaaggcttccaaatctgatgctacttctggaatcctcaattcaac

SEQ ID NO: 745409 - DNA, 100 bp, Homo sapiens
acgcggagggctcggtcaacggcttcatcagcaccttgggatgcagaatcctgatacactatcagcaatgtcaaaccctagagcaatgcaggccttgtta

SEQ ID NO: 745410 - DNA, 101 bp, Homo sapiens
gagtgaaggtgcagtgctggcgtcatcagtgagttctgcctcagtcagctcccaagtgaggacgcagtcacctttgaagactccggaggctgagttgctgt

SEQ ID NO: 745411 - DNA, 83 bp, Homo sapiens
ggtttttctgccacttttgcaagggcgaggtcagccccaaactaccgcctgattacatcaaccccagagccgtgcagctgggc

SEQ ID NO: 745412 - DNA, 74 bp, Homo sapiens
gaaatgaacctgcccacggtgtccgcgctcagggatgtgggaatgagtgacacagcaatgacatctttcctcgg

SEQ ID NO: 745413 - DNA, 98 bp, Homo sapiens
gccggtggaggaatttgtggctggctggatctctggtgagacatttttcttccttctgtcacatcacacccaatggacggcggacccagccgagaaga

SEQ ID NO: 745414 - DNA, 83 bp, Homo sapiens
ctgagctgcgaggaaaatggcggcgggaggaaaacgtcaattatgacagcaggtaattttatcggaagtgtttataactatat

SEQ ID NO: 745415 - DNA, 75 bp, Homo sapiens
agaagtgtatttagcatctctaggtacaggtttgcagattccgccagcagcacagcaagctctacagatgagtgg

SEQ ID NO: 745416 - DNA, 87 bp, Homo sapiens
accgccagatcaacctggagctctacgcctcctacgtttacctgtccatgaatgtaaccggaagactcctggtgggccttcgatggt

SEQ ID NO: 745417 - DNA, 73 bp, Homo sapiens
cgtgctgctggggcctcccggggccggtaaagggacccagtggaccagcatgccacggacgagaagtataact

SEQ ID NO: 745418 - DNA, 100 bp, Homo sapiens
gcttcggcattagagaaagagattggtccagaacagtttccggtcaatgagcactattttggattagtcaattggagttggatcacaggattgattttga

SEQ ID NO: 745419 - DNA, 50 bp, Homo sapiens
gtcaccaacagtacccatcaaaaatctcctgcaaagaagctgagccatgc

SEQ ID NO: 745420 - DNA, 100 bp, Homo sapiens
catctcacacctgatcaagatccgcctcaagcccaaggtcctcctcaaccacttcatgctgtgcatcaggccaccagcccctcgggttccaagatgcagc

SEQ ID NO: 745421 - DNA, 75 bp, Homo sapiens
cattggacacagaatccgagtggtgtgatccctcacatccacaaatctctgattggaaagaagggacagcagaaa

SEQ ID NO: 745422 - DNA, 90 bp, Homo sapiens
tgatggtgaacatgccaggagagcaatgcaaaaggcactgacccttgacctccggtggctcccccatctctcaggcgcgatggctacggg

SEQ ID NO: 745423 - DNA, 98 bp, Homo sapiens
cagcctcatctgtttgcggatcagaacccgagctgtgcttgtggctgcggctgctaactggctgcgcacaggaccagctccagcagaagatcatgtgc

SEQ ID NO: 745424 - DNA, 100 bp, Homo sapiens
ggatgtggaggggaatagactccatctatccatatgaggtcacagaattttccacactccttgacagaggtgcttaacccttatccatcagcattctcag

SEQ ID NO: 745425 - DNA, 50 bp, Homo sapiens
caaacatcttccaccacagcttagagagttttccgtctgatgaaggttgg

SEQ ID NO: 745426 - DNA, 100 bp, Homo sapiens
gttgatctgaatttgattgttgccctcatccgatacattgttttggaagaagagatggctgctcctgtcccgtgggcctgctgtgctgtgcttgccgccg

SEQ ID NO: 745427 - DNA, 90 bp, Homo sapiens
gccgctcccaagatgtcgcagacggccatgtccgaaacctacggtgtggatgaggtcaccattgtcaacattttgaccaaccgcagcaat

SEQ ID NO: 745428 - DNA, 98 bp, Homo sapiens
tcgccatcttggatccgcgggacaagaaaattcatgcgggggcagcactgaaatacttaccaacgatcgtcaacgatgtgaaattggtgtttgatccc

SEQ ID NO: 745429 - DNA, 100 bp, Homo sapiens
gatgttcgtcaaagccggccagagccaagacttggctctttgtgacagctaaaggtggttatttaagtatttttaaaaattacatgaatatccaggtgaa

SEQ ID NO: 745430 - DNA, 90 bp, Homo sapiens
aacttcaagtagtggaaggagtacagggaagtctataagctttgcaacagaattacagagtatgatattggccggtcgactgaaagcccc

SEQ ID NO: 745431 - DNA, 74 bp, Homo sapiens
aggaactctacaacccaatccagcaggacccagtgctccataaaggataatagtttccagtacactatccctca

SEQ ID NO: 745432 - DNA, 96 bp, Homo sapiens
ggatcccgatgtgaacatgctgcacgtgtttgttctgggcgaatggcagcccatcgaggacttggatgttgtgggtgatggtatgcagtgtcctcc

SEQ ID NO: 745433 - DNA, 100 bp, Homo sapiens
cgcagggggacggggaccagcagctgtcgccgccgctctcaggaggtgtcattaacttgtcagtacctatagttctgactgcgactcatgaagataaaga

SEQ ID NO: 745434 - DNA, 51 bp, Homo sapiens
caaatcaaattagtggttttgcgctggagagcgaggtggcttcaataagcc

SEQ ID NO: 745435 - DNA, 100 bp, Homo sapiens
tctggtagtggtgaaggtggaaaaggctataccaaagaccaagtagatggagttctcagggtaactaaggaagtggatgctacatctaaagaggccaaat

SEQ ID NO: 745436 - DNA, 100 bp, Homo sapiens
tggaaacaggaggaagaattcccaagccaaagctttccagatgatctcaatgccacccaccaacactgtgttttggccggttcacaacctcggtttagtt

SEQ ID NO: 745437 - DNA, 75 bp, Homo sapiens
cttctccagaaaaaactacactgtctactgccaagacatatctgaagagatggattaagaatgctttggattaag

SEQ ID NO: 745438 - DNA, 96 bp, Homo sapiens
agacaagttcatccccattttccaaggggacgacagcgtcgttattgggtcctggtcagctgagtggaaatagaaggatttctgctgccatcatct

SEQ ID NO: 745439 - DNA, 88 bp, Homo sapiens
tcacccagcatttcatccctcgtcgaaaggattggattggcatctttagagccatgatcatagctttcacgtcggacatgatcccccg

SEQ ID NO: 745440 - DNA, 75 bp, Homo sapiens
aggacactctggacttcagccaacagcggagctccctgggtcctcagcagtgaggctggcctccctgcgtgacct

SEQ ID NO: 745441 - DNA, 50 bp, Homo sapiens
gagcttctctccagagtagaaagggccacgcctggctgaaagatgacgaa

SEQ ID NO: 745442 - DNA, 73 bp, Homo sapiens
tggaagacacaaaagatggcatctggctggttcagtgtctcagtttgaaactgaattctacatcagtggactt

SEQ ID NO: 745443 - DNA, 85 bp, Homo sapiens
ccctcggatacgatagaaaatgtaaaggccaagatccaggataaggaagatgatgaggagtctgatgaggaagctgtgaagaaaa

SEQ ID NO: 745444 - DNA, 97 bp, Homo sapiens
cacaccatgccgactgtcagcgtgaagcgtgatctgctcttccaagccctgggccgcacctacaacaactgatcaatactgggttccatgtttacat

SEQ ID NO: 745445 - DNA, 95 bp, Homo sapiens
ataccttaatactgtggaggcttatgatccccagacaaatgagtggacccagcatgcatatgcgctagaacttctatttgatcagttgcatgaag

SEQ ID NO: 745446 - DNA, 97 bp, Homo sapiens
gcaaagctcaagatggcggacaaaacgccaggcggatctcagaaggccagttcaaaggtttgcccaaaggaccagccaaaacctcacctcaagccac

SEQ ID NO: 745447 - DNA, 100 bp, Homo sapiens
gaagtattaattcttccactgatatctcaaaaggtgatctggacaaaggaacaggtatctcaggtatggagaatacagaatcccaaacaaggcaatgaac

SEQ ID NO: 745448 - DNA, 100 bp, Homo sapiens
ctaatgcaggatattctgcagccaattcaaattcaattttcgccaactctagtggatgctgagaacttgctggagtcacagccactgggatcctttctca

SEQ ID NO: 745449 - DNA, 87 bp, Homo sapiens
cggcaccaaggcccccaagccctccttcgtgtcgtacgtacgccctgagtggattctgctgcgaaccggagaccatggccaaaccag

SEQ ID NO: 745450 - DNA, 98 bp, Homo sapiens
cgcggggtgaaggcgctcatggacggaagacccctggctctataagctgaattatggcagcccagtcaagatggccctaatggcttccctggatgcag

SEQ ID NO: 745451 - DNA, 100 bp, Homo sapiens
cagaaagcggtagcatctctcaaggcaaatggcgtgcaggcacagatggctaaggttcttgatcaatatgaacgagaaggatttaacttcctagccaagg

SEQ ID NO: 745452 - DNA, 75 bp, Homo sapiens
cgggtctcctgttccaactccacctagagctgtccgaggttctgtgggccatggtgatgcgcataggcctgggcc

SEQ ID NO: 745453 - DNA, 75 bp, Homo sapiens
tgaaactcatctgtacctcacttagaaaggaattactctcacttccaccacccgatgtatggaaactgctatact

SEQ ID NO: 745454 - DNA, 50 bp, Homo sapiens
tttcggccggaaccgccatcttccagggcctacttggaagtgcaccagca

SEQ ID NO: 745455 - DNA, 97 bp, Homo sapiens
cgccggccggctgcgaagacgcggtgggccgcccctccgatgagctctgtgaaaatgttacagcctcgtctcagtagtatcctgttcaagctcacat

SEQ ID NO: 745456 - DNA, 75 bp, Homo sapiens
ttttaccgatgctttaacatacagccactagactgtgatcaaccactctatgattgtcctatgtgtgggctcata

SEQ ID NO: 745457 - DNA, 100 bp, Homo sapiens
tggaatccaatcctctgcttccaggacaagtcctgcgcttggggatcctctgtacgcccgttcactgtagaaaacccctttggtgaaacatttggaaaaa

SEQ ID NO: 745458 - DNA, 75 bp, Homo sapiens
gtgagctcttcaccctggagggcaggagacagcagtccaggattacgtgtgccctctgcaaggaagccacgccct

SEQ ID NO: 745459 - DNA, 99 bp, Homo sapiens
ttccacaccatgtcggacggcgagggcccctccgccgggaacgctgtgaggagctccgtgttgaattgttatctatccatcagaagaaggtgtgtgagg

SEQ ID NO: 745460 - DNA, 109 bp, Homo sapiens
agaggaccctgtacagggacgtgatgctggagacctacagcagcctggtatcattggctattgacctgaaaagtggttctggaaaagtgtaccaaggccctgcaaaagg

SEQ ID NO: 745461 - DNA, 100 bp, Homo sapiens
cgaagaactcgagcgacagagacaagctgagcttgccgcacaaaaagctagagagttggttgaatctggcgatgtggaacccatggatatggagggctga

SEQ ID NO: 745462 - DNA, 100 bp, Homo sapiens
tgctgttcattttgaggaggtggccaaatcatgttgtgaagaacaaaacaaagtcaactgccttcaaacaaggtgcctaagtgtctagagagctgagtgg

SEQ ID NO: 745463 - DNA, 100 bp, Homo sapiens
ctgtccccagaggactacacgctcaaggggcctcatccacatgctcacccacttggccgaggctctgcaccaggcccggctgctggccctcctggtcatc

SEQ ID NO: 745464 - DNA, 74 bp, Homo sapiens
gaagctgagcgctgagaccaagggctaaagctgggagattcatcccaccggaaaaatgtttattctttcagatg

SEQ ID NO: 745465 - DNA, 49 bp, Homo sapiens
ctcaacaaccatttctaagtgtcattgaaattatgagactatcattcaa

SEQ ID NO: 745466 - DNA, 76 bp, Homo sapiens
acagctgcagtctaatagtaacacagagattgaccctcttgctggaatgacatctcttagtataggtggttcagct

SEQ ID NO: 745467 - DNA, 100 bp, Homo sapiens
cacggagcagcactcttcaccctgcacagccttgttaggaccttgcagatgcttcgggagaacctggaggaggaggccatcatcatgaaggacgtgcccg

SEQ ID NO: 745468 - DNA, 75 bp, Homo sapiens
tccagccgcaatgccattaccagttcctacagctccactcgaggcatctcacagaagtctgggccaacggtcaca

SEQ ID NO: 745469 - DNA, 51 bp, Homo sapiens
gctgaggaccgtgtggactttccaatgttttcagttgcaccaagcttagcc

SEQ ID NO: 745470 - DNA, 100 bp, Homo sapiens
ctctctttcaggccatcctggataacccggtggtgcagctgggcctgaccaacccgaaaacattgctagctgtcgcctggttgggcccggaaatgggacg

SEQ ID NO: 745471 - DNA, 100 bp, Homo sapiens
caagcatcctaagactccacttcctccagaattagctgatgttcaggcataaggttgtttacaggtgattctcctaggtcactggctgctgacaacctgg

SEQ ID NO: 745472 - DNA, 90 bp, Homo sapiens
ttttttctggatatcacattttcatcagattatccatttaagccaccaaaggtacatcaggaacgtctctatcaagaatacaatttcagc

SEQ ID NO: 745473 - DNA, 100 bp, Homo sapiens
gaaagagcccgagaactgctggtatcatacgaagaggagcagtttacggtccggcgccagctgccagtcgaggaaccgaacccagccaaaaggcttctct

SEQ ID NO: 745474 - DNA, 103 bp, Homo sapiens
atctgcacttcgcattttggcattgacatttaattttagggtcctttatatagaagggagagtaggatcttctgcaggacaactggtccttatcacagccagg

SEQ ID NO: 745475 - DNA, 100 bp, Homo sapiens
gcagcccccagtcgtcgtcacacacggtgccccacaggccactgtgcaggatctccactcggccctgacacaggtgtcctgtcagaagaacagatccgcc

SEQ ID NO: 745476 - DNA, 99 bp, Homo sapiens
atgtatgacgagattattgagttaaagaaggccaagactaaggggctgcagagcggggtggacattggcgtcaagtactcggagaagcaggagcggaat

SEQ ID NO: 745477 - DNA, 106 bp, Homo sapiens
attgaagaacaccttcagttacgacaagaagaaaaacggcaacgtgtaatcagaaggcacagattagaggaaggaagagcttcaaggttactgactttttatgatg

SEQ ID NO: 745478 - DNA, 75 bp, Homo sapiens
cggcaaggaagcggagggggccggagaagagagctctggggtcgacacgctgacatgggttttgccagattattc

SEQ ID NO: 745479 - DNA, 137 bp, Homo sapiens
catgaatactgtgacactgaccaccaggccaacttaacatcagcagatatcctgtctcagatgaagaggttggagatgcttgatgctgcaaagaacaagatgcgagtgaagatcagctatctaatgattgccctgac

SEQ ID NO: 745480 - DNA, 100 bp, Homo sapiens
gatcgaaatgtccatgagaaaaagcttggagataaagttgctttttactggtacagagaactacaacttagtacagaaagcaaagtaacagaatttctcc

SEQ ID NO: 745481 - DNA, 51 bp, Homo sapiens
gctcagcggatggtctgggtggacctggagtattctgacaagtccctgtac

SEQ ID NO: 745482 - DNA, 100 bp, Homo sapiens
aatacaaatgaaccaagcacacgtgtccgaatgtacattgaagatgtcagtttctacatgtgggaagtagacattgaaggctttatggtttacagacaag

SEQ ID NO: 745483 - DNA, 71 bp, Homo sapiens
cacaaaacagcagatttcccaagagcagcggaaaatgatccagtcacaggaagaggagttgtacgcatgtc

SEQ ID NO: 745484 - DNA, 83 bp, Homo sapiens
ctctgggatccccgccgctctgtctacaacccgaggtctgcagggaactggccaggcaagggggcaggcccgtttctcctggt

SEQ ID NO: 745485 - DNA, 75 bp, Homo sapiens
cttgcacgaaagctttcctaggccaaaaagaggttgtctaccttcataacaacaatatctctgtagttggatcaa

SEQ ID NO: 745486 - DNA, 60 bp, Homo sapiens
cggcacgatgccctttgacttcaggagcagtgtatgtatgaggaagtgcccacaggagtg

SEQ ID NO: 745487 - DNA, 100 bp, Homo sapiens
tggcattgacctctcagatcccaaacaactggcagaatttgctagggtcaacagttgtcaccgacagatggctgagattgctgtgaatgccgtcctcact

SEQ ID NO: 745488 - DNA, 100 bp, Homo sapiens
tttaaccccaaaatcagtgattctacatctcaagctcatattttgaagtgtttacgggctgaccccgcactacatctacccaccagccatcgtgcagccc

SEQ ID NO: 745489 - DNA, 96 bp, Homo sapiens
ggaatgcacatctgtgaagatgctgtaaaaagattgaaagctgaaattgaacttgaatgtggaacccagctttgtcttctgtttccccccgatgaa

SEQ ID NO: 745490 - DNA, 82 bp, Homo sapiens
gtggcttatgagtacctttgtcatttggaagaagcgaagagacccttgctccatcacccaggccagagtgtggtggtgcgaa

SEQ ID NO: 745491 - DNA, 105 bp, Homo sapiens
ccgagatgtctcgctccgtggccttagctgtgctcgcgctactctctctttctggcctggaggctatccagcgtccgcgggagagctgtggggcttggtgagtgt

SEQ ID NO: 745492 - DNA, 100 bp, Homo sapiens
aggaggactttctgtttgtttgtcacctttgacctcttattcgtaacattactgtggataatagagttaaatgatgctcgacatgcagcagaaggagaaa

SEQ ID NO: 745493 - DNA, 75 bp, Homo sapiens
gcaaatcgagtgcacctgggatgacaaaaagtcatagtggtgtgacaatgtgaagagtggccagattcgaaatct

SEQ ID NO: 745494 - DNA, 75 bp, Homo sapiens
tatgtctgcggaagtccccgaggcagcctccgcggaggagcagaaggttttataggatcacattgacaaaagtac

SEQ ID NO: 745495 - DNA, 97 bp, Homo sapiens
gatggcctactggggataacattcatgcagaacatcaggatatgatggatgatatctgtcaggagcaatttctagagctgtcctacttgaatggagt

SEQ ID NO: 745496 - DNA, 83 bp, Homo sapiens
ttaaggattccaagtaactcttatttgaacactgattccccatcctatccagagattagttttagttgcagcatggaacaatt

SEQ ID NO: 745497 - DNA, 122 bp, Homo sapiens
gccagcgccagctgcagccctggccgcgcactcgcctcagctgagcctggctctagaggacaaaatcccagtccttggcacaaactcaggaaatggaagccggagtctgttttttgtggggc

SEQ ID NO: 745498 - DNA, 75 bp, Homo sapiens
cagcgttctgcgtcatgggggagtgctgatcaactaaaagagcctcacgaaagattttacttgtagatcaacttt

SEQ ID NO: 745499 - DNA, 83 bp, Homo sapiens
ctttagcccatcctgtctgctagtgccatctgaaatccttcctggaacttgctatcatggtgaacttacttcagattgtgcgg

SEQ ID NO: 745500 - DNA, 48 bp, Homo sapiens
gaaaacaacttcgagggcagaatgtccaacatcacagtcacatacaga

SEQ ID NO: 745501 - DNA, 89 bp, Homo sapiens
tcacctttgaaatcgccaaataaggtgacgcatccaaagaagacattgacactgctatgaaattaggagccggttaccccatgggccca

SEQ ID NO: 745502 - DNA, 75 bp, Homo sapiens
gcgggagatgagggaagatgagaagcccctggtgctggagatgctgaaggtaagaacaagagagttggaaagcag

SEQ ID NO: 745503 - DNA, 100 bp, Homo sapiens
gaggcgttcatcgaggagggcacattccttttcacctcagagtcggtcggggaaggccacccagcaaaatgatgcttcaacacccaggccaggtctctgc

SEQ ID NO: 745504 - DNA, 75 bp, Homo sapiens
ggactggggccacgtggagctgctggagggattatatctgtccaagatgcgagtctggttttatcgaggagcttc

SEQ ID NO: 745505 - DNA, 100 bp, Homo sapiens
ttcagctcaggaccaggcaccttctgtggaagttaactgcctgtatccatggatcagctgctcttctatacccaatgtattggcaacacatatacatccc

SEQ ID NO: 745506 - DNA, 99 bp, Homo sapiens
cagagttctagggttctaagtgatgtccaggaaggaggaggaataatatttatggagcatatattatggaacacagccctcgggaccaaggatcacgtc

SEQ ID NO: 745507 - DNA, 100 bp, Homo sapiens
ggttggtgtgattagcttcgcagtctggaaagctttaggagttcacagtgtgcctgggagaacagcaggcagctgtgcatggtgggaagagctccgccca

SEQ ID NO: 745508 - DNA, 98 bp, Homo sapiens
ctcggggcaacccagacgtgcaacaaagtgcgatggttgcctttttcctctacaatggggtgtcactaggtcaatttgtactgcaggtaactcatcca

SEQ ID NO: 745509 - DNA, 83 bp, Homo sapiens
ccggcatcgtctttccgtcctctgaggcgacggccgcggctgcacaggccaagtcctgtatctgccatgtctgtggcgtccac

SEQ ID NO: 745510 - DNA, 82 bp, Homo sapiens
actgactttcagctatggaatcgtttttcagaagaagtgaagtcaagatgaagaaccatttgcttttctggggagtcctggc

SEQ ID NO: 745511 - DNA, 100 bp, Homo sapiens
ggcagcccaaggaaggccaacgtggaggcctcacgcagctccacagacagccccagctcggtgttcctcaggaagaaatgcagagtaacgtggaagtggt

SEQ ID NO: 745512 - DNA, 83 bp, Homo sapiens
aagtcgtcttccacttgcacgaaagctttcctaggccaaaaagagagttcaagctgaagaagatgtggaaaagtcccaatgga

SEQ ID NO: 745513 - DNA, 50 bp, Homo sapiens
ccatgaataatcaactttcaggcttaagaaagccatttaagaagttcctg

SEQ ID NO: 745514 - DNA, 80 bp, Homo sapiens
tcacctgtttcacaaactcttggcaggtaaagatgagcccagcagctacacatgtacaacttgcaaacagccattcacca

SEQ ID NO: 745515 - DNA, 101 bp, Homo sapiens
cgtagcctcggggaaggagcaggatttagaggaccactagttggaccccatcctcgtgctggaggaacagtatctggagtccatctttcaccatcttctcc

SEQ ID NO: 745516 - DNA, 99 bp, Homo sapiens
ctttgccatcactgccattaagggcttcgtgctgtgtcactccatcgctgggggtacgggttctggcctgggctcctacctcctggagcgactgaatga

SEQ ID NO: 745517 - DNA, 100 bp, Homo sapiens
gaagccctacgagattcacaccgtcttcggtctcctggggtcggcgccgagtgggaggatggcggaaagagtcacaccccaaagcctctttattcttttc

SEQ ID NO: 745518 - DNA, 75 bp, Homo sapiens
cattggaaagaagcgaccgcggcggctggtcataggttttggatctgttaaaattgcagcattcatagctatggt

SEQ ID NO: 745519 - DNA, 101 bp, Homo sapiens
cccactcccaccgccagctggaaccctggggactacgacgtccctcaaaccttgcttctaggagataaaaaggtgtctgacttccagcaactgctggcctg

SEQ ID NO: 745520 - DNA, 75 bp, Homo sapiens
atggtgctatacttgaattttctaaggtgtcattaggatgtttgtacagcgctattaattacagccttcaattcc

SEQ ID NO: 745521 - DNA, 101 bp, Homo sapiens
gtgaagtcctacagagttatcaggttccagaccctgccttctcttctgaaagcaaatggttatgagccttagagtttctgaactccaagtactgttgggct

SEQ ID NO: 745522 - DNA, 75 bp, Homo sapiens
agacggaaaaagtcgatctggagcttttcccctccccggcaacatggccaatctttcctaagctgctcagcttac

SEQ ID NO: 745523 - DNA, 82 bp, Homo sapiens
gcggagcccgccgggaccccccggagcgcggccacggcgcaggtgagaagccctaccactgcaactgggacggctgcggctg

SEQ ID NO: 745524 - DNA, 100 bp, Homo sapiens
gcttttaactctttcaaagccgattttgaaacggctgcagtgatacatgcgaagacacaggtaggacgttttgcacctcagttctctggatatcagcagc

SEQ ID NO: 745525 - DNA, 51 bp, Homo sapiens
attctttgcagttctgataaaacaggtgctggagaatctggtaaaagcacc

SEQ ID NO: 745526 - DNA, 75 bp, Homo sapiens
aacgggtcggctacagggagggacccaccgtagagactaaggtgatctttgcagagctgtttcaacttccagcac

SEQ ID NO: 745527 - DNA, 108 bp, Homo sapiens
agccgtctgcaaagtgtccccggcaagaagccggagaattttcatccttgggccttctcatcatgtgcccctctctcgatgtgcactttccagtgtggatatatatag

SEQ ID NO: 745528 - DNA, 80 bp, Homo sapiens
gacccctccctgccatgtatccgcagggcagacatccgttattttaccaagaaaatggtttgcacgactttgaacatata

SEQ ID NO: 745529 - DNA, 100 bp, Homo sapiens
gctcctactatccatttcaactacagatactttgaagtagaagaagctgatggtggggaatagcagcatagcctggtctcttggctacatgctcagcctg

SEQ ID NO: 745530 - DNA, 99 bp, Homo sapiens
aaagactctccagaccttagggaacaagaggcatcactcagtccttctgggacagcttccctagagaaaaggaacagttccgtaagctctttattggtg

SEQ ID NO: 745531 - DNA, 90 bp, Homo sapiens
cctgtggctaatacagatgcttctgttaaccaggaaggatatggagtaatagtactaaatcccaatgaaaactatattgaagtagaaaag

SEQ ID NO: 745532 - DNA, 101 bp, Homo sapiens
tcaatgctgctgtgtgggaagaagatttgtaaagaaaactcttagcatttatataactctgcagccttcaaagctcgaaccaaagctagaagcaaatgtcg

SEQ ID NO: 745533 - DNA, 89 bp, Homo sapiens
ggccaccctactgcctggaggccggggagccgacgcctggcaggtaaagtgaggaaacatgcaactgaacaggaaaaaactgaagaggg

SEQ ID NO: 745534 - DNA, 100 bp, Homo sapiens
caacagcctctgattacgacatggctgagatcaccaatatccgacctagctttggttttatgaatgaagctatggctacagattccccaagaagacccag

SEQ ID NO: 745535 - DNA, 98 bp, Homo sapiens
agctctgccggggaggaggaggaggaggaagaggaggagaaggggtggcactgaatcaacaagacaagcaactcaattgattaatgctttgatcaagg

SEQ ID NO: 745536 - DNA, 90 bp, Homo sapiens
gggggaaagacgaggaaagaggaggaaaacaaaagctgctacttatggaagatacaaaggatccaggatgagaagactgataaaagaaga

SEQ ID NO: 745537 - DNA, 80 bp, Homo sapiens
cagcaattaaacacagaaggaaatacccagactgttactacaacctcgggcgtctgaaatctcctgcaaagaagctgagc

SEQ ID NO: 745538 - DNA, 76 bp, Homo sapiens
tgcggggtgcgccggcagaggatccagtgttcaccatcctggccccggaaggcatagaatgtcaagctaaccaggc

SEQ ID NO: 745539 - DNA, 100 bp, Homo sapiens
ggcagcggcagcgacgctacccaccctcttccccaacacccacctagccagcgagtcaccgagccaccggccctcgggaaatgcactcggtgatggaaag

SEQ ID NO: 745540 - DNA, 100 bp, Homo sapiens
gtattgaatgaaagacccagtgcaaagacatcaccatgaacactagcagtttgggccccatggtatccctgtgacagtatttcccaaaagggaatataag

SEQ ID NO: 745541 - DNA, 74 bp, Homo sapiens
tgctaatccagtggaaatcaggagagctgaactgtcccaagcaataaacagtggtacattgttatcaaaaccgt

SEQ ID NO: 745542 - DNA, 90 bp, Homo sapiens
cctcactgtagatgccaagacagagactgcggtcttcaaaagaactaaagatgactcagagccatctggagaagaaacagtagaaaggac

SEQ ID NO: 745543 - DNA, 50 bp, Homo sapiens
cccagacaccagccccccaccatggttcgtgctggccgtgggcagcgccg

SEQ ID NO: 745544 - DNA, 101 bp, Homo sapiens
ctgtaactgaggagacaatagcacagacggaggttgactgcattcagccagtgccaaaagaggagcccagtcccgctaccaaattccagtccatcggggtt

SEQ ID NO: 745545 - DNA, 73 bp, Homo sapiens
agtggggcgctccatcgtgtacgatgcgacctaaagtcatgtggcacctccttcgaaggtacatggcatcccg

SEQ ID NO: 745546 - DNA, 98 bp, Homo sapiens
gcaggcgcctacatcctaactcgatttgctcgagaactttcaaaggcttccaaatctgatgctacttctggaatcctcaattcaaccaacatccagtc

SEQ ID NO: 745547 - DNA, 123 bp, Homo sapiens
cctacctatgtgaagaaaaggaaaacaacaaatcattccagtcagatgacagttcactaagagatgaacatcactcgaaaactatggagtcgaactttcaactgttcagtcccttgcagtgac

SEQ ID NO: 745548 - DNA, 51 bp, Homo sapiens
cccttcagtcgcagcctcactctagggacaagaatccttcaagaaacagga

SEQ ID NO: 745549 - DNA, 97 bp, Homo sapiens
caagactagtgtgagcaacaaaccacagcatgttccgaagagatgattggaagatggaagtggagggttaaataatgaaatgcagctaacatttcgg

SEQ ID NO: 745550 - DNA, 98 bp, Homo sapiens
gacgagaagccccaacagcacggcgtggcctctcagcctcggaatactctgaagatagtaactccgagccaaatgtggatttggaaaatcagtactat

SEQ ID NO: 745551 - DNA, 90 bp, Homo sapiens
ggatgcaccttcccctgccttggaaaggcggccttctgatctgtttaccacgtgagcaagcagctcggttctgtgcagagataaagtccc

SEQ ID NO: 745552 - DNA, 75 bp, Homo sapiens
tcaattaccaaaggtgatcttgagaccatgtctgctaaagagaaaggaaaatttgaagatatggcaaaagcggac

SEQ ID NO: 745553 - DNA, 100 bp, Homo sapiens
tctggctcggaggaatctcagtagggacaacaggcaggagaattatgggagcgcatttccccaggcatgcagtgacctggagttcagggaagtggcaaac

SEQ ID NO: 745554 - DNA, 74 bp, Homo sapiens
cttggcatgtttgtggaggtgaaggacccagaggacaagatctccttgtcacacacatcctgcaaatcacagtc

SEQ ID NO: 745555 - DNA, 100 bp, Homo sapiens
ccgagggaagatgaacgggacgcggaactggtgtaccctggtggacgtgcacccagaggaccaggcggcgacggtctggaaaatcccgaagcagaagccc

SEQ ID NO: 745556 - DNA, 51 bp, Homo sapiens
gattgaaattatctctggtgctgcagctctattttatttggagagaagcaa

SEQ ID NO: 745557 - DNA, 75 bp, Homo sapiens
accgcgaggcgagacctcttccagtcccacagaaccaaggtcctcaccatccccaccccccagccccacagagcc

SEQ ID NO: 745558 - DNA, 100 bp, Homo sapiens
agactggagaaggacctggaggaagcccatcgagagaagagcaaaggagactgcaccatccgtgttcatcttccttcctgtacagtattttcaaacttcc

SEQ ID NO: 745559 - DNA, 96 bp, Homo sapiens
aagacggacttccaatcgagtgactgcctggcacggatgaggataggaattcactcaggctccgtgctggctggagttgttggggtgcgaatgcca

SEQ ID NO: 745560 - DNA, 75 bp, Homo sapiens
cacccacctagccagcgagtcaccgagccaccggccctcgggatttggagcaagaggtggtggtggccttccccc

SEQ ID NO: 745561 - DNA, 75 bp, Homo sapiens
cgaccgggccctgggctggaggtaaaaccccacgaggcggggtttcaccatgttgcccagactggtcttgaactc

SEQ ID NO: 745562 - DNA, 100 bp, Homo sapiens
caaatttcctgaacacaccattatggcaaatcctgatcctaactgttgtcttggagtatttgggctgagcttgtacaccacagaaagagatctaagagaa

SEQ ID NO: 745563 - DNA, 83 bp, Homo sapiens
tgatacagattgttttcttggaaactaatctggattcactccctctggttgatacccactcaaaaaggacacttctgattaag

SEQ ID NO: 745564 - DNA, 75 bp, Homo sapiens
tggagaggcagatgcagcctcaggaccagctgaggatgtccggcttccagatcaacctcaacccgctcaaggagc

SEQ ID NO: 745565 - DNA, 99 bp, Homo sapiens
aaggccctggacacagcaatatctctgggctttcacaggactacagagacatcattgacactccaatggattttgctaccgttagagaaactttagagg

SEQ ID NO: 745566 - DNA, 82 bp, Homo sapiens
cagaaacactacctggtacacacgggagaaaagccacatgaatgccaggtcacgcatgaagggagcaccgtggagaagacag

SEQ ID NO: 745567 - DNA, 90 bp, Homo sapiens
cacccccctggggctgcaggagaccatcgcagagtttttgtacattgcccggccgctgctgcactaaatccctcactttaaggaggttat

SEQ ID NO: 745568 - DNA, 111 bp, Homo sapiens
ctcacctgtgacgatgagccagagacctacgtggcagctgtgaaaaaagccatttccgaaggtgcttttgaagatgatgatatcacgcacgttgaaggaagtgtagatcct

SEQ ID NO: 745569 - DNA, 49 bp, Homo sapiens
ctatgaggcagagatcaatcttcagatttggagcaagaggtggtggtgg

SEQ ID NO: 745570 - DNA, 100 bp, Homo sapiens
gctgatggtgatggagattttgatgtggatgatgccaaagttttattagaggttatgggtgatggtgaaagtgcacatgattctccccgtgacgaagcac

SEQ ID NO: 745571 - DNA, 51 bp, Homo sapiens
ccagaagatcacacagtgttgactgatcctttgaaatactccagccatgac

SEQ ID NO: 745572 - DNA, 82 bp, Homo sapiens
tgatttgcaacccttccgggaagccatagctctgcatgattaagcctgatcaagatgacaacctcccaaaagcaccgagact

SEQ ID NO: 745573 - DNA, 93 bp, Homo sapiens
gggcagacggattcatttagagctgcggaacaggacgccctctgatgacagagcgggatgccaccagcttgtccaaagggaagttccaggagc

SEQ ID NO: 745574 - DNA, 118 bp, Homo sapiens
tgggaagaaatacgaaaaggaacgatatgaaaaagtcataaaggcttgtgctctgaaaaagcaaaccctcctggggcttgcccatagatgctgttcagtgggatatctgcaatctgcc

SEQ ID NO: 745575 - DNA, 90 bp, Homo sapiens
ggtattgcacctagtggggagatcgaaaatgaaggagcacctgccgttcaagggcctgacacatttagggaagggcacccttaccctctg

SEQ ID NO: 745576 - DNA, 90 bp, Homo sapiens
tgaggaaggaccagcgggacgcctgcatcaaggaggccattctcttgtctgaagttgcagccggagtgaagaagagcggaccgctgccca

SEQ ID NO: 745577 - DNA, 88 bp, Homo sapiens
cggaggagcccccaccacggccactccccttcagtgacccaaagaaaccctcgttttggctggggaatgaaaccctgaaggtgccgct

SEQ ID NO: 745578 - DNA, 83 bp, Homo sapiens
ctcgtggcctgcctctgcgtgcgtcagcccaaggccaaccccactgtcactctgttcccgccctcctctgaggagctccaagc

SEQ ID NO: 745579 - DNA, 75 bp, Homo sapiens
gtgtgaatgtgcagtttgagtctgatgaggaggcaaaccacagggaagctggaaaagaagcggccctggcagaag

SEQ ID NO: 745580 - DNA, 98 bp, Homo sapiens
taggtgtatcaagtaatggtgcaaagcctgaaggtattcattcaggagaaggaccctacagatggagggaatgcaggaaagctaagaagaatcacacc

SEQ ID NO: 745581 - DNA, 143 bp, Homo sapiens
gtgagccactgcgtctggccccaagtaactttttaacacagttcttcaactgcataccttcaatctaagaaaacacttgctgagcagaatttggaggataccagacaacagctcttggcagccagaagcagccaggctaaggc

SEQ ID NO: 745582 - DNA, 50 bp, Homo sapiens
caatcttaattcctcacagaggttggataacagggcaagattcagaggaa

SEQ ID NO: 745583 - DNA, 75 bp, Homo sapiens
aaccaacccactttctcggcgccgcggctcttttctaaaagttttccagagtgtggattctttggcatgtatgac

SEQ ID NO: 745584 - DNA, 100 bp, Homo sapiens
gggcgcttcgctgatggtgtcggtgagcgcgtttcccgcctgagcgcaactagcggcgggtcgtgggcacctccaggactcgctcagcagcagcctgaaa

SEQ ID NO: 745585 - DNA, 100 bp, Homo sapiens
ctcttccagtaacattgaggattactgtgttttgtgagagctcgctaggcgccctaagcaacagagtttttcagtttccaagatggaatagttatagtgc

SEQ ID NO: 745586 - DNA, 75 bp, Homo sapiens
cggccccttagctcctatgactggaaccattgaaaaggagaacatcgagctggcgtttgacgacttggaaccccc

SEQ ID NO: 745587 - DNA, 75 bp, Homo sapiens
taattcggtcagagtcatgatgacagcacagctagctcagaattctgcaaatgcagattttgcaaactttgatgc

SEQ ID NO: 745588 - DNA, 83 bp, Homo sapiens
caatattggaagcgctttgatttacagcagctgcagggggggccctcagcctcttggccttgaacgggctgttcatcttgatt

SEQ ID NO: 745589 - DNA, 75 bp, Homo sapiens
tgctggagaactgaaggcggacagtctcctgcgaaaccaggcaatgggactatcggacaaaacctttctgctgca

SEQ ID NO: 745590 - DNA, 75 bp, Homo sapiens
gttgccaaactgcaggaaagccagccaggaaacgcaaggaaggcattactgggtaccggccaagaggctgtttgg

SEQ ID NO: 745591 - DNA, 74 bp, Homo sapiens
ccagaacaaagcattgccagaaaacgttaagtgccggtggtggtgtgcacattgagccccggtatagacagttc

SEQ ID NO: 745592 - DNA, 101 bp, Homo sapiens
ctgagacggcagcggcagcttctcaggtctgttgcggttctcccacttttccataagcagaacaagaaccaaatcaaacgtcttaacgcgtatagagagat

SEQ ID NO: 745593 - DNA, 83 bp, Homo sapiens
accccctggacctggtcagagcgcggatggccgtaaccccgaaggaaatctgcggataaccgtctggtccttgtgcacaaaat

SEQ ID NO: 745594 - DNA, 123 bp, Homo sapiens
gttcttgtgggtgtcacggggagtgtcgcagccctgaagttgcctcttctggtgtcaaagcttttggacattcctggggaactttatattgctgttggaatatctggagccatccaacattta

SEQ ID NO: 745595 - DNA, 100 bp, Homo sapiens
acatgtcttccaagagtgccaattactgctttgcctctcgcctaaagaatacaggactgctgctcttatcagagaccggaacatgaacattttgcagtac

SEQ ID NO: 745596 - DNA, 75 bp, Homo sapiens
ctgcagtgagaggcatgcttccttagaccaggaagcatgagtgggaaaagcatgggacctgcgccgcccaggtgg

SEQ ID NO: 745597 - DNA, 50 bp, Homo sapiens
caaacgtctaccattacagtggaagaagccaatcctgcttgtgcatggtg

SEQ ID NO: 745598 - DNA, 83 bp, Homo sapiens
gctggccggacagggccgcctgtcgccggccctgggcgctgcctatggcacagccaagagcggtaccggcattgcggccatgt

SEQ ID NO: 745599 - DNA, 89 bp, Homo sapiens
acgctgtgctcgctggcaccccgaacgggttgcttcccccgctgcgaggaaatttgcgagaatccccgatttatcattgatggagccaa

SEQ ID NO: 745600 - DNA, 75 bp, Homo sapiens
gtttcttggaatttgtggaggattttattcaggttcctaggaatctcgttgacttgggaagatccccatgaaaaa

SEQ ID NO: 745601 - DNA, 48 bp, Homo sapiens
aaagctattctgggggcaacagagaacaatatgatgcgtttgtgaagt

SEQ ID NO: 745602 - DNA, 100 bp, Homo sapiens
ggataagttctattttgaagaactggggaagtacgacatgatgatggatgtgtggggaggagagaacctagtgaacagagtatctgtcaggcaagagctg

SEQ ID NO: 745603 - DNA, 100 bp, Homo sapiens
cgcagcgtgtcaggcggagagacccgccgccaggaggcacgcggacctccagtggccggctccggaggcttggtgactccagtggcccaggtaggtggct

SEQ ID NO: 745604 - DNA, 100 bp, Homo sapiens
tttacaaccagagtgataagccaccgcctctgaacatcctgacaccatacagaccatattttacatccttccacgcctttcaggccttattgaagatgaa

SEQ ID NO: 745605 - DNA, 100 bp, Homo sapiens
acatcaggtgctcatcctgaggaccgcaacagatgaccaaggaagtttgggattatgttttcttcaaggaggctccatttcctaagactcagattgcaaa

SEQ ID NO: 745606 - DNA, 100 bp, Homo sapiens
caagaagtggtgaggacaaggcctgaagcctggagcattggtaagcgtcacactgccaaagtgagagctgctggagaactcataatcccaggaacgcctc

SEQ ID NO: 745607 - DNA, 126 bp, Homo sapiens
ccctgcagcggaaccggacccagtccctgagccgcccctacacccacagtatggcatgcagctgtaccagaattatatgcatccatatcaaggtagaagtggctgcagttcacagagcatatcacc

SEQ ID NO: 745608 - DNA, 87 bp, Homo sapiens
gggaggagccgcagcgccgggcgaccccgcccgggcctcgggaaaccatcttcatcggtactccaaggttctggaggcccatttggg

SEQ ID NO: 745609 - DNA, 107 bp, Homo sapiens
ttggtccgcggcatccgtaaccacaaggaggacgaggtattgttgcagcatctggcagtgagactgaggatgaggacagcatggacattcccttggacctttcttca

SEQ ID NO: 745610 - DNA, 100 bp, Homo sapiens
gggggggcggccgatcgggccggggtgcgcaagggggaccgcatcctggaggtatctgtgaagtcctggaacgctcccactctccacccctgaagctgac

SEQ ID NO: 745611 - DNA, 82 bp, Homo sapiens
gctgaatgggctgaaggaggaggacaaagagcccctcatcgagctcttcgtcaaggtatgccattttgaagactgagacgtt

SEQ ID NO: 745612 - DNA, 83 bp, Homo sapiens
ggcgcctccgctgcagtcgctgcgtctccaagcaaacggggattcagcgtccgatcctttggaacagggactcacgtgaagct

SEQ ID NO: 745613 - DNA, 100 bp, Homo sapiens
gtcagagtggaggctgcagactgtggagccgggagccggcagattgtcactgctgttccaagggcacacgcagagggatttggaattcctggagagttgc

SEQ ID NO: 745614 - DNA, 88 bp, Homo sapiens
acagagcagattctgaaacttcttgacaatttgcttgcgcttataaggaattattagccgagaagatgcagaagctctcctggagaac

SEQ ID NO: 745615 - DNA, 50 bp, Homo sapiens
gcctattggaggaaaacacaccaagattgagaggatccagaatccagatc

SEQ ID NO: 745616 - DNA, 110 bp, Homo sapiens
atagtgctctgatccagttgggtgacagggacagagcagaatgggctgatatagatccggtgccgcagaatgatggccccaatcccgtggtccagatcatttatagtgac

SEQ ID NO: 745617 - DNA, 101 bp, Homo sapiens
cttctttagttccatcaaacacagaggaatgaccaccatggcagatggcaacagaggatgtcaacaattttttggagctgttgacagtgtcttgaagagga

SEQ ID NO: 745618 - DNA, 90 bp, Homo sapiens
gtggtggtggtgtcttcctgtctcaacgatacctattttctagtgctgagatcctgagacaatgtatggcatgcagctgtaccagaatta

SEQ ID NO: 745619 - DNA, 83 bp, Homo sapiens
cccagccccagccccagccctacagagggactggtgattgcagctggaagtgcccatgaccgagctggcgtcctccgggggcg

SEQ ID NO: 745620 - DNA, 89 bp, Homo sapiens
tcagttaggattaggatcaaagtcagccatcagcaagccaacatgtgtcaaagatacaaccagacctccaaagaaagacgaagaaaatg

SEQ ID NO: 745621 - DNA, 82 bp, Homo sapiens
ggcagatcttctcatattcgggaaggagctaagggtggctgttgcaccacgccctccctcctgcccctgaggcccggaagcc

SEQ ID NO: 745622 - DNA, 97 bp, Homo sapiens
atatcagttggatcccactgcttccatttctattggaggtggacacaaaggaagaggcagccagacagctacttcagcgtcctcaacgcattcatcg

SEQ ID NO: 745623 - DNA, 80 bp, Homo sapiens
cgaacgaccaagagggtgttcgactgctagagccgagcgaagcgaccaagaatcgccttcagccctgtctggtgcatcct

SEQ ID NO: 745624 - DNA, 100 bp, Homo sapiens
cccgcctccggctggctgacgacgggcgcccccgagccgccgccgctgtccggagccccacagtctgaagatgatgagaaactgaaaaagaggaaggagc

SEQ ID NO: 745625 - DNA, 83 bp, Homo sapiens
ctccgcgtcccgctcgctgggagagagttggaatcgaagcctcttaaaatggcagatgacttggacttcgagacaggagatgc

SEQ ID NO: 745626 - DNA, 100 bp, Homo sapiens
ctggattgtgttgtcaacaacgctggccaccgaccctgatgctcccataagacagaaaatgccccttgatgatctggatagagaagatgaagttagatta

SEQ ID NO: 745627 - DNA, 98 bp, Homo sapiens
atttaagagagctctggacaagctggaatgcatccaagagaatccctcaacatgctggtgtccctggccagtgtccttccacctgtccacaagcatgg

SEQ ID NO: 745628 - DNA, 114 bp, Homo sapiens
cgtgattgcgttacaagctttgtctccttcgacttggagtctttgtccaggacggggctttgttatgcacctaaagccatattggaagctccagaagaaagagcaccccccgga

SEQ ID NO: 745629 - DNA, 50 bp, Homo sapiens
gaagttcctttttgaagtagttccagtgccatctgggattgacagctcag

SEQ ID NO: 745630 - DNA, 74 bp, Homo sapiens
tttgccacaaagcccagtctgtgtctcaaatcaaccacaagctggaggtttctaccatgaatgaaatgaagagt

SEQ ID NO: 745631 - DNA, 74 bp, Homo sapiens
ttgttacttacgttgcttagatggccgctcctgctggactactttaataaggacagagcgggatgccaccagct

SEQ ID NO: 745632 - DNA, 98 bp, Homo sapiens
cagcaccaaggcagtgggccaagacaggcggagagatatcacctatgagtacaagtatccagaagttgaggagctcaagcttgggaaaatggtgtgca

SEQ ID NO: 745633 - DNA, 95 bp, Homo sapiens
ttacatcagttaatagtagcaaatatgactggactggaaccatcaaacaaggctgcagagacagaaagaatttactttcaggttttcttacctaa

SEQ ID NO: 745634 - DNA, 51 bp, Homo sapiens
gaagattgtattaactacactagagagtcactgctagttggattgaagcac

SEQ ID NO: 745635 - DNA, 100 bp, Homo sapiens
aacagatgtatgctcatcagtattatatgcagtagtaatcccgtttgttggcaccattcctgatcagctggatcctggaactttgattgtgatacgtggg

SEQ ID NO: 745636 - DNA, 74 bp, Homo sapiens
ggagttgtatttagtgtgacgactgttgacctgaaaagttgttgacctcctgtactggagagacattaagaaga

SEQ ID NO: 745637 - DNA, 82 bp, Homo sapiens
tctacggcgcctcggccggggcgctcacggccacggcgctggtcaccggggtctgcctggggcatcttggatacagctcaga

SEQ ID NO: 745638 - DNA, 103 bp, Homo sapiens
aggaactgtggacagtgaagagaggcctctcccaaagcacctgcgcagagcccaggaaactctgcccgcagcttatgacggtcattaaccagtttctgaccaa

SEQ ID NO: 745639 - DNA, 101 bp, Homo sapiens
tgttgctggtctctggctccctcctcccagggccaggcgccgctcagaacggcctgtttaaagaagaaaacccgtatgctagatttgaaaacaactaaagc

SEQ ID NO: 745640 - DNA, 75 bp, Homo sapiens
ttcgaagccattcagtcctcaatctccttttccttggctacccgctttggggtgagcctgttaatctgcgtgaac

SEQ ID NO: 745641 - DNA, 80 bp, Homo sapiens
ccctgccagctgcgccgggacgggtgctttcttctgcgacctggtactcatctacctcatcaaaaagagagagttttacc

SEQ ID NO: 745642 - DNA, 100 bp, Homo sapiens
ctgagctcagacctgccaatttaccagagataattgataacaccctgtaacagctgaatgatttgtcattaattcggaagaacagaatggctctctttca

SEQ ID NO: 745643 - DNA, 100 bp, Homo sapiens
ctggctccttggcagcaatggctgtatttgaagataagtttaggccagacatggaggtagcctttccagtaaatatatgactcagggaaaagcctcagcg

SEQ ID NO: 745644 - DNA, 100 bp, Homo sapiens
ccaggttcagcagccgcagcaggttcagttaagtgggcagaccaacatccacctcagcaaaaacttcttcctgacgaatcgcgccagggagcgctcagac

SEQ ID NO: 745645 - DNA, 83 bp, Homo sapiens
gtgcgctgctcaaggacacggtctacaccgacttcgacgacaggccgacggtcgcaaggtcctacggtcaagcatccgggagt

SEQ ID NO: 745646 - DNA, 100 bp, Homo sapiens
ccgaaaatctgggctaagtgctggcaagagcgatgtctactacttcaggttcgatacaagaggctgttttcctagcgtggcttgctgcctttggtaagaa

SEQ ID NO: 745647 - DNA, 90 bp, Homo sapiens
cggaaactccagcgtgtctccagccgtgggaaagcaggcaggatgggagagtcgccgatagaaccacctcttccctgcctcctgggcttg

SEQ ID NO: 745648 - DNA, 51 bp, Homo sapiens
agcgttactgctgcacacctaaagtcaaggttggttgaatctggcgatgtg

SEQ ID NO: 745649 - DNA, 100 bp, Homo sapiens
ccaccgccacctgcacccgtttcaccgacgactaccagctcttcgaggagcttggcaagttgactgcattcagccagtgccaaaagaggagcccagtccc

SEQ ID NO: 745650 - DNA, 102 bp, Homo sapiens
ccgcgcgcagggcctgcagcgggagctggacggcgagcgcgagcggcgcgagaaaataacgaaggaggcccaacttcattcaataaggagcctgacggattt

SEQ ID NO: 745651 - DNA, 96 bp, Homo sapiens
ctttgattcagaatctctctctgctgctagtggatgcctcggttgggaccattcagtgtcttgaggaaattgtgactcgaaaagccctgtttcctg

SEQ ID NO: 745652 - DNA, 90 bp, Homo sapiens
aaatgatctgaaacaagagcacttctttctcctccacctgctcaggacaaccgcatccagggtggctacgagaacgtgccgactattgac

SEQ ID NO: 745653 - DNA, 100 bp, Homo sapiens
cctgcaaccatggtcgtgccactagccagctcggaagcccaggcaatactgaacactgcgcagcttgcagaggtctcctggcagccctcattaggaattc

SEQ ID NO: 745654 - DNA, 74 bp, Homo sapiens
ggggtggaggtggtgcctctggcagtgacgaggacgaagtgtccgagggcatgagccagaaggagagctctaag

SEQ ID NO: 745655 - DNA, 100 bp, Homo sapiens
ggcccggcggccgcggcgcccgccctcgcccgcgccccatggggtcacagccctcgagcatgttccaaactcggttcgcttgtggaaagcagccgttgag

SEQ ID NO: 745656 - DNA, 98 bp, Homo sapiens
gagaagccaagcacgctgacgaggttctgtgagagcatgttcacagcagatgaggctcgggacctgattcaacgttacctgacagagcaccctgaccc

SEQ ID NO: 745657 - DNA, 95 bp, Homo sapiens
tgggaacctagctgatgataggggggttccatctcccaacttgtccatgagtatgctgctgctgttccgctttgcgtcctcgctacaaacgcctg

SEQ ID NO: 745658 - DNA, 100 bp, Homo sapiens
gaagctcgatctgaagaggcagaaggagcaggctctgcgggaggtggagcacctgaagagatgccagcagcgggctgacgcacgaggcacacaggaagga

SEQ ID NO: 745659 - DNA, 76 bp, Homo sapiens
gcacacgccctgcatcgagcagctggagaagctcctggggatggtcctgtccatctgcttgtgccggcacgtccat

SEQ ID NO: 745660 - DNA, 83 bp, Homo sapiens
ctctgcggtttttgggctgtgttgacatcaaggatctaccaggaatcccactgtaagatggggttatgtcgctatgaagtttg

SEQ ID NO: 745661 - DNA, 100 bp, Homo sapiens
atttactgtacggtctcgtgtggctgctgacagtcctcctggaggggatctctggccaaggagtgtacggcataaaggcatcacaagtggtcgggctcag

SEQ ID NO: 745662 - DNA, 101 bp, Homo sapiens
cctgccgcccgccgcagggcgctgacggtcccgcacgtctgccgctgccaccggcgcgcccgaccctaaccggcagccatttgttctctttggtaatcact

SEQ ID NO: 745663 - DNA, 82 bp, Homo sapiens
ctaatccaccaaggatagccaatcggaccaaaaattcactcactttgcaatggaagaaaatggtgtgaatggaacattaact

SEQ ID NO: 745664 - DNA, 83 bp, Homo sapiens
cagctgcagccccggcggccgaacgcccgcggcgcgggactccatcgtcaggctatgactttgcagccgtcctggagtggttc

SEQ ID NO: 745665 - DNA, 82 bp, Homo sapiens
tgctcctggaggacttttggctcgcaagcgcttctccattctcccaacgtctcgggcctgtcctgacacagctctccctgag

SEQ ID NO: 745666 - DNA, 82 bp, Homo sapiens
agagcgacaagccgctggcagccgcggatctcaccgccgctcaggtttttgaaatcatgaatcctgtttatagtcctggatc

SEQ ID NO: 745667 - DNA, 90 bp, Homo sapiens
caccagctgctggccctcaccctgtggaaaggcatcctgacatcgaggcccaggagagaggagtccggtgtctacttgagaaacagctcc

SEQ ID NO: 745668 - DNA, 100 bp, Homo sapiens
ctatcttcagtggtcttactggcaggtgttggtgtccagatggatcgccttcgcagggctagcaaaatatgcaaagtgtgaccagtgtggaaacccaaag

SEQ ID NO: 745669 - DNA, 101 bp, Homo sapiens
atcgttcgtctggtggccttttgtccctttgcctcatcccaggttgccttggaaaatgccaacgccgtgtctgaaggtctataagaaggagaaagctcgag

SEQ ID NO: 745670 - DNA, 100 bp, Homo sapiens
aagagtccgtgttcatcgacgccgaggagctctgcagtgggggcgtaaaggctggcagcctccccgggtgcctccgcggccctggccaacgtcaacattg

SEQ ID NO: 745671 - DNA, 100 bp, Homo sapiens
tggactttttgaatttcaagaacagtaaagttggaacacagcagagggtgtgtaataaaatacagggggaagttgctgaagttatatttgtaggtgctaa

SEQ ID NO: 745672 - DNA, 75 bp, Homo sapiens
ctggtgaagtacatgaactcagggccggttgtggccatggttgggagccacgtgtaccagtgtgtgttgatcttg

SEQ ID NO: 745673 - DNA, 74 bp, Homo sapiens
cgccctgttccccgcgctgcggcctggcggcttccaggcgcactaccgcgttggaatcgaagcctcttaaaatg

SEQ ID NO: 745674 - DNA, 75 bp, Homo sapiens
ccgtgtccagccagggtcctgggccgcgacctggttctcccggagtctacagaccctttgaggatgccctgaagt

SEQ ID NO: 745675 - DNA, 90 bp, Homo sapiens
gtgggatttacttccggcagcaggtggtggggccatgtggaagccgtgaggtggtggatgaaggcttgatccctggagatgggctgggtg

SEQ ID NO: 745676 - DNA, 85 bp, Homo sapiens
gaatctgggactttcttcgttgccatgaggaaagaattctccgaggtctagatgttgatggaatatatcgagttagtggcaatct

SEQ ID NO: 745677 - DNA, 100 bp, Homo sapiens
agttgtcctgactcctctgaaggtaaacggggcccacgtggaatctgcatcagttggaaagatccaaataatgacttcagaaaaaacttgaaagtaacag

SEQ ID NO: 745678 - DNA, 100 bp, Homo sapiens
aagaaagacgtggcagcaagcgggagtcggggatagtgtcatcggttcggtggtcctggctctggcaaaggcacacagtgtgaaaagctggtggaaaaat

SEQ ID NO: 745679 - DNA, 96 bp, Homo sapiens
acctttctgagacccaggttggggacagtgccggaggggcctcctctgctgcagacatctggctgtgggtgagcgtggaggatgctcagatgcaca

SEQ ID NO: 745680 - DNA, 100 bp, Homo sapiens
gcatgtctttcagagcccggcaccacccatcttgagtatctggctgcctttaatattggttgggaacaaatctgatctggtggaatatagtagtatggag

SEQ ID NO: 745681 - DNA, 100 bp, Homo sapiens
tggatgccgacgccgaggccttcaccgcctacctgagattggcacagaacgtgcttgctaccgggacatgtcatccttcccggaaaccaaggctgagaaa

SEQ ID NO: 745682 - DNA, 82 bp, Homo sapiens
gcagggcctgcagcgggagctggacggcgagcgcgagcggcgcgagaaagctgtctgtccccagaccccagagcacgtccgg

SEQ ID NO: 745683 - DNA, 75 bp, Homo sapiens
ggaaggagtcgttgctgggagacatggaatggaggctcacaaagctggtgcccctgggtgaactgaccaagcaca

SEQ ID NO: 745684 - DNA, 120 bp, Homo sapiens
cttgatgctgcaacgcttaaaacgatgaagatttctcgtttcgaaaggttgatgctgatgtaacagttataggttctggtcctggaggatatgttgctgctattaaagctgcccagttag

SEQ ID NO: 745685 - DNA, 86 bp, Homo sapiens
tcattcccaagggctcctccgtgggtacaggaaccaacttgcacattgtcacaacttggacaaaagtaacacagaagaaccttact

SEQ ID NO: 745686 - DNA, 75 bp, Homo sapiens
gcagatcatcctggaggaccagaactgcaagctggccaagagcagcccgacggccatggaggctgaagagacgat

SEQ ID NO: 745687 - DNA, 83 bp, Homo sapiens
ctgtaaaactttacacattgtgctattcactctgctttacaagaaagagctcttggaggaagttggccagaatggcagccgag

SEQ ID NO: 745688 - DNA, 98 bp, Homo sapiens
ggcggcccctggagatgattgagccgcgcacgctacagtacaaggttcttcgtgaactttgtggttgggcaggatccgggctcagacgtcgccttcca

SEQ ID NO: 745689 - DNA, 75 bp, Homo sapiens
ccggtcgggagggaggaaggtggcaagatggtgttggaaagcactatggtgtgatgatcatgacgcagtcctgag

SEQ ID NO: 745690 - DNA, 100 bp, Homo sapiens
tgcagccgtccttttggatttctttttaataatgtgtgacccttcacctttgatcccctgacctgcattaccttgcatttatgacattaacagagaacag

SEQ ID NO: 745691 - DNA, 100 bp, Homo sapiens
gccttttataataaagacacttatcttgcccaagagctggggggggccctcagcctcttggccttgaacgggctgttcatcttgattcacaaacacaacc

SEQ ID NO: 745692 - DNA, 100 bp, Homo sapiens
aatgccaaccagtgggcagatatttttcaggcctctggtgccaaatacattgtcttaacttccaaacatcatgaagccaaatttgtatcctactgtgggg

SEQ ID NO: 745693 - DNA, 98 bp, Homo sapiens
atttgcccaggtgtgcagttccgatgaagacatcctgtgtctcaagtttcaccccttgcaggagaggagtcactcacaatttttgtggacaagcggaa

SEQ ID NO: 745694 - DNA, 80 bp, Homo sapiens
caagaacgtgagcaagcccaggcacagccgacgccgcgggccttcatcccgcgtggagtctacccccaagcccttctcct

SEQ ID NO: 745695 - DNA, 83 bp, Homo sapiens
cggcgctctggttttcggtgggtgtgccctgcacctgcctcttcccccattctcagtgctgctacatcctcatcctcctcttc

SEQ ID NO: 745696 - DNA, 92 bp, Homo sapiens
ccggagatgcctgacgcatctgtctgaggagcggtcagtgacgcgatggagcgggcaaggttttaaaatcaaagatgggaaaatcggagaaa

SEQ ID NO: 745697 - DNA, 100 bp, Homo sapiens
cgtcagcactgactttcagctatggaatcgattcgagtgagggttgaaaaggatccagaacttggatttagcatatcaggtggtgtcgggggtagaggaa

SEQ ID NO: 745698 - DNA, 96 bp, Homo sapiens
attcttagtaagatgccaaaaccaaaaccacctccaaacaggtgcattttctagaatcatgaaactttgtgaagaaaaatgtgaaacagatgaaat

SEQ ID NO: 745699 - DNA, 100 bp, Homo sapiens
tcgagttttctctgccatgttgctattgcaggacggaattgtaaaccatggctgtgtggatacaagctcagcagctccaaggagaagcccttcatcagat

SEQ ID NO: 745700 - DNA, 88 bp, Homo sapiens
cttcgacatactctccagcttcaagagagattaaacagattctagaaaatgaacttcagatacctgtgtccaaaatgctgttaaaagg

SEQ ID NO: 745701 - DNA, 100 bp, Homo sapiens
ggaaatacctgaaatacagcaaaaatatcctggaccggcaagaaaggcagctgtgagagagatgctcaatatgccccaggctatgacaaagtcaaggaca

SEQ ID NO: 745702 - DNA, 100 bp, Homo sapiens
cggctccgcgcgcctggcggctacatggagagtgtcaggttatgaagacagtatggagtttccagaccatagtagacatttgctacagtgtctgagcgag

SEQ ID NO: 745703 - DNA, 75 bp, Homo sapiens
atcacagatcctgtttcagccccctgtgcgccaccattgcagccaaagagttttcctccaacgacagaaaaacac

SEQ ID NO: 745704 - DNA, 75 bp, Homo sapiens
tagcagagtacgatactcaggtcaaagatccctaaagaagtggctgacatctttaacgcccccagtgatgatgaa

SEQ ID NO: 745705 - DNA, 100 bp, Homo sapiens
cccactctgaactcaagtcaccgtggagctccgccgccccgaaactttcaccgcgagcggatgacgtccggttgtttgccttcgtgcgcttcaccaccgg

SEQ ID NO: 745706 - DNA, 75 bp, Homo sapiens
aatgagctacataatcttctagataaaccacagttacaaggaattccaatgataacaccctatgcccattgtcct

SEQ ID NO: 745707 - DNA, 95 bp, Homo sapiens
aactgctcaagcctggagactcgcaacaagatcccctatgagagtcccatcttcagcagagatataacacgtgggaaccggaggagaacatcctg

SEQ ID NO: 745708 - DNA, 100 bp, Homo sapiens
gggcgggccgaaacctggaggcccggggggcccagctcccgtagggagccgtgggcgctcggtgcccgggccgggcagaactgataaatttcaaacggaa

SEQ ID NO: 745709 - DNA, 50 bp, Homo sapiens
agctgaagcaagctgaggagctcagctcctttggtgaagattaaacagag

SEQ ID NO: 745710 - DNA, 98 bp, Homo sapiens
ggagaaagaagtgggaaggatctgcgcgggactcagtctcctttgaggatgtggccgtgaacttcaccctggaggagtgggctttgctggattcttca

SEQ ID NO: 745711 - DNA, 80 bp, Homo sapiens
ccatatctgttttgaggattcattatgaacaaagaagtctcccaggctttcttagaaatggcttctgaggaagctgccgt

SEQ ID NO: 745712 - DNA, 100 bp, Homo sapiens
gcccagggactgcgtctcttgccggaatgtcagccgaggcagggaatgcgtggacaagtgcaaccttctggaggggttccgctttgattataccaatgag

SEQ ID NO: 745713 - DNA, 114 bp, Homo sapiens
gttatgaagctaatcctggcgttccaccagcaaccatgagtggttccatgatgggaagtgacatggaaattcagttcatgaagataagaagtttcttgacaaatacatgcccca

SEQ ID NO: 745714 - DNA, 100 bp, Homo sapiens
ccgtggctggttcccggcgagctacgtgcagttgctggaggttctccacatacgattctacttgtcaaattgcccaagaaattgctgagaaaattcaaca

SEQ ID NO: 745715 - DNA, 74 bp, Homo sapiens
ctcagttcaaagacctgttcttaaaaaaagttgttgtggtgctgggacagctgcagacacagacatgacaaccc

SEQ ID NO: 745716 - DNA, 89 bp, Homo sapiens
ggaaatggcacctatggacaagtctataaggtgctggagaatctggtaaaagcaccattgtgaagcagatgaggatcctgcatgttaat

SEQ ID NO: 745717 - DNA, 73 bp, Homo sapiens
ttcggctgctcatcgctgctcagcatcatagcgtgccataacatgagctatggaggtggcatgcgacccccac

SEQ ID NO: 745718 - DNA, 102 bp, Homo sapiens
cctgaaagtttccctcctctttccaaatcaaccataatattctgaggtgtgttccagagaacaagccttcagacatttgctatattgacgctgagctgtcag

SEQ ID NO: 745719 - DNA, 82 bp, Homo sapiens
cggcgccgaagaggcgactgaggccggacggggcggacggcgacgcagcccgcggcagaagaagaagctcattcacacagaa

SEQ ID NO: 745720 - DNA, 90 bp, Homo sapiens
cccattcaagatacggaactccctaaaggaatgggtgaatttaaggtccatcgagtacgtttctttaattatgttccatcaggaatccgc

SEQ ID NO: 745721 - DNA, 96 bp, Homo sapiens
aagatgatatttattcaccaaacaagctgcagggaagtcaacatttgtgaatatccttaaacaattgtgtgaagattgggaagtggttcctgaacc

SEQ ID NO: 745722 - DNA, 100 bp, Homo sapiens
actgacaacactgcgagtggcaactcagcaggtgggctacggacatctcagcaccctcgtgaaactggacaagaagccagtggagaccaacggtcctgat

SEQ ID NO: 745723 - DNA, 75 bp, Homo sapiens
caccgctgccctcagctccgagtccagggcgagccacacccactcgcccgggtctatggccacggtcggagagtg

SEQ ID NO: 745724 - DNA, 73 bp, Homo sapiens
tacctcactgcagaggtgctggagctggcagattggccatctgcaagcttcccttctccgtggagagcaggaa

SEQ ID NO: 745725 - DNA, 110 bp, Homo sapiens
ctggcctgcagctccttacaggaaagggccaatgtgaacctcgatgtccctttgcaagaatgtgcagctctcactgctaacagaaagagggatgggtgaagcagtacaag

SEQ ID NO: 745726 - DNA, 100 bp, Homo sapiens
aaaaggatcggaaaagaattttggaggcaggtggaagtcatcataaagtttctgtttcacccgtcgtccatgttcgaggactctgtgaatctgtggtgga

SEQ ID NO: 745727 - DNA, 100 bp, Homo sapiens
gacggctgcgcgggacggctctgtaggaaggaacttggttccccctccctcagcttccgccccaaaagtttctccagcatttggctctaggtgccaaggg

SEQ ID NO: 745728 - DNA, 75 bp, Homo sapiens
agcacagcggcatctttggcttcagcgtgtcccgcgttcccgttgcccgctctctcccggaagcagaggacggtg

SEQ ID NO: 745729 - DNA, 100 bp, Homo sapiens
atgtatggctgccgtgttatccagaaagctcttgagtttattccttcagaccagcaggtaattaattttgagactgaagaagtagaactttccttctcca

SEQ ID NO: 745730 - DNA, 83 bp, Homo sapiens
cgccagaccgccggctgcgccggagctgggggccttagttaccaaaactctaggacctaaaccatttcagctgcccttcagac

SEQ ID NO: 745731 - DNA, 75 bp, Homo sapiens
ggggtgcgcctgagcggggaagcccgcaaacaggcattatattgtacttctagcaagtgcaccaacagaaaaaca

SEQ ID NO: 745732 - DNA, 75 bp, Homo sapiens
aggagtaaggagaaaaagagtttccccagtgccttgtggcccagagttgctcagaattggagcagagcctgagac

SEQ ID NO: 745733 - DNA, 100 bp, Homo sapiens
tgtatcctgaagaatggcagtgagccggaagagccacaggattcggcaaagacggacacacaggctgacgccaagatggtgtgtgatgtggtgagtcgga

SEQ ID NO: 745734 - DNA, 83 bp, Homo sapiens
ggcttcctccagacctctcggcgcgggtgacttaagagattaaaattaatttggttgctgttggttctgaacaaataatgagt

SEQ ID NO: 745735 - DNA, 100 bp, Homo sapiens
cccgccggatcccccggaccccccgaccgtggggcaggagaccctgtaggaggaccccgggccgcaggcccctgaggagcgatgacggaatataagctgg

SEQ ID NO: 745736 - DNA, 75 bp, Homo sapiens
cgacagcagcagccatggaggacgagatgcccaagactctactctggccatctatgaccggtttggccggttgat

SEQ ID NO: 745737 - DNA, 100 bp, Homo sapiens
acctctgcgccatgagagccaagatggcccactgcgtgaccttggttcagctgtccatttcctgtgaccatctcattgacaaggacatcggctccaagtc

SEQ ID NO: 745738 - DNA, 90 bp, Homo sapiens
gcccaaaactacagttctgtcactcacttacacagtattgggaaatctgtgaaagtgttcaagaaggaagtgtatcttcatacatcacca

SEQ ID NO: 745739 - DNA, 122 bp, Homo sapiens
ggatgccctgcagtacctgcagaaggtctctggagacatcttcagcaggatgtacagttacccagcacgtgtacctcctcctcctcctattgctcgggctgtagtgccctcgaaacgtcagc

SEQ ID NO: 745740 - DNA, 100 bp, Homo sapiens
cagcacggatggaaagatggagatgaacctctaacacagtggaaaggaaccgttctggatcagtagaccaaattttggtacaattgaatcacactgcagc

SEQ ID NO: 745741 - DNA, 49 bp, Homo sapiens
gcgcggcggccccgggaccaaggagggggggccctcagcctcttggcct

SEQ ID NO: 745742 - DNA, 82 bp, Homo sapiens
ggccttagctgtgctcgcgctactctctctttctggcctggaggctatccagcaacccccagacctgactccggaggagcgg

SEQ ID NO: 745743 - DNA, 82 bp, Homo sapiens
gtccatgcggaagatcgtcgccacctggatgctggagaccatggtgaatccgggcagcagctcgcagccgcccccggtgacg

SEQ ID NO: 745744 - DNA, 100 bp, Homo sapiens
tgcatcatcacagcccttagaagtggtctccacaaaccggaggactacccccagactgcagtaagtgttgtcatggagactacagctttcgaggctacca

SEQ ID NO: 745745 - DNA, 99 bp, Homo sapiens
attctcttcaggggggcttcctctagattgaaagaaggtggcaagaggaagaagcagaagcagagagaggagtcgaagaagaagaagtcgaccaaaggc

SEQ ID NO: 745746 - DNA, 90 bp, Homo sapiens
cgtctggatttccaaggaagaatttcctctgaagcaccggggtattccctcagcggatactacacccatccatttcaaggctatgagcac

SEQ ID NO: 745747 - DNA, 90 bp, Homo sapiens
tgccaggagagaaaggtgaaaggggtactggatcttcaggacctcgggggctgcctggccccccagctgacttgagtcgcccaaagagca

SEQ ID NO: 745748 - DNA, 75 bp, Homo sapiens
cctggagctgctgttgcagcacttgttccccaaacaagtgctcctacattctggaagaccaacactgtcatctga

SEQ ID NO: 745749 - DNA, 100 bp, Homo sapiens
tgcagcatgacacggcctgtaccatcgcagccacggccagcgtggtcaaggagaagctggctgtctgtgcagacttttgcagacaaatcaaaacaagaag

SEQ ID NO: 745750 - DNA, 97 bp, Homo sapiens
ttgaccatggctgtagaacccagcagctcagaatccattaaaaggagagctgggaggagccctcggaaggctcggtcacactctccgagcacagcca

SEQ ID NO: 745751 - DNA, 74 bp, Homo sapiens
ctgaggacttaaatgaagccactgattagcaatttaaagatcctctccaaggtgattgaaatctctgaatatcg

SEQ ID NO: 745752 - DNA, 99 bp, Homo sapiens
tggaaaaagaaatggaacagaaacatagagaggaactggagcaattgaagctgactactaaggagaataaggaggtaatacagattttcattgaagaca

SEQ ID NO: 745753 - DNA, 83 bp, Homo sapiens
tggccgagcaggctgagcgatacgacggctcttgtcaggatggtgaagctgttcatcggaaacctgccccgggaggctacaga

SEQ ID NO: 745754 - DNA, 100 bp, Homo sapiens
gtgctgcagcagagcgcggcgcagaagtattaaaggtggaagaaggtccatatctttttctgtgggtgcttcaagtgttgttggaagtggaggcagcagt

SEQ ID NO: 745755 - DNA, 100 bp, Homo sapiens
cccggcggcggcggcggcggcgcgcgggggcgacgcgcgggaacaacgcgagtcggcgcgcgggacgaaggtgtggccgacgacgatgccctcgctgagg

SEQ ID NO: 745756 - DNA, 75 bp, Homo sapiens
gacacataacaagcagcagtgaggacaccaaaggttaccttgaggatagttttgtaaaatctggagtcttcaatg

SEQ ID NO: 745757 - DNA, 100 bp, Homo sapiens
agagggcacgcgggacgaggagccctggggtcccatcggatcatccagcagctcgtcaacggcatcatcacgcccgccaccatccccagcctgggcccct

SEQ ID NO: 745758 - DNA, 90 bp, Homo sapiens
cggaagtgcagctgcctcagttcttagcgcagggcctgccttaagtgtgaaagtaatgactgatgaaagtggaaaatccaaaggatttgg

SEQ ID NO: 745759 - DNA, 98 bp, Homo sapiens
atctccttacagcccgcagacacaagcataagcagtactataatggatgtagacagcacaatttccagtgggcgttcaactccagcaatgatgaatgg

SEQ ID NO: 745760 - DNA, 101 bp, Homo sapiens
agatccgcagctccacgcagcaagacccgcgccgccgggacccccaggacgacgtgtacctggacatcaccgtttcccgtcaccaattttccttggaattg

SEQ ID NO: 745761 - DNA, 80 bp, Homo sapiens
taacgtgagcccgctgcaggtgtgcggcccagtccgagacagcagatttggagcaagaggtggtggtggccttcccccga

SEQ ID NO: 745762 - DNA, 101 bp, Homo sapiens
atttgggatcactggaaagtcagcatgattttcgaaccccggagtttggtcgacaagaagatgctgaggaatacttaggcttcattctaaatggacttcat

SEQ ID NO: 745763 - DNA, 50 bp, Homo sapiens
atcgtttgggcaaagtacttgttcaaaactgaagctagtttagcctcacg

SEQ ID NO: 745764 - DNA, 80 bp, Homo sapiens
atggctcaaagaaagatgattatgaggctgagctccagagggtccagaaggtccgagagctggaactggtctatgcccgg

SEQ ID NO: 745765 - DNA, 78 bp, Homo sapiens
tgtggagagttttctagaagcctgtcgaaaaatgggggtgcctgagaacccttaggagaaatcttgagagtggacagc

SEQ ID NO: 745766 - DNA, 96 bp, Homo sapiens
agatgtaggacatctccatcaattcaggaggctccctccgggttacccccactccagagagggagaccaagacatcattgttttgaagtttctgaa

SEQ ID NO: 745767 - DNA, 100 bp, Homo sapiens
tgcatgtctggctacctcgtggacaagtttgcagatcgggagcgcaaggtcgccctcaaggccatgatcaaaacgtttccttgggtcttctcaggaccgt

SEQ ID NO: 745768 - DNA, 75 bp, Homo sapiens
ggctgcctcctgcagcccccatagcagagaccatggtgagagcaccagcaagctggccagtgtgacccgcagcgt

SEQ ID NO: 745769 - DNA, 82 bp, Homo sapiens
cactgctgagtcacacacaacgcttgttatgttttcatcacttctctccagaagtataccaacagatgttttaaagattgtg

SEQ ID NO: 745770 - DNA, 133 bp, Homo sapiens
ccccagcatgggctcctctgtcaatgacgctttaaagagagataaagatgccatttatggaataactgaagtgaagtgatggactccgatttggagagtagtaagacgtgaaaggaatacacttgtgtttaag

SEQ ID NO: 745771 - DNA, 75 bp, Homo sapiens
aattttagggtcctttatatagaagggagagtagtgcgccctatccactcctccacatccagccctaccatctcc

SEQ ID NO: 745772 - DNA, 98 bp, Homo sapiens
gcaggaggcccccacccacagcactggaccaagtttgaagaaaacaggtctgaaacaaggtcttacccccagctgcttctgaacacagtgactgccag

SEQ ID NO: 745773 - DNA, 113 bp, Homo sapiens
attaaggtggacagccaaacagaagctttattcgagaacagaatctaaaggaatgtgcacatctcctcctcttattaaacatggagtcattattagttcaacagtagacacct

SEQ ID NO: 745774 - DNA, 82 bp, Homo sapiens
tactctctctttctggcctggaggctatccagcggaatcccgctggctccgtggtgatggaacgcatccggatggacattcg

SEQ ID NO: 745775 - DNA, 75 bp, Homo sapiens
tcgggacggaggacgcgctagtcatgcttttcacttccactgcatctctcgctggctcaaaacacgacaggtgtg

SEQ ID NO: 745776 - DNA, 73 bp, Homo sapiens
ttgaagaaatacagcttggtgaagagttactagctcaagccactgaagatcctggtgtcgccatgggccgccg

SEQ ID NO: 745777 - DNA, 100 bp, Homo sapiens
tgcgaggagcccatgtcctatgactcagacctgggcacagcaaatgctgaggactcagaccagtctctgcaagagtgggtgcctgagtctgcacgctggc

SEQ ID NO: 745778 - DNA, 75 bp, Homo sapiens
agcggagcagtggaagaccaacgaagcccaagccatagaaacagcttgataactatggacagcaagaacttgcgg

SEQ ID NO: 745779 - DNA, 75 bp, Homo sapiens
aagtcgaaggggaaggcgcctgaagaggacgaaggctacgactggcaaagatgagggaggctgaagcggcccagg

SEQ ID NO: 745780 - DNA, 50 bp, Homo sapiens
acatgagacagtagccaaagccccagatggagtcctgctctgtcacccag

SEQ ID NO: 745781 - DNA, 83 bp, Homo sapiens
ctcccagtgacgggtctggagtgcgtgggggaccggctgttggcggtctcttgcatggcaccaagaatgttaccaattcaagc

SEQ ID NO: 745782 - DNA, 100 bp, Homo sapiens
acagggtcacagctctcacccagatgtgcctggcatcagaagggatgaaaatggaagaatcaaagctaataaaagcaaaagaatccgatggtggaagaat

SEQ ID NO: 745783 - DNA, 100 bp, Homo sapiens
cgggattcccagccatggcagattcctccgggcagcaggacttaattcagtgcacaaatgagatgaatgtgaacatcccacagttggcagacagtttatt

SEQ ID NO: 745784 - DNA, 100 bp, Homo sapiens
tgggacttattgcctgttcagtactgtgggtgatatttgcctttagtgcactcttctccttcacagtaaagtggctggttgttcttgcagaacatgccag

SEQ ID NO: 745785 - DNA, 75 bp, Homo sapiens
tgaagactaagaatatgagaaacctgaatccagaagatgctgagatgaatcgtcacctgtgtgtttggcttttta

SEQ ID NO: 745786 - DNA, 98 bp, Homo sapiens
tgccattagttgaagaaacttctttactggaagattcgtcagtgacttttcctgtggtaataatagctatgcaagaagaggccttgaagctggtgtta

SEQ ID NO: 745787 - DNA, 50 bp, Homo sapiens
gcggactcttcttcgccttcgacaattctgtggtgttcttggtcacacat

SEQ ID NO: 745788 - DNA, 83 bp, Homo sapiens
ggcactggcaccggcagcggcggcgcgggcggaggcagcagcaggcgacaatgcagatcttcgtgaagactctgactggtaag

SEQ ID NO: 745789 - DNA, 100 bp, Homo sapiens
acacttacaacaaaccagatgtcagtctgcaggtataaatcaaagccattctgtgaaaaactgctttcctgggtgaaaagcagtggctgtgccagagtca

SEQ ID NO: 745790 - DNA, 75 bp, Homo sapiens
gccggatccagcatctctccaccatcgactacgtggaggacgcatccggtgaaagacagagatcacatttcaact

SEQ ID NO: 745791 - DNA, 82 bp, Homo sapiens
ttggaaagtcaggaccgcgacggcagcagagcaccactatgagaagattataggaaaaacaccaagactagaggactctggg

SEQ ID NO: 745792 - DNA, 100 bp, Homo sapiens
aggaagtaacagctagcagtcgccactatgttgacaggctatttgaccctgatccccagaaagttctacaaggtgtcattgttccttgcctgtatctccc

SEQ ID NO: 745793 - DNA, 82 bp, Homo sapiens
gggagcgcaaggtcgccctcaaggccatgatcaaaacagccagcagccacccccgcccagccaacacctccccaggcccaag

SEQ ID NO: 745794 - DNA, 100 bp, Homo sapiens
gccggaaggggcaagacgggttcagttcgtcatggggctgtttggaaagacccaggagaagccgcccaaagaactggcagctggctaagagtcttgggca

SEQ ID NO: 745795 - DNA, 50 bp, Homo sapiens
gccgcccgcccgccgagcagccatgaggacatggccaccgtgttcccagc

SEQ ID NO: 745796 - DNA, 82 bp, Homo sapiens
gcggctctaacggggctttctacaaggtcaagggctcagaggtttgcagggccctcctgggaagatggggcccccaggaaac

SEQ ID NO: 745797 - DNA, 75 bp, Homo sapiens
tatcaaaggaaagatggatccagacaaggtgacttaagagattaaaattaatttggttgctgttggttctgaaca

SEQ ID NO: 745798 - DNA, 50 bp, Homo sapiens
agaaaatgttaaggagtcatcaagctgtccgcaggcttgtccaaaaggaa

SEQ ID NO: 745799 - DNA, 96 bp, Homo sapiens
ggctgcacacggtcaactccaggcacgaggccagcctgaagttgtacaagaacgtgctggccaaagcgctctatgacaatgtggccgagtccccgg

SEQ ID NO: 745800 - DNA, 101 bp, Homo sapiens
ccagggcccgcccaggacccccaagccgccgcggacgcaggctccctgactggcagtcctcacctttccgagctgtctgtgaactcgcaggggggagtggc

SEQ ID NO: 745801 - DNA, 90 bp, Homo sapiens
cgagaccgtgaccgagagcgtgaccgagagcgcgaatatcgtcatcgttagaagttcatggacttaaggactcgctacacggcattggtg

SEQ ID NO: 745802 - DNA, 82 bp, Homo sapiens
cctggaatcgcccaagtccctctactcgcgagggtttgaaagtattcttgaagggctgtttggacctgcattattaaaagat

SEQ ID NO: 745803 - DNA, 75 bp, Homo sapiens
tgagatttcacttccctgtcaactcttcagctcggtgcagcagtaccgcgtcgccatgactgccaaggactgctc

SEQ ID NO: 745804 - DNA, 96 bp, Homo sapiens
gaggagtgcggaacccgcgggagacgcaaacatgcagatctttgtgaagaccctcactggcaaaaccatcacccttgaggtcgagcccagtgacac

SEQ ID NO: 745805 - DNA, 96 bp, Homo sapiens
cagtggcagccccatgcgagcacccgaggaagaaccagaccttctggcactggccacaacagatggaagccaatttttcagagacccaaaggacag

SEQ ID NO: 745806 - DNA, 100 bp, Homo sapiens
cgcttcatcaaggaaggcaagcctgcctgcttctgcatcgacagatagccgtcttcagcttgagccccatcactagtgttctaagaacggaagcatctgg

SEQ ID NO: 745807 - DNA, 100 bp, Homo sapiens
ccggataattctttttatgtgcgaacatgtaacaagaatccaaagaaaacaaaatggtggtatcatgggtagatacaacaagaattgaatactccattcc

SEQ ID NO: 745808 - DNA, 75 bp, Homo sapiens
tgctattcactctgctttacaagtaccatgcggagaccatcaagaatgtgcgcacagccacggaaagctttgctt

SEQ ID NO: 745809 - DNA, 100 bp, Homo sapiens
ggagtaaaccacagactacgagggagtttgacagctattaaaaccagggctccacagttaggagtggtctgcaagaagaatctggacagtaccactgtgg

SEQ ID NO: 745810 - DNA, 98 bp, Homo sapiens
ggcgcgctcgagacgctcctgaggtgatgtgccttcaggacttttttggtgatgatgacatttttattgcatgtggaccggagaagttccgttaccag

SEQ ID NO: 745811 - DNA, 75 bp, Homo sapiens
tgcaacagtggccgcacgcataggttgggggccgtcccgctcctaaggcaggaagatggtggccgcaaagaagac

SEQ ID NO: 745812 - DNA, 60 bp, Homo sapiens
cggggcttcacgctggtggggatgaagatgctgcagctgtccccgccctactccggaccg

SEQ ID NO: 745813 - DNA, 100 bp, Homo sapiens
gcgacacacgggccaaatatcgagagggacgacggcctcgtgctgtgaagattgtagaaggcatgaaacaaaaaatgtggagtattgaaaatattgcctt

SEQ ID NO: 745814 - DNA, 74 bp, Homo sapiens
tcggggatcggtcgcctgagaggtaactaggatttctacctcaaccgcgagacctatgcaaggacggtgtggac

SEQ ID NO: 745815 - DNA, 74 bp, Homo sapiens
ggttctggacaagatgaagtctttctgccagattaaaaggagcccaagccccatctcatcctagcacaccctcc

SEQ ID NO: 745816 - DNA, 100 bp, Homo sapiens
gaagcatcgaaagcgttggagaggtgttaccggaacggcggcgacaagggtgttcccgaactagagtgggatcctgttcccagtgggttttctgcagggg

SEQ ID NO: 745817 - DNA, 75 bp, Homo sapiens
gaagaagaacatgggaatgattgttataaatgaaggctctcttgatatattacaccaccatattgcctcagtaga

SEQ ID NO: 745818 - DNA, 101 bp, Homo sapiens
agaccgtgctgcaccgcgaggcgcagggccacgagtccgactgcttctgcagctacttccgcccgggaatcatggtccagtgtccatcaaagtccaggtgc

SEQ ID NO: 745819 - DNA, 82 bp, Homo sapiens
aagggaccacggtcaccgtctcctcagagttgcatgctgagaatttgaaaaatgaagatgatgtagacactggactattagg

SEQ ID NO: 745820 - DNA, 95 bp, Homo sapiens
cttgagcgtgagcacttctggaagatcattaatgccttccgctactacgggatgtggagagcatcttgtgcgcaccatactggctagagaatgtt

SEQ ID NO: 745821 - DNA, 100 bp, Homo sapiens
gctgggaaacaattctgtgttcaccctcaccctgcaggctggcctctcagccatcaagacacccgacgaagcggagcaggtgtgggtgtgggagtacgag

SEQ ID NO: 745822 - DNA, 75 bp, Homo sapiens
catcccgggcactatgtgaatttggggtctctaattaacagaagatggcaaagcccagccacagcagctatgtcc

SEQ ID NO: 745823 - DNA, 100 bp, Homo sapiens
ctcatactggctgatgcgctctgttacgcacacacgtttaacccgaaggtcatcctcaatgccgccaccttaacagcatcaggatactcaaagtggaaag

SEQ ID NO: 745824 - DNA, 80 bp, Homo sapiens
agcttggctacgtggtgcaagagtcaggccagaacttcagcaccctggctgagaagagacgagttgtactgctgtcacag

SEQ ID NO: 745825 - DNA, 83 bp, Homo sapiens
agtgtaccagcagggcgttggctatgtgcccatcacaggccagctgcgggccgtccagcggctgtgccacttctacagcgccg

SEQ ID NO: 745826 - DNA, 100 bp, Homo sapiens
gagcgcctcgtcgacatgagtgatgtggaggaaaacaacttcgagggcagagttccagcaacagatagaaatgctttaagttcactctggggaaagctgg

SEQ ID NO: 745827 - DNA, 101 bp, Homo sapiens
cgttgctggtgacagcaaaaatgacccaccaatggaagcagctggcttcactgctcagtttggccagatcctggatatcctggtatcacggagcctgaaga

SEQ ID NO: 745828 - DNA, 100 bp, Homo sapiens
aggggctctggaaagaccgggtccaggtggccattaaggtgatttctcgagactggcacagcctccaggttggcgggctcatctgcgctggggttctgtg

SEQ ID NO: 745829 - DNA, 75 bp, Homo sapiens
ttatcctctaggtcccaggaatgaaggtaacctggatgaggacatcattgcagaagagaacatcgtttcccgaag

SEQ ID NO: 745830 - DNA, 90 bp, Homo sapiens
ccagatactttctccataaggcgaaaagttgctgccaaacaaggtgaatccgacccagagaggaaagaaacaaggcagaaagtagacgac

SEQ ID NO: 745831 - DNA, 100 bp, Homo sapiens
ctcaccgccgccgccgccgcgggatccgagtgcgggcgcgggcgcgggcgctcccggcgagccacggcttcaacggaccacaccaaaatgccatctcaaa

SEQ ID NO: 745832 - DNA, 83 bp, Homo sapiens
cagatctctgcagttacaggaacatcgtctgcttcatggctctgctgccatgaaggtgaagattaagtgctggaacggcgtgg

SEQ ID NO: 745833 - DNA, 98 bp, Homo sapiens
ctggatcatggctgccgcgccgccgctacgggaccgcctgagctttctacaccgggaatactcccccagttgcaagaggcgcaggaccgtggaagact

SEQ ID NO: 745834 - DNA, 100 bp, Homo sapiens
tgaaaagtcaagaacaggaatttaaagcacattgtcgaaactgataaatttcaaacggaagagagtggcagcatttagaaagaatctaattgaaatgtct

SEQ ID NO: 745835 - DNA, 98 bp, Homo sapiens
ccatgcttcagtgcgcaggaagtggggcagctgcgggcgctgcgtgccgtgttccggagccagcagcaggtgcagagcattgtagaccaaggagccat

SEQ ID NO: 745836 - DNA, 98 bp, Homo sapiens
ccggagcggcccaggagcacgccgcggggagcgcgggcgtccggggctggagtcgcgcaggcttctctctgggctccacagtgcagtctcacactaaa

SEQ ID NO: 745837 - DNA, 99 bp, Homo sapiens
catgggaatggacttcagactggtggactgttcatcattctgttgaagaaacgcttaacccagaagagcctaggctggatgtcttgatcaataacgcag

SEQ ID NO: 745838 - DNA, 100 bp, Homo sapiens
ttcagcctgcccgaagaggaaaggaaggtggtcgaggcccgcgccacgagactccgggactttcaagctcctccatttacaacctacaaagataaaagaa

SEQ ID NO: 745839 - DNA, 74 bp, Homo sapiens
gggacttcacctttgtctcctcagcagacgcggaagatagggatgaggaagaaatgaccaaacgagatgacaaa

SEQ ID NO: 745840 - DNA, 97 bp, Homo sapiens
gccagctggtggaggcgatagacgagtatcagatatgatccagatcctgatgatggatttaactataaacagatgatggttagagatgagcggaggt

SEQ ID NO: 745841 - DNA, 80 bp, Homo sapiens
aaacaagaagatgcttctaaaaggtttttgccaatccagaagactgtgtagcatttggcaaaggagaaaatgccaagaag

SEQ ID NO: 745842 - DNA, 75 bp, Homo sapiens
agctatgatggagactttgtctttgatgactcagaagctattgttaacaataagacatggatgaataatatgatg

SEQ ID NO: 745843 - DNA, 75 bp, Homo sapiens
ctggaggtggagccttgcccggcgagacgttgaggaatttgctgattcccttggaattccgtttttggaaaccag

SEQ ID NO: 745844 - DNA, 97 bp, Homo sapiens
cccctgtgtggccaagaagctggtgtgcggagatgaagaccaagatcactccatggatgaaatgacagctgtggtgaaaattgaaaaaggagttggt

SEQ ID NO: 745845 - DNA, 80 bp, Homo sapiens
gccgatccagcctgcggagcctgtggggcagatccgcctcacggacacgctgggcaggctctcgcacatcctggagatgg

SEQ ID NO: 745846 - DNA, 82 bp, Homo sapiens
ctgagcgtgctgcggacggcgctgcggtacatccagcaagagtgagccatggagctacgtgtggggaacaagtaccgcctgg

SEQ ID NO: 745847 - DNA, 75 bp, Homo sapiens
cgtcttccacttgcacgaaagctttcctaggccaaaaagagaaatgcatcttctgcagacaccgggttaagaggg

SEQ ID NO: 745848 - DNA, 100 bp, Homo sapiens
tccataaagaatggcccttgtggataagcacaaagtcaagagacagcgattggacagaatttgtgaaggtgggtttggaggatttgggacaacatctaca

SEQ ID NO: 745849 - DNA, 87 bp, Homo sapiens
agatctacacacaatgagctggaaaagaatcggttataaaacatggaggctggctcagtggttcgagccatttttgacttctgccct

SEQ ID NO: 745850 - DNA, 98 bp, Homo sapiens
ggaggcggagctgcaacgctacagtgacttttttgaacgaaccattctgtgcaacagccttgtgtggagttgtgctgtgacgggtagacctggactga

SEQ ID NO: 745851 - DNA, 74 bp, Homo sapiens
aatggttcagccccagtccccggtggctgtcagtcaaagcaagcctggagatatccctgttcagtactgcgccc

SEQ ID NO: 745852 - DNA, 100 bp, Homo sapiens
atgacaacaagaaagtgcagataagcagggatgggcaggaacgaatgcaggaatttgggaactgagctgtgcaagtgctgaagaaggagatttgtttgga

SEQ ID NO: 745853 - DNA, 82 bp, Homo sapiens
cagcctggtgtgaccgcatcctcatgtccccgtctgccaaggagctggtgctgcggacctgcctagagctggaacgttacct

SEQ ID NO: 745854 - DNA, 75 bp, Homo sapiens
ggctgcgtcgcccgaggcgaggaggagcgctggcgggaactactggagaccacgtgccgcctggccaacacgctg

SEQ ID NO: 745855 - DNA, 100 bp, Homo sapiens
tcgctggagtccgcgcctccctggaacccagcgggtgccgcttctccacccgaggcttccacctccaacgagccatgttccaggctgcaggagccgccca

SEQ ID NO: 745856 - DNA, 106 bp, Homo sapiens
ttggtttcgggatctcggtgctgcagacggcgagacctcctgcacaggtgtcgtgaaaactacccctaaaagccaaaatgggaaaggaaaagactcatatcaacat

SEQ ID NO: 745857 - DNA, 147 bp, Homo sapiens
gaggagtgcaacaaccactggttctccaggaaccgaaaaggcgaggagtatagtacggcaaaaaactgtcgccctaccacttatgtcttggatgaagatgaacctcgattccttgaagaagttgattacagtgcagaaagtaatgat

SEQ ID NO: 745858 - DNA, 95 bp, Homo sapiens
gagacgaagagacagctggatgaaaataaggaagaagtgatggctgtgaggcttcgggaagcagatagcatagctgctgtggctgaactacgaca

SEQ ID NO: 745859 - DNA, 83 bp, Homo sapiens
agagccttggaagtcaacactgtcagtcaagctgaactagcagaaattccagaaggctatgtcccagaacactgggaatatta

SEQ ID NO: 745860 - DNA, 75 bp, Homo sapiens
agttgctgtttactgttgctgtccgtaaactggaacctctgttcactcaagcttgtggctgaggacctctcccag

SEQ ID NO: 745861 - DNA, 98 bp, Homo sapiens
tggcggcgcccccgcagcccgtcacccacctcatctttgacatggacggacttcttctgggaaagttcacatccttggctccttccaaaatatcaaga

SEQ ID NO: 745862 - DNA, 100 bp, Homo sapiens
cctcattcttccatcctcagaaccaggatgaagttaaaggaagtagatcgtacagccatgcaggcatggagccctgcccagaatcaccccatttacctag

SEQ ID NO: 745863 - DNA, 100 bp, Homo sapiens
tcaacggagggctgcggagatcggtagcgcctgctgcccccaccagacgttatgaagaggacatgtactggaggagaatggaggaagaacaacatcattg

SEQ ID NO: 745864 - DNA, 124 bp, Homo sapiens
cgcagtcctactcccgccgagacccgccgctccggtcctgccccgaactgcccacggccggcagcgcttccagataggatttttgggccttggtctcatgggaagtggaatcgtctccaacttg

SEQ ID NO: 745865 - DNA, 100 bp, Homo sapiens
cagcccagacagctgcaagtcaccatggacgctgaagggtcggcactcttcaccctcccgagccctgcccgtctcggccccatgcccccaccagtcagcc

SEQ ID NO: 745866 - DNA, 75 bp, Homo sapiens
gaccaactggcatcccacagcctcctcttccagaatgcctttgcgcagaaatgaaagctcattagcatctacact

SEQ ID NO: 745867 - DNA, 101 bp, Homo sapiens
caccacagccaagccatcagtacccagtgctgacagtgagacacccctgacccagccatagcaccaagactgatgccagtagcactcaccatagcacggta

SEQ ID NO: 745868 - DNA, 74 bp, Homo sapiens
cggagcctggcgggcgtgggaacccaggccccgccgaggcggccagacaagtgggtttggactcggatgaaccc

SEQ ID NO: 745869 - DNA, 100 bp, Homo sapiens
aatcactgctgaacagatacgccgtggagggacgagacctgaccttgcagtacaacatctacaatgttggctcaaggaaggatttgatgccctggatccc

SEQ ID NO: 745870 - DNA, 100 bp, Homo sapiens
ggggcgagcctggaggattgtcactccaacctcttttcgctggtgaatccgccatactacatcccgctggttgagctggtcccccacccggagacggccc

SEQ ID NO: 745871 - DNA, 100 bp, Homo sapiens
gccgggacgggctgcaggcgggggtgctgcagaggacacgaggcggcgggctggagacatggaccgcggcgagcaagctgtcccctttcctccaacccaa

SEQ ID NO: 745872 - DNA, 80 bp, Homo sapiens
gtcagacctgtaggcctgatagactgattaaaccacagtttttcagaagaagtgaagtcaagatgaagaaccatttgctt

SEQ ID NO: 745873 - DNA, 100 bp, Homo sapiens
agcctctcgagtagctgggattacagttctgggaggtgatcagtgatgaacatggcatcgaccccaccggcacctaccacggggacagcgacctgcagct

SEQ ID NO: 745874 - DNA, 101 bp, Homo sapiens
ctgccgcgttagttccgagcttgaagtcaactgtgagcatcaggtggcaaagctcaatcaggacaattctgaaacagcagaacaatgtggaacatcctcag

SEQ ID NO: 745875 - DNA, 100 bp, Homo sapiens
catgtccctgtaacgatgagtgagctgacagctaaggggcttgcctaaaccacacagaatttcgctaaggagtttgtgatcagtgatcggaaggagctgg

SEQ ID NO: 745876 - DNA, 100 bp, Homo sapiens
tctcgtccagggtcatgggaggcaccgagttcgtgttcaaagtttcctagaggaagttctggcttctggactgcacagccgaagcaaggagagctctcaa

SEQ ID NO: 745877 - DNA, 88 bp, Homo sapiens
gggctgatccggcagggctacgcctgcgaggccatcaggaaatatggccgagattttcaggcaatctcagacgtgattgggaacaaat

SEQ ID NO: 745878 - DNA, 100 bp, Homo sapiens
ctaacttcagcggtggcaccgggatcggttgccttgagcctgctaaggagagagtgttgaaaaaaggagagcaccaaatacttgttgacgaaaaacctgt

SEQ ID NO: 745879 - DNA, 75 bp, Homo sapiens
gtttacctaacacgtctttgcaaggagagacagcgtctggagaccatcctcagtctctgtgctgaatacacaaag

SEQ ID NO: 745880 - DNA, 51 bp, Homo sapiens
gtagacaccagctccgaaatcaccaccaagacatgcacatgatggtgtcca

SEQ ID NO: 745881 - DNA, 75 bp, Homo sapiens
cactattattttggcacaacaggaagaacgctgtaaatgtaagcctattagagctacacagaagacctatttccg

SEQ ID NO: 745882 - DNA, 73 bp, Homo sapiens
gtccttctgcagtccctcgtccagccacccccagacgtcattgtccctgagaatggagaaccagtaggcacca

SEQ ID NO: 745883 - DNA, 98 bp, Homo sapiens
tttcttggtttcatggatactgattcagcacttagtgaagttcctcaattgaagcaagagatttctgaatggagtggtcacacgttacttgccttctg

SEQ ID NO: 745884 - DNA, 75 bp, Homo sapiens
gaacgttgcaaactctggaaaaaaacttgggaatgaattcttccaaaacaaaactagaactgcaaaagcacctga

SEQ ID NO: 745885 - DNA, 95 bp, Homo sapiens
taatgcaaacatgtgggaatgtctccaatcaatttcagttagaatgtggtccaacccatgaaggagctatatggaattaacctctcagatggcct

SEQ ID NO: 745886 - DNA, 83 bp, Homo sapiens
cgccggccgtctccttaacaccgaacaccgtaatctgtaagtcagatgctccaacaggggatgttcttcttgatgaagctctg

SEQ ID NO: 745887 - DNA, 98 bp, Homo sapiens
cacggcgggcgggcgagcgaggggctaacttcagcggtggcaccgggatcggttgccttgagcctggaactttccgctgtactttttgccatacagag

SEQ ID NO: 745888 - DNA, 50 bp, Homo sapiens
tgcaaaaccacaccgacttcaaggacaagcatcctggtggggaagaagtt

SEQ ID NO: 745889 - DNA, 90 bp, Homo sapiens
tgcagccccaggatgcctcgcaggtgcccagatagatgacaacaatcccaggcgcaccggccaccgcatcgtggcgccccctggtggccg

SEQ ID NO: 745890 - DNA, 132 bp, Homo sapiens
ccggattccagcccggccggggcctgcgggcgcccagagccgcgccgtccgcgccgcccgttctggtgtccctggccagtgtccttccacctgtccacaagcatggggaacatcttcgccaacctcttcaag

SEQ ID NO: 745891 - DNA, 100 bp, Homo sapiens
gttcatccgaccctgctaacccagactcacataagaggaaaggatcgccatgtgacacactggcatcaagaaactggcagacctttcacttcgtatccaa

SEQ ID NO: 745892 - DNA, 100 bp, Homo sapiens
gcattctatcatggaaggaggagatgaagggcaagggccaaaatgatggatgtggagagcatcttgtgcgcaccatactggctagagaatgttcacatgc

SEQ ID NO: 745893 - DNA, 90 bp, Homo sapiens
tgggatggaagaccaaccaagagatcaagctatctctgcgaatcaggtggaatgcatccttgggacatctttgcatagccccatctagga

SEQ ID NO: 745894 - DNA, 82 bp, Homo sapiens
acctacgtcccgctgccgtcgccgccgccaccatgcccaagagaaaggatgtcagtgggcccctgagggagctgcgccctcg

SEQ ID NO: 745895 - DNA, 75 bp, Homo sapiens
acgccttggtgggctggatgctggagcacacggaggccgtgatgaaggctgagcagtccaaagtcctgagcgccg

SEQ ID NO: 745896 - DNA, 51 bp, Homo sapiens
ctttcaactatatttgagcatacccaggaacttttcacacctgagtgcaaa

SEQ ID NO: 745897 - DNA, 75 bp, Homo sapiens
tccagcaaggtcggcagagcaaggggcttacgcagaaggacctggccacggtgccaagtcctgccctgccaactt

SEQ ID NO: 745898 - DNA, 82 bp, Homo sapiens
gcctaacttctactgacgaagcttggaagttgcagaagtgcctccggagccagcgtggtggccatagacaacaagatcgaac

SEQ ID NO: 745899 - DNA, 98 bp, Homo sapiens
tgagagcgagaacacgtgtcaagatgtggacgaatgtcagcagaacccaaggctctgtaaaagctacggcacctgcgtcaacacccttggcagctata

SEQ ID NO: 745900 - DNA, 100 bp, Homo sapiens
gtggccacctatggcttttggggatgttttagaagaatgtatgtctcttcccaagctatcttcttattctggatgggtggtagagcacgtcctaccccat

SEQ ID NO: 745901 - DNA, 83 bp, Homo sapiens
cgccgagccggcggccgctcccttccccgcgcagccccgcacggcccgggcccacgttggacgtgataagtatgagcctgcag

SEQ ID NO: 745902 - DNA, 83 bp, Homo sapiens
ccagattacattaatggatatacctgtgtttaaagctatccagccggaggagggcctgaggctatggcaggaggagcaggaga

SEQ ID NO: 745903 - DNA, 78 bp, Homo sapiens
gcgcatgcgcatattcagggcggaaggcgcgctaagagcagatggtccccatccctgctggagtatttacaatgggca

SEQ ID NO: 745904 - DNA, 80 bp, Homo sapiens
gagctgcatttgggtgccctccatggccaggaggacacccctggtggcctgcttgtgctgcactagctgtgaggataatg

SEQ ID NO: 745905 - DNA, 100 bp, Homo sapiens
accccaatgccaaggtggcctgtgaggagaaggcagagcccccccaggctatgaatgccctgatgcggttgaaccagctgaagccagggctgcagtacaa

SEQ ID NO: 745906 - DNA, 82 bp, Homo sapiens
ctggcactgtggttcctgcatgaagacagtggctggcggtgcctggacgtacaagactgatggatacatcgtctgcgaggaa

SEQ ID NO: 745907 - DNA, 100 bp, Homo sapiens
aacgccgacggcttctccacctacgtgtgcctggtgctgctggtggccaacattttgcggatactcttctggtattgttgcagcatctggcagtgagact

SEQ ID NO: 745908 - DNA, 100 bp, Homo sapiens
actgtattcagccctccatgtccttagtagccgactgaaacagggagaacacagccagcctttggaggaactactcagaagctgttgatttctccaaaat

SEQ ID NO: 745909 - DNA, 101 bp, Homo sapiens
gctgaatgccagcacactgatgaactactgtgcagaaattattgcaagtcattggaggaggaagaaggtgggaaaggtgaaaagaggaagagagaaacaga

SEQ ID NO: 745910 - DNA, 80 bp, Homo sapiens
atctgaagaaaagtagaaggaaaaacagaacgttgcaaactctggaaaaaaacttgggatggttcctacctggctgagtt

SEQ ID NO: 745911 - DNA, 100 bp, Homo sapiens
gtgagtcggatcgcagcttggatggccacttacctgaatgaccacctagagccttggatccaggagaacggcggctggccaaacaggcaggactcgtgaa

SEQ ID NO: 745912 - DNA, 77 bp, Homo sapiens
cccgaagaagaaaggattcgttacagccagagattgaaagaacattggagctatcatgtctggaagtgtgtttgcaa

SEQ ID NO: 745913 - DNA, 90 bp, Homo sapiens
ggcccacacgactagaaggacgactgcctggcgcgatacaaaaatgagctgcatctctgcgtctcccgcaagcacttcgctctggaacgg

SEQ ID NO: 745914 - DNA, 96 bp, Homo sapiens
cgtcagacaagtgcactcaacagaacggcccttcaaatgtgagggaaatcctcattgacgattcaatttgttgaaggccaatttgtggactcctac

SEQ ID NO: 745915 - DNA, 76 bp, Homo sapiens
tggcaagggtcccttcccccagagactgaatcagcccatgcagatcaacggcaacttctgtgggctggtgttgaac

SEQ ID NO: 745916 - DNA, 75 bp, Homo sapiens
ttaccatttaatcattgagctctatgatagggttaatttggagtggcccctggagtcagtttcctacaccatccg

SEQ ID NO: 745917 - DNA, 80 bp, Homo sapiens
gtctgaagatagatcgccatcatgatggagaaggaggagacaacccgggagctgctgctgcccaactggcagggtagtgg

SEQ ID NO: 745918 - DNA, 100 bp, Homo sapiens
gttgcctccgccgccaagagtgagcgagcggacccgcgatgggaaagctgtgtgaagagacaaagggagaatgccatgtgaagatggaggatcggagtga

SEQ ID NO: 745919 - DNA, 130 bp, Homo sapiens
caagccctcctcggcccctgagctccaggccgtgcgcatgtttgctgactacctcgcccacgagagtcggaggaaccattaaagagatcctggggactgcccagtcagtgggctgtaatgttgatggccg

SEQ ID NO: 745920 - DNA, 82 bp, Homo sapiens
cacttcttttttgagaaaggaaggaatatatcctgactgattcgctggccgcgcgccgaacccgagtccggcggcaccgacg

SEQ ID NO: 745921 - DNA, 75 bp, Homo sapiens
cgtggattccagaggggtgacagcgaaattgctgggctttgacaaacttcctctgtggggtaccatcctcatctc

SEQ ID NO: 745922 - DNA, 100 bp, Homo sapiens
ggcggagctaggagctggcggcgacggccacaggggcggcgacggcgcagtgcgaagcgaaacagacctgtgaccgcatcaagcagtcagcagctggcac

SEQ ID NO: 745923 - DNA, 100 bp, Homo sapiens
tgttacctgggaaccctggaggggccttcctcatccgggagagccagaccaggagagcttcaaaagcagtggactgtcttttggattcaaagtgggcaaa

SEQ ID NO: 745924 - DNA, 75 bp, Homo sapiens
tcaggctgcccagatggtggctcccggagtccaggcctccggtgtggctgtctctgatggtgtcatcaaggtgtt

SEQ ID NO: 745925 - DNA, 100 bp, Homo sapiens
gtttccttcaagctaaccaggatacagaacttggtggtttttgtaaacccagatgcggacgaaaagccctggtgctttattaaagttaccaatgacaagg

SEQ ID NO: 745926 - DNA, 82 bp, Homo sapiens
tcagcctcctgagtagctgggattacaggctgcacttaccagtgggctaccatggccgtgcctcctctgtcgtggtgtctgg

SEQ ID NO: 745927 - DNA, 115 bp, Homo sapiens
gtggacggccctgccgaccttggcgagagccccctcgcctttctcaccagcaacccagctagagacatgacctaacaccctgatgaccactctcagggaccttgagtgactggcc

SEQ ID NO: 745928 - DNA, 75 bp, Homo sapiens
aaattccagccctggaccttcttattaagattgcagagggaatggcatacatcgagcggaagaactacattcacc

SEQ ID NO: 745929 - DNA, 74 bp, Homo sapiens
agcataccaatgaacctctattcaatgcagtcattggagaaatcgatgaagaaacagattctgcgcttgatttg

SEQ ID NO: 745930 - DNA, 50 bp, Homo sapiens
ggcagattcaagcagctgcaagggacagcttaatgaagacaaactgaagg

SEQ ID NO: 745931 - DNA, 78 bp, Homo sapiens
tttacctacgttggcggccccagaagatgcggaggtggtggagaagccggccaaggaggaaacggtggtggagaacgc

SEQ ID NO: 745932 - DNA, 75 bp, Homo sapiens
catcctcctgtgctacaccacgaaggacagaataacgggctcccagattcacaagccccaccaagaggatcaccc

SEQ ID NO: 745933 - DNA, 106 bp, Homo sapiens
ggaaagaaggacaaggagttggtcctcgagtaaagagacggccacgccgacagaaacctggtggtgatctttgtgaagtctgtgcagcggtgcattgccttggccc

SEQ ID NO: 745934 - DNA, 75 bp, Homo sapiens
cgcgtctctctgctgcggcgcggggaccgctgtgctctcgactccgtgggaaggaggcttgtttaaactacggat

SEQ ID NO: 745935 - DNA, 74 bp, Homo sapiens
tttaaggatggtttagaaatggaaaaatgtagagttctactgtttcgaaccatggttaccaaggagaaggagaa

SEQ ID NO: 745936 - DNA, 100 bp, Homo sapiens
tcctggaaagctaccatgttcctgaattgattaagaatttactccagcaggttgcttccaaagatctgcttacaaatgttcaacagctgttggtagtgac

SEQ ID NO: 745937 - DNA, 82 bp, Homo sapiens
ccaaagtgcccggacccaaaacaggaagtgtcttctctttagggatggtgaggttggaaaaaggctcctgtaaccctcctcc

SEQ ID NO: 745938 - DNA, 51 bp, Homo sapiens
tgccactttcaacctgtttccggcaactctcacggcccaagagtgcggagc

SEQ ID NO: 745939 - DNA, 110 bp, Homo sapiens
gccaagcagccttagccctagtgtagagaatagagtatgagcctttggttgcatgctcttcttgtttagatgtctctgggaaaactgctttaaatcaagctatattgcaa

SEQ ID NO: 745940 - DNA, 75 bp, Homo sapiens
ccaggtgtaagcgcagaaagcaggcgaacccgcggcgcaataacgtccagttacaacacagggatcacaacaaac

SEQ ID NO: 745941 - DNA, 100 bp, Homo sapiens
ttctatcccatctacttccggcccctaatgagattggaggagtacaagatgctgcaatttgtcagtaatcaagtgggagagttccctgacttgttttcag

SEQ ID NO: 745942 - DNA, 75 bp, Homo sapiens
ccagaaggctgccgagggagactttaggacaagaggcgttgtttttgaggagacatcacagctttcccagatcgg

SEQ ID NO: 745943 - DNA, 100 bp, Homo sapiens
ccaagtctctttccagaggccaggctttatgggagcatgggttaccagcgacgcaccctgaggccactgtctgcagctcccgtgaagatgtccactccag

SEQ ID NO: 745944 - DNA, 90 bp, Homo sapiens
agaggaccccggtacatctgaaagccgggaaatggatacctgggatgaactcctaattggtagtgtagaagtgaaaaaggtaatggcatg

SEQ ID NO: 745945 - DNA, 79 bp, Homo sapiens
gaatgactcacactctcccttcttcctaccacaatgatgctcgaagagccaagattttcttcttcactcctcgcttggt

SEQ ID NO: 745946 - DNA, 50 bp, Homo sapiens
cagcagcagcatcctaaaacctctcagaacttacaatgtctcagaaaaat

SEQ ID NO: 745947 - DNA, 90 bp, Homo sapiens
gccccggccccctcccagcctgccgctccggagagccgcccgccgaggatgcgacgcaccgcaggagtggattagaacaagatgacatga

SEQ ID NO: 745948 - DNA, 75 bp, Homo sapiens
aatggagaatttgcaactcatcatagtcctgttcctaatgtggatctaccacccctgtgttcatcgagattccgg

SEQ ID NO: 745949 - DNA, 74 bp, Homo sapiens
cttgcttttgcttcagcgttctgtggttgtcaacaggtagctacagcaagctgggtagcaggcagatccaaagg

SEQ ID NO: 745950 - DNA, 75 bp, Homo sapiens
taccttctggaagctactactacgtggtgcttggaaagagcactacaaacaccactggtttcccgaaaagccgtc

SEQ ID NO: 745951 - DNA, 99 bp, Homo sapiens
agaaactttaaatcttgagaaaagaagattgtctatcatgaaggagtccgggaccatgtctggagaactaccaccaaacattaacatcaaggaacctcg

SEQ ID NO: 745952 - DNA, 103 bp, Homo sapiens
ctactgacaccttgtttgatgtgaatgccattgtcgcccatgttctcttccggttcttcttgatagcagtagcattcttgcagatcgtattcttctcatggac

SEQ ID NO: 745953 - DNA, 90 bp, Homo sapiens
gtgagcgcgccggaccaagcgggcccagaagcgggtttgtctacagattttgagcgttcgaagttgacccctgactaagtatactttgct

SEQ ID NO: 745954 - DNA, 100 bp, Homo sapiens
aggacgacgcagttccacagtctgatggagttcgaggaatttataaacgcaaacatgcagatctttgtgaagaccctcactggcaaaaccatcacccttg

SEQ ID NO: 745955 - DNA, 50 bp, Homo sapiens
cgtctccagactccacactcctagcaagcatttataagacgctgtttggc

SEQ ID NO: 745956 - DNA, 50 bp, Homo sapiens
cgcgtgttgggggcccccggagaggtggctgaagccatactattttatag

SEQ ID NO: 745957 - DNA, 83 bp, Homo sapiens
cgcgtccagcacctacgtcccgctgccgtcgccgccgccaccatgcccaagagaaaggtactgtctgatgagcgtgaaaggtt

SEQ ID NO: 745958 - DNA, 100 bp, Homo sapiens
gaaggcagcggcggcccaggccagcattcccgcaaccagagtctcactgtcgcccaggctgcagtgcagtggtgccatcacgcgtcactgcaacctctgc

SEQ ID NO: 745959 - DNA, 82 bp, Homo sapiens
gccgaaaatgcccccagcaaggaggtgctcgattcgttcctggatcttgcgagcggttgtggaacaggaaatgaaaaaggac

SEQ ID NO: 745960 - DNA, 85 bp, Homo sapiens
gaataagaagaacaaactgacgcagagtaaggtggagttctacttcctttcccagtacgtgtcgccagccgactccccgttccgc

SEQ ID NO: 745961 - DNA, 51 bp, Homo sapiens
caagagtgaaatccagaaggaggaatgggtaccacagaccatgtcatcgtc

SEQ ID NO: 745962 - DNA, 75 bp, Homo sapiens
gttcttgtttgtggatcgctgtgatcgtcacttggctcttgtcaggatggtgaagctgttcatcggaaacctgcc

SEQ ID NO: 745963 - DNA, 50 bp, Homo sapiens
gcgaacccgcggcgcaataacgacagaatgttgctgcgggatgtaaaagc

SEQ ID NO: 745964 - DNA, 99 bp, Homo sapiens
cagcagccagcctgatacgatttccatcgcctcacggacgtctcagaacacgctggacagcgataagcaaatgcagccctgaggatttggctactgcat

SEQ ID NO: 745965 - DNA, 100 bp, Homo sapiens
catcgatgggcggcggaaaatagcctttgccatcactgccattaaggtgcaggcagagcccccggggccatggccagcccttccggcagctccgaagccc

SEQ ID NO: 745966 - DNA, 83 bp, Homo sapiens
gcgccacgtccctcgtgcctacaccaaaccccatctctgggaaagccacagtatccgatttcgggcagacaacttgaacaagc

SEQ ID NO: 745967 - DNA, 100 bp, Homo sapiens
gtgaagaaagtgatcataggagaaaaccatttcaggattttatagctaccttgggaaaactttcaggattacatggccaggacctttttggaatttggag

SEQ ID NO: 745968 - DNA, 75 bp, Homo sapiens
agaagaactggcagtgcctcttccaacaggctttgaagacaagattcccaaaaggagattctctgagatgcaaaa

SEQ ID NO: 745969 - DNA, 99 bp, Homo sapiens
cccaggtctccgtgcagcccaacttccagcaggacaagattcagccagacacaatcatacaggtgtggcgagaggatattccagtgaactatatgaagg

SEQ ID NO: 745970 - DNA, 74 bp, Homo sapiens
cgcggggggcgatgaccgtgcgctgaccctgactcactccagagagatggaaaacttgatgactagctccaccc

SEQ ID NO: 745971 - DNA, 82 bp, Homo sapiens
tccgcaccgcggcttaaatgatgtattttgtgatcgcagcgatgaaaggtgtccctggccagtgtccttccacctgtccaca

SEQ ID NO: 745972 - DNA, 83 bp, Homo sapiens
aacctggcatatctgggcgccaagccgcggagcctccagacgggaacccaagacagaccaggatgaggagcattgccggaaag

SEQ ID NO: 745973 - DNA, 99 bp, Homo sapiens
tggacactgaaggaatcaagacagcggaatcagacaggaaggcccaccaacgctggccggcctccaagcacccgggcctctgctcatgtacagctcctg

SEQ ID NO: 745974 - DNA, 101 bp, Homo sapiens
ggcgaagctggccgagcaggctgagcgatacgacgttggaggtccccctccccactaagtgcctctttgcatagcaccagtccccacccgcacgctctctg

SEQ ID NO: 745975 - DNA, 97 bp, Homo sapiens
gcaaatccagacagaacctttgacttggtgttgaaagtgaaatgtcatgcctctgaaaatgaagtgaagctgtggtctaccaatctagacaactcag

SEQ ID NO: 745976 - DNA, 74 bp, Homo sapiens
aggattccaagtaactcttatttgaaactagacacaatgtgcgacgaagacgagaccaccgccctcgtgtgcga

SEQ ID NO: 745977 - DNA, 89 bp, Homo sapiens
gaaaccaagatagatgtgtcctatgaataccgcttcctggagttcacgactctgagtgctgccgcttgatggcattgaaacgaatggga

SEQ ID NO: 745978 - DNA, 82 bp, Homo sapiens
tcagatcgatctaagatggcgactgtcgaaccggtgttgacttcaaaatcaaaactgtagagctaagaggaaagaaaattag

SEQ ID NO: 745979 - DNA, 75 bp, Homo sapiens
ggagactgtgccgtggagggcctcgccatgtcctgctgcccgagatgctgcaatttgtcagtaatcaagtgggag

SEQ ID NO: 745980 - DNA, 75 bp, Homo sapiens
tcttcgattttatgaaaatggagaactctgtgatgtcacactcaaggaaaatgtttataggaggccttagctggg

SEQ ID NO: 745981 - DNA, 90 bp, Homo sapiens
atttaatggaaaatcgcttggttaaaacctgacacttttaacagggatatctgcattacctccacctcctccacctccaccaccaccagc

SEQ ID NO: 745982 - DNA, 80 bp, Homo sapiens
gtctgtgttgtgactgctttggacgtgggagtcacctgaaagccaggaaatggatgaaacgaggaggaagagatagtgac

SEQ ID NO: 745983 - DNA, 75 bp, Homo sapiens
acaaatgctccttctcctggagacgcaactcaaggtttctaccatgaatgaaatgaagagttattctcaagctgt

SEQ ID NO: 745984 - DNA, 115 bp, Homo sapiens
ccgacatgttcacgcacgggatccagagcgccgcgcacttcgtcatgttcttcgcgccctgcaaacggggattcagcgtccgatcctttggaacagggactcacgtgaagcttcc

SEQ ID NO: 745985 - DNA, 129 bp, Homo sapiens
gacgacttcaactatggcagcagcgtggcctccgccaccgtgcacatccgaatgggtaatgagaggccctaagatcccagaggatgccataagaggaaaagtcaggggagtgttgaagactctgcctcc

SEQ ID NO: 745986 - DNA, 75 bp, Homo sapiens
ccaccgcctccagcttgccaccaaagacctgcgactttgctcaggtcttgaggaccggcccagctcaggctcctg

SEQ ID NO: 745987 - DNA, 100 bp, Homo sapiens
tttgttccacttctggattcaggattacgactatcatttttgggaagagttttatagtaaggcattaggttctcctgaaaagaaagctgaacattcatct

SEQ ID NO: 745988 - DNA, 100 bp, Homo sapiens
aacagcactggagccatgctgctatctcataaattagagctaacagcaaaacagtatcctgtgtgggatgagttggcctactacgaagaaaacacacgag

SEQ ID NO: 745989 - DNA, 98 bp, Homo sapiens
gaagtccccggagaactctaccctggaggagattctggggcagtatcaacggagtctccggggtactccaaagattcaggtttactcacgtcatccag

SEQ ID NO: 745990 - DNA, 100 bp, Homo sapiens
cttggtcctagcacccactcgagaattggctcagcaggtcctggacccaagccagaagcctctgcaaagcttccttccagacctgcagataactatgaca

SEQ ID NO: 745991 - DNA, 100 bp, Homo sapiens
tcccagctactcgggaggctgaggctggagacgtttaaaagaccgtttcaaaagagatttacttttttaaaggactttatctgaacagagagatataata

SEQ ID NO: 745992 - DNA, 100 bp, Homo sapiens
tagagtcctcattggcacttactatgacaatttctgtgccattgctaggttaattgggaccaaaacatgtagacaggggactcagaagaagatccttgac

SEQ ID NO: 745993 - DNA, 100 bp, Homo sapiens
gaagaccctcctgccaaaaggaaatgcatctttatgtcagaaacacaaagcagcccaaccaaaggattacacagacagaggtccagcaaggacagcagca

SEQ ID NO: 745994 - DNA, 82 bp, Homo sapiens
ctcctgcaaaccagggtatcagaggtggtaagttttcttcatacagttcttttgtgtgacaaactggatttcagcacggcgt

SEQ ID NO: 745995 - DNA, 75 bp, Homo sapiens
tgcgaattctggcctgtggtggggatggaacggaaactctgatgaggaagaaagtgcttcagaatctgaactttg

SEQ ID NO: 745996 - DNA, 98 bp, Homo sapiens
accatgtgtgctctattagcaaaagttcaaatgaaggccaagagaaccaagtgagcagtgaagattcagaagattctgattttcaggaatcaggagtt

SEQ ID NO: 745997 - DNA, 75 bp, Homo sapiens
tcgatggaaccaaggatgacagcactaattctacaaccatgtccaagggacctgcagttggtattgatcttggca

SEQ ID NO: 745998 - DNA, 100 bp, Homo sapiens
ccacagcatgaccgctcgcggcctggcccttggcctcctcctgctgctactgtgtccagcgcaggtgctgcttttactgaaggcttatcaagtggtttaa

SEQ ID NO: 745999 - DNA, 75 bp, Homo sapiens
tgatccagaagtccagagctgaggactgcctgtttgcaggtgtgagatgcacaatgcgaaacctaggccccagct

SEQ ID NO: 746000 - DNA, 97 bp, Homo sapiens
catcggcgagctgcaggaggggctcaggaacctgggcatccctctgggccaggacgccgaggaggaagtgcacggctgtctataacgtgctgccggg

SEQ ID NO: 746001 - DNA, 99 bp, Homo sapiens
acaacaaccggccgctggaggcgctcatggaggtgtctgtgtctgatgtccatgaaggaggtgggtgatggcttacaggatcagatgaactgcatgatg

SEQ ID NO: 746002 - DNA, 100 bp, Homo sapiens
taaacagaaatcaccttcagctgtttcctgagttgctgtttcttgggactgcgaagctatacaggctatttttcggacgccgcccgatactacattccct

SEQ ID NO: 746003 - DNA, 86 bp, Homo sapiens
cgtccgcgggtttgcattctggggtggacgagctggacttcccaagtaagaagcggaagaggagccgctggaaccaagacacaatg

SEQ ID NO: 746004 - DNA, 51 bp, Homo sapiens
gattcgcagtggtcgcttcttctccttggttaagatcaatctacaaggaga

SEQ ID NO: 746005 - DNA, 75 bp, Homo sapiens
gtcgtctcgcctcccgcgcgccggtagaactgccattggatgtccagaatcccctgtagttgataatgttgggaa

SEQ ID NO: 746006 - DNA, 101 bp, Homo sapiens
aggggcctccagggtctgcagacaaggcagggtgctgctggtgagtagcagccggtacccagaccagtggattgtcccaggaggaggaatggaacccgagg

SEQ ID NO: 746007 - DNA, 142 bp, Homo sapiens
tacaccgtgaacatctccacagcacctcccaggcgctcgatgccagccgtcatcggtttccagacagctgctaatgggaatgacagcaagaaatttaaacgagatagacctccctgttcgccttcccgtgttctccatcttc

SEQ ID NO: 746008 - DNA, 75 bp, Homo sapiens
catgtcagaactatgacatggtcagtgggatctactcatgggtgatctggaccctctggcatctctcaaatcgct

SEQ ID NO: 746009 - DNA, 89 bp, Homo sapiens
ggcggacggcgtggaccacatagacatttacgcggatgtcggcgaagagttcaaccagggtgttactatcgttaaaccaatagtttacg

SEQ ID NO: 746010 - DNA, 100 bp, Homo sapiens
ggcgtcaggaggcacccaaggtggaggaaggcctgcgagaaggacagtaagaggagccgacacccgcactgccaggatccaagatgcagggctggtgttg

SEQ ID NO: 746011 - DNA, 100 bp, Homo sapiens
tctccctgaagcccaccggtccccaacgcatcatgccagggagccaagcgtcctgcccggcccttccccgggcgctgcctggacaggcctgcctgcgtgc

SEQ ID NO: 746012 - DNA, 101 bp, Homo sapiens
gcaataccaaacagtggcatggaccacacccagcggaatatctggagtccatctttcaccatcttctcctgagattgtactggaccgtgaccactcttctt

SEQ ID NO: 746013 - DNA, 125 bp, Homo sapiens
gaagagcgactagacatcaagcataatcggccgcgcagagactgcggacaactgtccattccattacaacccagctcagtatgactatgacagagatgatgtgggagaccgctgtgacaactgtc

SEQ ID NO: 746014 - DNA, 100 bp, Homo sapiens
gttgcttcagagtgtgaagtcaaatgcatgccaacattccagttttttaagaagggacaaaaggaccgtataatagacgctggccccaaaggaaactact

SEQ ID NO: 746015 - DNA, 100 bp, Homo sapiens
ttctcatggcattggtcagctgggtcatggactatgccattgctgcctgtctgcaaggcagaggaagcggctgctgagattactaggaagctggagaaac

SEQ ID NO: 746016 - DNA, 96 bp, Homo sapiens
gtcacaatttctacagcagagaccttgagggatatctttcttcactcctcttcacttcttcaagtccagcctctgatgaagcaggagagaaagaag

SEQ ID NO: 746017 - DNA, 98 bp, Homo sapiens
gcgggctcagcgcacctcattatcaaggatggcccactgcgtgaccttggttcagctgtccatttcctgtgaccatctcattgacaaggacatcggct

SEQ ID NO: 746018 - DNA, 132 bp, Homo sapiens
cactcactgccctggatcaggatcacgtcgcagtcctaggaagtccactagcagcttctaaggagaaccatggagtctggcagtaccgccgccagtgaggaggcacgcagccttcgagaatgtgagctctac

SEQ ID NO: 746019 - DNA, 75 bp, Homo sapiens
ctgggacccagactaggatctcaacccatcagagcaagttgtgcagaagattctgaccttatttgaggcttacat

SEQ ID NO: 746020 - DNA, 73 bp, Homo sapiens
ctacagctaaaatatctgaagattccaaagttctgcagcctcaaactggtattatagctgcaaatgtccttgt

SEQ ID NO: 746021 - DNA, 92 bp, Homo sapiens
ccgcgcgctgagggtctcggggcgggcgccgcgggacctctccgggccatgggagtggagtcaacatatcaatggagcaagtcacagtcgtc

SEQ ID NO: 746022 - DNA, 83 bp, Homo sapiens
ccgcaactctcagttcgagagtaaagacctgcctagagctggaacgttacctccagagcgagccctgctatgtttcagcctca

SEQ ID NO: 746023 - DNA, 100 bp, Homo sapiens
gcgggccgaaacctggaggcccggggggcccagctcccgtagggagccgtgggcgctcggtgcccgggccgggcaggccgttgatgctcactgccatcag

SEQ ID NO: 746024 - DNA, 89 bp, Homo sapiens
caactactttggattcacccacagcggggcggcggcggcggcggctgcggcccaatatagaacccttaggagaaatcttgagagtggac

SEQ ID NO: 746025 - DNA, 74 bp, Homo sapiens
caaaaataggactaagtcttaaactgggtgaatcaaaaactctggttttaagcaacctctcctacagtgcaaca

SEQ ID NO: 746026 - DNA, 75 bp, Homo sapiens
actctggctctgctgatgaggttgatgaatttgaaatccaagaggaagctcaccagtgtgggaaggggcttctca

SEQ ID NO: 746027 - DNA, 101 bp, Homo sapiens
gcctcctgcgctgccctgacaactcggacccgctgaccagcatgaaggacgtcctcaagatcaccacggcacaagagactatagtccccggcagatggcag

SEQ ID NO: 746028 - DNA, 82 bp, Homo sapiens
agagttctatgcactctgtgaccagctggagctgtgcctggagtcgttcacgcctactgaggagcatgtgttggtggtgcgc

SEQ ID NO: 746029 - DNA, 75 bp, Homo sapiens
gatatattcatctggagaaccttttggccaggtcttactttgatcctcgtgagtggcctcggaggcctttgaaga

SEQ ID NO: 746030 - DNA, 96 bp, Homo sapiens
tcttcgagattggcacacccagctgatgactatcagccagttcgtctgctcagtaaacctggggaactgagaagagaatatgaagaggaaataagc

SEQ ID NO: 746031 - DNA, 90 bp, Homo sapiens
aagaacttgagcgacatggagaacgaattctactatcgctacccaagattcactccttctccagttgcacagccacacccttcagctggc

SEQ ID NO: 746032 - DNA, 100 bp, Homo sapiens
aaagctttgaagaaaaggatttccaaaaactacaatcataaagaaatccaacttaccttgtcaaacgtgctggccaaagcgctctatgacaatgtggccg

SEQ ID NO: 746033 - DNA, 74 bp, Homo sapiens
attggcagagcttgacccaggcactagccgcagccgtatcggacactcagggagtcagacagcgcggaaggcga

SEQ ID NO: 746034 - DNA, 83 bp, Homo sapiens
caaaaaaaggagatgcctggcagccccgctctctgcaatcaagcgccttgttggtagtgaccaggagactctgaggattcacg

SEQ ID NO: 746035 - DNA, 100 bp, Homo sapiens
gtcacctccccacccccaccgccaagcagccacgagaaagatcctgaggaggatgaaggggctggccctggaggccgagagtgagctggagagacaagac

SEQ ID NO: 746036 - DNA, 75 bp, Homo sapiens
aaagcaaaggcgtcaggaatggttcttcctcagaaccgggtgaacatgacctacgagaagatgtctcgtgccctg

SEQ ID NO: 746037 - DNA, 76 bp, Homo sapiens
ctacaacagcagccacaggaaccttgagggagaaatgttttttctcatgattatgtattttggtgtggcgatttca

SEQ ID NO: 746038 - DNA, 88 bp, Homo sapiens
catgtcctctgaaaactcgggaatttgtcactgaaatggtgacaggagaggcggggtttcaccatgttgcccagactggtcttgaact

SEQ ID NO: 746039 - DNA, 97 bp, Homo sapiens
ttgaatgatttatagctaagactccaggacacccctgaagccgagaaatgattgcaacacctgctcggtataccgtgactttgggaggaacatctgt

SEQ ID NO: 746040 - DNA, 75 bp, Homo sapiens
cctcactgtctctgtcctggaagcagaaggagtctttgaaaaagatgccgatagacaagattccattaatctctt

SEQ ID NO: 746041 - DNA, 50 bp, Homo sapiens
gagctgcggtggcgtctccacacgttatctgactggatcaagattggaga

SEQ ID NO: 746042 - DNA, 100 bp, Homo sapiens
cgatgtgcgagactttggaaagtgttctaagaacggaagcatctgggctggatggaatttagcatcaagcagagtcccctttctgttcagagtgttgtaa

SEQ ID NO: 746043 - DNA, 101 bp, Homo sapiens
ccatcaagttcttcaggaatggagacacggcttcccccaaggaatatacagcacctgaactcctggggggaccgtcagtcttcctcttccccccaaaaccc

SEQ ID NO: 746044 - DNA, 100 bp, Homo sapiens
cttggtggaggggtggtgaccatcgaaaggagcaagagcaagatcaccgtgacatccgaggtgcctttctccaaaaggcattgaatgccccagaggagcc

SEQ ID NO: 746045 - DNA, 82 bp, Homo sapiens
aggagctccccagctggtggctggagcgaccccttgttctttggtggcgctgacctggacaaacaccagactcagacgtacc

SEQ ID NO: 746046 - DNA, 90 bp, Homo sapiens
cagacgaagacagtccctggatcaccgacagcacagacagaatccctgctaccacttgcattggacacacactactggacttggatcaac

SEQ ID NO: 746047 - DNA, 99 bp, Homo sapiens
aagaaactctcagtttgtgtttctgagaaagacttaattcagtgcacaaatgagatgaatgtgaacatcccacagttggcagacagtttatttgaaaga

SEQ ID NO: 746048 - DNA, 75 bp, Homo sapiens
cgcactgactcgcctcaagcacctgcgcatcgtcatcgtcttattgccagcagttttgaagatgactcccgtgta

SEQ ID NO: 746049 - DNA, 75 bp, Homo sapiens
ctgggcgccggagccgaggcgagcgccgcgcgcaccactggtgctccatacttgcttgcagtgcctacgtggctc

SEQ ID NO: 746050 - DNA, 90 bp, Homo sapiens
gcggccctggcggccgttgaaaaatggcgactgtggcagagttgaaggctggggtcacgggcgtcagcggtccagggaaggaagcaaagc

SEQ ID NO: 746051 - DNA, 127 bp, Homo sapiens
tcaacaaggacaacaatgagatcgtggacaagatcatgggcaaaggacagatccagggctggaccccaatggagaacaggtggtgtggcaggcgagcgggtgggcagcccgcatcatccagcacgag

SEQ ID NO: 746052 - DNA, 50 bp, Homo sapiens
cacgcagctggctggcttcagtggaccattttccgacagctcaacacggc

SEQ ID NO: 746053 - DNA, 80 bp, Homo sapiens
aattgcgctggaccgtcgccttgctcctcgccgcggcggggactgcaggtctctcaggcagctgcagagcttcaacagta

SEQ ID NO: 746054 - DNA, 75 bp, Homo sapiens
tcagagcgggcgctgcggaaactctgtgtggagttccaggtgatgacacagacccaatccctgagcttcctgctg

SEQ ID NO: 746055 - DNA, 90 bp, Homo sapiens
cagaatattggtcaagttgctgaccttgaagatagaatcacttgaattcctggatgaaatggagctgctggagcagctcatgcggcatta

SEQ ID NO: 746056 - DNA, 100 bp, Homo sapiens
tcgcagggcggcctgcagctgggccgcggccgaggaggcagcgcgacctccgcacggtgaattatgtaacctcattacgctggatgtagctcacaatcaa

SEQ ID NO: 746057 - DNA, 83 bp, Homo sapiens
caagaaaccaacattcccaacagccaccaccaccaccagatggatgagacctgcacgcagtggctcacagcagcacgatttgt

SEQ ID NO: 746058 - DNA, 118 bp, Homo sapiens
ccagccggaggagatgtggctctaccggaacccctacgtggaggcggagtatttccccaccaagccgatgtttaatgagctgaaagccagtggtggcgaaatcaaaattcataaaatg

SEQ ID NO: 746059 - DNA, 95 bp, Homo sapiens
gtcgcgccgctgctggttgctgtccctgtagtttatgccaacgtgacttcattcatacagatgaaccaaggatcgggatagcagtataaaattag

SEQ ID NO: 746060 - DNA, 87 bp, Homo sapiens
aagaaacaagccgtggaataggtgtatcaagtaatggtgcaaagcctgaattacatattattgaagttggcacaccacctacaggga

SEQ ID NO: 746061 - DNA, 49 bp, Homo sapiens
ctcgatgtgctctgcgtgttgctgggtctacatcatccgggtcacgtgg

SEQ ID NO: 746062 - DNA, 50 bp, Homo sapiens
gcgtggaacggctgcttttggaaggttggtgaaaaccctgtgtccttgga

SEQ ID NO: 746063 - DNA, 90 bp, Homo sapiens
ggaaactgtaagcaatgcaagcagcagctcaaatccaagctctcctggaagaataaaggggaggaaacgtgtccctgatcaccacccctg

SEQ ID NO: 746064 - DNA, 73 bp, Homo sapiens
aaaaggtgatctggacaaaggaacaggtatctcaggaagttattccaacttttgacatggctgtcaatgaaat

SEQ ID NO: 746065 - DNA, 102 bp, Homo sapiens
agacctcgaattagcaaaggaaacttttggccataggaaaaggatacagagtagagtttcatgaacctgaaacttggtggaaatttgatcctgaagaattag

SEQ ID NO: 746066 - DNA, 80 bp, Homo sapiens
cacctctcatggctaagagaactaaacagtcaccaggagactaaagtccatcaaaaacatccagaaaattaccaagtcta

SEQ ID NO: 746067 - DNA, 100 bp, Homo sapiens
gaggatgacgaggtgccggtggagcccgagtctgactccggggacgaggaagaggagatggagtctcgctctgttgtccaggctgaagtgccatggtttg

SEQ ID NO: 746068 - DNA, 100 bp, Homo sapiens
gagatgcacatcaaatacatgggcagccacatccctgcccttagagatttgtttgattccatggataaaacttcttccagtattccacctattattctac

SEQ ID NO: 746069 - DNA, 82 bp, Homo sapiens
tcgaatatcatgctggtggctctacccagaattcaattaaagtggctcaggtttactcctggcttgggggcattaggaagca

SEQ ID NO: 746070 - DNA, 97 bp, Homo sapiens
ttgatgtgaagccgaaggacctagggctgcctacagaagcgtacatttcagtggaagaagtccatgatgagaaccgcctggcccagcacaccctcca

SEQ ID NO: 746071 - DNA, 74 bp, Homo sapiens
ttgaagattgtgaagcaatagcctaagaaaaggcatatggaaggagcatttctctttgctgttctcctacattt

SEQ ID NO: 746072 - DNA, 90 bp, Homo sapiens
gggccggacccgcggccgcgttcggaggaagttggcagaagtcacagaagaagagtggctgagcatccccgaggttggcgatgccagaaa

SEQ ID NO: 746073 - DNA, 96 bp, Homo sapiens
agcggagacgggagtattatgaaaagatcggcatatgcggccagcaaagaatcacatgccactttggtgtttcataatctcctgggagagattgac

SEQ ID NO: 746074 - DNA, 76 bp, Homo sapiens
cgagaccagcctgactaacatgataatgctcggaatatttttcaatgtccattccgctgtgttgattgaggacgtt

SEQ ID NO: 746075 - DNA, 85 bp, Homo sapiens
agcccggggatccagcacgcaggtcaaaatgcagatcttcgtgaaaacccttaccggcaagaccatcacccttgaggtggagccc

SEQ ID NO: 746076 - DNA, 83 bp, Homo sapiens
cttggactgcagaaattggaagagtaaaggttgtggccagaaagcacgggcagcctgggactcctgttgccatagcaacccag

SEQ ID NO: 746077 - DNA, 82 bp, Homo sapiens
tggggagaaggatatccagacagccctaagatttaagtgccctgtatgctcaaaatttgtatcctcagatgaaatggatttg

SEQ ID NO: 746078 - DNA, 100 bp, Homo sapiens
ctttctcttctggatgtcccggagcaagacatatctgaagagatggattaagaatgctttggattaaggattgtggagcacatttcaatcattttaggat

SEQ ID NO: 746079 - DNA, 99 bp, Homo sapiens
cttcaacaagagcaagtgtcagaactgcttcaagccccgcgagtcgcatctgctcaacgacgaggacctgacgcagattcccactggaaattcgttgta

SEQ ID NO: 746080 - DNA, 75 bp, Homo sapiens
cgctgcagggcatcgcgctcaagtacggtgtcacgttgcaggaattgtgccttggatccatccatccagtcagct

SEQ ID NO: 746081 - DNA, 100 bp, Homo sapiens
ttggaggaagaatgatagcacagaaaatctctgtcagaactggtgctggagaatctggtaaaagcaccattgtgaagcagatgaggatcctgcatgttaa

SEQ ID NO: 746082 - DNA, 100 bp, Homo sapiens
ttctactgatcacattcctatactctacagaacagtggacccatcaacttgtgccagtacagggtctgtgcagtggagtaggcacttcagtggtcgaacc

SEQ ID NO: 746083 - DNA, 90 bp, Homo sapiens
cggcaccagccctttgcacctcgcagctaaaaacggccacatcgacatcatcaggtcgccccacggctgaattctcggtgataaaggcgc

SEQ ID NO: 746084 - DNA, 51 bp, Homo sapiens
cagttactcttcagggatgtgctgattactacaagaccttaacggttgttg

SEQ ID NO: 746085 - DNA, 75 bp, Homo sapiens
gacttttgaagaaatctggaagttttccacctaccatgctctcgggaagatcagttttcctgccatccaggctgc

SEQ ID NO: 746086 - DNA, 74 bp, Homo sapiens
gagcccggggatggcgcgccaggtggaacctaacttcttgtggaacaagtgttgccagctcagaaggcagtgag

SEQ ID NO: 746087 - DNA, 126 bp, Homo sapiens
agcgtgccagccaacaattctgttacacaaatgtgcttatcccaaaatggcatgatatatggacacggatacaggctcttctcaaccatctgtgagtccaggggaaccgtctccaccatccatcca

SEQ ID NO: 746088 - DNA, 90 bp, Homo sapiens
gtcggaccagcttttcaaacaatacaggaagaagaagtctctccacagttgtttactttccacgaagctgtttcacaaatggtagaaatg

SEQ ID NO: 746089 - DNA, 90 bp, Homo sapiens
cagagcgcctgcgaccccagtcggtgctccggggaggtcacctgacgaggagacaaatttacatgtattggagaccagaccagaagccct

SEQ ID NO: 746090 - DNA, 75 bp, Homo sapiens
gctggatgtttgcgacatcccagagagcttccagagctcaccgtcatggatgctctatcagaagcaaatggcaca

SEQ ID NO: 746091 - DNA, 98 bp, Homo sapiens
acaagggaaacagagacagtatttgtaccagttatccaggctggaatggaggctctgaaggctgctggcaaaggggacgtcccaacgaagagaccacc

SEQ ID NO: 746092 - DNA, 100 bp, Homo sapiens
ctatgctggcctaaaagaagaatttcgtaaagaatttaccaagctagaggaggggactcagaagaagatccttgacattgccaacatgctgggcttgtcc

SEQ ID NO: 746093 - DNA, 97 bp, Homo sapiens
ggtacttcattgatgccacaaccataatagaatgtctacattcctgaacagtggaggccatgtgtcttttggcagtcagtccagatgggaattggct

SEQ ID NO: 746094 - DNA, 87 bp, Homo sapiens
caactttgaatttcttctatcaacaggtgaaaattagttctgctgtgcttaaagctgcggcccatcactatggagctcaatgtgata

SEQ ID NO: 746095 - DNA, 100 bp, Homo sapiens
ctccgacctcctaaaatgaaattcattacagaaatctggcacccaaatggcctttgcccagtttgatgctgagggtgatgggacagttgatgccgagaac

SEQ ID NO: 746096 - DNA, 100 bp, Homo sapiens
gaagagggagtcaccactggacctccaaggaagccacgtgcagacatctacaaccttcgatctcctgacgagagccaggtgagaatttcaaggattatcg

SEQ ID NO: 746097 - DNA, 82 bp, Homo sapiens
cggcgtcgtcggatgttgtgttgcccgccaccatgagctacacagcactctcgagtggaccctgaggagctcttcaccaagc

SEQ ID NO: 746098 - DNA, 100 bp, Homo sapiens
agaaggggaacaccaccactctcattagtgagaatggtcatgctgccgacaccctgacggccacgaacttccgagtggatcgaaagctgctttgcgtcgc

SEQ ID NO: 746099 - DNA, 100 bp, Homo sapiens
gggaatgattctgatgatgatgatgaggtaggtcgatttggacaattaacttatgttcgcagttatcagggagagctaaagaagggtgacaccatctata

SEQ ID NO: 746100 - DNA, 95 bp, Homo sapiens
gaggaccagggagggaaatatgtcatgtatcccatagctgtgagtggcgatcacgagaacaataagagagaaaaggaacagttccgtaagctctt

SEQ ID NO: 746101 - DNA, 90 bp, Homo sapiens
tgaaaatccatcagtgccagcataccaatgaacctctattcaagtaagaatgattgatgttggctgatattggagtgctcattcacatga

SEQ ID NO: 746102 - DNA, 82 bp, Homo sapiens
ccgcaccttgtgttccggaagttccaggagccttcacgtaaatgggtccagtcatgcctcccagtaagaagccagaaagctc

SEQ ID NO: 746103 - DNA, 75 bp, Homo sapiens
ttaaatactggtttcacactccaccaagcatcccattacagatagaagagatacctatctggaaacaacaggcga

SEQ ID NO: 746104 - DNA, 87 bp, Homo sapiens
aagcagctggacagcacaattggaatccaccctgtctgtgcagaggttggtgttcgaggaagagacattgttgttcttggtgtggag

SEQ ID NO: 746105 - DNA, 75 bp, Homo sapiens
cgctgtctcagtcttcagatgagcaaattgtggctactaatttgccccctgaagatcaagatggctctggggatg

SEQ ID NO: 746106 - DNA, 82 bp, Homo sapiens
cttggactgagtcctgcaggacacaggctccagacccagttcctggacctgccctggaaaagaagtatcccgtagagatgag

SEQ ID NO: 746107 - DNA, 83 bp, Homo sapiens
gccagacgacaagcacacactatggcgctgaaacggattaataaggatcgaagtagaatgtatgacagtttgaatatgcactc

SEQ ID NO: 746108 - DNA, 87 bp, Homo sapiens
gactttcttcgttgccatgaggaaagaattctccgagcccctggaggaacgcgcatagatgatggtgacaagaccaagatgaccaac

SEQ ID NO: 746109 - DNA, 100 bp, Homo sapiens
tgggagagcgtctgtagcttccttggaggcaacgcacgggccacaggcatgttcctgcagtatacagtgccggggacggagggtgtgacccagctgaagc

SEQ ID NO: 746110 - DNA, 90 bp, Homo sapiens
ttcctctcgggctcttgggcgctgctctgagccactgaggcggctcccagctgcgttggcgacatggccgacacccccagagatgccggg

SEQ ID NO: 746111 - DNA, 98 bp, Homo sapiens
cgcgaggggaacggaggccagagctgcggggaggagccccagccccgcgacgaggaggaagcggagctggagctgctgaggcagtttgacctggcctg

SEQ ID NO: 746112 - DNA, 50 bp, Homo sapiens
ctctgtgtacgctgaggggggaggtcgctcctgtggttggtccagcccag

SEQ ID NO: 746113 - DNA, 98 bp, Homo sapiens
agaggccacctctttctttgtgggccggatgggtccttgagtccttcagactgtcacacaactgtaaggccagctaagccacctgtggtggacaggtc

SEQ ID NO: 746114 - DNA, 82 bp, Homo sapiens
gtttggcttggattatctcaacattctgttgctccataatgggagaagtaaagaacaaagacttaaggaacagcttggcgct

SEQ ID NO: 746115 - DNA, 90 bp, Homo sapiens
tcctctccccacaaagaaacaaatgcctttacagtttgatagtgccactccagctttcttaggttgccatctgcatgacacatctttctc

SEQ ID NO: 746116 - DNA, 94 bp, Homo sapiens
gctacagcttcagaagaccgaagcgttcgtatctggaagacaccaatgggaatcccaatggggaagtcgatgctggtgcttctcaccttcttgg

SEQ ID NO: 746117 - DNA, 101 bp, Homo sapiens
gccactgcaccgacttcatctgtttgctgaggctaaacactatcatgccaagttggtgaatataagaaaagagatgctgatgcttcatgaaaaaacatcaa

SEQ ID NO: 746118 - DNA, 75 bp, Homo sapiens
ggatggaactttgggtctcaaagctcgatgctgccaatgtcaccaacagcaatggggcccaccatcagcctggac

SEQ ID NO: 746119 - DNA, 100 bp, Homo sapiens
tccagtgccctcttcaacagacagccagaatggcggaggaagcgctggcggaccatcaagctgctgctgcgccggggcgcggaccccaacctgtgctgcg

SEQ ID NO: 746120 - DNA, 82 bp, Homo sapiens
gccacatactatccgtttgttcaggaaccaccagtgacagagattcactttggacagatcactagcaatcaaatgcttgtgc

SEQ ID NO: 746121 - DNA, 83 bp, Homo sapiens
caggcgctcaccatgttccctggaggccgggctctcgccatgggtcactgtcgcctctgccacgggaagttttcctcgagaag

SEQ ID NO: 746122 - DNA, 82 bp, Homo sapiens
ccacagcgcgctcctggagaatatgcacatcgagcaggttttaaaatcaaagatgggaaaatcggagaaaattgcccttccc

SEQ ID NO: 746123 - DNA, 90 bp, Homo sapiens
catcttctccagccaccccagccagtggaaccaaggtggcccacaaactctttaacaacttgaaataaatgtgtggacttaattcacccc

SEQ ID NO: 746124 - DNA, 90 bp, Homo sapiens
gcagcacggcacagcacgctcgacttcatgctcggcgccaaaggctcagcaacagcctcaccaaggactccatgaatatcaaagcccata

SEQ ID NO: 746125 - DNA, 75 bp, Homo sapiens
cgacagagggttctgtggaggacataagggagatagtgcagagactgaagagtccttggtataaatgaatggcag

SEQ ID NO: 746126 - DNA, 97 bp, Homo sapiens
ggtaatgtcaaggttcttaaatctgagagagacaagatcttccttctttatgaacagggtgatgaattagaagacaatggaaagaatttctacgaat

SEQ ID NO: 746127 - DNA, 82 bp, Homo sapiens
ggaattctaatttgaaccatgtttggattgaagccgcctctgtattacttaccaggtatcatgatattagctggtttgacat

SEQ ID NO: 746128 - DNA, 131 bp, Homo sapiens
tctgcacttcgcattttggcattgacatttaattttagggtcctttatatagaagggagagtagagagatcaaccagctttcactcctagtggaatattaactcctcatgccttgggttcaagaaattcac

SEQ ID NO: 746129 - DNA, 90 bp, Homo sapiens
ccgttatctgcaggtattgggagatgcacagctaagatgccaggaccacctggaagcctagaaatgtgaggattatgggaagaactttaa

SEQ ID NO: 746130 - DNA, 100 bp, Homo sapiens
ctcgtcatggcctacccgggatacggaggaggggcagtagcagaatcccatggtagccaggtgggtgaaggggagcgaggacgttctacctgccttgaag

SEQ ID NO: 746131 - DNA, 96 bp, Homo sapiens
aacagcagcatgagctctgggtctgggtccctccgaacaagtgaaaagaggtccttgtatgtcagggacaggatgagaacttcagtcaatgttgtg

SEQ ID NO: 746132 - DNA, 87 bp, Homo sapiens
acaacgcgagtcggcgcgcgggacgaaggccccttcacagatgtagtcactacaaatcttaaattgcgaaatccatcggatagaaaa

SEQ ID NO: 746133 - DNA, 83 bp, Homo sapiens
ctgagcctgcagccggccctgccgacacatgcctcactcctgtcagcagttccaccttttcatggttgaggagcacatgtggt

SEQ ID NO: 746134 - DNA, 100 bp, Homo sapiens
tatcaaatatgagaaagctaggccatctgaataactttactaagaccccacatataggaaccatcggatccctgtgtacagatgaagaactgagtcttgg

SEQ ID NO: 746135 - DNA, 51 bp, Homo sapiens
aagaaacaaagggcaagatttgcaaaagtactttgactcaggagactacaa

SEQ ID NO: 746136 - DNA, 90 bp, Homo sapiens
cgctgtgacgcgcacgctgtaggaaaactgtatgatgtggaactcttccagcgcatagaacacttaattgggaagaaactaccaggtttt

SEQ ID NO: 746137 - DNA, 50 bp, Homo sapiens
caaggacggcgttctggatctcaaagcgtctgacagcaatgcaagcttcc

SEQ ID NO: 746138 - DNA, 89 bp, Homo sapiens
gtgctactgtgcgctcgatccagcaccatggggaagcgggacaatcgggtggttacattgattacccacctagtacaacatcttacggg

SEQ ID NO: 746139 - DNA, 95 bp, Homo sapiens
aggattacacccttaccatgccctacgcccactgcaaagattctctaaccatggcacaggtagagaaacgtggaggtttgctccggaaatcttca

SEQ ID NO: 746140 - DNA, 82 bp, Homo sapiens
ccttctggaagctactactacgtggtgcttggaaagattaacgtcttcaaggacccagttgctgatcccaacaaaaggtcca

SEQ ID NO: 746141 - DNA, 101 bp, Homo sapiens
gcccaacgagaattccagtgctgacatctcagaatatgacagatacctagcatctagcaaaataatggcagctgcttaccttgaccccaacttgaatcaca

SEQ ID NO: 746142 - DNA, 75 bp, Homo sapiens
aggttctctttgtgtgagtaagcaagaacctgttaatatgatcctctgttgaagcaagaagacaaactgtatggt

SEQ ID NO: 746143 - DNA, 75 bp, Homo sapiens
ctctgccacgctgagcggcatccagcttgccaccagactcaccatcaattaccaaggcccttgcatctccccaga

SEQ ID NO: 746144 - DNA, 98 bp, Homo sapiens
tggaaagcatgaatgattttgatcccttgttttcagaggaaacacctggagtggagaagccggtcaccactgttcagaaacccgggatggacgtggcc

SEQ ID NO: 746145 - DNA, 98 bp, Homo sapiens
ccaccatgttcctgggcaccggggagccggccttggacacgaaatggtggagtcaatgaagaaagtagcagggatggatgtggagctgacagttgaag

SEQ ID NO: 746146 - DNA, 100 bp, Homo sapiens
gcatatcatgaaatcctccccacttatgtttgtaaatgtgagtggaagccatgaggccaaaggcagttgtattggtgggggagtggtactaaggatcaag

SEQ ID NO: 746147 - DNA, 75 bp, Homo sapiens
ggaccccagatgtctgacagccctgtgtgacaccaagataagtaacgtttgccaagatggtggataagaatattt

SEQ ID NO: 746148 - DNA, 98 bp, Homo sapiens
tattgaattctaagaccatccgttccaatagcagtggcttatccattggaactggtcagaatggcggcagtggagcatcgtcattcttcaggattgcc

SEQ ID NO: 746149 - DNA, 83 bp, Homo sapiens
ccaagatggtgaagcagatcgagagcaagcctgtgggccaaagctgaccaactcccccaccgtcatcgtcatggtgggcctcc

SEQ ID NO: 746150 - DNA, 75 bp, Homo sapiens
tgctttgctgttgtatgccttgttccacaagatatcagaagctttgcatcgtccctatggttgtgatgttgaacc

SEQ ID NO: 746151 - DNA, 100 bp, Homo sapiens
gcgtctgagacttggtgggaacggaccttcctcttagcccaagaagtcttgcaagcgacgggagccaattcaggccagtaccgccagggaggccatcgag

SEQ ID NO: 746152 - DNA, 75 bp, Homo sapiens
catttctcctattgaggagtcaacctgtcggaaaaggtaacagaagatggaactcgaaatcccaatgaaaaacct

SEQ ID NO: 746153 - DNA, 75 bp, Homo sapiens
gtccacccaccgccgccgcctcccaggatcaacggccaccccgggaagtccacgcgcctggcgggcttgtggaag

SEQ ID NO: 746154 - DNA, 73 bp, Homo sapiens
caagatggacagggatgataattgggcctccaagagttgggggccgtcccgctcctaaggcaggaagatggtg

SEQ ID NO: 746155 - DNA, 100 bp, Homo sapiens
agagagtatccagaagacatgccattcttgaggtggcaggtggtcagctgcgaatcaaaccgtctcagaccagtatccttcaggggttctcttactctga

SEQ ID NO: 746156 - DNA, 98 bp, Homo sapiens
tggtgctcagcgccgcggggatgggggcctcgggcgccccgcagccccccaacatcctgctcctgctcatggacgactgcctacaatgggaaaacttc

SEQ ID NO: 746157 - DNA, 100 bp, Homo sapiens
ccaacccgcggctatccatgtggaatcgctttcagtccttgtggacgattcgcggcttgtggggccgaggacagacactactatactggcaattgctgga

SEQ ID NO: 746158 - DNA, 153 bp, Homo sapiens
tgtgaacttctagccacatgtagtgcccttgggtacttggagggagacacttaccataaggaaccagattgcttagacaccacaggctggggcgtgagcccccgaggagccggctacctatttggcagtgacgtggtggcccagttcaacgca

SEQ ID NO: 746159 - DNA, 112 bp, Homo sapiens
atctctctcatctcgctcggctgcgggaaatcgggctgaagcgactgagtccgcgatggagggggatatgagactttctactcggaatatcctgagtgttgcgtggatgtaa

SEQ ID NO: 746160 - DNA, 88 bp, Homo sapiens
acgtatcttcgcggagactggcttcccggtgtcggagcagcggctgtggcgcggcggccgcgaggtataatattgagcccagcctata

SEQ ID NO: 746161 - DNA, 76 bp, Homo sapiens
ggctgagatgggcaccgcggatctggggccgtcctcagtaaaggaccttcctctgccaagatttgttgcttcaaag

SEQ ID NO: 746162 - DNA, 99 bp, Homo sapiens
ctcattgcgcccagacgggccggcccagagctcccgggtcgtctttcgtgtggccgcgaggaatctggtggacagtaacaaactttggtgaaatttcag

SEQ ID NO: 746163 - DNA, 78 bp, Homo sapiens
agacttctactggctgcgctcctttctggccggagaaagacgagaatccaggacttgaatcgtatcttcccactttct

SEQ ID NO: 746164 - DNA, 75 bp, Homo sapiens
cccaggatggtgatccgtgtatatattgcatcttcctctggctctacagcgcaaatgcagccctgaggatttggc

SEQ ID NO: 746165 - DNA, 98 bp, Homo sapiens
agagttctgcgttttgccagtcacctctcaactgtgtgccaaagatcagtgtgcgtgtgaccaccatggatgcagagctggagtttgccatccagccc

SEQ ID NO: 746166 - DNA, 90 bp, Homo sapiens
gccttgaggacctactcacagataggaattgaagatacaggctagttccaaaggtttattttcctgagcaaattcatgatgttgtacggg

SEQ ID NO: 746167 - DNA, 76 bp, Homo sapiens
tcagctctgaagcaaagaccaaatcagaatccacttcaggccacagacctccaccagcacgaagtggacatcgttg

SEQ ID NO: 746168 - DNA, 100 bp, Homo sapiens
atcgagcggctgcagatggagatgaaggaggacgacgtttcttttctcatggaagttccaggttaaaggcagcctcagctcacggggcagttgatggtgg

SEQ ID NO: 746169 - DNA, 50 bp, Homo sapiens
ctctgttcacggctccatcgctgttagcagcccctggaagagatcatcac

SEQ ID NO: 746170 - DNA, 100 bp, Homo sapiens
ggactccagaggcagtgatagaacacccagacgcagggcctgctttcttccccgggcgatgtgcagagatctttgccaggggtcaaagcgtcgggaagct

SEQ ID NO: 746171 - DNA, 75 bp, Homo sapiens
accgccgccacaccgccgctgcctcagtcatgccgtgggtaattccagaattgattggccataccattgtcactg

SEQ ID NO: 746172 - DNA, 74 bp, Homo sapiens
ggcacataatagatgcacacaaactttcacttgctccatttatcttaaagaaattggacagcatatgaagacag

SEQ ID NO: 746173 - DNA, 97 bp, Homo sapiens
agatgtccaaaaggaaattaaaagaggcacgaagctgagtaatcaagtcagaggattatatgacttttatctgcctagagaagaactatggatctac

SEQ ID NO: 746174 - DNA, 100 bp, Homo sapiens
gggcgccccgcagccccccaacatcctgctcctgctcatggacgacgggacaccgtggtgtttaaggatggccagtactggatccgaggccggacctcag

SEQ ID NO: 746175 - DNA, 116 bp, Homo sapiens
ctgcgaggctcggagaaacaggcgccgcgggctccgcgcccggccggacccgggcccgagctctacgaactcgacggggaccccaagaggaaggaattcctggatgacttgttcag

SEQ ID NO: 746176 - DNA, 100 bp, Homo sapiens
agcagctggccttccaggtggagcaggtgaagcgggagtcggagttgaagcgctgccactggagtgacatgttcacgggaaggctgcggaccgagatccc

SEQ ID NO: 746177 - DNA, 98 bp, Homo sapiens
cactcgtctccgtgggtgtggcggagcgcgcggtgcatgcccaataggggcacaaaacgtccccgggatgatgaagaggaggagcagaagatgcgtcg

SEQ ID NO: 746178 - DNA, 82 bp, Homo sapiens
ctttggacctatcaacagtgttgccttccatcctgatggcaagagctctttgaggagttgcaggagctgctgacccatgaca

SEQ ID NO: 746179 - DNA, 75 bp, Homo sapiens
ttccatttcaacttctgccgacaacttttctcctgatttgaggggtgataaaagaaaatgtggctgaagttaccc

SEQ ID NO: 746180 - DNA, 83 bp, Homo sapiens
gaaaaacttcttgccaaccaaaatgatcaagttccagatgatcctcagtgagggataccatcctttcaatattcaagagtcac

SEQ ID NO: 746181 - DNA, 75 bp, Homo sapiens
tcaccacttacgaaatcagggtcaaggtcatcagaagattgagagaaagaggagaaccaatcagactatttggag

SEQ ID NO: 746182 - DNA, 74 bp, Homo sapiens
agctgggcaccaggaagcgaaggctggattggcagccaccatttgcatgtgatgttgataaacttcattttacg

SEQ ID NO: 746183 - DNA, 75 bp, Homo sapiens
gccgcggcggccatggcgcgaggagacgccccgcgggacagagagaagtggagatcctgatgtttctcagtgcca

SEQ ID NO: 746184 - DNA, 83 bp, Homo sapiens
gcccattatccctgtcactcagccccggtttttagaacttcagccataaaaatgggcagaattttccttgatcatatcggtgg

SEQ ID NO: 746185 - DNA, 99 bp, Homo sapiens
gaggacagacaattgttcagttgcaaaaagaaactggagccaccatcaagctgtctaagtccaaagatttttacccagttagcaaaaggtgtgacaagc

SEQ ID NO: 746186 - DNA, 96 bp, Homo sapiens
tgattctcacgggcccggctgccggcccccgctctgccctgaaaggcctaaagaatgtatttgacgaagcaatattggctgccctggagcctccag

SEQ ID NO: 746187 - DNA, 100 bp, Homo sapiens
aaccagctgatagactataagatcctggggctccagttcaagctgtttgcctgtgagaaatgtaatcttggttctcctgaagatttcctctccaaagcct

SEQ ID NO: 746188 - DNA, 50 bp, Homo sapiens
ggtcatgtacccggtggactcggtgaaggagcttctggaagaggtgaaga

SEQ ID NO: 746189 - DNA, 51 bp, Homo sapiens
caaccctttccaagcagttcaagaagatttttgcactgagtggccagccgc

SEQ ID NO: 746190 - DNA, 83 bp, Homo sapiens
aggccaagttcctgacagcctggaacaacgtcaagtacgacaatgcagatcttcgtgaagactctgactggtaagaccatcac

SEQ ID NO: 746191 - DNA, 90 bp, Homo sapiens
tcagtgtgaatgcatcggccacccctttccaacagccgagtggatatgggtctcatggatacaacactgatccactccttataccgccgc

SEQ ID NO: 746192 - DNA, 100 bp, Homo sapiens
cttgggtgctcaaagttacccagaaataattattacaggggcattcttcttgagcaccgagaaaaagaatttggagacaaagtaaacctactttctgttc

SEQ ID NO: 746193 - DNA, 98 bp, Homo sapiens
cccggccgcgggagcctcgtggctgcgtcaccgccgcccccccagacaagatggacaccgcggaggaaggtggaatgaatcttacttgttgaatatct

SEQ ID NO: 746194 - DNA, 101 bp, Homo sapiens
gggagcgcgaggtcgatgaggactcggagcctgagcgggaggtgtggcagagaagacacagcttctgaaattgagtgtacctgctacttttatgcttgtgt

SEQ ID NO: 746195 - DNA, 74 bp, Homo sapiens
tctgacctctatagcctggcccattcctacctcgcggcttactgaactaaagcgccagtgtgtagagaaagagg

SEQ ID NO: 746196 - DNA, 100 bp, Homo sapiens
tgtgctcctaacaacctgtctcttgaagggtcagacaggtattatccccctcgagaagaggaaacaaatgaaatagaacgacagcagtcacaagtccatg

SEQ ID NO: 746197 - DNA, 82 bp, Homo sapiens
ccagtagcctccggattggaatcattcccgcagggcagctggtggaatttttgaagaaaatggaatctcgaggccccctttc

SEQ ID NO: 746198 - DNA, 75 bp, Homo sapiens
cttactcgggagctggctgaagatggctactctggagttgagacaatgcctgtggaagacaagtcagacccccca

SEQ ID NO: 746199 - DNA, 83 bp, Homo sapiens
ggtacttctgccactgctgctccgtggagatcgtcccgcgcctgccggccctgggctgcatcttgtacctgctgtgcttccgg

SEQ ID NO: 746200 - DNA, 90 bp, Homo sapiens
ccaccttcagagcgtcacggcgtacgccctcatggggaaaatctccccggtgactttcagtcttccccagctcctcaggaggggtcggag

SEQ ID NO: 746201 - DNA, 50 bp, Homo sapiens
tcgacccggcctggcgccggactagacatccccgattgaaagaaccagag

SEQ ID NO: 746202 - DNA, 111 bp, Homo sapiens
cgctgctcagcgccgcacccggaagatgaggctcgccgtgggagccctgctggtctgcgccgtcctggtttcagagactcctccactctctgggaatgacacggactccct

SEQ ID NO: 746203 - DNA, 76 bp, Homo sapiens
gaggccccggcgccgcccggaactgcagcgggtgtggaaccactttgacagcggttcgtgcccaggccaggccatc

SEQ ID NO: 746204 - DNA, 98 bp, Homo sapiens
ctgcgccgggccccgggccccgatggccccgaccgcgtgctggagctcttcgacccacccaagggctgggaggatggaatgctgggcatgaaaaaagg

SEQ ID NO: 746205 - DNA, 82 bp, Homo sapiens
gggaaccaacccactttctcggcgccgcggctcttttctaaaagtacccaacatgagtgaagtttcctgcaagaaacgggac

SEQ ID NO: 746206 - DNA, 101 bp, Homo sapiens
ggggggagcggcgttggaggccaccgtttccagaaaacctcggatcaattctcagctggtggcacaacaagtggcacaacagtatgccaccccaccacccc

SEQ ID NO: 746207 - DNA, 98 bp, Homo sapiens
tggagacataactgtggcaatgacatcagaaattgttcttccggaatggaccatcagagatttcacagtgaaaaatgaggctctgtcggtggtgagcg

SEQ ID NO: 746208 - DNA, 99 bp, Homo sapiens
aaggccagtgactaccaacgtttggaccagaagcaacgcacctcttgctttttcctccaaagtatgttatgttaagtttcgtgatccatcaagtgttgg

SEQ ID NO: 746209 - DNA, 105 bp, Homo sapiens
tttcgccagcccgtgccgcgagcgcggcctgcaggagttttccaagagataacttcaccaagatgtccagtgataggcaaaggtccgatgatgagagccccagca

SEQ ID NO: 746210 - DNA, 98 bp, Homo sapiens
gtgactttgtaaaaatacagaaggcctttgagggagattcttcaagcaatcactatgtcaacagacacaggtgtttcccttccttcatatgaggaaga

SEQ ID NO: 746211 - DNA, 75 bp, Homo sapiens
aagaaacaaaagtgccaccgaagagggtggttatgctgcataccgctacgcccagcctacccctgccactgccgc

SEQ ID NO: 746212 - DNA, 132 bp, Homo sapiens
tagaagcagagacaccaggacagaaaagacagtgttctgctttcatggagttcacagaagagtcgaggagatgaactgtctcattgtgttgagcctgagccatctcaggtgccaggtggcagttctagagac

SEQ ID NO: 746213 - DNA, 100 bp, Homo sapiens
ctggctaccgttcggactatttgtagtcatgtacagaacatgatcaagggtgttacactggaatgaattcttccaaaacaaaactagaactgcaaaagca

SEQ ID NO: 746214 - DNA, 100 bp, Homo sapiens
gcgtttcagaattgcaattccaaaatgtgtaagacgggatattctcttctgtgctgtcaaggagtgcctagaaagatgacaactcaagcaccgacgttta

SEQ ID NO: 746215 - DNA, 75 bp, Homo sapiens
ccggatgcaggacagacccctcagatgagaatcccaagcagcacattcccctggaggagtacgctgcgaacctaa

SEQ ID NO: 746216 - DNA, 50 bp, Homo sapiens
cttcatggtgtccattttatttagcaagatgcctgtgaggagccaccaac

SEQ ID NO: 746217 - DNA, 96 bp, Homo sapiens
ctgacttcttcctgctgctgcttttcagggagccgtgggtactgccacctgctcacccactctccctagccccagagcgcagtccgtgctggtggg

SEQ ID NO: 746218 - DNA, 90 bp, Homo sapiens
gctgctgcaccgcggcgccgacatcaattacgccaatgtggacggactcactgccctgcaccaggtacggacattgctgcaggagaagag

SEQ ID NO: 746219 - DNA, 100 bp, Homo sapiens
ggaactttgggtcctgaatcttctgggagctgaggaaccagatatcttgaaaagctgccagaaaggagatgtaatcagtgtagagaaaaccgtgaagaga

SEQ ID NO: 746220 - DNA, 74 bp, Homo sapiens
gagaagaagcgcaggcacaggaagctggtgacggcgatgaacggctttatcctgtggataaacgcagagtgaac

SEQ ID NO: 746221 - DNA, 100 bp, Homo sapiens
aaaaggagcggggtcgacggtccccactttcccctgagcctcagcacctgcttgtttggaaggttccagcaacagatagaaatgctttaagttcactctg

SEQ ID NO: 746222 - DNA, 90 bp, Homo sapiens
gcatgctgcttttgatgtctgacaacgtggatcgttgttttgaaacttggtgtaatacggtgcccagtatgccgccaagaatgcagacag

SEQ ID NO: 746223 - DNA, 73 bp, Homo sapiens
cgtgaccgagagcgtgaccgagagcgcgaatatcgtcatcgttagaaggtccagaggtgtccttctaaagctg

SEQ ID NO: 746224 - DNA, 75 bp, Homo sapiens
gacaagatcaccacggacgagatgatcaaacgcctgaaggtggatccataaagaacccagccaacccgcagaggg

SEQ ID NO: 746225 - DNA, 50 bp, Homo sapiens
tgaagctggggatggcaacagcattggtccatcttgagtggcctcttccc

SEQ ID NO: 746226 - DNA, 74 bp, Homo sapiens
cgctctccatgaagcagttcctggacttcgctttcaagatgttagaaagttcaagccagaagtttcttcagggt

SEQ ID NO: 746227 - DNA, 100 bp, Homo sapiens
ctgatgcagtccagcaaagaactttcacatgtggacctccctgaagattttctaaggagcaaagatccaggtccagagagcatcgcagacatcgatctcg

SEQ ID NO: 746228 - DNA, 100 bp, Homo sapiens
agtccgtgagcggtggcagtcgcgaccgcgggtgcatccagtttctgcgcccagctacctggcctatcgaaactttatgattgacacttaccgactgaac

SEQ ID NO: 746229 - DNA, 75 bp, Homo sapiens
aagcagacctcattttgattgtagtagcagtggaggcgtcttggctccggagaaagctgcgtggcaagaggcggc

SEQ ID NO: 746230 - DNA, 78 bp, Homo sapiens
agcaacccctgtgcttctccccaggtccagccaatgcattcagaagccaaaatgtgaagctgtggtctaccaatctag

SEQ ID NO: 746231 - DNA, 75 bp, Homo sapiens
cgccgcaccaggtcttgtagcagcgcctcctcgaagatgctcatgaagcagcaggaccggctggaggagcgagag

SEQ ID NO: 746232 - DNA, 98 bp, Homo sapiens
ctggggctgcctgccgggcggccgggcgcggcgagcccagttatggagaaaacttgtatagatgcacttcctcttactatgaattcttcagaaaagca

SEQ ID NO: 746233 - DNA, 100 bp, Homo sapiens
gccgtctctgcagcccgcgggtaactgggccgttgccgccgtccgcgctcggcccccgcggagagatcgtcagtatttaaacagatcacatcatgcgtga

SEQ ID NO: 746234 - DNA, 114 bp, Homo sapiens
cgtaccagaggtggaagtccaagtcaaacgcagaaggactgcctcactgagcaaccaagaattgggaaaatgaggtacgttagtgttcgcgattttaaaggcaaagtgctaatt

SEQ ID NO: 746235 - DNA, 100 bp, Homo sapiens
aagtccagagcggttagataaggagggcctgaggctatggcaggaggagcaggagaggaaggtgcaagccctctcggagatggcatctgaacaactgaag

SEQ ID NO: 746236 - DNA, 100 bp, Homo sapiens
cagaggatggaacacttcagtgcattcaaggtgtgatgaatgcagactctgctaccattttggctgtttggatcctcctttgaaaaagtctcctaaacag

SEQ ID NO: 746237 - DNA, 83 bp, Homo sapiens
ttccttttcacctcagagtcggtcggggaaggccacccaggaggcaagtgaggcctatctggttggcctttttgaagacacca

SEQ ID NO: 746238 - DNA, 75 bp, Homo sapiens
ccaagtgtggcagcagttcgtgaagtctgtgaggaggttgaaggggcccggccaggactcggggaagggtggcct

SEQ ID NO: 746239 - DNA, 100 bp, Homo sapiens
aggtgttggacgcagacggcgtcacttgcttgggaaggctttgtgatacctgatgaagggggcccacaggaggagcaagaagagtattaacagcctggac

SEQ ID NO: 746240 - DNA, 50 bp, Homo sapiens
gctccggctggtctgtggtgaggggaggaactggacttgcggctcattcg

SEQ ID NO: 746241 - DNA, 100 bp, Homo sapiens
cacagagaagatccgcgaggttgtctgctgtcaaaatgcagatcttcgtgaaaacccttaccggcaagaccatcacccttgaggtggagcccagtgacac

SEQ ID NO: 746242 - DNA, 83 bp, Homo sapiens
gaaggacggcctgacgcaggcggacaaggacgcgctggatggcctcctccagcaggcgtggtgaccaagatgaagatgcagag

SEQ ID NO: 746243 - DNA, 110 bp, Homo sapiens
cagcgggagctggacggcgagcgcgagcggcgcgagaaaacgcaaacatgcagatctttgtgaagaccctcactggcaaaaccatcacccttgaggtcgagcccagtgac

SEQ ID NO: 746244 - DNA, 98 bp, Homo sapiens
agatatggcagaagtgaagtcaatgttccgggaagttcttccaaagcaaggaagaagaaaggcgtatggcatctgttttagccaaaaaagaggaagag

SEQ ID NO: 746245 - DNA, 50 bp, Homo sapiens
agcgctttgatttacagcagctgcaggtctggcgtgctcctgatcagagt

SEQ ID NO: 746246 - DNA, 131 bp, Homo sapiens
cgccgagtggtctgtgcaggttcgcgggtcgctggcgggggtcgtgagggagtgcgccgggagcggagatatgatctcagtgaccagctgctggaggtggtcggcttggaaggagccatggagatggggca

SEQ ID NO: 746247 - DNA, 75 bp, Homo sapiens
ccagtggccacctctgcagtgtcttccacaacctgggtgcttcctgggtgagttggggtttagtcaaaggtgctg

SEQ ID NO: 746248 - DNA, 93 bp, Homo sapiens
aggcagagtgctgatgtgaaaaataccacgacaaaaccaccctatgatgaaactacagaatctgtttgtagatgattcaggtcgatatttggc

SEQ ID NO: 746249 - DNA, 74 bp, Homo sapiens
ccatgacaaccagtcaccagcctcaggacagggtccagtaggcgtcaatgtcacttatggaggggatcccatcc

SEQ ID NO: 746250 - DNA, 101 bp, Homo sapiens
tgtcagaccagagaagagcacagaatgtaccagagagaaaaccagaactgatggctctatttgcagtctttcagacaacattcttcttaacattgctgtcc

SEQ ID NO: 746251 - DNA, 105 bp, Homo sapiens
gcccttgttcccccaaatgtctgactctgactctcggactgagaaacgcaagttcctccgtgtcacaaagcagtacctgccccacgtggcgcgcctctgtctgat

SEQ ID NO: 746252 - DNA, 100 bp, Homo sapiens
tgttttagagctggcagcagcatctcagcccaagagaaggagaagttaaatccactcaagaccgaaaaagcgccctccacctgttccgcctggggaatgc

SEQ ID NO: 746253 - DNA, 95 bp, Homo sapiens
tggagttcagctatgatgagaacaccgtgtacagcatcggcgaggacgggaagaaggccagggatgtaccgcctacgacgtagctgtcaacagcg

SEQ ID NO: 746254 - DNA, 96 bp, Homo sapiens
taaaagtggccattagtactgtgagcatgaaccttgagagtcctgtgtatggaaactcacatgagtcagctcagtctagaagggtagtaatttctc

SEQ ID NO: 746255 - DNA, 98 bp, Homo sapiens
tgcaaacactaacagaatatttaaagaaaacacttgatcctgatcctgccatccgacgtccagagcagcccgacggccatggaggctgaagagacgat

SEQ ID NO: 746256 - DNA, 95 bp, Homo sapiens
ggcgcctctttggacatgcacagttgatacagagtgatgatgatattgggattcctctggaataagcagaattgcagatggattcaatggaattt

SEQ ID NO: 746257 - DNA, 75 bp, Homo sapiens
cagcgatcgagagagaccggagaggtggagaggccaagaataaggagacgggtgctttggctgcggccaaagtca

SEQ ID NO: 746258 - DNA, 82 bp, Homo sapiens
gaaaagcgagaccgcgtgcgaggaccgaatgcgtcaacctttgaggatgtcacccaggtgtcctctgcctaccagaagacag

SEQ ID NO: 746259 - DNA, 88 bp, Homo sapiens
tgtccctgctcagtcggccaagaagccctgcccaggtcggccacacacccggagcaccgtcatcacagcggtcaagttccttatctcg

SEQ ID NO: 746260 - DNA, 50 bp, Homo sapiens
tttccctactccaccatcatcaacaaagacagcatcgcacagaattattt

SEQ ID NO: 746261 - DNA, 82 bp, Homo sapiens
ggacatgatcctctccgcctctcgaggtacggactaaggtgagaagccctaccactgcaactgggacggctgcggctggaag

SEQ ID NO: 746262 - DNA, 50 bp, Homo sapiens
ccaagcgcttcgccatcgacataggtaatcattaccaaatgaggaggaaa

SEQ ID NO: 746263 - DNA, 98 bp, Homo sapiens
ggccctccacgggccttcgccaaagtgaacagcatcagccccggctccccagccagcatcgcgggagccggcggcttgtggacgtgatggatgtgaac

SEQ ID NO: 746264 - DNA, 90 bp, Homo sapiens
cggcggcggttgcgggggggaagtgactgggcggtgccggcgccggagacgatgccgttagtgaagatagtccaagtcctaagagacagc

SEQ ID NO: 746265 - DNA, 158 bp, Homo sapiens
ctgtcagcacagaagcattaccatgacgctctgaacatcatcgacatggccctgagtgaatacccagaaaatttcatatgctgatggaaagttaagcgtgaaatttggggtcctcttccgtgatgataaatgtgccaacctctttgaagcattggtag

SEQ ID NO: 746266 - DNA, 51 bp, Homo sapiens
acagcaacagctcggcgggctggaaggctcttgatggaaatgtgtatgatc

SEQ ID NO: 746267 - DNA, 100 bp, Homo sapiens
cccgcacagattgagccgagttgtcgccccgctgggagaagtgaccctcctgcgcctgggaaggtgctgagctactggtgcttcagtcccggccacagca

SEQ ID NO: 746268 - DNA, 82 bp, Homo sapiens
gcaaagtacagcgcttctgggagtccaactcggctgcccacaaggagaacaccttccaccatgaccacctcagcaagttccc

SEQ ID NO: 746269 - DNA, 50 bp, Homo sapiens
tgggccttagcattgttgcagcaaaggctggaggctcccaggtgattttc

SEQ ID NO: 746270 - DNA, 89 bp, Homo sapiens
ggccttttgtccctttgcctcatcccaggttgccttggaaaatgccaacgccgtgtctgaaggactgagcagggggaggaacatttaag

SEQ ID NO: 746271 - DNA, 75 bp, Homo sapiens
ggcgtgcggagcggcggcggaccacctccagctaaaagatggcggcaaggcagcccaggcaaatgtaagaatagg

SEQ ID NO: 746272 - DNA, 101 bp, Homo sapiens
ggccgctgcgtgttgtccacccaagatggagttcctcctggggaacccgttcagcacaccagtggggcagtgcctcgatgccttcaattaagttgcagagt

SEQ ID NO: 746273 - DNA, 75 bp, Homo sapiens
cggcgcctttgaggattcagagcgactgggcgcaagccctcaggcttttggttactccccttcccaccccatccc

SEQ ID NO: 746274 - DNA, 74 bp, Homo sapiens
ctggttcaccccgtggtcgaggagtcggtttgctgactgcgccatattgttgctgacacaactggagactggac

SEQ ID NO: 746275 - DNA, 114 bp, Homo sapiens
cccaacgtggatgacaagaagacgtccaatctgagcgtgctgcggacggcgctgcggtacatccagggtttccaggcctgaggtgcccgccctggccccaggagaatgaaccag

SEQ ID NO: 746276 - DNA, 100 bp, Homo sapiens
tgacctgtgcatcctgtgtgtctaacatagaaaggaatctgcagaaagaagctgaactttgtcagcgagcaagaacaatgccaggaggtctggagaaaac

SEQ ID NO: 746277 - DNA, 75 bp, Homo sapiens
tgtccgggggcctggctaaggaaaccctattacctccaggtcttaattacagagcacggtgacctgggtaatagc

SEQ ID NO: 746278 - DNA, 100 bp, Homo sapiens
cgaggaaaatgtcctcatccgatgagggggccaagttcatcgccctgcggaggtccatggaccaggggggagactgtgccactctgctgaagaatattgg

SEQ ID NO: 746279 - DNA, 100 bp, Homo sapiens
ccctggctctgcctcctggtggccctcgccctggacgtcgtgagaggtcagaatggcggcagtggagcatcgtcattcttcaggattgccctactggccc

SEQ ID NO: 746280 - DNA, 75 bp, Homo sapiens
gaccgtgaccgagagcgtgaccgagagcgcgaatatcgtcatcgttagaagctcaaactggaggattataaggat

SEQ ID NO: 746281 - DNA, 75 bp, Homo sapiens
gcgcaccaaggatgtgaaagaggctgtcagaaagctggcttatcaggtgcagctcagtggaagatgatgacaacc

SEQ ID NO: 746282 - DNA, 80 bp, Homo sapiens
ctgcatgagacccagggtcctgaaagaaatgaccgcccggatgtgccactgagagccccgcgggtctcccggtgcccgaa

SEQ ID NO: 746283 - DNA, 83 bp, Homo sapiens
tttcagttggagttggaatttgtgcaatgtttagccaacccaaattaccttaatttggtattggaaggaactggccctgggcc

SEQ ID NO: 746284 - DNA, 89 bp, Homo sapiens
ggccttcccaagatgtaccgaatatctcaactgatgtcaacaccagtagcaattcctctttagagagcaaagaccacctacaggcacca

SEQ ID NO: 746285 - DNA, 100 bp, Homo sapiens
cgaagtcagttccttgtggagccggagctgggcgcggattcgccgaggcaccgaggcactcagaggaggaacaagtggtgatgaacttggacagcaggct

SEQ ID NO: 746286 - DNA, 50 bp, Homo sapiens
caccaaaaagctttctgctaggggtggcatttttctgaagttgttcatta

SEQ ID NO: 746287 - DNA, 82 bp, Homo sapiens
gcggcttcctggcctgggcgctccggtggcggcggaggtgacagagttagtccttgataattgcctgtgtgtcaatggggaa

SEQ ID NO: 746288 - DNA, 83 bp, Homo sapiens
ctgggttccaggaggacacgctgcagttggccttcatcgacttgagacaaagttatcagttcagtggatggaatatcattaca

SEQ ID NO: 746289 - DNA, 75 bp, Homo sapiens
cttggtgcccctgggcatcaccaacatagccatcgacttcggggagcagatatggctcgtggacagcagaaaatt

SEQ ID NO: 746290 - DNA, 82 bp, Homo sapiens
cattttcggcaaccgctgctggcagttttgccaggtgtttgttaccttggacatggatttgattgacatactttggaggcaa

SEQ ID NO: 746291 - DNA, 50 bp, Homo sapiens
tgcaacctccgtggcagtaagaaaggggcaccaccacgaggcgatttgtg

SEQ ID NO: 746292 - DNA, 99 bp, Homo sapiens
caccgctactcggagggcgagcggacctccctggagaagaccatcatggagcagttcaaccctagcctccggaacttcatcgccatggggaagaattac

SEQ ID NO: 746293 - DNA, 133 bp, Homo sapiens
cgcaggtcccggatgttgcggacagtatgaggcaagcgcagggggacggggaccagcagctgtcgccgccgctctcaggaacgtgtgacgacggctggaggccaacagagtccctacaggtggtgctcacggt

SEQ ID NO: 746294 - DNA, 50 bp, Homo sapiens
gggcaatccgggcttgcagacgaggactttctgaagaccttttcccccga

SEQ ID NO: 746295 - DNA, 76 bp, Homo sapiens
ctacgaaacagaaatttcatgttgcaccctttcaaacacactccaccaggtggcatcatacctctgcttgttgcca

SEQ ID NO: 746296 - DNA, 51 bp, Homo sapiens
tgaaaccagcagacagaatttgtcagagaggatctgacgaactactctcag

SEQ ID NO: 746297 - DNA, 100 bp, Homo sapiens
tctgttcctccatttcccgcctcagctggatgacggagagggatctccgggattaaagaacaacgaccgcagagtgaagacatttccacctggacacctg

SEQ ID NO: 746298 - DNA, 97 bp, Homo sapiens
ttacagataaaggccatgcaaaagatgcctgtgttattagtcacttttctgtagaaggtcagttggaattcagggcattgctatttattcctcgtcg

SEQ ID NO: 746299 - DNA, 101 bp, Homo sapiens
cggtgcgcagacagagctattccagcaccagcagagcttcagtatcagacacagcacagcagccatctgaagagcaaagcaagtctcttgaaaaaccgaaa

SEQ ID NO: 746300 - DNA, 90 bp, Homo sapiens
ttcccccacagccgagcagccgccgggcggaggggacagcgcccgccggaccctgcagcccagactcaaaccattactgggacttccacc

SEQ ID NO: 746301 - DNA, 96 bp, Homo sapiens
ggctcctaaggaaggacccgcctttagggtgcaacaccggaggatttcagcaacctcccacctgaacaaagaaggaaaaagctgcagcagaaagtc

SEQ ID NO: 746302 - DNA, 100 bp, Homo sapiens
aagaaagatagagataaggagaaggataaaatgaaagccaagaagggaatgctgaagggcttgggagacatgttcagacccaacatgagtgaagtttcct

SEQ ID NO: 746303 - DNA, 100 bp, Homo sapiens
ggatgatgcagaagaggagtcctttaggaaggtattgaagcccctgggtgataatttgatggaggaaaacataaggcagtctgtaacaaactctatcaaa

SEQ ID NO: 746304 - DNA, 50 bp, Homo sapiens
gactatggcatctatgttatcaaccagtggaacatgacaaggaattcttc

SEQ ID NO: 746305 - DNA, 50 bp, Homo sapiens
cttcctggccctctaccaaaccgtgggctttcattaaagatagaaccagg

SEQ ID NO: 746306 - DNA, 100 bp, Homo sapiens
tggcctttcaagcaccagtcaatatccagaatgtttctccatcccagagagatgaagtaattcaatggctggccaaactcaagtaccaattcaaccttta

SEQ ID NO: 746307 - DNA, 100 bp, Homo sapiens
gtgcattccagtgaagctgcaataatgaataattcccaaggggatggtgaacattttgcacacccaccctcaggagaatgtactactcatcacctcccac

SEQ ID NO: 746308 - DNA, 103 bp, Homo sapiens
tggtgaaggtccggggcttgccctggtcttgctcggccgatgaagtgcagaggtttttttctgatattaacctggctgcagagccaaaagtgaaccgaggaaa

SEQ ID NO: 746309 - DNA, 83 bp, Homo sapiens
tggaatgcatccaagagaatccctcaacatgctggctgactgtgctgtcctgattgttgctgctggtgttggtgaatttgaag

SEQ ID NO: 746310 - DNA, 76 bp, Homo sapiens
ttatgaaggacgcaatcaagcccaatctcatgcagacactggaggaaagtaatggaccagtgaaggtgtggggaag

SEQ ID NO: 746311 - DNA, 82 bp, Homo sapiens
caaaaagcatgaggaacgtctgggcacgttaccttttcgacaaaatgattcatctagtcattgccagaagagtgggtctcct

SEQ ID NO: 746312 - DNA, 100 bp, Homo sapiens
gagtggggttcagcgtagactctggaccaggagaggcccgcggtgaccgaggcctgggccccggatatctgtatgcccttggacagaaggtttggaaaag

SEQ ID NO: 746313 - DNA, 90 bp, Homo sapiens
ggaggggcgaaggcgggcggcagaggcgatcagggtcccgacggcctacacatggggcgctgtgggcgccgtggggctggtgtgggccac

SEQ ID NO: 746314 - DNA, 82 bp, Homo sapiens
atcagcactaaacatcgtgggggatctcttacggaaagtaggggaggcaagtgaggcctatctggttggcctttttgaagac

SEQ ID NO: 746315 - DNA, 132 bp, Homo sapiens
ccaggtccctctctctgtccccggccgccatggagcagccgccggcgcctaagaggtgctgtacttctttgcagtatacaaggactagcagttaatattgacccaatcttatatacgtggctcatctatcag

SEQ ID NO: 746316 - DNA, 101 bp, Homo sapiens
cgccgccacactttcctgggagcggcggccacggaggcaccatgaagaagtcttactcagtggtttgagtccagccaatgacactggagccaaaaagaaga

SEQ ID NO: 746317 - DNA, 82 bp, Homo sapiens
ggtacctgcggccaattcggtggaacgaggacgcggactgcgaaggcaggtgagaagccctaccactgcaactgggacggct

SEQ ID NO: 746318 - DNA, 74 bp, Homo sapiens
tttggacagtctatggatctacattataccaataacgaggactttgtgttttatgccccacgtctgagaatcaa

SEQ ID NO: 746319 - DNA, 50 bp, Homo sapiens
cgtcaatcagagcgtcctgtgcgggtgcaacaccggaggatttcagcaac

SEQ ID NO: 746320 - DNA, 76 bp, Homo sapiens
gcagaacaacgacagagaacatggctccaataccaggtatgaccccaaaacaaaccagtggagcagtgatgtggcc

SEQ ID NO: 746321 - DNA, 82 bp, Homo sapiens
agttggaagcagccgatccagcctgcggagcctgtggggcagataaacattgacgatcttgaggatgaccctgtggtgaacg

SEQ ID NO: 746322 - DNA, 100 bp, Homo sapiens
agcgtccctgtgacctggccgatgaggaagtactgagcctgttggaggaactggcccggaaacaggaggacttttgggaggtcatcagtgatgagcatgg

SEQ ID NO: 746323 - DNA, 74 bp, Homo sapiens
ccgacttcgatgatcgtgtgtcggatgaggagaaggccgctccccacaggagaacctggtgccatgtgacgtgc

SEQ ID NO: 746324 - DNA, 82 bp, Homo sapiens
cccggccccgccaacgctgccgccggctgagctgactgctgcccactttggaggaggcggtgggctccttcacaagaagact

SEQ ID NO: 746325 - DNA, 96 bp, Homo sapiens
gggagacaaagcagcgcccgtctgcttcgggcctctggaatttagcgctcgcccagctagccgcaggacacagaatttccaggtgttgtggtgcga

SEQ ID NO: 746326 - DNA, 51 bp, Homo sapiens
cacaggagccggagcagaagcaaagagtgtgatccagctttgcttcctgag

SEQ ID NO: 746327 - DNA, 111 bp, Homo sapiens
tcaaagtcagcatgatccacagactgcgattcacaaccgacgtacagctaggatgctataaaatcaccacggtctttagccatgcacaaacggtagttttgtgtgttggct

SEQ ID NO: 746328 - DNA, 82 bp, Homo sapiens
gatatttgcctttagtgcactcttctccttcacagtaaagtggctgttgtattccctgaatgactataaaccacccatttcg

SEQ ID NO: 746329 - DNA, 75 bp, Homo sapiens
gttctctcgatcagggcatacatctttcttcgacaaaggggttctccaaaaaatgtggaatcctttgcatctatg

SEQ ID NO: 746330 - DNA, 75 bp, Homo sapiens
caaaactccagtatgggttcgagaagaagagaggcatacttttttgatgcaccagagatggaccatctcccaaca

SEQ ID NO: 746331 - DNA, 100 bp, Homo sapiens
accccaatttttggactgtgctctcaaactttactttgcctcatttgaggagtgggaacaggcttcggcgaacacaaagcactgcctcctaaaccaccaa

SEQ ID NO: 746332 - DNA, 82 bp, Homo sapiens
cgctgctgctgtgtgcggtgctgctgagcttggcctcggcgtcctcggattgtctaaagccccaggaaaaatggtggaaaat

SEQ ID NO: 746333 - DNA, 75 bp, Homo sapiens
ttttttgtggagtggtttgaatatcgtaagcgcacgtttaaacatctcaaggctgacaagacctacatgttacga

SEQ ID NO: 746334 - DNA, 95 bp, Homo sapiens
gacagctcccggctcagcccccagagcatgctccttacggacatccaaaaattgcttggaactgacttcatgggtaccataagtacagagaacaa

SEQ ID NO: 746335 - DNA, 75 bp, Homo sapiens
tcctgcccaactactgctacaacggctctaccaaccggttggaagtactccatgacacacactcggagaaagtcc

SEQ ID NO: 746336 - DNA, 100 bp, Homo sapiens
ggtgtttgtctcctctaaagacgccgatctcacaaaaatggctacaaacttcctagcacatgagaagatctggttcgacaagttcaaatatgacgacgca

SEQ ID NO: 746337 - DNA, 98 bp, Homo sapiens
agttgtcgacgaccgacagggtggtgaaagcgagtaaccagctcataaatcacatcgaacagtttttggatactaatgaaacaccgtattttatgaag

SEQ ID NO: 746338 - DNA, 98 bp, Homo sapiens
cctaaaggcaaccctgggccccaaggtcctcctgggagaccagactctgaagaagaagctatggagactacaccagccaaaggaaagaaagctgcaaa

SEQ ID NO: 746339 - DNA, 89 bp, Homo sapiens
ctccgcgtcggagctgcgcgggatcctggctactctggccccgcaggccgggagcagagggttacagctgaagtaaagcacaacatcac

SEQ ID NO: 746340 - DNA, 75 bp, Homo sapiens
cttcatagtagtgtatttatttggcgctgtgttacagaatttacgatgtaggcatgcagttaaaaagtcaacaaa

SEQ ID NO: 746341 - DNA, 90 bp, Homo sapiens
ttgtgggagaagaatggctctgagaactcacatctgagaaatgagccgtcagactgctacagcattacctaccggtacctcgaagtgtcc

SEQ ID NO: 746342 - DNA, 101 bp, Homo sapiens
accacatacttggagtagggagaatattcagggaagatcttatcgtgaccaacagctgctgcttctcaagaagcacttagaaaataattacaggagcagag

SEQ ID NO: 746343 - DNA, 100 bp, Homo sapiens
attgacaaaatccatctcattaatgacaatcagccatcctggattggacatgccggtggcagatatcaaagccgtggtgacgggaaaggactgccctcat

SEQ ID NO: 746344 - DNA, 75 bp, Homo sapiens
ggaatgacagcggcgaggagaacgtcccgctggatctgacccgaggatttaagtgccctgtatgctcaaaatttg

SEQ ID NO: 746345 - DNA, 112 bp, Homo sapiens
ctcgtggccagtgactacccctaacgcacaataatatggctccgatgggctcaaaggtgcagcggaactgctgcctgacgctctgcaacttcagcatccccgaggagctgga

SEQ ID NO: 746346 - DNA, 100 bp, Homo sapiens
aggaaattctgaaagtccctttggccttgcagacctctatagaggagcgtgtggctcatctacgaagagtccaggtgaggacaccagtgatgaattctga

SEQ ID NO: 746347 - DNA, 76 bp, Homo sapiens
tgtgcttaaagccatcttccaggaagtgcatgtacaggtcctaggcctacttacaagcctccagtctcaaattatc

SEQ ID NO: 746348 - DNA, 50 bp, Homo sapiens
agcggcagcggcaagagcatgaacgcggcctgaagccaatggaccacaat

SEQ ID NO: 746349 - DNA, 78 bp, Homo sapiens
ggccaggggaccaagctggagatcaaacgtcagcccaaggctgccccctcggtcactctgttcccgccctcctctgag

SEQ ID NO: 746350 - DNA, 100 bp, Homo sapiens
gccagcaaaaagttgctgaagaagaagaaggcagcctggcatcctcgctacaacctcattgttgtgggccgatacccagatcctaatttcaaaagttgta

SEQ ID NO: 746351 - DNA, 74 bp, Homo sapiens
ccggagacagcggcacagaggtgcttctgccaggaccatcagcacgtgcccatcgacatccagaccagcaagct

SEQ ID NO: 746352 - DNA, 101 bp, Homo sapiens
gccgagggacaccgcagtatgaggcagaggaggcaagtgaggcctatctggttggcctttttgaagacaccaacctgtgtgctatccatgccaaacgtgta

SEQ ID NO: 746353 - DNA, 75 bp, Homo sapiens
cctgcagcgggagctggacggcgagcgcgagcggcgcgagaaaggtcccctggaagtgacgctgactcagccagt

SEQ ID NO: 746354 - DNA, 75 bp, Homo sapiens
ggacacagcaatatctctgggctttcacagtttttggctttcacccccaaccagtgaccaaagacttgaccactc

SEQ ID NO: 746355 - DNA, 75 bp, Homo sapiens
tcacttttgaagaaattgccaaaagtgctaaaatcacagtgaatgaggaggtggagcccatgtgcaaggagagcg

SEQ ID NO: 746356 - DNA, 100 bp, Homo sapiens
cagagaacctttaacgtggacatgtacgaggagatccaccgcaagctctcagaggccaccagtcctctctgcgccccatgcacccccaggctctgcatcc

SEQ ID NO: 746357 - DNA, 83 bp, Homo sapiens
agtgttttcatttgcggagagctccctggtgactgccagcccaagtaaataccagctgtcccctacagtgaatatgccccaag

SEQ ID NO: 746358 - DNA, 98 bp, Homo sapiens
gcctcgtccggtactcagacgctggcgggcgcagtttctcacgacgggccgagcctgccactaactgtcaagtaatccacctctggctaccatcctta

SEQ ID NO: 746359 - DNA, 75 bp, Homo sapiens
gccggcccggcggctgctgctgctgctgacgctgctgctgcccggcctcggggttgaaaggattgttgacaaaag

SEQ ID NO: 746360 - DNA, 100 bp, Homo sapiens
tatacacagccccctacagatctgtgggactggtttgaatccttccttgatgatgaagagactggcattgctcgggtaccacttgctggagctgctggag

SEQ ID NO: 746361 - DNA, 50 bp, Homo sapiens
cctgaagataacaagccactcttaacagtccactttggaaagtgaagaat

SEQ ID NO: 746362 - DNA, 100 bp, Homo sapiens
tttcgggagagcaaaggctgtgtctacggcagcctggggatatagcttatgccaaattttctggtgcacccttgaaagtcaatgtgatagataacacctg

SEQ ID NO: 746363 - DNA, 98 bp, Homo sapiens
gccgccgggacccccaggacgacgtgtacctggacatcaccggcgacattgactacagcaccgtgctcctcggcatgctggtgacgcaggacgtgcag

SEQ ID NO: 746364 - DNA, 82 bp, Homo sapiens
gcgcacgcgccgacagacagcgccgttccagccctcgcccgatgcacggatgtgaagttcatttccaatccgccctccatgg

SEQ ID NO: 746365 - DNA, 98 bp, Homo sapiens
agctcccccgcctcggggagggcaccaggctactgcagcactggggtgtcagttgttggtccgacccagaacgcttcagttctgctctgcaaggatat

SEQ ID NO: 746366 - DNA, 75 bp, Homo sapiens
ccatgagaaaaagcttggagataaagttgctttttactgggtgccgaacaggtgaagcaaaattgacaaaaggat

SEQ ID NO: 746367 - DNA, 74 bp, Homo sapiens
tcgagttaaagttggatgtgctggaacagcatgcttttcacttccactgcatctctcgctggctcaaaacacga

SEQ ID NO: 746368 - DNA, 85 bp, Homo sapiens
gagactcggagagcatcactgtaggatatatctgcatcttgaaaggaagataaaacaaaagccttctttggaatagatggatttt

SEQ ID NO: 746369 - DNA, 50 bp, Homo sapiens
cagagtgaggtttctgcagacaatcaagcaattaagttggaatatgcaag

SEQ ID NO: 746370 - DNA, 75 bp, Homo sapiens
gccccttcccttatctacttcagaacagattacagagttgaaggctgattttcagtaccaggaatcgcagatgag

SEQ ID NO: 746371 - DNA, 75 bp, Homo sapiens
catccttgtaatgcgactagcaaccaaggaacaagagatgcaagagtgtactcactattcatggccgaattgatc

SEQ ID NO: 746372 - DNA, 90 bp, Homo sapiens
acctgcggcctcactgggacccccaggaggtgaccctgcaggatcccctaacaacagtgagagagcaatgcgagcagttggagaaatgtg

SEQ ID NO: 746373 - DNA, 98 bp, Homo sapiens
tgaacttcaccatcctacagatcttccctttcacctatgaaagcaaacgtatgggcatcatcgtgcgggtggagcccccagaaccatgtgccgagccc

SEQ ID NO: 746374 - DNA, 138 bp, Homo sapiens
gccgcgcggacctccgtcttccttgtccgcgtgggcccgggcgcaggcgagagtccagggacacccccgtttcgagaaactaatctggattcactccctctggttgatacccactcaaaaaggacacttctgattaag

SEQ ID NO: 746375 - DNA, 100 bp, Homo sapiens
ccgcgatgttcgccccccggctgctggatttccagaagacgaaatacgcgaggtccctgtgcgttttattgcgacctgccggtgggaactttgtctccga

SEQ ID NO: 746376 - DNA, 101 bp, Homo sapiens
agatgagctgtcctttcaggaaggagccattatttatgtcatcaagaagaatgacgatggtggacttcacctcgtgcacaggcctcttctgtgtcctggga

SEQ ID NO: 746377 - DNA, 74 bp, Homo sapiens
ctcaccgcaacctccacctcccaggtggtgtacacaatccctgcagtactgaccctgcttgttggacttaaccc

SEQ ID NO: 746378 - DNA, 80 bp, Homo sapiens
ctgatcgagaagtttgtagacacaccgagtcctaggaaaaacccttctgtggttataaagccagaagcatgttctccaca

SEQ ID NO: 746379 - DNA, 83 bp, Homo sapiens
ggattcgccgaggcaccgaggcactcagaggaggagaaccaggtgcatcagcgcattgcggagctgaggaaagcaggtctgtg

SEQ ID NO: 746380 - DNA, 100 bp, Homo sapiens
gtcctttatatagaagggagagtagacgtgtactcatatgatgaggatgacatggtcctggaccccagcctggctgagcacctgtcccacttcggcatcg

SEQ ID NO: 746381 - DNA, 90 bp, Homo sapiens
cgggcgacctgggcaccagcaggacccgaggccaggagccaggggcccagaaggctccagatggaccctgggaaggacaaagagggggtg

SEQ ID NO: 746382 - DNA, 101 bp, Homo sapiens
agcacaccagtggggcagtgcctcggtgacagagctgaatgaacctctctccaatgaagatcgaaatctcctctctgtggcctacaagaatgtggttggtg

SEQ ID NO: 746383 - DNA, 100 bp, Homo sapiens
gccatcaggtaggctgcgttgaggatctttgctcttccatccgcctttgatcgtcttcctcttcagccatccagtttaggtagcagtcaccattatgctc

SEQ ID NO: 746384 - DNA, 50 bp, Homo sapiens
cttggttaccaagaagccatacatgctccatgttgttcactggaattcag

SEQ ID NO: 746385 - DNA, 98 bp, Homo sapiens
cccttgtaagacagccaagaaaacaggaagagggttggaggcaaagttccgaatagggatgaggcatacgtgaatatgcttttaaggctattaaccag

SEQ ID NO: 746386 - DNA, 82 bp, Homo sapiens
agggaagtgtcttcacaaagatgagggagacattacctcatccctcaagattgctcgctgcaaacacaacgctgagaaatgg

SEQ ID NO: 746387 - DNA, 100 bp, Homo sapiens
cggcccacagtgggggtgtgcaaacccgagagaactggtctatccttcactggagtctgatgatgatgaccctgctttgaaatctcgacccaagaaaaag

SEQ ID NO: 746388 - DNA, 90 bp, Homo sapiens
attcgcagtggtcgcttcttctccttggtccaggtgcaggtacagcagtctccgcaacaggtctcggctcagctctccccacaactcacc

SEQ ID NO: 746389 - DNA, 100 bp, Homo sapiens
gagccgggctgtggtcactaatgtacaggcagaaaacgagaggctcaccgcagtcgtgcaggatctgaaggagatcagcaaacagcagctgcagacagtc

SEQ ID NO: 746390 - DNA, 100 bp, Homo sapiens
taccatggcttccccagcctgcaggccctggctgatccttctgctgcaattggacctcatcgaacagcagcagcagcagctgcaggccaaggaaaaggag

SEQ ID NO: 746391 - DNA, 86 bp, Homo sapiens
cggtgatgaagaatccccccgaaaggaccccccaggcctgctggtgggtacccttgatgttgtgttggactccagcgcccgggtcg

SEQ ID NO: 746392 - DNA, 89 bp, Homo sapiens
aaatgtgccctcttgagagatgacctggtgttagtagacagagcaactggaatgagattgttgataactttgatgatatgaatttaaag

SEQ ID NO: 746393 - DNA, 100 bp, Homo sapiens
aggagaacgaacatcttctggacctttgtccagaaaccagcctggacaccaagtctgtgtcagaaggccacctcaagaggaacatcgtggtgaagaccgt

SEQ ID NO: 746394 - DNA, 100 bp, Homo sapiens
gcggtcctggagctgctgcagcggccggggaacgcgcgctgcgcggactgcggcgccccggtgagacggtttaagcggaagcatcttactgccattgact

SEQ ID NO: 746395 - DNA, 83 bp, Homo sapiens
atcctctctgagatcaaggaagccgtcgctgccctgcccccgctgctgtcggggccgtgtttggcctcaccacctgcatcagc

SEQ ID NO: 746396 - DNA, 100 bp, Homo sapiens
ccatggtagctgggatgttagggctcaggatctgtacccagctctgaaaggtgtaaacacagttttccactgtgcgtcacccccaccatccagtaacaac

SEQ ID NO: 746397 - DNA, 100 bp, Homo sapiens
ccgctttgaggtgtggaatgcgatgactcggtgctccttgtcttctgagatgttgggcccctcttgggatggagatgaagcagaatccactggtgaaatc

SEQ ID NO: 746398 - DNA, 100 bp, Homo sapiens
catttatcacaccaagtatgacacagcggacagaattctaacagattccattcagagagcaggggatgaccgcagcctgtccagctcatcctcagaggcc

SEQ ID NO: 746399 - DNA, 74 bp, Homo sapiens
gacgttcatcgccgtgttatccttgagtaaaggtggagttggcatgaacttaacagcagcagatactgtgattt

SEQ ID NO: 746400 - DNA, 80 bp, Homo sapiens
attcagtctcgtctcctcggtcagtggactcttattcttcaactcagcatgttccttagacccaaatgatttgtacattg

SEQ ID NO: 746401 - DNA, 98 bp, Homo sapiens
gcagttcccaggatctgcataaaggttctgccatcttgaaacccccattctgtttccagcccagaagaaatgctgcccctaccagatccctccttgaa

SEQ ID NO: 746402 - DNA, 74 bp, Homo sapiens
tcaatgtccgcatcgcaaccaccgccctggccatctaccatgtggtatctcgggggagctttgtgccttgatgg

SEQ ID NO: 746403 - DNA, 75 bp, Homo sapiens
cgccaaggtcctgcttcaccgaacagcacctcaggagcagggttatgaagactggcttcgacataaagcagacaa

SEQ ID NO: 746404 - DNA, 50 bp, Homo sapiens
ctcagaagtactcggacaaggagctgcagatggagctaacacccattatg

SEQ ID NO: 746405 - DNA, 100 bp, Homo sapiens
ctcacttaaagacctttatgccatccaagagattcaagctgaagaaaacctgtttaaactcattgtcaagatatgatgtttcagcttctccgaggtctgg

SEQ ID NO: 746406 - DNA, 88 bp, Homo sapiens
gaagcactacaaacaagcagctgagaaagaccacagcaagattctttcattcgtctcctcctagcctgggggaccaggctcgaactga

SEQ ID NO: 746407 - DNA, 101 bp, Homo sapiens
gagggaagcgatgccacgggagatggaaccaaggagaaaccatttaaaacaggtctaaagaaaagaggcacagttagatgaagaaggacagtttcttgtca

SEQ ID NO: 746408 - DNA, 80 bp, Homo sapiens
atgctgggcatcatcccctatgccggcatcgaccttgcagtctacgagctcgggttcatgacgctctcgatattcctgtg

SEQ ID NO: 746409 - DNA, 101 bp, Homo sapiens
gattcagacaagaaaggcaaggaaacatcttttgacaagatgtcacctgaaagtggtcacagccgcatctttgaagtggctgctaatttacagaagattgt

SEQ ID NO: 746410 - DNA, 96 bp, Homo sapiens
gctgagatggaatcttcttctcactgctgtaagcaaagccatgaccctctgccacagagatagttttggtgtcttggctgggcatgacaaccgcgt

SEQ ID NO: 746411 - DNA, 132 bp, Homo sapiens
gtcccccagtaggagaatgactccgattcgtgaccctcagcgccggtgcatgtcgatggctggaaacaggattgttgaaatactccctgaacatctgaaagagtttcagtcccttgaaactttggaccttag

SEQ ID NO: 746412 - DNA, 48 bp, Homo sapiens
gtccggaaccatcccttcttccagggcccccccggctcccagccgtcc

SEQ ID NO: 746413 - DNA, 51 bp, Homo sapiens
gtcggcggcgcccggatgggcagctgagttttagaaagagcgttttcgcta

SEQ ID NO: 746414 - DNA, 100 bp, Homo sapiens
ttagcagatatactattgtactatggacttcatcgctttatagccaacattggccagaaggaagacttcgaggaagccaggaagaaggcactgaagcttg

SEQ ID NO: 746415 - DNA, 100 bp, Homo sapiens
caaggagcgggtccgtcgcggagccggagggcgggaggaacatgacatcgcggaggagagccggacagggcagcggccggcactaccgcgctgcgatttg

SEQ ID NO: 746416 - DNA, 83 bp, Homo sapiens
cccagaccctggagcctcagttggaagcagccgatccagcctgcggagcctgtggggcagagctttcagcagaggccaaggca

SEQ ID NO: 746417 - DNA, 82 bp, Homo sapiens
gtcgaggctgtagcaggactccagacaggggcaagtgtccgagtggtgaatcagctacttacagagatggatggtctggaag

SEQ ID NO: 746418 - DNA, 75 bp, Homo sapiens
gtgattcccggaccctggaagagaagagggtggctaatgattaagaagaaccttgaaggctatgtgggatttgcc

SEQ ID NO: 746419 - DNA, 50 bp, Homo sapiens
ctgaaatgggggcgaccattcttaggtgtgggcaagagcagtttactgtt

SEQ ID NO: 746420 - DNA, 98 bp, Homo sapiens
aatcatctagaaggacaaatgaacttcaatgcagattctagccaacataaagaaatgagccgtcagactgctacagcattacctaccggtacctcgaa

SEQ ID NO: 746421 - DNA, 100 bp, Homo sapiens
gcctgccaccgagccgggcccacctccccaccaaggaagcgagggcggcactgctcacaggacggctacccatccgcaatggcttctacaccaccaacgc

SEQ ID NO: 746422 - DNA, 105 bp, Homo sapiens
tgttccacatcattgacttactgctttgtgagaattcagtaattggatcataacgagacttctgcggattgcagcaactccctcctgtcatttgttacacaagaa

SEQ ID NO: 746423 - DNA, 74 bp, Homo sapiens
tctggatcatcgaactgaatcctactcaatgtgaagatgatgaggatgaaaacctttgtgatgatccacttcca

SEQ ID NO: 746424 - DNA, 96 bp, Homo sapiens
acaaatttttggatgatgatggatccatttctcctattgaggagtcaaccccctcatatggaaaatttgaaatgcagaggggaaacagtagcaaag

SEQ ID NO: 746425 - DNA, 74 bp, Homo sapiens
atcatcattgttggagatgagatccttaaggtcatttggatccaggattcctagcaagtgacaaaacatctggc

SEQ ID NO: 746426 - DNA, 74 bp, Homo sapiens
cgccgctttgccggctctctgcgacctgctagcctcggcggccgacccccagatttatccacctatcaatgtgc

SEQ ID NO: 746427 - DNA, 100 bp, Homo sapiens
ggcggcggccgaggacggggacagcgacgacgcggaggcagagaagggaacgcccggcccagccccgacttccttcgctgggcatctggctgggattctt

SEQ ID NO: 746428 - DNA, 76 bp, Homo sapiens
cactcgattcagctattggaaagtttttttaatgtggttggaacaactgaggtgaaaggtgtagcagtcactcggc

SEQ ID NO: 746429 - DNA, 98 bp, Homo sapiens
taagattgctgaggaggcggcgggtagctggcaggcgccgacttccgaaggccgccgtccgggcgaggacttctgccatgggcaagtgatgtggccac

SEQ ID NO: 746430 - DNA, 98 bp, Homo sapiens
catgccgctcctaagcctgcacagccgcggcggcagcagcagtgagagctatgacatggtgcattacggccactccaaccagctgcgccaggcacggg

SEQ ID NO: 746431 - DNA, 50 bp, Homo sapiens
aatgaggacccgggaagaaatgacacgatgaggcgagtggtacgacagag

SEQ ID NO: 746432 - DNA, 88 bp, Homo sapiens
gaggttcgcggctctaacggggctttctacaagggtctaaaattcccaggactccacagctttgcaccagataagcctggaggaatac

SEQ ID NO: 746433 - DNA, 51 bp, Homo sapiens
ctctgttccaaatgctttgctggttttcaaatggaacattttgatgcatca

SEQ ID NO: 746434 - DNA, 83 bp, Homo sapiens
tgctgatcgagccgtatctcctcagaggatcaggcgtgtgtccagttctgaattcaagccaggaagaagcagcaatctgtctt

SEQ ID NO: 746435 - DNA, 100 bp, Homo sapiens
agaggaatagctcctgcccccgccctctctgtttctccccaaaataaccattctccagatccagaatggtagataacgcagatcatctctggaaaggata

SEQ ID NO: 746436 - DNA, 145 bp, Homo sapiens
ggtggtcaacgtgggtgggaagactgtgaagctacagatttgggacacggctggccaggagcggtttcgctgcagtacagcaatggcgatcagaaggtagaacagctgtatggctgcacattcccatcctccaaagccgatttat

SEQ ID NO: 746437 - DNA, 100 bp, Homo sapiens
gcctcccgaacagctgggactacagagatgtgtgcacagacccaggccatgcagatactggtgcctctaacttcgtcagcccagaacacctcacctctgg

SEQ ID NO: 746438 - DNA, 83 bp, Homo sapiens
cagcccgcccgaccccgtcccgaccctggccgccccgagcggagcctggaggaagccatcttcgacaagagcacagggaaggt

SEQ ID NO: 746439 - DNA, 83 bp, Homo sapiens
cggatcgggtggagtgtaggtcatatcgccgcgggctgggtataagtaagcaagaagagggcctgggagaagagtctgacgag

SEQ ID NO: 746440 - DNA, 100 bp, Homo sapiens
gtgaggccttcccagccacgtggaactgtccctcaggaggtcactcacatgcatcaaggagagcctgcgtatcttcattgacctgggggagacagacaag

SEQ ID NO: 746441 - DNA, 75 bp, Homo sapiens
cacggatccgcaagccaagtgcagaagcaaagaagcgctggcagtttcaaacgttgttgatcattatgaaaatcc

SEQ ID NO: 746442 - DNA, 100 bp, Homo sapiens
aggagatccggaagaatcctgagttccgtgtgcagttccaggacatgtgtgcaaccattggcgtggatccgctggcctcacctgtgcctgtgtggaatac

SEQ ID NO: 746443 - DNA, 75 bp, Homo sapiens
agttatgtggctcaaatgattgtggaaggatctgagtctctccctgcggagacagccctgaagaactcctgtaac

SEQ ID NO: 746444 - DNA, 74 bp, Homo sapiens
gacatttaattttagggtcctttatatagaagggagagtaggagtccaatgtgctgattgctgctaacagtcag

SEQ ID NO: 746445 - DNA, 76 bp, Homo sapiens
cagagttgctccgggccattgtcgactgtggctttgagcatccgtcagaagtggtttgatgataagaacccaattt

SEQ ID NO: 746446 - DNA, 75 bp, Homo sapiens
ccgggagacaagatccgatctactgagagctgcgaggtcccagtagggatggcacaatcagcgaggacaccatcc

SEQ ID NO: 746447 - DNA, 75 bp, Homo sapiens
tttcgtaccctttggagaatatgatttcaagctttttagatcagcaagccatcctgtttgtggacactgctgatc

SEQ ID NO: 746448 - DNA, 100 bp, Homo sapiens
ctttttcgcagtactcgaacgttgttattttcggtgtgcctcagatgctttgactctcccggatcttgcagagcagtttgcccctcctgacattgccccg

SEQ ID NO: 746449 - DNA, 75 bp, Homo sapiens
gagaagatagtttcgtgtggtacatggataatccacaggtatctagaagagcagaagacagagaatggaaaagat

SEQ ID NO: 746450 - DNA, 100 bp, Homo sapiens
cagtgctagaaatgtacagtaagctgaaagaacagatgagtgccaaaaggaatctgtcttgaactatcgtttcgatcctctcggcattgttgatggtttt

SEQ ID NO: 746451 - DNA, 50 bp, Homo sapiens
cctcccaagtagctgggattacagttcaaatctgaacatcaatgatgtac

SEQ ID NO: 746452 - DNA, 101 bp, Homo sapiens
cccatctggaatggacagaaggctagaacctgcagtgcagtgagtgtgggagaaaccagctggcacaaggaagttaaaccgaatttaacagagagaattca

SEQ ID NO: 746453 - DNA, 75 bp, Homo sapiens
tgaaggctttgagccagggcccatgatgaattgtgaagaacaagaggaaagtatggggaaggagccaagcaggag

SEQ ID NO: 746454 - DNA, 100 bp, Homo sapiens
gcaacaacaagctccgagggcagccattctatgctgtggaaaagaaagcatactgcgagccctgctacattatacccataatatctgccgaacatctgac

SEQ ID NO: 746455 - DNA, 100 bp, Homo sapiens
aagaccttcagcatctggacaatgaggagagtgaccaccatcagctcagaaaagccctgagagcagatggctttggagacaatcctttctatcactgttt

SEQ ID NO: 746456 - DNA, 89 bp, Homo sapiens
gttactcaaacagagggaactacaacagaggtggaatgcccaacagagggaactacaaccagtttcgctcttgttgcccaggctggagt

SEQ ID NO: 746457 - DNA, 90 bp, Homo sapiens
cggaggggtgatagatatgatgactaccgagactatgacagtccagaggaggagtttgtttacgaggacatggaggccctctgcagtgtc

SEQ ID NO: 746458 - DNA, 82 bp, Homo sapiens
ggcggctctgcgctggccgggggcgcgggcggcggcgccggcaggaaggtactccaaagattcaggtttactcacgtcatcc

SEQ ID NO: 746459 - DNA, 100 bp, Homo sapiens
catggagaggggccgtggcccctgcagcggaaccggacccagtccctgagccgcccctacacccacaggtactccaaagattcaggtttactcacgtcat

SEQ ID NO: 746460 - DNA, 50 bp, Homo sapiens
caataccctgatgactcatgaagtgcctataacagtgttttatggacagg

SEQ ID NO: 746461 - DNA, 97 bp, Homo sapiens
agctctcctgccacagctcctcaccccctgaaaatgttcgcctgctccaagtttgtctccactccctccttgaaagctgccgtgtgggagatcacag

SEQ ID NO: 746462 - DNA, 100 bp, Homo sapiens
ctggggcaccgaccccgcaacgactgcccgggctgcgggaggggaggagagcagagaacgtccccaggccgagacgcatccagagctttcgtgaccgggg

SEQ ID NO: 746463 - DNA, 98 bp, Homo sapiens
gtcattataccttcacccagcatttcatccctcgtcgaaaggattggattggcatctttagagcgtcacaatgtagcagggaccccaggcgtcgtgct

SEQ ID NO: 746464 - DNA, 90 bp, Homo sapiens
gccgagcaggaggcgccatcatggatggagccctggggctgtcgctggagatcggggagaaccgcctggtgatggggggcccccagcagc

SEQ ID NO: 746465 - DNA, 101 bp, Homo sapiens
gcagattcctccgggcagcaggggaatgaaagctactggttgattttaaagtgcctgggcctcacaggtttggagatgtcccagaataaggcacaatgtca

SEQ ID NO: 746466 - DNA, 97 bp, Homo sapiens
ggcggatgccctgcagtacctgcagaaggtctctggagacatcttcagcagaccctgtattcagtggatcagctggcaccacccaaatagataaatt

SEQ ID NO: 746467 - DNA, 100 bp, Homo sapiens
gtgtaagaagtgccttttgcctcccaccgtgattctgaggcctccccaaccatgtgcaattgttatgaagacagtatggagtttccagaccatagtagac

SEQ ID NO: 746468 - DNA, 132 bp, Homo sapiens
ctgttgttacctgggaaccctggaggggccttcctcatccgggagagccagaccaggagaggtatcgagaaccttccctgcgaacttcagaggaacttccagctgatgcgagagctggaccagaggacggaa

SEQ ID NO: 746469 - DNA, 89 bp, Homo sapiens
cgtggagtccttcaactacgctgtgcacgagggtctcggcctcgcggtgcagatgccgaaagttcagtataaatcgaactgtaaaccat

SEQ ID NO: 746470 - DNA, 95 bp, Homo sapiens
cactgactttcagctatggaatcgactgaacctccattgaatactccagaaaacagggaatatactgctgaaataatgtttgagtccttcaatgt

SEQ ID NO: 746471 - DNA, 74 bp, Homo sapiens
cacacattccagagaactgtgggctggctgtgtgaactgctccgctggaaggagaacccaagcccagaaaaccg

SEQ ID NO: 746472 - DNA, 97 bp, Homo sapiens
gcgtccccggcgcgaagaggctggactcggattcgttgcctgaggagtggaagctggacacactatgtgacttgtatgaaaccctgaccatcaccca

SEQ ID NO: 746473 - DNA, 78 bp, Homo sapiens
tgggcgcagggaagaggaagcggaggcactcggaagaaacctccacagctgttgagaaaaaggagaaacctcttccaa

SEQ ID NO: 746474 - DNA, 75 bp, Homo sapiens
ggccatcgaggccctgctgcacgacctcagctcccagaggatcaccagcgtggggttgtgagtcccggcccagcc

SEQ ID NO: 746475 - DNA, 100 bp, Homo sapiens
cagtcggacgcgtctccccaagaaagggcgccctgcgtccggcagaggaggcgagcatcccgctcaggtgatgaggaacccctcgcgcacccagcgcaga

SEQ ID NO: 746476 - DNA, 75 bp, Homo sapiens
acgggggcgagagtgaacgattcaacccgggggagctcaggtggcggctttgaaatacatcccatctgtcctgca

SEQ ID NO: 746477 - DNA, 83 bp, Homo sapiens
gcaatggtcacagccaccaacagtatggaagagactctgatgcaaatagcatcacgtcatcttgacagctatgaattccttaa

SEQ ID NO: 746478 - DNA, 96 bp, Homo sapiens
cgattattagctttagtgaaatgggctaataatgctggcaaagtggaaaaatgtgcggcaatgaatcgctccctggctaatgtgattcttggaggc

SEQ ID NO: 746479 - DNA, 101 bp, Homo sapiens
ggtgaatgccatgtcaactttgttcggaagattgaaaactgtaactatgcagtggaacttgggaagaacaaggccaaattctccttggttggcattgctgg

SEQ ID NO: 746480 - DNA, 100 bp, Homo sapiens
cggaccggagactttggggcctaactagcccatcacctcttcatgaccactgcctgccaggaggctaactacggtgccctcctccgggagctctgcctca

SEQ ID NO: 746481 - DNA, 75 bp, Homo sapiens
tacgtccatggaagtgaaagtcctctttttctttgtaccacttactgagacggaggacatccgcttggagccaga

SEQ ID NO: 746482 - DNA, 75 bp, Homo sapiens
ttcgtcggggaggtggtagaagaagactctgaacaggaagtgcctcctggaaccacagagtcggttcagtctgtg

SEQ ID NO: 746483 - DNA, 82 bp, Homo sapiens
ggccgagcgggcggcttcctggcctgggcgctccggtggcggcggagcaaacggggattcagcgtccgatcctttggaacag

SEQ ID NO: 746484 - DNA, 51 bp, Homo sapiens
ccaaggatcagcagatcggagagaaggagaaacggctgcagtgcctgtcct

SEQ ID NO: 746485 - DNA, 75 bp, Homo sapiens
ctggcagccgccgccgtggaaggtaactataactacccaatattgcagccatggagtccatgcttaataaattga

SEQ ID NO: 746486 - DNA, 75 bp, Homo sapiens
tttgcaacccttccgggaagccatagctctgcatgatcctgataacttaagtgactctctcttttccggtgatga

SEQ ID NO: 746487 - DNA, 83 bp, Homo sapiens
ccgggtcttccagagcgtgaagatcaagatcggttcgtgctggccgtgggcagcgccgtctttgatgccatgttcaacggggg

SEQ ID NO: 746488 - DNA, 100 bp, Homo sapiens
cagcccggcagcccgagccgaccaaatttgactacctgaaggaggaggtggatcggatcattttctgtgtcttcttagaagttgacttcaaaatctacaa

SEQ ID NO: 746489 - DNA, 89 bp, Homo sapiens
tctctacagaagagcttctcctcatcaactggggatgattacagttcttcctaaaaaagtttattaaccttgcaagaactcttcaggca

SEQ ID NO: 746490 - DNA, 100 bp, Homo sapiens
tttgaaatagttcatgaaccaaatcatcaggaaatactacgagactgtctcagcccatccctacaagccttgctgtctctaactctgatctgatatcctg

SEQ ID NO: 746491 - DNA, 100 bp, Homo sapiens
gcctcccggggccggtaaagggacccaggagcacggtctgaatctgcacagagcaagatgctgagtggagtcgggggctttgtgctgggcctgctcttcc

SEQ ID NO: 746492 - DNA, 99 bp, Homo sapiens
caggagcctgccccgccctggggacgaagagctgcagctcctcctgtgcggatacctcggatctgcattttcaagtgagcaaagaccgctatggagggc

SEQ ID NO: 746493 - DNA, 98 bp, Homo sapiens
taactcggctacaacatttggcagaggtgtctgacttccagcaactgctggcctgtgccagggtgcaagctgagcactggagtggagttttcctgtgg

SEQ ID NO: 746494 - DNA, 100 bp, Homo sapiens
aaaaattcatcagagagcattttactactgagctgcaaaggttgtttgcattcgctccacttggaatgctctctctccaaagctgagttgtgacacaaga

SEQ ID NO: 746495 - DNA, 97 bp, Homo sapiens
ggaaagagcccgaacttctcccgctctacctcagcctgcgggactgctcggctcggcttctaggcggcaaataagggcgagactgaaaaatcaagtc

SEQ ID NO: 746496 - DNA, 98 bp, Homo sapiens
gtcatgacctatagacttcacaaagagctggtctctgctgccactttttaaagatgacatcaggtatctgttgacaatggacaaactatggcggaaaa

SEQ ID NO: 746497 - DNA, 75 bp, Homo sapiens
tttctcctattgaggagtcaacgtaatggcacaattgacttccctgaatttctgacaatgatggcaagaaaaatg

SEQ ID NO: 746498 - DNA, 82 bp, Homo sapiens
tcaaatctgcagcagcatgatttaaggtggtcctgacaaccaagtccactttgaagggtaccaggtgtccaatcagtgtatg

SEQ ID NO: 746499 - DNA, 82 bp, Homo sapiens
ggaggaggaggagaggatgatttttggatcctgagaattgatctatgttggatcaagatggggactcgcagtgttgcccagg

SEQ ID NO: 746500 - DNA, 82 bp, Homo sapiens
ccgagcgcaaggacagcgcgaggtccgcgcagcccagcgcagccattaagactttgaccccgacgcaggcttcagtgattgc

SEQ ID NO: 746501 - DNA, 101 bp, Homo sapiens
atttttgcatgagacgcttctggacagttggagtcattcgttgcccagtttgcagccaagaatgtgcagagagacacatcatagataacttttttgtgaag

SEQ ID NO: 746502 - DNA, 90 bp, Homo sapiens
cctgtttgaaataataacaagctccaggaccttctacgtacaggtataccggacactacttcataaccactttactctactccttcttcc

SEQ ID NO: 746503 - DNA, 75 bp, Homo sapiens
aaaaactggctgtgaataatatagctggtattgaagagatgaacgacccgagccagcccaacgaggagggcatca

SEQ ID NO: 746504 - DNA, 100 bp, Homo sapiens
gtggctgcgccggaggcctgactctgggagcacgcactgtgagccgtgagctttgaggcggtgggatgtgtcagcagaatgtctcctgcccccgagagcg

SEQ ID NO: 746505 - DNA, 80 bp, Homo sapiens
agccagggactgggcatccacccggccaggttcccaggaaggacaagatcgcagaggaaggtgggcggcgggagtgccca

SEQ ID NO: 746506 - DNA, 75 bp, Homo sapiens
gcacccgccttttctctctctcctctggcaggatgaggcgtgcaggcctgggaatatgctgaatttcagtatcgg

SEQ ID NO: 746507 - DNA, 80 bp, Homo sapiens
cccggacggcacaccctacgttaccgtgctcaagcttcctggagatgatggaggctcgcagccgtggccatgcgtcccca

SEQ ID NO: 746508 - DNA, 73 bp, Homo sapiens
tcctgcagtccgcctctgggccctgccgatactctcttaacttactggaataaagtatcacctcaggagctca

SEQ ID NO: 746509 - DNA, 100 bp, Homo sapiens
agaaggaaaaagcagtaaagccagaggaagcttttcagaagagctggtagatgaagctctgggtgctgtggctgctgaacttcaggatatgtgcgaagat

SEQ ID NO: 746510 - DNA, 83 bp, Homo sapiens
cctggcagagaagttccggcagaaggcctccatccacgaggcctggactgacgtgctgctcacggccgtgaactgctacagcg

SEQ ID NO: 746511 - DNA, 74 bp, Homo sapiens
ccggtctctgttccgcaggatggacaccataaatcgcatccaggacctgctggctgaggggactataacaggtg

SEQ ID NO: 746512 - DNA, 83 bp, Homo sapiens
gagaaggatcaaggacggatgatgaagtagtacagaggtgaatcaaaaactctggttttaagcaacctctcctacagtgcaac

SEQ ID NO: 746513 - DNA, 75 bp, Homo sapiens
ttctcgctaacaactgcccagctttgagacgtgccaccttgcttagcgcccgtcaaggaatgatgtctgcacgag

SEQ ID NO: 746514 - DNA, 100 bp, Homo sapiens
tggggctgctcccatcattgatgtggtgcgatcggtacttacaatttcatcagaaattcctaaaagaattcgaagtgccttaaaaaatgcagaagaatca

SEQ ID NO: 746515 - DNA, 89 bp, Homo sapiens
tccgagatcaaggagctgcatctggttcctgttgctagagcaagtattctttggctaattggagaaaactgtgaacgagttcctaaaat

SEQ ID NO: 746516 - DNA, 100 bp, Homo sapiens
tttcccacttgattacccgttaagtcccccaaagatgagatttacctgtgagatgtttcatcccaacaattgagtctgtttctcagccattggaaaacca

SEQ ID NO: 746517 - DNA, 83 bp, Homo sapiens
acaccaacatcgatgggcggcggaaaatagcctttgccatcactgccattaagttttctggatatgccgcagaaggatccgtg

SEQ ID NO: 746518 - DNA, 50 bp, Homo sapiens
cggcgcccggatgggcagctgaggcatttattaatacagcaaaagaaatt

SEQ ID NO: 746519 - DNA, 82 bp, Homo sapiens
cttggttgcaggtcacagtaccctcagcccaagctgctggagcacagggggatatgagactttctactcggaatatcctgag

SEQ ID NO: 746520 - DNA, 75 bp, Homo sapiens
atgcagccccctctcagctccatgagctccatgaaacccactctgtcgcacaggagggcatcctggctgtttcac

SEQ ID NO: 746521 - DNA, 98 bp, Homo sapiens
aacagaatcagctgttccctgcgaaaggcaatccttaggtgtcacatggccctctagtggaagggatgctcagctggaccgaggcaactgcaggatat

SEQ ID NO: 746522 - DNA, 99 bp, Homo sapiens
agccgtaatctcctcattggagcaagggaaggagccctggatggttgtgagggaagagacaggaagatggtgcccagatctgactgcagccatgagcag

SEQ ID NO: 746523 - DNA, 75 bp, Homo sapiens
aggagcaaagtcattcccaccaagatcccatgacttcctcttcaaattcctggtgattggcagtgcaggaactgg

SEQ ID NO: 746524 - DNA, 95 bp, Homo sapiens
acaattctctttctcttcatattttctcacatatacaacacgattcttctaatggatgggaacatggggagccgggtgtgggctgagccctgcct

SEQ ID NO: 746525 - DNA, 90 bp, Homo sapiens
ctttacgtgtccaaaggcttcaacaagaacgatgcccccctccacgagatcaacggtgctggagaatctggtaaaagcaccattgtgaag

SEQ ID NO: 746526 - DNA, 98 bp, Homo sapiens
tgaagctctgcgtgactgtcctgtctctcctcatgctagtagctgccttctgctctccagcgctctcagcaccaaatattgatgatgttaagaagttc

SEQ ID NO: 746527 - DNA, 96 bp, Homo sapiens
ccagcaaagtctgatgtttactgtgaggtgtgtgaatatcctgatggaaccaagtctttgaaactgggagactttgggcttgcgactgtggtagaa

SEQ ID NO: 746528 - DNA, 111 bp, Homo sapiens
ctttcttcagccgaggccgccgccgcctctccttgctgcagccatggacaactcagttttggcggagcaaagtcctagaggtggccaaggacttccctgagtacacctttg

SEQ ID NO: 746529 - DNA, 83 bp, Homo sapiens
caactccagccagctcaccgtccacctgcgatctcacacggacatcgctattgcggttccgaggcagtgggaagagatgcggc

SEQ ID NO: 746530 - DNA, 90 bp, Homo sapiens
tacattccagaggatgaggcgctgatgcttcgggatggacgtggatatcaaagtattgcagagtgccttagcagccatccgacatgcccg

SEQ ID NO: 746531 - DNA, 80 bp, Homo sapiens
caataaaaacatccccgtcatcgagtatgagcagttcatcgcaggccctgcgggtgaatggcctggagcaactgtgcaac

SEQ ID NO: 746532 - DNA, 73 bp, Homo sapiens
tggcattgcagctttctatggcggagaacaacaaacaggaaaatgttggggcttttcaggaagcataataaga

SEQ ID NO: 746533 - DNA, 51 bp, Homo sapiens
ggaaacattcaagaacctggcatctatagctttcaagatgttagaaagttc

SEQ ID NO: 746534 - DNA, 101 bp, Homo sapiens
aggaccttggcttgcctgctgctcctcggctgcggatacctcgcccatgttctggccgaggtgtacgtgaacggagagtgggtgaccaacatcagcgaggg

SEQ ID NO: 746535 - DNA, 101 bp, Homo sapiens
tggccgcgcggcctcgggaacggcccaggtccccgcccgcaggtcccgggcaggtggaaagtgagaccaacgtcctgcaggacggctccctcattgacctg

SEQ ID NO: 746536 - DNA, 51 bp, Homo sapiens
agagcaactaactgatgctgacaccaaagtatcaccttttgccatgatagc

SEQ ID NO: 746537 - DNA, 101 bp, Homo sapiens
ctcgctcgctccccgctctggagaaggaggagacagttactgtctatcccgcagacgtggtgctctttgaagggatcctggccttctactcccaggaggta

SEQ ID NO: 746538 - DNA, 75 bp, Homo sapiens
agtagtcgctggagtccgcgcctccctgggtgacaatggaatggactctgatatggaagaggaagcagatgatgg

SEQ ID NO: 746539 - DNA, 75 bp, Homo sapiens
ggactcttgcagacctctttacctggctgttcatcttccataatcaactgatccggccccacatcgcaactcttc

SEQ ID NO: 746540 - DNA, 98 bp, Homo sapiens
ttccttcagagaccgctttcttggaggaatttggagatctgaaaacagaggagcaggattttatggaagaccttgggttatggaacagagaaaagaac

SEQ ID NO: 746541 - DNA, 101 bp, Homo sapiens
aaaaaccagcatcaagcgggacactattaatccactatatgatgagacgctgaggatcactggcgttatccttcttgcagttggcatttggggcaaggtga

SEQ ID NO: 746542 - DNA, 100 bp, Homo sapiens
cttgtgcctccattcccgggaggggggagcggcgttggaggccaccgtttccagatgggaataactgggaacacaagtccatttggacagccctttagtc

SEQ ID NO: 746543 - DNA, 125 bp, Homo sapiens
ggtgaggctgggccagcgagtgatccaggtggagaattcccacatcatcctcacaggagcaagtgctctcaacaaggctgtactttcgcagtcaagtcaaaggggagacggaccgagaacggctg

SEQ ID NO: 746544 - DNA, 74 bp, Homo sapiens
cgggagacgagaagcctgaaaagtcgcagcgagctggagccgccggagaaatgcactcggtgatggaaagagag

SEQ ID NO: 746545 - DNA, 75 bp, Homo sapiens
tcggaagagcgctcccaggagaaacaagctgtgggtgagcgtggaggatgctcagatgcacaccgtcaccatctg

SEQ ID NO: 746546 - DNA, 75 bp, Homo sapiens
ctcaactcattattgaaaaggccgaacatggagatcaagattatatctgtgggcagatttgtccttcccattctg

SEQ ID NO: 746547 - DNA, 83 bp, Homo sapiens
cggccatgagccgctacatactcatcatggggctcctgtacaaggtcagcccaaggccaaccccactgtcactctgttcccgc

SEQ ID NO: 746548 - DNA, 75 bp, Homo sapiens
tctaaacctgtgaccacccctgaagaaattgcacagtccgtgcactggagaaggcgaggtcaagtgcccaactgc

SEQ ID NO: 746549 - DNA, 98 bp, Homo sapiens
ccaggagtaagagcccatagcagtctgccagacaatagagcatatggctttggagtttaacccttctgccaatccagaggcaagcacaatattccaga

SEQ ID NO: 746550 - DNA, 83 bp, Homo sapiens
ccagatgatgcggtggtgggggacctgccggcacgcgactccccccgggcccaaaccgcggcgagtcctttgcacatgttggc

SEQ ID NO: 746551 - DNA, 50 bp, Homo sapiens
ttttggatcaattaccagtgctaaggaggagctgacaagcacaagtgtgg

SEQ ID NO: 746552 - DNA, 83 bp, Homo sapiens
gaggaagtaggggtgcacctcagcactatcccaagactgctggcaacaggttccccacattggcagacaaaattagaagcggc

SEQ ID NO: 746553 - DNA, 95 bp, Homo sapiens
tgagtagccggtaacaaacgagggttcccgggattggaccgacgcagccatgaattcaaagaagctttttcactatttgacaaagatggtgatgg

SEQ ID NO: 746554 - DNA, 75 bp, Homo sapiens
gttaccgtcagatttcctccagaggccagtggcaggaagaaccggacccggcgaacctggaagtggaccatgatt

SEQ ID NO: 746555 - DNA, 75 bp, Homo sapiens
cacaggggccccgaagaactcccacaatgccacaggaggaggcagcagcagttaccgaggagacactttgtgttg

SEQ ID NO: 746556 - DNA, 75 bp, Homo sapiens
gccttttccgttgccggtgccggcctagcgtcctggaattacttcaatcaagtggagccgccaccaaaatgcaga

SEQ ID NO: 746557 - DNA, 50 bp, Homo sapiens
tagggtcctttatatagaagggagagtagacggagtctcgcgctactggc

SEQ ID NO: 746558 - DNA, 89 bp, Homo sapiens
ttaaaaagaaatggtgtaaaagttcctggtgaatatcgaagaaaggagaacggtgaggagatgttaaagtaacccatcttgcaggacga

SEQ ID NO: 746559 - DNA, 75 bp, Homo sapiens
cgcgggggcgacgcgcgggaacaacgcgagtcggcgcgcgggacgaagaaaaatggctacaaacttcctagcaca

SEQ ID NO: 746560 - DNA, 82 bp, Homo sapiens
gttaatgtttacggcgaagtctactcaacgtttccaagagttgagaattatggctgcaggaaaatttgcaagccttcccaga

SEQ ID NO: 746561 - DNA, 82 bp, Homo sapiens
cggagctgatcgtccacccagttctgagaagaaggaagttgtggaagaggcagaaaatggaagagacgcccctgctaacggg

SEQ ID NO: 746562 - DNA, 100 bp, Homo sapiens
atcatgtctgcgagccaggattcccgttgatattcactgatggactccaaagaatcattaactcctggtagagaagaaaaccccagcagtgtgcttgctc

SEQ ID NO: 746563 - DNA, 73 bp, Homo sapiens
ctcagagcagaagtatggtgcactggtcaataactttgctgcctgggatcatcaaacggggattcagcgtccg

SEQ ID NO: 746564 - DNA, 100 bp, Homo sapiens
ggaaatcctatcaagtgccaatgctggcccagctctccgtgttccggtgtggtggtcataatgtcacaatctccttgcagtccaggactgggcatactca

SEQ ID NO: 746565 - DNA, 51 bp, Homo sapiens
ctcaacacccccgacaagatggtcataactccatgcaggaagctcatcttg

SEQ ID NO: 746566 - DNA, 95 bp, Homo sapiens
ctggggccagggaaccctggtcaccgtctcctcagacggcgggcgctaacaccaccgacaaggagctagaggttctctccttgcacaacgtcacc

SEQ ID NO: 746567 - DNA, 100 bp, Homo sapiens
gagtatcaggaatttgaagagatgctggaacatgcagagtctgcacaaagtaaaaacaaccgtcctctccgtacgagccagatctatgcccaggatgaga

SEQ ID NO: 746568 - DNA, 98 bp, Homo sapiens
aatttaagcctgatctaacccctagaaacagatatttcagcagttgaatcagttgaattcacttcatcaagaaactatcatgaaatgcgtgaaaagta

SEQ ID NO: 746569 - DNA, 76 bp, Homo sapiens
tcccgcaccctcaccgtcacttccagcacctcacacccatcaagaagggagaattccacaagttggctgatgccaa

SEQ ID NO: 746570 - DNA, 102 bp, Homo sapiens
catgtcggtggcggggctgaagaagcagttctacaaggcgagccaggtggaatacatgttggtatcttttgatcatgaaaataaaaaagtccggttggtcct

SEQ ID NO: 746571 - DNA, 76 bp, Homo sapiens
gcggcggcggcgcccgcgggtggtataaaatggcggatttcgaagagttgaggattgaggaaacttgaatattttt

SEQ ID NO: 746572 - DNA, 100 bp, Homo sapiens
aaacacccacctgaaaatatcattgatgggaaggcagcaacaactcatctccagtggattttgtaaataacaagaggacagacttatcttcagaacattt

SEQ ID NO: 746573 - DNA, 100 bp, Homo sapiens
ctggtcttcaccaagaacttcgcaggctatctgggagaatcagttctattacctctttggcttcctgttccttgttttcatcatcctggtggtatcctgt

SEQ ID NO: 746574 - DNA, 97 bp, Homo sapiens
gggcagataatgcctttatgttacttactcagcaagacactaagggcgactaccagaaagcgctgctgtacctgtgtggtggagatgactgaagccc

SEQ ID NO: 746575 - DNA, 51 bp, Homo sapiens
catctctcaacttcacagccactatgggaaagggctccttcaagtatgcct

SEQ ID NO: 746576 - DNA, 100 bp, Homo sapiens
cggctcactccagctgacaaagcagagcacatgaagcgacaaagacaccccagattgcgcccccagtcaggtgcagctcctttttgacaatgaagttctc

SEQ ID NO: 746577 - DNA, 75 bp, Homo sapiens
gaaaaataataattacatctgcaaagaccttatttccaggtctatcagccacagtctctgcaagtttccaagagc

SEQ ID NO: 746578 - DNA, 83 bp, Homo sapiens
ctgaactttggttccagttatattgtgtctaattctgctaacctgaaagtaatgcccaagacgtagctgggtgcgaagaatca

SEQ ID NO: 746579 - DNA, 100 bp, Homo sapiens
cagagcgccagagcctgaggatgtcgccgtcccgggcggcgtggacctcctcaccctgccgcagctgtgcttcccaggtggacgccctgcttcatctggc

SEQ ID NO: 746580 - DNA, 100 bp, Homo sapiens
accattgacgccatgtcgggttattcgagtgaccgagaccgcggccgggaccgagggaaccctaaggactctgcaatatgaataattccctagagaacac

SEQ ID NO: 746581 - DNA, 100 bp, Homo sapiens
ctgaacaaaagaagctggaagccgcagaccttgtgatattccaggcgggatgtagctcattttgggatacgagtctccatcgtggagcctggcttcttcc

SEQ ID NO: 746582 - DNA, 83 bp, Homo sapiens
aagatcagtggatgggggtcaccgtccagagccaaggtccagggggcaaggtcgtggtaatgaaagcatgggatgctcatgtg

SEQ ID NO: 746583 - DNA, 98 bp, Homo sapiens
agacagcacattcaccaacatttctcttgcagatgacatagcatgaactggaaaatattgaacctactcaaggcctttcaatagaagcctctgtgaca

SEQ ID NO: 746584 - DNA, 100 bp, Homo sapiens
cgggactccggggcgccacgggggccatgtaagcaggaagatttcgatgtcgatcattttgtgtctgactgtaggaagcgggtccagctggaagaactga

SEQ ID NO: 746585 - DNA, 50 bp, Homo sapiens
tgtgggaggacaggccctcgtccgcagaggactacgggcactacgaagag

SEQ ID NO: 746586 - DNA, 75 bp, Homo sapiens
gcaaaccaggacgtgctggatgacagcgttcagactcctcaagaggaaatatcattctgcaaaagaagcttatga

SEQ ID NO: 746587 - DNA, 121 bp, Homo sapiens
atgtcggccctgcaggagagcaggcgggagctgatggtccagctggaagagctgatgaagttgctgaagcaatttcctgctgcagagagcattttaagaaaggacagcattcctgtgacct

SEQ ID NO: 746588 - DNA, 90 bp, Homo sapiens
gcagaggatccagtgttcaccatcctggccccggaaggtggcaattttggaggtagccccggttatggaggaggaagaggaggatatggt

SEQ ID NO: 746589 - DNA, 75 bp, Homo sapiens
ctgcactccatggactaaattgttttagatggagcaggattagatattgatttccatcttgcctctccagaaggc

SEQ ID NO: 746590 - DNA, 83 bp, Homo sapiens
cagaccctggagcctcagttggaagcagccgatccagcctgcggagcctgtggggcagacctcgaagtagggggaaaactgca

SEQ ID NO: 746591 - DNA, 100 bp, Homo sapiens
tatggacaccccgccttggggcaaggcaaggtacatcaggaacgtctctatcaagaatacaatttcagcaaggctgagggccatctgaaacagatggaga

SEQ ID NO: 746592 - DNA, 75 bp, Homo sapiens
ccagagcctggccatcccccggattacagaatgtggcctctcctgttctcaggaggcatgtgagcgcagcctggc

SEQ ID NO: 746593 - DNA, 90 bp, Homo sapiens
ctggagaaatccagagttgtctttcaattttgcctgcactctccctggatgctggaggctggaggcagtgacgcagcaacagcgcgaggc

SEQ ID NO: 746594 - DNA, 101 bp, Homo sapiens
ggaaagtgaggcagctgcaaggagggcggcgggactgcactcgagtgtccagacctgctcgatgggagaagatgtcaaccggacactagaaggtggaagga

SEQ ID NO: 746595 - DNA, 50 bp, Homo sapiens
ctgccctttcttgggctgtgttcacgggcccaatggctgcaaaatcgcaa

SEQ ID NO: 746596 - DNA, 97 bp, Homo sapiens
tggaaattttgagccatttcgaatcacttaaaggagtggacattgctagcaatgagctcccaaagccatccagggagttggtctctcagtccatggg

SEQ ID NO: 746597 - DNA, 101 bp, Homo sapiens
ggcgagcggtggtttggacgccggcggagacgcgggcgagggcatcgagcgcctcaaacgaaagaaccagcccagggagcacatggggagctggcagtcag

SEQ ID NO: 746598 - DNA, 100 bp, Homo sapiens
ggaaggtggagatctcctgtgctgcgaccactgcccggctgccttccacctccagtgctgcccatgaaacccctgaaggccaccgccaccacctcccagc

SEQ ID NO: 746599 - DNA, 75 bp, Homo sapiens
gggcccatggccgccatgacgcctgctctaggggactcagaagaagatccttgacattgccaacatgctgggctt

SEQ ID NO: 746600 - DNA, 76 bp, Homo sapiens
gcctgcagctgctcgcctgtctccgtcggaagggagcccaagctttgcagagatttggaacttggccacaaatcgc

SEQ ID NO: 746601 - DNA, 98 bp, Homo sapiens
attcctgaaatacatccaggaaagacatggagattctcttaaaaaggcaaccccgtggccaactggattcacgcccgctccacgaggaagaagcgctg

SEQ ID NO: 746602 - DNA, 75 bp, Homo sapiens
cacaaccggacaaggaccctcacatgtgcagggtggttacccaggctgtccttacccacctggtggtccatatcc

SEQ ID NO: 746603 - DNA, 75 bp, Homo sapiens
ataccgtgccctgaggttggacgtggggaatttctcctggggctcagagtagcacgaacttccaggagccggtgc

SEQ ID NO: 746604 - DNA, 50 bp, Homo sapiens
cagacccatttccagtcatgagcattgcttcaccggcagctacccggtca

SEQ ID NO: 746605 - DNA, 74 bp, Homo sapiens
gaggatctgatgacgattactctttttgcagagctctgaagggaggtacttttaggttgaaatacgcccctcca

SEQ ID NO: 746606 - DNA, 99 bp, Homo sapiens
tcatctctatttgcagccaggaatggaagatgggagaagacttcatggcggcggctatggttgccttctgataattgaaggatccctagtggaataagg

SEQ ID NO: 746607 - DNA, 100 bp, Homo sapiens
gaaaatacaaatcacacgcataatggatgaaaggaaccgacagatgatgactttgaccagtttgataagcctggcgcggaacggtcgtggagaagaagag

SEQ ID NO: 746608 - DNA, 88 bp, Homo sapiens
agggccaggcgccgctcagaacggaaagaccacagcaagattctttcattcgtctcctcctagcctgggggaccaggctcgaactgac

SEQ ID NO: 746609 - DNA, 98 bp, Homo sapiens
attctgcaaccaagcacctgaaacagcaggatttagagggaaagatcattgtagatgaactgaagcaagaagttatcagtaccagcagcaaggcagaa

SEQ ID NO: 746610 - DNA, 75 bp, Homo sapiens
cttgccaggtgcctgtctggaaggccagatacacaattgcagcgagaacattgggagatcttgtgcggaagttag

SEQ ID NO: 746611 - DNA, 135 bp, Homo sapiens
cttccagaacatctgggagaatatttaatggaaaatcgcttggttaaaacctgacacttttaacaggtgatttgaagatattaaagctagaaattggaactagaaaatcaaaagaattcaaggcatcttaacgtg

SEQ ID NO: 746612 - DNA, 100 bp, Homo sapiens
ggaacggtgaaaagaaatctgttgcttcttgcatggaaatgggacgtcggtcatcagatactgaagaagaaagcagaagcaagagaaaaaagaaacaccg

SEQ ID NO: 746613 - DNA, 60 bp, Homo sapiens
ggttttcaaggcttaatcgaagagatgagtctaacgtgaagacattttgctccaagaata

SEQ ID NO: 746614 - DNA, 101 bp, Homo sapiens
aacaccatggaaatatttgacattgaggatgacatgactgactccctgcgagattacaccaacctgcctgaggctgcccctttgctcaccatcctggacat

SEQ ID NO: 746615 - DNA, 134 bp, Homo sapiens
tgtccacccaattgtggttgtgcagccagatgcctggacagaggacaatggcttccatggaatggccaacctgctgacgggccccaaacggaacctgatggccctggcccggacatggtggaatcagttcagcg

SEQ ID NO: 746616 - DNA, 135 bp, Homo sapiens
tggtgggactcaatgttctcgatgccaatctctgcttgaaaggagaagacttggattctcaggttacaatgcccttttaagatatgaaggatttgaaaatgactctggtctggacttctggtgcaatatatgtgg

SEQ ID NO: 746617 - DNA, 100 bp, Homo sapiens
tagagatgaagcaattgcagcttgcagagcaggggctcccttctctgtaattggaaacacaatcaggcataatgattataaagtggtttctcctgctttg

SEQ ID NO: 746618 - DNA, 100 bp, Homo sapiens
cactgctttggaacttgcagtagaccagagagaaattcaacatgtctgtctgtatgaaattgtgtgtagctgcgtttgctgtatctgctgttgcttctca

SEQ ID NO: 746619 - DNA, 100 bp, Homo sapiens
acctgtctggattattcattattacatgaagtatcatgtttctaaacagactgaatttgatctgattaatgtgaaggactggccagtctgggaaaccgcc

SEQ ID NO: 746620 - DNA, 98 bp, Homo sapiens
tgaggggtttgtactatcctcggtgctgtggtgcagagctagttcctctccagctcagccgcgtaggtacggttcctggagcagcagaacaagatgct

SEQ ID NO: 746621 - DNA, 131 bp, Homo sapiens
aaacgttctaaaaagaggcgaaaggaagcaagcagttcagaagagccaaggaataaacatgcaatgaacccaaaagggctgcgtgagctctgcgtcaagcttatgttcctgcacccagtggactatgggag

SEQ ID NO: 746622 - DNA, 75 bp, Homo sapiens
ttggctttgcctttctggacacagaagtatttgtgacagaaaggcctaaagaatgtatttgacgaagcaatattg

SEQ ID NO: 746623 - DNA, 98 bp, Homo sapiens
tttacctcctcatctggctcttcatttgtggtacttttaatgcaccagtaatggtgctggagaatctggtaaaagcaccattgtgaagcagatgagga

SEQ ID NO: 746624 - DNA, 78 bp, Homo sapiens
aagagcttgctccctacgatgagaactggttctacacgcgagctggagaactacgatgacccgcacaaaacccctgcc

SEQ ID NO: 746625 - DNA, 75 bp, Homo sapiens
atttgttaaggattccaagtaactcttatttgggttacattccgaaaagcaaatgggagatggacacatctgagg

SEQ ID NO: 746626 - DNA, 90 bp, Homo sapiens
caggcggcgggacgactctggccttttgaagaccgggggacacggccaacacggtgaaggaaaagttcgggaggaagctttatgaatcct

SEQ ID NO: 746627 - DNA, 76 bp, Homo sapiens
caggggctgagcttctgcgctgtggagaagccagagacaaataccgatactttgcttgtttgatgagagcccggtt

SEQ ID NO: 746628 - DNA, 75 bp, Homo sapiens
tgaggctacctgtgaacagtacgcagtgaatgtttttccacagtgcctacacaacctgataatccattttctcac

SEQ ID NO: 746629 - DNA, 100 bp, Homo sapiens
cgctccctcccagcagagctacctatctatggagaaaatcattcaagtggccaagacctctgctgcacaggtctgtgtgaaaatgtgtgaccctgccaaa

SEQ ID NO: 746630 - DNA, 90 bp, Homo sapiens
tgccgggggagcggggccttccacaccccctccgtgggtgtgtgctctagccggcccggtccttggactgaaagaatgcaccaggggctc

SEQ ID NO: 746631 - DNA, 75 bp, Homo sapiens
gtggtccggccatggacgacctcgctcttcagtaggttacctgcaacatccaggatcagaacaagtacaatttcc

SEQ ID NO: 746632 - DNA, 75 bp, Homo sapiens
cttaaaagtgcaaacaaaaagacttctatttccagcttcaagaattaaacatgtggacatgaaccaaaagagcat

SEQ ID NO: 746633 - DNA, 100 bp, Homo sapiens
gcgcagttttgttctgctccagctgttcgaaggtgatccagtcttccgtgtgtgctaagatcgtgcagctcctggggcagaatgaggtggactatcgcca

SEQ ID NO: 746634 - DNA, 75 bp, Homo sapiens
gggtctgagtctcacagcttgtaaagggagaaacaaaggcagcgctgccctcgggggagcattggccctggcgga

SEQ ID NO: 746635 - DNA, 75 bp, Homo sapiens
cccagctgaagaccactttagaaactcaattaactgccccagagcacatcagctatgtgccccagctctcaaacg

SEQ ID NO: 746636 - DNA, 99 bp, Homo sapiens
aactgcgatttccaaatcgatagttttagagcctatctattggaattcctcgaactccaagtacacggctgccccacaccccctgctatctcttgatcc

SEQ ID NO: 746637 - DNA, 96 bp, Homo sapiens
agagaagccgagctccgcgcccagcaggatcaggcaaaaatgatcatgccgaaaaagtggcggaaaagctagaagctctctcggtgaaggaggaga

SEQ ID NO: 746638 - DNA, 75 bp, Homo sapiens
ctggcctcacggaccttgggctgaccggtctgtctggcttcaggaacttgctactaccagcaccatgccctacca

SEQ ID NO: 746639 - DNA, 51 bp, Homo sapiens
ggggttccatctcccaacttgtccattctgttcgagaagtcacaggctacg

SEQ ID NO: 746640 - DNA, 125 bp, Homo sapiens
tgcagcagtgaggccaagctccagtgtcccacttgcatcaagctgggcatccagggctcgtacttctgctcgcagatcctcttctcatgtagacggctttcttccaagtggtggtgatgatggtg

SEQ ID NO: 746641 - DNA, 75 bp, Homo sapiens
gagattgagcacgtgaccaagcgggccatcagcacccccgagaggcgccatgttttggaagtttgacctgcacac

SEQ ID NO: 746642 - DNA, 100 bp, Homo sapiens
ctggtgcgcttggccgggcgggctggaggctcctgcagctgcgatgcctgcccgagcaccagaagtgtctggacaaactcctcaataactgccttttgag

SEQ ID NO: 746643 - DNA, 100 bp, Homo sapiens
tataaaatgcatgagaggaattctctactgctatatgcgtcaggccgataaggtccaaccgtgactgccagatcgaccagcaccaccggaaccagtgcca

SEQ ID NO: 746644 - DNA, 80 bp, Homo sapiens
ccctggagcctcagttggaagcagccgatccagcctgcggagcctgtggggcagattcacaatgacatcctttcaagaag

SEQ ID NO: 746645 - DNA, 100 bp, Homo sapiens
gaggaccttccacgtggattctccagacgagagatgccatggacaatattaccaggcagaaccaattctacgatacccaagtcatcaaacaagaaaacga

SEQ ID NO: 746646 - DNA, 88 bp, Homo sapiens
tggcggagagcggcctgcgggcgatcgggccgagacagagctgtgaaccaaccccgctcacggctaacaagcccacccaccatggcga

SEQ ID NO: 746647 - DNA, 75 bp, Homo sapiens
tggtctacgagctgtttctcatctttatactcttccagggaacaccagctggctgatgagcctggagaacccgct

SEQ ID NO: 746648 - DNA, 50 bp, Homo sapiens
atatgctggaatggttccttgccttttcagatattaatggcaaagttcag

SEQ ID NO: 746649 - DNA, 50 bp, Homo sapiens
ccggagtcagaaccctccgcagagtaaagacgactgcaagaacattgcca

SEQ ID NO: 746650 - DNA, 83 bp, Homo sapiens
ctgagggaccgcggggttagccactgctggctgcttccagtgttcgccgagaggtcttgagtcaccacgtccgaatataattc

SEQ ID NO: 746651 - DNA, 75 bp, Homo sapiens
ctggaaggagcacgaggaagcagaatttgctgattcccttggaattccgtttttggaaaccagtgctaagaatgc

SEQ ID NO: 746652 - DNA, 100 bp, Homo sapiens
gaacccacatcccccataggtcactgtgtggccatctaccactttgaaggtgggacagtcacttcctcctccctccccacccctgtcgcatccacgtgcg

SEQ ID NO: 746653 - DNA, 82 bp, Homo sapiens
gggatagtgtcatcggttcggtaaagtttctgttctctggcaaacgagatgctgctcagtggacggaagctgacagcgcagg

SEQ ID NO: 746654 - DNA, 90 bp, Homo sapiens
ggattccaagtaactcttatttgaaaatgaattgtgacttgtcccggtctctcttatctagtggtaagcatccgtggcattcaagacgaa

SEQ ID NO: 746655 - DNA, 82 bp, Homo sapiens
ccaacgagctcaacgccaggcgccgctcctttacagactgattcttgctattccaaatcctcttccacgttgacagcccttc

SEQ ID NO: 746656 - DNA, 75 bp, Homo sapiens
ggggccttgataacacagagtttcaagagatcctacagtaaggaattgtttgaagaagttatttcaaagatgcgg

SEQ ID NO: 746657 - DNA, 75 bp, Homo sapiens
cagcaagtgcgcggttggggccactgcgaggccgttttaggtacatgtcccagagcaagcacacggaggcccggg

SEQ ID NO: 746658 - DNA, 96 bp, Homo sapiens
cggcgaggatcaaaatcttcgaaggagggaaaaggggaagatagtgatgtactcagtataaatgcagatgcttatgacagcgacatagaaggccca

SEQ ID NO: 746659 - DNA, 100 bp, Homo sapiens
cattctgaacaccccagatttgcgaaaacaatgaaggagcgatatatagttatcagcaaagtagatgaagaagaacgcaaaagaagagagcagcagaaac

SEQ ID NO: 746660 - DNA, 75 bp, Homo sapiens
tcatgatgtcaacaaccgtggctcacaagatgaaagagcacgtagctttgcagtttggggagggctgttttccat

SEQ ID NO: 746661 - DNA, 75 bp, Homo sapiens
agccgcccgcttcaaccccaggggaccagaggaactcagccctgattgcggcttggacttaaggatcagcaggag

SEQ ID NO: 746662 - DNA, 90 bp, Homo sapiens
cgtgaccgagagcgcgaatatcgtcatcgttagaaggtgccgagagtgaaaacgaagaggagagccctcggcaggaaagttctggggagg

SEQ ID NO: 746663 - DNA, 103 bp, Homo sapiens
atatgttagcgttgtatcttgggagaaagacacagtctccatcatcccagatgcctggaagtcattgacagataaagtccaggaagctcgatcaaatgcccgc

SEQ ID NO: 746664 - DNA, 82 bp, Homo sapiens
ctcaagatagcggagctgaagctgcgggaggcccccagccccgtgaaagaacttgtcctggacaacagtcggtcgaatgaag

SEQ ID NO: 746665 - DNA, 97 bp, Homo sapiens
aaagagacacatgatgagagagattctacaggccaggatggggtgtcagagaaaagggtgagaagccttataagtgctcatgggagggatgtgagtg

SEQ ID NO: 746666 - DNA, 98 bp, Homo sapiens
aactacagaacaacatatcgtatcagatggcagacatacatcatttaaaggagtgctcaagctggtattactatgtaactatgccaatgccagcctcc

SEQ ID NO: 746667 - DNA, 83 bp, Homo sapiens
cttcggcagtccacccaccgccgccgcctcccaggtacttcttcaataaagaaggggattttaacaacctgacagctgcagca

SEQ ID NO: 746668 - DNA, 90 bp, Homo sapiens
gtgggacaccgtgggctgcgtgtgggacgggtttagcggcagcctcttcggtgtggatgaggtcaccattgtcaacattttgaccaaccg

SEQ ID NO: 746669 - DNA, 100 bp, Homo sapiens
ccgggttcgccgagccgcaggagagacacgctgggccgaccccagagcggcgctggacagagtgtgaacatggctacgcctcttcattcccgtccatgcc

SEQ ID NO: 746670 - DNA, 82 bp, Homo sapiens
agccctgctcgcagaattaccgcctcttctttagaggataagatcaatgccctcattaaagcagccggtgtaaatgttgagc

SEQ ID NO: 746671 - DNA, 110 bp, Homo sapiens
ggtctgcatactcgctgcccgccggctccctcccccgcgtccctgcgaccgccgcggcgaagatggcctccggtgtggctgtctctgatggtgtcatcaaggtgttcaac

SEQ ID NO: 746672 - DNA, 100 bp, Homo sapiens
ttcgcagcgtggattttaaccgaggcacggacaacatcaccgtgaggcagggggacacagccatcctcagtgccggtggtggtgtgcacattgagccccg

SEQ ID NO: 746673 - DNA, 114 bp, Homo sapiens
gcgagatgttcaccatccatgcctacgtgggcttcaccatggacaagctggtgcagaacattgcgcggcagggtgagaactctgtctcagtcgacgggaagtgcagtgactcca

SEQ ID NO: 746674 - DNA, 126 bp, Homo sapiens
ccctaccgcccctgtcccgccggggagcggcggcggccttggactttgctgtctttcctcgcggagacaggatctatcttgggatcccatggctttctttactgggctctggggccccttcacctg

SEQ ID NO: 746675 - DNA, 100 bp, Homo sapiens
agtcttggattcgtgaacagaccacagtggaccacttctgggtggtggacttgctttgtgaagagacagttcatgaacaagagtctttcaggacctggac

SEQ ID NO: 746676 - DNA, 97 bp, Homo sapiens
gccttggatgtgaacattttccagccaatggagatcttcgtggatgatgagacgaagttgacgctgcatgggttgcagcagtactacgtgaaactga

SEQ ID NO: 746677 - DNA, 83 bp, Homo sapiens
ctcccgtccttctcatccttcggcgccctgcgtccggcagaggaggcgagcatcccgctcaggtgatgaggaacccctcgcgc

SEQ ID NO: 746678 - DNA, 100 bp, Homo sapiens
cgatttgaccaaatttctggaagagttctcaaaagtctatggtcctgtgttcaccgtgtattttggcatgaatcccatagtggtgtttcatggatatgag

SEQ ID NO: 746679 - DNA, 96 bp, Homo sapiens
tggaatgccacaaatgcaaatacttgtgcactgggagagttgcctgaagattttgctgtggtgtttggagaagcagagggtgaacttgctgttgga

SEQ ID NO: 746680 - DNA, 83 bp, Homo sapiens
atgcgctcggacggaacgttaggaaggccctgcttccccgggcgctgcctggacaggcctgcctgcgtgctgggacatgtctg

SEQ ID NO: 746681 - DNA, 141 bp, Homo sapiens
cgatgaaatccaaaggtgaatcttttggttggtgattttgatgatagccacaaagcaagcaggttacagaatgtctgaaggggacagtgtgggagaatccgtccatgggaaaccttcggtggtgtacagatttttcacaag

SEQ ID NO: 746682 - DNA, 74 bp, Homo sapiens
cccttcccagtttatgcctttggtggaagaaggaccatggaaatctcagttatcttcaacaaaatctaaaaagg

SEQ ID NO: 746683 - DNA, 88 bp, Homo sapiens
tgaaaatacagccaagatcttggcaaagcttctccctcagtatttagaccaggaaacaaaccatcaggcctcccagaaagtatccggg

SEQ ID NO: 746684 - DNA, 75 bp, Homo sapiens
cgtagctccagaggtttaaccataggatagagaaaccagaacttgatggagagtttggattcattgctttgtgca

SEQ ID NO: 746685 - DNA, 75 bp, Homo sapiens
ccccaggcctgcgtccgagtctccgccgctgcgggcccgctccgacgcggaagtcaaaccggcacgatgtccagg

SEQ ID NO: 746686 - DNA, 75 bp, Homo sapiens
gaggttaaagagacccgttcagagtcctacagtggcagaatgaaatgaatgatgtgcctttctttgatatccaac

SEQ ID NO: 746687 - DNA, 98 bp, Homo sapiens
tgatgaattcttcataccccgggttcaattcccatgaaagtgcagcacatgcaattgtttctgttaatggtactaccattgaaggtcatgttgtgaaa

SEQ ID NO: 746688 - DNA, 74 bp, Homo sapiens
tgcagccgcgaggaggcgcgggaggtgttcgagaacgaccccgagacggtgccagtgacggggtggcccgtgag

SEQ ID NO: 746689 - DNA, 140 bp, Homo sapiens
gatttacttgttggggccctcttgataaaaagagatgtggggggattctcgacctgctaacagaactggaccttttcggcagttgcagtggtgcagaatggctgacctcagtcttgcagatgcattaacagaaccatctc

SEQ ID NO: 746690 - DNA, 90 bp, Homo sapiens
ccttaatgcagcaactgaattccgagagcctcacagctctgctaaaaaacaggagagtagttatcttgatggaattagaagttttgaagt

SEQ ID NO: 746691 - DNA, 83 bp, Homo sapiens
aaatgatagaggacagcgggcctggtatgaaagtacttctcatggataaagagacggttcagcttgttggtttagatgaggag

SEQ ID NO: 746692 - DNA, 75 bp, Homo sapiens
agactttgcttcattaaagtgtctgagaaggaagattgtatccagccttcagtcatcagacatgttcgttcttgg

SEQ ID NO: 746693 - DNA, 75 bp, Homo sapiens
gttccctcagcaatatgattgtacaggtttgcagattccgccagcagcacagcaagctctacagatgagtggctc

SEQ ID NO: 746694 - DNA, 100 bp, Homo sapiens
gcactcccagctgcgcagggcctgccaggtggcgctcgaattcctagaggacctgtgcaacaacctcttgaggatcgaatcttcactcccgctgtctcag

SEQ ID NO: 746695 - DNA, 75 bp, Homo sapiens
gagctgaggactgcctgtttgcagcccttgaagataaggatggtcaaacaaaataatatcatacctggagaaact

SEQ ID NO: 746696 - DNA, 82 bp, Homo sapiens
gtgaaagtggcggtgcggatacgacccatgaaccggcgagagttgcatgctgagaatttgaaaaatgaagatgatgtagaca

SEQ ID NO: 746697 - DNA, 75 bp, Homo sapiens
cggctgccatcttagtctagggactgaggagtcgccgccgccccgagtcccggcagattttttgaaaggactgcc

SEQ ID NO: 746698 - DNA, 82 bp, Homo sapiens
aaccgcccgcaggcccgtcgcagctccattaatgcaactaccattacactaaggtccgcgggagagctgtggggcttggtga

SEQ ID NO: 746699 - DNA, 74 bp, Homo sapiens
gccagacagactgctgagcgactatattgagaaggaggtaaaggaggtgaaacagcagaaatgcctgacatgta

SEQ ID NO: 746700 - DNA, 50 bp, Homo sapiens
tgactgcgtcaggcatctcaatcatggtttggtcaagcctcctctaaaac

SEQ ID NO: 746701 - DNA, 100 bp, Homo sapiens
gtaaagtggttggttgcagttgtgtagtagttaaggccaaggccaaggatcaaaccaaggcccaggctgcagccccagcttcagttccagctcaggctcc

SEQ ID NO: 746702 - DNA, 57 bp, Homo sapiens
ggagggcctcgccatgtcctgctgcccgggatgaagctgaaatggaatatctgaaga

SEQ ID NO: 746703 - DNA, 75 bp, Homo sapiens
gacgtgggagtcacctgaaagccaggaaatgaacccagcttagactagaaagtctagaagacacacacataatga

SEQ ID NO: 746704 - DNA, 74 bp, Homo sapiens
atttttgggaaggtgcaaggggtgtttttccgtaagcatactcagcaagaaagtacgactatcagcagccacaa

SEQ ID NO: 746705 - DNA, 100 bp, Homo sapiens
aaggaggatgcggcccagtttgccgccggcatggccagtgccctagaggcgttggaaggtacttccggaacctgtgctcagatgacacccccatggtgcg

SEQ ID NO: 746706 - DNA, 96 bp, Homo sapiens
tactcacagagttagagagagggatggtgcacttctctatgccaccatcttcgggaatgtgacgactattttccaacagatgtatgccaacaccaa

SEQ ID NO: 746707 - DNA, 100 bp, Homo sapiens
gagagctccccaggggagttctctgtgtctgtgaaaggactactgagcccagccaggctgtatgccattgctgccaaagaaaaagatattcaagaggagt

SEQ ID NO: 746708 - DNA, 112 bp, Homo sapiens
gccgtccttctccactttcgccagcccgtgccgcgagcgcggcctgcaggagccctgggcgctgcctatggcacagccaagagcggtaccggcattgcggccatgtctgtca

SEQ ID NO: 746709 - DNA, 75 bp, Homo sapiens
ctgggcacccacggagcctccggggctggtggacgacatccttggagaaggcagcgacgacagcgacagcgagaa

SEQ ID NO: 746710 - DNA, 83 bp, Homo sapiens
gctttgggtggaccagtaatgaggtgtcttcagtgccctgggtttgcctgtgacccaatgcccactgggactgaatgccaaag

SEQ ID NO: 746711 - DNA, 50 bp, Homo sapiens
gagggatccttcacccgtgtctgtgtcttgggacaaggtgcgcattcctg

SEQ ID NO: 746712 - DNA, 74 bp, Homo sapiens
gcagggtcatccttgcccttgtcctcccctttcatccctatgtggaaaacgatgataccacgagtcaacccaaa

SEQ ID NO: 746713 - DNA, 97 bp, Homo sapiens
ggtgtcttccggcagctcctctgaggtctcctccatcaactccgacctggagattcaggaggaatcagatatgtggaaaataagagaactggaaaaa

SEQ ID NO: 746714 - DNA, 75 bp, Homo sapiens
aaaaaaaagttgactccagtggagaaactgagaagaaagatttcagagacaatgcagatcttcgtgaagactctg

SEQ ID NO: 746715 - DNA, 83 bp, Homo sapiens
ttggagggacagcctcgaggctactgttttgttaactttgaaactaagcagagagatggctgcccaaagattgtcaatctggg

SEQ ID NO: 746716 - DNA, 100 bp, Homo sapiens
ctctcccgtcaacaccaagaatcaagctgtgaaggacagtcattttgtttactcattcagccctgttgcaggtcccaataaactcttcataaggttgaca

SEQ ID NO: 746717 - DNA, 100 bp, Homo sapiens
cagaaactggaggagtcccgctcgaagctagatatctcccggggccaattcagcatctctacctggccatcctaacaaggtgatttgtgaaagggtgaga

SEQ ID NO: 746718 - DNA, 90 bp, Homo sapiens
ggtcgcagttcttgtttgtggatcgctgtgatcgtcacttggcaggatgacgcaaaacacggtgattgtgaatggagttgctatggcctc

SEQ ID NO: 746719 - DNA, 90 bp, Homo sapiens
tacaagggtcctgaagtcagttgttgcatcaaatacttcatatttggcttcaatgtcatattttggcatccgcagtcggaaggctcgagc

SEQ ID NO: 746720 - DNA, 100 bp, Homo sapiens
ggaacttgtgattgagcagtttgaagacttgctagttaggattttattactggcagcatgtatatcttttatggcccactgcgtgaccttggttcagctg

SEQ ID NO: 746721 - DNA, 80 bp, Homo sapiens
cggttggtgtcgacggatctctttacaagacgcacccacaaaatggaagctccactcaaggaggcgccgggaggccccaa

SEQ ID NO: 746722 - DNA, 100 bp, Homo sapiens
gagcttcatcaaaaatagtgatagctttgataaccgagcccaggaagtgcgtcccctccgtggtcgtgggcgtcgtgggcatgggccacgtgcctggcat

SEQ ID NO: 746723 - DNA, 74 bp, Homo sapiens
ccaagctcgtggcctgcctctgcgtgctgatgaacggcagcagccactcaccaacagccatcaatggtgcaccg

SEQ ID NO: 746724 - DNA, 100 bp, Homo sapiens
gacctctgccgcaaacatgctccgccagatcatcggtcaggccaagaagcatccgagcgaggatcagctgatttattcggaggatttgctgactttggct

SEQ ID NO: 746725 - DNA, 51 bp, Homo sapiens
cgagctgagctggcagagtcgtattcaaagacctggaccaatgcattgttc

SEQ ID NO: 746726 - DNA, 76 bp, Homo sapiens
cctcgaagtgcgcaaacttgacactcaccctgaccggaatggtctgccgaaaaccgaccgacccggttgattggcc

SEQ ID NO: 746727 - DNA, 100 bp, Homo sapiens
tctagctcagaaccattagacacatcagtggagtccatgctacctgattgcccccgggtctcagcaggtccacgctgcttttatgagctgtaacactcac

SEQ ID NO: 746728 - DNA, 90 bp, Homo sapiens
cgacatcacggatgagaaatctttcgagaatattcagaactggatgaaaagcatcaaggagggccattatgctgtgatgaacaaccccac

SEQ ID NO: 746729 - DNA, 100 bp, Homo sapiens
acccctgctgtcagcctcgactacctctacccagatggaaagacccacaacccagacctgactgagctcggccaggcagaaccccagcagcgcatccacg

SEQ ID NO: 746730 - DNA, 100 bp, Homo sapiens
ggtggactcccggagaggattcctaccgagagtggatacagagagggaagactgtgcctgaggagctggtgaagccagaagagctcagcaaataccggca

SEQ ID NO: 746731 - DNA, 83 bp, Homo sapiens
cagagcaacctctttcaggctttaatagggatcatagacggtatttctatgtaaacgaacagtcgggcgagtctcagtgggag

SEQ ID NO: 746732 - DNA, 90 bp, Homo sapiens
gcagctccccagggcccacgggccagccccgccgccctcgcaacctggcagccgccgccgtggaagcatggcctgtatgagaagaaaaag

SEQ ID NO: 746733 - DNA, 80 bp, Homo sapiens
aagaaagtcagggggactgcaaaggccaatgttggtgctggcaaaaaggtgttcgaaatccgcaccactgatgacctcac

SEQ ID NO: 746734 - DNA, 90 bp, Homo sapiens
ctaattttgacacagaaattcctttcctgctagaactttcagaatctcaggcgggtgaggcagacgcgtgccatgcctaccagatcattc

SEQ ID NO: 746735 - DNA, 100 bp, Homo sapiens
cgactgcaactgctggattgctgcaaggctgagggacgagaacgaggtcttctacattaagtccattgagccacagaaagtatcgacattagggaaaagc

SEQ ID NO: 746736 - DNA, 100 bp, Homo sapiens
gatcgatattttgtcgaagaaactgtggaagtcattaggaacaatggtgcaaggcagtagcagaatcccatggtagccaggtgggtgaaggggagcgagg

SEQ ID NO: 746737 - DNA, 96 bp, Homo sapiens
gcctgagcaacatccgcgagttcctgcgcggctgcggggcttccctgcggctggagattggaccagtggatcacattgaattctcttctggccctg

SEQ ID NO: 746738 - DNA, 74 bp, Homo sapiens
tggaatcgcccaagtccctctactcgcgagagtttatgtggccgaggcagacaagtggaattaggccttgctgc

SEQ ID NO: 746739 - DNA, 100 bp, Homo sapiens
caccttccggcggccgaagacactgcgactccggagacagcccaaatatcctcggaagagcgctcccaggagaaacaaatgttacatcctgtccactgca

SEQ ID NO: 746740 - DNA, 75 bp, Homo sapiens
gcagagggatggctgctcagctgctgactgatgaggcactgatgatgtctttctacctaaagatattgacctaga

SEQ ID NO: 746741 - DNA, 75 bp, Homo sapiens
ggcagcctgaacggagtgtgcgacggattgggagacttgcctaacgatatctcacctctactcccatgaattcac

SEQ ID NO: 746742 - DNA, 75 bp, Homo sapiens
ccggagtgaggctgaagggagtggatcagagcactgcctgagttactacatgatcatgctgtggagcatttcact

SEQ ID NO: 746743 - DNA, 100 bp, Homo sapiens
cataacatggagctccagtggaagtgatttgtcggatgaagataagacactttctcagttacagagagatattgctatatggagatttgccaaaaaataa

SEQ ID NO: 746744 - DNA, 82 bp, Homo sapiens
ggtggctatgaacccagaggtcgtggaggtggccgtggaggcagaggtggcatgggcaagaggtggaaacatacagaagaag

SEQ ID NO: 746745 - DNA, 100 bp, Homo sapiens
aacaactcgaagaaaaatgcccagtctgggatggctcaggaaatgttatcagcaaattgatagaagggaactccaaattcagctaatacccaaggaaatt

SEQ ID NO: 746746 - DNA, 100 bp, Homo sapiens
tccgctaccaccaccacaccagaaactagcaccagccccaaatttctccaagtggtaagaagttcagaagcaagcctcagttggcaaggtacctgggaaa

SEQ ID NO: 746747 - DNA, 90 bp, Homo sapiens
gattttactaagtggctgggcagagaaggagttcattcaaaagtgcctgcagtctgagcctgctcgcagaccaacagccagagaacttct

SEQ ID NO: 746748 - DNA, 101 bp, Homo sapiens
caggcaaactagatgtggaaggcagatctgtaaatacatgctacaggatttaactatcagaatgaagatgaaaaagtcaccttgtctttccctagtactct

SEQ ID NO: 746749 - DNA, 100 bp, Homo sapiens
tggccacactttccagaatgagtgtttcttttgtgttgaacagagtattataatgactatggagatatcatcaaagaaacaatgagtaaaacaaggcaga

SEQ ID NO: 746750 - DNA, 100 bp, Homo sapiens
cccagcaggatctgcatcgtcatcgagccggcccagcttctgaagggagatgtcatgggcgtggagcgcatcgacgagcccggcctgcggagcctgcgca

SEQ ID NO: 746751 - DNA, 75 bp, Homo sapiens
acagggctagccccttgagcagtccagggtttatattttcatccagaaacctgcattagggaaagagggatgcga

SEQ ID NO: 746752 - DNA, 78 bp, Homo sapiens
gccaacgccccggtggagaagctgagatcatgcatgcattttcagttgctccttttgaccagaatttgtcaattgatg

SEQ ID NO: 746753 - DNA, 83 bp, Homo sapiens
gcactgacccagcctgtcctcctgttgcctgcaggccaggctactgcagcactggggtgtcagttgttggtccgacccagaac

SEQ ID NO: 746754 - DNA, 100 bp, Homo sapiens
gaacggatagctccctcctggaaaagactgacatcaatttgccctatcttacaatggattcttctggacccaagcatttgaatatgaagttgacccgtgc

SEQ ID NO: 746755 - DNA, 83 bp, Homo sapiens
gaagaaatttggagtgtgcgtgcgcgccgagcggtgaacttcacggtagaccagatccgcgccatcatggacaagaaggccaa

SEQ ID NO: 746756 - DNA, 75 bp, Homo sapiens
caaagaaaccaaagacaaacgattagaagatggctatttcagaatagcttggatttacactgggcaacgtggttg

SEQ ID NO: 746757 - DNA, 90 bp, Homo sapiens
ggccacctacagaaacaaaatgtcaacaaattgatgggagtcagtggatcggtggggaaaatgctgcttaccctgggccctgggctgtag

SEQ ID NO: 746758 - DNA, 101 bp, Homo sapiens
ctatgactcagacctgggcacagcaaatgctgaggactcagaccagtctctgcaagagtgacagagctgaatgaacctctctccaatgaagatcgaaatct

SEQ ID NO: 746759 - DNA, 50 bp, Homo sapiens
agagcaagactcccaagcagctgatgggtttgtggagttcttccatgtag

SEQ ID NO: 746760 - DNA, 90 bp, Homo sapiens
ctcacctgccttgcatcgttccgagtcctgtactggactgcatcaggccgcgtctcctcaggaatgcatctactcatgcctcgaaatctc

SEQ ID NO: 746761 - DNA, 135 bp, Homo sapiens
cagggattgtcaatgaggcagatcagattccgatttgacgggcaaccaatcaatgaaacagacacacctgcacagtgctgcactagctgtgaggataatgccccagccaccagctactgtgtggagtgctcggag

SEQ ID NO: 746762 - DNA, 50 bp, Homo sapiens
cgagaacctgggccaaggcgacaagatcctgaacccgccgccctccccgg

SEQ ID NO: 746763 - DNA, 89 bp, Homo sapiens
acattgcttcacaaccagatggaaagcaattgcagattccaaatggaaatacatcagagcttatttttaatgcagtgcatgtaaaagat

SEQ ID NO: 746764 - DNA, 90 bp, Homo sapiens
acgcagtgcgccccgcttcggtgttacttccctcaggtattggctgggatccaccaaaacttcaatcaattttcctttcttaaggagata

SEQ ID NO: 746765 - DNA, 74 bp, Homo sapiens
aacagcacactgaaggaggctcagttcaaagacctgttcttaaaaaaaggattcactccttctccagttgcaca

SEQ ID NO: 746766 - DNA, 50 bp, Homo sapiens
cgccgccaccatgcccaagagaaaggttttaaaatcaaagatgggaaaat

SEQ ID NO: 746767 - DNA, 100 bp, Homo sapiens
cagggcctaacatgggacagccgcaaccaggaatgacttctaaggagaaggcagagcccccccaggctatgaatgccctgatgcggttgaaccagctgaa

SEQ ID NO: 746768 - DNA, 75 bp, Homo sapiens
cccggcccggctcggccgcctcaggtgagaagccctaccactgcaactgggacggctgcggctggaagtttgcgc

SEQ ID NO: 746769 - DNA, 75 bp, Homo sapiens
cgagctgggagggagccgcgcgcctttgtgcgcgcgccgaggaggaggaaggtgaggacggcgatccatcgtcag

SEQ ID NO: 746770 - DNA, 82 bp, Homo sapiens
agatgcaaaggaaagaatattaactgatcatcaaaaagaagttctcaaaacaaagcggatgttgctggagcactgtcagtag

SEQ ID NO: 746771 - DNA, 51 bp, Homo sapiens
cgccgcgtccttggctggcgtgccctgtttgtgctcttcgtcctggcctac

SEQ ID NO: 746772 - DNA, 82 bp, Homo sapiens
ggttaatgtgggccatgtctggtgagaagccctaccactgcaactgggacggctgcggctggaagtttgcgcgctcagacga

SEQ ID NO: 746773 - DNA, 75 bp, Homo sapiens
ccaaagaggactttcgctatcgatctcctcattcagcctgctgagggatgcccaagaagttccagggtgagaaca

SEQ ID NO: 746774 - DNA, 75 bp, Homo sapiens
cctggcacgatcgcccgtcggggacctggagccccggacagagagggcggatgttcccccccttcaaggtgcgag

SEQ ID NO: 746775 - DNA, 95 bp, Homo sapiens
cgcagggggacggggaccagcagctgtcgccgccgctctcagtgttctaagaacggaagcatctgggctggatggaatttagcatcaagcagagt

SEQ ID NO: 746776 - DNA, 100 bp, Homo sapiens
ctgccgcctcccgggagtgccgtgcgccgcagcccgggcccaggccccggcagcgcctgggacaaggatgtgatgcagcaggccaccaatgcaattctta

SEQ ID NO: 746777 - DNA, 98 bp, Homo sapiens
ggacatctggagcctgggagtcatcctgtacaccctcgtcagcggctccctgcccttcgacgggcacaacctcaaggctgccccgggagacgctggcc

SEQ ID NO: 746778 - DNA, 100 bp, Homo sapiens
gaagcccagtacatttcaagttggtcgcggcttgggctccgctttggggaggggcagcagctttggggccatttggatcacacgatgttttttcaagatt

SEQ ID NO: 746779 - DNA, 75 bp, Homo sapiens
atgctagtacaactggactttttgacccatataagatcttcttggaaacagaattgttctacaaaggtatccgcc

SEQ ID NO: 746780 - DNA, 89 bp, Homo sapiens
gtttgctctgctcttccaacaccagtggaagatgatcacatcccaggatgaatctggttatagatggacaagagacgatcattctgcaa

SEQ ID NO: 746781 - DNA, 50 bp, Homo sapiens
gtttcatctgtggatggagtattgatcagttggccttatttcctcagtgg

SEQ ID NO: 746782 - DNA, 127 bp, Homo sapiens
gcgctgttcgtgctgctgggattcgcgctgctgggcacccacggagcctccggggctgtaagactttgaccccgacgcaggcttcagtgattgccgcggatcagaagcctgagcactttggctcgag

SEQ ID NO: 746783 - DNA, 100 bp, Homo sapiens
aaaaacttaagcttccttggattcccacgtcaaaggaaagtttcaagacttaattcagtgcacaaatgagatgaatgtgaacatcccacagttggcagac

SEQ ID NO: 746784 - DNA, 50 bp, Homo sapiens
acccttcctgcaggccccatcagtgaagctgtggtctaccaatctagaca

SEQ ID NO: 746785 - DNA, 82 bp, Homo sapiens
cgcaaggtcgccctcaaggccatgatcaaaactggcctcggaggcctttgaagatgacagctgtagcaactttgtgtctgaa

SEQ ID NO: 746786 - DNA, 90 bp, Homo sapiens
gcgatggtcttcctgctggggctcatgtttgaggttggccttggggaggcactattagaggctgaaactattgaagaacaagaatctcca

SEQ ID NO: 746787 - DNA, 51 bp, Homo sapiens
accttggagaaaaattttaacgtttgagagctggaagtcgagtgtgctact

SEQ ID NO: 746788 - DNA, 82 bp, Homo sapiens
acaccaaagaagagaaagacaaggatgaccaggaatgggaaagccccagacctgcctagagctggaacgttacctccagagc

SEQ ID NO: 746789 - DNA, 99 bp, Homo sapiens
ctcctgagggcggcttcgatgccatcctgcagacagctgtgtgcacgggttggggtgctggaggactgcttcaccttcctgggcatcttcctggccatc

SEQ ID NO: 746790 - DNA, 75 bp, Homo sapiens
ggcagcggcaggctcaggtgcagccgctgattgcagccttcttcgctgagtctctgcccagtgtgggagggcaga

SEQ ID NO: 746791 - DNA, 74 bp, Homo sapiens
tgcctctctcagtccgggtttggagactcctgcgtcctccgacttttcatggaatccagcactacgccctgccc

SEQ ID NO: 746792 - DNA, 100 bp, Homo sapiens
ctgatggagctggtgtggggcaccaagagcagccccggtctctcggacaccattttctgccgctggacgcaaggaaccacgtgaatgttgagggggcgac

SEQ ID NO: 746793 - DNA, 82 bp, Homo sapiens
gtgaatctgacccgactggattcctccatgactcaaggcacagactctccaggcaaagagtatgtggggattgtccggctgc

SEQ ID NO: 746794 - DNA, 99 bp, Homo sapiens
ggttaacatacttgaagcccaggccaactgcaagcaaatgcttattgtgaaaatccagatatagtattaattggcaacaaggcagacctaccagatcag

SEQ ID NO: 746795 - DNA, 82 bp, Homo sapiens
gaaattgagagacaaaaggaaatgcttcgaaataatgaatccaaaatccttcatttacagtctttgagagttcaggccctgg

SEQ ID NO: 746796 - DNA, 75 bp, Homo sapiens
ctgtcatacttaaatacttgacatctaaaatttttggtattgcagatgacctgcccgaaaccatgttaatagaat

SEQ ID NO: 746797 - DNA, 75 bp, Homo sapiens
cagaagtgatcgctcagctggagaacgcggctaaagttctgatggtgggaaagcagtgccactctccgcttcaca

SEQ ID NO: 746798 - DNA, 100 bp, Homo sapiens
ggacaaacagaagattctggacaagtgtaatgaaattatcaactggcttgataagaatcagaccctttggctttgctgagagaggactcagatgatagtg

SEQ ID NO: 746799 - DNA, 105 bp, Homo sapiens
cgcacgccaagcacgtggtgggctatggccaccttgatcacccggaagttcaggctgaattctgaaggcaaacttgagcagacggtctccatggcaaccacgaca

SEQ ID NO: 746800 - DNA, 100 bp, Homo sapiens
gtcaactatgaggtggatcggagatttcatcaacccgatagcagaagggtcaactcttctgttggattttctgttttgcagcatacaagcaatgacccat

SEQ ID NO: 746801 - DNA, 100 bp, Homo sapiens
tcaaggttataagaaaggtgcagaagtcattttaaactatggacgactccgaggaacattgaggtcttgggctggcacgaagagctgcccggccagagca

SEQ ID NO: 746802 - DNA, 73 bp, Homo sapiens
atctcacacaagtggtcagtttggttgtggaaaggtaaaaatgcatttgcaaagggagaaaatgaaggccaaa

SEQ ID NO: 746803 - DNA, 50 bp, Homo sapiens
gcacggtactggagaacacggatgataaacattgacgatcttgaggatga

SEQ ID NO: 746804 - DNA, 90 bp, Homo sapiens
cggccttctacatcctgttcttcaccgttatcatctatgttcggctggacttctccatcaccaaggctaaagaattacctccaaagccat

SEQ ID NO: 746805 - DNA, 100 bp, Homo sapiens
ggacgatgcaccagtgatctacgggctggagttccaggtgccccacgcctggctgtgatggttctggacatatcaccggcaattatgcttctcatcggag

SEQ ID NO: 746806 - DNA, 80 bp, Homo sapiens
ctgggattcgcgctgctgggcacccacggagcctccggggctgcaaattgtggctactaatttgccccctgaagatcaag

SEQ ID NO: 746807 - DNA, 100 bp, Homo sapiens
cctccatgcaaattgggtgcttcacagagacttgaaaccagcctggacaccaagtctgtgtcagaaggccacctcaagaggaacatcgtggtgaagaccg

SEQ ID NO: 746808 - DNA, 100 bp, Homo sapiens
agcaaagaggaagaactgaaccggactaaggccaccatgaatgccatccgggaagagcgggaccggctccggaggaggggtgatgaattagaagacaatg

SEQ ID NO: 746809 - DNA, 90 bp, Homo sapiens
agaacaactgcctggaactcaaaaagaaaaatcacaaagaggagtttcagaaagaactccatctgggcagagcggcttgggtaaatccac

SEQ ID NO: 746810 - DNA, 97 bp, Homo sapiens
tcagaagcatgtgtcttccccagctctgcagccacatactatccgtttgttcaggaaccaccagtgacagagtatcttcctgtccacttccaacgaa

SEQ ID NO: 746811 - DNA, 75 bp, Homo sapiens
ccgggaagtcggggtctccttcgccttctgtctttctgcgtcctactagcagacaacctctcctacattgagcac

SEQ ID NO: 746812 - DNA, 90 bp, Homo sapiens
gctattgcagaatttttgactggagactatagtagatcctgataacttaagtgactctctcttttccggtgatgaagaaaatgctgggac

SEQ ID NO: 746813 - DNA, 100 bp, Homo sapiens
tgctgcctggtgcagaggatcctggaggcctgggaagccaacgaccacacgcaccagctgaggtgggtgtcctggttggcaaagaccggtcaagttttta

SEQ ID NO: 746814 - DNA, 75 bp, Homo sapiens
gattgctttaaatgatcacctaaagcaggttcaaaccttgtactactcagctgatcacaagctgcttgatgggaa

SEQ ID NO: 746815 - DNA, 83 bp, Homo sapiens
acaataagcagacagaagagccaagcagctatggaggaaaatcagagccgctcccgaggccccggcgcggcgcgagggcgcgg

SEQ ID NO: 746816 - DNA, 100 bp, Homo sapiens
tgaatggaggagacgtattacaacttttagctgcagtggagctgccgtttgagcaaggaagacattgaacgtatggtccaggaagctgagaagtacaaag

SEQ ID NO: 746817 - DNA, 90 bp, Homo sapiens
cctgatgggcgggtgtctgtctctgctcgaattgacagaaaaggattctgtgaagctttgatgtggaaaatggcccttccccaggtcgga

SEQ ID NO: 746818 - DNA, 80 bp, Homo sapiens
ggaaattatgaccaagtacctcaccccaaagggtggcccagttgaaatccttcccttcctctaccttggaagtgcctacc

SEQ ID NO: 746819 - DNA, 100 bp, Homo sapiens
aaaaaaccaaaagagaaagtggatgctctatcacagtttgatctcaacaattatgcaaatgcctgtgaggagccaccaacatttgaagctatggagctca

SEQ ID NO: 746820 - DNA, 100 bp, Homo sapiens
gttcaagaaaatgctgaagatgcgcttggctgggaagctaggataggctgacgaagtcagacttagtgtgggaacctggccctgcccgtggaccggaagc

SEQ ID NO: 746821 - DNA, 75 bp, Homo sapiens
caaggcactgctttttcatgacgaaagtgttgtgaagagcgaagacttttcgctcccagcttatatggatcggcg

SEQ ID NO: 746822 - DNA, 100 bp, Homo sapiens
cccatggggtatatccaccctcaagtgtggtgttggggatgtcctttgcactgaccctgaactgccagattgacaaaaccagccagaccatagggctatg

SEQ ID NO: 746823 - DNA, 111 bp, Homo sapiens
caagcacttggttgaccccattgacgatctttttcttgctgcgaagaagattcctggaatctcatcaactgagttcacccagggcatgatcttacctacaatgaatggaga

SEQ ID NO: 746824 - DNA, 100 bp, Homo sapiens
ggcatgttggatatgtgcggctttgatactggagctctggatgtgcataagctggagcctgaggcgtggaaacacgtggaagccgtatatatagacattg

SEQ ID NO: 746825 - DNA, 76 bp, Homo sapiens
ttaaataccaagtaccgggattccttgccccagttgaatggccacatctgttgctcagtggatccacagtgccttc

SEQ ID NO: 746826 - DNA, 101 bp, Homo sapiens
gtttgcttcaaaggaaagtgagatcactgatgaagatatcgatggtattttggaaagaggtgcaaagaagattgcagagggaatggcatacatcgagcgga

SEQ ID NO: 746827 - DNA, 100 bp, Homo sapiens
cctgcccccttcccccacccccgactcgggcttggcgcggcggccagaggaaccccgagatgtcaagccctccaacatcctagtcaactcccgtggggag

SEQ ID NO: 746828 - DNA, 100 bp, Homo sapiens
actcgcaggcgtcatgttgggaatcgggcctccggtgtggctgtctctgatggtgtcatcaaggtgttcaacgacatgaaggtgcgtaagtcttcaacgc

SEQ ID NO: 746829 - DNA, 100 bp, Homo sapiens
atgttcctgagcttgagatgctaggaagacttggtgattcgcctttgccagtctcatctcgtgtctgctttgttaagttccatgatccagactcagcagt

SEQ ID NO: 746830 - DNA, 98 bp, Homo sapiens
gaggacccgttcacagctaagctgagctttgagaaatgactgctgagtacgcctgcacaaggaaacagtttaacaagaggctcagtgaatttggattg

SEQ ID NO: 746831 - DNA, 88 bp, Homo sapiens
agcatcaactacctgcactttggagaaccaaagtcctggtggatagatacttctcaagacatcacacagcgtgagtcaatcaaggagg

SEQ ID NO: 746832 - DNA, 50 bp, Homo sapiens
ttcgcagtggtcgcttcttctccttgatcaatgagctgagcaatgttcct

SEQ ID NO: 746833 - DNA, 98 bp, Homo sapiens
ggcgccgggccccctagggattttcaggaatgtatcctgtcaggtataatgtcagtgaatggcaagaaagttcttcatatggatcgaaacccttacta

SEQ ID NO: 746834 - DNA, 74 bp, Homo sapiens
gggcctgcagcgggagctggacggcgagcgcgagcggcgcgagaaaactggcataaggtcccagctggtgatat

SEQ ID NO: 746835 - DNA, 100 bp, Homo sapiens
cctagtgaaagtggacgacgaggtggtggccaggttgcagatatcaagaaagtcaacaacttcatcagagaacaagacttatatgctttgaaatctgtta

SEQ ID NO: 746836 - DNA, 100 bp, Homo sapiens
gctcttccgggatgttgaggatgaggagacgtggattcgagagaaagagcccattgccgcatctaccaacagaggcgatctccggagatgtgaagaaggg

SEQ ID NO: 746837 - DNA, 96 bp, Homo sapiens
gataagtcgaaggggaaggcgcctgaagaggacgaagccttcatcctccccaaggcagaggtgtgcgtgcggaaccatgtccagccctacatccca

SEQ ID NO: 746838 - DNA, 98 bp, Homo sapiens
gtcctgctccgtggtgctctatgaccccctgacttcaaatctcaacctgagccatccccagttcttagccagttgagccagcgacaacagcaccagag

SEQ ID NO: 746839 - DNA, 75 bp, Homo sapiens
ggggcagaagaagagcagaaaatagcagccaggaaccaagaaaacttggttgccaacttggcctgttccatctca

SEQ ID NO: 746840 - DNA, 90 bp, Homo sapiens
gtcggagtttgagccccggaggcagagcggctgccatggacctgaaggagaagaaggagaaggtggaggagaaggcaagccggaaagagc

SEQ ID NO: 746841 - DNA, 82 bp, Homo sapiens
gcagcgagagcatccccaaggactcgctccggatggccatcatggtgcaggtgagaaaactgatgcttggagatgtgatcac

SEQ ID NO: 746842 - DNA, 75 bp, Homo sapiens
aagtttcaaggagtttgggaaaaaccgcgaagtcatggggctctgtcgggaagcatatagcactttctacattgt

SEQ ID NO: 746843 - DNA, 75 bp, Homo sapiens
atttgctcttacgtatttgtgtgacttgactcttcaaacacaaaggtagagtggaacccccagctattagaggtc

SEQ ID NO: 746844 - DNA, 74 bp, Homo sapiens
gtgtccattggacaacagagagtgggaattccaaaattagggcctagtcaaaattttgaagctgagtcaattca

SEQ ID NO: 746845 - DNA, 75 bp, Homo sapiens
atgagctggggcaccgagctctggccatcagtggcctatgtacataccacgccgggtctgccttcaggctgggaa

SEQ ID NO: 746846 - DNA, 101 bp, Homo sapiens
aacaaggaagcggagaggcaagagtgtcgagttatagcagtgctggattgggagctgtcaaccattggtcatcctttgtcagacttagctcatttttccct

SEQ ID NO: 746847 - DNA, 100 bp, Homo sapiens
tacacttcgactctcaaagcaataccaggatagctgttgtttcagagaaagaagctccaccatgaggcgaggtggatggaggaagcgagctgaaaatgat

SEQ ID NO: 746848 - DNA, 74 bp, Homo sapiens
tcgtcctaggaatggatttctcctctaatgacagatttaaattccaggttgtcatcaatggccgagagtttccc

SEQ ID NO: 746849 - DNA, 75 bp, Homo sapiens
ctctgcaaagcctccagaggacataccacctccaggatcaggatgcagagatgccttcaattaagttgcagagtt

SEQ ID NO: 746850 - DNA, 80 bp, Homo sapiens
cgtcagaacgtggcttatgagtacctttgtcatttggaagaagcgaagagcttttgtctggtcctctgagccccagtgag

SEQ ID NO: 746851 - DNA, 150 bp, Homo sapiens
aactggaggaccacattacccagcttcacgagtacaatgacatcaaggatgtggggcagatgctgatgggcaaactaggacatggatttgattgacatactttggaggcaagatatagatcttggagtaagtcgagaagtatttgacttc

SEQ ID NO: 746852 - DNA, 106 bp, Homo sapiens
cccagccgccgccatgaaggccgtggtgcagcgcgtcacccgggccagcgtcacaggcctcaaaaaagaaggtgtatatgctctataacctgcagccagaccggtc

SEQ ID NO: 746853 - DNA, 101 bp, Homo sapiens
gcgtgcggccctggattcaggggccttccagagccctgtatgatgagattcgtcagtttcgcaaggcctgtggggaggctcatcttaaaactatattagcg

SEQ ID NO: 746854 - DNA, 74 bp, Homo sapiens
ccaagcttaacttttccaatgtggaatcctgggccttcattggtcagagatgtcatcatcgctgcaagcgttgc

SEQ ID NO: 746855 - DNA, 75 bp, Homo sapiens
aagaggaagaggaaagcaaaggagtcagggatggctcttcctcagccagcagccagcttcgggtgtagcctattc

SEQ ID NO: 746856 - DNA, 100 bp, Homo sapiens
gtaattaatgctgcagatgatgatgaagatgatgatggttcctccccgggcagaagaaatcaccattccagctgatgtcaccccagagagagttccaaca

SEQ ID NO: 746857 - DNA, 75 bp, Homo sapiens
gtacctgcgctatgaagacacgcttcttctggaagaccagccaacagagtgaagacatttccacctggacacctg

SEQ ID NO: 746858 - DNA, 82 bp, Homo sapiens
tagccggcgacttgagtgacgagttgaaatcacaaagattagacacctttttagataggtgttcttcagcaccactgacaac

SEQ ID NO: 746859 - DNA, 75 bp, Homo sapiens
ccgacttcgatgatcgtgtgtcggatgaggagaagaggcccagaaatctaaagatctttgttctataactgtaag

SEQ ID NO: 746860 - DNA, 99 bp, Homo sapiens
cttctctgcaagaactgtctcaaaaaatggagaatgaaaagacagaccttgttgaatccagactccaaaatgatgcaaatcaacctgactggatttttg

SEQ ID NO: 746861 - DNA, 80 bp, Homo sapiens
tggtcagcctgatctcggacttcacagccagcagaactcttcgcaaacctgggtatacttcatgtgacaaagaaaaaagt

SEQ ID NO: 746862 - DNA, 100 bp, Homo sapiens
caatgacccaacatctcttcggaaaaacctcaggtttgcacatccttatcaatatgaactaaatcactttaccccagcagatgcagtgcttcaaaagcca

SEQ ID NO: 746863 - DNA, 80 bp, Homo sapiens
atggagaaccaggagaagtttttatcaacaaaggcaaaggattcggatttattaagcttatggaacagattaaaagggcc

SEQ ID NO: 746864 - DNA, 98 bp, Homo sapiens
tgctggtggccctggctttcgtgtgctggagaaagatcaaacagagctgtgaggaggagaatgcagggatgtcaagccagacaacgtcctgctggatg

SEQ ID NO: 746865 - DNA, 85 bp, Homo sapiens
tactctatatgaacaatccgtctggatcacggatgtaggaagtggctctcccctggacaagttggtgtccagcacatcagacctg

SEQ ID NO: 746866 - DNA, 75 bp, Homo sapiens
ctctacgcctcctacgtttacctgtccatggacccccgcagcaaacacaagtttaagatccacacgtactccagc

SEQ ID NO: 746867 - DNA, 75 bp, Homo sapiens
gttttcagtggaggaaagaaatttctgtcaatgatgagagtccggagtgttgtcatgtgaagcctgccatccagg

SEQ ID NO: 746868 - DNA, 97 bp, Homo sapiens
caccagttgagcggccttctacttccacagcagtatttggcacaggtggttattaacttggtgatgcttttggctgaaatgaaaatacaggaccgcg

SEQ ID NO: 746869 - DNA, 96 bp, Homo sapiens
cctggagggaaagtgccgctttaaggagaactgcaggacggaagctcctgttttcttgtcagccgccagctgagggccattcgcagcttctccagg

SEQ ID NO: 746870 - DNA, 83 bp, Homo sapiens
tggcagcgcaggcgcaagcgcagagagcggaggcggtggtggtggcggccgctggccagtaaactggcgatggaatatgagag

SEQ ID NO: 746871 - DNA, 80 bp, Homo sapiens
cttctactggctgcgctcctttctggccggaggccgggctgggatcagatgggaagtggaacctcgtcatgaccagaaac

SEQ ID NO: 746872 - DNA, 99 bp, Homo sapiens
ggggaatctggaagaggctggggagtctgtgtccttccagctgcagatacggagcttcctggagatgatggaggctcgcagccgtggccatgcgtcccc

SEQ ID NO: 746873 - DNA, 98 bp, Homo sapiens
gcggcctccagagccggcatgtggcgctgtcggtgggcggccgcgagatcctcaaggaaacccagcgtttgctggcagaaccagttcctggcatcaaa

SEQ ID NO: 746874 - DNA, 74 bp, Homo sapiens
gctgagcccatcactgcagacagtgaccccgcttatagttcgaaggtactgaggacaaatcagttctctgtgac

SEQ ID NO: 746875 - DNA, 80 bp, Homo sapiens
tggagcctcagttggaagcagccgatccagcctgcggagcctgtggggcagaccacacctgtgacaatgcaggttggaga

SEQ ID NO: 746876 - DNA, 90 bp, Homo sapiens
ccaaaggctattggatcagctcagcaggttcaggagcatcccaggaggaacagaatgatcttggtcttggtgaccttccctctgatgagg

SEQ ID NO: 746877 - DNA, 75 bp, Homo sapiens
cgaaagcctgaggaaaaagcggccgcgatttggtgctatggagaaatttttggtagaatataagagtgcagtgga

SEQ ID NO: 746878 - DNA, 75 bp, Homo sapiens
cattctccagaggcgttccatttgctaccgtcagagggctcagaagctttcggaaattcacaaggatcaacctgg

SEQ ID NO: 746879 - DNA, 100 bp, Homo sapiens
gtaaaataccttcaagcgaatgggccctattgtgctcacacattcagaacctgttacccaaggaattccctaaagggttgtgagtcccggcccagcccct

SEQ ID NO: 746880 - DNA, 75 bp, Homo sapiens
ctgtgtcccgtgttttctgcgtgaggtaataaaaggcctgacatatctgagggagaagcacaagatcatgcacag

SEQ ID NO: 746881 - DNA, 50 bp, Homo sapiens
tgcaagaaagcctctttgcaaccgggatttcaaatatgcgtgcattagag

SEQ ID NO: 746882 - DNA, 80 bp, Homo sapiens
cttcctcaccaagcaggatgcgaaggccacgcccagatttcttctaccgctgcttccctgatgggctagcccattctgac

SEQ ID NO: 746883 - DNA, 100 bp, Homo sapiens
ccggagctggcaagatttgggccgtggagcagcgtcaccctttacaccagaaagctggcgggcactatggggaaaaaacaaaacaagaagaaagtggagg

SEQ ID NO: 746884 - DNA, 97 bp, Homo sapiens
aaatttaaggaggtggccgaggcatatgaagtgctgtctgacagatctcatggtccggaatgacaccccctgtggaaccaccattggacctatcttg

SEQ ID NO: 746885 - DNA, 74 bp, Homo sapiens
gaacatttctgaaggattggtcgtgtaccccaaacttcaacattgctttatggcatgtgtggtcgtttttcact

SEQ ID NO: 746886 - DNA, 90 bp, Homo sapiens
gtcttcctgtggccctcaaacaaaaaatcactgcattacatcagcaggtgacctcaaagcagaagctctgaattcacctctcatctgacg

SEQ ID NO: 746887 - DNA, 83 bp, Homo sapiens
ctgagggctacgtggagggcctggatgatgaggaggaggatgaggatggtgcccaccagctgacctctcctccttctcagtca

SEQ ID NO: 746888 - DNA, 100 bp, Homo sapiens
ggagaagtttcttaggcagaaagcaatatcaactaactgtgcagatctcttccctgaagaacaggctgaaaaaggtctccacaaccactggggatggtgt

SEQ ID NO: 746889 - DNA, 100 bp, Homo sapiens
ttctacctgacgctcgtcctcatcctggtcactagcggactcttcttcgccttcgagtgtggaatatcaaacaaatgattaagttgacacaggaacatat

SEQ ID NO: 746890 - DNA, 50 bp, Homo sapiens
cacttgaaataccggatgattttggaggggttgatagttcttggggaggt

SEQ ID NO: 746891 - DNA, 100 bp, Homo sapiens
cccagactgacttgttcacatgtggcaaatgtaaaaagaagaattgcacttacacacagaaatgagccgtcagactgctacagcattacctaccggtacc

SEQ ID NO: 746892 - DNA, 50 bp, Homo sapiens
ttacactgtgatacgactgactaaagatttgatcaccaggagatttttcg

SEQ ID NO: 746893 - DNA, 100 bp, Homo sapiens
ttccgtcctctgaggcgacggccgcggctgcacagattgtccgtgtggagcccttggtgaccatgggccaggtgactgccctgctgacctccattggctg

SEQ ID NO: 746894 - DNA, 100 bp, Homo sapiens
gcggaaaggataagcctcgacttagaagctaccgagttaccctaagaaaggtcctccagtcgcagctggatactctgctccaggggcaggagagcattaa

SEQ ID NO: 746895 - DNA, 104 bp, Homo sapiens
acagttgaaactccagcagcgccggacccgggaagaactggtgagccaagggatcatgccgcgctgatgaattcatccgagcaaatgccaccaacaagctgaca

SEQ ID NO: 746896 - DNA, 82 bp, Homo sapiens
cctcgcgccggctgctctttccggaacccttaggagaaatcttgagagtggacagcaattgtgaagatcgccagagagttct

SEQ ID NO: 746897 - DNA, 98 bp, Homo sapiens
ttatacttgcttttgcttcagcgttctgtggttgtcaacagataatctgcaaaatggcttcaatgctgagtaagagtaccgttgaacgcctgctactc

SEQ ID NO: 746898 - DNA, 101 bp, Homo sapiens
ccaaaacagagcaagggcaaaagaattccataagcatgattatgatatgagggtggatgatttccttcgtcgcacacaagctgttgtcagtggccggagaa

SEQ ID NO: 746899 - DNA, 50 bp, Homo sapiens
caccggctgttcgaggccttgactgtaggcataatcaccagcaacacccg

SEQ ID NO: 746900 - DNA, 83 bp, Homo sapiens
ccaaggtggatattgatgaccacacagacctcgccattgagtatgagatataaagatgaagcgcagctgtataaagaagagca

SEQ ID NO: 746901 - DNA, 75 bp, Homo sapiens
agacacaggcaattgtatgtcagcagcttggtccccagtcccaagcggaagttggaagaaccagttctggagttc

SEQ ID NO: 746902 - DNA, 119 bp, Homo sapiens
gtgccttcaggacaacaactgggactacaccagatctgcccaggccttcactcatctcaaggatcgacgagaacgtgctaggagcccagctggacgttgaggccgcccattcagagatc

SEQ ID NO: 746903 - DNA, 100 bp, Homo sapiens
tggggacctcctgctggcagggaactgcgaggagattgagccccttcagatgtacgattatagtttggatatgtggagtttgggttgtatgctggcaagt

SEQ ID NO: 746904 - DNA, 74 bp, Homo sapiens
gggagtcgtaaacaaccctgaagagaacagccaggcctggtatgtcttactgaaagaaagaaacatgcttctaa

SEQ ID NO: 746905 - DNA, 75 bp, Homo sapiens
tgattatcgtaggaggagtcctccacctcgtcgcaggttctctacttaaaagacaatgactactgatgaaggtgc

SEQ ID NO: 746906 - DNA, 82 bp, Homo sapiens
cccccccttccccacgcaaccccagatccatttacactttacaagttgcatgctgagaatttgaaaaatgaagatgatgtag

SEQ ID NO: 746907 - DNA, 51 bp, Homo sapiens
gtttatgatgaatcagccaagtcaaaagacagggtctctgtcacccaggct

SEQ ID NO: 746908 - DNA, 100 bp, Homo sapiens
tcactgcagcctcaacctcctggactcaggtgtaaaaggaagagaatgtctcctggacctaattgccacaatgctggtactacagtttattcgcaccagg

SEQ ID NO: 746909 - DNA, 100 bp, Homo sapiens
ccgtggggcttccgcctcgtgggcggcaaggacttcgagcagcctctcgccatttcccgggtgattggtctgttggacgtttttacacctgcaaggtctc

SEQ ID NO: 746910 - DNA, 101 bp, Homo sapiens
ccgcctcaggggccatggcgaagcacgagcagatcctggtcctcgatccgcccacagacctcaaattcaaaggtcaaaatgcagatcttcgtgaaaaccct

SEQ ID NO: 746911 - DNA, 100 bp, Homo sapiens
gtgggcccagtcctcggtgcggcgcggccaggtattcaaaacctttgaccacatggcccgtcaggatgatgagaagagaaggcaggaacttgaagagaaa

SEQ ID NO: 746912 - DNA, 80 bp, Homo sapiens
cacgagcatttccaagtgatagatctagttcacttgaaggcttccataaccactttgttcacgagtactaatcttcagtc

SEQ ID NO: 746913 - DNA, 83 bp, Homo sapiens
cccgcctgccaggcgctcgggggccgaactggccctggactacctctgcaggtgaaatgacaatggatgctctgttggctcga

SEQ ID NO: 746914 - DNA, 90 bp, Homo sapiens
ttctgttcaggccagaccctctgggagcttctcagccattttccacagatcaggccgacggtcgcaaggtcctacggtcaagcatccggg

SEQ ID NO: 746915 - DNA, 75 bp, Homo sapiens
ccggccgcctcagccatggacgcgtccctggagaagcgaggagagctacatggtccaggactacgcccagatgaa

SEQ ID NO: 746916 - DNA, 60 bp, Homo sapiens
ctcctgcgccggccttgcctcggattgaagaatgtgtggtatgctctgacaagaaagcag

SEQ ID NO: 746917 - DNA, 74 bp, Homo sapiens
ctcagtccctctgtgctccaggactccctcaataatgaacaatcagtggattatagacataagttctccttgcc

SEQ ID NO: 746918 - DNA, 83 bp, Homo sapiens
atgtgaaattgactaaatacatgaatccacattcatctcaatggaaggatcctgccttaagtcaacttatttgtttttgccgg

SEQ ID NO: 746919 - DNA, 74 bp, Homo sapiens
ttggacttccagcctccagaactggtctccagccacctgcccttcccgagaagagagagctctgggccttcttc

SEQ ID NO: 746920 - DNA, 75 bp, Homo sapiens
ccggggccctctcagcaagaacgggaacaaaactctgagagttggaaactcaactattggaacaatgtactgttg

SEQ ID NO: 746921 - DNA, 75 bp, Homo sapiens
gaccttcgtgctgtttctctccctggcttttggggcaagctacggaacagtttgggtgaaaaaaattgtctgcag

SEQ ID NO: 746922 - DNA, 74 bp, Homo sapiens
tcccacttgcatcaagctgggcatccagggctcgtacttctgctcgcagatctgaagaagacacttgaatcatg

SEQ ID NO: 746923 - DNA, 100 bp, Homo sapiens
cgagaggatcatggcggatggccccaggtgtaagcgcagaaagcaggcgaacccgcggcgcaataacggaggctctgtcggtggtgagcgacgaccagtc

SEQ ID NO: 746924 - DNA, 119 bp, Homo sapiens
caacctgaagaggacctggcagcaataagtttttggtgaaataacaaagaggtacctggaatggaaacacaaaagtagccataaagactcttaaaccaggcacaatgtcccccgaatca

SEQ ID NO: 746925 - DNA, 90 bp, Homo sapiens
ggagaaaaacggccaagaggcagacctaggaaatgggtaaagattatagttcccaacagcacagcaggtctgataatagggaagggaggt

SEQ ID NO: 746926 - DNA, 100 bp, Homo sapiens
gattattggtaacaaaaaggcaattgaacttctgatggaaaccgctgaagttgaacaaaatggtggtctctttataatgactgaaggagcattaggttat

SEQ ID NO: 746927 - DNA, 76 bp, Homo sapiens
tggaagcttgacgcgcacctgtgcaagcacacgggggagggttccgagtctgaggaagacataaccttgtgcctgc

SEQ ID NO: 746928 - DNA, 50 bp, Homo sapiens
gtccgcttttctctaaggaacccgggtgatcagcccatgacctaaacctc

SEQ ID NO: 746929 - DNA, 75 bp, Homo sapiens
accgcagcctggtgcagatcatctacgacgagaaccgggactttgtgttttatgccccacgtctgagaatcaaca

SEQ ID NO: 746930 - DNA, 100 bp, Homo sapiens
gctggaacttgccctgtctcctcgcagatgagcaatgctggggtgaaaacaacacggctagaagctcattctgaaatggggagcactgaaattttggaaa

SEQ ID NO: 746931 - DNA, 75 bp, Homo sapiens
acaacgccaaggagctggtcgattacttcctaaatgtggccactgcccagttcttctggatctgcctcagtcctg

SEQ ID NO: 746932 - DNA, 76 bp, Homo sapiens
aaggaaaaactggagagcttcatcaaaaatagtgatagctttgataaatggactcaccctgtcacccaggttggac

SEQ ID NO: 746933 - DNA, 76 bp, Homo sapiens
aatgagtaccgctttgcttgggtggaagcagatggggtaaattggtggataatattaatgcagctgtgatggattt

SEQ ID NO: 746934 - DNA, 83 bp, Homo sapiens
ccgaaagtcccgtccggaccctccaagtggagaccctggagtggaagctggacacactatgtgacttgtatgaaaccctgacc

SEQ ID NO: 746935 - DNA, 75 bp, Homo sapiens
cggatgcggagcgcggtgctgccggtggagcttcagagcatcctggccagaacaagccaaggagccaagacgaga

SEQ ID NO: 746936 - DNA, 74 bp, Homo sapiens
ctgcagccgcagcctgtggctgtgcagggccccgagccggcccgggtcgagaaactggcgatggaatatgagag

SEQ ID NO: 746937 - DNA, 100 bp, Homo sapiens
aaaaggaggtagaaatactcttcattcaagtcaatcagtttgcattgatatgattctataacagactcttccagaaatgatatgaagaggaaatttgccc

SEQ ID NO: 746938 - DNA, 98 bp, Homo sapiens
taacttctttaatgcaagagctacaaaacagtggaaagactgattcggaactttggaaaaactgtgaggcttcttttgggacacataaagatccatat

SEQ ID NO: 746939 - DNA, 82 bp, Homo sapiens
gaaggtggcaagtcgctcctgtcatttctacaacaacgtagaagggaaagcaggcaggatgggagagtcgccgatagaacca

SEQ ID NO: 746940 - DNA, 95 bp, Homo sapiens
aatcttgtggacaaatccaggggaagccatgtttcctgagagactgggagttgcaggtgcacttcaaaatccatggacaaggaaagaagaatctg

SEQ ID NO: 746941 - DNA, 90 bp, Homo sapiens
gcttgggagagctggctttaatactctgactgtgaataatccagaatggctactctgatctatgttgataaggaaaatggagaaccaggc

SEQ ID NO: 746942 - DNA, 75 bp, Homo sapiens
gaacgaattatctggcccctggggggctttcagatgaaggatttgggggcagagcacttggcaggtcatgaaggg

SEQ ID NO: 746943 - DNA, 96 bp, Homo sapiens
ataaaagtggccattagtactgtgagcatgaaccttgaggtgtgcattgagacgtacataagcagctgtcaccagcgtagcataaacactgctgtg

SEQ ID NO: 746944 - DNA, 75 bp, Homo sapiens
gaaagcagctgagatccagaggagtggaaggctcccccttgactaaagctagagtcccacgaactggctgggtat

SEQ ID NO: 746945 - DNA, 75 bp, Homo sapiens
acacgcataatggatgaaaggaaccgacaggtagttttggatgttgggtgtggaactggaattctctctatgttt

SEQ ID NO: 746946 - DNA, 100 bp, Homo sapiens
tcttatccaagccgttggatgtcttgaagaatttggggtaaagatcctgcctttgcaaggtttgtggtaaatatgccagctctagaacacatgaatcaga

SEQ ID NO: 746947 - DNA, 100 bp, Homo sapiens
agagagggaagagattcagccagcacactcctcgcgagcaagagtgaagacatttccacctggacacctgaccatgtgcctgccctgagcagcgaggccc

SEQ ID NO: 746948 - DNA, 101 bp, Homo sapiens
gactacaactcgcccaccacgtccagcttcaccacgcggctgcacaactgcaggaacaccgtcacgctgctggaggagttgccgaacaagcaaccggaaaa

SEQ ID NO: 746949 - DNA, 82 bp, Homo sapiens
gggctgaggcggccgcggggcccgagcgcagttggaatcgaagcctcttaaaatggcagatgacttggacttcgagacagga

SEQ ID NO: 746950 - DNA, 78 bp, Homo sapiens
gccgtcttcccctccatcgtggggcgccccaggcaccagggcgtcatggtgggcatgggccagaaggactcctacgtg

SEQ ID NO: 746951 - DNA, 74 bp, Homo sapiens
gacaggagttcatctacccggagaagcaggagccctactcggcaggaagaaatgttggctatttggcgatgaga

SEQ ID NO: 746952 - DNA, 73 bp, Homo sapiens
cctggtgcgcaaggccccgaacaacaggaatgggtaccacagaccatgtcatcgtcctggcgtccacgaaccg

SEQ ID NO: 746953 - DNA, 75 bp, Homo sapiens
ggaccggccggggaaacagtattttctggaagggcaattaccagctctggctgggtcgccacaacttgtttgacg

SEQ ID NO: 746954 - DNA, 82 bp, Homo sapiens
gaaaaataccacgacaaaaccaccctagcagcggaggaggaaatggcaggtcctaatcaactctgcattcgccgctggacta

SEQ ID NO: 746955 - DNA, 75 bp, Homo sapiens
gaagacatcaatggctgtccgaagaacagatcccaaatgggtaagcttgatgattaccaggaacgaatgaacaaa

SEQ ID NO: 746956 - DNA, 100 bp, Homo sapiens
cagcctcgtcagactcggagacgtctgacagtgacgatgagcagcccatcaataagggaggggtcaggactccagtacctccaagaggaagactctctgt

SEQ ID NO: 746957 - DNA, 75 bp, Homo sapiens
ggttaagctggctgtcctgaaatattataagttgccttgccaactaatacgacctcatcgagacctcggactgag

SEQ ID NO: 746958 - DNA, 97 bp, Homo sapiens
tttgggtttagcacgatgagctcaatcggcactgggggcgtctctggccgagcctctttttgtggaaaacgacagcagcagcagtggcctggaagac

SEQ ID NO: 746959 - DNA, 75 bp, Homo sapiens
ccgggaactgctgacgcttgatgagaaggacccacggcgtctgttcgaagctatgaccaccaaagattatccatc

SEQ ID NO: 746960 - DNA, 100 bp, Homo sapiens
agcagcttgaccgcatcgtgaaggaatctggaggaaagctgaccaggcggcttgtgaacagtcaggtgaactgtcacccctacaactcagcttgcaacca

SEQ ID NO: 746961 - DNA, 100 bp, Homo sapiens
atcgaaagcgttggagaggtgttaccggaacggcggcgacaagggtgttcccgaactagagtgggccaaggagcgggagctggaactgaagaacacctgg

SEQ ID NO: 746962 - DNA, 82 bp, Homo sapiens
ggagtctacggggatgctgttgaggaaatggactggagtgtggaatggacagcaaattatggatgaacctatgggagaggag

SEQ ID NO: 746963 - DNA, 100 bp, Homo sapiens
gtcgagggccgcctgctcgttcctgacagaatgtgggaccagggagattggatctgctctcaccaggatgtgcatgaggcacagaagcattgaagccaag

SEQ ID NO: 746964 - DNA, 80 bp, Homo sapiens
cccttttgcctcagatactattttgaagagtcctgaagtctggaggctagacttcctgaaagcaagtcaagaatatagag

SEQ ID NO: 746965 - DNA, 100 bp, Homo sapiens
tctggttatagatggacaagagacgatcattctgcaagcaggcaacctgaatacaggaccaaaagcacagctgatgttgcggtatccagatggaaaaagg

SEQ ID NO: 746966 - DNA, 100 bp, Homo sapiens
aagaatattttgcctgctggaacctgctgtatctactcaagagtggaagttttcacagctggatagaacttatactggcttgcagactcttggagcagag

SEQ ID NO: 746967 - DNA, 100 bp, Homo sapiens
gaattttgctgaaattatcgaagctgatgaagtacttctttttgagagagctacttttctgtttgcattgagactccttgcattccgccagatacacaaa

SEQ ID NO: 746968 - DNA, 106 bp, Homo sapiens
agagttccaggcctgcccacagacggtggtgcctcaaaacacctacccaggcatgtcgggccccaggcctgtggtgctgagcgggccttcgggagctgggaagagc

SEQ ID NO: 746969 - DNA, 83 bp, Homo sapiens
tgaagtcgcccgtgggggctgagcccgccgtctacccgtggccgctgccggtctacgtttggctcagaagaaggcggccccaa

SEQ ID NO: 746970 - DNA, 90 bp, Homo sapiens
cggccagcttcacgaagtcagagaggtgcccaagcaaggaaagaaataatgaagagacacatgtgttagctgcagccttttgaaacacgc

SEQ ID NO: 746971 - DNA, 83 bp, Homo sapiens
cgtcctctgaggcgacggccgcggctgcacagctgcagatctgggacacggccggccaggagcggttccgcaccatcacccag

SEQ ID NO: 746972 - DNA, 83 bp, Homo sapiens
catagtacctacagcagcactccaggtctcggcgcggaagatggccggcggcgtggacggccccatcgggatcccgttccccg

SEQ ID NO: 746973 - DNA, 75 bp, Homo sapiens
cctgaccatggctccctgcagtaccctttaacgttagttgaatccatggacatgaaacccacagatatagagggt

SEQ ID NO: 746974 - DNA, 89 bp, Homo sapiens
ctcagagtgtgaccaactggaaccctcaagaggaccgagacttaattcagtgcacaaatgagatgaatgtgaacatcccacagttggca

SEQ ID NO: 746975 - DNA, 100 bp, Homo sapiens
agcatgggcaggagctgtggatagtgaagagaggcctctcacatgctacctgtgcagaattgtcgagaacggtcaagaaagagtagaagttgaagaagat

SEQ ID NO: 746976 - DNA, 98 bp, Homo sapiens
aagccttttccgttgccggtgccggcctagcgtcctggaattacttcaatcaaatatacctgtgtttcccacaatcacagccactgtgacttttcagg

SEQ ID NO: 746977 - DNA, 80 bp, Homo sapiens
ggcgctgctggagttccgcgacaccatcttcgacaacatcctcaagatgccttcaattaagttgcagagttctgatggag

SEQ ID NO: 746978 - DNA, 101 bp, Homo sapiens
tttgttcgtctgctgagactcggctccaaggtcacagctcgtaacactggctttcatgagaaggacaagaagccatattgccgaaaggatttcttagccat

SEQ ID NO: 746979 - DNA, 76 bp, Homo sapiens
ttcttcttatggccagagccagaacaggtacagccaaagaccggagctttggagagatgaagtttaaacagtgtcc

SEQ ID NO: 746980 - DNA, 114 bp, Homo sapiens
cattccatctctcttcctttctcatgttttggctttggggctagggcactggtgaggtggattgatgatgaatcttctggcacacctggagcaactccagaacacagtcgtgag

SEQ ID NO: 746981 - DNA, 75 bp, Homo sapiens
gcaactctcagttcgagagtaaagctaaaaagtttgcagagacccaacctaaaaaggacacaccacggaaagaga

SEQ ID NO: 746982 - DNA, 75 bp, Homo sapiens
gtgagctggaaggtcttggagcgaagagctcggaccaagcgctcagaaagtgttgtgaagagcgaagacttttcg

SEQ ID NO: 746983 - DNA, 90 bp, Homo sapiens
cagaaccagatccgggagcacgtcatcgccatcgaagggaaatcctcattgacgattcaatttgttgaaggccaatttgtggactcctac

SEQ ID NO: 746984 - DNA, 90 bp, Homo sapiens
tggtggtaaccgcgaccgagacggcagtgcggcggaagcggtccaagaatgcctcaggatggatcagatgacgaggacgaggagtggccc

SEQ ID NO: 746985 - DNA, 98 bp, Homo sapiens
tggaagcaacttctatttagtgatcatggcccgtcaccaagaattgctgtcccagcagcaaaatttcattctggccacccagtcagctcaggccttct

SEQ ID NO: 746986 - DNA, 75 bp, Homo sapiens
gcaggccctgaccttcgccaagaagcacctgcagatctcccaggaggccctgtttgtgctcttcgtcctggccta

SEQ ID NO: 746987 - DNA, 100 bp, Homo sapiens
cagatgtatgtcacatattgcaaaaataagcctgattctactcagctgatattggaacatgcagggtcctattttgactagtcgtgaaaggtgccaaatt

SEQ ID NO: 746988 - DNA, 87 bp, Homo sapiens
ggagagttctgcatgttgattcaaaaactgtcttctcagattactctcctagaggctcagaatagaactggggaggcagacagagaa

SEQ ID NO: 746989 - DNA, 51 bp, Homo sapiens
ggagatatggcgcaactgcggcgcgaaggtgggagtcaatcattttgacaa

SEQ ID NO: 746990 - DNA, 100 bp, Homo sapiens
tacagcaagaaagaccatcaagtttaccaatgcttcaggactgccccaaggcccgcagggaggtggagctgcactggcgggcctcccagtgcccgcacat

SEQ ID NO: 746991 - DNA, 75 bp, Homo sapiens
cttttggaaaagttgtggagtgcatcgatcataaagcccaccttttgtggtgacattggatgaggtagagctgat

SEQ ID NO: 746992 - DNA, 96 bp, Homo sapiens
tctccacgctctgtctcctcaacctctacctggcggaggttcttaaatgttagaaaccacaggaatcagtaccaagctttgaagcctcgattgcca

SEQ ID NO: 746993 - DNA, 100 bp, Homo sapiens
agctgcgcgtcgccaaagtgacaggcggtgcggcctccaagctctctaagatcctcctgacaaggtgatccgggcgggccccgcaggaattttatcccct

SEQ ID NO: 746994 - DNA, 75 bp, Homo sapiens
gaaggtgacatttgataactggggaagactgttcagatagggatgaggaagaaatgaccaaacgagatgacaaaa

SEQ ID NO: 746995 - DNA, 74 bp, Homo sapiens
ggagaacggatcaagtgcttattacaggcatttgtctggccttcccttttactgctggctgggaaggaggagca

SEQ ID NO: 746996 - DNA, 73 bp, Homo sapiens
atcgctgatgtggtgttgctgcagaagctgcagactatagggtatgaccccatcatttccccagaggtctcgg

SEQ ID NO: 746997 - DNA, 89 bp, Homo sapiens
ggcaaacgagaattaaatgccgagaaggccagtacgttccagggccctgcgaaccagaagacctcatcgacgggatcatctttgctgcc

SEQ ID NO: 746998 - DNA, 101 bp, Homo sapiens
ggcctggtgtgtgtgtcattgcagtgtatgaacccagggcactgtggggacagggcgacgtgtgtccaggcgtttgccgacggagtcttgctgtgtcgccc

SEQ ID NO: 746999 - DNA, 83 bp, Homo sapiens
attggaaaaggcagctttggcaaggtggtgccaccaccacaacagaatgatcttgagattcctgaaagtcctacctatgaaaa

SEQ ID NO: 747000 - DNA, 100 bp, Homo sapiens
cagtggagcgcgccaagcaggtcaccatgacggagctgaacgccatcatcgggggggatatgagactttctactcggaatatcctgagtgttgcgtggat

SEQ ID NO: 747001 - DNA, 100 bp, Homo sapiens
ggatcgaaatgtccatgagaaaaagcttggagataaagttgctttttactggtgatggaatatgagaataggattcgagcctactccacgccagacaaaa

SEQ ID NO: 747002 - DNA, 75 bp, Homo sapiens
cgggaaggaagatccggcgcggggcacaggatccggagctggagcccccaggtcaaaatgcagatcttcgtgaaa

SEQ ID NO: 747003 - DNA, 98 bp, Homo sapiens
tggcaagattcttctgaattgtgctgccttggccaaaagaggttgaaatcacaaagattagacacctttttagataggtgttcttcagcaccactgac

SEQ ID NO: 747004 - DNA, 74 bp, Homo sapiens
catacagtgtcagaacaaaggctgggatgggtatgatgtacaggaccctgatgctcccataagacagaaaatgc

SEQ ID NO: 747005 - DNA, 100 bp, Homo sapiens
ggcaaggaaatcctccgcccatttatgttgggtcttctccaactctgaaggcaaggcatctttacatatgtgattatcataaaaacttaattcagagtgt

SEQ ID NO: 747006 - DNA, 75 bp, Homo sapiens
acttcgccgactttgagaaaatctttgtcaagatcagcaacactatttctgctaaacctattcgtcccgggcaac

SEQ ID NO: 747007 - DNA, 50 bp, Homo sapiens
aagaactggcgtcacgtttacaaggtgagaagccctaccactgcaactgg

SEQ ID NO: 747008 - DNA, 100 bp, Homo sapiens
tggcaactgtatgatagaagctatataaagtcaagtgtccattttctttcaactatatttgagcatacccaggtaaatgaaacccagttttgtgttaata

SEQ ID NO: 747009 - DNA, 98 bp, Homo sapiens
tccacacgggcctccgaagagctgccgcgacgcccggcccgcagggcagtgaaagatgcagatgtactttgtatggacatacagattctgtgaacagc

SEQ ID NO: 747010 - DNA, 75 bp, Homo sapiens
gaaggcggcgcgggaggtgaagttgctgctgttgggtgccccctgataagtgccgatgtgccgtgggcagcatcc

SEQ ID NO: 747011 - DNA, 90 bp, Homo sapiens
gtctcccgaatcctcaagtccttcaactacccctcggccagcctcatctgcgccaaggctgagtagttcactgacttgaagtatactcag

SEQ ID NO: 747012 - DNA, 99 bp, Homo sapiens
ttgtttgtcaccacaaaaaggacagtgttcctgacaggcagcgatcggattcccatctacggcatggccagtctgcagattgtcatccagtccacagcc

SEQ ID NO: 747013 - DNA, 75 bp, Homo sapiens
caggcccagaacggagccgccttggcctcggggtctccctacaccaacggatccccaggtgattcttatcagaag

SEQ ID NO: 747014 - DNA, 83 bp, Homo sapiens
cttcggcagtccacccaccgccgccgcctcccaggtttactcctggcttgggggcattaggaagcactggaggctcttcggga

SEQ ID NO: 747015 - DNA, 75 bp, Homo sapiens
cttggaacacgtggtatggcgagcaggaccaagctggtgaatatgcaggttttgatgagacgcagccaacagctg

SEQ ID NO: 747016 - DNA, 50 bp, Homo sapiens
cagaggaactcagccctgattgcgagggccatatcattcgagggagcaga

SEQ ID NO: 747017 - DNA, 82 bp, Homo sapiens
atctctgcaaactcaacttgctgggccggtgcaactattcgcagtccgagcgacatgggaaagcggaaccaccaaaaggagt

SEQ ID NO: 747018 - DNA, 100 bp, Homo sapiens
cacagctgctgatacctgcatcatatttgattctgactggaacccacaaaatgacttgcagcaggatcaggcaaaaatgatcatgccgaaaaagtggcgg

SEQ ID NO: 747019 - DNA, 51 bp, Homo sapiens
gggacaacgataccaccccgaatggaggttcaagatgtgagagggtcagac

SEQ ID NO: 747020 - DNA, 106 bp, Homo sapiens
caaacttggtgtcttttctacaaactctgtgcctcaacaaccatttctaagtgccatcccaatggaaattgcttcgacaggaactgttgaagtacctggaatactt

SEQ ID NO: 747021 - DNA, 82 bp, Homo sapiens
gctttcacgaaggcaccgacgtcatcatgctgaccaccaatcagatccgtaagctacgagttccagggagctctgtcctggt

SEQ ID NO: 747022 - DNA, 96 bp, Homo sapiens
cgaagccaccagctcccgggacccgctcagcgatactgattcttgctattccaaatcctcttccacgttgacagcccttcagatatttcaacactc

SEQ ID NO: 747023 - DNA, 74 bp, Homo sapiens
gactcttttacactcaactaattggcatcatcacagggtgctacatccattgtgtacagatgcaaacagaaggg

SEQ ID NO: 747024 - DNA, 83 bp, Homo sapiens
agactcagaatcgaatctcttctccctccccttcttggtcatcatcagatttgaaatatttaaagtggatacaaaactatttc

SEQ ID NO: 747025 - DNA, 78 bp, Homo sapiens
ccatctttgctcctccctgcaactaactccattcttaattgagaagaagctggaggagttctccgtggaagaggccga

SEQ ID NO: 747026 - DNA, 51 bp, Homo sapiens
tattgagtacattgaagccacaggtagctacagcaagctgggtagcaggca

SEQ ID NO: 747027 - DNA, 100 bp, Homo sapiens
aagggccttgacgatctggacgccgatgccgatgatggctgggcagcactattcctgatcagagaactccagttgcttcaacacacagtatcagtagtgc

SEQ ID NO: 747028 - DNA, 100 bp, Homo sapiens
ctgaaagctgagctaggaattcccttggaagagaatgattgaagatagtgggaaaagaggaaataccatggcagaaagaagacagctgtttgcagagatg

SEQ ID NO: 747029 - DNA, 98 bp, Homo sapiens
tatccaccccagcagcagcagtacccagggcagcaaggttacccaggacagcagcagggctacggcacttctgtctcctgctgccatgtgaagaagaa

SEQ ID NO: 747030 - DNA, 75 bp, Homo sapiens
agtttcaagatcctggaccgtgtcaccatccaggaactcacagatcccaagtgtccttcaagatatcactgtact

SEQ ID NO: 747031 - DNA, 100 bp, Homo sapiens
ccaccttctatgggttaaggcaacagggtttctccaaagaaattaaaatacctaaaaccaaatatgttggctatatcaaggattatgaaggagccacttt

SEQ ID NO: 747032 - DNA, 136 bp, Homo sapiens
tcaccgaagtgacgttttagaaacagtggtcctgatcaacccttctgatgaagcagtcagcaccgagcaaaccaagatggagtatgagtggaaacctgacgagcaagggcttcagcaaatcctgcagctgttgaag

SEQ ID NO: 747033 - DNA, 51 bp, Homo sapiens
gcgatcgggagacagccgggcgctgcaagctctcactctctggctgaatgt

SEQ ID NO: 747034 - DNA, 98 bp, Homo sapiens
ccaaagccagcctggcatactttgaagatcgtcatggggttatatcttaagtgtggtgctgctaacattgcccaggcagcatctggttcagctttatc

SEQ ID NO: 747035 - DNA, 100 bp, Homo sapiens
tgaggatggagtccaagactgagaaatggatggaacgaatacacctcaatgtctctggtactggtgtggcatactcggacagagaagcccaagatgaagc

SEQ ID NO: 747036 - DNA, 75 bp, Homo sapiens
gtggagaaagtcgtcttccacttgcacgaaagctttcctaggccaaaaagaggtttgggccccatggtatccctg

SEQ ID NO: 747037 - DNA, 74 bp, Homo sapiens
ctcagctggtggtgattgcacacgacgtggatcccatcgagggttatgtggtccgaatcagtggtgggaacgac

SEQ ID NO: 747038 - DNA, 100 bp, Homo sapiens
tatatactttggttacctatgtacctgttaccactttcaaaaacattccatacaccaagcttgggtgatgaggaatttgaaatcccacctatctccttgg

SEQ ID NO: 747039 - DNA, 83 bp, Homo sapiens
ctttggatcctggtggctatttcattattaatggatcagaaaagaatgaagatgttcgaccacacatcagagacagatttcgc

SEQ ID NO: 747040 - DNA, 96 bp, Homo sapiens
gaaggctattacagccagagtcaaggttctttttcagcaaacccctgcggatcctcaacatcctcctgctgctggagggcgctgtcattgtctatc

SEQ ID NO: 747041 - DNA, 100 bp, Homo sapiens
cgacgcggggcgggccctgggggtcctcagcgtggtctgcctgctgcactgctttgattctgcttctcagaagatgcactattatagatactctaacgcc

SEQ ID NO: 747042 - DNA, 75 bp, Homo sapiens
acctactaacctcactgtcctacaaaggcacttttccaaacacaggagccaggatcatgctgtttactggaggtc

SEQ ID NO: 747043 - DNA, 90 bp, Homo sapiens
cctcctcctgaaagtggccgggtttaatctgctcatgacgctgcggctgtggtccagctgagcctaaattatacagatctgtgattgaag

SEQ ID NO: 747044 - DNA, 83 bp, Homo sapiens
gacaatggggacccgggacgacgagtacgactacctattcaaaggtggaggtggaggaagcgtccctgggatcgagaggatgg

SEQ ID NO: 747045 - DNA, 95 bp, Homo sapiens
ctttcctggatctgaggatgtgaaacttaaatttgaagagagtcttcctaatattctcaccgatgatcgatttaaagttatgtttgagaaccctg

SEQ ID NO: 747046 - DNA, 100 bp, Homo sapiens
atttctaaaatcgccagcaatggctggtcacagtggctcacatctctaattccagcactttgggaggccaaggcaagaggatcacttgagccgaggattt

SEQ ID NO: 747047 - DNA, 99 bp, Homo sapiens
gggagatccacagctaagacaccgggacctcctggaagccaaaaatgatgcagtacacgttcatctaccaagccttactcgagtactacctctacgggg

SEQ ID NO: 747048 - DNA, 90 bp, Homo sapiens
gcgcgaccacgaaggccgctactccgaggcggtgttttattacaagattttccatctttgaccagaaatttgccaagccaagagttaccc

SEQ ID NO: 747049 - DNA, 97 bp, Homo sapiens
tccgaggtattcaagctctccagcttactctgcaagttctccccggacggcaagtacctggtgatggcatcagctgagaagggaaggaagcccatgt

SEQ ID NO: 747050 - DNA, 100 bp, Homo sapiens
aaaagaagtttgacattcagaaacttatcaagaggttctactctttggatagagaccaaaatcatactttgaagccctgggcagtgacggggttcgggtg

SEQ ID NO: 747051 - DNA, 90 bp, Homo sapiens
tctgcacttaccttggaagccaatatatcttcacagaaatggcctcggtgaaagaactcttttcttctttgggagtcgaatgtaatgtct

SEQ ID NO: 747052 - DNA, 75 bp, Homo sapiens
gacattcagagtcttgaaacagcaatcaaaaggactgaagtggggttaagagtctgttgcggttctcccactttt

SEQ ID NO: 747053 - DNA, 78 bp, Homo sapiens
cctaagctatcactggacatatcaaggacttcactaaattagcaggcagttgcagtggtgcagaatggctgacctcag

SEQ ID NO: 747054 - DNA, 73 bp, Homo sapiens
cttgccttaccagatggcgcacacaactaccaggaagattcctgacattcagacaactgacttgtaactgact

SEQ ID NO: 747055 - DNA, 74 bp, Homo sapiens
ctggccgacatcgcggccttcttccgatccgaagctgcacacatacatgtaagagaagcaaaaatgtcagatga

SEQ ID NO: 747056 - DNA, 108 bp, Homo sapiens
cgcggattcgccgaggcaccgaggcactcagaggaggttctgggccggagaaggggcgacgttcgggcaccccccgaatggacaatctttccttctgtcaacggcagg

SEQ ID NO: 747057 - DNA, 99 bp, Homo sapiens
agatcaagagcaagaagttccgctgctcaggtacattgaacggaaagccttccttgaccgagtggatcacaggcagtttgaaattgagcgagatctcag

SEQ ID NO: 747058 - DNA, 74 bp, Homo sapiens
tgaagacgacttcgaccctgcccagcacgaccagctcatgcagtagagatggtttcagcatgttggccagtctg

SEQ ID NO: 747059 - DNA, 74 bp, Homo sapiens
tgttgatgaagatgaaagagactgcaggcacagatagatcattatctaggacttgcaaataagaatgttaaaga

SEQ ID NO: 747060 - DNA, 82 bp, Homo sapiens
tcaaacaagacaacttgagctgaaagcgaaaaactatgctgaccagaatgaagactggcccatttgcagagcactccaacca

SEQ ID NO: 747061 - DNA, 82 bp, Homo sapiens
agctggcaccatcattgcccgccagggagaccagacctggaatcatttttctgataatgaggcagagcgggttaaaatgatg

SEQ ID NO: 747062 - DNA, 83 bp, Homo sapiens
accagctggtgctgcgcggcgcaggtctcggcgcggaagatggccggcggcgtggacggccccatcgggatcccgttccccga

SEQ ID NO: 747063 - DNA, 75 bp, Homo sapiens
catgcagattatatcgcatcctatggctcaaagaaagatgattatgttacttttcacatagaaccatatagcaat

SEQ ID NO: 747064 - DNA, 74 bp, Homo sapiens
atgggctgaagctggggtctggaccttagtgaagtcaccctgctgagaaatgaagtggcacagctgaaacagct

SEQ ID NO: 747065 - DNA, 89 bp, Homo sapiens
tgagaaaacaccgaagggacattctgtcttcatggacatttttgaacttgtggcatggctttgggaagaagacaagaatttgagatctg

SEQ ID NO: 747066 - DNA, 74 bp, Homo sapiens
tgaggcctccccagccatgcagaactgtatgttgaagaaagtacgcacatcttatcttctgaacattttgatgg

SEQ ID NO: 747067 - DNA, 100 bp, Homo sapiens
gctgtttctcaagaaaccatcagaaacacaggagctagtccagcaggtcttgagtttggcaacacaggaaaaaggtcactggtcagaacagcaagaagaa

SEQ ID NO: 747068 - DNA, 100 bp, Homo sapiens
agcgggaaccacctccagtaaaacagcttgagattaagaaccatgtattcttcagccccataaactgggatgacctgtaccacaagaggctaactccacc

SEQ ID NO: 747069 - DNA, 83 bp, Homo sapiens
tctagaaatgaatgtttccatctcttcagagatgaaccagtaatctatgccagcaattatgacaatgttagcagaccatgcag

SEQ ID NO: 747070 - DNA, 90 bp, Homo sapiens
ggcgtggagagggagtgatgtcttccagactcggtgctgtacccgccagccccccaagatgaacccagtggtggagccactgtcctggat

SEQ ID NO: 747071 - DNA, 100 bp, Homo sapiens
ttgaactgggcacagcatgcggaaaatactacagagtgtgcacactggctatcattgatccagcttcagctttagctgcagctgcctctgttcagccact

SEQ ID NO: 747072 - DNA, 98 bp, Homo sapiens
atgttggcggtccctgtgacctgtggagacacggccagatctgccctccagacgtagacaagtttggcaacgagatcacccagctggcccggcccctg

SEQ ID NO: 747073 - DNA, 90 bp, Homo sapiens
gccacttccgccccaggtacgctaggccgcggccttcgttcctcccagaaagttggctagagatttactacatccgtccttggaagagga

SEQ ID NO: 747074 - DNA, 100 bp, Homo sapiens
gtccagatggacagagttgatcaggccgccgctgcccagcagatcccgatctcccttcacacatctctgcaggcacaagctcagcttggactgaggggtg

SEQ ID NO: 747075 - DNA, 74 bp, Homo sapiens
gaaatctgttctacaggaagatgctgagaaactgcggaaagaattgcatgaagctccgctctgcattggataaa

SEQ ID NO: 747076 - DNA, 98 bp, Homo sapiens
ggactatgggcgaatagctctgaccacccggcgaagtatcaagtggggcagctgtattctgtggctgaggccagtaaaaatgaaacgggtggtggcga

SEQ ID NO: 747077 - DNA, 50 bp, Homo sapiens
atgacaaacaaccagctcttcaggaaaatgtttataggaggccttagctg

SEQ ID NO: 747078 - DNA, 101 bp, Homo sapiens
aggaagaagaccaaggcccaccatgccccagccatcatcgtctacagactgccgtggacctggaaatgcagcaagctcctgatgaaatccatccatgcagg

SEQ ID NO: 747079 - DNA, 100 bp, Homo sapiens
gccgatccagcctgcggagcctgtggggcagctgtgtaaatgagtatggaagattatgatttcctgttcaaaattgttttaattggcaacgctggtgtgg

SEQ ID NO: 747080 - DNA, 75 bp, Homo sapiens
tcataggattagatgatccaagtcaccaagaaattactgtctcaagtgatacgttgatttggagcatatgcgaac

SEQ ID NO: 747081 - DNA, 50 bp, Homo sapiens
ggatctcggctgtccttcctcccgacagattatgagggacaagccaagaa

SEQ ID NO: 747082 - DNA, 100 bp, Homo sapiens
tcaaatgatcttctaggagatttgtttggcgtgccaagcttctctgtgaaagagcacagtcctggtcagctgagtggaaatagaaggatttctgctgcca

SEQ ID NO: 747083 - DNA, 100 bp, Homo sapiens
cagctcttgacccggctggtattgtctctacagccaattcctctgaagtcagcaacagcaaagggaaggatcgaatcatatttgtaaccaaagaagatca

SEQ ID NO: 747084 - DNA, 98 bp, Homo sapiens
gggctttatccctcttgtgatttacctgggttgttatggagttgatggagagagtgactctattatgagttcagcttctgaaaactccactgaacctt

SEQ ID NO: 747085 - DNA, 100 bp, Homo sapiens
agttgagagacagaggcaccccggacagagacgtgaagcactgaattctctggctgatgaacttgctcttgtggatgttttggaagataagcttaaagga

SEQ ID NO: 747086 - DNA, 73 bp, Homo sapiens
cctcccgaatagctgggactacaggctgcagccacaggtccgcacggaaaaccaggagctccaagactgccgc

SEQ ID NO: 747087 - DNA, 50 bp, Homo sapiens
gcgaggtccgcgcagcccagcgcagccatttttcagatgcttcaagtgtt

SEQ ID NO: 747088 - DNA, 76 bp, Homo sapiens
tgtatctctaattggaagcagtaccatcaagtcttcagccacattgtttctctagaagggcaagaaatacaagtaa

SEQ ID NO: 747089 - DNA, 100 bp, Homo sapiens
aaaagaggcgaaaggaagcaagcagttcagaagagccaaggaataaacatgcaatgaacccaaaagggctgcctctaagaatcaaacttcactcttggga

SEQ ID NO: 747090 - DNA, 100 bp, Homo sapiens
ttcccgcgccccgcagcgccccgcagagcagtcgagtgctgcttttgacacaaaaacggggttacgtgtggcagtgaagaagctctccagaccatttcag

SEQ ID NO: 747091 - DNA, 83 bp, Homo sapiens
tggtgtaccaggcgaagctggccgagcaggctgagcgatacgacggttgtgaactaaaggccgacaaagattatcactttaag

SEQ ID NO: 747092 - DNA, 83 bp, Homo sapiens
gaaatgcacaagctggagcccaactgataatccttgaacatggaactcaacagaggcaattattatcccgactgcaaatcgac

SEQ ID NO: 747093 - DNA, 75 bp, Homo sapiens
gggaagtgcctagtcaagtacgcaggccacgtgggctcagcaatcagccatgactgcctttgcactgtccatgct

SEQ ID NO: 747094 - DNA, 100 bp, Homo sapiens
tccttttcgaccttcaatccagttccaaggactccacgggctttcggaaaatgtgattgatcgaatgaaggaatcctctccatctggttcgaagtctcag

SEQ ID NO: 747095 - DNA, 50 bp, Homo sapiens
gcttgtgaactctgtccagaggaggaagaggagttgtacgcatgtcagag

SEQ ID NO: 747096 - DNA, 80 bp, Homo sapiens
atcagccattcctagagagaggcgatgggcctattggacaagggtgtacagccccccagagtggatctctcgacaccagt

SEQ ID NO: 747097 - DNA, 100 bp, Homo sapiens
tccaatcctctgcttccaggacaagtcctgcgcttggggatcctctgtacgcccgttcactggtcaaagttggaaattgtaatactcctaaaccaagctt

SEQ ID NO: 747098 - DNA, 122 bp, Homo sapiens
gactgcgtgctgaaggtgctgggcacgatgcacctggaagtccagtatgaaggtcatgttgatgctgggaaaagtactctgatgggccatatgctttatcttctgggtaatataaacaaaag

SEQ ID NO: 747099 - DNA, 90 bp, Homo sapiens
caagaagcaaaaaagggactgctaagaagataccaccaggccagacggttttgctgtctcagcctactgtggtacaacttcaagcacctg

SEQ ID NO: 747100 - DNA, 100 bp, Homo sapiens
cagatattatgaatacaaccatgatctcttccaaagaatgccacagaatcaggggaggcatgcttcaggtgctatacttggtagatcagaaactcaggag

SEQ ID NO: 747101 - DNA, 75 bp, Homo sapiens
ggagaagcacccacaaaactagcatcctcctggaggagctcggagttttgcggcctccaggtggtggatccaatt

SEQ ID NO: 747102 - DNA, 100 bp, Homo sapiens
agcactttgggtttcatttgtaaaggagccggagccccagctggaaggggtctgtgtacatcagcaactttcaaacccattttatttggagaaaatgtac

SEQ ID NO: 747103 - DNA, 101 bp, Homo sapiens
tgcgttacaagctttgtctccttcgacttggagtctttgtccaggacggatttttagactctgaggagcagttggagctaatccacattatggaaatggaa

SEQ ID NO: 747104 - DNA, 101 bp, Homo sapiens
cgagcgaggcagctctgagccgcgcggttcgccatcggtggtgtgaactcattgttaagcacaagttcacgaaagcctacaaaagtgtggagaggttcctt

SEQ ID NO: 747105 - DNA, 75 bp, Homo sapiens
ggcgactgggggctgaagagcgcgccgccctctcgtcccactttccagatctcttccgttccctgctggcagttc

SEQ ID NO: 747106 - DNA, 74 bp, Homo sapiens
ctaatattcccattggaaataagaaagtgctcaagtaaagctctttgtgacagggcttttcagcttaaatcaag

SEQ ID NO: 747107 - DNA, 82 bp, Homo sapiens
tggacttttgcttcatgtgtcctggaaactgggctgggtagagatcaacagcagttcaaggaagccagcagacctgcagaac

SEQ ID NO: 747108 - DNA, 50 bp, Homo sapiens
tgtgggctggtgtgtggaactggatcttaagattgaaagtgatgttcaag

SEQ ID NO: 747109 - DNA, 82 bp, Homo sapiens
ccctcagctggagcactggaagtgggggctctgccgcttctctccctctccgaaggaagaggcccagcagaagggactcgct

SEQ ID NO: 747110 - DNA, 75 bp, Homo sapiens
cctgttgcgatggcgcagaaaccccgttgacaaggcactgctttttcatgacggaagaagaatttggacttgatg

SEQ ID NO: 747111 - DNA, 74 bp, Homo sapiens
ttaatcctcaatttaagcctgatctaacccctagaaacagctgtatcttcagtggtgtgatgaagctacagtag

SEQ ID NO: 747112 - DNA, 80 bp, Homo sapiens
tgagcctgttggaggaactggcccggaaacaggaggacttccagggtctccctccactgctgtagtaacccgggtccggg

SEQ ID NO: 747113 - DNA, 75 bp, Homo sapiens
atcctctgtacgcccgttcactgggccctagtggaatggcatcccaggggtgcccttctgcctccagagctgaga

SEQ ID NO: 747114 - DNA, 118 bp, Homo sapiens
gggagtcccaacgccgctgtcctctggctctggtctagccacaacagggtcaatgctcgccttgcagagattccccagtgcgctggctgcaaccagcacatcctggacaagttcatcc

SEQ ID NO: 747115 - DNA, 83 bp, Homo sapiens
accagtccctggggattccttaccacattgtgaatattgtctcaggctttatcctgtggataaacgcagagtgaacgagtttg

SEQ ID NO: 747116 - DNA, 83 bp, Homo sapiens
ggcgaacggggcgagcctggaggattgtcactccaacctcttttcgctggattttttatcaagcagaaatgcatcgaacaacg

SEQ ID NO: 747117 - DNA, 75 bp, Homo sapiens
ggaagaaattgatattttgatgaacaatattgaacgctatcttaagaacaatccatttcacagatgaagaaacag

SEQ ID NO: 747118 - DNA, 83 bp, Homo sapiens
cccagcccatcctctctaaccaagccccatggctgggggttatggagtgatgggtgacgatggttctattgattatactgttc

SEQ ID NO: 747119 - DNA, 100 bp, Homo sapiens
cacatggtgtgggccgacatcaagagctgcgagatccaacagggagtctgaagatacagtattgctcgtcctcaaagagatctaccaaacccagggtatc

SEQ ID NO: 747120 - DNA, 75 bp, Homo sapiens
ggcccaagtccttggctgctgagtggtgacagtagcccagcccgccggccaggaggagacatcacagctttccca

SEQ ID NO: 747121 - DNA, 100 bp, Homo sapiens
gaaaacatgtactacagccagtcttctatgtttccacatcggtcagaaaaagattgcattccactcttcgttcaacttgttttggagagattaactcgag

SEQ ID NO: 747122 - DNA, 100 bp, Homo sapiens
tatacccagtaaaggagaaagcccaccacacacgttctgcaaagtcgacaagaatctcaataacagtatgccagatgacgtgtactactgtggaataaag

SEQ ID NO: 747123 - DNA, 100 bp, Homo sapiens
gtcaacatgcatgcttctgtcaaaaacaaggttctggaaacaactgggcatatggagaaagtctgtgattgctgtgagcttcatagcagcgttccttttc

SEQ ID NO: 747124 - DNA, 75 bp, Homo sapiens
cccagtcctcggtgcggcgcggccagagcatggatcattttgatgacattggtcccagtgttgtaatggcctccc

SEQ ID NO: 747125 - DNA, 100 bp, Homo sapiens
tgacgactgtgcaggaagaaaacgagccagtgatttacaatagagcaagaatggcttcctttgggtggaagaggaaaattggtgagaaggtctcaaaggt

SEQ ID NO: 747126 - DNA, 100 bp, Homo sapiens
gaaagtccatatggtgtccgagtcaactgcggctagccttgatgtaccgaatgcaggttgcaaatattgacaagtttgaagagaagcttcgagcagctga

SEQ ID NO: 747127 - DNA, 139 bp, Homo sapiens
aagatggcgctggccggatggaaatcctaatgacagtctccaaattcgcctccatctgtaccatggtacgtcagcctgtcatatgcatcaacaaccatgtattttgttcgatttgtattgatttgtggttgaagaataa

SEQ ID NO: 747128 - DNA, 82 bp, Homo sapiens
ccctgagccctgggacctctgaagtgaacactgcagggccatttggaattgaatgatctggcacgggaccctccagcacagt

SEQ ID NO: 747129 - DNA, 74 bp, Homo sapiens
cacgcttagcggcttctcctcagcccacatgggcagtcacgccaaatgaccctgtgactaacatctgtcaggca

SEQ ID NO: 747130 - DNA, 75 bp, Homo sapiens
gcagtcgcgcggagcccggcttccgacgtgcagcctggcagtgcagtggagcagcctcagaacaaagtgagacag

SEQ ID NO: 747131 - DNA, 98 bp, Homo sapiens
caaccagactggcttccccaataagcacagccgcttcaacgtctactgcttccgagtttgtcccgctggctggaagcctggcagtgacacgattaagc

SEQ ID NO: 747132 - DNA, 101 bp, Homo sapiens
tgaagacgcacggtgccaggaccaagtatctgctgctggagccagttctgcttctcggcaaggagcgatttgctggtgtagacatccgtgtccgtgtaaag

SEQ ID NO: 747133 - DNA, 75 bp, Homo sapiens
ctgaaaagtcgcagcgagctggagccgccggagagctccctctttgcccactagcagggcattagctggtgctga

SEQ ID NO: 747134 - DNA, 80 bp, Homo sapiens
cgcgcccagagccccgcgtttcagccctagggaagcctctgcagtccttgtccctggctgactcgaaactcaagactgag

SEQ ID NO: 747135 - DNA, 98 bp, Homo sapiens
atgcagttctccatcgtgccaatttggtgttgtactgcgaggcattcctgaccacctacaggaccttcatctccccagaggagctcatcaagaagctg

SEQ ID NO: 747136 - DNA, 73 bp, Homo sapiens
tctgacacgtattgtctcaagattaaagaagaagcctgggaagtttataaacagataaagacgcaacatgaaa

SEQ ID NO: 747137 - DNA, 90 bp, Homo sapiens
cttcctccaaaagggagcatcagccagctggaccctggaggaactgagcaaggcggtgaagatgcccgtggcgctgctgcggcggcggat

SEQ ID NO: 747138 - DNA, 83 bp, Homo sapiens
cgcccgccccccaccgccgccccctccggcgtgttcatgcccccggggaagctcttcgtgggcggtcttgactggagcacgac

SEQ ID NO: 747139 - DNA, 90 bp, Homo sapiens
tgatcatggaaagccagtgaagaatgcattagatttaaagtttgatatggaacaactgaaggtgaatgaaaactttgccattgatttgat

SEQ ID NO: 747140 - DNA, 75 bp, Homo sapiens
aattataaagaagctgaagctaaacttctggagtttcagaagagccttgaaacgtctgatagccactactcgagc

SEQ ID NO: 747141 - DNA, 129 bp, Homo sapiens
ccccatgatccccctgggcctgaaggagaccaaggagctggactggtctacaccgctgaagcacgtatctcccatgcgccaagtggagcccccagccaagaagccagccacaccagcagaggatgacga

SEQ ID NO: 747142 - DNA, 75 bp, Homo sapiens
gtcggactcccgcggcgggaggagcctgttcccctgagggccctcatctttgtgtcccatggagccggagagcac

SEQ ID NO: 747143 - DNA, 100 bp, Homo sapiens
cgctgattcagtacaccagcaatgctgaggatgccaacttcacgctcagagacagctgcaccgacttggagctctttgctatcatggtgaacttacttca

SEQ ID NO: 747144 - DNA, 99 bp, Homo sapiens
cccaaacctgtaaaaccagtgacgttttccacaggcatcaaaatgcttcttgctgctgacagttgctctcctggcttcttactcagtccatcttctgct

SEQ ID NO: 747145 - DNA, 90 bp, Homo sapiens
ggaagtgcagctgcctcagttcttagcgcagtatgttggtgagagtgaacgtgctgtgcgacaagtttttcaacgagccaagaactcagc

SEQ ID NO: 747146 - DNA, 100 bp, Homo sapiens
aaacttcactttcttcattcacaatcccaagcgccaggaccttgaagttgagcccacttcgatgtgttgttcttgtcgcacttagggacatcaatcaagg

SEQ ID NO: 747147 - DNA, 95 bp, Homo sapiens
cgattattagctttagtgaaatgggctaataatgctggcaaagtggaaaaatgtgcgttgggcaagacctgaagctcacagcatgcacatgagga

SEQ ID NO: 747148 - DNA, 100 bp, Homo sapiens
ggagcttgcaagcctggctatgcttcagccttgatgacggccatcttcccccgctagaatgggtactaggaaaaaagttcatgcatttgtccgtgtcaaa

SEQ ID NO: 747149 - DNA, 101 bp, Homo sapiens
gctcagagcaaggatgcgtgaaattgtccatattcagattggccagtgtggcaaccagatcggagccaagcaggttcctgctccagcgtggctcctggact

SEQ ID NO: 747150 - DNA, 100 bp, Homo sapiens
catcaccctccttgcagcctcccccagaaagcaatgataattcccaggacagtcagtctggtactaacaatgcagggcaggagcgatttggcaacatgac

SEQ ID NO: 747151 - DNA, 93 bp, Homo sapiens
cgccgctctagcggccgggactctgaactatggcgttcttggccaggctgactgagagatttgtgctgggagtggatatgttcgtggagacac

SEQ ID NO: 747152 - DNA, 148 bp, Homo sapiens
gtgcgggcggaggccggcccccgagagccgccgacatgaagaaagacgtgcggatcctgctggtgggagaacttcaaatcctgtgctcaagaatatgtggcctgaaggcaaactgagcattacagaggtgaccaagcgacctctgact

SEQ ID NO: 747153 - DNA, 75 bp, Homo sapiens
tgagcctcaagtgcttctgcattacattgaaatggatgcagtcagaactgaatgttgaagaagtggtaaatgaca

SEQ ID NO: 747154 - DNA, 90 bp, Homo sapiens
gaaatggcagacgatctcggagacgagtggtgggagaaccagccgactggagcaggcagcagcccaggtcgctcctgtggttggtccagc

SEQ ID NO: 747155 - DNA, 100 bp, Homo sapiens
gtaagctcatcgacaaacaactccaggacgaaaagatgggctacatgtgtacgcaccgcctgctgcttctagtcttcccgaggctgctgtccatgacact

SEQ ID NO: 747156 - DNA, 100 bp, Homo sapiens
cgtgtttctgtccaagccccagaaagcggccctggagtacctggaggatatagacctgaaaacactggagaagggcaccgaccgtcacgagctaacttcc

SEQ ID NO: 747157 - DNA, 90 bp, Homo sapiens
gccggagtgagaagcaagaaggccctggacacagcaatatctctgggctttcacagggatgaattgtaaaagcaacatcagcttgaccag

SEQ ID NO: 747158 - DNA, 100 bp, Homo sapiens
aggggggggtaccacacaacaccccagcaaacctccgggcccccaggcatggctagctcggtaaaaagatggcctatcagaaggtccatgcagatcaaag

SEQ ID NO: 747159 - DNA, 98 bp, Homo sapiens
tggtttggaaggagacaaaatcctcaccactagtccatcagatttctttaaaagccatagttatagagctggcggtcaccatggcaatgcgggagctg

SEQ ID NO: 747160 - DNA, 103 bp, Homo sapiens
tgggagacaagcccgcgcccaacaccttctatgtaggagtacgagagggcctccaaagtggaccagtttgtgacgcgcttcctgctgcgggagacggtgagcc

SEQ ID NO: 747161 - DNA, 82 bp, Homo sapiens
agggaaccctggtcaccgtctcctcaggccagaagccaaggagtcctcagtgacggtgggatccacaacatctccacatcgc

SEQ ID NO: 747162 - DNA, 101 bp, Homo sapiens
ttcttactaaggacgagctgatcaagtatatgactgaagaaggaacatcatttacagcgagcaatttcagcacagcaagtgtttagagaaaaaaaagagag

SEQ ID NO: 747163 - DNA, 100 bp, Homo sapiens
ctgttcaaaaattggcctccgaccacaaagacatccacagcagtgtttctcgggttggaaaagccattgataagggaagcagtttaagtgcacggtgtgt

SEQ ID NO: 747164 - DNA, 100 bp, Homo sapiens
gccggtctctctaaatatgccccaggctgtattcatcaccaaagaaaaaacttacaccaatgcagaaatcggttagtccattagtttggtgcaggcaagt

SEQ ID NO: 747165 - DNA, 96 bp, Homo sapiens
tcacttggaggatggtgaaccctactgtgagactgctgtggatttctttaaccagatcaacatgttatatggaactattacagaattctgcactga

SEQ ID NO: 747166 - DNA, 75 bp, Homo sapiens
aattgtcgaggacaaaaagagtggcaggagttctgatataacctcaggaaagtgatgaagcattgggcccaacaa

SEQ ID NO: 747167 - DNA, 75 bp, Homo sapiens
accctgtacagctctaaaaaccttagacaagcatggaataattacaacattaaagcctgaacttggaaagataat

SEQ ID NO: 747168 - DNA, 74 bp, Homo sapiens
cagatgttgtcaaggtggcctaccaggaggccaggggtgtcgccatggtgtggcctgaagtcactgatcctgag

SEQ ID NO: 747169 - DNA, 100 bp, Homo sapiens
aattttcctcacacacagttacttgccaagacgattgaaaaactaatctggattcactccctctggttgatacccactcaaaaaggacacttctgattaa

SEQ ID NO: 747170 - DNA, 50 bp, Homo sapiens
ctgaaaggaaatgacggattttgaactcctcctcccacatctgatggagc

SEQ ID NO: 747171 - DNA, 100 bp, Homo sapiens
cagcttcgtggaggagtacaacaacaagttgccagaggttccaccctctgaggaggaagaacaggaagcctgggtgaatgccttgcttggaagaatattt

SEQ ID NO: 747172 - DNA, 75 bp, Homo sapiens
tctcagcttccacaccctcaccctacccctacatcggacacccccaagatcatcatgctcaggaacgacatttac

SEQ ID NO: 747173 - DNA, 75 bp, Homo sapiens
ttcttccttactgtaatgggactatttctactccacataatctggaagaaatgttggctatttggcgatgagagg

SEQ ID NO: 747174 - DNA, 101 bp, Homo sapiens
ccattaagggaagagtttacatcacaaattatcgtctttatttaagaagtttggaaacggtgttccattgcctaaagaggagaacatttctgctcccttga

SEQ ID NO: 747175 - DNA, 100 bp, Homo sapiens
tcatcgtgaccaccggcctggtattgggatgattgggaaaatgaggtacgttagtgttcgcgattttaaaggcaaagtgctaattgatattagagaatat

SEQ ID NO: 747176 - DNA, 100 bp, Homo sapiens
gtttcctcagtggatgcctttcggcgcgccgccgcccggcgccgcgggactgggagaccgggtgtcatggagaaactccagctgggcccagagattctgc

SEQ ID NO: 747177 - DNA, 75 bp, Homo sapiens
agaagactcatctaactagacatatgcgtactcattcaggtgagacatggaatccattaaaattgcattatcagt

SEQ ID NO: 747178 - DNA, 98 bp, Homo sapiens
aactggcagtttcccacatgggtgtactcgtgttccaggtgaacaacaacgggatcatctccttcctgaaggaggtttctcagttcaccccagtggcc

SEQ ID NO: 747179 - DNA, 83 bp, Homo sapiens
ctatactcttgaccctcacacccgctgggagtactgtgcaattaaaacatgcgatggagtttcgctcttgttgtccaggctgg

SEQ ID NO: 747180 - DNA, 82 bp, Homo sapiens
gaagacctattatcagatcaaccaccaaagtgggaaacattgaaatcaaggtttactcctggcttgggggcattaggaagca

SEQ ID NO: 747181 - DNA, 100 bp, Homo sapiens
acagaaaaattattatgtctgtgttcccttgggactcattggaaattgtacagtgacatcttctgggatttagtctggtgcttttcagtgggaagaattg

SEQ ID NO: 747182 - DNA, 100 bp, Homo sapiens
taaaagcccggattcaggattcagatgaaccaggtaaagatgatgattcttttgatcggaaatcagtgtaccgaggctcgctgacacagagaaaccccaa

SEQ ID NO: 747183 - DNA, 50 bp, Homo sapiens
gaggaggcgccggaccgggggggcagtagcagaatcccatggtagccagg

SEQ ID NO: 747184 - DNA, 100 bp, Homo sapiens
tgacaatgggcagaacgaattcagtgatatcattaagtccagatctgggtgatcttgatactgcagcagtaaaagtggaatttgatgaagaattcagtgg

SEQ ID NO: 747185 - DNA, 75 bp, Homo sapiens
tcagcgatagcccagtggatggccattccagccgaatttgccacatacctgaatttctgccgttccttgcgtttt

SEQ ID NO: 747186 - DNA, 90 bp, Homo sapiens
ctcttgtcctcctcagcctcgaggcggggtttcaccatgttgcccagactggtcttgaactcctgagcttaagcaatccacctgcctcgg

SEQ ID NO: 747187 - DNA, 90 bp, Homo sapiens
ctaactatggagtatcggctaagtcaagcttgtatgatataatacattgccaagcagaagaactctgaaaaattcaagattagtgagtaa

SEQ ID NO: 747188 - DNA, 101 bp, Homo sapiens
ctagccaagaaacctggatggaaagaaactaattttcaggaagttattccaacttttgacatggctgtcaatgaaatcttctttgaccgttaccctgactc

SEQ ID NO: 747189 - DNA, 100 bp, Homo sapiens
ctgccgtcggtggtgctgaagctctttctggctgcagccctcccaggcccaatacttcaaagcatcctacctctgctcaatatatattacttggagagga

SEQ ID NO: 747190 - DNA, 100 bp, Homo sapiens
cagaatcaccagcactggctgaaggtggtattaaagataatcaaacattatcaagaagaaggacaaggaactgaagttgttcaaggagtgcttttgggtc

SEQ ID NO: 747191 - DNA, 100 bp, Homo sapiens
gtaacctaagctggcagtggcgtgatccggcaccaaatcggcccgcggtgcggtgcggagactccatgaggccctgctggtgagtgacacacggagagtg

SEQ ID NO: 747192 - DNA, 75 bp, Homo sapiens
ggagaagcgcgcgggcgcgcaggccgcggggagcacctggcggggatctgatgagcttctttcttctggcatcat

SEQ ID NO: 747193 - DNA, 96 bp, Homo sapiens
gtgatgtgacgctggagaacctggcacttatgtcctccctgggattaaagcaaggagagccaatcatgactggcaaaacacagaccagcaacgtca

SEQ ID NO: 747194 - DNA, 90 bp, Homo sapiens
agcggggcgatgagtgtgggcatggggcagccgccagcccaaacaggcgtgtcacaggatggctggctgtggtgaaattgatcattcaat

SEQ ID NO: 747195 - DNA, 100 bp, Homo sapiens
caaaagggaagctgaaaccaactcagaatgcttctgagaaggagatctattgggaaactgattataaccactcgggcaccatcgatgcccacgagatgag

SEQ ID NO: 747196 - DNA, 100 bp, Homo sapiens
ctggggattggccagctgactgctcaggaagtaaaatcgtccaatggatgggaccccaatgaaatgttcaagttcaatgaggagaactacggtgtgaaga

SEQ ID NO: 747197 - DNA, 100 bp, Homo sapiens
aaatggctgatttcctgagaatcaagttaaaacctctagacaaagtaaccaaatctccagccagtattgatgaagatgaccctactgctgatgataccag

SEQ ID NO: 747198 - DNA, 100 bp, Homo sapiens
tggaattaggcaaatatggacaggggcccctgtctgtgttctcagccaagaaccggtggcggctggtggggcccgtccacctgacccgaggagagggcgg

SEQ ID NO: 747199 - DNA, 82 bp, Homo sapiens
caacaacaccctcaacaacgccatgcctcaaaatgatgcttcaacacccaggccaggtctctgcctcggaagtgagtgcttc

SEQ ID NO: 747200 - DNA, 78 bp, Homo sapiens
gccgagcaggctgagcgatacgacgctggcaaaactcaaggctcagaaactgcagggcccccaaaaaagaaaaggaag

SEQ ID NO: 747201 - DNA, 120 bp, Homo sapiens
agcctggggaatgagacccaaactgctcatacagaattacgcatttccacttctaatgctctagaggacaaaatcccagtccttggcacaaactcaggaaatggaagccggagtctgttt

SEQ ID NO: 747202 - DNA, 75 bp, Homo sapiens
ggatggtggttcctgctgccctcaaggtcgtgcgtctgaagcctacaagaaaggaagatttggagaatggggaag

SEQ ID NO: 747203 - DNA, 75 bp, Homo sapiens
tgcccccccttccccacgcaaccccagatccatttacactttacaatacatccagaaagtgcccagaagaaactt

SEQ ID NO: 747204 - DNA, 100 bp, Homo sapiens
tggggtcggcgccgagtgggaggatggcggaagttggcatggattacagaagctgcatcctgagacccggcggttccgaggatgccagcgccatgctgag

SEQ ID NO: 747205 - DNA, 75 bp, Homo sapiens
gtcggcactgctactgcgaagacagctggcaggtggaagttaaacgagctgagcctcgggacagcaagagccaag

SEQ ID NO: 747206 - DNA, 50 bp, Homo sapiens
ggagaacgtcccgctggatctgacccgagagtgtttcacagccaatggtg

SEQ ID NO: 747207 - DNA, 88 bp, Homo sapiens
aaactagagcaaataaccgttttgaaattaacttggtcctgatgtctgaccatggagatgtgagcctcccgcccgaagaccgggtgag

SEQ ID NO: 747208 - DNA, 75 bp, Homo sapiens
cttgaacccgggaggcggaggttgcagatatgagcaagacagtgggcatgacagtggaagtgaggatgcctgttt

SEQ ID NO: 747209 - DNA, 75 bp, Homo sapiens
ctgctctacaacgtgcctgcagtggccgaggagattcaggatgaagttggtactccaaagattcaggtttactca

SEQ ID NO: 747210 - DNA, 100 bp, Homo sapiens
cgcaggacccgcaacagcgcagagggtagttcttccaacgtttattcttgaaagaagatctcttttagaaatgtatgcagacttttttgcacatccggac

SEQ ID NO: 747211 - DNA, 100 bp, Homo sapiens
tcatctgattttgatgcgtgtctcattaccaaagctggtgctacttttactgactggtttacctcttatgtcaaaaatgttgtatcaggtggcttcccca

SEQ ID NO: 747212 - DNA, 73 bp, Homo sapiens
gccaaatggtgcacccacgtcgtggcactctgtctcttccgcatccacaacacccgtgttcctgtgcggaggg

SEQ ID NO: 747213 - DNA, 46 bp, Homo sapiens
tcctgagtagctatgactacggggaaatcctcattgacgattcaat

SEQ ID NO: 747214 - DNA, 75 bp, Homo sapiens
gaggggagagcggccgccgccgctgccgcttccaccacaggttttacagaaggcgacacatgttgttcagagtga

SEQ ID NO: 747215 - DNA, 74 bp, Homo sapiens
gccaaaagacttctacagagtgaacccgaaaatccttccttgagtcgtgtcccaaatgcgaacatcctcgtgct

SEQ ID NO: 747216 - DNA, 100 bp, Homo sapiens
aacggctccagcatcaagatccgtctgacaggagattcatatgggacattgtgtaaatctgactgatggggctgtcgaagctgtccttacttactgtcct

SEQ ID NO: 747217 - DNA, 100 bp, Homo sapiens
ggccgagtgtggcgcagcagtggcggcgcttcccattcgccatgcgccgggggtgggtgcccgaaggaaaatcatcagcgtgttagcattttctttgact

SEQ ID NO: 747218 - DNA, 75 bp, Homo sapiens
tgtctcttctcgccctggcggggaaggaatactcccccagttgcaagaggcgcaggaccgtggaagacttcaaca

SEQ ID NO: 747219 - DNA, 74 bp, Homo sapiens
tctgcttccatcccgccagtttggctctcctgccacagctcctcaccccctgaaaatgttcgcctgctccaagt

SEQ ID NO: 747220 - DNA, 50 bp, Homo sapiens
ctcaaaccccccctatcttccattcaggtcgttgaggacttccacatgga

SEQ ID NO: 747221 - DNA, 88 bp, Homo sapiens
aacaaagctgaggtccagatgaaagagaagtttctggtcactccccaggattatgcgcgggtgaaggccatgccgcctcctgggaaag

SEQ ID NO: 747222 - DNA, 155 bp, Homo sapiens
gaaaaccaggaagtgatccttgaggaagtgagagattttcagcttcgggacaagtacatgtttgctacaaaggtggtgatggagtttcactcttgtctcccaggctggagtacaatggcatgatctcagcttactgcaacctccgtctcctgggt

SEQ ID NO: 747223 - DNA, 74 bp, Homo sapiens
tggtcgctgctgtgatgtgtaggaggaagagttcaggtggatgagaatggcaaaattagtcgccttcgtcgaga

SEQ ID NO: 747224 - DNA, 75 bp, Homo sapiens
cggggctctccgggcctcccgccgcttagcctgatgctggaaggacgaaggtcccgcggcagtgctggtggccat

SEQ ID NO: 747225 - DNA, 100 bp, Homo sapiens
tcagcgatgctgcctataaaggggtccaccctcacatcgtggagatggacaggagacctggaatcattgttgtcaagctacaacttcaagcagaagagag

SEQ ID NO: 747226 - DNA, 73 bp, Homo sapiens
aaaggccaaagagaggtgttctgaacaagttcaagaatgcatctactcatgcctcgaaatctcctgacagtgt

SEQ ID NO: 747227 - DNA, 89 bp, Homo sapiens
tatgtggccagttatttgcctcagtaaaagagtttggcagttctctaccagtggaccaatcttttcatccccgtgtacctcaccatcag

SEQ ID NO: 747228 - DNA, 82 bp, Homo sapiens
cgccgcccgtccacacccgccgccaggtcccgcggcagtgctggtggccatggttcccgtagccagaaggagttgcccacag

SEQ ID NO: 747229 - DNA, 100 bp, Homo sapiens
caaactctggagtaattggagccaagaaatgagtataggttgtgggagacaagtagccaacagtatcataactggcaacaaaattgtgaatggaaaaagc

SEQ ID NO: 747230 - DNA, 100 bp, Homo sapiens
cgcggtgctcggcgtacagcagacgctggaggagatggacttcgagaggggtggtggccctagggccgtaggttgctggcccctgttctgaaccaccgag

SEQ ID NO: 747231 - DNA, 88 bp, Homo sapiens
ggccgcgctctgctgcttcctcgtcctagtgatccacgcgcagttcctcaaagaaggagctgctgctcttcctccagaacctgcccac

SEQ ID NO: 747232 - DNA, 90 bp, Homo sapiens
cagccgagaggaagggagggcagctcgggccgtgtctttggtgcaacactaacaaggcttgtctggactacccagttacaagcgtcttgc

SEQ ID NO: 747233 - DNA, 98 bp, Homo sapiens
ggctgtggcctgaaagtgacgggagcagcagccaatgaggcatttcatccttcatgaagccattcaggattttgaattgcatatgagtgcttggctct

SEQ ID NO: 747234 - DNA, 75 bp, Homo sapiens
ctgccagcaagaaatgatcagtagcaccagtgtttatgatggagtctcgctctgtcgcccaggctggagtgcagt

SEQ ID NO: 747235 - DNA, 75 bp, Homo sapiens
gtggccgtggggagaccgtctattttcagctgaactctcatctctcaacactggcaaatattcataagatctacc

SEQ ID NO: 747236 - DNA, 90 bp, Homo sapiens
ggagcggcctggcaccacagccgcgtcagtgttgcggcgcgggatggcagttttacagtctccgcacagtttctaataagtgaccgtgac

SEQ ID NO: 747237 - DNA, 82 bp, Homo sapiens
cagcagccaagccggggcagtttcagtctccaccccaaatgcagtgctgggattacaagcgtgagctaccacacccagcgag

SEQ ID NO: 747238 - DNA, 98 bp, Homo sapiens
ttgggcttcatcatggaggactacctgcagggttgtcgagctgctctgcaggacctgaaggagaagaaggagaaggtggaggagaaggcaagccggaa

SEQ ID NO: 747239 - DNA, 106 bp, Homo sapiens
cgcggaggtgcggagagactccttgggggtcgagcacataacggggttcgggtgtctcgtgtgtgaacatcacagtgctgctctgaaagtggtgacgaaaggaaga

SEQ ID NO: 747240 - DNA, 88 bp, Homo sapiens
atcatctattccaccgtgttctggacacagcatctactcagcgtgggtcacctctgtgaacatcactgactgcaagcctccctcaatt

SEQ ID NO: 747241 - DNA, 100 bp, Homo sapiens
tctcaaccttgtgggatgtgaaaactctgttactgaaggtattatgagacaggaagcatcaagcctggggtaattggaggatccaaaccaaaggtcgcca

SEQ ID NO: 747242 - DNA, 100 bp, Homo sapiens
acctttggacagtccaatgtcaacattgcccagcaagtgggattaaagcctgtggtttccacagaagcaccacctatcatatttgccacaccaactaaac

SEQ ID NO: 747243 - DNA, 101 bp, Homo sapiens
tttgcctgaatggggggctttgttatgtgatacctactattcccagcccattttgtaggttttgtagtgcatccctgagcatgagcacagaatgaagcggc

SEQ ID NO: 747244 - DNA, 90 bp, Homo sapiens
aaaggcgctttggctaagctggtggaagctatcaggaccaattacaatgacagatacgatgaggtggcagggcccagccccgaaccagac

SEQ ID NO: 747245 - DNA, 75 bp, Homo sapiens
tcagtggccctgtacgacatccggactggaaaatgtcaggagacgcaggtcagaatggaaatgggctgcagaccg

SEQ ID NO: 747246 - DNA, 83 bp, Homo sapiens
acccttgtctcactcccagttggctcttagtcacagcttgtgctgcattgcacctgtcctcgcggccaaggtgctcagaggcg

SEQ ID NO: 747247 - DNA, 98 bp, Homo sapiens
gatgaagattcaccaaataagctatatactttggttacctatgtacctgttaccactttcaaaagccactcgctctggtgggaccctcgtgcttgtgg

SEQ ID NO: 747248 - DNA, 75 bp, Homo sapiens
cttcatccaccgtggcaatatcctattccccagaccgagttttcatggagtgataatgaaaggagcagcagccgc

SEQ ID NO: 747249 - DNA, 82 bp, Homo sapiens
agagccgtggtgaagatggactggcgggagaacatcactgtccccctccagacagttggctggatctattattggcaaaggt

SEQ ID NO: 747250 - DNA, 75 bp, Homo sapiens
tgctgcgcggcccccgcgcatgactattgcccagaagaaaagatgtttggttttcacaagccaaagatgtaccga

SEQ ID NO: 747251 - DNA, 90 bp, Homo sapiens
cgaaaacgtggttgtagagttccgtgactcccagtcccttttctagctcctccggtcatgatacatccacactccagactctgtgtctgg

SEQ ID NO: 747252 - DNA, 100 bp, Homo sapiens
acgggctgggcgcccccagaagcccgggaacaaactatctggagtccatctttcaccatcttctcctgagattgtactggaccgtgaccactcttcttcc

SEQ ID NO: 747253 - DNA, 98 bp, Homo sapiens
ggaaatcgggctgaagcgactgagtccgcgatggaggctgttttgacagaatacaaattaaaagcaattgaatatgtgcatggatacttttctagtga

SEQ ID NO: 747254 - DNA, 104 bp, Homo sapiens
actaggccattttccctgccaggtgtcctttttgacctcttgacctctgactcaaaggagcacggtctgaatctgcacagagcaagatgctgagtggagtcggg

SEQ ID NO: 747255 - DNA, 100 bp, Homo sapiens
attacatattccagtaatggtggatgaagttgttcattgtttgtcaccacaaaaaggacagatggaggacggccataccctcttcgactacgaggtccgc

SEQ ID NO: 747256 - DNA, 90 bp, Homo sapiens
cgcagccggacttctgctgcactggggctccgaatgacccagaatctggggtgggcttaggccccgggtcccgagggctgtaacctgttt

SEQ ID NO: 747257 - DNA, 80 bp, Homo sapiens
agaaggtcaacatgctcaagcactgcaagcggcacacgggtgctggagaatctggtaaaagcaccattgtgaagcagatg

SEQ ID NO: 747258 - DNA, 98 bp, Homo sapiens
aaaaagatagaatggactttggcatctccttggaaacaatgccatctttgaatgtgagagataaacctagtttcagcatgtctgcagcagagaccagt

SEQ ID NO: 747259 - DNA, 108 bp, Homo sapiens
cattgacatttaattttagggtcctttatatagaagggagagtagagagtacacactagatgtgtacagactctcctccgtggtcacacagcacgattccaagaaggc

SEQ ID NO: 747260 - DNA, 100 bp, Homo sapiens
cagacggcgctatgtacgccctcttcctcctggccagcctcctgggcgcgggagactccatcctctgccaatggcccttcccgggagggctctaggctgc

SEQ ID NO: 747261 - DNA, 98 bp, Homo sapiens
gaggccggacggggcggacggcgacgcagcccgcggcagaaggggtctcctgctgccagctaagtgtgggagaacttgtgcacgtatctcccctccga

SEQ ID NO: 747262 - DNA, 131 bp, Homo sapiens
gatgaaagacagctggattcatggtccgtactgctgagtgagtctatgatcttggagccccggcgctgtgcttcctgtcggacccagaggaccccgctctggagagacgctgaagatgggacccctctctg

SEQ ID NO: 747263 - DNA, 99 bp, Homo sapiens
gattaaagacattcgggagaatgggatgaaggaagatgagaatgtgcctactgctcctgatcctccaagtcaacatttacgtgggcatgggacaggctt

SEQ ID NO: 747264 - DNA, 75 bp, Homo sapiens
tgaatttgcaaaacttactgtaggtaattgttgatgaacagcacttggatttcctgttggcatatactatttcgg

SEQ ID NO: 747265 - DNA, 75 bp, Homo sapiens
gtctggaactcctgggctcaaaccatcctcccacctcagccttgtgaccctggcagcaaccccaacaaacgccag

SEQ ID NO: 747266 - DNA, 120 bp, Homo sapiens
cccatcggcattggcatttttgtcacctccaacaacatccgcgagatcgagtgcatgcaagatatgggaaatactaaagcaagactactctatgaagccaatcttccagagaactttcga

SEQ ID NO: 747267 - DNA, 75 bp, Homo sapiens
ccgcgtccgccgattcctcctccttggtcgccgcgtccttggctggcgtgatgcagcagtctcggccctggctgc

SEQ ID NO: 747268 - DNA, 99 bp, Homo sapiens
tgacctgcctgtcgtcgtggtggccaacaagcaggattcgccaaccaacaagctcctctacgccaaggagattcctgagtaccggaagatcgtgcagcg

SEQ ID NO: 747269 - DNA, 83 bp, Homo sapiens
tcttcggtggactccttcggcagtccacccaccgccgccgcctcccagtgcagtgctggagttcgtgggtgacgggatctata

SEQ ID NO: 747270 - DNA, 100 bp, Homo sapiens
ctcggaccatcactgtggcactggctgatggtggccggcctgacaacacagggcgtgggatgaagcctgctgggagcgtgaatgacatggccctggatgc

SEQ ID NO: 747271 - DNA, 50 bp, Homo sapiens
agagttctgcatgttgattccttccagggaaaaagacaactaaactttgg

SEQ ID NO: 747272 - DNA, 85 bp, Homo sapiens
ctttccatagctgtaggactgctggaggtgaagaaactgtgcaacatgcccagatcatacaacaaggaagtaatggaattgagat

SEQ ID NO: 747273 - DNA, 100 bp, Homo sapiens
agcagctcatcattccccaagtgccactcttcaacatcctggctaagttcaatggcatcactgagaaggaaacagagcaaatgcagcgttacaatcaaag

SEQ ID NO: 747274 - DNA, 100 bp, Homo sapiens
gctgatgattacgataaaaagaaactagtgaaggcgtttaagaaaaggtgattgtggccttggctgtatgtggctccatcctcttcctcctcatagtgct

SEQ ID NO: 747275 - DNA, 90 bp, Homo sapiens
gtatggattgtaatcggttttatcgattttggtgttgttcagagatactttcctaactttgtcagcgagcaagaacaatgccaggaggtc

SEQ ID NO: 747276 - DNA, 100 bp, Homo sapiens
caccccgatggtagccgaggagctgccatgtacatcttcatgtgatcagccaggattttgattctccttgccttaaaaacaaaaaacattggaattcttt

SEQ ID NO: 747277 - DNA, 102 bp, Homo sapiens
gccaaggaacagaattagaagaaaaggaaccctggcctgagaaatatggctacacacacctttctgcaggagagctgcttcgtgatgaaaggaagaacccag

SEQ ID NO: 747278 - DNA, 99 bp, Homo sapiens
gaattcttcagattctagttttgagaagaatgtggaaataacggagcaacttgctaatggcaggcattttacaaggtgagtggcagtgtgatgagtgtt

SEQ ID NO: 747279 - DNA, 93 bp, Homo sapiens
cagattcgcagtggtcgcttcttctccttgatgtctttggtggacttgggaaagaggttgctagaagcagcaagaaaaggccaagatgatgaa

SEQ ID NO: 747280 - DNA, 90 bp, Homo sapiens
ggcggcggcactgccggcggggaccgctgggaaggcgaggacgaggacgaggacgtcaagaagatggcagtgaacgtatactcaacgtca

SEQ ID NO: 747281 - DNA, 100 bp, Homo sapiens
cccccgagaccccgtcggacccatggtttccagtgcagcgcggagtgggcgatgccagcgtgccagggggtgttgtgtcctacaggatgtcagttgcaag

SEQ ID NO: 747282 - DNA, 51 bp, Homo sapiens
gccgccgtcagagccgccctatcagcttggtgatccagctatttttcctgc

SEQ ID NO: 747283 - DNA, 75 bp, Homo sapiens
agagatctacattaaccagctggaagccctgttgctggttggatggcaagcatgtggtgtttggcaaagtgaaag

SEQ ID NO: 747284 - DNA, 101 bp, Homo sapiens
ctactcttgcgccccctgctggtttcctgccctgtctctggcagccaggaggcaggagcagcgggcgacagtgcgggccctgtggttctgggccttctcgc

SEQ ID NO: 747285 - DNA, 100 bp, Homo sapiens
aaagtcctgaagaaatccagtggattctgtttctggcgtctgcatacgcaagtccccaactcgctgaggagagctgttcagctatggctgctgtcacaca

SEQ ID NO: 747286 - DNA, 100 bp, Homo sapiens
caccgttcagaaggccccagcttgaaggcctggagagccgcccagcagcacaacacagggaagcttggggaggtcaaaatgcagatcttcgtgaaaaccc

SEQ ID NO: 747287 - DNA, 74 bp, Homo sapiens
caggacctcccgatgagcctacgaggtcgaagtggttctggaaactttggtggtggtcgtggaggtggtttcgg

SEQ ID NO: 747288 - DNA, 100 bp, Homo sapiens
cgataaaggaactcaggcgcctcttcttagttgatgatttagttgattctctgaagcttcatgattgtatccaaaaaaccttgaatgaatggagttccca

SEQ ID NO: 747289 - DNA, 82 bp, Homo sapiens
ccccagtgacaagccagcaccagtccagaagcctccatccagtgtgtggacactgccagcggctgcagccgacttggaatga

SEQ ID NO: 747290 - DNA, 100 bp, Homo sapiens
ctggggtccaagaagagagatgaggccccagatgagaccaccctaaaggagctggccgagaccctgcaacagaagaacattgaccacatgctgtggcttg

SEQ ID NO: 747291 - DNA, 100 bp, Homo sapiens
cctaactccagactccaccagatgtgcaggcttttcctccgcaaccatgtctgacaaacccgatatggctgagatcgagaaattcgataagtcgaaactg

SEQ ID NO: 747292 - DNA, 80 bp, Homo sapiens
gtgcagaggatcctggaggcctgggaagccaacgaccacacgcacgggctgacgcacgaggcacacaggaaggaggtgga

SEQ ID NO: 747293 - DNA, 83 bp, Homo sapiens
aatagtgatagctttgataaggtggcccagttgaaatccttcccttcctctaccttggaagtgcctaccatgcatccaagtgc

SEQ ID NO: 747294 - DNA, 75 bp, Homo sapiens
gctctggagtggcccagcctaactgcccagtggcttccagatgtaaccagatgcccattcaccagaatctcaagg

SEQ ID NO: 747295 - DNA, 74 bp, Homo sapiens
tctctctggccatttattgctgtcttgttccatggactgtaaaattaaggttttgattcatggattcacccagt

SEQ ID NO: 747296 - DNA, 75 bp, Homo sapiens
aaacaataatggatttaatgctctgcatcatgctgcactaaggggaaatcccagatgctgtgagagaagtaagga

SEQ ID NO: 747297 - DNA, 132 bp, Homo sapiens
cttcaagttggagcaaggagaggggccatggacattggaaggggaagccccacatcagagctgttcagggatggaagaagcgagcctgtgccttggagtgtcttcggcggagccggaagctgagccccacct

SEQ ID NO: 747298 - DNA, 74 bp, Homo sapiens
cggtggagtgcagcaggacactatcctggccgagggccttcacttcagaactgggcacctccgggctgtgaaaa

SEQ ID NO: 747299 - DNA, 83 bp, Homo sapiens
tgcgggcgcgccccaccaccgccctcaccatggttatggaaacaaaggacatgctttacatcgtcactgaatttgctaaaaat

SEQ ID NO: 747300 - DNA, 75 bp, Homo sapiens
atcgaacagagccgggagttcaagaagaacactccagaggttgctgcttttgctcagaggacatccatgacccta

SEQ ID NO: 747301 - DNA, 100 bp, Homo sapiens
agagtattggtcctaaagtccagagacagagcactaattagcatcggcgtgtcataagatccatcacagctgcaaaatacagagagaaacagcaagtgaa

SEQ ID NO: 747302 - DNA, 82 bp, Homo sapiens
cttagtggggacccagggcatcagacacaggtaacaaatcggaagtacccaaaactgaaagaagtggatgatgtgcttggtg

SEQ ID NO: 747303 - DNA, 88 bp, Homo sapiens
gggccgcttctcgcgggccggggccacgctcagcgccgagggcgagatcgtgcagggctctgccagcagacagccttggcacacaggc

SEQ ID NO: 747304 - DNA, 74 bp, Homo sapiens
agtatactcttcgcatactggcaatcatttggggaagaatctacagttgctgatggacagagtggatgaaatga

SEQ ID NO: 747305 - DNA, 96 bp, Homo sapiens
aaagtccaagctcgtggtgggtggaaaagtgttcgccgagattgctctccccagtctttatcagaccctctgctttgaagatgcagctctgtggcg

SEQ ID NO: 747306 - DNA, 98 bp, Homo sapiens
tccagtttgctgcagaaacgtgccaaaaccaggcaggagaagtcaggatggctaaaggtgaccccaagaaaccaaagggcaagatgtccgcttatgcc

SEQ ID NO: 747307 - DNA, 82 bp, Homo sapiens
gccctggggccggcgatgtgccaccgaggctgaggatgatggtagattgccagacttcccaagtaagaagcggaagaggagc

SEQ ID NO: 747308 - DNA, 98 bp, Homo sapiens
agaagactgctgatcttagaaacaggtgttctgggactcagtgttagaagctgtctgtctgtaagaatcttgctgtctctgcctcatgaaaacaattg

SEQ ID NO: 747309 - DNA, 95 bp, Homo sapiens
ccagtcagacctcggataacaatgccctgacacctgaggtcgcccggctcatggagatgggattttccagaggtgatgctttggaagccctgaga

SEQ ID NO: 747310 - DNA, 82 bp, Homo sapiens
tgcctttgttgattaactggacaaattcaggcaattatttgggatatacctgtaagtgtgggggccttcagtcaggaagtcc

SEQ ID NO: 747311 - DNA, 82 bp, Homo sapiens
gggcgagcgaggaggatggcggagtcggggctcctgacggtgtccctggccagtgtccttccacctgtccacaagcatgggg

SEQ ID NO: 747312 - DNA, 98 bp, Homo sapiens
gcgctgtcaataaagaacggcagtttgaatcggtgctgaacaggttctggagccattgttgctgccgttgtggtggttgtcatcatcatcttcaccgt

SEQ ID NO: 747313 - DNA, 75 bp, Homo sapiens
caaccacctctggctagtggtggaactctgcacagggttatgtaccgaaggactctaccgtgtcagcgggaataa

SEQ ID NO: 747314 - DNA, 90 bp, Homo sapiens
ctcagcctcctgagtagctggaaccatcatatgcaccagcacgcctggctaagtgtgggcaagagcagtttactgttgcgttttgcagac

SEQ ID NO: 747315 - DNA, 82 bp, Homo sapiens
atggacgggcgccgcgtccctgcacagcccgccgcagaggtcatcatcagatttgaaatatttaaagtggatacaaaactat

SEQ ID NO: 747316 - DNA, 100 bp, Homo sapiens
gttcgtctcttacgtctgcggaagtgcagctgcctcagttcttagcgcaggttgattcttcaccacactgaaaccattaggaaaaatccttgtggttaac

SEQ ID NO: 747317 - DNA, 75 bp, Homo sapiens
tgactcagcttcgagcttgtgccaaataccacatggaaatgaattctaaggctttcagataaacttctgtgaaaa

SEQ ID NO: 747318 - DNA, 75 bp, Homo sapiens
gcgatatgatgatcctgaagtacagaaagacatctcccttgcctcagctcctatgatagctactgcagcaatcaa

SEQ ID NO: 747319 - DNA, 53 bp, Homo sapiens
ggcgcggggaccgctgtgctctcgggagaagaaatgggtgaccgttggtgaca

SEQ ID NO: 747320 - DNA, 98 bp, Homo sapiens
tttttgagaaaggaaggaatatatcctgactgatttactatactggcaattgctggagaagattttgcaattgttgcttctgatactcgattgagtga

SEQ ID NO: 747321 - DNA, 101 bp, Homo sapiens
ttgcacttcgtgcccgaaacgccgaatataatcccaaggacacatgacggaagtgtgtatttttgggccactccacggcaggtccctagcctgcaacattt

SEQ ID NO: 747322 - DNA, 82 bp, Homo sapiens
ccgagaagctcaccttgtggtctacggtcctgtccacctaccactttgggggcaatgaattcagtttgcctgttctgtatgc

SEQ ID NO: 747323 - DNA, 75 bp, Homo sapiens
ttggaaagacccaggagaagccgcccaaagaactgtctattgcgtctgcagacatggatttcaaccagctggagg

SEQ ID NO: 747324 - DNA, 100 bp, Homo sapiens
ggttagtgtgctctgagggagggtccgagccagccgctgttttgccggaggagcccctcaggccgtgtgtgtctggggaagagacttacagaagtggagt

SEQ ID NO: 747325 - DNA, 90 bp, Homo sapiens
gaacatgtaacaagaatccaaagaaaacaaaatggtggtatcatgcgccagcagccctgtggtggcgacgacgatggaccaggagccagt

SEQ ID NO: 747326 - DNA, 114 bp, Homo sapiens
taataacacaacaagtttagggagtccatggccagaaaacttttggggatctagtgaaaagccatttgatgtatgcggtcagagaagaagtggaggtcctcaaagagcaaatca

SEQ ID NO: 747327 - DNA, 89 bp, Homo sapiens
gacggcgaggcgctcaacggcgagccagagctggacctcaccagcaaggatctatcttgggatcccatggctttctttactgggctctg

SEQ ID NO: 747328 - DNA, 97 bp, Homo sapiens
gcggacccacttgtgcggcggtcggcgcggggcgcgaggtggaatgaatcttacttgttgaatatcttctggttactagttggattcatttgtgaaa

SEQ ID NO: 747329 - DNA, 100 bp, Homo sapiens
gagagagcgcgaaactcatgaaccccctcacgctggtggaggccattgtcttgccaatgaaccacaaggagaagtttgagaacttggggatccaacctcc

SEQ ID NO: 747330 - DNA, 75 bp, Homo sapiens
aaactaagaccaaggtcaattgaagtagaaaatgactttctgccggtagaaaagatcaacaaactccatttatgt

SEQ ID NO: 747331 - DNA, 100 bp, Homo sapiens
aaaaggaagactgagagaaaaccatcggaggaggaatatgtgattaggaaaagtgctgggactctggtgcccccaaccctgggcatcctcaggctttgag

SEQ ID NO: 747332 - DNA, 76 bp, Homo sapiens
tctcgggctcggaacgagactgcacggttgattcttcaccacactgaaaccattaggaaaaatccttgtggttaac

SEQ ID NO: 747333 - DNA, 82 bp, Homo sapiens
aacttcatgtgtctgtggcagtcttgtaaaaatatctagtcctcagactattgtggagttattcttccaagaagttgcaaga

SEQ ID NO: 747334 - DNA, 100 bp, Homo sapiens
caaaatgaacacagtcactgggtgatttagccctgcggaattgttttctcacctccgacttaaatgtgaaagtgggagattacggaataggattcagcag

SEQ ID NO: 747335 - DNA, 75 bp, Homo sapiens
gatgaggaaatcaaggctgatgaaaactgtggatttagttactccactctgccatgtctttccaccactgcctgc

SEQ ID NO: 747336 - DNA, 75 bp, Homo sapiens
tggatgtctgagaactttgagagaccgaaaaagaaggacgtatgctctacaaggatctggggactttgatgattt

SEQ ID NO: 747337 - DNA, 97 bp, Homo sapiens
tcttcaccatttacccaagccagagcacattggatccgagcagttaccaaggttcgactccagctgcaggaggcagaactcaaaagcttgatggaca

SEQ ID NO: 747338 - DNA, 51 bp, Homo sapiens
gtcagtttctgaggaatttcatcaggcgtgccgccgccagacggattactg

SEQ ID NO: 747339 - DNA, 100 bp, Homo sapiens
gttctacttcacactgcagaactgggttctggactttgggcgtcccattgccatggaccacatggtgacaatgcatgatgtgcttgatgctcagtggctg

SEQ ID NO: 747340 - DNA, 100 bp, Homo sapiens
aatctcctgaaaaagaggaaggcttatcaagccctcaaagccacccaggcaaagcaggcacttttggcaaagaaggagttcctctttggaatccatgcag

SEQ ID NO: 747341 - DNA, 75 bp, Homo sapiens
gccggttatctctgtgaatctcagggatacagcaggccaggagcgatttcacaccatcacaacctcctactacag

SEQ ID NO: 747342 - DNA, 100 bp, Homo sapiens
cctctcttctaattgatgctggggccaatgtgaatgtgaaggacagaaatggaaagacgccccttatgccggccggcgctcacttgtcttcaggaagctc

SEQ ID NO: 747343 - DNA, 83 bp, Homo sapiens
tccactttcgccagcccgtgccgcgagcgcggcctgcaggaggtacgaggaacagcaaattcaggaaaaagtggcgacctttc

SEQ ID NO: 747344 - DNA, 90 bp, Homo sapiens
agactgccagccctgacgggacagagccagggcactcaccaggctgcaagaacagtgctgggaaaggccttttccacctcatatccagct

SEQ ID NO: 747345 - DNA, 98 bp, Homo sapiens
gccctttgaggtgcactggaggaagcacaccctgtcctatgtggacgtcggcactgggaagggttccagctgagccatcttccctcctgtcactatca

SEQ ID NO: 747346 - DNA, 78 bp, Homo sapiens
gggtcctgagcctgccccagccagtaccagcgccgtgggactttgaacatgtcggggatcgccctcagcagactcgcc

SEQ ID NO: 747347 - DNA, 82 bp, Homo sapiens
ccgtggttgccaggagagctgcgccggcgagaagcggccgagccagcagcaggtttttgactaaaggccagaatgcattggt

SEQ ID NO: 747348 - DNA, 75 bp, Homo sapiens
ccaaaccgcaccaacctgtggcaggattggcctaatgaagaagttcaacctggagagatggaaaatcagctctca

SEQ ID NO: 747349 - DNA, 90 bp, Homo sapiens
gaaactagtgaaggcgtttaagaaaaggagacacaccttgaagaaacaacagagagccaacagaatggtgaagaaggcacgtctactcct

SEQ ID NO: 747350 - DNA, 138 bp, Homo sapiens
acagtagcatggagtgtgacctcatggagactgacatcttggagtcgttggaagatctagggcgagcaaggttcaagcgctccaatagtgtgacggctggcgtgcaggcagacctggagctggagggcctggcaggcc

SEQ ID NO: 747351 - DNA, 91 bp, Homo sapiens
aaggatcatgtctgcgagccaggattcccggttgaaatcacaaagattagacacctttttagataggtgttcttcagcaccactgacaaca

SEQ ID NO: 747352 - DNA, 104 bp, Homo sapiens
gagacagattcgcagtggtcgcttcttctccttgccaaggttcagaaattgcctctcaaggacgggaactggctaatcatttccaaagtgaaggaactccagtt

SEQ ID NO: 747353 - DNA, 101 bp, Homo sapiens
gtttccatcaatattaacagagatggctttggactgaatcaaggtgcctgtgaatctgctccgtgcgggccgcatctttgtgttcgagccaccgccagggg

SEQ ID NO: 747354 - DNA, 75 bp, Homo sapiens
agctgtggagacccacctgctcaggaaccctcaccttgtttcggactatagctccagtcagtctcagtcatccta

SEQ ID NO: 747355 - DNA, 50 bp, Homo sapiens
caaggcagagcggctcccccctttcgatactgaaacaagaatggcccaaa

SEQ ID NO: 747356 - DNA, 100 bp, Homo sapiens
tcaaagaaggaaagaagaaggggaagaaaagaaggggaagaagatcaaaacccaccatgccccagatcatgctttacgattatggaatatccagacggac

SEQ ID NO: 747357 - DNA, 83 bp, Homo sapiens
ggctggtgcgcgagacgccgccgagaggtttggtgcacctcgatttggaggaagtagggcagggcccttatctggaaagaagt

SEQ ID NO: 747358 - DNA, 82 bp, Homo sapiens
tgtcgtctttgcttcagccgcagtcgccactggctgcctgaggacatagatctgattgacatcctttggcgacaggatattg

SEQ ID NO: 747359 - DNA, 100 bp, Homo sapiens
ccaagtttcacatccttgtctgtgaagctaaactcaatgctgctgtgtgggaagaagatttgtaaagaaaactcttaggctggagtgcaatggcgtgatc

SEQ ID NO: 747360 - DNA, 100 bp, Homo sapiens
cgctgatccgagaccctcgctcccccatcaacgtggagagcttgctgagcatggatcattttgatgacattggtcccagtgttgtaatggcctccccagg

SEQ ID NO: 747361 - DNA, 90 bp, Homo sapiens
ctttcattcacatggaataacttactataaggaacatgaggaaacagattgtctcagtttacctagctttgaaaatgccatacccatggg

SEQ ID NO: 747362 - DNA, 101 bp, Homo sapiens
cctgtactctcatcgctctcggcctccgacacgcaaggacattggagtccctatcaccggttgcctagacaacttcatgggaaggcccttgggaatctgag

SEQ ID NO: 747363 - DNA, 103 bp, Homo sapiens
tcgagcgcccctccgagctggggttggacgctgccagtttgcacagcagcagtgtaaacaggaacatcgataagtagtgtaaaaacttgcacaatgaaatccg

SEQ ID NO: 747364 - DNA, 80 bp, Homo sapiens
agcccttccgccacggccgtctctggagagcagcaggtgtggacactgccagcggctgcagccgacttggaatgacctgg

SEQ ID NO: 747365 - DNA, 100 bp, Homo sapiens
ctggaagacgcgctcctgcgccggtgaatctggattgggaaagtcgacattaatcaactcattattcctcacagatttgtattctccagagtatccaggt

SEQ ID NO: 747366 - DNA, 96 bp, Homo sapiens
gtagctgttccctcagagcgacagggtgctgtgggcccagaagcgcccatgcctgagagcgtccaggaccaggcagagctgggccttaagggccct

SEQ ID NO: 747367 - DNA, 83 bp, Homo sapiens
tccgcaaggccggagaaggccgccgggcccgggcatggtggtctggggcaacgcggaagcaaatgcagccctgaggatttggc

SEQ ID NO: 747368 - DNA, 90 bp, Homo sapiens
tgtctgcaagccagttagaagccctctgtcctcagcagaaaaagtcctacctggagcgaagcgttaaggaagctgaggacaacatccggg

SEQ ID NO: 747369 - DNA, 99 bp, Homo sapiens
ctcggataccagcgctcagcccacctgtgattatggccgttaattaaggaaaagttgagccagggcgtgaccctcgtcgtggacagatacgcattttct

SEQ ID NO: 747370 - DNA, 100 bp, Homo sapiens
cagtctgtggacattagtgggcttcagttagccttggccgttttttcaagggggaacatggcaaaggtgttcagtttcatccttgttaccaccgctctga

SEQ ID NO: 747371 - DNA, 88 bp, Homo sapiens
gctgcggaccctgccattccggaggaggtgaccatggaggctggtggcctccccttggagctgtggcgcatgatcttagcctacttgc

SEQ ID NO: 747372 - DNA, 73 bp, Homo sapiens
gatcatcctgctgggcttcgtccagatcgggaagggtgctgggcgtcctcttctttgccatagcctgcttctt

SEQ ID NO: 747373 - DNA, 115 bp, Homo sapiens
ccactctgactgcaagcacccctttcttgaaccgaacagagtcaagtggaatcaaagaatgatatggaacctagcaaagctgttccactgaatgcatctaagcaagatggaccta

SEQ ID NO: 747374 - DNA, 87 bp, Homo sapiens
acaacatatcgtatcagatggcagacatacatcatttaaaggagccgctcccgaggccccggcgcggcgcgagggcgcggggcgcgg

SEQ ID NO: 747375 - DNA, 100 bp, Homo sapiens
ttgcagaccagttccagcttggcgtgtcccatgtttttgagtatatccgttctgagacatacaaatacagcgctggagagcgaggtggcttcaataagcc

SEQ ID NO: 747376 - DNA, 75 bp, Homo sapiens
caaaagcacacaaagacctcctcctccacaggggagacagagcttcctgcctgacacagctcacttcaagaagtg

SEQ ID NO: 747377 - DNA, 100 bp, Homo sapiens
cttgaaaagcggcacgacaacattaaaccatcagatgaggtcttggcagcacctgtctcctttcaccccagggcctgagcctggccagcctacaatgggg

SEQ ID NO: 747378 - DNA, 98 bp, Homo sapiens
tggtgaaggccctccagacccaaagttctggcctataggaacaagacattttcagtaatggaagaaggagcttccaggctggggaagatcatcatttc

SEQ ID NO: 747379 - DNA, 76 bp, Homo sapiens
ttttccccatcagaactggacacaagcaagctcagtcacaagttcaaagagctgggaaaacggcaatggattaata

SEQ ID NO: 747380 - DNA, 90 bp, Homo sapiens
ggaggaggaggaggaggaggaagagaaggaggaagaggagggcatctcgcaggagtcctcggaggaggagcagtgacccatgcgtgccgc

SEQ ID NO: 747381 - DNA, 96 bp, Homo sapiens
gctcagcatggtcagtgccgtttaacctttattgtggtggagtccaccccgctgtgacgcaaacatgcagatctttgtgaagaccctcactggcaa

SEQ ID NO: 747382 - DNA, 110 bp, Homo sapiens
cggatagtgctgaagaggagggggcgttccccagaccatggcatctacggaagggaatacggggtgctttgcattcaggaatacagaaaaaacagcaaagtggagtcaag

SEQ ID NO: 747383 - DNA, 100 bp, Homo sapiens
gtacttgaaggatggcgaagaggtcgcgcaggtgaccaagaatatggcccaggtgaccaaagccctggacaaggccctgagcaccatggacctgcagaag

SEQ ID NO: 747384 - DNA, 75 bp, Homo sapiens
aattccgagagaacgagcacctcctcgaagtcatcccagtttgcacgtgcattatttaatcacatagacaagtca

SEQ ID NO: 747385 - DNA, 100 bp, Homo sapiens
ccacatgggctcagcagatcagagagggcagacaccactttttagtaggcaaagacacttctaccacaacaatcagtattcagcaagcggaaatgggagc

SEQ ID NO: 747386 - DNA, 78 bp, Homo sapiens
tctggcctggaggctatccagcctggatgctgacaaatatgagaatgatccagaattagaaaagatccgaagagagag

SEQ ID NO: 747387 - DNA, 80 bp, Homo sapiens
cggcgggtacctgcggccaattcggtggaacgaggacgcggactgcgaaggcaggtacatgtcccagagcaagcacacgg

SEQ ID NO: 747388 - DNA, 75 bp, Homo sapiens
aaaatagaacctacgctgaaattttgggggcaggttctcttgctagaaactggcgatggaatatgagaggagccc

SEQ ID NO: 747389 - DNA, 100 bp, Homo sapiens
attttgttaccgacaagaactctggagaagtcatgacagtagggcatgtcggggaaaccagcacgatgtgccagtcattcctttggatgtagtagataat

SEQ ID NO: 747390 - DNA, 101 bp, Homo sapiens
gccgttgaaaaatggcgactgtggcagagttgaaggctgcttagaccatgctcagcctccaagcagccttgtcatcgacaaagaatctgaagtttacaaga

SEQ ID NO: 747391 - DNA, 107 bp, Homo sapiens
gcgtttctacggcgcggctctcacggactcaggccaggccactcgcaggaatacggggtgctttgcattcaggaatacagaaaaaacagcaaagtggagtcaagtac

SEQ ID NO: 747392 - DNA, 75 bp, Homo sapiens
cgcggaggccggggacgcggaggccgaggacgcggaggacgcggctctgccagagtcatcctttttgaacttcca

SEQ ID NO: 747393 - DNA, 82 bp, Homo sapiens
gcgctggatggcctcctccagcaggtgtgcgggaagtccttcaaccgcatgtacaacctgctgggccacatgcacctgcacg

SEQ ID NO: 747394 - DNA, 100 bp, Homo sapiens
gctggcgctgtcgccggctgcagtggccgccgctggagaccgcgggacctggcgctgcagcgagacctaatctgggagcctgcaagtgacaacagccttt

SEQ ID NO: 747395 - DNA, 80 bp, Homo sapiens
acaatgccctggagtcaaagactgctgccagcggggtggaggcgaacagcagaccaggcatttcatccttcatgaagcca

SEQ ID NO: 747396 - DNA, 80 bp, Homo sapiens
tctgtcttggaggacatcagaagatcattcattatcatggtgtagtaaagtccatgttaggtcttggtcagctgtctact

SEQ ID NO: 747397 - DNA, 110 bp, Homo sapiens
agtgagaaagaagtgtccggccgggccatccccttcagaaccttgatgctctgcacgaccaccttgctaccatctacccaggaatgcgtgcaccttcctttaggtgcact

SEQ ID NO: 747398 - DNA, 90 bp, Homo sapiens
gcctgaggagcgggcacagggcaaggcggcggacggctgcgtcgcccgaggcgaggaggagcgctggcgatgtgctggtggacggacagc

SEQ ID NO: 747399 - DNA, 128 bp, Homo sapiens
cactccagtcggtgttgagcacggcgagcagtctcaggcctttagtgatgatggtccgaataaatactggaaagaataccactttaaaattcagtgaaaagaaagaagaagccaaacgtaaacgaaag

SEQ ID NO: 747400 - DNA, 100 bp, Homo sapiens
tttcaggaaggagccattatttatgtcatcaagaagaatgacgatgatcctgtctcagaaagaagagtgggagagcaggactcagcaccaacccaggaaa

SEQ ID NO: 747401 - DNA, 98 bp, Homo sapiens
cctcgagtgaatgggcggatctcatatcttcacttggcaaactcaacaagtgtggccagactccactgatgatagctgccgaacaaggcaatctggaa

SEQ ID NO: 747402 - DNA, 100 bp, Homo sapiens
gctggagcatttgccgggttggtggctcctgcacatttttacagttctccagtccttctctttcgaaactgccaagttttggaccttatctggaacagcg

SEQ ID NO: 747403 - DNA, 98 bp, Homo sapiens
cagccttcgagtcgttcttgctcttcgagggcgagaaactgcctgcgctgctgacttaaggccccaacaccaaacacagaagcaacagccttacacag

SEQ ID NO: 747404 - DNA, 98 bp, Homo sapiens
gacgctgctgggtccgctgagcggggcgacccgaggttacacaaaacttccttttaaatggtttgactacctcagggaaactggctccattgcagcac

SEQ ID NO: 747405 - DNA, 98 bp, Homo sapiens
cggaggagggcaaggactacccctttgccaggttcaataagcatctgacagatacgtctcatggtgtaagaaataagtgcctgcagttacttggcaat

SEQ ID NO: 747406 - DNA, 96 bp, Homo sapiens
ctctgcctgaggttgtccgaaggatgccgaggaaaaggatatcaggactggaatggctcttacagcaagatccgttaaagcggcaactggggaaga

SEQ ID NO: 747407 - DNA, 100 bp, Homo sapiens
cagggaggctttcagccggagaagcgagtttcagctggttccaccccgatgcaggtggtcacgtgcttgacgcgggacagctacctgacgcactgcttcc

SEQ ID NO: 747408 - DNA, 75 bp, Homo sapiens
agctgcctctctggtctccaactagtattatgagaggagtcaatcagagggtttttaatgaccacaacaagcaag

SEQ ID NO: 747409 - DNA, 100 bp, Homo sapiens
ccctcctcctccagccgcccgcttcctccttgccaggagtgtgaagattgctcctggagcagttgtatgtgtagaaagtgaaatcagaggagatgtaact

SEQ ID NO: 747410 - DNA, 74 bp, Homo sapiens
aggcaaaaccagagtactgttgctgtccacagccatgagccactcctcaagacatgaggctgagctggttccgg

SEQ ID NO: 747411 - DNA, 87 bp, Homo sapiens
cgaagttaaaggaagtgttccccacggctgcgctcatgccagctgatggtgagaccattctaaaaggcctccagtccattttccagg

SEQ ID NO: 747412 - DNA, 75 bp, Homo sapiens
tggaaaatcaagctaagcgcctactagagcagggtttggagactcagaatgagtccctggaacgccagatgcgtg

SEQ ID NO: 747413 - DNA, 88 bp, Homo sapiens
gcgtccgaggctcgcgggcggcgggcccggattggccatcgggactttgatgtggagaagcgacttcggagagacctcaggaggacac

SEQ ID NO: 747414 - DNA, 100 bp, Homo sapiens
aaaaggaagaattgacccttgaaggaatcaaacagttttatattaatgttgagagagaggaaggtgtcttgctgcaggtaactaatgaagaagtggtcaa

SEQ ID NO: 747415 - DNA, 123 bp, Homo sapiens
gtgctcggcgcggtcctgtactggctgctgctgccctgcgcgctgctggctggtgagccaccagctgggcagcatcatggacctcttcaccaccagcctggcccttgcgggcctgacgccgcc

SEQ ID NO: 747416 - DNA, 101 bp, Homo sapiens
atgctttaggctgccggatgtctgatctccgaataactgaggcgtttctgtacatggattatctgctaataaggcagtggattttacaacagtcaaattct

SEQ ID NO: 747417 - DNA, 90 bp, Homo sapiens
tagctgaacagaagccgggagaaattgctgaagaactcgcaagctcctacgaaagaaagctcatcgagatttggaggccaatcactgcca

SEQ ID NO: 747418 - DNA, 75 bp, Homo sapiens
ttgttaagtttcacaaatattgggctgacattaaagagaacaaggccaggcctacgagcgggacctggaggctga

SEQ ID NO: 747419 - DNA, 50 bp, Homo sapiens
ctgcactctttcaactggcagaggtcgaacaagtaaaattacttgaccga

SEQ ID NO: 747420 - DNA, 96 bp, Homo sapiens
caaattggagcaagaagaagaaccatgggtgatggaggaagaagtattaaggagacactggcaaggtgtcagttgtacccgaggcgttctcagcag

SEQ ID NO: 747421 - DNA, 96 bp, Homo sapiens
gctgtgccgcgcagttaggcagcagcagccgcggagcagtagccgccgtgggagggagccatgaagcattacgagtcaaaccggcacgatgtccag

SEQ ID NO: 747422 - DNA, 89 bp, Homo sapiens
ctgggcacggcgtccagggcagctagggcctgggccgcggttcggccgcgccggccggatttggagttccatggagtgatgagatttta

SEQ ID NO: 747423 - DNA, 83 bp, Homo sapiens
atttgttaaggattccaagtaactcttatttggttggagaaaaagtcttccccatctggagatgacagttgatgctttatttg

SEQ ID NO: 747424 - DNA, 98 bp, Homo sapiens
ccatgcagaatgccaccaagtatggcaacatgacagaggaccatgtgatgcacctgctccagtctgtggagtccccagagaaccctttgaagaaaaac

SEQ ID NO: 747425 - DNA, 83 bp, Homo sapiens
tgccacggctgaaccctccttctcaatcttggaacagcacccccttctttaaggattcctacaggaagcaagtagtaattgat

SEQ ID NO: 747426 - DNA, 100 bp, Homo sapiens
gtgacactcaacaggattcccgattcgttttgtaatgaaggcccactcatttgtcagagagaacgtgcctcgggtactaaattcagctaaggagaaatca

SEQ ID NO: 747427 - DNA, 90 bp, Homo sapiens
ctttccagttcttcttacccagggcttagaaagtaacgattttgaaatgctaaattatcgtcgtcctccccgcagtcaggctgcccatca

SEQ ID NO: 747428 - DNA, 83 bp, Homo sapiens
gcaccagtagcttttctgagaatacttgctgaaaaggaagttttctggaatgggtttactcctggcttgggggcattaggaag

SEQ ID NO: 747429 - DNA, 90 bp, Homo sapiens
caggtcctgagcctcgagccgcagcacgagctcaaattccgagactgaggctgatgtgaatccaaaggcctatccccttgccgatgccca

SEQ ID NO: 747430 - DNA, 100 bp, Homo sapiens
cgtatgtctattacacagactttgtcatggagctcactctcctgtccctggacctcatgcaccatattcacatgttggttccacttccaaacatgagttc

SEQ ID NO: 747431 - DNA, 100 bp, Homo sapiens
gacggcgcgtccgcccgcccttaaagggcccgcacctcggaaaactcgcagcccagcacggcgtcgggtccgcaggggtggagcagctcatgtacatcaa

SEQ ID NO: 747432 - DNA, 50 bp, Homo sapiens
taaggattccaagtaactcttatttgtacagcatacagggcagatgtcag

SEQ ID NO: 747433 - DNA, 100 bp, Homo sapiens
cctctgggagcatcttcagcaagttcacctccaagtttgtacgcaggtgttaactgtctggcctatgatgaagccatcatggctcagcaggaccgaattc

SEQ ID NO: 747434 - DNA, 100 bp, Homo sapiens
cttgccctggtcttgctcggccgatgaagtgcagaggtttttttctgctctcctgccacagctcctcaccccctgaaaatgttcgcctgctccaagtttg

SEQ ID NO: 747435 - DNA, 50 bp, Homo sapiens
tggagttaatggtctaatttatgatagtactatactggcaattgctggag

SEQ ID NO: 747436 - DNA, 126 bp, Homo sapiens
ccgggatcgtgaccgagaccgtgaccgagagcgtgaccgagagcgcgaatatcgtcatcgttagaagattggccagtctgaagtttacctcatcagtcctgacaccaaaaaaatagcattggagaa

SEQ ID NO: 747437 - DNA, 101 bp, Homo sapiens
atttgggttgcaacaactaagtctacagtaaataaatggaccagcatctcagacatgtcgaaaaagatgttttgatccctaaaataatgagagaaaaggcc

SEQ ID NO: 747438 - DNA, 82 bp, Homo sapiens
atcctcctgcgtcgactttccaaagcgctggaattatgggcgtgagccactgtgcccagctcaaactggaggattataagga

SEQ ID NO: 747439 - DNA, 100 bp, Homo sapiens
gttggccctgtgatccctcaagactggtccacggagtgtatgaccacaaacagccatcaagagctggagataagatgggtagactgctacttccctttta

SEQ ID NO: 747440 - DNA, 75 bp, Homo sapiens
gacgaggaaagaggaggaaaacaaaagctgctacttatggaagatacaaagggaaatgacttaatcgtctttttg

SEQ ID NO: 747441 - DNA, 82 bp, Homo sapiens
ccgcccgcctgctcggcgaccagttgcagatctgatctcttctgaacacctcatcgtgtctccatccctgggaatctgaccc

SEQ ID NO: 747442 - DNA, 98 bp, Homo sapiens
tggagctctgggcccagaggacttctggcctttggcacgtcctgctccgtggtgctctatgaccccctgtgaacacttgtcctgctccttcacctttt

SEQ ID NO: 747443 - DNA, 98 bp, Homo sapiens
gaaacaatggcatttacagaaagagtcaacagcagtggcaacagccatcactggtgcaagctatatttaacggagatcctgatgaagttcgagcacta

SEQ ID NO: 747444 - DNA, 98 bp, Homo sapiens
agtggccatggggagcctcagcggtctgcgcctggcagcagcacttttccagccattaactccaggctctcgagaatttgaagatgttgtaaatattc

SEQ ID NO: 747445 - DNA, 100 bp, Homo sapiens
agaaacactttctcagctgtgctcagagctacagatgtactgcagtgccatgctgggtatcttaaagaacaaggcattgtcctctgcagacacccaggct

SEQ ID NO: 747446 - DNA, 100 bp, Homo sapiens
tcctcctcctgaccctggtgaacagatcttcaacctgccaaaaaagtctcaccatgcaaactcccccacagcaggcatccgcatgctggacggcgatgtc

SEQ ID NO: 747447 - DNA, 100 bp, Homo sapiens
tggactcaagcgatcctcccaccacctcagcctcctgagtagctggaaccatcatatgcaccagcacgcctggctaaccaggaaccatgattgaatgggg

SEQ ID NO: 747448 - DNA, 75 bp, Homo sapiens
gaggagctggggccatcaaggacctgcctagagctggaacgttacctccagagcgagccctgctatgtttcagcc

SEQ ID NO: 747449 - DNA, 75 bp, Homo sapiens
gtgtggtggatcatttcaaccgggtgaccatcgggatgaggaggaagagacccacatgaagaagtcagagtcgga

SEQ ID NO: 747450 - DNA, 75 bp, Homo sapiens
gtccagttaacatcaaggagagaaatcaggaagattatgggaggaagagctgaagagagacctgaaaattaagaa

SEQ ID NO: 747451 - DNA, 75 bp, Homo sapiens
agacaggctggctcattaacatgcatcctacaatgcagatcttcgtgaagactctgactggtaagaccatcaccc

SEQ ID NO: 747452 - DNA, 82 bp, Homo sapiens
gcccatcgtgcttaaagaaggaaaccaaggtgtatgttggtaacctgggaactggcgctggcaaaggagagttagaaagggc

SEQ ID NO: 747453 - DNA, 100 bp, Homo sapiens
cccgtggagcccccggctgcagcttggggggagcaactagaagccatttgtgtcaaggtaacgtctggagaaacaaaaggtcaggaaaggccaatgctcc

SEQ ID NO: 747454 - DNA, 75 bp, Homo sapiens
gcctgcgactgcggggacagcaacgtgatgcgggagagcgggttacctacctgggcaaagtctccaccactggca

SEQ ID NO: 747455 - DNA, 134 bp, Homo sapiens
aattgacactatttgtggaggattgatatgacagaaaggagccaaggatgactcaagtttttggccagagagccggcatcatggattccttcaaagtagtgctggaggggccagcaccttggggcttccggctg

SEQ ID NO: 747456 - DNA, 96 bp, Homo sapiens
accgcaagtacagagagtacagccccccatatgcgccggtgttcatgaagtctgtgaagctggagtgggtgcaagacaacatcagggcagcccaag

SEQ ID NO: 747457 - DNA, 96 bp, Homo sapiens
gcatcagcagcgtgatgttatcgggccagtgtcgttattatccttgtggagtaatagaatcaatactgccaattccagaaaacatcaggaatttgc

SEQ ID NO: 747458 - DNA, 75 bp, Homo sapiens
tggagtccgacctgccaagtgccgtgacacttctgaaaaatctccaggagcaagcctataatgcaaagagcaaaa

SEQ ID NO: 747459 - DNA, 75 bp, Homo sapiens
ggccaagaagaacttaagcgaggccctgggggacaacgtgaaacagcaggagtagggctgattggagccattgta

SEQ ID NO: 747460 - DNA, 82 bp, Homo sapiens
accgcaactctcagttcgagagtaaagcagttggaattgatcacaccttttcagttgtacttcaatcctgaattaatcttta

SEQ ID NO: 747461 - DNA, 100 bp, Homo sapiens
tatcaaaaggagcggggtcgacggtccccactttcccctgagcctcagcacctgcttgtttggaaggtgctggagaatctggtaaaagcaccattgtgaa

SEQ ID NO: 747462 - DNA, 83 bp, Homo sapiens
cttgaaggcatcgtgtggcaggaaacagaagatgtgtgccggtccaacaaaagcccttgggtctgtttgacttgttcaagtgt

SEQ ID NO: 747463 - DNA, 100 bp, Homo sapiens
gtttgcacattatggcaagaagggcgctgttttcgacaggtgtgcaggtttcggcacatggagattgatattcaattagcagagcctcacagacaatggc

SEQ ID NO: 747464 - DNA, 75 bp, Homo sapiens
atacaaatcacacgcataatggatgaaaggaaccgacaggtgctgctggtgagtagcagccggtacccagaccag

SEQ ID NO: 747465 - DNA, 82 bp, Homo sapiens
ccaacgcctggctcggagcagcagcctctgagttgtcactcagcccagtccatcagtttctcagcccagtacttctcagagt

SEQ ID NO: 747466 - DNA, 98 bp, Homo sapiens
gccggagacgagaccagaggccgaactcgggttctgacaagatggccgggctgccccgcaggatcatcaagctgagctgcccctcctggacctgatga

SEQ ID NO: 747467 - DNA, 100 bp, Homo sapiens
cgctgtcaagctcaacactgggagcaccacagacctgccaaaggctttccacgtttgtgcagcaatcctcgagtgtttagagaagaggaagatatcctgg

SEQ ID NO: 747468 - DNA, 100 bp, Homo sapiens
tgggaaacctgtagggtatggtccagctgtgccgcaccgaggcgagcaggagcagggaacaggcattgcttctatgacagtgccagtgtacattgcggag

SEQ ID NO: 747469 - DNA, 74 bp, Homo sapiens
gactcctccgtgcccgctgacattatctcatccacagacaaacttggactcagtggcctttgaggatgtggctg

SEQ ID NO: 747470 - DNA, 74 bp, Homo sapiens
ctggaacaggctctctcacaacatgggcatgaggcagccttcgctgctttcctctgctgtctctgcaagattgg

SEQ ID NO: 747471 - DNA, 119 bp, Homo sapiens
cgtcagtgtccttagagaaatacgggctttatttgcacttctggaaatacctaagttgcttttgaaatcagaaagtcagtgcagggttgtagtgttgatgggctctacttctgatcttg

SEQ ID NO: 747472 - DNA, 73 bp, Homo sapiens
caaagctggaacgtagagacatggccgccctgctcccccaatgaaaggccagcttcgaagaaaagctgaaagg

SEQ ID NO: 747473 - DNA, 134 bp, Homo sapiens
ccaagctgcagatcgagctgggcaagtgcaaggcggaacacgaccagctgctcctcaagtaatactgcattgcatgattgtgcagaatctggaagtttggacatcatgaagatgcttcttatgtattgtgccaa

SEQ ID NO: 747474 - DNA, 100 bp, Homo sapiens
ggcggggaggcgcggagcgcgcgtgtggtccttgcgccgctgacttctccactggttcctgggcaccgaaagatggagtctcactctgtcatcaggctgg

SEQ ID NO: 747475 - DNA, 75 bp, Homo sapiens
ttccgaaactgtcaagattggcaagggtgcaacaccggaggatttcagcaacctcccacctgaacaaagaaggaa

SEQ ID NO: 747476 - DNA, 50 bp, Homo sapiens
ctgcccctggaggagaaatagaagttcccagtgacctgacagcagaggag

SEQ ID NO: 747477 - DNA, 100 bp, Homo sapiens
aggccagaaacgcagccattgccaatcactgcttcacctgcgccatcaatcgagtgggcacccaaaaggcatacctgctggcagcgggggtcattgtctg

SEQ ID NO: 747478 - DNA, 100 bp, Homo sapiens
ctgcggcagcttcaatcccatcaccaaagggcacattcagatgtttggtgctggagaatctggtaaaagcaccattgtgaagcagatgaggatcctgcat

SEQ ID NO: 747479 - DNA, 108 bp, Homo sapiens
gaaggcaagaagcagtataagatgatctgccatgtgttcgagtcggaggatgctttatcctgtggataaacgcagagtgaacgagtttggggagtcctacgaggagaa

SEQ ID NO: 747480 - DNA, 75 bp, Homo sapiens
gagaaattgagaaaaggagaggagcacagattcaggcagcaaactgcagaatccgcaacggtgagaatggaatac

SEQ ID NO: 747481 - DNA, 74 bp, Homo sapiens
ctgtagcaaacgtccgcggcctctcaggaggaagaagccagacgacagtcaggagctcagtatggctcttttcc

SEQ ID NO: 747482 - DNA, 75 bp, Homo sapiens
tacttcgtctatgtggcgcccggcatagcaatcccaggacccaccggctcagaagggcccaacgctcaccactaa

SEQ ID NO: 747483 - DNA, 75 bp, Homo sapiens
gccagtcttggggacagtgtcagcaaattgacattgaacgctgtgtgagagaatctatcaacctgttttgttgga

SEQ ID NO: 747484 - DNA, 100 bp, Homo sapiens
aaatggcatagttatggaaggatatctgttcaaacgagccagcaatgccttcaaaacttggaacaggtaccccaatctgaagtcagtaaatgaactaatc

SEQ ID NO: 747485 - DNA, 100 bp, Homo sapiens
ctgagcagagccaaggatgagtatgagaggtggaagatggaacttctgtaaaaacactggaaacactccagcaaagagtgaagcgtcaagagaacctact

SEQ ID NO: 747486 - DNA, 90 bp, Homo sapiens
gctgagtggcctcttataccccggactgcaggaaccctaaggactctgcaatatgaataattccctagagaacaccatctcctttgaaga

SEQ ID NO: 747487 - DNA, 82 bp, Homo sapiens
ggggttggcatcccccacatacgatgtgtatatctcatgattgatatggagaaactagtcatgggccaaaggtcaagatact

SEQ ID NO: 747488 - DNA, 100 bp, Homo sapiens
aggatcttaaccaccattatcttaactgaggcacccaaaatgacctcagccctttgtgggtcctgctcctgtgtgcccacgtcgtcactctcctggtcag

SEQ ID NO: 747489 - DNA, 100 bp, Homo sapiens
gtacgcagacgccggccatgtgtgccacctgtgccatccaaactgcacctacggtgctgattcctaaagaaaagcccccaatcacggttgtgggtgatgt

SEQ ID NO: 747490 - DNA, 82 bp, Homo sapiens
cccacaaccccgccgggcacatgtgaaaggccctgggaggagcggggacactgaggacctctctccaaattggcctctcaac

SEQ ID NO: 747491 - DNA, 83 bp, Homo sapiens
cccttcaccaaggagactgctatttcatgcttgtatccatatattcctgcacatattacaaagcctaaggaacataagaagtt

SEQ ID NO: 747492 - DNA, 100 bp, Homo sapiens
ttgaggcccggggagagccggggagccgggcccgcgcgccgagagaatcttggtttggattctgaagttgctaaagcaaatgccatgggttttgctggat

SEQ ID NO: 747493 - DNA, 100 bp, Homo sapiens
ttccatgcagcctgccttaccggtggtggtcaccaatacaattccacatgaagtccagaagctccagtgccccaagattaaaactgtggatatcagcatg

SEQ ID NO: 747494 - DNA, 100 bp, Homo sapiens
acatgtaacaagaatccaaagaaaacaaaatggtggtatcatggtatgagaaagtgccagtcatcttggttgggaacaaagtggacctggaaagtgagag

SEQ ID NO: 747495 - DNA, 50 bp, Homo sapiens
ggacattccaggcagaggcaagcctctgcaatcccagataatggaagaag

SEQ ID NO: 747496 - DNA, 82 bp, Homo sapiens
cggagcgcggagcccggctcccgcaccatggaggaggacgacagctacggtggcggcgggaaggccaaggtctctggcagac

SEQ ID NO: 747497 - DNA, 83 bp, Homo sapiens
ctggccaagaagctcctggcaaaactgcgctttctggctgaggagaccatgctcgacagctgaccaaggccatgatgcgaaag

SEQ ID NO: 747498 - DNA, 106 bp, Homo sapiens
attccagcactggactcatggaggctgagcatttattcagtttttggctttcacccccaaccagtgaccaaagacttgaccactcaaagtccagctccccagaaca

SEQ ID NO: 747499 - DNA, 100 bp, Homo sapiens
tcgccgccactgccgcaggaggcgtgagagtgtgaacatggctacgcctcttcattcccgtccatgccgagcccccgactgcagcattcaaagcccccac

SEQ ID NO: 747500 - DNA, 100 bp, Homo sapiens
cgggctcttctgttctacccctggggttgccttggcaagagcagtgcctagaaagcccgaaaatctcttgtactacagtcaagatgaggagtccaaaata

SEQ ID NO: 747501 - DNA, 98 bp, Homo sapiens
gtttccaaggcggcggccgcgttcgcaccccagggtctcaccggcaagggaaggataatgtgaagcatatatgcgtttaagcaaactccccgaagcag

SEQ ID NO: 747502 - DNA, 90 bp, Homo sapiens
tccctttaatccagtgactgtcaggtcgatcatatacatatgtagagtgtgtcggtcagaaggaacacctgagaaaccgctttatcatcc

SEQ ID NO: 747503 - DNA, 74 bp, Homo sapiens
tatgcagttagaaagagagggaatatttatggaagacactgcctgaaatacatgctacaggatttaactatcag

SEQ ID NO: 747504 - DNA, 75 bp, Homo sapiens
ttttgtatttcctgcctctgccccacccccaaagagtctggttggaagcaaatgtttttttaatggacttgcatc

SEQ ID NO: 747505 - DNA, 76 bp, Homo sapiens
tttactgaatacgcatactttagaaatagctgacgatatcagagctttgctgatagatgccatgcccccagaggcc

SEQ ID NO: 747506 - DNA, 98 bp, Homo sapiens
tcggggacattattgcgcgtggaacggctgcttttggaagagtctcactctgttgtcacccaggctggagtccagtggcaggatctcaactcactgca

SEQ ID NO: 747507 - DNA, 75 bp, Homo sapiens
caaccgtctccagccttggtctgagtggactgtcctgcagactggagcgctgctcagcgctttcgttcagctgtg

SEQ ID NO: 747508 - DNA, 82 bp, Homo sapiens
ctggcaggagcggcagccaggagtcgcctgggtccctgctggagtatgctgggtgtgatgaatgcagactctgctaccattt

SEQ ID NO: 747509 - DNA, 97 bp, Homo sapiens
gcccaaatatcctcggaagagcgctcccaggagaaacaatttcattgtactgacaacctcagctggcatcatggaccatgaagaagcaagacgaaaa

SEQ ID NO: 747510 - DNA, 100 bp, Homo sapiens
aaagccctacactgctgtagaggtcatgctggaagtgtagattctatagctgttgatggctcaggaactaaatggactccagaaggaagacgcttggtca

SEQ ID NO: 747511 - DNA, 90 bp, Homo sapiens
attacttggagcaaagggcagtcggcggagcttcgccaaggctggcgcagtcgtttgaacaatttgaaagcaccattgggtttaagctgc

SEQ ID NO: 747512 - DNA, 82 bp, Homo sapiens
tggacgtcgcctccttgaaagttgaaggagttctcgggagaccccggagaaggtgaacctgagcaaggtgggcgagtattgg

SEQ ID NO: 747513 - DNA, 101 bp, Homo sapiens
tggaaccacgccctactgttgctcctactacgcttatattgggaatatcctctcgtacccactgatggtaatgctggcctgctggctgaaccccagattgc

SEQ ID NO: 747514 - DNA, 74 bp, Homo sapiens
caccaacatagccatcgacttcggggagcagtcactgtgtgcccagtattctgcagacaaacgagaagatgaga

SEQ ID NO: 747515 - DNA, 100 bp, Homo sapiens
acatactatccgtttgttcaggaaccaccagtgacagacggtttccaacctagatgaggaaagccgatggacagtccactacactgccccgtggcaccag

SEQ ID NO: 747516 - DNA, 98 bp, Homo sapiens
ccgaggtagaggcagtggcgcttgagttggtcgggggcagcggcaggttaatgttgaagaaggaaaatgcggaagtcgtcatttgacaagttttataa

SEQ ID NO: 747517 - DNA, 83 bp, Homo sapiens
aggagattatgaccttaacatcagtggcaggaaactgcatatcttctggtttacatgaagatggagtgctaatggaaatgccc

SEQ ID NO: 747518 - DNA, 71 bp, Homo sapiens
ggatttggcgctgcagaaccagatccgggagcacgtcatctccatcgaggagacacctatggctgccgatg

SEQ ID NO: 747519 - DNA, 99 bp, Homo sapiens
gtggggtggaccagctggtggagatcatcaaggcaatctgtacagaagctggtctgatggccttaagagaacgtagaatgaaagtaacaaatgaagact

SEQ ID NO: 747520 - DNA, 100 bp, Homo sapiens
gcctttcaatgtgacacaaggaaagtattctacagtaacaaatgtggcaattattttggatctatcacctgtcatcataactggcttctgcttgtcatcc

SEQ ID NO: 747521 - DNA, 100 bp, Homo sapiens
gacccacttgaagctttaaaagagaaatacttgaggccttctccaggattcttgtttcacccacaagtatgccttgaatgtggagaagattattgttcag

SEQ ID NO: 747522 - DNA, 85 bp, Homo sapiens
ggtaaagtcgagtatctggtgaagtggaaaggatggcccccaaagtttacccaaggtccagcctagcccctaggcaccatgtcgg

SEQ ID NO: 747523 - DNA, 100 bp, Homo sapiens
ggagtgcgcggcggccgcagctgccacaaaccagttgttgacctcctgtactggagagacattaagaagactggagtggtgtttggtgccagcctattcc

SEQ ID NO: 747524 - DNA, 98 bp, Homo sapiens
agagggcaggcaggaggtcggagcagctccgcgaggaccgcaccatcccgctcattgttatgaagacagtatggagtttccagaccatagtagacatt

SEQ ID NO: 747525 - DNA, 100 bp, Homo sapiens
gtgccgcgcagttaggcagcagcagccgcggagcagtagccgccgtgggagggagccatgaagcattacgagaccctatcagatttggatatgtccttca

SEQ ID NO: 747526 - DNA, 87 bp, Homo sapiens
agcaggtggtggagcggctgctggaaacgcaagacggtgccgagaagcagctgcgagttacttcgatgccctgctgaaattgcgaca

SEQ ID NO: 747527 - DNA, 82 bp, Homo sapiens
tggcctcctccggtctcctcctgcagcatggcgaggacaacatccttgctgcctccagctggcgggcgaccacagctactgc

SEQ ID NO: 747528 - DNA, 90 bp, Homo sapiens
aaagagttgattgaaattatctctggtgctgcagctctggttcaggataagtttgaggtgctgaattacacaagcattcctatctttctc

SEQ ID NO: 747529 - DNA, 100 bp, Homo sapiens
ctggactacaaggacgagttctcgggcagaggcgacctccccgcgttccatgcgcacagggacagggtttctgcagatcctgctttgtgacttcgagtga

SEQ ID NO: 747530 - DNA, 75 bp, Homo sapiens
accattcccttacaggagacctccctgtacacacaggtccagtttggccatgctggagcttgtgccaaccaggct

SEQ ID NO: 747531 - DNA, 100 bp, Homo sapiens
gagaggatctggtgtaccaggcgaagctggccgagcaggctgagcgatacgacgactgaaccggccgctgacactctcggagaagattgtgtatggacac

SEQ ID NO: 747532 - DNA, 75 bp, Homo sapiens
cctcgggggccacactgcaggcctccgcgctcagtgccacttccgagtggatccagttctttaaggaagccggca

SEQ ID NO: 747533 - DNA, 51 bp, Homo sapiens
ctggcccgaaaggagagcctcagcagtgttgtactgctacttctataaacg

SEQ ID NO: 747534 - DNA, 100 bp, Homo sapiens
gcgcaagaagattgggggctgtcttgatcttagcagtcaaatcaagggctgtctcgtgactgcttcagctgacaaatacgtgaagatctgggacatctta

SEQ ID NO: 747535 - DNA, 83 bp, Homo sapiens
cattaccccactctttccgccctaatggaggtctccagtttagaatccacattcatctcaatggaaggatcctgccttaagtc

SEQ ID NO: 747536 - DNA, 100 bp, Homo sapiens
cgctgcctctaggttctgggaagatggcgaaggtctcagagctttacgatgtcacttgggaagttatgtctggacacattgcttcaacatagaacgcaca

SEQ ID NO: 747537 - DNA, 80 bp, Homo sapiens
gaaagtacaattctattgcacatcaatgatatcatcccaggtcagcccaaggccaaccccactgtcactctgttcccgcc

SEQ ID NO: 747538 - DNA, 100 bp, Homo sapiens
acctagtgggtgtaatacatcatgaactgcagggctttaaaactgggaagtagaataatctgatccgcagcagcgatatccctccctcttacctcagcac

SEQ ID NO: 747539 - DNA, 75 bp, Homo sapiens
gaaggcctgttttgaagagaaggggaataagactgcatctgttcatatgagtgacttttttgaacgaaccattct

SEQ ID NO: 747540 - DNA, 100 bp, Homo sapiens
tacatcacaggagctgccctgtatgctgcccggatccccgaacgctttttccctggcaaatgtgacatctggacgcaaaatcgaatgaagctaatggccg

SEQ ID NO: 747541 - DNA, 98 bp, Homo sapiens
tgcgcggggtgatcaccatgaacgaggagtacgagacgaggttcctgtgcaactcttcacaggtcacgagaagagaatgccttctagatgcaaaatca

SEQ ID NO: 747542 - DNA, 100 bp, Homo sapiens
cgggcccaggcccggccccagccgccgctgcggagcccgccgggaccccccggagcgcggccacggcgcaggtgtcatggagaaactccagctgggccca

SEQ ID NO: 747543 - DNA, 82 bp, Homo sapiens
caaggagctaaagcagcgtgcgttcagccctgggctggccaaatttcgcagtctcctgtgcacagcggagggtgaagcagca

SEQ ID NO: 747544 - DNA, 50 bp, Homo sapiens
gtgacactcaacaggattcccgatcttacagactctttcagcacctacga

SEQ ID NO: 747545 - DNA, 100 bp, Homo sapiens
gttttctctgccatgttgctattgcaggacggaggtcctctcatcgttactgaagagcttcactcccttagttttgaaacccaattgtgccagcctggtt

SEQ ID NO: 747546 - DNA, 90 bp, Homo sapiens
ggatccttgtgggcatgatccataatcggtttcaagggtgaccaaggcgagaggggtccagtggggcaaccaggccctcagggaaggcag

SEQ ID NO: 747547 - DNA, 100 bp, Homo sapiens
tcaagcaatggtaaaaaaggaaaccctggtacgagtggctgctttacagaatctggtgaagataatgtccttatattatcagtacatggagacatatatg

SEQ ID NO: 747548 - DNA, 83 bp, Homo sapiens
ggagaactttgcactcgttagctcactggttttcggctttgtgagaaaccttaccatcaaacacgatggccagcaacgttacc

SEQ ID NO: 747549 - DNA, 100 bp, Homo sapiens
ctttccctctcccaacatggcggcctcaggtactccaaagattcaggtttactcacgtcatccagcagagaatggaaagtcaaatttcctgaattgctat

SEQ ID NO: 747550 - DNA, 97 bp, Homo sapiens
gcgagccgcctgccccggtgcgcagacagagctattccagcaccagcagaggcagaatccagagaccacatttgaagtatatgttgaagtggcctat

SEQ ID NO: 747551 - DNA, 75 bp, Homo sapiens
cctgccgtccatgcggaagatcgtcgccacctggatgctggaggaatggtcctcgtccgaagtgagaatgggcag

SEQ ID NO: 747552 - DNA, 82 bp, Homo sapiens
acgtgggctcgctcttcgacgacggcgaactttctgaccaagtatacaactacccagagggcctaggagaagtgctgtatag

SEQ ID NO: 747553 - DNA, 50 bp, Homo sapiens
cttaggtatttaagtactgaaagcaatggctgccatccggaagaaactgg

SEQ ID NO: 747554 - DNA, 100 bp, Homo sapiens
ggcctgtcatgagagacacgatgagaagtccttaaaggtagatcactgattcacaggggagcaggcggaggcaaggaaatgcactcggtgatggaaagag

SEQ ID NO: 747555 - DNA, 87 bp, Homo sapiens
ggcaaggacgagccggggcgctgaaggtcttgggcgtctttggtactggcttttttaggggtctgcctggggattacccttgctgtg

SEQ ID NO: 747556 - DNA, 100 bp, Homo sapiens
caatgaatggacacagtgatgaagaaagtgttagaaacagtagtggagaatcaaggagttggcatcctttggaagagttcgtgaaagctttctgcccaga

SEQ ID NO: 747557 - DNA, 74 bp, Homo sapiens
tgggattaaatctggacgctatatccaggtgatgatgaacagtctacacagatggctgcaagttgggaagatga

SEQ ID NO: 747558 - DNA, 75 bp, Homo sapiens
cgagaggaccatcctgggtgctggccctgtgctggagggtttttaatgaccacaacaagcaagcatgcagcttac

SEQ ID NO: 747559 - DNA, 83 bp, Homo sapiens
aaaggattagcgagaagaaaatgtccacccccatcgaagtgttgtgtaaaggctacccttgtgaatgactggcaggaggactg

SEQ ID NO: 747560 - DNA, 100 bp, Homo sapiens
gcggccgcgaccccggccccggcctcggccgtggcgagcggggcaaaatctccaaaaatcttgccagatattctgaagaaaatcggggacacccctatgg

SEQ ID NO: 747561 - DNA, 76 bp, Homo sapiens
cctcgattctttgcagaagaggaagatggaggagaagtaccagttctaaatgtcagttataagccacagaaaatta

SEQ ID NO: 747562 - DNA, 50 bp, Homo sapiens
cccggagtgattgcccggcagagcgcgtgccccaccttagaacagtatgc

SEQ ID NO: 747563 - DNA, 100 bp, Homo sapiens
gatgatgcagaggagcgagctgagcgcctccagcgagaagttgagggagaaaggcgggcccgggaacaggtcccacccacctctgcctccgccatggctg

SEQ ID NO: 747564 - DNA, 118 bp, Homo sapiens
aagccttcctggttcttctatatattttgatttataaccgtgagatgttgctgctcagttgccaagcaaggtttatggttggctgtgggagatgtgatgactggtttcatggtgattg

SEQ ID NO: 747565 - DNA, 82 bp, Homo sapiens
ccttcacctgcagaagcgtgtcgttctgcaccagcgccttgatcgagtacttgaggctgtctgtccccagaccccagagcac

SEQ ID NO: 747566 - DNA, 83 bp, Homo sapiens
caaagctgtctgggccaaaggaataagaaacatgattcccgtgacagaattccggcagttctctgagcagcagcctgccttcc

SEQ ID NO: 747567 - DNA, 100 bp, Homo sapiens
ccacacgggcctccgaagagctgccgcgacgcccggcccgcagggcagatgccacagggcccagtgggctccgggtcctgccccagggctacggctggaa

SEQ ID NO: 747568 - DNA, 75 bp, Homo sapiens
tccgagccagccgctgttttgccggaggagcccctcaggccaaggaagaatcctgctcaaaaatgaggtgaatta

SEQ ID NO: 747569 - DNA, 111 bp, Homo sapiens
caaccctgaagatatttagagatggtgaagaagcaggtgcttatgatggacctaggactgctgctttggagtttaacccttctgccaatccagaggcaagcacaatattcc

SEQ ID NO: 747570 - DNA, 83 bp, Homo sapiens
tcaacatggcaacttctggtaatggtcaggatagagagatgaactaccaacagaatcctagagacaactttctttctttggag

SEQ ID NO: 747571 - DNA, 90 bp, Homo sapiens
aatgagcatccagtggaaaacacgccagcttcaaagcaagaatggacagcaaattatggatgaacctatgggagaggaggagattaaccc

SEQ ID NO: 747572 - DNA, 100 bp, Homo sapiens
cgggattcgcggcccggagctcgggaccggacttggatgttgtgggtgatggtatgcagtgtcctccttcacctttgctttttgatccttcactaaccct

SEQ ID NO: 747573 - DNA, 118 bp, Homo sapiens
ccccggcagcgcccggcgacccctgctgctgctactgctgttgctgctgctcggtttacccaaggtccagcctagcccctaggcaccatgtcggacagtgatctaggtgaggacgaag

SEQ ID NO: 747574 - DNA, 100 bp, Homo sapiens
gtctaaaggagcccatcgtgcgggtcttgcaaaggagtacgagagggcctccaaagtggaccagtttgtgacgcgcttcctgctgcgggagacggtgagc

SEQ ID NO: 747575 - DNA, 83 bp, Homo sapiens
attggatttaaaagacagtcctcgtcagcactgactttcagctatggaatcgaaaatgtggtgacctggaagaagaactcaag

SEQ ID NO: 747576 - DNA, 100 bp, Homo sapiens
ggaaaaagcggccaaagaagtgaagctgctgctactcggccctgatccttcaccagctaggccgctacagtctggcggagaagatcctccgggacgcggt

SEQ ID NO: 747577 - DNA, 100 bp, Homo sapiens
actgcggagcctgcgggtcgccagcggccccgccgagagccggaggcaatggatgaacagagcgtggaggtccagccgccgcagggaatgacgccggtgc

SEQ ID NO: 747578 - DNA, 100 bp, Homo sapiens
aatccgcccgcaagagcgagccgcctgccccggtgcgcagacagagctattccagcaccagcagagtcctggttcctctgataagatcgacaaaagaaac

SEQ ID NO: 747579 - DNA, 75 bp, Homo sapiens
gcattggtatctacggcctggacttctatgtggtgaaaagccatacaagtgtacctgggaaggctgcgactggag

SEQ ID NO: 747580 - DNA, 90 bp, Homo sapiens
ccatgttaggacattatgtaaattgtgaggattcttatgtggctagtttgcagaataagaagatctacttggacattattcacacataca

SEQ ID NO: 747581 - DNA, 82 bp, Homo sapiens
cgcggaatctgggtgcagttcctgcagtaccccactctacgatcaggctgggtggagaaggaaacctactattagccccccg

SEQ ID NO: 747582 - DNA, 98 bp, Homo sapiens
taacactgaaaccaatggtgaatttgacatatctgaagagatggattaagaatgctttggattaaggattgtggagcacatttcaatcattttaggat

SEQ ID NO: 747583 - DNA, 100 bp, Homo sapiens
tccaagatgtagctaatgaccgtggttcccactgagactgggaagaagagcaggtcagcagtccaaatattctacgacttatttatcaaggacgatttct

SEQ ID NO: 747584 - DNA, 95 bp, Homo sapiens
aaaccccacaagcactgcatacgcctctcaacattgcctacagccacatctacagctcctacaggaatttcgtggggccacctcatttcaagact

SEQ ID NO: 747585 - DNA, 100 bp, Homo sapiens
gccactcacagggcttcaacaagctagctgagcttgagatcttcttagcccagagagcagtggagttgagtgaggaggcagatgtcctgtctgtgagcca

SEQ ID NO: 747586 - DNA, 100 bp, Homo sapiens
gtcgggcctgtggaagaagcgccgcgcacggacttcggcagaggtcttgttcagcgttgcgtaatcatccagaaagatgacaatggatttgggctgacgg

SEQ ID NO: 747587 - DNA, 75 bp, Homo sapiens
gatctttccggatcaatccagatggcagccagtcagtggtggagctttggagtttaacccttctgccaatccaga

SEQ ID NO: 747588 - DNA, 50 bp, Homo sapiens
gggcgctccggtggcggcggagatctcacattcttgaaggtggcattgaa

SEQ ID NO: 747589 - DNA, 106 bp, Homo sapiens
cgaaggctgtgcggtctgccaggagctgcggccccgtccggcccgggctgggcaacgggcatgaggaggtagttgcatgcgcctgggatggacagacatatatcat

SEQ ID NO: 747590 - DNA, 90 bp, Homo sapiens
atctcgaggagcggctgatagagctgctcaggtacactcacgtggaagctgagtgtcctttcctgacttttgacgacctcctgaaccggt

SEQ ID NO: 747591 - DNA, 100 bp, Homo sapiens
cggccctgctgaagctgctgcagtctccaaaaaaagttggtgatgacattgccaaggcaacgggtgactggaagggcctgaggattacagtgaaactgac

SEQ ID NO: 747592 - DNA, 90 bp, Homo sapiens
cggcagtcggatagacaataccacaacaacacattttgcagagccctcttggaacagagatcatgatgacacggcatctactcgttcagg

SEQ ID NO: 747593 - DNA, 75 bp, Homo sapiens
atacagccaagatcttggcaaagcttctccctcagtatttagaccaggatctcgaggacctggaagaagcagagg

SEQ ID NO: 747594 - DNA, 88 bp, Homo sapiens
gcacaggcagacgcgggccagcctcagcaccgacagccgacgcgcagatagcagagccatccttgggtcaggatggctaaaggtgacc

SEQ ID NO: 747595 - DNA, 73 bp, Homo sapiens
tgacaacatcatggtcaaaaaaactggccaggacaaggagcatccaagatacctgatcccagaactttgcaaa

SEQ ID NO: 747596 - DNA, 74 bp, Homo sapiens
gatttcctcccggacatgatggtcgagggccgcctgctcgttcctgacagaatcggggccttttccgaagtggt

SEQ ID NO: 747597 - DNA, 75 bp, Homo sapiens
cgctactctccgggaggggcgcttcccgacgccaaggaggatacgaagcgttttcggcttcctgcccggagctgt

SEQ ID NO: 747598 - DNA, 83 bp, Homo sapiens
aatcccccactctttccgccctaatggaggtctccagtttcgtaaataacagatgcgggtgaaagatccaactaaagctttac

SEQ ID NO: 747599 - DNA, 96 bp, Homo sapiens
aaggacgtaatactccactgtgcgacagctgtcttgtcgacggtctcactgatgcctcttctgcattcaaagttcctcgacccgggccagatacac

SEQ ID NO: 747600 - DNA, 82 bp, Homo sapiens
cccggtgtgcctcggcagccttgcgctgctctaatggtccggacttccgtgtggacctgatttcccatcgccttctgtcccc

SEQ ID NO: 747601 - DNA, 90 bp, Homo sapiens
agaggagagctcagaattgccaagatttatgacaggggcagccacaccacagtgggcgtcggcggacggcttgaggggttgacccaggac

SEQ ID NO: 747602 - DNA, 96 bp, Homo sapiens
gacgatctgcacttcgcattttggcattgacatttaattttagggtcctttatatagaagggagagtaggggtgagcccctccagactccgaatag

SEQ ID NO: 747603 - DNA, 80 bp, Homo sapiens
gtcccgaccctggccgccccgagcggagcctggagagctgcctgagaactggacagacacgcgggagacgctgctggagg

SEQ ID NO: 747604 - DNA, 100 bp, Homo sapiens
aaggtggcgtggctggcgattcgtgttcgtgagggccttttctggtcatttgattgcccgcctcagaacgatggatctgcatctcttcgactactcagag

SEQ ID NO: 747605 - DNA, 100 bp, Homo sapiens
gacggcttggttggggtcgctgcgaggggactactaggagcgccgaggcgtttgcaccttctgctccatctcctcaccacatcagcccccggagagttcc

SEQ ID NO: 747606 - DNA, 80 bp, Homo sapiens
ctaccattcgcctgatgaactctcagcctggtctgccacctcagaacttttcaatgtctgtcacagttccagtgaccagc

SEQ ID NO: 747607 - DNA, 100 bp, Homo sapiens
ccggccccgctgccgctgctgctgggcctcttcctccccgcgctctggcgtagagtaggtggcaagtgggagaaaccatcagaaattttggaaatcaaag

SEQ ID NO: 747608 - DNA, 83 bp, Homo sapiens
ggtcaagatcgccgaagtagactgcactgctgaacggaatatctgcagcaagtattcggttcagacagtaactttaattccag

SEQ ID NO: 747609 - DNA, 75 bp, Homo sapiens
ctcagaactgagaagctgtcaccacaggctatatggaaagcacaggtgtttctgcttctggagaggccccaggaa

SEQ ID NO: 747610 - DNA, 90 bp, Homo sapiens
cacagaacagcgacagtacaaagaagactcttgtcacactaattgccaacaacaatgtggatatcaaagtattgcagagtgccttagcag

SEQ ID NO: 747611 - DNA, 73 bp, Homo sapiens
gtggcaactctgtgggatggacatgcagccgtttggcatggtgaatgaaaactttgccattgatttgatagca

SEQ ID NO: 747612 - DNA, 50 bp, Homo sapiens
cacctttgctgcaaaaaattacggtcaacagctttggggatgacgaagag

SEQ ID NO: 747613 - DNA, 75 bp, Homo sapiens
gcagctcacctgagagacggagccccggctcgcccgtgtgcagaggtccctgtgcgttttattgcgacctgccgg

SEQ ID NO: 747614 - DNA, 75 bp, Homo sapiens
tcctcgaagtagacctcaaaaatggataccctgcagtgcactgtagaacagaagataagaacttttctctgaatt

SEQ ID NO: 747615 - DNA, 51 bp, Homo sapiens
taattgaggatctcaaacttgcaagaaagtcaatgcaaaatcatgctgccg

SEQ ID NO: 747616 - DNA, 83 bp, Homo sapiens
ctgagatggacctgggaactccaacatatgatgaaaaccccatgaagttcagacttggttccttcaacctagagaaagttgaa

SEQ ID NO: 747617 - DNA, 75 bp, Homo sapiens
agcgattttagtttatgacataacagatgaagattcttttcagaagctaaacaagcattgaggaagcagcaaaca

SEQ ID NO: 747618 - DNA, 100 bp, Homo sapiens
ccagcagcactgtggaggccgtcctcgcttcggaaccaaaaagaagcttcccagagccggggccaggagccccaagcgccctctagcagcaaacacagaa

SEQ ID NO: 747619 - DNA, 90 bp, Homo sapiens
atttggagctggggctactgctggcaacattcctctgctggagccagttctgcttctcggcaaggagcgatttgctggtgtagacatccg

SEQ ID NO: 747620 - DNA, 49 bp, Homo sapiens
caagattgtccccattgccatccagcctgtcctgggagctggagaggat

SEQ ID NO: 747621 - DNA, 101 bp, Homo sapiens
ggaaccggctccggggccccgataacgggccgcccccacagcaccccgggctggcgtgaggcaatgagaagcacgaccttcatgttacctcccagcagggc

SEQ ID NO: 747622 - DNA, 88 bp, Homo sapiens
tgccaccagaacccaagaagattccgataagaaacacgaatgttctgaaggatctggaaaagagaaaagctgatttaaataccatcac

SEQ ID NO: 747623 - DNA, 75 bp, Homo sapiens
ccttcagtatctcagtcctccagtgtttggatattcaggaaagatgaatgggagggctgattttcgagagccgaa

SEQ ID NO: 747624 - DNA, 100 bp, Homo sapiens
gatccagaagtccagagctgaggactgcctgtttgcaggtgtggccgacgacgatgccctcgctgaggagcgcatgcggagaggccagaacgccctgcca

SEQ ID NO: 747625 - DNA, 74 bp, Homo sapiens
cacgggactccgaagcccagcggctccccgactccttcaaggactctccagaaagagcaacagtaatggagtac

SEQ ID NO: 747626 - DNA, 100 bp, Homo sapiens
tgaaaaaatgagcgaactggaacagttgaggcaagaagcagaacaactgcggaatcagattcaggtatattcaagagcaaatgaccaagagccatgtggg

SEQ ID NO: 747627 - DNA, 126 bp, Homo sapiens
gtggggagaacttatagcccttgaagtcaaccatctcacacctttccaaaggacgcgaccataactctaaaagaacatagataccctggagcgaatagccgggctggaacaggaggacttggtgga

SEQ ID NO: 747628 - DNA, 51 bp, Homo sapiens
ttccaaggagggcaaagcgtcctgcgggacttaagtcacaacagattatct

SEQ ID NO: 747629 - DNA, 74 bp, Homo sapiens
cagccgcgctgcgccttccacactgtgcgcttatcccttttactattcagcgactatgtgaattgttaacagat

SEQ ID NO: 747630 - DNA, 75 bp, Homo sapiens
cttatgagtacctttgtcatttggaagaagcgaagaggtggtatggtcaggaaaaagactacaatgtactagtca

SEQ ID NO: 747631 - DNA, 98 bp, Homo sapiens
gaagtgcagctgcctcagttcttagcgcaggtattgttgcagcatctggcagtgagactgaggatgaggacagcatggacattcccttggacctttct

SEQ ID NO: 747632 - DNA, 82 bp, Homo sapiens
ctctgcaggcttgccgaagaagggaggtggaacacctgcagcaggagactgctgctctgaaaaagcaaatgcaaaaaataaa

SEQ ID NO: 747633 - DNA, 100 bp, Homo sapiens
gcagaacgcccgccctggagcagttaggaccgaaggtctccggagagtcgccggcggtgccagcccatgactgaagagttgctgaaacaacaaaagctga

SEQ ID NO: 747634 - DNA, 50 bp, Homo sapiens
tgtaatcccagcacttttggaggccgaggatttaagtgccctgtatgctc

SEQ ID NO: 747635 - DNA, 101 bp, Homo sapiens
gccaaacgtcatcattaagttggagcagggagaggagctgtggataacgggaggtgaatttccatgtcaacatagtcctgagtgaagttcccagaccctac

SEQ ID NO: 747636 - DNA, 100 bp, Homo sapiens
gaaggtttttgctgcgccaacgcagtgaccgaaggctccgctcacgcccggatgctgataggtcttgctggctacctgagtggatatgatggtacctttt

SEQ ID NO: 747637 - DNA, 82 bp, Homo sapiens
ctgtgtgcggtgctgctgagcttggcctcggcgtcctcgggagcaaatggaatgatgactttgaaaaccactggcttacgcc

SEQ ID NO: 747638 - DNA, 90 bp, Homo sapiens
agcagccatggccccagacttgtcgcacggatgcagaaaacttaatggaggaggctgaggtgttaagtgtgatgcttccataatacattt

SEQ ID NO: 747639 - DNA, 101 bp, Homo sapiens
ggccgccgccgccgccgcccaggcgcaggtactccaaagattcaggtttactcacgtcatccagcagagaatggaaagtcaaatttcctgaattgctatgt

SEQ ID NO: 747640 - DNA, 74 bp, Homo sapiens
aagctgacccctgaaggaaacaaagctgaagaaatcaggggagaaacccctgcttggtggaagcctgatggaat

SEQ ID NO: 747641 - DNA, 100 bp, Homo sapiens
ttcatgaacaagaaatcttgcacagagatctcaaactaggcctcctctgtagaatggaaactctgtacccctgcttgtcttaggacctcatggatcccag

SEQ ID NO: 747642 - DNA, 143 bp, Homo sapiens
gagtcctatccagggctggcctgagctgccaggatgggctccagccactcaacactctgaactgaaacaagaaggactgaaagaggtgtccccactgcctctaaatctcaaacgtttatacaaagagacactggaaattgaac

SEQ ID NO: 747643 - DNA, 100 bp, Homo sapiens
tggtgtgagcctgacgtctagttcccaggttagaaaatggatttctgactggaatctcaccactgaaaaaaagcacacccttttaagactactttatgag

SEQ ID NO: 747644 - DNA, 50 bp, Homo sapiens
agagctgaggactgcctgtttgcaggtggtctttgggaagaagcttcctg

SEQ ID NO: 747645 - DNA, 100 bp, Homo sapiens
ctgctttatatttctctcagaccattcccatcagtgagcattacaggtacattttgaccaatttaaagaagcattaatactcatcttgtccagaactctg

SEQ ID NO: 747646 - DNA, 130 bp, Homo sapiens
tcttaactgaagaattggacaaagcattagcttgttttcgaaatgctatcagagtcaatcctagacattataatgcatgtgagaaagatcagtctaaagaaaaggagaagaaagtgaaaaaaacaattcc

SEQ ID NO: 747647 - DNA, 83 bp, Homo sapiens
aggaagccggccccctgcctgcccgcgcctagaccccattcagctactgcagcactggggtgtcagttgttggtccgacccag

SEQ ID NO: 747648 - DNA, 82 bp, Homo sapiens
ctttctcccttgatccgggagtctttccactggggcagctgtgcggagggtagtggcagccatgaaccggatggaccagaag

SEQ ID NO: 747649 - DNA, 100 bp, Homo sapiens
agcctgttggagaaacacaaagagggctacaccaagtccattgatatttggtctgtaggctgcattctggcagaaatgctttctaacaggcccatctttc

SEQ ID NO: 747650 - DNA, 107 bp, Homo sapiens
gttagatgacactggtttggcttatatatgtcagacgtatgagcgtttctcccatgttgccatgatcttgatgccccctaaaaagggaggtgatggaattaaaccac

SEQ ID NO: 747651 - DNA, 100 bp, Homo sapiens
ggaacaattatgctctcatgttaatgaaaagattggcaatattaagaaaaccttatcattaagaaactgtggcctccccatggccacccatggaccagtc

SEQ ID NO: 747652 - DNA, 100 bp, Homo sapiens
attacggcgtgctgaaaacagatgagggcattgcctacagagtgcctggtgaagaatgtgatgggatcactagcatgtctgcggagagcggccctgggac

SEQ ID NO: 747653 - DNA, 100 bp, Homo sapiens
tggcactgctgctctgctgggacccgaggctgagccaagcaggagcttactccacgggaacagcctctagataatctgagttgttgaaaatacgaagcct

SEQ ID NO: 747654 - DNA, 50 bp, Homo sapiens
aaatcatgggtatttttgctaaagctgtgattttacaacgagatgctgct

SEQ ID NO: 747655 - DNA, 100 bp, Homo sapiens
tttgtatccaagatagttgacagtgggcctgcagccaaggaaggaggcctgcaaattcatgacaggattattgagtgttgaaaatgagcccatgagcaca

SEQ ID NO: 747656 - DNA, 83 bp, Homo sapiens
ctgccgtggctgctcaacaaggagctgggctgcatcaactcgagatgcagaggatgctatttatggaagaaatggttatgatt

SEQ ID NO: 747657 - DNA, 75 bp, Homo sapiens
tcgactatggcaacaagtacaagcggcgggtgccccggcatccggaggggtttccaggtatataagcaggtgtgc

SEQ ID NO: 747658 - DNA, 80 bp, Homo sapiens
cggctgcgggaaatcgggctgaagcgactgagtccgcgatggaggtttagctgtgcctcccagtgactataatgacaagg

SEQ ID NO: 747659 - DNA, 100 bp, Homo sapiens
aggaaggtcctaggggaccgccaggccgagctggggagaagggtgacgagggcagtctgcggcggtgttctggtgcacccccagtgggtcctcacagctg

SEQ ID NO: 747660 - DNA, 98 bp, Homo sapiens
cgtggctggaagacatggccactccagtcggtgttgagcacggcgagcagtctcaggcctttagtgatgatggaatagccaggccagaagaaggaagg

SEQ ID NO: 747661 - DNA, 75 bp, Homo sapiens
ctatgcttaccgagatgcggttttcctcgcagaacgcctttatgcagaaggactttgcctcccgggccaaactgg

SEQ ID NO: 747662 - DNA, 100 bp, Homo sapiens
ccagctcacccactgccagcagaggaggtgataacctttatgatggtattgaggacatgattggctatcggcccgggccctggatgaagtacagctgggc

SEQ ID NO: 747663 - DNA, 50 bp, Homo sapiens
ggtctatggactttccgaagacgagtgaggtctgccagtctttagtgaaa

SEQ ID NO: 747664 - DNA, 98 bp, Homo sapiens
tatgcactggcagctgctcatcagccgcacatcggagaaccaggtgcatcagcgcattgcggagctgaggaaagcaggtctgtggtcccagaggcgtc

SEQ ID NO: 747665 - DNA, 97 bp, Homo sapiens
ggccggcagccccgggacacccccgcaagcgagcagtgtctttggtgcaacactaacaaggcttgtctggactacccagttacaagcgtcttgccac

SEQ ID NO: 747666 - DNA, 98 bp, Homo sapiens
ccataaactattggattcataacctgctccatgcttgaaaacatggggattggaattcgaggcggaggagctgtaccagaagagagtgctgaccataa

SEQ ID NO: 747667 - DNA, 83 bp, Homo sapiens
cgaggagcgggaagagttgctggggtgacgcagctggaccagaggctggcactcatcaccgacatgcttcaccagctgctctc

SEQ ID NO: 747668 - DNA, 87 bp, Homo sapiens
aaagaaccctggctggggaaaagggaagtgaaaagagatctgttttcagcttcctggagatgatggaggctcgcagccgtggccatg

SEQ ID NO: 747669 - DNA, 82 bp, Homo sapiens
gcacatattaaagtcaaccaatatgaaatgcctgactccagaaaagatatttggcatgatcttcagtatgatcttgtgctgt

SEQ ID NO: 747670 - DNA, 82 bp, Homo sapiens
cgccgctgagggaccgcggggttagccactgctggctgcttccagtgttcgccgagagctggcgcctactatccagcccaag

SEQ ID NO: 747671 - DNA, 82 bp, Homo sapiens
ctcgggtttgggcgaccaggaggtgccggtggccgcgctcggacccgaatcccaaggactgcagcaaagccaaaaagctggt

SEQ ID NO: 747672 - DNA, 90 bp, Homo sapiens
gcaacagctaaaatctcaaagacaagaggagacactgagggaacaaacacttctggatgcatccgatgcctttgtggaactgtacggccc

SEQ ID NO: 747673 - DNA, 82 bp, Homo sapiens
ccccctcctcacccgaacatcagggccctccagactcaggcgccccaacactgtggaataatggcaacagaaagactggcta

SEQ ID NO: 747674 - DNA, 90 bp, Homo sapiens
ctttcggcaagaactggattcgtggcgccacaagctcattcactgtgtaggtttggtgcacctcgatttggaggaagtagggcagggccc

SEQ ID NO: 747675 - DNA, 51 bp, Homo sapiens
gagcaattgctggtcctgagcctgagaaaatatttacaccagcagctccag

SEQ ID NO: 747676 - DNA, 50 bp, Homo sapiens
cacagggcttcaacaagctagctgagctgcagaagaaagatcagcaactg

SEQ ID NO: 747677 - DNA, 75 bp, Homo sapiens
cggttcctgaaggaccctggtggaggaagaaagggtaaagttctttacaaagttcgctggaaaggctatacatcg

SEQ ID NO: 747678 - DNA, 83 bp, Homo sapiens
ggccgcgcctggcctggccgggaccatgcatcaagatggtgctcatgtggaccagtggtgacgccttcaagacggcctacttc

SEQ ID NO: 747679 - DNA, 85 bp, Homo sapiens
cgccaggactccctggaagcctagaaatgaggctagtattactagcttgaaacaagctgccctggttaaagcgcctctcattccg

SEQ ID NO: 747680 - DNA, 100 bp, Homo sapiens
cacatcctagcccctttccttactggatcctcaaaccagaagaaaacctgaatctctgaggtgagggtcccgatgtcctggtgtacagcttggactttgg

SEQ ID NO: 747681 - DNA, 81 bp, Homo sapiens
catcgtctcctgtgtggcgatggtcttcctgctggggctcatgtttgagacctgcctagagctggaacgttacctccagag

SEQ ID NO: 747682 - DNA, 75 bp, Homo sapiens
cgagggcaggtggtctgtggagctggtcaacgaccgcggggcgcagagagctatttgtccaagaactctgaagat

SEQ ID NO: 747683 - DNA, 100 bp, Homo sapiens
gattcgcgctgctgggcacccacggagcctccggggctggactccatccccgtgtctacctccctccttggagacacttccgacacgacctctactggcc

SEQ ID NO: 747684 - DNA, 100 bp, Homo sapiens
agtgggggtgtgcaaacccgagagaactggatgtgaaaggaccacccacccaccgtctgtcttgtggtcagtcaccctacaccgagacaacaacgtggga

SEQ ID NO: 747685 - DNA, 98 bp, Homo sapiens
cagagaagcaggacctcgggccatgggaatttgctgcactgacaaaagaattaaatgcctgcagggaacaacttctagaaaaggaagaagaaatctct

SEQ ID NO: 747686 - DNA, 100 bp, Homo sapiens
cgggacagagcgcctgcgaccccagtcggtgctccggggaggtcacctgacgaggagaggatgtactgagtaaagatgctggggaatgtgcaatatgcct

SEQ ID NO: 747687 - DNA, 100 bp, Homo sapiens
acagggccgtgccgcagatgcccaccggaatggagaaggaagaggagtcgaaagaactggttgtcttcttgggcggtgttgcagggttcatctttacttt

SEQ ID NO: 747688 - DNA, 100 bp, Homo sapiens
ggaaggttcgggaagctgttggagcagtgtggggaatttcccaccaggatgagtatgattggctgtgattttagtaacagagtatgcaagaggaggagac

SEQ ID NO: 747689 - DNA, 50 bp, Homo sapiens
ccgacatcgcggccttcttccgatccgctttgcccgaagtttttacatac

SEQ ID NO: 747690 - DNA, 98 bp, Homo sapiens
cggggcccaggtgagaaaggcccacctgtgtcctggttgagggtctccagggttctttggggcccgagatttctacctggacaaggactggtactata

SEQ ID NO: 747691 - DNA, 95 bp, Homo sapiens
aagtctggactggctccccgtgtggatcaggagaagtgggcccagcgttcattcaggggcgacctatctactgctcttgaggtcgccattgactg

SEQ ID NO: 747692 - DNA, 75 bp, Homo sapiens
tatctgggttacacattctgtggctggattgtcttaggaccataccatgacaagcatggagatatggaccaaaag

SEQ ID NO: 747693 - DNA, 88 bp, Homo sapiens
agaagagagcctaactgaaaggaagagggagcagagcaagaaaaaaaggaagacgatgacttcagtttgcctgagaatacagatcaac

SEQ ID NO: 747694 - DNA, 75 bp, Homo sapiens
gttactgcaatggcatgaaaaggtggagccttacaaagtaaacctctctcaagatttagagcatcagctgcaaaa

SEQ ID NO: 747695 - DNA, 90 bp, Homo sapiens
taagattgaatgccaagcagaaaattacctaaatgcactctttcgaaagaaagacgttacatccaagaggaaataatccaggcaaggaag

SEQ ID NO: 747696 - DNA, 76 bp, Homo sapiens
acttgtcttccactaaagagttggacctgtcagagctcagaggacgaatcaaaatgggtagaagaactcatgaaga

SEQ ID NO: 747697 - DNA, 50 bp, Homo sapiens
caaaaatcagagtcacacttaaaagaaggactgaaactgttgaggagccc

SEQ ID NO: 747698 - DNA, 75 bp, Homo sapiens
tgaaagagccacagagttggcagaactgtttgaaaatgctctgcagaaccttggcctgaaaatgctacattatat

SEQ ID NO: 747699 - DNA, 95 bp, Homo sapiens
atgcaccagagctttgacaacctctactccatggggtacagaagtgcaggtggatgacatcaagcgggtctactcactcttcctggacgagtccc

SEQ ID NO: 747700 - DNA, 127 bp, Homo sapiens
cccttggaaacacgctggcaagcaagattataatcaggaagtggatgcctccatttttaagaatttcgctaaggagtttgtgatcagtgatcggaaggagctggaggaagatttcatcaagagcgag

SEQ ID NO: 747701 - DNA, 95 bp, Homo sapiens
accagcatttagagctgtttatgaagcactgagaaatcttcttaatgaagaggataactcagaatcatcggctatagagcagccacctacttcaa

SEQ ID NO: 747702 - DNA, 51 bp, Homo sapiens
gattggcccactttccccattcacagttttggtatcagcatgatgctggcc

SEQ ID NO: 747703 - DNA, 75 bp, Homo sapiens
caccatcctagaggtcaagatcagctctggctaggaaggaggagacagttactgtctatcccgcagacgtggtgc

SEQ ID NO: 747704 - DNA, 100 bp, Homo sapiens
tttcacactgtaagtctgagcatcagtttaatattgacagcatggttcataaacatggatttggtgctatggagaaatttttggtagaatataagagtgc

SEQ ID NO: 747705 - DNA, 98 bp, Homo sapiens
gggccacaaatgctccttctcctggagacgcaactcaagtttctacagcagtataatcactacaaatccaatgtggagattttcaaattgcaaccaaa

SEQ ID NO: 747706 - DNA, 88 bp, Homo sapiens
aagtcttccagtatgaatcccacagaaaccaagaatttttgacagcagctgtatatcttctaagattccgctcctcaccaccatcagg

SEQ ID NO: 747707 - DNA, 51 bp, Homo sapiens
cttggattatctcaacattctgttggtggagcagttctggaggttttatag

SEQ ID NO: 747708 - DNA, 119 bp, Homo sapiens
cgccgccatcctcggcgcgactcgcttctttcggttctacctgggagaatccaccgccatccgccaccatggggcagggtggacaggaagcagctcagcccagcctgggagaggccaag

SEQ ID NO: 747709 - DNA, 73 bp, Homo sapiens
aagcagaggagcagcaggaccaggaccctgatgctcccataagacagaaaatgccccttgatgatctggatag

SEQ ID NO: 747710 - DNA, 124 bp, Homo sapiens
tgagaagaccaccatcaacaatgagtacaactaccgctgctggaccacaaaccgctgccagaaaagtgctggagaatctggtaaaagcaccattgtgaagcagatgaggatcctgcatgttaat

SEQ ID NO: 747711 - DNA, 100 bp, Homo sapiens
acaagaaggagatacattaaatgcaatagcccttcagtactgttgtacgctaagatatcaacatggactagggactccagacttgcggcaaacccttccc

SEQ ID NO: 747712 - DNA, 75 bp, Homo sapiens
gcccaggacctccaggggaacaatgaggcctacgcagagctcatcgtccttggtacaccaggggttggaaaaacc

SEQ ID NO: 747713 - DNA, 122 bp, Homo sapiens
aaacagcagtatgatgaactggaggctgagtacgacagcctcaaacaggagctggagcagctcaaagagattttacatcctgaagtccaaactctagatctacggagctgcgatatatcaga

SEQ ID NO: 747714 - DNA, 98 bp, Homo sapiens
atgtacacattcacccttcatcagtgaactatcaggtgatgaagccaacccttgcaagtttcaggcctgtaatgaattttcagagtgtctggtcaacc

SEQ ID NO: 747715 - DNA, 110 bp, Homo sapiens
acaaaacctcagtcatcgtcacgagtcctgagtcggttaaggcatttgcccccagcacagcaaacgtttcctgagagctctaaccaaagacaaacttttggaagccaaac

SEQ ID NO: 747716 - DNA, 101 bp, Homo sapiens
agaagaggattggaggtgtcagtgttaaaggaacctctacaacgaaggtgaagccacggaagataagcaaagaacagtctgaacttgatcaagatttggat

SEQ ID NO: 747717 - DNA, 101 bp, Homo sapiens
aggaactgcttttgagtgagatggtcccagaggcctggaggagcggactgattctctcgggcctagccgtccttggaacccgatattcgggctgggcggtt

SEQ ID NO: 747718 - DNA, 89 bp, Homo sapiens
acccggcggccaaaggccagtgactaccaacgtttggaccagaaggaattgaatgatctggcacgggaccctccagcacagtgttcagc

SEQ ID NO: 747719 - DNA, 90 bp, Homo sapiens
aggccattggctctatggaaaacactggaaatgcttccagactgcacacttttacttagaggacagtacatcccctagagttatatccac

SEQ ID NO: 747720 - DNA, 90 bp, Homo sapiens
caggcctcgtgccgttacggccatcacggcggccgcagtggcgtcctggagccctcctcaggctgatgaattcatccgagcaaatgccac

SEQ ID NO: 747721 - DNA, 48 bp, Homo sapiens
caccctgttgtggctctataagcaggaatgtatcctgtcaggtataat

SEQ ID NO: 747722 - DNA, 101 bp, Homo sapiens
gaagaccgcgcgcagggcctgcagcgggagctggacggcgagcgcgagcggcgcgagaaatgtctccagaacgctatagctatggcacctccagctcttca

SEQ ID NO: 747723 - DNA, 100 bp, Homo sapiens
tgccgatgaaactcctgcgtaagaagatcgagaagcggaacctcaaattgcggcagcggaacctaaagtttcaggtatgctgcaaaagagcaccagcagg

SEQ ID NO: 747724 - DNA, 75 bp, Homo sapiens
acctcacagattccagcttcggaacaagagaccctgagaacttccctcagtgtgtgctagaaatctctgaccaag

SEQ ID NO: 747725 - DNA, 101 bp, Homo sapiens
gggggagatatcatgctctggaattttggcatcaaggacaaacccaccttcatcaaagggaattcaaagaagctttttcactatttgacaaagatggtgat

SEQ ID NO: 747726 - DNA, 96 bp, Homo sapiens
ggaagaggccgctgcggagcctgctcggcttcgtcgctgccaacctgctgttctggctgctttgactctcccgcgaagacctttccttcactgttc

SEQ ID NO: 747727 - DNA, 75 bp, Homo sapiens
cggatttgggggcttcctcactcgtggctttccgaaggctgctggttgagactgagctaaagttaatctgttgtg

SEQ ID NO: 747728 - DNA, 100 bp, Homo sapiens
atgatttcttcagatatgtcgaaatgtcaacatttgacatagcttcagatgcatttgccacattcaagctgcccaaactccaaaatgatggtagagaatt

SEQ ID NO: 747729 - DNA, 100 bp, Homo sapiens
acattacaagcagattgtttgggtcaaattgggaaattacagtcttacctgcagtggtgaaaaacggagacgggagcaggaaagtaaatatattgaagaa

SEQ ID NO: 747730 - DNA, 83 bp, Homo sapiens
cccgctcccgggaaccgttcccgggccgttgatcttcggccccacacggcgccatgtcagaaccggctggggatgtccgtcag

SEQ ID NO: 747731 - DNA, 99 bp, Homo sapiens
catcatcatcgtcaaagaagaagaaaacaaaggtagaacatggaggatcgtcaggctctaaacaaaattctggtatctacgagaccccagcaggcacca

SEQ ID NO: 747732 - DNA, 75 bp, Homo sapiens
accgtgtcttacatcagttcagagaggaccttgctaagcagtactctgacagactagaatgctgtgaaaatgaag

SEQ ID NO: 747733 - DNA, 83 bp, Homo sapiens
ggtctccaactagtattatgagaggagtcaatcagagaaaatggtgtgaatggaacattaacttcaaatgtagcagactctcc

SEQ ID NO: 747734 - DNA, 75 bp, Homo sapiens
tgttctctgtcctgaatgtgagaatcctgaaacagatttggacttgcaattgtgaccaaatatattacaaagggc

SEQ ID NO: 747735 - DNA, 97 bp, Homo sapiens
aaccatgagtgtaaggttaccccagagtatagacagatgtccagaaggcttcttgggggaatattgtcaacatcgagacccctgtgagaagaaccgc

SEQ ID NO: 747736 - DNA, 83 bp, Homo sapiens
ctgggtgattcacgtgtgcccaggccctgaggtgggccggacctgggagtggcagatcgccatggatcggatgaagaagatca

SEQ ID NO: 747737 - DNA, 75 bp, Homo sapiens
gtggagagttttctagaagcctgtcgaaaaatgggggtgcctgaggtgctggagaatctggtaaaagcaccattg

SEQ ID NO: 747738 - DNA, 100 bp, Homo sapiens
gggatcacaaacactcagagtggaaaaagtaccatcatttgaaacagaattcaattcgtcataatctgtccctacacagcaagttcattcgtgtgcagaa

SEQ ID NO: 747739 - DNA, 75 bp, Homo sapiens
caagctgctcatcatcggcgacagcggacttgaaaatactggaaatctgtccggatccaaattattttgcaagcc

SEQ ID NO: 747740 - DNA, 102 bp, Homo sapiens
cgctccactgtcggtagcaacaagcataaagccaaggtagaagcaatgaccctggacctcgctctgctccgtagcgtgcagcattttgctgaagcattcaag

SEQ ID NO: 747741 - DNA, 82 bp, Homo sapiens
cccgctgctcagcgtcctcatgtggggggtaaaccactcgcaattctgtggtgttcttggtcacacatttatggagtttctg

SEQ ID NO: 747742 - DNA, 76 bp, Homo sapiens
cagggggaacgaattatctggcccctggggggctttcaggaggcacgcggacctccagtggccggctccggaggct

SEQ ID NO: 747743 - DNA, 74 bp, Homo sapiens
ttcttgtacagttgagatgtgcagtgttacaactccttgtacctatggagttgtgtataagggtagacacaaaa

SEQ ID NO: 747744 - DNA, 100 bp, Homo sapiens
ggcgattccgcagtccccccgttccctggaggtcctgtggaatggaccttctaccgctttgaggctgtgtgggatagctctctgcataactcccttcttc

SEQ ID NO: 747745 - DNA, 83 bp, Homo sapiens
gcagctcctggtgcgtggcccagcctcagacttcctgggtctgcaggtccagccggctggcaccctccatgtacccaggggag

SEQ ID NO: 747746 - DNA, 75 bp, Homo sapiens
tgcctgctccacaagcggcgccgcgccctcggcctgcacggatgcctgaaatgtgcagatgccccgtgtcagaag

SEQ ID NO: 747747 - DNA, 74 bp, Homo sapiens
caggtctctgtcgagcagcggacgccggtctctgttccgcaggatgcttactgcagagtgggtctgggcatctg

SEQ ID NO: 747748 - DNA, 75 bp, Homo sapiens
cgaatatcttcccttacaagggttatatatggaattatggtaccctccctcagggtttggacagaggagccaaag

SEQ ID NO: 747749 - DNA, 75 bp, Homo sapiens
ccggcggagcctctggaatcacccgggtcgctgttcctgagcgggagatacagatgacccaccaagaattactca

SEQ ID NO: 747750 - DNA, 88 bp, Homo sapiens
cttggagcccagagccacgtcaaacagcgattttctgtgacatacatagaacgtcctgatgttaataaccgccacaaagtcccaccac

SEQ ID NO: 747751 - DNA, 129 bp, Homo sapiens
caagaatatctgttcctgcaactgcactgattctagaaacactctctattcgaactctcatgagaaatcaacagcagtgatatgtcggcccacgtcaccagcccctctggccgtgtgactgaggcagag

SEQ ID NO: 747752 - DNA, 82 bp, Homo sapiens
tagagcaaataaccgttttgaaattgacatggatttgattgacatactttggaggcaagatatagatcttggagtaagtcga

SEQ ID NO: 747753 - DNA, 96 bp, Homo sapiens
aagtcggccagggaagccgcggcctccctgagcctgacgctgcagaaagaaggtgtgattggagtgacagaggagctggctaaatatgaatacatg

SEQ ID NO: 747754 - DNA, 90 bp, Homo sapiens
cattaactaccgtctgggaatactagagttttgccgaattgacaagcccctgtgtcacagtgaggatgagaaactcagcttcgaggcagt

SEQ ID NO: 747755 - DNA, 90 bp, Homo sapiens
atgcactaatggcttatatggaaaatacagcgaccaactgattgtcgacatgcctactgataatcctgacaagcaatcatctccttgggc

SEQ ID NO: 747756 - DNA, 75 bp, Homo sapiens
cactgccaaagtggatgccattggactagagcttgtggacggcaagctccctgatggctcggagatcccgctccc

SEQ ID NO: 747757 - DNA, 100 bp, Homo sapiens
cagcagaggttccccacacatgtcaaagatgtggccactgtgtgccggcagctagcagagaagagaatgctgggtcataatcgtatcattgcctacagta

SEQ ID NO: 747758 - DNA, 78 bp, Homo sapiens
tgggctccgtggcaatgaattcttctgtgaactaataatcacaagaagttgtcagaatttggaattagaaatggcagc

SEQ ID NO: 747759 - DNA, 74 bp, Homo sapiens
gcccccaatttcccagctgctaaaggaagaggaaggctactgcagcactggggtgtcagttgttggtccgaccc

SEQ ID NO: 747760 - DNA, 51 bp, Homo sapiens
atgatccgggacctgtgccaggcagacaagcacaagctccgggtggataag

SEQ ID NO: 747761 - DNA, 100 bp, Homo sapiens
ctctggctccctcctcccagggccaggcgccgctcagaacgggttcaggataagtttgaggtgctgaattacacaagcattcctatctttctcccggaag

SEQ ID NO: 747762 - DNA, 97 bp, Homo sapiens
gcagcttcggcggcggcagagggtacatgtcccagagcaagcacacggaggcccgggagctcatgtactcgggagccctgctcttcttcagccatgg

SEQ ID NO: 747763 - DNA, 83 bp, Homo sapiens
gcatctatagcaccagtgactgtgagcacggcatggccagcgtcatctccagggtgctgttggcccaaaggttgccctgaagc

SEQ ID NO: 747764 - DNA, 100 bp, Homo sapiens
atttgagaaaccccctcaggtacagacccaggctcttcgagactttgagaaggtgacaatctctgtggatggcattcttaccacgacgggctacactcaa

SEQ ID NO: 747765 - DNA, 100 bp, Homo sapiens
tggtttcactaagttccatgcatccctgcctgaggtgaaaaaccatacaagtgtcaaatttgcaatcagtcttttagaattaagaaaacattaacaaaac

SEQ ID NO: 747766 - DNA, 96 bp, Homo sapiens
aaaaaattcatctgggcggtatctggaacttgggtacttcaggccctctgcagagacctcagctgtcaaaggtcaagaggaagaagccaaggggtc

SEQ ID NO: 747767 - DNA, 100 bp, Homo sapiens
caagaatggacttctagacatgaacaagggcctcagcctgcaacacataggccggccccacagcggcattggtttacccaaggtccagcctagcccctag

SEQ ID NO: 747768 - DNA, 100 bp, Homo sapiens
cgagaactggctgaagccgatgaacagcgccgggatccaggaagatgatccctatgatcttgaagatgtttctgcacagaaatgagggaaatacaaagaa

SEQ ID NO: 747769 - DNA, 80 bp, Homo sapiens
gtggcatcatatcagccattacagcgaaaactcttcactgcaggtgatgacaactccgtgagggtggagattatacatct

SEQ ID NO: 747770 - DNA, 76 bp, Homo sapiens
ctttttcagaaatgcgcagagcaaacatctttcaaagggtccccgcactcccggtgaagaacttgaatggtactgg

SEQ ID NO: 747771 - DNA, 100 bp, Homo sapiens
catgcccacggccgccgcccccatcatcagctcggtccagaagctggttctgtatgagactagagctgtgaagagcgattatatgttagagatagctgat

SEQ ID NO: 747772 - DNA, 82 bp, Homo sapiens
tcttctgcagcacatggtcttactggagcagccgccggcacaagcacccctcgtcacagataacgaaggaggcccaacttca

SEQ ID NO: 747773 - DNA, 122 bp, Homo sapiens
ccgggcggcgcgcctgtggagcgctgggggcggcctggggctgagcatggagcagcgcggcggaggtcatacttatcctgacgaagctgtatgacttcaacctgggcagcgtgactgagagt

SEQ ID NO: 747774 - DNA, 90 bp, Homo sapiens
gctgtgtggacgcggtgcgcaaatccctgcaaggggtggcaggcctatgttgtccttggccagtttctggtgctaaagaaagatgaagac

SEQ ID NO: 747775 - DNA, 75 bp, Homo sapiens
gcgtcgcgcgcgcctgtagctcgcgggcctcgcaggtaaagagaaatgtgtatgaccttacaagtatccccgttc

SEQ ID NO: 747776 - DNA, 100 bp, Homo sapiens
cttatggtgtcatctagaaaaacaagagatgcagattctgggtcacgaaggtactccaaagattcaggtttactcacgtcatccagcagagaatggaaag

SEQ ID NO: 747777 - DNA, 100 bp, Homo sapiens
ggcgccacgggggccatgtaagcagatgcctgtgaggagccaccaacatttgaagctatggagctcattggtaaaccaaaaccctactatgagattggtg

SEQ ID NO: 747778 - DNA, 100 bp, Homo sapiens
cagacactgctccctgtgaaattctgaaggagaatacttatctctggcgcacatcactatatttggctgcctctgccagtgctgaattctttgctgacat

SEQ ID NO: 747779 - DNA, 90 bp, Homo sapiens
gcgggaggcaacggagctaccagccgctgcaagctttcttcctggtggcagatgacatcatggattcatcccttacccgccggggacaga

SEQ ID NO: 747780 - DNA, 75 bp, Homo sapiens
cctgggatccagcccttctggtgtcacctcccagggtgactcaactccaggtacatgtcccagagcaagcacacg

SEQ ID NO: 747781 - DNA, 80 bp, Homo sapiens
tgaccatcatcctgctcctgggtgccgtggcatgtcgatttgtccttcactacagttcttggcacagctgaagatcatgg

SEQ ID NO: 747782 - DNA, 96 bp, Homo sapiens
ggaggatgcctatgtattccctggggatggcgcatcacacaccaaagtcaggatggctaaaggtgaccccaagaaaccaaagggcaagatgtccgc

SEQ ID NO: 747783 - DNA, 117 bp, Homo sapiens
cattgacactgttggtacagagggctggggagaggatgcagagctgcagttggatgaaggatttcaaggaacagatcatccaccatgtggccaccatcattctcatcagcttttcct

SEQ ID NO: 747784 - DNA, 98 bp, Homo sapiens
cttgaggaagagaacacgagcttgaagatcctccccggcgtgaaggtcatcatcgcacacaccgagaccaaaggacccttgggagactcacacctggg

SEQ ID NO: 747785 - DNA, 109 bp, Homo sapiens
aaaccacctggaaggaaaagctgcaatctcaaataaaatcaccagttgtatttttcagttattacaggaagcagccctacctgaacccatccttccatccctccaaaaa

SEQ ID NO: 747786 - DNA, 82 bp, Homo sapiens
aagcgggccaaggtgcacatcaagcaaagtacccacgtttgttcgaatgctggccccagagggagccctgaatatacacgag

SEQ ID NO: 747787 - DNA, 90 bp, Homo sapiens
ggcctgtcagttatcgggtgtgaccgccgccgcccaggcttatatttggcaccctttaccctgcgtattattcctacaaggctgtgaaat

SEQ ID NO: 747788 - DNA, 100 bp, Homo sapiens
tgtctcctggtgaccgagcacccgcctccgggcatcttcaactgagacagagctactggatctcagccttgtcaaagatgccagatgtgggagacacgcc

SEQ ID NO: 747789 - DNA, 88 bp, Homo sapiens
tcgggcccggcggagcggcccggccggagcgcccccgcgagctcggaccaggtgtcgtgaaaactacccctaaaagccaaaatgggaa

SEQ ID NO: 747790 - DNA, 83 bp, Homo sapiens
cccaggacttcggaactagacgagatatgcacccaatgtccagggagcgtgcaaaatttgtcaaaagtggccttttattgtaa

SEQ ID NO: 747791 - DNA, 89 bp, Homo sapiens
cggtatgagcgggagcagtatgccgatcgggcgcggtactcagccttttaaagcttgaggagaacgaagtgaaactcctggtagaacgg

SEQ ID NO: 747792 - DNA, 82 bp, Homo sapiens
ccagtacagcaccggcaagaccaccttcatcaggttttaaaatcaaagatgggaaaatcggagaaaattgcccttccccatg

SEQ ID NO: 747793 - DNA, 144 bp, Homo sapiens
gtgatggcaacggccaacttcggcaagatccagatcgggatttacgtggagatcaagcgcagcgatggtactaggttttgacaagcttgcatcatgcgtgagtataagctagtcgttcttggctcaggaggcgttggaaagtct

SEQ ID NO: 747794 - DNA, 74 bp, Homo sapiens
gctcaaaatggagttgccggagagacagcccaggggtagaaatatttctgtcatggctcattcaaagactagga

SEQ ID NO: 747795 - DNA, 98 bp, Homo sapiens
ttctctgaggcggcgagagatggtcaggtctggagctcgaccgggccaggactgcttgcattaaaggacttcctcatcctttttttcatgaaactgag

SEQ ID NO: 747796 - DNA, 78 bp, Homo sapiens
agacatccaaatctggtattcaacaaataattgagtgctttcgatcagatgagaaatattcgattatctgacttcact

SEQ ID NO: 747797 - DNA, 75 bp, Homo sapiens
gccactggagaaaaacggccaagaggcagacctaggaaatggtgaagaactgaatgtcatcatgtctggaatcaa

SEQ ID NO: 747798 - DNA, 82 bp, Homo sapiens
ctgtggcaatggaacaggcttgagaaacaggctgctctttggcgtaaattgcaatcgattagggatcgtttctcagaatcaa

SEQ ID NO: 747799 - DNA, 130 bp, Homo sapiens
cggccctgcagaagctggaggaggcagaaaaagctgcagatgagagtgagaggtctgagaaagaaccccagtttaagtttatctacttcaaccacatgaatctcgccgagaagagcacagttcacatgag

SEQ ID NO: 747800 - DNA, 90 bp, Homo sapiens
attgggatgttcagagacaagtttgggattacctttttggaaaagaaatgtatcagctcttagaacaagctctggtgattgaggaacagc

SEQ ID NO: 747801 - DNA, 98 bp, Homo sapiens
cggcggccacctgagtggcgcggcggtgtcaggtgttgctggaagaagccaaggatttgctctctgactggctggattctacacttggctgtgatgtc

SEQ ID NO: 747802 - DNA, 97 bp, Homo sapiens
ctgcactccagcctgggcgacagaaagtttacaaggaaaggggaaatgtctgaaatggagattgcacaatcctgtcttgaagcagaagactcagcta

SEQ ID NO: 747803 - DNA, 75 bp, Homo sapiens
ggggccccatcgagaaatggccgcgtcggcagactgtgccctgtccacggtgcctcctgcatgtcctgctgccct

SEQ ID NO: 747804 - DNA, 51 bp, Homo sapiens
gtccacaatgtgaatcctacagtttccagagtccccagggagacacttaag

SEQ ID NO: 747805 - DNA, 95 bp, Homo sapiens
tttgatttccggagtcagtcattttactgtcaagacatttcttcggcattctgcaacagttttcggctttgtgagaaaccttaccatcaaacacg

SEQ ID NO: 747806 - DNA, 100 bp, Homo sapiens
cagaagaaatctgtattgctgcttctaaagcttgtgctattcaaaatcgtaatcctgtgtggtatcaggcactgactcacggtcttaatgaagaacaaag

SEQ ID NO: 747807 - DNA, 100 bp, Homo sapiens
ccttgggtttgaagatgatgttgtgattgagtttatattcaaccagctggaagtgaagctcaacgggacccaggtggagtctgtacagctcaaagtcaac

SEQ ID NO: 747808 - DNA, 88 bp, Homo sapiens
gctgatgctgcccgagaaattgaggccgttgtacaaccatccagcaggtggtatggtcaggaaaaagactacaatgtactagtcatgg

SEQ ID NO: 747809 - DNA, 100 bp, Homo sapiens
ttcgtagccatatcacttgtataaaataggctgagatatagtgactgtaagctgtgatctcagtatacaaaggttcttgggtgtctctggggagtccctg

SEQ ID NO: 747810 - DNA, 75 bp, Homo sapiens
gagtgagtcggagctgccgcgctgcccaggccatggactgtgaggttagaaaatggatttctgactggaatctca

SEQ ID NO: 747811 - DNA, 83 bp, Homo sapiens
attgagatggcagaaggtgctccccgtcacattgaagtagtgaaattgcttgtgtcgcatggagctgaagtgacatgcaagga

SEQ ID NO: 747812 - DNA, 73 bp, Homo sapiens
ccccagatgtctgacagccctgtgtgacaccaagataagtaacaagcctggaatggtcccccctccgccggga

SEQ ID NO: 747813 - DNA, 75 bp, Homo sapiens
gaagcccaagcacctgggcgtccccaacgggcgcatggacataagcagctctatgaccaatagcacagctgccag

SEQ ID NO: 747814 - DNA, 51 bp, Homo sapiens
cttaagcgcgcatctgtggaaacaattaagacctggcctgggccgtcagct

SEQ ID NO: 747815 - DNA, 101 bp, Homo sapiens
cgagaagcgcagcaacgtgcggtgggaccacgagagcacctaatctgggagcctgcaagtgacaacagcctttgcggtccttagacagcttggcctggagg

SEQ ID NO: 747816 - DNA, 101 bp, Homo sapiens
gcggcggcggccgaaccaaccgagtcggatcctgaccctaaaacctaggtgtccgcaatgttgccagtgtctgtctgcagattggctacccaactgttgca

SEQ ID NO: 747817 - DNA, 100 bp, Homo sapiens
caagaatctcttagtaagatgaaatacgatgaaatcacagctacatatttgttattggggagaaaatcttcagagtttgtcagaggaatggctgtgaatg

SEQ ID NO: 747818 - DNA, 100 bp, Homo sapiens
ctcttcactttcctcggcaagaaatgtgtggaaatgcttccagactgcacacttttacttagaggacagtacatcccctagagttatatccacacctcca

SEQ ID NO: 747819 - DNA, 100 bp, Homo sapiens
gaaggaactttgggtcctgaatcttctgggagctgaggaaccagatatcttgaaaagctgccagaaagcttctcagatgaccaagatggtgctgcagatg

SEQ ID NO: 747820 - DNA, 80 bp, Homo sapiens
gtagaagttctccatcttgggaaagtctgggtacaatgactcttcttgcttttcacctaagttgaataagcaccctgtgc

SEQ ID NO: 747821 - DNA, 97 bp, Homo sapiens
ttccccacggaggccatgggcgacccagcccccgcccgcagcctggacgacatcgacctgtccgccctgcgggtaaaagtcttgcagtgaaaaaccc

SEQ ID NO: 747822 - DNA, 50 bp, Homo sapiens
accagcggttccatcctacacttggggaagagtgacccattttgcttgtt

SEQ ID NO: 747823 - DNA, 97 bp, Homo sapiens
tacgtctgcggaagtgcagctgcctcagttcttagcgcagctccttgctcggattgaacgtatggaaaggcggatgcagctggtaaagaaggataac

SEQ ID NO: 747824 - DNA, 86 bp, Homo sapiens
cacggaggtcagaggggaggaggactctggagctgacagcgcgcacttcacccgcagttggctgatcagctgaccgaagaacagat

SEQ ID NO: 747825 - DNA, 80 bp, Homo sapiens
tcgccagcggagcgaacccgagagcgtggagcgggctgggccagctgatgaacttattagtcctaaagacattgatcctg

SEQ ID NO: 747826 - DNA, 100 bp, Homo sapiens
aagaaaagctgtggcaaccgaaatgagactccctcagatccagtgataattgacagatctgttacctaaagcaataaaaaatggccagaggatcagtgtc

SEQ ID NO: 747827 - DNA, 75 bp, Homo sapiens
ggaagcccagacaccaggaaggtgagatcttcgacacagaaaaagagatgccaagattcgcatttttgacctggg

SEQ ID NO: 747828 - DNA, 101 bp, Homo sapiens
atttgttaaggattccaagtaactcttatttggtgttgagagagaaaagaattcctccctggatggaagtggtccttatacccatgacaggaaaaccaagt

SEQ ID NO: 747829 - DNA, 82 bp, Homo sapiens
ctggaatcgcccaagtccctctactcgcgaggtgacttaagagattaaaattaatttggttgctgttggttctgaacaaata

SEQ ID NO: 747830 - DNA, 51 bp, Homo sapiens
ggcatgggcatgtacaacaccgacgagatccgggatcagttgaaggaagag

SEQ ID NO: 747831 - DNA, 75 bp, Homo sapiens
gaattggttagtggagaagaagggttgttacaagttgagttgaaaacaagaaaaacttgcttttggcgccatcaa

SEQ ID NO: 747832 - DNA, 100 bp, Homo sapiens
gcagccccgcggcccccgcgccccgcgggacccggacggcgacgacgggggaatgtggcgctggatccggcagcagctgatctagaaatggccattgcct

SEQ ID NO: 747833 - DNA, 98 bp, Homo sapiens
ggggaagagctgggtcgactcaaggggttgtgtccactgtggtccccgactctgcccacaagctgttcatcgggggcttacccaactacctgaacgat

SEQ ID NO: 747834 - DNA, 90 bp, Homo sapiens
gcatcaaaaacaacattgaagaggaggaaaaagaggttggctcaggagtgaaacctcggtccggctgggctattgatccctttggacact

SEQ ID NO: 747835 - DNA, 96 bp, Homo sapiens
cgacttttacatcatcacggagattcttcgctgctgctgccttaccgccgagaaccaccacccgccaggcgtcttgcggccacacccctggcgggt

SEQ ID NO: 747836 - DNA, 100 bp, Homo sapiens
gtttacagtctgactactggaaggtgttttggggaacgagtttagtatattaaaatcaccagggtctgttgttttccgaaatggaaattggcctatacca

SEQ ID NO: 747837 - DNA, 90 bp, Homo sapiens
cagagacgcgaaggagaggccctagaaccgtgcagcggaactgctgcctgacgctctgcaacttcagcatccccgaggagctggaattcc

SEQ ID NO: 747838 - DNA, 100 bp, Homo sapiens
ttttgggctatgacgtccatgttctatgtgaccagactgcacagcatgaagaagactttgaattacggaaagaactgattggacaggtgatgaaccagct

SEQ ID NO: 747839 - DNA, 83 bp, Homo sapiens
gaatgttcttaacccagaagtagctgaatgtgttactccattgctgaggagtgcttagcagtgtctgcaaaaacgaatctttt

SEQ ID NO: 747840 - DNA, 100 bp, Homo sapiens
gtggagagagagctggatgctcttttggaacagcaaaacaccattgaaagtaagatggtcactctccaccgaatgggcccacatatgacagtggacatag

SEQ ID NO: 747841 - DNA, 75 bp, Homo sapiens
aggaaagagaggcttttgcagagtcactcaggacaagcttgaagtaatgttgcaggtcagtggaatccagttttt

SEQ ID NO: 747842 - DNA, 83 bp, Homo sapiens
ggcggccactgggcgcagcacccagacaatgcagatcttcgtgaagactctgactggtaagaccatcaccctcgaggttgagc

SEQ ID NO: 747843 - DNA, 100 bp, Homo sapiens
acattgcccacctcaatggcctaagcaagtgtctgcagtgccaaatgtgtgacccagaacatggttggtgcgggagaggtggatgaagacttggaagttg

SEQ ID NO: 747844 - DNA, 100 bp, Homo sapiens
ttcacttcctgaccgtgggctggaggaacagaagcggaacagccacagcagcctcccaaggagtctgcaagttggtgcagattgatgagtatgatcactc

SEQ ID NO: 747845 - DNA, 83 bp, Homo sapiens
aggagctaaagcagcgtgcgttcagccctggggctccctggggaagggaatgcagggttgctggggctgggcccagaagcagc

SEQ ID NO: 747846 - DNA, 100 bp, Homo sapiens
aaaaatcaaagcccctctgagtaagggaagatgagtggctctcggcagcaattgactgtttagaataccttccagaccaaatggtggtggaaataagcag

SEQ ID NO: 747847 - DNA, 101 bp, Homo sapiens
aagagggtctggaggagccttctcaagaacagaggctgttgaagctcaaatccgaagttttggacagactccttctcaactactcatagagccccatcctc

SEQ ID NO: 747848 - DNA, 74 bp, Homo sapiens
aattgtagatcccttcagttcaaaacataatgtgattgacactcttgcactcctgtaatgagcctggcactgtg

SEQ ID NO: 747849 - DNA, 75 bp, Homo sapiens
accaccaccacaccagaaactagcaccagccccaaatttccttttcggagactgggaagcccaactgcgaagaat

SEQ ID NO: 747850 - DNA, 82 bp, Homo sapiens
aggatcgaatcttcactcccgctgtctcagcagtctacagcacgagtgatcagcagctggactgtgccttggacctaatgag

SEQ ID NO: 747851 - DNA, 75 bp, Homo sapiens
caaagagcccctcatcgagctcttcgtcaaggaaagaccacagcaagattctttcattcgtctcctcctagcctg

SEQ ID NO: 747852 - DNA, 83 bp, Homo sapiens
gtttgataaaactaccaacaggcacagagggtggcaatgaccatgagatcttcacagaccccagaaccatgggctactccgtg

SEQ ID NO: 747853 - DNA, 96 bp, Homo sapiens
cagaggacgccggaacaccctggaagccgagaaatgtgactcgatggaaacagaagaaaagacaagcagtgcatttgtaggaaagacaccagaagc

SEQ ID NO: 747854 - DNA, 83 bp, Homo sapiens
gtggtcatcgatgggagcaacgtggccatgagatttttggggacatcaggacagaacgtgagtgacattttccgatacagcag

SEQ ID NO: 747855 - DNA, 83 bp, Homo sapiens
ggagatcccaggcggtgacagagtggagccatggctagagaacatccagtcatggataaaaatgagctggttcagaaggccaa

SEQ ID NO: 747856 - DNA, 83 bp, Homo sapiens
aacctcatcagttcaggcatccgtgagaccattcgctaccttgtgcagcacaacatggccctgggaggagcggggacactgag

SEQ ID NO: 747857 - DNA, 75 bp, Homo sapiens
gagatgcgcaaattcactccccagtacaaagaaactaatctggattcactccctctggttgatacccactcaaaa

SEQ ID NO: 747858 - DNA, 95 bp, Homo sapiens
aaataaaagagccctgcaatttgaagatacatgagacagcagccaaacccccaggtgcaagttttgaaactgcttttgaatttgtctgaaaatcc

SEQ ID NO: 747859 - DNA, 83 bp, Homo sapiens
gggcagcccgcagaggacagcgaccacggccaagtcctgtatctgccatgtctgtggcgtccacctcaacaggctgcattcct

SEQ ID NO: 747860 - DNA, 82 bp, Homo sapiens
cagagccaccagccaatgatcttttcaatgctgcgaaagctgccaaaagtgacatgcagaacaagttgaaatcatcgcagaa

SEQ ID NO: 747861 - DNA, 100 bp, Homo sapiens
gaatagaccctctgtccaggcagcattaaaacttaagcagtcctggacgcacaatatccagcgagagaaagagtttctgcggaagctggtgaaagctcgc

SEQ ID NO: 747862 - DNA, 75 bp, Homo sapiens
gagctgaactctatcatccgagtattctctgaaaccaaatgaccaaatcttggctgaagacaaacacaaggaact

SEQ ID NO: 747863 - DNA, 50 bp, Homo sapiens
cggaggtcgataagctggaactgatggagatacaactcgtcaacgaatca

SEQ ID NO: 747864 - DNA, 80 bp, Homo sapiens
cggggatgtccagccacgtcgctttgttttcccacgctaggagctaccacaacaggctccccacaggtgcaggaagccgc

SEQ ID NO: 747865 - DNA, 82 bp, Homo sapiens
ccctggagcctcagttggaagcagccgatccagcctgcggagcctgtggggcagagacttccagtgtcctactattgaagcc

SEQ ID NO: 747866 - DNA, 88 bp, Homo sapiens
caaaatgaggcgtaagaaacgctttgcaaagcaaggagttaaagttcctcgtaattttcgcttgttggaagaacttgaagaaggacaa

SEQ ID NO: 747867 - DNA, 90 bp, Homo sapiens
gtgctttagaatccagggaacttcttgctttgtgcttgaaaaaaatcaaagcccctctgagtaagatgacttcctgaagccacagatcat

SEQ ID NO: 747868 - DNA, 100 bp, Homo sapiens
gagtcctgttccaccttcagagcgtcacggcgtacgccctcatggggaaaatctccccggtgactttcaggatagatcactgcgaccagaggaaattgaa

SEQ ID NO: 747869 - DNA, 100 bp, Homo sapiens
ccgaccccgaggcctcggaccgggaggttccgcgcgccgcggcgttccgtgttgtggcgttgccccgccgggcctgatgtaccacgatgcctctcgctgg

SEQ ID NO: 747870 - DNA, 82 bp, Homo sapiens
actgaagtggaatcctagaaactacagtagtgggacacataacatagaagtaatcgtccagagtctcgctctgtcacccagg

SEQ ID NO: 747871 - DNA, 88 bp, Homo sapiens
ttccacttcgtgttcttcctagcttccctgtatgtgatgatgaccgtcaccaactggttcaagatgcagcaccgaggcttcctcctcc

SEQ ID NO: 747872 - DNA, 51 bp, Homo sapiens
ctcacctgtgcgggatggaacaaaagcctgctcctgcaaccagcacgcccg

SEQ ID NO: 747873 - DNA, 100 bp, Homo sapiens
cctcagttggaagcagccgatccagcctgcggagcctgtggggcagttatgccccgtggtgccctgcttgtcaaaatcttcaaccggaatgggaaagttt

SEQ ID NO: 747874 - DNA, 75 bp, Homo sapiens
attccggcctggagctcccagggccgagcttccacagcgcggcacctgtacctccggggtggcgctggggttggc

SEQ ID NO: 747875 - DNA, 100 bp, Homo sapiens
actttacatctgaactacgaaagcatccttcatctcctgatcccaaactctcctctgagctccgttgtaccttccagcagagccttatctattggctcca

SEQ ID NO: 747876 - DNA, 97 bp, Homo sapiens
caccaaagctgttgaatgctgtgacaaggtaggtgacacttcgtttgatctgccggaagcaaatgtcctcattcagatctcatcccatggtggctcc

SEQ ID NO: 747877 - DNA, 75 bp, Homo sapiens
cagcaggctgagcagctgcaaacccccgaaaaagtggattctgctgcgaaccggagaccatggccaaaccagcac

SEQ ID NO: 747878 - DNA, 100 bp, Homo sapiens
cagaatcagctgttccctgcgaaaggtatttattacagtatcaggagccaataccttgtgagcagttggttacagcgctgtgtgatatcaaacaagctta

SEQ ID NO: 747879 - DNA, 75 bp, Homo sapiens
cacgtttagaaaatgataaagaatccctcgttcttcagacttttggagagaagctcctaggagtcatggcctgga

SEQ ID NO: 747880 - DNA, 100 bp, Homo sapiens
cctcaatctccttttccttggctacccgtggcttctggcacagcagcttaattgaccggaacctcattgattattttgttcccttcctccccctggaata

SEQ ID NO: 747881 - DNA, 100 bp, Homo sapiens
gagcttactggtgaaggaatgggacaagacccatctttatgcaaagccagcgttacagtaatgttccaggttgggagccacgtgtaccagtgtgtgttga

SEQ ID NO: 747882 - DNA, 96 bp, Homo sapiens
gtatgcgtccgtggtggaggacatgatcctgaagggatcatggcccaagttgcaatgtccaccctccccgttgaagatgaggagtcctcggagagc

SEQ ID NO: 747883 - DNA, 96 bp, Homo sapiens
actccgagttctcggtactcttcagggatgagtcatgtggcagtggaaaatgcgctcgggctggaccagcagctcagcagtacaacgtaccccgtg

SEQ ID NO: 747884 - DNA, 75 bp, Homo sapiens
cgcctcggacaccttcgagggttgggactcaaatggatgctaaaaagccaaggaaatgtgatttgactcccttcc

SEQ ID NO: 747885 - DNA, 73 bp, Homo sapiens
taagattgtcttggaaatactaagttgggtttcagcgttaaaaacaatggccagtcagggaggccccaagtat

SEQ ID NO: 747886 - DNA, 96 bp, Homo sapiens
agcgagatgaatactgctgaggactggggcctcattttggatatctgtgataaagttggtcagtctcgcactgggcttcgggagcaggaaagaaaa

SEQ ID NO: 747887 - DNA, 101 bp, Homo sapiens
cacgaggaattcttcttccattaataaatcaactcagtgatcctgattatattaatcagtatgtcatatggatgatgggaaccaacaaatgtgccagccag

SEQ ID NO: 747888 - DNA, 98 bp, Homo sapiens
tgaatgtgcagtttgagtctgatgaggaggtctatgttaacaatgaatgggcaaccagtgttggggaaggagggagctttggagaacttgctttgatt

SEQ ID NO: 747889 - DNA, 128 bp, Homo sapiens
cggcccggcagtgctgcaaccgctacagcagccgcaggaagcagctcaccttccaccggatatgaattgtctcccacggcagcagctaacttcacacgccgaaacctggctgactgtcttcggagtcg

SEQ ID NO: 747890 - DNA, 100 bp, Homo sapiens
gtataggttgtcaaaattcacaaggcaaggtgactttgaaaggaataatgtatttgtggccttggacatgaggcagtcagtcctctgttgctgttaacat

SEQ ID NO: 747891 - DNA, 100 bp, Homo sapiens
gccgctcctaagcctgcacagccgcggcggcagcagcagtgagaggattgtcagtggcttcgccccgaggagagctgactgccctgggctgctgcctccg

SEQ ID NO: 747892 - DNA, 80 bp, Homo sapiens
gaccccgcctccctcccgcgcgtgctgcgggtctgctcgggggtctacttcgaggctcaccatggatgatgatatcgccg

SEQ ID NO: 747893 - DNA, 97 bp, Homo sapiens
cccagccaagcccagccaagcccagccaagccccgccgatcgcgggcaccggagccagccccgcagcggagttacactgttagaccttatgatagcc

SEQ ID NO: 747894 - DNA, 83 bp, Homo sapiens
aaaagaaatacgtgaattctggcacaccattggatttaatgtagagacggtgacgtacaaaaaccttaaattccaagtctggg

SEQ ID NO: 747895 - DNA, 90 bp, Homo sapiens
tggtgccgacaaggtcttcccttctttggacgaggaggtccccccggccgagtgaaacaaagagtcctcttcgtggaaaagaaaaaaata

SEQ ID NO: 747896 - DNA, 90 bp, Homo sapiens
cagcagtttaaaagtttaccagaatatcttgaaaatatggtaataaagctagccaaggaattaccggtggtctgtttttctggggggcca

SEQ ID NO: 747897 - DNA, 75 bp, Homo sapiens
tggagttggaatttgtgcaatgtttagccaacccaaattaccttaattttggaaagatccaaataatgacttcag

SEQ ID NO: 747898 - DNA, 98 bp, Homo sapiens
gttgcactggatccacccagtgaccggacttctcacccccaggatgtcatcgagggtactccaaagattcaggtttactcacgtcatccagcagagaa

SEQ ID NO: 747899 - DNA, 82 bp, Homo sapiens
ttggagcctcgccccccggggaagcggtggatggtccctgtgcgttttattgcgacctgccggtgggaactttgtctccgag

SEQ ID NO: 747900 - DNA, 88 bp, Homo sapiens
atcggaacccctccttgaagctgatggtgaatgtgtgcggacacactctgctggagcattggatttgctaaaggagcttaagaatatt

SEQ ID NO: 747901 - DNA, 100 bp, Homo sapiens
agacatttacgcggatgtcggcgaagagttcaaccagggcgtctctggccgagcctctttttgtggaaaacgacagcagcagcagtggcctggaagacgc

SEQ ID NO: 747902 - DNA, 75 bp, Homo sapiens
ctctttgtggtttcttctgatttctgccattggggttgctccgactgtgtgttccaggagtggtggctctgaggt

SEQ ID NO: 747903 - DNA, 51 bp, Homo sapiens
tgctttgaaagccttgatcaggggaaaggctcatcttcaggtggaactaat

SEQ ID NO: 747904 - DNA, 50 bp, Homo sapiens
tccactttggaaagaagatttctcaggatgaaattgattctgcagtaaag

SEQ ID NO: 747905 - DNA, 76 bp, Homo sapiens
gagccccacggagcgctgcggagcgaacctcacctttccagggcgcaagaaatggaatctatttggaatttgcaga

SEQ ID NO: 747906 - DNA, 98 bp, Homo sapiens
aaaagatgtatgaggagttcaagcagctggctctggaggacgccaaagaaggctacaggctctcaactacaatctgagcaaagaagggcatttagaaa

SEQ ID NO: 747907 - DNA, 97 bp, Homo sapiens
aaatcttctcagttcctggctcccaaggatgaccgttcattaataaatttgcatctcatgcacaccagttacttcctctttgtgatggtgataacaa

SEQ ID NO: 747908 - DNA, 83 bp, Homo sapiens
agaagaagttgcgaaggatccccaacggggaggccaacgtgaagaaatgagtaacccgaagcccctagaggagtggtcacctg

SEQ ID NO: 747909 - DNA, 100 bp, Homo sapiens
gccaacagtacctcattgctctttggcgactcttattgtggcctgaagcacgaggacaaacgtggaggtagcggatctcacaactggggaactgtcaaag

SEQ ID NO: 747910 - DNA, 97 bp, Homo sapiens
ttcgttctgctgctattcggcatttatggacttctaaaaaacccatttttatctgctgctggagccagttctgcttctcggcaaggagcgatttgct

SEQ ID NO: 747911 - DNA, 100 bp, Homo sapiens
attcggctctataattcactgaagtcaagattgacttggacaaggctactgcagcattcattttggaagaaagcttttgctggagcagatcaggaatcaa

SEQ ID NO: 747912 - DNA, 74 bp, Homo sapiens
ctccccagccacgtggaactatggagtctcattctgtcatccagaccggagtgcagtggcaccatctcagctca

SEQ ID NO: 747913 - DNA, 75 bp, Homo sapiens
agtggatagctttaaagcaaagggggctccccctcgagatggaaaagctacaaggctttggcccaccaagtgtgt

SEQ ID NO: 747914 - DNA, 102 bp, Homo sapiens
ggaaaggctcggctcatgttctgggacttaggagggcaggaagagctgcagtctttgtgggacaagggcgtctctggccgagcctctttttgtggaaaacga

SEQ ID NO: 747915 - DNA, 100 bp, Homo sapiens
gcctatgaccagcaagaggatggggccctggatgagggggaagggcctcaaagccagaagatgcccttggaaatcacccgtagctttatccagaaccgag

SEQ ID NO: 747916 - DNA, 60 bp, Homo sapiens
aaagagcacctgagagtcaacagcccaggacatgatccacatcgcggacaccaaggtcgc

SEQ ID NO: 747917 - DNA, 89 bp, Homo sapiens
cggctttggaatccaccagctacatccagctccctgaggcaggacaatgccgtcttctgtctcgtggggcatcctcctgctggcaggcc

SEQ ID NO: 747918 - DNA, 75 bp, Homo sapiens
agatgtgggatgtcagtactggcatgtgccttatgaccctcagtgaaattcacatgtctgaagaagctatacagg

SEQ ID NO: 747919 - DNA, 87 bp, Homo sapiens
aaagcttcagagttctctaaaaaaactggctgtgaataatatagctggtattgaagaggaaccactcgttttgactattattttatc

SEQ ID NO: 747920 - DNA, 75 bp, Homo sapiens
attgaggaacatggcgttgctggtgcgagtccttgccaaagagtgtggccagatgcaaaataagtggctgatgat

SEQ ID NO: 747921 - DNA, 88 bp, Homo sapiens
tcaaggagctggaagtgctgctgatgtgcaacaagtgtgatgaatgcagactctgctaccattttggctgtttggatcctcctttgaa

SEQ ID NO: 747922 - DNA, 80 bp, Homo sapiens
ggttctcagagagggccctggcactcatgaaggcccgcaattatatccagatcgagagacagaagattctgaaagggttc

SEQ ID NO: 747923 - DNA, 100 bp, Homo sapiens
gtctggtgtgggtttcccaagcaaggttccttggaagaagatgtctgcagaggcactggtgccatcacacagtgacacggacggtgtcctgccaggtgca

SEQ ID NO: 747924 - DNA, 100 bp, Homo sapiens
tatctttagtaaggatgggaccttgtttgcctggggcaatggagaaaagtttatgtctcattggatcaacctgtgactgctttaaatcttttcaaacaag

SEQ ID NO: 747925 - DNA, 85 bp, Homo sapiens
tgtcaaaactttacaagttaattgaagagtcttgtccacagctggcaaattcagtgcagatcagacccagaagtccacattcccc

SEQ ID NO: 747926 - DNA, 75 bp, Homo sapiens
ggcaaacctttcttgagctcaggttcttgggtgtctctggggagtccctgggccagaccttcctccagactccag

SEQ ID NO: 747927 - DNA, 100 bp, Homo sapiens
gagcggacgcagtgatttgctccccctcgtgcagcaacccccacacccagcaccagtatttgattttcatcaagcagctgatggtatccaggaacaacag

SEQ ID NO: 747928 - DNA, 100 bp, Homo sapiens
tgttcaagacacaccggaggcgacggccatggccacaggtaatcttcagcaagtactgcaactccagcgacatcatggacctgttctgcatcgccaccgg

SEQ ID NO: 747929 - DNA, 82 bp, Homo sapiens
aaaaaatcaaagaggcatttgaagtctttgaccatgagtcgaataatacagtggatgtgagacagtctcgctctgttgccca

SEQ ID NO: 747930 - DNA, 90 bp, Homo sapiens
gtggttattcgcctaaaagaaggtctggatatatctcatcttcaaggacaaggactctcaaattgcagacatactgtcaacatctgggac

SEQ ID NO: 747931 - DNA, 88 bp, Homo sapiens
tcgctggacgtctagagatgtgggcatggcagacaaatctgtaggggttgtagaaggtgatttagctgccatagaagcatacaagtca

SEQ ID NO: 747932 - DNA, 131 bp, Homo sapiens
ctcaggtgctgaaccagatgatgaagagtatcaggaatttgaagagatgctggaacatgcagagtctgcacaaacatatctgaagagatggattaagaatgctttggattaaggattgtggagcacatttc

SEQ ID NO: 747933 - DNA, 121 bp, Homo sapiens
gcgtgttgaccagtggatgtgacagttcagcattagaagggctacccctaataaagcgactcattgagcaggaaacagtactgctggagcaccctttcagtgctgtgaaacaagaactgca

SEQ ID NO: 747934 - DNA, 50 bp, Homo sapiens
gtccaaacgctaggtggctgggtccagaagtggaacggatagtgaaagcc

SEQ ID NO: 747935 - DNA, 75 bp, Homo sapiens
agaaggcagtcacgtttttcgatgatgtcacagtctacctgtttgaccagggtcggcactcttcaccctcccgag

SEQ ID NO: 747936 - DNA, 75 bp, Homo sapiens
cggcctctcggcctctgccggagaaacagccttgaaaagatcttttgaggtcgaggaggtcgagacacccaactc

SEQ ID NO: 747937 - DNA, 74 bp, Homo sapiens
gggagagtgtgcagccgagtcactactgcctgcctgcctgcctgctacgctgcatatctatgtgagactgaatt

SEQ ID NO: 747938 - DNA, 82 bp, Homo sapiens
agagagggaagagattcagccagcacactcctcgcgagcaaggcccagattattcatcagcatggctacctgctaatgaatc

SEQ ID NO: 747939 - DNA, 98 bp, Homo sapiens
cccgcgccgaccgcgttcctatggacagacgcacagacacctgcagatgcctgtgaggagccaccaacatttgaagctatggagctcattggtaaacc

SEQ ID NO: 747940 - DNA, 74 bp, Homo sapiens
tggctattgaggcagagagacgacgcattcaggagaagaaggatgagaagcctaaagaaactgttccaactctt

SEQ ID NO: 747941 - DNA, 100 bp, Homo sapiens
aagaatgtcattgaaacttgcaaagaggctggggttcagtcaggatggctaaaggtgaccccaagaaaccaaagggcaagatgtccgcttatgccttctt

SEQ ID NO: 747942 - DNA, 90 bp, Homo sapiens
atctttgccaagaagaacgacattcccttcgagctgcgcatcgtggatctgattaaaggtgtgcatcaccttcgaccaggccaacctgac

SEQ ID NO: 747943 - DNA, 49 bp, Homo sapiens
taagagcttggaggcggcccgcggttatagggatggcccaggtaatcct

SEQ ID NO: 747944 - DNA, 100 bp, Homo sapiens
gtattcagatcttcatgtgtctcttctaagctgaataaagctgttttggaactgtcaggtacctcaaagcgattttgcagaaaagaagtccacagcaaag

SEQ ID NO: 747945 - DNA, 90 bp, Homo sapiens
gacgcggcgcgcgaggacccgagccaggcggggacaggacggcggggcgagccagcttccttcaaaatgtctactgttcacgaaatcctg

SEQ ID NO: 747946 - DNA, 50 bp, Homo sapiens
ttcctgcagtaccccactctacgatcagtgaaaccaatccgtaatctaaa

SEQ ID NO: 747947 - DNA, 75 bp, Homo sapiens
caagaatactctcttgtcaccagattactgaggtgtactggaggttttgagagattacctgaagttgcactcaaa

SEQ ID NO: 747948 - DNA, 100 bp, Homo sapiens
gtgaattcacagtctaccatgaattggaaggactcacaccacccggcaagaactgctcactacggctccctgccccagaagtcacacggccggacccaag

SEQ ID NO: 747949 - DNA, 73 bp, Homo sapiens
gtgaagagaggcctctcccaaagcacctgcgcagatattgatgatgttaagaagttcaaaccgggttacctgg

SEQ ID NO: 747950 - DNA, 75 bp, Homo sapiens
ggcggctcgggacggaggacgcgctagtgtcaaaatgcagatcttcgtgaaaacccttaccggcaagaccatcac

SEQ ID NO: 747951 - DNA, 100 bp, Homo sapiens
aaagacagatcctgtgtcacccggcaactcagaaacatcaggtccaagtatcttctcacaggtatgaaacacctagcgatgctattgaggtgataagtcc

SEQ ID NO: 747952 - DNA, 100 bp, Homo sapiens
tggcacctgcgcgaagctggccaaagcctgcccagacggctcacctgtgcgggatggaacaaaagatggtccccatccctgctggagtatttacaatggg

SEQ ID NO: 747953 - DNA, 96 bp, Homo sapiens
gagttccagaggctgctcggcttccagctcaatcctgccggttgcgccttcttcctggacatgaccaactggtgctactcgtgagcagtagtcgcc

SEQ ID NO: 747954 - DNA, 75 bp, Homo sapiens
tgagagagtgcaagccgtgggtcaagagaatccatcccattaaatgacctgaagtcagaagtatcaccacggatt

SEQ ID NO: 747955 - DNA, 51 bp, Homo sapiens
gcgctgttccacctcattcaacttcagggaaatgatcttcattggttagca

SEQ ID NO: 747956 - DNA, 101 bp, Homo sapiens
atagattttggtggaaagtttcattgtgtatgtagaagaccagaagtggatggagaattgcaaatagaagagtcttccaaaccagtgaggctatcacaaca

SEQ ID NO: 747957 - DNA, 82 bp, Homo sapiens
gagcaggagcccggcaccccccgccgacaaggagggaagatgatccctatgatcttgaagatgtttctgcacagaaatgagg

SEQ ID NO: 747958 - DNA, 74 bp, Homo sapiens
tgagactttctccttcaagtacttggcagatcactctcttagcagtgttctaagaacggaagcatctgggctgg

SEQ ID NO: 747959 - DNA, 75 bp, Homo sapiens
caggaaagacatggagattctcttaaaaagactgggccagtgccattcgcgtcgcagctctggactgcatggaag

SEQ ID NO: 747960 - DNA, 83 bp, Homo sapiens
cgccgggctcttcgtggctcaggcggggggagcggaccctgacaagttccagcttccccgggcgctgcctggacaggcctgcc

SEQ ID NO: 747961 - DNA, 88 bp, Homo sapiens
gggatgataattgggcctccaagagtaaatgagctggatggtatcccgttgatcctggacaactgcaacatcagtgacagtaacccct

SEQ ID NO: 747962 - DNA, 75 bp, Homo sapiens
catggagggagtggacatcagccccaaacaggacgaaggcgtgctgaagcagttggaattgatcacaccttttca

SEQ ID NO: 747963 - DNA, 74 bp, Homo sapiens
ggagctgggcgcggagcccctcacagtgcaggaaatctactttcttcaatgtgttaaccaatagtcaggcttca

SEQ ID NO: 747964 - DNA, 75 bp, Homo sapiens
ggctggaggggaagaatattggaaatgcttccagactgcacacttttacttagaggacagtacatcccctagagt

SEQ ID NO: 747965 - DNA, 60 bp, Homo sapiens
cagcttcctttgccgctctgcatcatgttgccaaagaatttagaacgagtctacgtggac

SEQ ID NO: 747966 - DNA, 101 bp, Homo sapiens
gcagaggcttgggccgccgagctggacccggaccggttttggccatcctggtgatcgagttcatctacgccatcgtgggcatcgtctggctcactcagtac

SEQ ID NO: 747967 - DNA, 83 bp, Homo sapiens
gagtgggcgcggaggcgaccgccatggcgttcctcaaactccgtgaccaggaactgtggctgcaccatctgtcttcatcttcc

SEQ ID NO: 747968 - DNA, 75 bp, Homo sapiens
ttcttctggataacactgtacaagctttcaaagtcaatgataaaagaatcagagtgtctcaacccttgacaagag

SEQ ID NO: 747969 - DNA, 100 bp, Homo sapiens
cctgtacagcctgcagaactgtgtgatgaatgcagactctgctaccattttggctgtttggatcctcctttgaaaaagtctcctaaacagacaggctacg

SEQ ID NO: 747970 - DNA, 127 bp, Homo sapiens
gaacattatcacaaagctatcatcctgccaaactccaggctcagatgtcacagcgttacagtgtttctgccacctctgtacaaaagacaattttacttgtgtgacagatgggctctgctttgtctct

SEQ ID NO: 747971 - DNA, 100 bp, Homo sapiens
ctacctgcagcgccgtgtggcacgacacaaaaatcagaaaactacccctgagtgtggtcccacaggatatgtagagaaaatcacatgcagctcatctaag

SEQ ID NO: 747972 - DNA, 128 bp, Homo sapiens
gacgcccacagagcagacccctcggggctccatggaatccctggccctgtctaatgcaacagcgagaactatctaggaaaggacgaggaccaaattaccaagcctttggatctaatccatgtggcatc

SEQ ID NO: 747973 - DNA, 51 bp, Homo sapiens
cgaatatcgtcatcgttagaagtctgaagatgatgagaaactgaaaaagag

SEQ ID NO: 747974 - DNA, 82 bp, Homo sapiens
cctttatcctggtcatcttctatttccaaaactagacgcttgaagcaaagctgccatcccagaagacgacatgctctcagca

SEQ ID NO: 747975 - DNA, 105 bp, Homo sapiens
cgggatttgggtcgcagttcttgtttgtggatcgctgtgatcgtcacttgcaattctgtggtgttcttggtcacacatttatggagtttctgaagggcagtggag

SEQ ID NO: 747976 - DNA, 90 bp, Homo sapiens
gacaggaactgtggacagtgaagagaggcctctcccaaagcacctgcgcagttcgatcctttggtacagaagacagaccgacagatcgtc

SEQ ID NO: 747977 - DNA, 98 bp, Homo sapiens
agagcctggagtctgcgaaggccgggacccggttccccggcccacagtgggggtgtgcaaacccgagagaactggatggagttttaacattgaatgcg

SEQ ID NO: 747978 - DNA, 100 bp, Homo sapiens
tgatgggatagcgttgcaaatccttaaaagagtcttaacggcagcggaggaggaaatggcaggtcctaatcaactctgcattcgccgctggactaccaag

SEQ ID NO: 747979 - DNA, 100 bp, Homo sapiens
ttgataaggaaagtactgtccaaatgaattatgtcagcaacgtatccaagggccagctctcaatgttgcaagaaaaaatagaccatttggagcgtttgct

SEQ ID NO: 747980 - DNA, 98 bp, Homo sapiens
aaaagaactgtagatgcccggctgaaattaagtgaggaattgagtggtggtagattgaagggaagcagctcgagagtgtcgtagaaagaagaaagaat

SEQ ID NO: 747981 - DNA, 51 bp, Homo sapiens
cgcggacccaggggcgcccacgccagttcctccgtgtcacaaagcagtacc

SEQ ID NO: 747982 - DNA, 100 bp, Homo sapiens
catgatttccctcccggggcccctggtgaccaacttgctgcggtttttgttcctggggctgagtgccctcggtctgccatcatggatgttctcgcagaag

SEQ ID NO: 747983 - DNA, 96 bp, Homo sapiens
gaaaaccatggaagtgatgagaaactctcaggaaactctgttaaccattgtagaggataaaagaatcagagtgtctcaacccttgacaagaggacc

SEQ ID NO: 747984 - DNA, 83 bp, Homo sapiens
cagaggtgaaaccaacagccagtgatatgctatacatggaatgggtaccacagaccatgtcatcgtcctggcgtccacgaacc

SEQ ID NO: 747985 - DNA, 75 bp, Homo sapiens
acttccagacactggaaaactggatgctgcagacactgaacgaggagccagtgaccctaaaaagtctgccagtcg

SEQ ID NO: 747986 - DNA, 133 bp, Homo sapiens
gcaagaagccctgcctgatgagacagaggtggtggaagaaactgtggcagaggtgactgagggagagacaaaggcagcgctgccctcgggggagtattggccctggcggaacgcagcaaccacgagggatcca

SEQ ID NO: 747987 - DNA, 75 bp, Homo sapiens
aaagaaaatgggactggttgaccaactggtggaacccctgggtggctctgagggtcctgttccccgaccgctacg

SEQ ID NO: 747988 - DNA, 97 bp, Homo sapiens
gcaggaaaatttcgatattgaagtgtcaaaatccatagatggaaaagatggaagtatatattcaagcccaggactgtatagtaaaacaatgaccccc

SEQ ID NO: 747989 - DNA, 101 bp, Homo sapiens
ccgaggagcggagcggggacgagacgccgggatccgaggtgccgggtgacaaggccgccgaggaacagggcatccgtgtcattctggaccttactcccaac

SEQ ID NO: 747990 - DNA, 74 bp, Homo sapiens
atcttctaaacagagcagcagcagcagagatgataacatgtttcaggtccctgagtgccagaggtggtggtgtt

SEQ ID NO: 747991 - DNA, 97 bp, Homo sapiens
agcagcaacttcgaaaggcgatgttggaaaaagacggagtgtggatgaggtcaccattgtcaacattttgaccaaccgcagcaatgcacagagacag

SEQ ID NO: 747992 - DNA, 83 bp, Homo sapiens
atgagcttgatggaaaagaactctgtagtgaaagggtggcccggtggaaatcctgccctttctgtacctgggcagtgcgtatc

SEQ ID NO: 747993 - DNA, 75 bp, Homo sapiens
tgctcacactcatgaggagccggaaggttcctaaagagaaagatgaaatggtagagcaagagtttaaccggttgc

SEQ ID NO: 747994 - DNA, 101 bp, Homo sapiens
tcccgagtagctgtgattacagtgctgcatttgatacagttcttgggataaatgttgcagtcaagaaactaagccgtccttttcagaaccaaactcatgca

SEQ ID NO: 747995 - DNA, 101 bp, Homo sapiens
ttgttcaagtacccactggaccgtggttttgcaggaaatgtgaatctcaggagagagcagccagagtgagctctggtatcgagactttagtggaggagctc

SEQ ID NO: 747996 - DNA, 100 bp, Homo sapiens
tttaggagtaacgcagcagctgtcatcttttgaaacggagttcaacacacagccgcatcgtaaggaattcattgaagagttgctgtctcccccttttggg

SEQ ID NO: 747997 - DNA, 75 bp, Homo sapiens
ggggctccggctggtctgtggtgaggtggacatcttcaataaggagctactgctaatccccatccacctggaggt

SEQ ID NO: 747998 - DNA, 74 bp, Homo sapiens
aatagcagctcaagacttgttgctggtcctcagtttgcagaagacccctcccagttgccttcaactcagttacc

SEQ ID NO: 747999 - DNA, 100 bp, Homo sapiens
ctgccgggttcaagcgattctcgtgcctcagcctctccagcagctgggattacaggcttatgtacataaaagcgtgatggaggaactgaagagaataatt

SEQ ID NO: 748000 - DNA, 80 bp, Homo sapiens
tcaagatgtaaagaagactattcagaaaaagatgattgacgctgtctggagcacgagcacctgtgaatttgttcgtactc

SEQ ID NO: 748001 - DNA, 122 bp, Homo sapiens
agaatctgcagatggggctgctctcggccctgcctctggctgtggaaacaggcctccaagtacccaaggtttccacttcaagcgtgacccttttgcctgtgggatgagctccagcatggggt

SEQ ID NO: 748002 - DNA, 82 bp, Homo sapiens
gctcgccatggccgacgaaaagcccaagtgatcagggccaaagcggtcagtgagaaggaagtggactctggaaacgacattt

SEQ ID NO: 748003 - DNA, 90 bp, Homo sapiens
ctatggcgcactggagtaccctgttcctggcaaggcggggtttcaccatgttgcccagactggtcttgaactcctgagcttaagcaatcc

SEQ ID NO: 748004 - DNA, 119 bp, Homo sapiens
acgaagatgacgtgtatggaaactcatcaggaaggaagcacaggggccactcggagtcgcccgagaagaccttgcctcatagtattcgatcagattcagaagatatctgtttatttacg

SEQ ID NO: 748005 - DNA, 88 bp, Homo sapiens
ggagaggagcgtcaacagcagcaccatggcactgtgacttctgccgtgttcaccgtgggagacaacgtggtttcaggcagcgatgacc

SEQ ID NO: 748006 - DNA, 82 bp, Homo sapiens
ctttgagctgcacgttgcacaagtgaaattactgatagcaacaaaggtcggaagatgttggagaagatgggttggaagaaag

SEQ ID NO: 748007 - DNA, 110 bp, Homo sapiens
taacaagtactccatcttcagagacagctggttttgtgttggcctttaccagagtttgatccaagccagattcgactgattgtatatcaagactgtgaaagacgagggag

SEQ ID NO: 748008 - DNA, 100 bp, Homo sapiens
gcatggaggaggaactgttgacaattgaagacagaaaccggttgttgacctcctgtactggagagacattaagaagactggagtggtgtttggtgccagc

SEQ ID NO: 748009 - DNA, 82 bp, Homo sapiens
tggccctggtggggattgacagccacgggaaggtgaaatgacaatggatgctctgttggctcgattgaaacttctgaatcca

SEQ ID NO: 748010 - DNA, 87 bp, Homo sapiens
gctgctggtaacagggccttgcctagtgggccttccttcccaggtgctggagaatctggtaaaagcaccattgtgaagcagatgagg

SEQ ID NO: 748011 - DNA, 100 bp, Homo sapiens
cttttcaccaaggaactggtgctgcagcgagaggcaaagcagagagcagaggttcttcagtccacgcaacggttcttctctgaacagcaacagagcaaac

SEQ ID NO: 748012 - DNA, 50 bp, Homo sapiens
gcggccgcggggcccgagcgcaggccagcggagcctgcaccaccgtggag

SEQ ID NO: 748013 - DNA, 80 bp, Homo sapiens
gcagccgatccagcctgcggagcctgtggggcaggcagctgagtatgtcccagagaaggtgaagaaagcggaaaagaaat

SEQ ID NO: 748014 - DNA, 100 bp, Homo sapiens
ggccggcttcgttctgaaccgcctgcaatatgcaatcatcagcgaggcctggcggctagtggaggtaggtagccatccaagcttcctgaaggaggttcga

SEQ ID NO: 748015 - DNA, 100 bp, Homo sapiens
atgacaactttatttacctctatgtagtctctgaaaatggaagaaaatatagcagatatggaaggtgcactacaggtcctcataacctagaaacttgtct

SEQ ID NO: 748016 - DNA, 100 bp, Homo sapiens
ctggcccaccgcctgcccaaccgcgtgaccttgattgagttaatgaacttcacgcctcagcgtccaggccacgcccagatttcttctaccgctgcttccc

SEQ ID NO: 748017 - DNA, 75 bp, Homo sapiens
cgaaatccagactctttttaagaggcttcgcgcagttccaaccaacaaggtgattgaattactcagatatgaaga

SEQ ID NO: 748018 - DNA, 100 bp, Homo sapiens
cccatctaatcacagactcctatttgaagtatttgacgaaaatagactggagctctgccagtgccggccgggagaaggcaattgctcctgctgtaaggag

SEQ ID NO: 748019 - DNA, 90 bp, Homo sapiens
agtagaaaatgactttctgccggtagaaaaggctggttggaaggaaaatcatgcaacattcatgagcgaactaaaaaatcttcaggcttc

SEQ ID NO: 748020 - DNA, 89 bp, Homo sapiens
cagggaacttgctgagcaactattcaaaaatttgcctttccccatcttcctggttctgctccttcgtggcctagtcttgtggacaccag

SEQ ID NO: 748021 - DNA, 86 bp, Homo sapiens
gaggagctgcagatcattctggaagacttacagagacagaacgaagagctggaaaaattgccacagccaccccagccttcagcaac

SEQ ID NO: 748022 - DNA, 51 bp, Homo sapiens
cctctgtcgctgggacccttcaggccaacagagattttgagaaacacattg

SEQ ID NO: 748023 - DNA, 96 bp, Homo sapiens
gcccggctccgggccagcatccgagagcccggactggaggtcggaacgagctgattgcccgctacatcaagctccggacagggaagacccgcacca

SEQ ID NO: 748024 - DNA, 82 bp, Homo sapiens
aggttctgaaccgcaaagggacagcagaaactggccgctgcgcggccctgcgcatgctgctggcagatcagggccagagctg

SEQ ID NO: 748025 - DNA, 51 bp, Homo sapiens
ctccaaattcgcctccatctgtaccatgataagctgtcattggaaggaata

SEQ ID NO: 748026 - DNA, 102 bp, Homo sapiens
gctcagcctggcgccggagctgaaacacgacgtgaaggtcaaaatgcagatcttcgtgaaaacccttaccggcaagaccatcacccttgaggtggagcccag

SEQ ID NO: 748027 - DNA, 50 bp, Homo sapiens
agggactgaaggtcacaccacagcgcgatgtccttacggacctgtcagcg

SEQ ID NO: 748028 - DNA, 90 bp, Homo sapiens
catggacctggctctcagtgcccacataaaaatactagattacagttgctcccagtcggagtctagccagtcagaggcgtctgtccggag

SEQ ID NO: 748029 - DNA, 75 bp, Homo sapiens
ccgatggaattcggctctataattcactgaagtcaaggcacagatagatcattatctaggacttgcaaataagaa

SEQ ID NO: 748030 - DNA, 75 bp, Homo sapiens
gagaagatcctggaagaaccgcaccctctgatgttccagaaactccaggaccagtcacccacaaaagctgtatat

SEQ ID NO: 748031 - DNA, 75 bp, Homo sapiens
agtgagagggagctctacatcccatctgtggatcttctgactgcccagagttcaaggaggccttccagctgtttg

SEQ ID NO: 748032 - DNA, 75 bp, Homo sapiens
tgatgtcacaagattgaccacattgatcacagctgttgagctaatggaccgaactgaaatgccatgccaggcatt

SEQ ID NO: 748033 - DNA, 100 bp, Homo sapiens
caacagagtgagttgttgctcccgcctgagcccagcccccagaaaggattgtgacatatcgttggacccagaattgagatggctgatcactgggaaactg

SEQ ID NO: 748034 - DNA, 75 bp, Homo sapiens
cccttctcctcgccactccaaggttgcagacgaagcagacctgtcatttactccatcctttatagtgatgctaca

SEQ ID NO: 748035 - DNA, 100 bp, Homo sapiens
gtaactgtcccctctgactaccatttctaagctcgaattacatctttacaagaggaggtgaagcatctcaaacataatctcgaaaaagtggaaggagaaa

SEQ ID NO: 748036 - DNA, 74 bp, Homo sapiens
cggtgcagaaggtcaacgccgcaggcacaggtaaggggcctggataccaagaagtgactgctcatctaatccat

SEQ ID NO: 748037 - DNA, 100 bp, Homo sapiens
gatccgcaagaacaagtaccgccccgacctgcgcatggctctaacaagagaagagatcacagaaacgtgaggatcaagaagccggactacaaggtcgcct

SEQ ID NO: 748038 - DNA, 74 bp, Homo sapiens
cttttgcttgcagttaggtcaagtggagggagagaagtcttttttcctccagccaggagagcagctggaacaag

SEQ ID NO: 748039 - DNA, 98 bp, Homo sapiens
tttgagggccttttctcttcctgcttcatctctaaaggtccttctaggagagaggtgaaagccagacccggtccgtttggaatgcctgggatggtgcc

SEQ ID NO: 748040 - DNA, 90 bp, Homo sapiens
ccaggagatgaaatgacaacgtcaaccctccagatgatggatggcccaggagagaatgatcctgatttgaaacctgcagaccaccctcgc

SEQ ID NO: 748041 - DNA, 82 bp, Homo sapiens
ccgcagcaccatggcgaccaccgtcagcactcagcgcgggccgtaaggtacctgccgtgggcagatctgagctttcttcttg

SEQ ID NO: 748042 - DNA, 101 bp, Homo sapiens
gtgatcagtgactttggtgaaagctaagaaggttcaaacaaatttgcaaatgatatacaacttctaaggagaagacagactgctgctttggacctgttggt

SEQ ID NO: 748043 - DNA, 95 bp, Homo sapiens
tagaattggttcttcattatatgctttaggaactcaggattctacagatatatgcaaagtatgtattcccgtgtgccagagtgccaggtcaccac

SEQ ID NO: 748044 - DNA, 75 bp, Homo sapiens
ccacaaaatgcttcatctcttgatcaagacttcaaatcccaaaagaacttcatcattaacatgacttgcagattt

SEQ ID NO: 748045 - DNA, 74 bp, Homo sapiens
ttctaacagatttccccaaattggatatatgaagcaacagcatgtcatagaaaccttgattggcaaaaagcaac

SEQ ID NO: 748046 - DNA, 87 bp, Homo sapiens
agaaacacggaaactaggaagaggaaattaactatctgtacttataagaaagtgaagtcactgcttttgctgtcttggatcaagacc

SEQ ID NO: 748047 - DNA, 100 bp, Homo sapiens
tggacccggcctgggagaagcagcagcgcaagggctccttcacctaccaaacgcaaagaccgctcagatgagaagtccaaggatcgctcaaaagataaag

SEQ ID NO: 748048 - DNA, 100 bp, Homo sapiens
gccgttccctgagctggagcgggtgctgcaggcgccgccgccggacgtcggcaacggagaaggttatatatttggggagaaccccagaagaagcatatag

SEQ ID NO: 748049 - DNA, 82 bp, Homo sapiens
ctcagttggaagcagccgatccagcctgcggagcctgtggggcagatgcttcaggactgccccaaggcccgcagggaggtgg

SEQ ID NO: 748050 - DNA, 50 bp, Homo sapiens
cccggaaccgcgattcggcgtgtcagatgaaggatttgggggcagagcac

SEQ ID NO: 748051 - DNA, 100 bp, Homo sapiens
ctacaaattttgctactgtcagatggattgactatggaaaagttgccaaattggtgtgtcaaggatgccacaatgccatcgacccagaagtgcagcgggt

SEQ ID NO: 748052 - DNA, 78 bp, Homo sapiens
tccccgggggcgccatggcgaccggagcgaacgccacgccgttggcgctgataaagcagtttgtgtccgacgtggcct

SEQ ID NO: 748053 - DNA, 83 bp, Homo sapiens
catttgggaccaagctgatgagcccttgaagcacagcagagctccaagagtcaggatcgcaagtcagaaagcaaagaaaagag

SEQ ID NO: 748054 - DNA, 88 bp, Homo sapiens
agtatataaggtcaccgcccgggacaagaccagcgctctgagcctgagcaatgtggcaggcgttttctatatacttgtcggaggtctg

SEQ ID NO: 748055 - DNA, 99 bp, Homo sapiens
gggggccgccgggctgcggcaagactggtgaattttcagctcgtttccttttgaagctgcccgtagatttcagcaatatccccacataccttctcaagg

SEQ ID NO: 748056 - DNA, 100 bp, Homo sapiens
ttggagagaggagaacgaacatcttctggacctttgtccagcctactcatgaaggttacttctcttgtttggatatctggacgctgtttttggactatct

SEQ ID NO: 748057 - DNA, 100 bp, Homo sapiens
gtgacatctgatgctgtggaacttgcaaatcgaagtatgtcagatgaagagcaagaaagtagttgtgatacggtggatggctctccgacatctgactctt

SEQ ID NO: 748058 - DNA, 75 bp, Homo sapiens
tcacaggctgttgtgaggactaagggtgcggcagtgcctggtacatggtccagcaagactatgaatctctgttcc

SEQ ID NO: 748059 - DNA, 100 bp, Homo sapiens
ctgagagtcgcgaggagaatcagtattgagcttttaagtgtcgtcttgcacaggctcctatggatattccaggtttaaacctgagtcaacaagaatacta

SEQ ID NO: 748060 - DNA, 100 bp, Homo sapiens
ctgggagaagagccaagagccgatccttagaaagaaaacgacgagaaccagagaggagacgactttcttctccaagaatatcaacacctttgagaacaga

SEQ ID NO: 748061 - DNA, 100 bp, Homo sapiens
gagagaacgaagcctcggctgggagcgattgcagagggaatggcatacatcgagcggaagaactacattcaccgggacctgcgagcagctaatgttctgg

SEQ ID NO: 748062 - DNA, 83 bp, Homo sapiens
gaagagttgtggcgaggcagatcctgccccgtggccgcggccgtctcgtctacgacgttcctccatcggtgagcaaggatgtg

SEQ ID NO: 748063 - DNA, 100 bp, Homo sapiens
atcaattctgcattcctaaagttagctgatgttttcagagttgggaccattgtagcactggtatacaatgtgctgaaaaccctaatggaaatgaatggca

SEQ ID NO: 748064 - DNA, 129 bp, Homo sapiens
aagagctggggctccgcgaggaaaacgagggcgtgtataatggaagctggggaggccggggagaggccctggccaacgtcaacattgggagcctcatctgcaatgtaggggccggtggacctgctccag

SEQ ID NO: 748065 - DNA, 75 bp, Homo sapiens
gtgcaagctggccagggacctcaaggaagcttatgacaggtgctgactctggctgcccaggagctgtctaggcct

SEQ ID NO: 748066 - DNA, 100 bp, Homo sapiens
tttagagagcagcgtggagagtatcatctcaccaaaggtgaatgaaaactttgccattgatttgatagcagagcagcccgtgagcgaggtggagactcgg

SEQ ID NO: 748067 - DNA, 96 bp, Homo sapiens
ggattaccgcgcgctctgcgacgtgggcaccgccatcagctgttcgcgcgtcttctcctccagctccccccacccgctgcctgcggttttgtttct

SEQ ID NO: 748068 - DNA, 82 bp, Homo sapiens
agaattaccttatcagtgcaggagaggattgtgtctgcttggtgtggagccatgaagagaaccatggagtctggcagtaccg

SEQ ID NO: 748069 - DNA, 75 bp, Homo sapiens
ataaactttctactgatcacattcctatactctacagaacaggtacaggtttgcagattccgccagcagcacagc

SEQ ID NO: 748070 - DNA, 100 bp, Homo sapiens
ggctgcccttcactttgaccagatgttccagaggtttggctctcccatcatcatcttgaatttagtgaaggtaaatatgctgaagatatatttggagaat

SEQ ID NO: 748071 - DNA, 51 bp, Homo sapiens
gccatcatgctgaaacgattcaatagaggctactacttgagaagaggcaaa

SEQ ID NO: 748072 - DNA, 100 bp, Homo sapiens
tgttcccggccctcctgcttcacggtgttcggcgtccacctgaacaagtggcagctggacaagaagctgggctgtgggtgcctcctcctgtatggtgtgt

SEQ ID NO: 748073 - DNA, 100 bp, Homo sapiens
tgggtcagtcaagaaccatttccaaacaaggacatggagggaaggcttcctaagctatttcagagatgccttatgaaggttttgcacattgatttatgga

SEQ ID NO: 748074 - DNA, 100 bp, Homo sapiens
aacgaaggtgaagccacggaagataagccatggccatgcagaaaatctttgcccgggaaatcttggactccaggggcaaccccacggtggaggtggacct

SEQ ID NO: 748075 - DNA, 75 bp, Homo sapiens
ctgagggctacagactcaaccgaaatggagactataaggaggttgaagatgacagcgatgcagagacctatggag

SEQ ID NO: 748076 - DNA, 75 bp, Homo sapiens
ccggccctactatgaggctcggcggctggctaaggaggttcacagctggagcaaagctgttgtttcacctgaggc

SEQ ID NO: 748077 - DNA, 83 bp, Homo sapiens
cagcagctcaccgaggacggggactcgctcctggaatcccagctgcagtcacagaagaggagccatgagaatgaggccgaggc

SEQ ID NO: 748078 - DNA, 75 bp, Homo sapiens
caaagacccagtgaacaaatccgggggcaaggccaaaaagaagtccttgctggtgcagacgaagcggcgggctct

SEQ ID NO: 748079 - DNA, 75 bp, Homo sapiens
gtggcccttgtctcggataaagaaggaagccatgtcaaggcagaagtcaattcatctggaaagactatctctgag

SEQ ID NO: 748080 - DNA, 75 bp, Homo sapiens
aggctgccggctccacccctcagtttggaaattttagcattcaggtgccaggaatgcagatgggacagccagtgc

SEQ ID NO: 748081 - DNA, 137 bp, Homo sapiens
gctggtcttgaactccttccctcaagtgattcttctgcctaatcctcccaaagttcttagattacagcatacatctgtggatggatatactgaaccacacatccagcctaccaagtcgagtagcagacagaacatcc

SEQ ID NO: 748082 - DNA, 83 bp, Homo sapiens
cacgcacgggatccagagcgccgcgcacttcgtcatgttcttcgcgccctggtgatacgggcatgaaaaccaggcttgaggac

SEQ ID NO: 748083 - DNA, 75 bp, Homo sapiens
ccggttgtcctcaggcgctgtcagccttttgtcatacatgatatggagacactgtgtatggctgagaagacgctg

SEQ ID NO: 748084 - DNA, 90 bp, Homo sapiens
ggcgaggggtgcacggcggccacctgagtggcgcggcggtgtcaggaagacagagatgtcaatgaccccatgcccaaccgaggcggcaat

SEQ ID NO: 748085 - DNA, 99 bp, Homo sapiens
gcaactcttcggctaacttcaaaggtccttctatatgatccactctttgactggaccatgaatcctttgaaagctttgtatttacagcagaggccggaa

SEQ ID NO: 748086 - DNA, 75 bp, Homo sapiens
aaggaggcagaggcacttatgcttgtcagggaggttatattcaaaagaaaaaggaactgtggggaatctgtatct

SEQ ID NO: 748087 - DNA, 86 bp, Homo sapiens
gcccctcggcctcggagcaacgagcgcagcgccgaaatacactttcgggaaatggcctctaaatcctggctgaattttttaacctt

SEQ ID NO: 748088 - DNA, 90 bp, Homo sapiens
tcttgcgaccacagccagagcctcagcaggagcctgttctcatcaccatggcaacagcaatggcaccagcatgatatcattgatcattcc

SEQ ID NO: 748089 - DNA, 88 bp, Homo sapiens
cggccccagtcagacgcaggcagccccaaagcctgaacaggcagggccagacccagcccacagcccccatcccgtagcccttcctgga

SEQ ID NO: 748090 - DNA, 87 bp, Homo sapiens
gaaaatcgtcttatagttgagaatttatcctcaagagtcagctggcagggttggttctggacattacacagcatacgcaactcacga

SEQ ID NO: 748091 - DNA, 83 bp, Homo sapiens
ctgtagcagtggctgtatcttcttggggtctccaccgcagcttggaatccacgaagactccactaaccgccgccgcctgtctg

SEQ ID NO: 748092 - DNA, 75 bp, Homo sapiens
tggttggtgaagaaggatttgtagatggccgccaagaacgagtcatgtttgacaaaattacatctcgaatccaga

SEQ ID NO: 748093 - DNA, 75 bp, Homo sapiens
ccgcgcccaagcgcaggggctcctcgggctcagtggggtcgcagtgtatgtttgatgggacgccatctttcagaa

SEQ ID NO: 748094 - DNA, 75 bp, Homo sapiens
tggaattgctactgctgcctctgtcactcctggtgaccagcattcaaggttacggcctccgctgccacagggcca

SEQ ID NO: 748095 - DNA, 82 bp, Homo sapiens
gcgcagagcaaacatctttcaaaggtccaggtgcaggtacagcagtctccgcaacaggtctcggctcagctctccccacaac

SEQ ID NO: 748096 - DNA, 100 bp, Homo sapiens
tagtgaaaatgattttgaagttattggaagataaaaatggagaggtacagaatttagctgtcaaatgcctttctgagaaaagtctacagcattctttctc

SEQ ID NO: 748097 - DNA, 83 bp, Homo sapiens
atttacccagaagtagtccatatgcccagacacatggccccaggccaagcaccccatcaggctaccccgtggagggatgccca

SEQ ID NO: 748098 - DNA, 75 bp, Homo sapiens
cttggagagcagcggcggcggcggcaccccgggcgcggtattgttgcagcatctggcagtgagactgaggatgag

SEQ ID NO: 748099 - DNA, 100 bp, Homo sapiens
tatttgaggtggtgaaactggggaaaagtgcaatgcaggtatgtttctataaaacctgataaccgaaaattggccaacggaacaaatgtcctcggcttac

SEQ ID NO: 748100 - DNA, 100 bp, Homo sapiens
ctaaagatagatgtaaaagctgcaacggaaggaagatagttcgagagaagaaaattttagaagttcatattgacaaaggacgtgttcctcatgatccggc

SEQ ID NO: 748101 - DNA, 75 bp, Homo sapiens
gaagaagctgccgtttttcctgaagttgcccgttgccgagagatggatgagcagattagactgatggaccagaac

SEQ ID NO: 748102 - DNA, 82 bp, Homo sapiens
ccgctgcgctttgactaccacccccatgatggggatgagaagctggcagggcggagatgctggaccacgccgtcctgcttca

SEQ ID NO: 748103 - DNA, 101 bp, Homo sapiens
ttgcatccggagagtggacaagaaatgtggaaaagccactggcagtgattcaagtggtgtcattgatctcacaatggatgatgaagagagtggagcttcac

SEQ ID NO: 748104 - DNA, 97 bp, Homo sapiens
tacgattccaggacaagcttttgtccccaaaccagagatcctgataacttaagtgactctctcttttccggtgatgaagaaaatgctgggactgagg

SEQ ID NO: 748105 - DNA, 83 bp, Homo sapiens
gctgccagccggccagattgtgagtgtggacactgccagcggctgcagccgacttggaatgacctgggagacaaatacaacag

SEQ ID NO: 748106 - DNA, 98 bp, Homo sapiens
gaacagtctctcctcctcacagaagcctggtgctggttgccgaggagaacgtggacttccgcatccacgtggagaaccagacgcgggctcgggacgat

SEQ ID NO: 748107 - DNA, 82 bp, Homo sapiens
agggcaagcacgggaagaagcagctggacccgctcaccatctacggcatccggtgctgcctgctgtttcccggggagatcat

SEQ ID NO: 748108 - DNA, 98 bp, Homo sapiens
tccatcccgtgccctcgctctgagctgcgcctggacctggttctgccttctggacaatctttccgataagaccatcatcatgtggaaactgaccaggg

SEQ ID NO: 748109 - DNA, 100 bp, Homo sapiens
atgaagttgacctggatgaactcatccttcaaaccgacgcatactcaggagcagaggaaggagaaaacattttctatttggcagttgaagatatagaaac

SEQ ID NO: 748110 - DNA, 80 bp, Homo sapiens
tggcaagatttgatgctcttgtgctcagtgacatcattcagtatgtgccaagtgctctctgctgccccagcagagccagt

SEQ ID NO: 748111 - DNA, 74 bp, Homo sapiens
gttgatgaagatgaaagagactgcaggtggtgtcgggtttgacatcaactgtggtgtccgcttgctaagaacca

SEQ ID NO: 748112 - DNA, 98 bp, Homo sapiens
actcggcgcccgcgcctcgggccgtcgggagcggagcctcctcgggaccagggagaccctcacgcagggcttagagttctgtcggcggcagcagaggg

SEQ ID NO: 748113 - DNA, 90 bp, Homo sapiens
gtctctcctggacacgcccgttgcccactgcaagttctctccaggtgcaattgaagcctctcagcagaattcaattcgtcataatctgtc

SEQ ID NO: 748114 - DNA, 97 bp, Homo sapiens
aacgacctcacccagcaggagatacggaccctggagctttggtgtcatccccagcactcctctggccatccatacaccactgatgccaaaccagagc

SEQ ID NO: 748115 - DNA, 100 bp, Homo sapiens
tccgggctcacgtgatggcctcccaccattccaagcggagaggccgggcgtcttctgagagtcaggtggtgatgatgtccagcaactctgtgaagcagga

SEQ ID NO: 748116 - DNA, 83 bp, Homo sapiens
ggcaagggcaacttcgcggtggtcaagcgggccacgcacctcgtcaccaaggccaagaatgagtccctggaacgccagatgcg

SEQ ID NO: 748117 - DNA, 82 bp, Homo sapiens
aagcagccgatccagcctgcggagcctgtggggcaggtgatgtgtccaatctagatcccaacttctcatttgaaggcaccaa

SEQ ID NO: 748118 - DNA, 98 bp, Homo sapiens
cgcggaggctcgcgagatccgcatgaaggagctggagcggcagcagaaggagggccctcatctttgtgtcccatggagccggagagcacagtggccgc

SEQ ID NO: 748119 - DNA, 75 bp, Homo sapiens
attgagcctcaaaatgaagatggcacatggcccaggcagaccttgcagtcaaaatggggtttcactcttgttgcc

SEQ ID NO: 748120 - DNA, 97 bp, Homo sapiens
gagaaaagccagtattgcttgtgctcctaacaacctgtctcttggtgtcatggagaaactccagctgggcccagagattctgcagcgggaaaatcca

SEQ ID NO: 748121 - DNA, 100 bp, Homo sapiens
ctatgggcggctggcggaccctgctgtcactgactttccagatggagtgaaggtacctgagcgcaggaaccatggtcttcattgctgcctcagcattagc

SEQ ID NO: 748122 - DNA, 100 bp, Homo sapiens
tggctgccttcaaaatccaacccttctcttcccagctcatttccagtatgtattttcaaaggccatgtcatttttgaagactgcctctttaagctatgtc

SEQ ID NO: 748123 - DNA, 51 bp, Homo sapiens
ctattgtaagtgcagatggaacacaacaggaatcctatgaggatggttgtg

SEQ ID NO: 748124 - DNA, 100 bp, Homo sapiens
agctaagagatatctgcaatgatgtactgatctttaatctcatgaagtacgacagctacagccgcttcttaaagtctgacttgtttttaaaacacaagcg

SEQ ID NO: 748125 - DNA, 88 bp, Homo sapiens
aaaaggtcccggaccccccggatctgacggggcgggacctggcgccaccttgcagccagagactgctgctactttgaaacgtacgata

SEQ ID NO: 748126 - DNA, 100 bp, Homo sapiens
cagaagcagagttacaggacatgattaatgaagtagatgctgatggtggcaactatggcggtggtcctggttatagtagtagagggggctatggtggtgg

SEQ ID NO: 748127 - DNA, 82 bp, Homo sapiens
ggcagtccacccaccgccgccgcctcccaggaacttttgactggagagaatcacagatgtggaatatttgtcataaataaat

SEQ ID NO: 748128 - DNA, 82 bp, Homo sapiens
tgagctcagacctgccaatttaccagagataattgataacaccctgtaacagctgaaacaatatgatgcgtttgtgaagttt

SEQ ID NO: 748129 - DNA, 82 bp, Homo sapiens
cgggagctggacggcgagcgcgagcggcgcgagaaaaaaggacccaggagcgataacagtaaatcaaataagatatttgtcg

SEQ ID NO: 748130 - DNA, 74 bp, Homo sapiens
aagtatgacctcagctcatggctctgcttcaggttttcctttggaatatggataaatacaccatgatacggaaa

SEQ ID NO: 748131 - DNA, 96 bp, Homo sapiens
agccatgcccctcaggctggaacttgccctgtctcctcgcagatgaggtgtctgcagcagcaccctcaggacagcctgcccacagccagcgtcatc

SEQ ID NO: 748132 - DNA, 73 bp, Homo sapiens
gacgctgctgcggacgtacagcggccacggctacgaggtgggaaactacctccgtatgttccgaggttctctg

SEQ ID NO: 748133 - DNA, 90 bp, Homo sapiens
gtgaagcaagtgcagatagatggccttaaagaagatcttctggagccacaggaacagcttcccccacctcctttaccgcctcctgtttcc

SEQ ID NO: 748134 - DNA, 118 bp, Homo sapiens
gtggccttcgcgtctgcccggccaagaggcaaaggggaggttacgcagcaaaccatccagaaggtgagaagccctaccactgcaactgggacggctgcggctggaagtttgcgcgctc

SEQ ID NO: 748135 - DNA, 98 bp, Homo sapiens
tttacagcaaaattcagggcttcaaatataatgccatcttcaagacgagccaaactcaggctgtaccttgagcagctcaagcaactggtgcccctggg

SEQ ID NO: 748136 - DNA, 75 bp, Homo sapiens
cgagcgcgctcgctccggcgccggcctcgcctcctcgcagcagcgccatgcaagagtgagccatggagctacgtg

SEQ ID NO: 748137 - DNA, 96 bp, Homo sapiens
tcctggcccgcagccgccacctacccagtgaccatgatagatataaagatgaagcgcagctgtataaagaagagcacctgaggaatcggcagcacc

SEQ ID NO: 748138 - DNA, 80 bp, Homo sapiens
agcatctgctggacagccctccccgcccccaagtccttaccaacctgtgccactgagcagtctgaatgccagaatggata

SEQ ID NO: 748139 - DNA, 100 bp, Homo sapiens
actgcgcccccgggagcgggcgcccagagcaaaaacttgcccaactagaagaggcgaagcaggcttccatccaacacatccagaatgcaattgatacgga

SEQ ID NO: 748140 - DNA, 82 bp, Homo sapiens
caggctgatggagagctgaacattactcttccagaagagttatcagggaataccaagagcagagagagcatccaggaaccta

SEQ ID NO: 748141 - DNA, 90 bp, Homo sapiens
gtggatgcagcagataaccggaaaatcacacctcttatgtcagcatttcgcaagattgctgagctgaaaagaggtgctgaaattattgtt

SEQ ID NO: 748142 - DNA, 83 bp, Homo sapiens
cggaaatcagctctacagttcagttgtggaagctgatcgaggaagcctaagcaggctctgtgaagtgggaatagtggtatttg

SEQ ID NO: 748143 - DNA, 100 bp, Homo sapiens
tatgctgtcaattttccaatgagagatggtatagatgatgagtcatatgggcagatatttaagcctgtgtgatgaatgcagactctgctaccattttggc

SEQ ID NO: 748144 - DNA, 100 bp, Homo sapiens
tgaatgtgtttgctctcatgaacatgcaatgagaagactgatcaatctgttttaagataaaattggctgcagcattggcaagatgtcgaatcaagcatga

SEQ ID NO: 748145 - DNA, 82 bp, Homo sapiens
ccagaccttatccagctgagaaagacgagagaccaatacttgatgcatttccggagagttcttttgaagtcacttcagaagg

SEQ ID NO: 748146 - DNA, 75 bp, Homo sapiens
gctttccccgcaagatggacggtttcgccggcagtctcgattactgtggcatgatcctccaccattcacactcta

SEQ ID NO: 748147 - DNA, 126 bp, Homo sapiens
tgagcatacaccgagagagtgaggagccagacgacaagcacacactatggcgctgaaacggattaataaggtagctacagcaagctgggtagcaggcagatccaaaggatatcatgaagtttccag

SEQ ID NO: 748148 - DNA, 98 bp, Homo sapiens
gcgggatctgcaccgcgaccagggccgcaggaagacgcatctgaaccggacggcttttctcatttccacttgtacgtgtgcgctgcttttctcgtgag

SEQ ID NO: 748149 - DNA, 90 bp, Homo sapiens
gctcgaggtggactatgaggctatccgcagcgagatggagcagctcaaggagatgaccgcacctcgagcaggagtggggatgccacgtct

SEQ ID NO: 748150 - DNA, 98 bp, Homo sapiens
gaatagagagagccaccggccaaagaccacaccacttcctgcgcagaggcatcttcttctcacacaggagcaagagcagctctacctgaggtcaggtg

SEQ ID NO: 748151 - DNA, 83 bp, Homo sapiens
ggatccctggggcagagaggaagcttctagtgtactcttactttgaaaaggctttggatgaagagtatttaaaagtagatgcc

SEQ ID NO: 748152 - DNA, 50 bp, Homo sapiens
cagggagctggaggccctgcggcagacaccttccagttccccgacatgga

SEQ ID NO: 748153 - DNA, 75 bp, Homo sapiens
aagctcattgaagcagaggacaacatgaactgccaggtggctttcctgggggaatgcctggtaattttcccggag

SEQ ID NO: 748154 - DNA, 73 bp, Homo sapiens
cggttccccggcccacagtgggggtgtgcaaacccgagagaactggaaattgacattgaacgctgtgtgagag

SEQ ID NO: 748155 - DNA, 100 bp, Homo sapiens
gacagaaggacggcttgtgagtctccattctgttgccatctaccttgggatcaaacggaaaccgccccccggctgctccgattcccctggagtgtgaagc

SEQ ID NO: 748156 - DNA, 80 bp, Homo sapiens
tcatttcccccgtcttctcagtgagatttccttgaagtcccgggcccagagcccggccagcaggagcagttggtcttcgg

SEQ ID NO: 748157 - DNA, 82 bp, Homo sapiens
ttgtgacaatgactcaccttttggattttccacatagcaatcagattatattccatcacaacaagatattctgcttgccaga

SEQ ID NO: 748158 - DNA, 100 bp, Homo sapiens
tcgccaccgaggtcgcacgcgtgagacttctccgccgcctccgccgcagacgccgccgcgtggtataagttgaaatccaaaccaggaaagaaggacaagg

SEQ ID NO: 748159 - DNA, 82 bp, Homo sapiens
caggtgctggaaaggaatgaggagttacagagggccgagaaggacaggatcagaacaactctgctcatggtgattacatgca

SEQ ID NO: 748160 - DNA, 100 bp, Homo sapiens
gccgggccatggggtggcgggcggcgggcgcgctgctgctggcgctgctgctgcacgggcggctgctggcgaccaagaccttggacaaggcaggggtgct

SEQ ID NO: 748161 - DNA, 90 bp, Homo sapiens
aggagagacacttgtgaacattcaagtgaagcaaaagcctttcatgattattctgaatcaccatcttattctcctcagcctcagccattt

SEQ ID NO: 748162 - DNA, 75 bp, Homo sapiens
cagatcaaaggataaacttgaccaggtttccagtgaaataagtgacctggtgtcccgtgcaatgcatcacctgca

SEQ ID NO: 748163 - DNA, 100 bp, Homo sapiens
tcccagacctgatctccaccatgatgtcaacagatttggccattcagcagtcttacacaacaggacagtcattttgtttactcattcagccctgttgcag

SEQ ID NO: 748164 - DNA, 83 bp, Homo sapiens
cagacctgcaagctctttgacacacagcagttcttgtcagaacccgaaaacagtggccaaatgtcaggtaactcccagaagaa

SEQ ID NO: 748165 - DNA, 90 bp, Homo sapiens
ctgacatcattgcaatcaagtcacctgacacatttgtgagaactatttatgcagatttcattcatacctgtgaaaagctctgccatgaag

SEQ ID NO: 748166 - DNA, 83 bp, Homo sapiens
cgcgccggggtggcgcccctccaaccgtcctaacgccgggccggcagcaaggagagcagtagagaactgtggactattctgct

SEQ ID NO: 748167 - DNA, 83 bp, Homo sapiens
aaggaaatgggacatttgagtgtggcgcgtgcagataaccttctgttcggtgatgaaattatcactaatggttttcattcctg

SEQ ID NO: 748168 - DNA, 75 bp, Homo sapiens
gcgaccagtgcgcgtcccagctggaaaaggagttcatccgtctgggcagcctcagcaagctctcggggaaggggc

SEQ ID NO: 748169 - DNA, 75 bp, Homo sapiens
tgaagatgattctaattcaacaaatcataacttggttcccgtgtcagtggctatgatgacacctcaagttatcac

SEQ ID NO: 748170 - DNA, 100 bp, Homo sapiens
aggttcttcagtgtatgcctgaaatgagccgtcagactgctacagcattacctaccggtacctcgaagtgtccaccatcccagagggtgcctgccctgac

SEQ ID NO: 748171 - DNA, 75 bp, Homo sapiens
gatggacaagagacgatcattctgcaagcaggcaacctgaatacagggaacgggtatggcaatccccgaaactca

SEQ ID NO: 748172 - DNA, 99 bp, Homo sapiens
ccagtgccactcgtgagtggacagaacaggaaaccctgcttctcctggaggcgctcctatgatgtcccaccacctccgatggagcccgaccatcctttc

SEQ ID NO: 748173 - DNA, 75 bp, Homo sapiens
cccggatcagccgcctgacccggcgggtggaggagatcaaggcagcctggcatcctcgctacaacctcattgttg

SEQ ID NO: 748174 - DNA, 50 bp, Homo sapiens
gcagtcgcctagccaaccctgttcagaatttaggccacccgtattggctt

SEQ ID NO: 748175 - DNA, 82 bp, Homo sapiens
tacaaaggaagacttgtaacctggagaagaggatggagtctcactctgttacccaggccggagtgcagtggcgcagtctcgg

SEQ ID NO: 748176 - DNA, 75 bp, Homo sapiens
gggaccttctccctgcctggacccctactattgcaacaagcgtcatcacgtagacataaccaagaaacttcaccc

SEQ ID NO: 748177 - DNA, 75 bp, Homo sapiens
agccgctggggtcccttttgcctcagatactattttgaaggtgctcctcgcctgcttgcagatatcagaccccag

SEQ ID NO: 748178 - DNA, 100 bp, Homo sapiens
tttaagacaaaatttactcagccagtactacctggtttcatggacccgctggggcccagcccctactcatggtgcccagaagacctggctatggcaccat

SEQ ID NO: 748179 - DNA, 90 bp, Homo sapiens
cccgagaacgtgcgggaagagaagatcatcgagcatttcaaacgtgccggtggtggtgtgcacattgagccccggtatagacagttcccc

SEQ ID NO: 748180 - DNA, 99 bp, Homo sapiens
gctgatatacatccaatgaggaatcccgcccattgtcagttcctgttaaagccatgttgaatatatctgaaagctgtagaagtcctgaagaaagaatga

SEQ ID NO: 748181 - DNA, 83 bp, Homo sapiens
gccgcgaaccgcagtatcatgctggccaagaagatcatcattaaggacggaggcacgatgacttcaaacctgcttctattgac

SEQ ID NO: 748182 - DNA, 50 bp, Homo sapiens
ggcgtggagatatggcgcaactgcggcgctgccctgaaactctaatctca

SEQ ID NO: 748183 - DNA, 83 bp, Homo sapiens
ctgaacgtggccctgaccagagcaaggttgggatttgctgtgttcctgggcaggtgcctggtcaatcagtcctcgggatggca

SEQ ID NO: 748184 - DNA, 90 bp, Homo sapiens
caccaatcccttcgatcaggatgttgaaccaacgaaacgtatgctttccttccaagggttagctgagttggcacatcgagaatatcaggc

SEQ ID NO: 748185 - DNA, 100 bp, Homo sapiens
gacgcctttggtccctcggtgtctgcactggctgctggtcaaggcttcagtgtggagtaattgacactttcgaggttggtgttcatattgctgatgtgag

SEQ ID NO: 748186 - DNA, 100 bp, Homo sapiens
ctcttccaaaaccacaaacttgcctacgtcagtaacagccaccaagggaagtcgagataacatgagtattgtactagtttgcttttcaaatgctcccaag

SEQ ID NO: 748187 - DNA, 74 bp, Homo sapiens
gtctggatcacggatgtaggaagtggccataaagaatgctgatgggagaaccattttcctaattttcaaattgt

SEQ ID NO: 748188 - DNA, 83 bp, Homo sapiens
gctggaatgcatccaagagaatccctcaacatgctgaaggaagaatcctgctcaaaaatgaggtgaattaatacttgggcgct

SEQ ID NO: 748189 - DNA, 100 bp, Homo sapiens
aagctcttcacagatctcagagaaattggccatggaagctttggagcagtgtattttgtgagaagcgccactgctttgatgtcaactataattcaagtta

SEQ ID NO: 748190 - DNA, 90 bp, Homo sapiens
aaaaagacggacagcccatcgtgtgaactatagagtttgtggacagatttatattgggatgatcatggtgattttactgctgcttgtggc

SEQ ID NO: 748191 - DNA, 74 bp, Homo sapiens
gccagcggcaggaccagcgggcgggggcccacgaatataattggtgattacaactttcctctataaattaactc

SEQ ID NO: 748192 - DNA, 98 bp, Homo sapiens
cccacacctccggaccgagggacgcggagtcctgtgaagataaatcagattagcttggatgaaagtggagagcacatgggtgtgtgttcagaggatgg

SEQ ID NO: 748193 - DNA, 100 bp, Homo sapiens
cagcacaccagttgatatgccaagcagaggacagaatgaagacagggacagtggcattgctcgatcagttttggcaagcgttctgcaggaagttttaggc

SEQ ID NO: 748194 - DNA, 90 bp, Homo sapiens
cggagcagaacggattgcaggaataccctctaccatctgctttggtcagggtgccgctcgaggatttaaaagcaacaagaagaaaaccaa

SEQ ID NO: 748195 - DNA, 95 bp, Homo sapiens
tggcgaagcacgagcagatcctggtcctcgatccgcccacagacctcaaattcaaaggattttttatcaagcagaaatgcatcgaacaacgagaa

SEQ ID NO: 748196 - DNA, 100 bp, Homo sapiens
cgaagacttttgggagattataggagaactgggcgacggagcctttgggaaagtgtacaaggtcggcttgggaaaccaaaaattacacagagtttaatgg

SEQ ID NO: 748197 - DNA, 90 bp, Homo sapiens
tccactttgcgatcgtcacactgaatctattgccaacatccagattgtggcttttcatggcctgccactgaaaatcaagaaagaacccca

SEQ ID NO: 748198 - DNA, 97 bp, Homo sapiens
caaggctgcctataatcaagtaaaaacaatagctcaaggaaacctttccaacacagatgtccaagctgccaagttggccgttgtccaatgtgttgct

SEQ ID NO: 748199 - DNA, 100 bp, Homo sapiens
ggaagcagcgtgagcagccggaggatcgcggagtcccaatgaaacgggcagccatggccctccacagcccgcaggacctacaagaacagtgaggagcttc

SEQ ID NO: 748200 - DNA, 75 bp, Homo sapiens
tgctatctgttgacatggaaaacaaggaaaatggctctgtcggtgtaaaaaagtgtgatgaatgcagactctgct

SEQ ID NO: 748201 - DNA, 100 bp, Homo sapiens
gaatcgaatgtcacgaatgcttgaagacagagatttattcgtaatgcgactcaaagctgcacggcagtctgtttatgagatggagtcttgctctgtcgcc

SEQ ID NO: 748202 - DNA, 90 bp, Homo sapiens
gtcccgaagccgatctctctctcgttcaaggaagcgcaggctgagaatgaatctgagctttttggacgtacaattcgtgtcaatttggcc

SEQ ID NO: 748203 - DNA, 75 bp, Homo sapiens
cgcgagatggcttgctccattgtcgaccagaaggtatcttgcaatatattcagaactctccctcctagtgacagc

SEQ ID NO: 748204 - DNA, 89 bp, Homo sapiens
tcacaaaagcaattaagagagctcaaataatgggtagctacagcaagctgggtagcaggcagatccaaaggatatcatgaagtttccag

SEQ ID NO: 748205 - DNA, 75 bp, Homo sapiens
gagctatggagaggtgacgcttgtgaagcaccggcgggacggcaagcaggtgattgaagcctccgatgttgtcct

SEQ ID NO: 748206 - DNA, 73 bp, Homo sapiens
tgccaggctgcaagggctcgcccgggtttgacggccaattcctgtccccccagcagcatggcatcgtgtgctg

SEQ ID NO: 748207 - DNA, 90 bp, Homo sapiens
gtccgggagaacacagagggcgagtacagcagcctggagcatgagaattacaggaagtcctcccgccatctggctgccttcatcaacaag

SEQ ID NO: 748208 - DNA, 87 bp, Homo sapiens
ctgcccagcgttggcgaggagccccgggaggtgcttctgcggctgtacggagccatcttgcagttaagtgggcagaccaacatccac

SEQ ID NO: 748209 - DNA, 50 bp, Homo sapiens
gaaattgtcccgaatccctgcagaatggaacaaaagtgggacttttaaaa

SEQ ID NO: 748210 - DNA, 83 bp, Homo sapiens
ggctgccctgctggccgcgccgggagcggcgctggccccaaggcgctgccctgcgcaggttgtattccctgaatgactataaa

SEQ ID NO: 748211 - DNA, 100 bp, Homo sapiens
ctcgcttcctgctcgacctgcggcagtacttgggtactccaaagattcaggtttactcacgtcatccagcagagaatggaaagtcaaatttcctgaattg

SEQ ID NO: 748212 - DNA, 88 bp, Homo sapiens
gagcgcgagagcttcgagcggactcaggcagcggaggaggagaaagagatggacctcccggactcggcctcgagggtcttctgcggcc

SEQ ID NO: 748213 - DNA, 122 bp, Homo sapiens
aactggcagctgtcttcctttgcaaaacgagactgttaataaaacctaccccagggtaggacggactgttcggtggacatcttcaataaggagctactgctaatccccatccacctggaggt

SEQ ID NO: 748214 - DNA, 76 bp, Homo sapiens
tctggcctggaggctatccagcgttaaccccaaagattggctttccttggagtgaaatcaggaacatctctttcaa

SEQ ID NO: 748215 - DNA, 98 bp, Homo sapiens
aagaactcaagaccatgaggaaattaatgcaaattcaagcagatctaatgaggcgtcaagaagaactcagacgcttggaagaactcagaaaccaagag

SEQ ID NO: 748216 - DNA, 100 bp, Homo sapiens
caacgcggagtggagctcagccaggggcagccggctctggtgctcccagaagagatgccctcggccaccagccacagcgggagcggcagcaagtcgtccg

SEQ ID NO: 748217 - DNA, 74 bp, Homo sapiens
agatctcagtcagagtaggaaataattttcacaaccttcaagaaattcggatattttctgttaccaacaacaca

SEQ ID NO: 748218 - DNA, 98 bp, Homo sapiens
ccctggctctataagctgaattatggcagcccagtcaagttgttgacctcctgtactggagagacattaagaagactggagtggtgtttggtgccagc

SEQ ID NO: 748219 - DNA, 82 bp, Homo sapiens
gaagcctcttaaccgagccttgtaggctgaaattgcaggtggaaaggaatttggacaattttccgacagctcaacacggcca

SEQ ID NO: 748220 - DNA, 75 bp, Homo sapiens
tccggcgctcgccatggccgacgaaaagcccaagaataccctctaccatctgctttggtcagggtgccgctcgag

SEQ ID NO: 748221 - DNA, 146 bp, Homo sapiens
aagatcggcttgaaattaccaactgctttcctttccctcagcacacagaggatgatgctgactttgatgaaggtgaccaccatgtcggtgaggttgcggttcctgtcccctggggacacaggggccgtgggggtcgtgggccggag

SEQ ID NO: 748222 - DNA, 98 bp, Homo sapiens
tgacagacctggagactgcagttctctatccttcacacagagcataccagaaattcctgatgacctgaagcaactttataaaactgtgtgggaaatct

SEQ ID NO: 748223 - DNA, 82 bp, Homo sapiens
ctgccctctgaggagatggtcatgacaggcccagctgagagccagcctggaggttacccagcagcaggccacccaggccgaa

SEQ ID NO: 748224 - DNA, 100 bp, Homo sapiens
acccgcggaaccgacggctcaggtgccggacgctggcggatgtgcgagcgaggaagatgagaatgtgcctactgctcctgatcctccaagtcaacattta

SEQ ID NO: 748225 - DNA, 56 bp, Homo sapiens
ttcgtgattcagcaagtttcatctcaaggtcctcctattatcactcttgagccagt

SEQ ID NO: 748226 - DNA, 50 bp, Homo sapiens
gtctgcgagccaggattcccggtagagcagagccggagccaggtgcaggc

SEQ ID NO: 748227 - DNA, 75 bp, Homo sapiens
cagttttggtcatcggaagtggtgccttcagcacaggttttcctaggacattaggacaagccgaagccctggaca

SEQ ID NO: 748228 - DNA, 100 bp, Homo sapiens
tggctgcagcctcccggcgccagcgaagacaggcccagagcaagagaggcatcctcaccctgaagtaccccatcgagcacggcatcgtcaccaactggga

SEQ ID NO: 748229 - DNA, 49 bp, Homo sapiens
cacacacaccatcatggtcctggctattgagggcacctacattgacaag

SEQ ID NO: 748230 - DNA, 98 bp, Homo sapiens
tggtcaagttctacaatgttcgtggggagcacatcttcacactggacactctcgtgcagggtttggaaatcccttgtctccaggttgctgggattgac

SEQ ID NO: 748231 - DNA, 100 bp, Homo sapiens
gagagccaggtccagagcgccgaggagccggtctaggacgcagcaggcccctggccccaacatggcccgtcgctctcagagctcctcgcagggggacaac

SEQ ID NO: 748232 - DNA, 92 bp, Homo sapiens
caccgacctcgacgtcttgcctgtgtcccacttgttcgcggcctataggctttatcctgtggataaacgcagagtgaacgagtttggggagt

SEQ ID NO: 748233 - DNA, 100 bp, Homo sapiens
aatttgcagcaccatcaacagatgcccctgataaaggatacgttggaattcctcctgatcagcagagactgatctttgctggcaagcagctggaagatgg

SEQ ID NO: 748234 - DNA, 74 bp, Homo sapiens
cagttggaagcagccgatccagcctgcggagcctgtggggcagttgaggaaacgtgtgaagcttgaagggaaag

SEQ ID NO: 748235 - DNA, 100 bp, Homo sapiens
cagctgcccacttggacgatgcaggaatcggtgagtttcaaggatgtggctgtggacttcacccaggaggagtggggtcaactagactcccctcagaggg

SEQ ID NO: 748236 - DNA, 83 bp, Homo sapiens
agctgctgctgtgcggagaacaacggacaatgcagatcttcgtgaagactctgactggtaagaccatcaccctcgaggttgag

SEQ ID NO: 748237 - DNA, 100 bp, Homo sapiens
gtgccctgctctgaggactacgacagtcaccgcaggttcgaaggaatactcccccagttgcaagaggcgcaggaccgtggaagacttcaacaaattctgc

SEQ ID NO: 748238 - DNA, 89 bp, Homo sapiens
aaaatggcccagacacagaaaggttaaaaagatcaagtggcatgagcagccttttggggaaaattggtgccaagaagcagaaaatgagc

SEQ ID NO: 748239 - DNA, 81 bp, Homo sapiens
ccttccttataggcgtcagcgggggaacagctagcggcaaggtaccaaccaagaagctgaagaaatatgagaaagaatatc

SEQ ID NO: 748240 - DNA, 100 bp, Homo sapiens
aatgggtctcttgttgaaatccgaaatttcttgggtgaaaaatatatccgcagggttcggatgagaccaggcatgttctctatgggatggccagcttttt

SEQ ID NO: 748241 - DNA, 75 bp, Homo sapiens
gaggaaaatgagcagtctctgcccccgccggccggcctcaacagacaccatatctcagaagacggtagagattgc

SEQ ID NO: 748242 - DNA, 75 bp, Homo sapiens
caaagacgctaaacgtgccctactctgccccgggggagaggttgacatcatggacatatgtgagtccatcctgga

SEQ ID NO: 748243 - DNA, 83 bp, Homo sapiens
gggccctctacagggaagtgatgctggagaaccacagcagtgtggctggactagacaatgcagatcttcgtgaagactctgac

SEQ ID NO: 748244 - DNA, 98 bp, Homo sapiens
ctacaagacaacaccctgatctggcatggacatctgttttcactcattagctcctgaggtaaacaaattgaaaaaatgagcgaactggaacagttgag

SEQ ID NO: 748245 - DNA, 49 bp, Homo sapiens
cctggaccttgcagccgcaatgggtgtggatgaatggaacatagctcgc

SEQ ID NO: 748246 - DNA, 83 bp, Homo sapiens
ggcgatggttcgtgctgagcaacgggctcctgagctactacagactggtcaaacaaatggattttacagaggcttacgcggac

SEQ ID NO: 748247 - DNA, 87 bp, Homo sapiens
cggagactttggggcctaactaggcctcatgcattgtgcgtcagcagcaatgtttatggtgaaaaatggcaacgggaccgcgtgcat

SEQ ID NO: 748248 - DNA, 100 bp, Homo sapiens
ggttttgagctctgctctgcctgtgatgtcgagaacactggctatgttagatactaaagaaggcttccccacaacccatatgcatctgctttgactggtg

SEQ ID NO: 748249 - DNA, 100 bp, Homo sapiens
aggaagcagggctgggccagcagttggcagatcagcccctggaagcagatgaagggcagaagataagattattggactgactactagtcctctacgggac

SEQ ID NO: 748250 - DNA, 74 bp, Homo sapiens
ggtggccaacaaagtcaaggtccccctgcaggcctctttggctttgtgatcctctccctgctgctggtgcccat

SEQ ID NO: 748251 - DNA, 75 bp, Homo sapiens
ccagaacaagaagaagaagaagtctggaggcttccagtccatgggtatttgaaatatctcaccaaaaaatatttg

SEQ ID NO: 748252 - DNA, 100 bp, Homo sapiens
ggggagctggaggaacaggcagtggaaatccatggtgcaccttccaatttcagttccagccatctggaatcaaagcacgtatactgtgtagatgttaatg

SEQ ID NO: 748253 - DNA, 82 bp, Homo sapiens
tgcagctcttgggttttttgtggcttccttcgttattggagccaggcctacaccccaggccctgatccttcaccagctaggc

SEQ ID NO: 748254 - DNA, 82 bp, Homo sapiens
cagcctcaaacaggagctggagcagctcaaagagtttcgccgtgaggaagatgcggaaaaggctgtgattgacttgaataac

SEQ ID NO: 748255 - DNA, 82 bp, Homo sapiens
caaagagtagcctgggtctggcttcttgtactggagaaatggttggcccgggaaaaggaaccaattgatgaacttcccaaaa

SEQ ID NO: 748256 - DNA, 75 bp, Homo sapiens
cacagtaaggccaaaaatgtgcatactcacagagttagagagagggatggtggcacctgaatggacagaagagga

SEQ ID NO: 748257 - DNA, 76 bp, Homo sapiens
atggtctttgtgcacatttacatcaaggtattaatctctggagaagacacatccacagttagcactttcttcagat

SEQ ID NO: 748258 - DNA, 88 bp, Homo sapiens
ggacgggagagtctgccggcggagaatataagggctgatatgccgagcattacccagggggagtcctcattctgacctcaaagaaagg

SEQ ID NO: 748259 - DNA, 75 bp, Homo sapiens
tcttccgcctgccagaggtgcaaagggatgtgcccaagtcaggtgctggagaatctggtaaaagcaccattgtga

SEQ ID NO: 748260 - DNA, 90 bp, Homo sapiens
gatctgcaggctgtgggacttgaagactatgggaagcaagagcagaaagaccatgggtttgaggtggcctccacttcccctgaagacgag

SEQ ID NO: 748261 - DNA, 100 bp, Homo sapiens
gagctaaagcagcgtgcgttcagccctgggtttggaaattttagcattcaggtgccaggaatgcagatgggacagccagtgccagaaacaggcccagcta

SEQ ID NO: 748262 - DNA, 75 bp, Homo sapiens
aaagcaaaacttattactgatcttcaagactctccccacctggtgcaggttcgggagcggatccgcatcaatggg

SEQ ID NO: 748263 - DNA, 82 bp, Homo sapiens
gctgaggcggccgcggggcccgagcgcagagagaagaagaaggaggttcctgctgtgccagaaacccttaagaaaaagcgaa

SEQ ID NO: 748264 - DNA, 74 bp, Homo sapiens
gccgctgccgccatcgtgccagcccctcggatcttgagccagatgattgtgcatccatttacatctttaatgta

SEQ ID NO: 748265 - DNA, 100 bp, Homo sapiens
tccaccctgggggagctgaaacagaacctgtccaggagctggcatgacgtgcaggtctctagcgcggagatgtcctttgcttctcagatgtaaatgcact

SEQ ID NO: 748266 - DNA, 75 bp, Homo sapiens
gcgtcgcccgaggcgaggaggagcgctggcgatataattggtgattacaactttcctctataaattaactcttga

SEQ ID NO: 748267 - DNA, 96 bp, Homo sapiens
ccacaaacaccattggccaaagcagtgcggaatatgttctcattgtgcatgacatagggcctgattacattccaacagaggaagaaaggagagtct

SEQ ID NO: 748268 - DNA, 75 bp, Homo sapiens
ccgaggagtagtcgctggagtccgcgcctccctggttacagaatgtctgaaggggacagtgtgggagaatccgtc

SEQ ID NO: 748269 - DNA, 75 bp, Homo sapiens
gaccaaaattgaaaaaatggttgacctcacccaggtcaaaatgcagatcttcgtgaaaacccttaccggcaagac

SEQ ID NO: 748270 - DNA, 75 bp, Homo sapiens
tcttatatctgtagcaattactctgcatcctacagctgctgaggtagcaatgaagtgatgaggatactgatctct

SEQ ID NO: 748271 - DNA, 74 bp, Homo sapiens
gtgagcctgtgcacctgaaagaaggggaaaccatctgccgtgtgactggtgggatgaaggtaaaggcagaccga

SEQ ID NO: 748272 - DNA, 136 bp, Homo sapiens
gcggaagtgggaaacctgtagggtatggtccagctgtgccgcaccgaggcgagcaggagcagggaacaggcaaatgtgcaataccaacatgtctgtacctactgatggtgctgtaaccacctcacagattccagct

SEQ ID NO: 748273 - DNA, 119 bp, Homo sapiens
gtcggcttcaaagagaaaaggcaacatcctgtcacaggccatgctctggcaaaaacttcccttttagactatggcgacatacctggagttcatccagcagaatgaagaacgggatggtg

SEQ ID NO: 748274 - DNA, 50 bp, Homo sapiens
cgcccgccttcgacaagcccaaaagctttttgacaactacatgcaacaag

SEQ ID NO: 748275 - DNA, 128 bp, Homo sapiens
cccgggttccaaacccctagccacgacatggaagaatttttgcaacgcgccaaatctaaactgatttctttaaagactcgtgcagcacatcattatcgctggatgcccggacatgtaatacacctgac

SEQ ID NO: 748276 - DNA, 90 bp, Homo sapiens
cggagacccccaggtcctgcgggcgcggtccaacgagcgctcctccaagcggagccttggagggcacggccggcaccattacctccaacg

SEQ ID NO: 748277 - DNA, 131 bp, Homo sapiens
ggacgggaaggcgggagacgagaagcctgaaaagtcgcagcgagctggagccgccggagcattgtgatgaccacctgctccaccttctgtgcccttggcatgatgcctctcctcctgtacatctactccag

SEQ ID NO: 748278 - DNA, 97 bp, Homo sapiens
tcccgggctcgagccccgccctgccgccagccaggaggatcccttttcccccagaaattactcaatgctgaaacctctcaaagtggtattagagacg

SEQ ID NO: 748279 - DNA, 50 bp, Homo sapiens
ctccatattctcaggcacagagaaagagacacctgtgcatagcagatcat

SEQ ID NO: 748280 - DNA, 100 bp, Homo sapiens
cttcgatatgaattatacgaatcgagctttatttgaaggtagacgcatcgaatttgcagaacaaataaataaaatggaggctaggcctagaagacaatca

SEQ ID NO: 748281 - DNA, 100 bp, Homo sapiens
cggcagaggattcgctcccagagcagctgcggccagagctgtaggtaaaacttgcctactgatcagttacacaaccaatgcatttcctggagaatatatc

SEQ ID NO: 748282 - DNA, 75 bp, Homo sapiens
ctggccgataaatccctggctactagaactgaccagagaaacttgcccaggccaaagaagagaacgtgggcttac

SEQ ID NO: 748283 - DNA, 100 bp, Homo sapiens
ctaaaatatatttgtactggagatttccctcctggaaccaaaggaaatacatttgtacacgatcccaaggtactgcataagccgaccacagtataagact

SEQ ID NO: 748284 - DNA, 83 bp, Homo sapiens
ccccagatgcccaccgggatggagaaggaggaggaatcggatttttcaagccacattcaattgataggatgaaaaaatttaag

SEQ ID NO: 748285 - DNA, 83 bp, Homo sapiens
cgctgcggcctggcggcttccaggcgcactaccgcggcaagagcggtgagcggggcgcctatgcctccttcgggagagacgca

SEQ ID NO: 748286 - DNA, 88 bp, Homo sapiens
ggaggccttccagctgtttgaccgaacaggttatcaatactctggctgaccatcatcatcgtgggactgactttggtggaagtccttg

SEQ ID NO: 748287 - DNA, 100 bp, Homo sapiens
gaaattttgagtagatccatagtgaaacggtgggcaaattttgcaaaatatgggggtgatccattcatgttgcagcagtctacaaatccagcaccaggaa

SEQ ID NO: 748288 - DNA, 83 bp, Homo sapiens
ccgcctccccggcgccgccgtggctcgacggagaccagctaggggtttgccttcccggattgggcctacaagccagagtcgtc

SEQ ID NO: 748289 - DNA, 88 bp, Homo sapiens
cgcagtggtcgcttcttctccttgattcttggtgccaccattgagaactccaggattgtcctgcagatcgacaatgcccgtctggctg

SEQ ID NO: 748290 - DNA, 83 bp, Homo sapiens
cttcagtcagtcgggccgcgccgcgcctcagctctgactcggtgaaatacctggagtgctcagctctcacccagagaggcctg

SEQ ID NO: 748291 - DNA, 51 bp, Homo sapiens
gtggagacacggccagatctgccctccaaaatgcactcggtgatggaaaga

SEQ ID NO: 748292 - DNA, 100 bp, Homo sapiens
tgtgaggaaaggcacctccaccaggcgcatattaaatttcctattgactacccctattcaccacctaccttcagattcttgaccaaaatgtggcacccca

SEQ ID NO: 748293 - DNA, 100 bp, Homo sapiens
tggacacagaagtatttgtgacaggattttttatcaagcagaaatgcatcgaacaacgagaatcaagatcactgagctaaatccccacctgatgtgtgtg

SEQ ID NO: 748294 - DNA, 82 bp, Homo sapiens
gccctggatgggactgtctatgatgtcatgtttgtcagcacaggtggatcagtacaagggaaagcgggatttggagtcactg

SEQ ID NO: 748295 - DNA, 75 bp, Homo sapiens
tttctattgaagatgtccaaaaggaaattaaaagaggcacgaagctgctcctgagaaccatgtctatgcccaaag

SEQ ID NO: 748296 - DNA, 51 bp, Homo sapiens
ttcgcagtggtcgcttcttctccttgcaggaggatgcattagcacaacagg

SEQ ID NO: 748297 - DNA, 50 bp, Homo sapiens
tcctggcagcaggggtttcaatgggagggggtcatcctgtatatcctcct

SEQ ID NO: 748298 - DNA, 75 bp, Homo sapiens
cttttatgacaatattggatttgtaggtcctgtgccaccaaaacccaaaggtgctggagaatctggtaaaagcac

SEQ ID NO: 748299 - DNA, 100 bp, Homo sapiens
gctgccagagtttaacctcatccactccctgagtcatcagtgagttctgcctcagtcagctcccaagtgaggacgcagtcacctttgaagactccggagg

SEQ ID NO: 748300 - DNA, 100 bp, Homo sapiens
aatgggagatgaagacgatctgagcactgttgcaagaattcaattccgtcttcctgatggttcttcctttacaaatcagttcccttctgatgctcctcta

SEQ ID NO: 748301 - DNA, 96 bp, Homo sapiens
ctgcctgaaaatgcactcggatgccgccgctgtcatgatcagggccaaagcggtcagtgagaaggaagtggactctggaaacgacatttatggcaa

SEQ ID NO: 748302 - DNA, 82 bp, Homo sapiens
cggccgcgcggactgaaggagactgaaggcataatcaccagcaacacccgggacaataatacgggggccacctacccccacc

SEQ ID NO: 748303 - DNA, 50 bp, Homo sapiens
aaggattccaagtaactcttatttggtcttgatagactttctgtaaagaa

SEQ ID NO: 748304 - DNA, 74 bp, Homo sapiens
tgaacagtacgcagtgaatgttgaaaaggccaaagttgttgagcccctggactatgagaatgttattgcccaaa

SEQ ID NO: 748305 - DNA, 89 bp, Homo sapiens
ctggcaccggcagcggcggcgcgggcggaggcagcagcaggcggatggtccagcagtttggggtggattttgagaagaggatcgagggc

SEQ ID NO: 748306 - DNA, 82 bp, Homo sapiens
tggcacatggcccaggcagaccttgcagtcaaagttacgactatggctatgtctgcgtggagttttcactcttggaagatgc

SEQ ID NO: 748307 - DNA, 82 bp, Homo sapiens
tctaaaaagccctcagtaccagagacagaagcagatggattcgtccttttagaggccacaagaggaagctgaatgaagagga

SEQ ID NO: 748308 - DNA, 100 bp, Homo sapiens
tgtgtacatcacccccatggaggccctggcagagcagtctctggcatctctatcccctatgaggcaccacgtaagacctcctgcccttagctctcttgct

SEQ ID NO: 748309 - DNA, 98 bp, Homo sapiens
cagcgacacaattgtctgtgacagtaacagtacttgggatcccccagttccaaagtgtcttaaagctttgatgttcacaagaagtgtcccctctgtga

SEQ ID NO: 748310 - DNA, 82 bp, Homo sapiens
cctacacgccgccgcttgtgctgcagccatggcctgaagctgcccagcaggcattccaaggcctgggtcctggtttctccgg

SEQ ID NO: 748311 - DNA, 75 bp, Homo sapiens
cgatgttcggccaggtggctccaaggagaggaagcagtgatgcattgaggtcatcatcagatttgaaatatttaa

SEQ ID NO: 748312 - DNA, 100 bp, Homo sapiens
cagggactgccaggcccgaaaggccagcaagatgaatatttcccccgcttccctcgccagtctttatgaggaagacttcaagcaggacatggcagccctg

SEQ ID NO: 748313 - DNA, 90 bp, Homo sapiens
gatggttgggagcagatcgattttaccttggataccctgctttggatatcagtattacctgcaagtcaaaaaagatgtgcttgaagggcg

SEQ ID NO: 748314 - DNA, 90 bp, Homo sapiens
cctctcccctattgctggctctgcagggctctgatcaagcggatccaagccatgattcccaagtactcccctgccctcaacaagatgttt

SEQ ID NO: 748315 - DNA, 100 bp, Homo sapiens
gcagaaggtgcaggaggtgctgaaggccaggtggaggagcagaagacactgtctgtgcgccaattccactaccaggcctggccggatcacggcgttccct

SEQ ID NO: 748316 - DNA, 75 bp, Homo sapiens
cccggatctgacggggcgggacctggcgccaccttgcagacatgggaaagcggaaccaccaaaaggagtgatgat

SEQ ID NO: 748317 - DNA, 83 bp, Homo sapiens
ctggagggcaaagcgtggtgcgagcaggtgagaagccctaccactgcaactgggacggctgcggctggaagtttgcgcgctca

SEQ ID NO: 748318 - DNA, 50 bp, Homo sapiens
ggatttttagcccagcccatgaaggaacagtggaggccatgtgtcttttg

SEQ ID NO: 748319 - DNA, 88 bp, Homo sapiens
aggagaaggaaaagttgagcacattgccaaccggagttccccaagaaggaggtcttcgaggggagaagaggaaacgagatgctgaaga

SEQ ID NO: 748320 - DNA, 75 bp, Homo sapiens
tccgggaattaagtccagtttcttttcaatataggcctcacagcccaaggagcgtcctcggtccgcagtcctcct

SEQ ID NO: 748321 - DNA, 75 bp, Homo sapiens
agaagttcatctgcatatctgaccttcgggcccaagtcagcaaaagagaacgatctgaccatcatcctaggacag

SEQ ID NO: 748322 - DNA, 142 bp, Homo sapiens
gagaaaagtaggatgaacctgcccaaggggccggacacgctctgcttcgacaaggacgagttcatgaaggagactgctggctattagccgccatcgcctcccttacgcttaatcaaaaagcactggccagagtcatccccca

SEQ ID NO: 748323 - DNA, 100 bp, Homo sapiens
aagcaagaaagaaacaaaagttcacctctgcgaaggactcagcccaggagagtgttattactcgagatattcatcgtacatttcccgcacatgattactt

SEQ ID NO: 748324 - DNA, 51 bp, Homo sapiens
gaaaatggaccagtttgttcgttacgagaggctagtattactagcttgaaa

SEQ ID NO: 748325 - DNA, 82 bp, Homo sapiens
ccagagtcacacacggtcctaagagctgggcaccaggaagcgaaggctggttttaaaatcaaagatgggaaaatcggagaaa

SEQ ID NO: 748326 - DNA, 72 bp, Homo sapiens
ccgccaaatcgtgacaccatgaaagtcctctttggacatctaactaagatttttacctcctataactccacc

SEQ ID NO: 748327 - DNA, 100 bp, Homo sapiens
atttgagccgccgcattttttaaccctagatctcggttaatgttcgtgaagaaattgaagagttttttccaagaatgtggaagataaatcaagataaaag

SEQ ID NO: 748328 - DNA, 75 bp, Homo sapiens
aagaagaatgttttcagaaaagaacagtctaaaggtgtaaaaacggaaagagcatctacggtgagcgcttccccg

SEQ ID NO: 748329 - DNA, 100 bp, Homo sapiens
ccctcagccgtgtggctgctgagctctgtggagccaggcacagacactgtgttcacctctccagtcacatcgacgtccaagcagatgttctgtggcaaag

SEQ ID NO: 748330 - DNA, 100 bp, Homo sapiens
cgtctctctgctgcggcgcggggaccgctgtgctctcggggatttttgacatcttgtgaagcagaactacaggagctcatgaaacagattgacataatgg

SEQ ID NO: 748331 - DNA, 100 bp, Homo sapiens
cgtggagcagtttcctcatggatgtgctttcccctctgagcttcatcaaggtaaatattgcagattttcaagagaatcagtgggtgacttgtttccagga

SEQ ID NO: 748332 - DNA, 75 bp, Homo sapiens
agaatgttattctgtcttcacaaaccggaggttacttgctggacagaagaaaagctcccccttctggacatttga

SEQ ID NO: 748333 - DNA, 87 bp, Homo sapiens
cctaatgttttcagggagaaaagcatgcagaacagatatgtacaaagtggatatgggccctcacattttccaaacctgtccatctgc

SEQ ID NO: 748334 - DNA, 49 bp, Homo sapiens
gctgcaggggcgccctggttttcagggtcccgggcgaggcgcccgcgcc

SEQ ID NO: 748335 - DNA, 82 bp, Homo sapiens
gacaagccgctggcagccgcggatctcaccgccgctcaggtgatgaacggcagcagccactcaccaacagccatcaatggtg

SEQ ID NO: 748336 - DNA, 100 bp, Homo sapiens
gcagaaagtgaagctgtttcgggccagcgacccgctgctcagcgtcctcatgtggggggtaaaccactcggtttttagaacttcagccataaaaatgggc

SEQ ID NO: 748337 - DNA, 75 bp, Homo sapiens
ttctgaagttgttcattaagacttcccagcattcctacagatataaatagaaagagcgggatttagaattggccg

SEQ ID NO: 748338 - DNA, 109 bp, Homo sapiens
gcagccctctcagggggcacgctgagtggcggcattctctccagtggcaagggaaaatatagcaggctgattcaccccaagagtggccgttcctaccacgaggagttca

SEQ ID NO: 748339 - DNA, 100 bp, Homo sapiens
ccacaacgccgcttcggggctcctagatcttcgtgaagactctgactggtaagaccatcaccctcgaggttgagcccagtgacaccatcgagaatgtcaa

SEQ ID NO: 748340 - DNA, 80 bp, Homo sapiens
gaaggtctctggagacatcttcagcagctctcatgggaggttgaatggagcagctgaacttggctgacagtggcctggtg

SEQ ID NO: 748341 - DNA, 75 bp, Homo sapiens
ccaagatgtagctaatgaccgtggttcccactgagataagccaatggacacgtcagtgttatctgaagaaggagg

SEQ ID NO: 748342 - DNA, 76 bp, Homo sapiens
gcccgcggccggccagccgaagatggtggcggctactcctcctgctgagctgactgctgcccactttggaggaggc

SEQ ID NO: 748343 - DNA, 100 bp, Homo sapiens
gttaaggattccaagtaactcttatttgagggagaccaagacatcattgttttgaagtttctgaaagtgttgggcggcaaaaattcaggtgcctggggga

SEQ ID NO: 748344 - DNA, 75 bp, Homo sapiens
ctcggaggccaagcctgcagcggtggctgctgaaaatgaagagagaccttggccagtgccaaggaggagaacgtc

SEQ ID NO: 748345 - DNA, 109 bp, Homo sapiens
ggacaatgttaaagcagaaagcagcacagcaggcagcctcttccagtgggcagggtcagcaggcccaaacccccacagatgggctcaaggacagcttgcctgactgcag

SEQ ID NO: 748346 - DNA, 83 bp, Homo sapiens
cgacgctggagtggggagaagcatcatggttcaacggagtgcatccgccccaacccttttccccctcgtctcctgtgagaatt

SEQ ID NO: 748347 - DNA, 83 bp, Homo sapiens
cgggcctgcaccatgagcgtcccggccttcatcgacatcagtgaagaagatcagacctgcctagagctggaacgttacctcca

SEQ ID NO: 748348 - DNA, 83 bp, Homo sapiens
cagaaggtctctggagacatcttcagcaggtttacccaaggtccagcctagcccctaggcaccatgtcggacagtgatctagg

SEQ ID NO: 748349 - DNA, 90 bp, Homo sapiens
ttgcactccagcatgccgatagttcaaacttctatatcacagaaaagagctatggaacagtctgtgccattcaaagatgtggattcagac

SEQ ID NO: 748350 - DNA, 100 bp, Homo sapiens
caacatctttcctcaccccaaggtactccaaagattcaggtttactcacgtcatccagcagagaatggaaagtcaaatttcctgaattgctatgtgtctg

SEQ ID NO: 748351 - DNA, 90 bp, Homo sapiens
aaaggagcgaggcctttggcgctcgttaggcaaaagatgtgattgaagagcatggtccttcagaaaaggcaataaacggcccaactagtg

SEQ ID NO: 748352 - DNA, 100 bp, Homo sapiens
tggaacatggctagcaggaatgcttactgttgcgtggttcgttattaacagagttcactgcatccaagaagaggagaaaacactgaacaaagagcctggt

SEQ ID NO: 748353 - DNA, 87 bp, Homo sapiens
ctttgggggacatcctcagtgcctggtctggctgattcaagcaggagccaacattaacaaaccggactttctgaagaccttttcccc

SEQ ID NO: 748354 - DNA, 75 bp, Homo sapiens
ctcggcatggctctcctggtgctcggttcgacgaggtgctttataaatcatctcaggactttcaacccaggcata

SEQ ID NO: 748355 - DNA, 98 bp, Homo sapiens
gaaaatgcccctggggagacacatgcacaagacacaagacagatcggcttgccaaaggatcagaatgttaccaaaagagccttagtttaaatcctttc

SEQ ID NO: 748356 - DNA, 111 bp, Homo sapiens
ccggccaagaggcaaaggggaggttacgcagcaaaccatccagaagcaagagtgagccatggagctacgtgtggggaacaagtaccgcctgggacggaagatcgggagcgg

SEQ ID NO: 748357 - DNA, 101 bp, Homo sapiens
agctgggcgcggattcgccgaggcaccgaggcactcagaggaggagctccttcccttaacagagctgagagaggcatctggagctgcagcatggaccagcg

SEQ ID NO: 748358 - DNA, 75 bp, Homo sapiens
gagctgcgcccgctgccttcacaccccggacatccgcgccacacagaagtcattcagaattcaaaagaagttcta

SEQ ID NO: 748359 - DNA, 74 bp, Homo sapiens
tgaaagagtcgaatggtttgttggcagatcatggggaatttcagaggtcatgccctccctggaaccttcttttt

SEQ ID NO: 748360 - DNA, 74 bp, Homo sapiens
tgaattgtgctgccttggccaaaagagtttttcagaagaagtgaagtcaagatgaagaaccatttgcttttctg

SEQ ID NO: 748361 - DNA, 75 bp, Homo sapiens
cacaggctccggctcatggcatcaagtggcatccatcataagcctcagtccaaggagttcctctagaatcatcaa

SEQ ID NO: 748362 - DNA, 100 bp, Homo sapiens
tatggaaaagttgccaaattggcatttgcctggtggcctgatttattggctgaacatgcagagaaattttgggctttatttacagtggatatggacactg

SEQ ID NO: 748363 - DNA, 74 bp, Homo sapiens
cagatccgggagcacgtcatctccatcgaggcctcctctattggcccaggaagcccacccagccccgccacgca

SEQ ID NO: 748364 - DNA, 82 bp, Homo sapiens
tcaaatgctagcagacacggtggctactctgcctcggggacgaaagcagagcagcccgacggccatggaggctgaagagacg

SEQ ID NO: 748365 - DNA, 98 bp, Homo sapiens
ggaaagtgaaagatgaaaagtcaggaaaagatgacacccaaattatcaaggcagcagaacttgctgaattcactgccaagattgcacttctagaggaa

SEQ ID NO: 748366 - DNA, 75 bp, Homo sapiens
gactgtggcagagttgaaggctggtggtcagaatggcttcaacattcctcaagtcaccccatgcccagaagtagg

SEQ ID NO: 748367 - DNA, 99 bp, Homo sapiens
cctctggagggcagcgaccatcctgcccagaaccttatcctcacattccagtttgacgcaggagctccaaatggaccagcaggcaaagaaacatctgca

SEQ ID NO: 748368 - DNA, 75 bp, Homo sapiens
gcgggaggtgaagttgctgctgttggagatggggttcttcctctttgcctaggcacacgactgtctatcccagat

SEQ ID NO: 748369 - DNA, 90 bp, Homo sapiens
actcgcgcggggcagccaagagacgagaggaatgttacggcatccggagtcatccctcagatttctctgatcatgggcccatgtgctggt

SEQ ID NO: 748370 - DNA, 75 bp, Homo sapiens
tgcgatggcgcagaaaccccgttgacaaggcactgctttttcatgacgtgaagcgtgacattcaggaaaacgatg

SEQ ID NO: 748371 - DNA, 100 bp, Homo sapiens
caccttctccatcaggtgcagaagtactataaccaagagtggacattgtgggatcgctttgaggtacaagggctgcagcctaatggtgaggagatgaccc

SEQ ID NO: 748372 - DNA, 75 bp, Homo sapiens
ctaccttatgagctcggttttcttatgcttataagagtggaacagcacggaaaagtcgagataattgccaatgat

SEQ ID NO: 748373 - DNA, 76 bp, Homo sapiens
tagttgtgtatgatgtgacagatcaggaaactcgaactatctaccagtttcattacaagaattggccagaccatga

SEQ ID NO: 748374 - DNA, 75 bp, Homo sapiens
gcaggaaaattgtattctattgcgtctagataacgagatgcttcctgaaacttggagagtggcagctgaatctac

SEQ ID NO: 748375 - DNA, 100 bp, Homo sapiens
tcaaggatgccctcctgaaagccaacctcatgacagatgcccgaatgctagcgagccagaacattgtgatcatcctttgtggaaacaagaaggacctgga

SEQ ID NO: 748376 - DNA, 50 bp, Homo sapiens
tgacaaaaacttaaattgtggaatggtttctataatccaggaacttgtta

SEQ ID NO: 748377 - DNA, 97 bp, Homo sapiens
tgtgccttcacggaatgtatcctccgaagctatggcctgaagacgggattctttagatcctgaccaagatgaagcagcagggtcatgagacagccgc

SEQ ID NO: 748378 - DNA, 75 bp, Homo sapiens
agggttttgtggaattgggagcctaattgatttcattcttatttcaatgcagattatggagagaattatggatct

SEQ ID NO: 748379 - DNA, 74 bp, Homo sapiens
ttagcagagacacatttcctgaggatatcgtgactctgagatttgcccacctgatgaccttgccagcttgccat

SEQ ID NO: 748380 - DNA, 75 bp, Homo sapiens
cgccagaccttctgtgggatcatcggacccacctggaaccccacctgctggcctgccactcctcctgctatgatg

SEQ ID NO: 748381 - DNA, 123 bp, Homo sapiens
gttgcactcactgccctggatcaggatcacgtcgcagtcctaggaagtccactagcagcttctaagggaagctgttttaggttatgtgaaagagatgtttcctcatctctaaggcttaccaga

SEQ ID NO: 748382 - DNA, 74 bp, Homo sapiens
atgtactgtgcttggctggaaaaccccaaaagtgtacataagtttcctgtgggccgcatccacagacacttgaa

SEQ ID NO: 748383 - DNA, 82 bp, Homo sapiens
accctcgtattctcctgcccttccccagtgtgtcccggcatggatatccggaacaacctcactaggttgcatgagctggaga

SEQ ID NO: 748384 - DNA, 82 bp, Homo sapiens
ggaacgctgcctctgccgcaaagatgcccccttccgctggaaagcggtagctacagcaagctgggtagcaggcagatccaaa

SEQ ID NO: 748385 - DNA, 100 bp, Homo sapiens
gttaaaagcagccttcgccttatcccagatgatctatccctcctgaaactctaccctccaggggatgaggaagatctctgaccgcctgcgccggaactgg

SEQ ID NO: 748386 - DNA, 100 bp, Homo sapiens
ctgaaaggaaatgacggatttttgttctaagaacggaagcatctgggctggatggaatttagcatcaagcagagtcccctttctgttcagagtgttgtaa

SEQ ID NO: 748387 - DNA, 83 bp, Homo sapiens
atgtgaagaatggcaaaggatcagtgcttcctaactcagtttgcttgcctaaactggacttgaagcaatttaaactactggag

SEQ ID NO: 748388 - DNA, 99 bp, Homo sapiens
agtgtcaggctggttgtcaattttgatatgccttcaagtatggatgagtatgtccatcagcagcaagatgaagagcgacgtcggcagctgagagagaga

SEQ ID NO: 748389 - DNA, 83 bp, Homo sapiens
ctcagctcctggggctgctaatgctctgggtctctggccagaagcggactcctagaagaggggagcagcaaggatggaatgac

SEQ ID NO: 748390 - DNA, 83 bp, Homo sapiens
gtgacatgcagttgtccaaaagtgaaattttacgaactcaggcggagtacgtccagcttgttactgaacttcgaatgacaaga

SEQ ID NO: 748391 - DNA, 74 bp, Homo sapiens
tcgacacccggctgaacttcatccaggtgtcaaagctgcttaaagaagtgcagaaattccaacagaatgggttt

SEQ ID NO: 748392 - DNA, 51 bp, Homo sapiens
actgactttcagctatggaatcggtggagctgatcagaataatgttcagca

SEQ ID NO: 748393 - DNA, 90 bp, Homo sapiens
gttttactctaaagggtggcctggagcacggagaaccattaatcatctctaagggatatgatgatacatacgcagaacaaagttacgaag

SEQ ID NO: 748394 - DNA, 86 bp, Homo sapiens
aagggaccacggtcaccgtctcctcagactcctgccaccttatgcttgtcaccaacccttctcctccaaatctgatacaccagact

SEQ ID NO: 748395 - DNA, 110 bp, Homo sapiens
acgagccagtggcaatgacccagacccggacgacccccattgctgagccagcggagctgcttggacactttgccaccatcaccttgaccttcatcgacaagaacggagag

SEQ ID NO: 748396 - DNA, 100 bp, Homo sapiens
gaagcttaagggtcctcctgagaagaagcccaagaaaatgaaggagcgtcctgacctaaaaggtgcaaaaatgcagagtaataaaacttttaacttggag

SEQ ID NO: 748397 - DNA, 126 bp, Homo sapiens
cagacccctgtccactggcaagctggaaggctttcagagcatcgatgaagctatagcctggctcaggaaggaactgatttatcatagaatccccgactcagacccatcttctagcaaaacaaggca

SEQ ID NO: 748398 - DNA, 101 bp, Homo sapiens
tggtggtggcataggttatgaagctaatcctggcgttccaccagcaaccatgagtggttccatgatgggaagtgacatgacctcgggactcaacaataaac

SEQ ID NO: 748399 - DNA, 98 bp, Homo sapiens
attggggttgatgaaacttacctctttgaatctgaaggtttaggaaactttgagggaaattttgagtcactggaccttgcggaatttgctaagaagca

SEQ ID NO: 748400 - DNA, 101 bp, Homo sapiens
cacggaagtcctctgagcagcctgttaccttctgcctcagtgccagagtccatgacaattagtgctggagaatctggtaaaagcaccattgtgaagcagat

SEQ ID NO: 748401 - DNA, 101 bp, Homo sapiens
ggccagatagtaccatgatagctgtatcagtttggacttctcccactgagcatgacaagcactcgaaaggctaaatcaaccagaaacatcgaaacaaaagc

SEQ ID NO: 748402 - DNA, 100 bp, Homo sapiens
cgcctcgttgccctctgtctgccctggaaacaggtggcatctgcatcgcaccacggccctcggaagaaggggcggaaatcctccctgccatggcgatgag

SEQ ID NO: 748403 - DNA, 83 bp, Homo sapiens
aaggcggtgagcctctccgtcactggtgactgctacattgagaaacttggttgattcatcattagtaagaagtaagttcctaa

SEQ ID NO: 748404 - DNA, 100 bp, Homo sapiens
cagaacaccatgatcaacctcggtctgcaaaatgcctgtgatgaggccatttaccagtgggcctttggagtgacgctgtgggaactcatgactctgggcc

SEQ ID NO: 748405 - DNA, 101 bp, Homo sapiens
tacagcaacgcggccgctgtgcactctgcccatagggagtacatgttccctctcccagcctgtgctgactcagccatcttcccattctgcatcttctggag

SEQ ID NO: 748406 - DNA, 75 bp, Homo sapiens
aagctgaagatgatgatgaaaccggacagtcattttgtttactcattcagccctgttgcaggtcccaataaactc

SEQ ID NO: 748407 - DNA, 82 bp, Homo sapiens
gcgccgcgcacttcgtcatgttcttcgcgccctgtggaggtgaagccggtgctgccaagagccatgcccagttccatggggg

SEQ ID NO: 748408 - DNA, 80 bp, Homo sapiens
cttcaacaagctggtgatgcccaactacccattcatcaacattcggtcaagtgatcccctgtaagcagcttacagattcg

SEQ ID NO: 748409 - DNA, 98 bp, Homo sapiens
aaggctgcggcgcgcagagcgaggctgcgggaccccaggatgggggacaggaggctgcggggcctcagattggtgaaagacaacaagtgttagtaaca

SEQ ID NO: 748410 - DNA, 75 bp, Homo sapiens
gtttgaggaagaaaaggtgaaacggcagaatgaaatcgccaagaagcgttgtgttggtgttgaagaggagaaggc

SEQ ID NO: 748411 - DNA, 83 bp, Homo sapiens
tgcaacatctgcaaggtccgcttcaccaggacaagatgaagctcatcatcctggagcactattctcaggcgagcgagtgggcg

SEQ ID NO: 748412 - DNA, 50 bp, Homo sapiens
tccagcgggtcctggagcgggtgctgaagactccctgagaaccccaagat

SEQ ID NO: 748413 - DNA, 98 bp, Homo sapiens
ctgtttttcctacctgttcagcacttctttcagcgatatgaagttaaatccaggtaattttgagtgtggaaatccagagaatctaaaaagcaaatgca

SEQ ID NO: 748414 - DNA, 50 bp, Homo sapiens
acccagaattcaattaaagtggctcaggtgacttaagagattaaaattaa

SEQ ID NO: 748415 - DNA, 82 bp, Homo sapiens
caggagtttgagaccaacctggccaacatggtcagggaagtcaaagatgcatccctgagttcttcctagcaggcaagcagcc

SEQ ID NO: 748416 - DNA, 100 bp, Homo sapiens
aatggaaaaaggacggtgttcttggtcaactctggtggtatcacggaaaacttgacagaacgatagcagaagaacgcctcaggcaggcagggaagtctgg

SEQ ID NO: 748417 - DNA, 90 bp, Homo sapiens
tggtcatgatgttcgacattaccaagcagtgacgcatcttctctccagactgccgatcccagaaagccaggtgatcaccattaaccccga

SEQ ID NO: 748418 - DNA, 75 bp, Homo sapiens
gggaccatgacttgaagcgctgccagtatgtgaccgagaaggtgctgggaacaccaacccgggaacaaatccgag

SEQ ID NO: 748419 - DNA, 100 bp, Homo sapiens
cacgaaaggcagccgcggatcgccgcgctcagcgacaaacaagattttttatcaagcagaaatgcatcgaacaacgagaatcaagatcactgagctaaat

SEQ ID NO: 748420 - DNA, 50 bp, Homo sapiens
cactattttggattagtcaattgttgaactaaactgcaaaatgaaatttg

SEQ ID NO: 748421 - DNA, 83 bp, Homo sapiens
tctgggcgaaaattggatgtgaaaatgaagccagaccgaggagtatgctgctgctgttccgctttgcgtcctcgctacaaacg

SEQ ID NO: 748422 - DNA, 73 bp, Homo sapiens
gcgaggaaaagagccctggatgattttgagggaagaaacacagttcacagtgtactaaagggagcacattgtt

SEQ ID NO: 748423 - DNA, 82 bp, Homo sapiens
gcagccctcggccaaacggccagacgccgacgtcgaccagcagagactgtttggtgccctggttgtcagatgttggaaagca

SEQ ID NO: 748424 - DNA, 101 bp, Homo sapiens
aggaggagcagaggagcacacagatgaagcagatccctacctgtttcaaggacctgccagtctgagaagcttcttgtcataaggccatccaggggccacgc

SEQ ID NO: 748425 - DNA, 80 bp, Homo sapiens
agatacccgcggtgcaccgcctgctgggagcgccgctcaagtgatgtcttggcattgcccattttcaagcaggaagattc

SEQ ID NO: 748426 - DNA, 82 bp, Homo sapiens
ccgaggaggcagccaagctcatggcctgccactgcgtgcgctgaccccgcactacatctacccaccagccatcgtgcagccc

SEQ ID NO: 748427 - DNA, 50 bp, Homo sapiens
gtgggacccaaatctacaatgcacttttccagccattaactccaggctct

SEQ ID NO: 748428 - DNA, 90 bp, Homo sapiens
gaagttgtccaacaggtggtactttatgctagaacccagcgcaggagtaaattgaaagaatcacttggacggacatataatgatctgaac

SEQ ID NO: 748429 - DNA, 51 bp, Homo sapiens
ctcaaggccatgatcaaaacgtccagggagtcggtagtaagggatggcggg

SEQ ID NO: 748430 - DNA, 49 bp, Homo sapiens
cggagaggagtggcctcgcccgcttggtttgatgaacttgtgaaaaaat

SEQ ID NO: 748431 - DNA, 98 bp, Homo sapiens
gaagatcaagaagctcattaagagcttggaggcggcccgcggagttgtctgctggttctcagcttgaagaagattctgcagtccttattgatcctttt

SEQ ID NO: 748432 - DNA, 75 bp, Homo sapiens
ggtgctgaaacgtgaagatgtgtttaaagcagtacaagtccagcggagaaagactggacctacagagacatctgg

SEQ ID NO: 748433 - DNA, 100 bp, Homo sapiens
tatgtcaagtatcagaaagaagagtggcatgctttgacagcaagtggactccgagtccagggcagagcctcagttaggcatgtttgacgtgggtggccag

SEQ ID NO: 748434 - DNA, 75 bp, Homo sapiens
cggcaacatggcagagaccgcggccggagtgggccgcttcaagaccaaggaacaccagctggctgatgagcctgg

SEQ ID NO: 748435 - DNA, 100 bp, Homo sapiens
ccgtccctcaccgcggcatcaagcaggtccggacccactggctgctggagcttgtcaccaccaggttgtacgtggacactataaaggtcagcaaattggc

SEQ ID NO: 748436 - DNA, 100 bp, Homo sapiens
attgtgtgttttgcacgcagctatgatggagactttgtctttgatgactcagaagctattgttaacaataaggttgaggaacaggttagcaccactgaga

SEQ ID NO: 748437 - DNA, 80 bp, Homo sapiens
cgcaggagccgcgcccggacccagggttttcgacgctggggaagtgtttgggatcatgcaagtggaggaggtagaagagg

SEQ ID NO: 748438 - DNA, 90 bp, Homo sapiens
ggctgaggccctgagtgtaccaccagagcgggactctgactccgaacctactgatgataggtgtgcctaccgcatgttgccgctgctgtt

SEQ ID NO: 748439 - DNA, 75 bp, Homo sapiens
gggtcctcgtggatcagactacaggagagaagtttgctgaggaatgccttcaagcacaaagtgatgaatgactgc

SEQ ID NO: 748440 - DNA, 75 bp, Homo sapiens
ctgtgatgtagtttcctgacctctgacacgtattgtctcaagattaaagcccggtcctttggagtagaatggatt

SEQ ID NO: 748441 - DNA, 75 bp, Homo sapiens
tccagatctccatctccaaaaagaagtcgtgatgagaggagatggattgaaaagcagaacagagcaacaagagca

SEQ ID NO: 748442 - DNA, 82 bp, Homo sapiens
ccttggccacctccccaggtgatgcctgaagctcaagggactgtgtccaccctcagagcactacaaacaccactggtttccc

SEQ ID NO: 748443 - DNA, 97 bp, Homo sapiens
agttactcaggcactttcttctcaatttcatatggcaacaaactaggaagaatacaagcgattgagtgaagcactagcagaggatgggagctacaat

SEQ ID NO: 748444 - DNA, 101 bp, Homo sapiens
gcacaaagagcttgctccctacgatgagaactggttctacacgcgagctggtaagatctcagagactacagcccggacctactcgcacctgaacatcgcgg

SEQ ID NO: 748445 - DNA, 100 bp, Homo sapiens
ggagacaacagaaacagaaacgattgtggaaacaggctgaagaggacgcccacctggatggggctgttcctatccctgcagcatctgggaatggagtgga

SEQ ID NO: 748446 - DNA, 100 bp, Homo sapiens
tttcgacagtaacccgtttgccgacccggatctcaacaatcccttcaagatatggtccggaaaaagaacccccctctgagaaacgttgcaagtgaaggcg

SEQ ID NO: 748447 - DNA, 51 bp, Homo sapiens
aaattgcaagcattctatccaaatggtaaaccccagtgataggtaccatct

SEQ ID NO: 748448 - DNA, 89 bp, Homo sapiens
taagcaaaaaattccagcagatggagtccacaggatcagagtggactttaagcactgcggaaggcgcggagggagcagcagctggtcag

SEQ ID NO: 748449 - DNA, 98 bp, Homo sapiens
gaatttcgatctccgccctggggtcattgtcagtgcaccagagtggaatcacatagacccccggcggaaggaagaactggacaagaaagttgaggatg

SEQ ID NO: 748450 - DNA, 75 bp, Homo sapiens
caccagtgaatgtttggggtggatgaggcagcaaagggttcaaaccttgtactactcagctgatcacaagctgct

SEQ ID NO: 748451 - DNA, 100 bp, Homo sapiens
cggccggcggcggctgcgggctgagcggcgagtttccgatttaaagctgagctgcgaggaaaatggcggcgggagattgagcttctagagcctcagagat

SEQ ID NO: 748452 - DNA, 101 bp, Homo sapiens
agccggccccccacctccccccggagccaggctggtttcggaaatgcccttacagcagcagggctaccctgagaggaatctacatgcagagaagttcagga

SEQ ID NO: 748453 - DNA, 100 bp, Homo sapiens
ggagccaagaagtagcagaagggagccgagtttatctggagtgtagagtcactggaaaccccactcctcgagtcagaattcaattcgtcataatctgtcc

SEQ ID NO: 748454 - DNA, 87 bp, Homo sapiens
ctgttgtgcctcttcatattggcgatcctgttgtcgcaatgtccctgctcttctctcgatgcaactctatcgtcacagtcaagaaaa

SEQ ID NO: 748455 - DNA, 90 bp, Homo sapiens
gagccgcgagcgcccggccgaacccgcgatggaataatgcccagcggcccgccaggtcccgccaccccacgtcatgctgcagcgccgcag

SEQ ID NO: 748456 - DNA, 142 bp, Homo sapiens
ctcgtgaccaaacgccagatgaaaatgaggaagtgatcgtcagaattatcgggcacttctttgctagccaggttgaaatcacaaagattagacacctttttagataggtgttcttcagcaccactgacaacacggttctgac

SEQ ID NO: 748457 - DNA, 116 bp, Homo sapiens
attttgcatcatcatagttgcaattgcactactgattttatcagggatctggcaacgtagaagaataatgctggggacaaatggtctgcctttttaaaggaacagtccacacttgc

SEQ ID NO: 748458 - DNA, 73 bp, Homo sapiens
ttagcccgcttcgagcgcccgggggcgattcttggtgccaccattgagaactccaggattgtcctgcagatcg

SEQ ID NO: 748459 - DNA, 89 bp, Homo sapiens
ggctgtgtcaatgccattgaattctccaacaatggaggccagtggctggtctcagtcattgaagactctccggaattcagatttgaaac

SEQ ID NO: 748460 - DNA, 88 bp, Homo sapiens
cagaatatgccaaaaatggagaaatttttgagtggtgtggcgtacattgcggctccctccggttctgctgctgacaaagttgtgattg

SEQ ID NO: 748461 - DNA, 97 bp, Homo sapiens
aatgtatggatacaacttacgtttgatgaaagatttgggcttgaagacccagaagatgacatatgcaaattcccgacagttaagcaatggggagaca

SEQ ID NO: 748462 - DNA, 100 bp, Homo sapiens
cgtccctggagcggccgccttccagctggaatgcagtagccctctgggcctgggatattgtggttgataactgtgccatctgcaggaaccacattatgga

SEQ ID NO: 748463 - DNA, 51 bp, Homo sapiens
aaaaacctgaggctgatgacccaaagtccaagccttatgcatttgatcggg

SEQ ID NO: 748464 - DNA, 100 bp, Homo sapiens
ggccggccgcccagacgctgcccgcgggcccggccacggcggagccaaggtgaaaggtgtagcagtcactcggcctacacccacagcatcgaccttgtga

SEQ ID NO: 748465 - DNA, 98 bp, Homo sapiens
ttttgaaaatggagaaaaagagtgaggaactgagaaacatggatggccttgggaacgtggaaaaggttaatttggagtggcccctggagtcagtttcc

SEQ ID NO: 748466 - DNA, 75 bp, Homo sapiens
ctcggacagatgaagctccccaaggagctgcagacaagttggatggcttgaggactggtactaaaaggaaacgtg

SEQ ID NO: 748467 - DNA, 100 bp, Homo sapiens
ttcgagaagattagcaaaggtgctaatccagtggaaatcaggagaggagttcaggagaagatgggcataatgaataaaggagtcatttatgcgctttggg

SEQ ID NO: 748468 - DNA, 100 bp, Homo sapiens
ctcccgagtagctgggactgcaggtatcactcctccttgcttcaatctctttgccctcttcgatgctcaggcccaagtctggttgcccccaaaccacatc

SEQ ID NO: 748469 - DNA, 108 bp, Homo sapiens
gggggcgcagggaaggagggcgtccgagtcaacaaccgcttcgagctgggctcttccgtgggcggcggcttcgcgggcttggagttcgcgcggccgcaggagtcggag

SEQ ID NO: 748470 - DNA, 75 bp, Homo sapiens
gcctcctggaccgtccaagaagatcttttgccagaaatgagggcatactggcctgacgtaattcactcgtttccc

SEQ ID NO: 748471 - DNA, 100 bp, Homo sapiens
cagcaagatgcggaggctgcctcggcggagcagaggaaccacacgctgatcatgttacaggcccaaaaactgcgactggcatacacaaggagctctcatt

SEQ ID NO: 748472 - DNA, 75 bp, Homo sapiens
gtttcttactcgggagctggctgaagatggctactctggagttgaggaccgcagctgaatgcacagctagaaggt

SEQ ID NO: 748473 - DNA, 99 bp, Homo sapiens
cgacgcccgcaggtcctcgcggtgcgcaccgtttgcgacttggttgtttacattcagagctctatcaataagaggaatacatattacagtgaattcgac

SEQ ID NO: 748474 - DNA, 100 bp, Homo sapiens
ttgcagctttttatggtgtttaatctaatacacttaagctgcagtcccaaaattagggaacgtggttctcctcaagatttagttactaaagacatcactg

SEQ ID NO: 748475 - DNA, 100 bp, Homo sapiens
aggtgtgggagatcgtgggcgagctgggcgacggcgccttcggcaaggtttacaagttggccagtcagtgctgaaagatgtaagcaaagtgaagaagctg

SEQ ID NO: 748476 - DNA, 82 bp, Homo sapiens
gccagaagcgggcggcgcgggggagatgatcagcttgaacgggtctttttacgacttggccatgctgaaacagatgaacaat

SEQ ID NO: 748477 - DNA, 100 bp, Homo sapiens
ccactctccttggcttgttctgggggaagacaggagatggttggaatccattttcgtacccatacaaaaaactggattatggaaaatgggagctgtatat

SEQ ID NO: 748478 - DNA, 100 bp, Homo sapiens
ctgatgtcaatcttgagggctaggtttggttccgtggctccagatggacagtaccattcgcctattaggaacaagagtgcaagattcaatgccatgctgg

SEQ ID NO: 748479 - DNA, 100 bp, Homo sapiens
cgcgaattggagaaaaagttcagtgggaagcatgtcgtctttatcgctcaggacactttgccaccatcaccttgaccttcatcgacaagaacggagagac

SEQ ID NO: 748480 - DNA, 82 bp, Homo sapiens
gccacctgcacctcctaaaaagggactgctgcagagactcttcagtcgccaagcgcctgtgtctggcagagctggtgtgaga

SEQ ID NO: 748481 - DNA, 100 bp, Homo sapiens
tgaatattctgttttgctgcccgaagcttggggaggacccgcagatcctgtagactatctgccagcagcacctcgggggctctacaaggaaagggagctt

SEQ ID NO: 748482 - DNA, 101 bp, Homo sapiens
ctgaagcctgatttctttgatccagcttcaattatggatgaatcagtcttttggtgggccttgtgcttcggtatggcattcatgttccgagtgatgtaaat

SEQ ID NO: 748483 - DNA, 50 bp, Homo sapiens
aagagttttcttactgtacctcagaaatgattctggggaccattctgacc

SEQ ID NO: 748484 - DNA, 99 bp, Homo sapiens
ctcggctggagagcagaagaccgaaaggaggacctctccatgcccctgatcgaagaggaaattgatgggctctctggcctcctgttccccttctatgat

SEQ ID NO: 748485 - DNA, 90 bp, Homo sapiens
gaccggtttggttgaagttggagaagtatccaatagggatattgtagaaactgtctttaacctgtcatgtgtgatacttctaggccttct

SEQ ID NO: 748486 - DNA, 99 bp, Homo sapiens
ctgttcaggtcacaatttctacagcagagaccttgagggatatctttcttcactcctcttcacttcttcaacttcagattttcctgtccttgatcccag

SEQ ID NO: 748487 - DNA, 83 bp, Homo sapiens
catccttgtttaatgactttggtgccctcaacatctctcagagacgaaaggccggacatggtggctcacacctggaatcccag

SEQ ID NO: 748488 - DNA, 48 bp, Homo sapiens
gcggcgccatggcagggcttgcaggggggaccttccttggagcagagg

SEQ ID NO: 748489 - DNA, 80 bp, Homo sapiens
gtctgggaccttaacagggagccatgatcctgataacttaagtgactctctcttttccggtgatgaagaaaatgctggga

SEQ ID NO: 748490 - DNA, 98 bp, Homo sapiens
ctcattggtccaaaattgaagagaaggtgtgcagcaatgacaacaagaccttcgactcttcctgccacttctttgccacaaagtgcaccctggagggc

SEQ ID NO: 748491 - DNA, 100 bp, Homo sapiens
ctctcgccttacgacagcccggtcggatcatggggttgcccagggggccggagggccagggtctcccggagtactatactggcaattgctggagaagatt

SEQ ID NO: 748492 - DNA, 98 bp, Homo sapiens
tgtcgagtcccgactactacgagaggctgggccaactccagcacgggctgcgggacagaagcctggaatggtcccccctccgccgggagaagaaagcc

SEQ ID NO: 748493 - DNA, 90 bp, Homo sapiens
ggtccagtcattccaaatgaagagatgcctgaccaacagatgtgggattactagctgtaattgcaaataacatcattaccattaacaagg

SEQ ID NO: 748494 - DNA, 82 bp, Homo sapiens
ggaaaacagagaaagaagtgataggagggctctgtaggctccccacaggtgcaggaagccgccgcccagccatggacgggga

SEQ ID NO: 748495 - DNA, 100 bp, Homo sapiens
ccctcatggggaaaatctccccggtgactttcaggtcgggaaagaggttaaagaagacacgcaagtatgatatcatcaccactccagcagagcgagtgga

SEQ ID NO: 748496 - DNA, 100 bp, Homo sapiens
ccatgcagtgtcctcctcagggagggcaggagagcctgaggagtggcggggccgccagggacatgagagatggctttagaagaaaaagtttctactcttc

SEQ ID NO: 748497 - DNA, 101 bp, Homo sapiens
gtagcaagacgcctctccaaagcagcccttctgcgcaggagctgaaagctccactgggagcttgatcctggatagtgtttgtatgatgtgcacacgtctct

SEQ ID NO: 748498 - DNA, 96 bp, Homo sapiens
gcgtcccggggacttggggccgcagggagacgcaaacatgcagatctttgtgaagaccctcactggcaaaaccatcacccttgaggtcgagcccag

SEQ ID NO: 748499 - DNA, 75 bp, Homo sapiens
ctggaagacgcgctcctgcgccggttaacacagaaatctgcctcctgggccatgccgcttctaaggcctgtttct

SEQ ID NO: 748500 - DNA, 100 bp, Homo sapiens
ggcagtaacacatagcgtcaaagagcaaatcatgaaggacaggtggatcaatgcagggcatgaagaagatgaactcaaaccatttgttgaaccagagcta

SEQ ID NO: 748501 - DNA, 83 bp, Homo sapiens
taaaacagcaattggagctctaaaattaaacatcggggacctacaggttacaaaggagaggccccctttcatccctgaaggag

SEQ ID NO: 748502 - DNA, 75 bp, Homo sapiens
ggacgacgcagttccacagtctgatggagttcgaggaatttataaatggaccacacatccccgacctacatgctt

SEQ ID NO: 748503 - DNA, 75 bp, Homo sapiens
ttgggtcttcttcttaatcccatatctggacatctggaacatccatgggctgtgcttaagagtaaaacttcagcg

SEQ ID NO: 748504 - DNA, 98 bp, Homo sapiens
ccgagatgtctcgctccgtggccttagctgtgctcgcgctactctctctttctggcctggaggctatccagcatctgccggaggcgctgggcaatgac

SEQ ID NO: 748505 - DNA, 74 bp, Homo sapiens
ttgaagactggctgaatgatgacctcggctcctatcaaggggaaatcctcattgacgattcaatttgttgaagg

SEQ ID NO: 748506 - DNA, 51 bp, Homo sapiens
ttttagggtcctttatatagaagggagagatccacctctgatgttcagtga

SEQ ID NO: 748507 - DNA, 99 bp, Homo sapiens
tcacatctaggagcatctacccatggacagacatgtcttcccatggaggactcaagcacagagggttcggaaaccgcgttgctgcacggggccccaggg

SEQ ID NO: 748508 - DNA, 100 bp, Homo sapiens
acgtggctactatggaaggcgccgtggccctccccggaatattgcagcaaaaattggaggtgatgcagggacatcactgaattcaaatgactatggttat

SEQ ID NO: 748509 - DNA, 99 bp, Homo sapiens
gctgtgacgcgcgcgccggagcggggtccgatggttctcgaaggcccgcggcgccccgtgctgcagggcgtctctggccgagcctctttttgtggaaaa

SEQ ID NO: 748510 - DNA, 75 bp, Homo sapiens
ctaagagctgggcaccaggaagcgaaggctgggaccattgacatttatggatgtggccatagaattctctgtgga

SEQ ID NO: 748511 - DNA, 100 bp, Homo sapiens
aaacaccggtaggagcggggaggtgggtactacacaaccgtctccagccttggtctgagtggactgtcctgcagttttctggatatgccgcagaaggatc

SEQ ID NO: 748512 - DNA, 71 bp, Homo sapiens
gcggtctagcgggcgcggcgggcggcgcgcagagagcttccttcaaaatgtctactgttcacgaaatcctg

SEQ ID NO: 748513 - DNA, 90 bp, Homo sapiens
ggaattcctgatgaatttatatgtccaataactagagaacttatgaaagatccggtcatcgcatcagtgaaattggagcgatttgaaatt

SEQ ID NO: 748514 - DNA, 100 bp, Homo sapiens
gctctactgcttcccctcctgtctccagttctccacgctctgtctcctcaacctctacctggcggagctttcagatgaaatggagacagagaagaatata

SEQ ID NO: 748515 - DNA, 80 bp, Homo sapiens
cgcggcatcaagcaggtccggacccactggctgctggagcttgtcaccaccaggtttgaacggtgtccccgggagcatct

SEQ ID NO: 748516 - DNA, 100 bp, Homo sapiens
ctccaaccacttccctcattagtgtggctgtcacaaatttctgtagaaaatgtttcctgactgcaatgagggaaagcggagcacattgtcccctatgtcg

SEQ ID NO: 748517 - DNA, 75 bp, Homo sapiens
tgcatccctgaccagccgccaacaaaggaagttcatgatttgttaaaagactatgacttaaaatattgttatgtg

SEQ ID NO: 748518 - DNA, 100 bp, Homo sapiens
gagaaaattgaaggctccaaatccttagctcagagctggaggatgaaggatcggtcttcaggcagtgacagtggtgggagcagcagcagcagcagcagca

SEQ ID NO: 748519 - DNA, 100 bp, Homo sapiens
agatcctgtgtcacccggcaactcagaaacatcaggtccaaggttgccaagagggtgatcctgttgtcgggcacaccagccatgtcccggcccgcagagc

SEQ ID NO: 748520 - DNA, 96 bp, Homo sapiens
ctcctctcgaatgcagcagccacagatctctgtctacagtggttcagaccgacatgctgtacaggttcgagaaatggctgctactaccttaagcgg

SEQ ID NO: 748521 - DNA, 74 bp, Homo sapiens
caactgttctaatgaggtcctatctattactgctatgttgtcagtatcaccttttgccatgatagcatttcttt

SEQ ID NO: 748522 - DNA, 82 bp, Homo sapiens
tggagaccttcgagcaccccaacgtggtcagttgggacagaaataacccagagccctggaacaaactgggtcccaatgatca

SEQ ID NO: 748523 - DNA, 100 bp, Homo sapiens
ccacttcatggatcgctacaacgtcaccacctccaagcagctctacaccgtggccgtctcctgcctcctgcttgcaagagctgggagtgagcacaaatgc

SEQ ID NO: 748524 - DNA, 50 bp, Homo sapiens
ggagcagcatcgaggcccgggagtgcctggatcaaagtggaacagctgaa

SEQ ID NO: 748525 - DNA, 98 bp, Homo sapiens
cctggagtctgcgaaggccgggacccggttccccggcccacagtgggggtgtgcaaacccgagagaactggctccaaagacaacaggccctccctctg

SEQ ID NO: 748526 - DNA, 51 bp, Homo sapiens
aggaaaggagtggacacagtagcataccataaagtctccaaaggatggcac

SEQ ID NO: 748527 - DNA, 74 bp, Homo sapiens
cacccggggcctttccgtccgagaaattctcgcagagcttacagattaacagacccctgactatgaagaaggaa

SEQ ID NO: 748528 - DNA, 74 bp, Homo sapiens
ctcagttcttcctcccagagctgcagcggcgcctggacgactggccaaggcagaggcttcctcaggagaccatc

SEQ ID NO: 748529 - DNA, 100 bp, Homo sapiens
acgtgtcatttctaagtactttctcctactccataaagacttcaagaaagttgcagacgttggcagtgctgttgcggcagctcaaggcagagggccaccg

SEQ ID NO: 748530 - DNA, 74 bp, Homo sapiens
ctgcagcagctgcattacaacagattctgaagacaatccccaaacattgcttttttctgcaacttgccctcatt

SEQ ID NO: 748531 - DNA, 100 bp, Homo sapiens
tgacgaaggggaaaccgactggaaagtcattgccattaatgtggatgatcctgatgcagccaattataatggaggagatgttaaagtaacccatcttgca

SEQ ID NO: 748532 - DNA, 83 bp, Homo sapiens
cctctccttgctgcagccatggacatttgacattgtgcagcaaagaaatggttatggagaagcccagtccgctgcttgtaggg

SEQ ID NO: 748533 - DNA, 100 bp, Homo sapiens
gcctgtctgccgcgatggatgacagtaaggtggtgtggggatgatgtgctcattgagtgaacaagggaagcagctagctatccaggtgtctaatatcctg

SEQ ID NO: 748534 - DNA, 50 bp, Homo sapiens
cgacgccgtcgcggtggactgcaaggtgaaaggtgtagcagtcactcggc

SEQ ID NO: 748535 - DNA, 75 bp, Homo sapiens
ctaataaccaactgcaattcctacctccagttttgtaccaatggctagaagcagatcgtcatggcaagagccaag

SEQ ID NO: 748536 - DNA, 82 bp, Homo sapiens
aaaagagcaaagataagaagagaaaaagagaagatgaagaaacccagcttgatatgttgagcaagaaagctttctgctcagc

SEQ ID NO: 748537 - DNA, 92 bp, Homo sapiens
ggttcgtgcgctgtggagacgcggagggtcgaggcggcgcggcctgagcaatggctgccatccggaagaaactggtgattgttggtgatgga

SEQ ID NO: 748538 - DNA, 100 bp, Homo sapiens
ttgtgattggcggtgaccggatattcagttgcacatccccacatcaatgcactgccaatgttgatactccagatccctatgtggaactttttatctctac

SEQ ID NO: 748539 - DNA, 98 bp, Homo sapiens
aggattccaagtaactcttatttgatgagaccccgctttctacaccaaccgcaagagacagccttgacaaactctctctaactgggcatggacaacca

SEQ ID NO: 748540 - DNA, 90 bp, Homo sapiens
gtctgactacacagaggcgtataatcccaaaatagggatgttcgtctaaccccagaagactttgctagagctcagaagtactgcaaatat

SEQ ID NO: 748541 - DNA, 100 bp, Homo sapiens
cgggggacacgcaggatgagccccgcgaccactggcacattcttgctgacagggacaagaatccttcaagaaacaggaaaaaactcctaaaacaccaaaa

SEQ ID NO: 748542 - DNA, 83 bp, Homo sapiens
ccgactggtactccgtctacacgtctgccattgccttcacctgtcaacagcatctccaccctggagcctgtgagccggtgcca

SEQ ID NO: 748543 - DNA, 51 bp, Homo sapiens
gacagaacttcgagatcggccaccaaatcagccggcaccaggagcagttca

SEQ ID NO: 748544 - DNA, 50 bp, Homo sapiens
gcgcccgccgccgcccgtccccaggaatatattaaaggaatctgtgaacc

SEQ ID NO: 748545 - DNA, 96 bp, Homo sapiens
ctcacatggtgtctgggcccttggcactctgtctattatcctcccagtccacaacgctgaaccgtggctggacgaatgtttgaggtctgttttgca

SEQ ID NO: 748546 - DNA, 75 bp, Homo sapiens
ttttttcagtcagccatgagcataccaatggagatcttcgtggatgatgagacgaagttgacgctgcatgggttg

SEQ ID NO: 748547 - DNA, 100 bp, Homo sapiens
gtgccagcacctttcggcttctgagacggcggcagcagcggcattcagatctgcgatgagctgggagtgaagcggccatcttctgtgaaagtattctcag

SEQ ID NO: 748548 - DNA, 80 bp, Homo sapiens
gggggctctggtgatggactcatccccacagactattgcccagaagaaaagatgtttggttttcacaagccaaagatgta

SEQ ID NO: 748549 - DNA, 100 bp, Homo sapiens
ctccttcgtgtgtacctcctgctccggcagcctgttggcgtgcagtggtgtgatctcagctcattgcaacctctgcctcccggactcaagcaatcctccc

SEQ ID NO: 748550 - DNA, 74 bp, Homo sapiens
aagaatacagcaagggtgcagactatatggactgcttatataggcgagtgttgtgtataaaggaagttgaaatc

SEQ ID NO: 748551 - DNA, 97 bp, Homo sapiens
ttagccagttctacaaggaatcattgatgaaagttatgccttatgttgatatactttttggaaatgagacatatttgcataagcttttcaagagaga

SEQ ID NO: 748552 - DNA, 82 bp, Homo sapiens
atttcaggaaaacagagaaagaagtgataggagggctctgtaggttggagcaaaacgtcccactcactggaggcacctgagg

SEQ ID NO: 748553 - DNA, 100 bp, Homo sapiens
tgatgtggaagaaatgaattacatggctgccgagggcgagggcgaggtgtgagagggtccagcagaaggaaacatggctgccaaagtgtttgagtccatt

SEQ ID NO: 748554 - DNA, 75 bp, Homo sapiens
agcggccgccggctcccccacgagggactttgaacatgtcggggatcgccctcagcagactcgcccaggagagga

SEQ ID NO: 748555 - DNA, 100 bp, Homo sapiens
gcagtgccaagacttggttaaagtcattgaggactttccagcaaaggcaaagaacagagcagttcaccatttgcattatatagaacgatatgaagaccat

SEQ ID NO: 748556 - DNA, 99 bp, Homo sapiens
ccgtcctccaccgtttcctccaggacagcacctagtcgtggccggaggagtctcagagctgtcagaaagcatgttggcagataaattgaacatgactcc

SEQ ID NO: 748557 - DNA, 90 bp, Homo sapiens
gacagattcgcagtggtcgcttcttctccttggaggtggaatttaattctcctccccttgaatatgggctggacaaagagaaaaatggta

SEQ ID NO: 748558 - DNA, 74 bp, Homo sapiens
ggcagtcttccttattattaagctgcaagctttcttcctggtggcagatgacatcatggattcatcccttaccc

SEQ ID NO: 748559 - DNA, 100 bp, Homo sapiens
tcgacattgctgctgggaatgggcttggtggagccagtgaacgtggtggacaatggagatggcacacacacagtaacctacaccccatctcaggagggac

SEQ ID NO: 748560 - DNA, 132 bp, Homo sapiens
ggatgttaaaaatcaacaccaggactacagtaaggctgaaatcattgaagtgcttggagtgcagaactgaaagaggacagagcgggatgccaccagcttgtccaaagggaagttccaggagctcctggtggg

SEQ ID NO: 748561 - DNA, 100 bp, Homo sapiens
gcttataaagcaatgaataaatttggtgaagcacttaagaaatgtcatgagattgagagagttcaaaccttgtactactcagctgatcacaagctgcttg

SEQ ID NO: 748562 - DNA, 82 bp, Homo sapiens
ctgggcttcatagcattcgcctactccgtgaaggttttatgccgctgagataatgtgtggactgcagtttctacacagcaag

SEQ ID NO: 748563 - DNA, 99 bp, Homo sapiens
tgggcaatggtgaagaccaccgcagggcggccgaggaacaggcctttgagagcagccagaagtacaaagaggggaagtacatcattgaactcaaccaca

SEQ ID NO: 748564 - DNA, 83 bp, Homo sapiens
ctcgcgctcaagttcgagaacgcggccgccggacaatgcagatcttcgtgaagactctgactggtaagaccatcaccctcgag

SEQ ID NO: 748565 - DNA, 100 bp, Homo sapiens
gacatcatacatggctattgatggcagtgctcttgtgaaaggtgtagcagtcactcggcctacacccacagcatcgaccttgtgaacccagcgacctgac

SEQ ID NO: 748566 - DNA, 97 bp, Homo sapiens
ggatttctaaaccagtttactgaagataagccaactttgaatttcttctatcaacagctccatcaagtatgatggtgaaggatgaatatgtgcatga

SEQ ID NO: 748567 - DNA, 100 bp, Homo sapiens
cctaacctttattcatatggcatctcagaagtatgtgttacggagacatgctcttattgtacagattggcccaagagagagaagcagcaaaagctaagaa

SEQ ID NO: 748568 - DNA, 75 bp, Homo sapiens
tcatatgcagacttatgaagttgaccttaataattcatcagagaagatatgaaatataaagatgctactaataaa

SEQ ID NO: 748569 - DNA, 50 bp, Homo sapiens
ggactgttgttggaggaacactttccagatatctgttccaaaaacccctg

SEQ ID NO: 748570 - DNA, 49 bp, Homo sapiens
ccatgatcgttatgaatgatcagaatcttgccctgtcgctcaagctggg

SEQ ID NO: 748571 - DNA, 83 bp, Homo sapiens
tctagatgtaaatgtcagtggaaaggagagctaccatcactaagtgcctccggagccagcgtggtggccatagacaacaagat

SEQ ID NO: 748572 - DNA, 100 bp, Homo sapiens
aaaatatcgattcaaacagtgaaagtgaaagagaagagatagaattaaaatctccgagggtatcagccagttccaaagaaccagccatgtcaatgaattc

SEQ ID NO: 748573 - DNA, 71 bp, Homo sapiens
aggtcaaacctgaaagaccccagttatggatgggaggcggagatggacatggtggcctggggtgtggacct

SEQ ID NO: 748574 - DNA, 90 bp, Homo sapiens
tgcgggcctcctcggcttccagaaacgctccagaggacaagtgctgtttgataaagtgtgtgaacacttgaacttgctagagaaagacta

SEQ ID NO: 748575 - DNA, 85 bp, Homo sapiens
caccgacctcgacgtcttgcctgtgtcccacttgttcgcggcctatagaagactgtgcagtctttgtaactgatgaagagcaagg

SEQ ID NO: 748576 - DNA, 83 bp, Homo sapiens
gaacgtgcgggaagagaagatcatcgagcatttcaaacgctggtcagtgagaaggtcggaggggccgaggggaccaagctgga

SEQ ID NO: 748577 - DNA, 82 bp, Homo sapiens
gaggctcggagaaacaggcgccgcgggctccgcgcccggccggacccgggcccgagcaggaaggagcgccccacctccctga

SEQ ID NO: 748578 - DNA, 100 bp, Homo sapiens
cattttggaagaggaaccacaagaaaatcaaaagaaacttttgcccttatcagtaacacctgagctcctctggtgcaagtgtggtagctattgacaacaa

SEQ ID NO: 748579 - DNA, 74 bp, Homo sapiens
cagcacactgaaggaggctcagttcaaagacctgttcttaaaaaaagatagttttgaggcagctgtgccatcaa

SEQ ID NO: 748580 - DNA, 90 bp, Homo sapiens
tgtgcagggcagagcaggaggccccccgagggaacacaacagtagatgagttaatgatgagactcatggctgcaatggagatcttcacag

SEQ ID NO: 748581 - DNA, 100 bp, Homo sapiens
gcccggattgtggcccggtgcctgtgggaagaatcacgccttctacagactgcagccactgcggcccagctcgccctcccctacctgcggaagagtcaag

SEQ ID NO: 748582 - DNA, 90 bp, Homo sapiens
acattctacgttcccttggggaaatatctgctctgacttctaaattagcagatctacgaagacatggatgattcaacagccacacaaagc

SEQ ID NO: 748583 - DNA, 82 bp, Homo sapiens
ttccctttgactgtgtcctgctgctgctgctgctactacttacaagtgcctcgagtctttattggtaaagattgtataggcg

SEQ ID NO: 748584 - DNA, 83 bp, Homo sapiens
gaaagctagaggcattgaggagcctgaagattctcagcccctgtccctgccttacccagcaagcttcccacgtttggagcccc

SEQ ID NO: 748585 - DNA, 100 bp, Homo sapiens
ttggacatattcctctcctgatctggcctcatctgttccagggaggtgggattgagcagactgccagattcacttacagccccagctaattccaccaaac

SEQ ID NO: 748586 - DNA, 77 bp, Homo sapiens
gtcgggctcaggcccagcagggccatcggccatacttcctgaaaaaatgtgctggaaacgtgcgtagcaacagtagg

SEQ ID NO: 748587 - DNA, 51 bp, Homo sapiens
cactttaatattttccttactgctaaggatgctttggagtctgcaatgaag

SEQ ID NO: 748588 - DNA, 98 bp, Homo sapiens
cggccggtgccagcacctttcggcttctgagacggcggcagcagcggcattcaggtctaccccgagccccggagcgagagcgagtgcctgagcaacat

SEQ ID NO: 748589 - DNA, 95 bp, Homo sapiens
attacctgaggccctccctgttcgtgtacccagaggagtcgctggtgattgaatcttccctggagaaggagagggagactcccagtcccatcgac

SEQ ID NO: 748590 - DNA, 83 bp, Homo sapiens
cggggaaggaggagcgctaggtcggtgtacgaccgagattagggagagtcgcggttgctgatcgtggtgcttgagtagagccg

SEQ ID NO: 748591 - DNA, 100 bp, Homo sapiens
gagtccaaggtccgggtatcttaccagggaaagtttaaaggaagaggaaatgatcgcagggaaaagctccagtcttttgactctccagaaaggaaacgga

SEQ ID NO: 748592 - DNA, 75 bp, Homo sapiens
agaattttcacctggaacatgagaggaagatgttggatccagggttgatgacgtgttccaagcaagctatgtttc

SEQ ID NO: 748593 - DNA, 80 bp, Homo sapiens
tgctctgctcttccaacaccagtggaagatgatcacatcccaggttgcagtgcacgaggggattaactcaggaacagcca

SEQ ID NO: 748594 - DNA, 100 bp, Homo sapiens
ggcgcgggctgcagacggctgcgaggcgctgggcacagttgaagatcctctttgtaacttccactccccaaacttcctgaggatctcagaggtggaaatg

SEQ ID NO: 748595 - DNA, 74 bp, Homo sapiens
aagtcactggaaatcacaacagttggatagtaatgtgacaatggcggtggatgaattttattccaagatagaag

SEQ ID NO: 748596 - DNA, 88 bp, Homo sapiens
ctcgcgcttcagcgtcccggcgccgtcgcgccactcctccgactcaaatagctataactgtaccaaagacatggaagaaaccaaaaga

SEQ ID NO: 748597 - DNA, 98 bp, Homo sapiens
acaggcgtgtgccaccacgcccaggtttgagaaatttctgtggttcattagctcagagaactatctaattataggtggacgagatcagcaacagaatg

SEQ ID NO: 748598 - DNA, 100 bp, Homo sapiens
ctagcgttagaagcgagctggaatgcgtgaccaacatcaccctggcaaatgtcatccgacagctgggcagcctgagaacgtcaaggtcgtgggaaataaa

SEQ ID NO: 748599 - DNA, 75 bp, Homo sapiens
tctgcgccccaggtgttgtgtgtgggggtgcagttgttgacctcctgtactggagagacattaagaagactggag

SEQ ID NO: 748600 - DNA, 50 bp, Homo sapiens
caggctcctgctgacccgggcagagaagggaagtcttctgaccaactggc

SEQ ID NO: 748601 - DNA, 100 bp, Homo sapiens
acaacatggcagacattgacaacatgaacaggctgaacactttgccacgaggcttcggctccctgccagctcttgaggttctggacttgacgtacaacaa

SEQ ID NO: 748602 - DNA, 82 bp, Homo sapiens
agcattttcatgaaacaaccccaaataaaggaagtggaaccacttcaggtatagactatgtgatacctaaaacagggtttta

SEQ ID NO: 748603 - DNA, 82 bp, Homo sapiens
gagctcctggaggcggcgggatggaggcggcggccggtgacttaagagattaaaattaatttggttgctgttggttctgaac

SEQ ID NO: 748604 - DNA, 98 bp, Homo sapiens
ccgcctcagccatggacgcgtccctggagaagatgccttcaattaagttgcagagttctgatggagagatatttgaagttgatgtggaaattgccaaa

SEQ ID NO: 748605 - DNA, 75 bp, Homo sapiens
tcagcctcatctactgcacacttgagtccatgagattttagagtggattcttctcatcgcagtgctccaggcagc

SEQ ID NO: 748606 - DNA, 75 bp, Homo sapiens
cgtaatgtgccagtcatcactggtagcaaagaacactgattccccatcctatccagagattagttttagttgcag

SEQ ID NO: 748607 - DNA, 87 bp, Homo sapiens
gataagtgtccccgtagagtcaaccggccaggagtggtggctcacacctgtaatcccagctctgggaggccaaggccagtggattgc

SEQ ID NO: 748608 - DNA, 98 bp, Homo sapiens
gagaaccaacttagcaagcacagtgctgtcactcaaggccaaccccttcaaggagcgaatctgcagggtcttctccacatccccagccaaagacagcc

SEQ ID NO: 748609 - DNA, 100 bp, Homo sapiens
tggcagtggccacatactttctcagaaaccttcacatcttggtcaaggtccctacagttcagtccccccgccttctgctcccccaccaaagaagtctctg

SEQ ID NO: 748610 - DNA, 100 bp, Homo sapiens
ttctcgcggcgctcgagggaccatggccgatcctcgcgtgagacagatcaagatcaagaccggcgtggtgaagcgatggagtcatcagaacccactgtga

SEQ ID NO: 748611 - DNA, 83 bp, Homo sapiens
aaattttgcactactggcatcgatggagccatgacaatttgggatttcaaggcatcgttggcttcacagtatgactgatgatc

SEQ ID NO: 748612 - DNA, 83 bp, Homo sapiens
ccaaataccaggctaccatggtctacaagactctcttcgctctttgcatcttaactgcaggaccaagaatcgccttcagccct

SEQ ID NO: 748613 - DNA, 73 bp, Homo sapiens
ggaccaagaaaggcactgtctaccttaccccttaccgggtctccagtgggggctgcagactaagcaaaatgag

SEQ ID NO: 748614 - DNA, 96 bp, Homo sapiens
gaaaactgtattcctaataaccagctaagcaaaccagacgcactggtcaggttaaagctgaagctcaacaaagatatagtgatctctgtgggcatt

SEQ ID NO: 748615 - DNA, 100 bp, Homo sapiens
ctcatcaccctggtcggggtggtggtggctgtgagctccttaataagcatttatagtcagtttttggcagcaatagaatcactaaaggcattctgggatg

SEQ ID NO: 748616 - DNA, 50 bp, Homo sapiens
aggactgccagctggcgctgcagggagagcacatctgcctgatccgcaag

SEQ ID NO: 748617 - DNA, 100 bp, Homo sapiens
ctgattagcaatttaaagatcctctccaagagagttggaaactcaactattggaacaatgtactgttgacacaagtgttgctaaagaacagagccttccc

SEQ ID NO: 748618 - DNA, 75 bp, Homo sapiens
ggtatttcttttctctcttcagcccccaacccagtggagtctccaggtttaaaggagagcaactagaagtcgtcc

SEQ ID NO: 748619 - DNA, 138 bp, Homo sapiens
caacccgttcttgcctcaggccagtcgcctccaggccaagagggatccttcacccgtgtctggtgtcatggagaaactccagctgggcccagagattctgcagcgggaaaatccaaggcttatttatgccaggctgag

SEQ ID NO: 748620 - DNA, 75 bp, Homo sapiens
cagccgatccagcctgcggagcctgtggggcaggaagccagttgagggaagttctccatgaatgtacgtcacaat

SEQ ID NO: 748621 - DNA, 75 bp, Homo sapiens
ctttcccatatcagagcatcacttttcctgagttaagcaataaattctccagtgctgatgaagcggctttaaaag

SEQ ID NO: 748622 - DNA, 83 bp, Homo sapiens
ttatctggttttgtaataacacgttcacacaaaagatgttggacaatttctacaattttgcttcatcatttgctgtctctcag

SEQ ID NO: 748623 - DNA, 98 bp, Homo sapiens
gaacaaggatttccttcttggggttaattttccactctcctttccaaacctttgcagctgccctttgttaaaggtagtgggcagcagtcagtgacagg

SEQ ID NO: 748624 - DNA, 50 bp, Homo sapiens
cgaatatcgtcatcgttagaaggtatgatctcgtgaaaccttgagagaaa

SEQ ID NO: 748625 - DNA, 137 bp, Homo sapiens
cccgcccaaggtgaacccgtggactaagaacgcattgccgccggtcctgaccaccgtgaacggacagtcccccccaggttatgaagacagtatggagtttccagaccatagtagacatttgctacagtgtctgagcg

SEQ ID NO: 748626 - DNA, 75 bp, Homo sapiens
aacacggaaactaggaagaggaaattaactatctgtacttataaggatatagctgacctggcatttgaggtatca

SEQ ID NO: 748627 - DNA, 90 bp, Homo sapiens
aatttctacagcagagaccttgagggatatctttcttcactcctcttcacttcttcagtgacattaattaccaagaatttgctaaaagac

SEQ ID NO: 748628 - DNA, 98 bp, Homo sapiens
ggaactggcagtggtggcggctcttcaccaagatgcaagtgctgctggaccaggcgggctgctgtatcgtgggtcagagtgagcagctggttcctgcg

SEQ ID NO: 748629 - DNA, 75 bp, Homo sapiens
caaaatgtcaacaaattgatgggatctgcctacaaactggtttgctactttaccaactggtcccaggaccggcag

SEQ ID NO: 748630 - DNA, 51 bp, Homo sapiens
catccagtttgatgtttactacaaggactttgcctcccgggccaaactggc

SEQ ID NO: 748631 - DNA, 75 bp, Homo sapiens
tgcagttgctccccgcccccgagcagccgagggaataaccagcaagtacctgtcaagaatgaagtagatcattgt

SEQ ID NO: 748632 - DNA, 83 bp, Homo sapiens
tttcgacaggtgtgcaggtttcggcacatggagattgattttaattggttggggtcagataagaagaggagtgacaatcaagc

SEQ ID NO: 748633 - DNA, 50 bp, Homo sapiens
agtcaatatgttggaggcatgctaagggtctaaaattcccaggactccac

SEQ ID NO: 748634 - DNA, 75 bp, Homo sapiens
tgctgctgtctttgtttgccggattagatccttccaaggtgagcacctgcggatctgtccccagggctacacctg

SEQ ID NO: 748635 - DNA, 48 bp, Homo sapiens
ggaggaccattaggaaatccaaatgattcgcctttgccagtctcatct

SEQ ID NO: 748636 - DNA, 76 bp, Homo sapiens
tttggaggttcgtacacgcctgaaaattctcataccgctcccctcactgctaatatccctcctaaatgtacaatca

SEQ ID NO: 748637 - DNA, 100 bp, Homo sapiens
ctccggacctcgctgcagcgcggacccggcccgcccgcccgatgatgaccactggatcgtcgacacagactacgacacgtatgccgtgcagtactcctgc

SEQ ID NO: 748638 - DNA, 90 bp, Homo sapiens
cccagtgccttgtctggctacctctcatgcacaggcttgcccatgttgagaatgggaaagcaggcaggatgggagagtcgccgatagaac

SEQ ID NO: 748639 - DNA, 83 bp, Homo sapiens
ccgaacgggttgcttcccccgctgcgagactgtgccctgtccacggtgcctcctgcatgtcctgctgccctgagctgtcccga

SEQ ID NO: 748640 - DNA, 101 bp, Homo sapiens
ttgcactggatccacccagtgaccggacttctcacccccaggatgtcatcgaggggcaagaagaggcagagctggaggagttcctgtgccctgtgaaaaca

SEQ ID NO: 748641 - DNA, 74 bp, Homo sapiens
tcgacatcgagatcaaccgggagccgggcagctgacacacaagagttcaggaccaaactgcacaaagtatttcg

SEQ ID NO: 748642 - DNA, 83 bp, Homo sapiens
caggcgacccgagggccgagggtttggaactcgcagaggtgtggacactgccagcggctgcagccgacttggaatgacctggg

SEQ ID NO: 748643 - DNA, 74 bp, Homo sapiens
gagttcccgttacaatcactagtgttgcagttgggacagaaataacccagagccctggaacaaactgggtccca

SEQ ID NO: 748644 - DNA, 90 bp, Homo sapiens
gggcatggcgacttggtctcagccggactcgggccagtttggcgccggcacggagtcctacttctccctgctgcgcttcctgctccttct

SEQ ID NO: 748645 - DNA, 100 bp, Homo sapiens
agcgccatcgtcatctcagccactctggtcatcctgctggcatactttgtggagtaaagccaatcccagctgaaggaatcaagtcaaatccttccaagcg

SEQ ID NO: 748646 - DNA, 96 bp, Homo sapiens
ctgatttgtccctggggcggcagcgcggacccgcccggagatgaggtccttctggcactcctctggtggaccgcccccatcggccacacttgccct

SEQ ID NO: 748647 - DNA, 75 bp, Homo sapiens
cgaaccgcaccaccagctggatcgacccgcgggacagggcagctggtggaatttttgaagaaaatggaatctcga

SEQ ID NO: 748648 - DNA, 78 bp, Homo sapiens
agagttggagagagtgccccacaacacccctgtggaggcggggtttcaccatgttgcccagactggtcttgaactcct

SEQ ID NO: 748649 - DNA, 100 bp, Homo sapiens
tttgcaagtaaagaagaggcaaccacgttctccaatgcaatgctgtttgccctgaacatcatgaattcccaagaaggagcatcttcatgatacagttaag

SEQ ID NO: 748650 - DNA, 75 bp, Homo sapiens
gcgaggcagggccagcagcaggcgggaggttatggaaacaaaggacatgctttacatcgtcactgaatttgctaa

SEQ ID NO: 748651 - DNA, 100 bp, Homo sapiens
cgatcgttggcgggagatgtcgaaccccgggacacgcaggaacggctccagcatcaagatccgtctgacagcccacaggtcctgacttcaggagcaagac

SEQ ID NO: 748652 - DNA, 100 bp, Homo sapiens
aacttcgagacggaaatagacaaacagctccaacaaggcaaaggtaacaaatgtggcaattattttggatctatcacctgtcatcataactggcttctgc

SEQ ID NO: 748653 - DNA, 96 bp, Homo sapiens
ctttccagcgcgcaggggtgacagcccacacccaggtgctggctgctgtctacaaggctctgagtgaccaccacatctacctggaaggcaccttgc

SEQ ID NO: 748654 - DNA, 142 bp, Homo sapiens
cagctacgtcagctccaagatatgcaagatgtggggaaggtggatgctgcctgggagccatccaaaaacacgcggagctggagttcgcccaaatcatcatcatcgtcgtggtggtcacggtgatggtggtggtcatcgtctg

SEQ ID NO: 748655 - DNA, 78 bp, Homo sapiens
tcctttcaggctccatcagcctcggtgacagtgtggagatccctgccctcaaggtaaggcccataggacaacctggtc

SEQ ID NO: 748656 - DNA, 75 bp, Homo sapiens
ccagccctgctcgcagaattaccgcctcttctttaatggattaaaggagcccagcccctaggccagtgaagggac

SEQ ID NO: 748657 - DNA, 100 bp, Homo sapiens
ggagcatgggcttcggaggcctatagcccgcaggcgggcgctaatattgacacctgctcagaagaccagaggaccccgttgatggaagcagccgaaaaca

SEQ ID NO: 748658 - DNA, 98 bp, Homo sapiens
ttacaccagaatgtaaatgtgaagaacataatcattgctttaattgataggacagagcgggatgccaccagcttgtccaaagggaagttccaggagct

SEQ ID NO: 748659 - DNA, 110 bp, Homo sapiens
ttgtgagagggctctgcagtataaactaggagacaagatccatggattcaccgtaaaccagtttaatggatcgagaagtggcgttgcttgctgaaatggacaaagtgaaa

SEQ ID NO: 748660 - DNA, 100 bp, Homo sapiens
attaacaaggagcatgtactggccgcagcaaagctgcggttggatttctcacgatgtccagtgttatctccatgtctgcccctttcttcctggggaagat

SEQ ID NO: 748661 - DNA, 51 bp, Homo sapiens
ggcctacccgggatacggaggaggggtgacttctgggggaacagaaagcat

SEQ ID NO: 748662 - DNA, 83 bp, Homo sapiens
atgatatcctgagacaggctttggcagttggataccagacagcttctcacaacagataacgaaggaggcccaacttcattcaa

SEQ ID NO: 748663 - DNA, 75 bp, Homo sapiens
gtggccatcaaagtgattccccggaatcgtgtgctgggctggtcccccttgcttcagcaagtgtcaacattggtc

SEQ ID NO: 748664 - DNA, 50 bp, Homo sapiens
gatgtggactgcagtgctgcagtgccaggcaatcatcaaatgcttagaag

SEQ ID NO: 748665 - DNA, 78 bp, Homo sapiens
ctaaacttaaaagcaagctggttctctgggatataaataagctaaaagatggcggcaaggcagcccaggcaaatgtaa

SEQ ID NO: 748666 - DNA, 83 bp, Homo sapiens
ccgccgaaaaagagaagacgctttacccgactctttgggccgttatctcacatgtgaagttcatttccaatccgccctccatg

SEQ ID NO: 748667 - DNA, 50 bp, Homo sapiens
gccaggggcctgggggcaagattgttgtcaggcagttcctgctccgactg

SEQ ID NO: 748668 - DNA, 119 bp, Homo sapiens
gctggtaatagatgtctgacaaactaaagaaagacttgtgttacggctggaaacaggattgttgaaatactccctgaacatctgaaagagtttcagtcccttgaaactttggaccttag

SEQ ID NO: 748669 - DNA, 100 bp, Homo sapiens
aacgaaaagagaattgtacactgcagaataactgaagtgaagtgatggactccgatttggagagtagtaagacgtgaaaggaatacacttgtgtttaagc

SEQ ID NO: 748670 - DNA, 101 bp, Homo sapiens
agaggcagacctccagaactacctgtaaattatgtgaaacctccaaatgtggttaatagaagatgaaattgcaaccattcttaaatctacattgaaaggac

SEQ ID NO: 748671 - DNA, 120 bp, Homo sapiens
gcacttcttggatatcatcgaccctcgcacactctttgtcactgagattgaggaacagttgactttggaaaagttgcatgagtggactaaacctgagaatctcgatttcattgaagttaa

SEQ ID NO: 748672 - DNA, 56 bp, Homo sapiens
tttttgattcttttgacaatgatggaaagagtgaaatggatgagaatcaaatccag

SEQ ID NO: 748673 - DNA, 75 bp, Homo sapiens
gctggccactggcaagctgtcccctgatgccatcccagggtttccaggcctgaggtgcccgccctggccccagga

SEQ ID NO: 748674 - DNA, 100 bp, Homo sapiens
cgagaaccgtcagtttgagccagatggtttcaagtgccccatttgctccaagtctgtggcttctgacgagatggaaatgcactttataatgtgtttgagc

SEQ ID NO: 748675 - DNA, 100 bp, Homo sapiens
tgagagaagtttaagagaagaaatggacatgattgcctaaatcagccaaacacagggctcaggccacagggtcaccacatacatcgcccacccatggagg

SEQ ID NO: 748676 - DNA, 83 bp, Homo sapiens
ctctcttcgctctttgcatcttaactgcaggaccacagaatactggccatggtgcaacttctggttttggcagtgcttttaca

SEQ ID NO: 748677 - DNA, 73 bp, Homo sapiens
atttaagagatttcctagttcaaataaagtattcagaggatatgaagcacaagaccactcttctggagcttca

SEQ ID NO: 748678 - DNA, 51 bp, Homo sapiens
aagaagtgtgttgcatgaatttctaagttacagatgtagagctaaaacgac

SEQ ID NO: 748679 - DNA, 88 bp, Homo sapiens
gtttgcataccggatgggagtgacagtgtaatagaaaaacaagcaagaaaccttttaggtctacgaccccttccgctttgacccagag

SEQ ID NO: 748680 - DNA, 75 bp, Homo sapiens
gggtgtcgatccttttccctccagtcagatactagagtaaaaggatggtttcttctggacaattatatacccaca

SEQ ID NO: 748681 - DNA, 74 bp, Homo sapiens
gggagggtggttaccgctgaggagctgcagtctctgtcaagtttttgaaatcatgaatcctgtttatagtcctg

SEQ ID NO: 748682 - DNA, 75 bp, Homo sapiens
ttcagtgactgaattaaaaggtgtcaagaagctcagaatggttataaacaacttgtgaaatgagtgatttggaag

SEQ ID NO: 748683 - DNA, 98 bp, Homo sapiens
gaaaatcatcttatcagacgaaggcaaaatgtatgcaccggaagcagtactcagaacaagtcatacctaatgctgcaggaaacatttccaaacgtgta

SEQ ID NO: 748684 - DNA, 100 bp, Homo sapiens
gccgtgaattgggttcttcagtttgattgtcctgaggatgccaacacatatattcacagagcaggtagaactgccagtactatactggcaattgctggag

SEQ ID NO: 748685 - DNA, 51 bp, Homo sapiens
caagaactgtgaaaggtttaatgaaggtcatgtggttatgggtaacaatgc

SEQ ID NO: 748686 - DNA, 111 bp, Homo sapiens
aacgacgtggacatccctggctgctggtttttcaagctgcctcacaaggttaacacagaaatctgcctcctgggccatgccgcttctaaggcctgtttcttctcatgagcc

SEQ ID NO: 748687 - DNA, 74 bp, Homo sapiens
cctccctcaccttggacacctcgcttgggttctacgcggccgagatctgcatcgccctcaacttcctgcacgag

SEQ ID NO: 748688 - DNA, 88 bp, Homo sapiens
gccacaggtgactatttgtttgaacctcattcaggggaagagtacactcgagatgaagtactatactggcaattgctggagaagattt

SEQ ID NO: 748689 - DNA, 83 bp, Homo sapiens
ccccaagaaaaggctcctaggagcaggctggcatggctctatataagattgtccccaaaaatccctactacttttggtctgtg

SEQ ID NO: 748690 - DNA, 76 bp, Homo sapiens
tgctgccagggtccctgaagagggaagacacgcggaaacagatggcagttgaattcctgcatgaactgaatgttcc

SEQ ID NO: 748691 - DNA, 105 bp, Homo sapiens
gggacgttggggagggggctgtgccgggcggagagaactcagcgaggattctgagagactgacttgcataccaaatgtgtggtggatgtggatgcaaacaaggtt

SEQ ID NO: 748692 - DNA, 90 bp, Homo sapiens
ttgcaagaaacctcaggacttgagtaacagcaacatgagcctccattatggcatgctgaatttaccaaagaagaattggttcagaagctc

SEQ ID NO: 748693 - DNA, 97 bp, Homo sapiens
ggggatgagagctgcaccgcgcgggacaagtcgccggcggcgcccgacggagcagtcagatgccctggatgcagctagaggatgattctctgtacat

SEQ ID NO: 748694 - DNA, 82 bp, Homo sapiens
acatgcagaaggaagctattgctgctcacaaggaagccattaatttgctagaaccaatgacaaacgaccccgtgaactacgt

SEQ ID NO: 748695 - DNA, 75 bp, Homo sapiens
gcaaaatagtgtgcctccttcacagaaaaagttggagaagatgagggatcatgaacgaaaggaagaaacttttac

SEQ ID NO: 748696 - DNA, 100 bp, Homo sapiens
cagcaagacgctgcccgccatcgagctggaccgagagcacagggtggcaggaatcttcccccgcctatccttcaaggacaagtccacgtatatcgagtcc

SEQ ID NO: 748697 - DNA, 132 bp, Homo sapiens
gatgacatcaagcacacgactcttggtgagcgaggagctctccgagaagcaatgagcgcgatgtacaatacggtgtggagtatggaccgcgatgacgcagactggagggaggtgatgatgccctattcgaca

SEQ ID NO: 748698 - DNA, 99 bp, Homo sapiens
tcaagaagccaatctattttggattctttggagactgtggccaagacatgcatgtcagagcgggagcgacaggtgatgaagaagctgaaggaggtggtg

SEQ ID NO: 748699 - DNA, 82 bp, Homo sapiens
gaaaattacctaaatgcactctttcgaaagaaaggtggagtctttcattttggatcaggatgatttggaaaatccaatgctg

SEQ ID NO: 748700 - DNA, 51 bp, Homo sapiens
gagcagtaagggactgagctgctggtaatggtaactcgggatttgaaggac

SEQ ID NO: 748701 - DNA, 100 bp, Homo sapiens
gtcctctgctgcatcatgatgtcaacaaccgtggctcacaagatgaaagagcacctcttggataagcacaagaatacagagagcatggtggagcttctgg

SEQ ID NO: 748702 - DNA, 82 bp, Homo sapiens
tgttctcagatggctgataatggagaaagatcacagcagtgttccaagttctaaagagaatctacctgttactcgtattttg

SEQ ID NO: 748703 - DNA, 82 bp, Homo sapiens
gcagtggggacgagctttgaaagaacttgccagacttaaacagagagagcaggagattcggatgggtcagatggctatggga

SEQ ID NO: 748704 - DNA, 100 bp, Homo sapiens
taccgcagcatccaagtcggccctggtacttcctatttaacagacattgtgtggtgggctggcacaatcgcaagtaagtagcctgtgtggcgaagtctgg

SEQ ID NO: 748705 - DNA, 82 bp, Homo sapiens
gggaggcaccatcgggctgctctatgtgtttggacagagccctaaataagtcacacagcaccctgaaagtgattccctggtc

SEQ ID NO: 748706 - DNA, 110 bp, Homo sapiens
agtaaaacaaggtgcagagaatatgatacagatgtattcaaatggatcttcaaaggaggaacagacacctttacatattgcctcccgcctgggtaagacagaaattgtcc

SEQ ID NO: 748707 - DNA, 74 bp, Homo sapiens
ggtgtacagccttgtgcctgacaggaccgtggccgaccggcagctgccagagactgctgctactttgaaacgta

SEQ ID NO: 748708 - DNA, 75 bp, Homo sapiens
attcagctcaggaccaggcaccttctgtggaagatacttggtgcttgaaaaactgaagaaggaagacgctgaccg

SEQ ID NO: 748709 - DNA, 100 bp, Homo sapiens
caaatgcagaggaagaatttttctatgaggatttgcatgggcaactgatttgtctacagacttagaaagtcaactctctgttagttgtaaatgttatgag

SEQ ID NO: 748710 - DNA, 100 bp, Homo sapiens
ctttcccgagggctaccacaaaattaaccgggacactccatcgcctcagggcgcctcggaaaccaggagatcatgagcttgattgcacattgatccaacc

SEQ ID NO: 748711 - DNA, 90 bp, Homo sapiens
ggaaacttcaccaagagcctcggcagctccagagcgacgggaaacgaaagatctttgtggagttcacctctgtgtttgactgccagaaag

SEQ ID NO: 748712 - DNA, 98 bp, Homo sapiens
aggcctccccagccacgtggaactgtgaatgaaaactttgccattgatttgatagcagagcagcccgtgagcgaggtggagactcgggtgatagcgtg

SEQ ID NO: 748713 - DNA, 86 bp, Homo sapiens
ggggactccaaaagccattactacatctcgccatcttcccgggccagggagctcgaggccatgagcagatataccagcccagtgaa

SEQ ID NO: 748714 - DNA, 98 bp, Homo sapiens
cctgcaagatactgagagattgaagcatgctctggaaatgttcccagaacattgcacgatgcctcctggacagagcgggatgccaccagcttgtccaa

SEQ ID NO: 748715 - DNA, 75 bp, Homo sapiens
aactgaaggactctgaagctgaggtctgactcccagcaccgcttctggaagcccagcgaggtggaggaggaagtg

SEQ ID NO: 748716 - DNA, 82 bp, Homo sapiens
cgctccctctgctcttcctcccttcgctcgcaccatggtgtcgtgaaaactacccctaaaagccaaaatgggaaaggaaaag

SEQ ID NO: 748717 - DNA, 87 bp, Homo sapiens
cctgcagctgctgctgcggctctcactgtgcgggctgctgctccagagggcggagtgggctcgggatgagtttgaaggcctcttcaa

SEQ ID NO: 748718 - DNA, 111 bp, Homo sapiens
tccctgcctcgcagcagatgttccctgtcactcagtagtattagaaaggaagatatccacacgacaaagtagagaggagctgataagaaggggagtgcttaaggaattgcc

SEQ ID NO: 748719 - DNA, 100 bp, Homo sapiens
tggatcgtggacaaacagcacgtgtatatcggcagtgccggtttggactggcaatccctgggacagcagctgatttagaagaaagttttaatgaacatga

SEQ ID NO: 748720 - DNA, 100 bp, Homo sapiens
gccagttccctgctgaagatggccagatccccttgtctgataaccagttcaggatgtccatcctggaacgactggagcagatggagaggaggatggccga

SEQ ID NO: 748721 - DNA, 74 bp, Homo sapiens
tttttccttcctaggagaaatcgaggagctgcggctctaccccccggatgttctgtgccaaggtctttgtggct

SEQ ID NO: 748722 - DNA, 49 bp, Homo sapiens
tgaaaaggaagttttctggaatgggttggcttcatgagttgggaaagag

SEQ ID NO: 748723 - DNA, 88 bp, Homo sapiens
ccgagctccagccgaaggagaagggggtttttcagaagaagtgaagtcaagatgaagaaccatttgcttttctggggagtcctggcgg

SEQ ID NO: 748724 - DNA, 100 bp, Homo sapiens
gggaggggcccacgactctgaccagcacccacactcaggctctggccgcagtgtcctgtcattcgagtcaggtgtgcctaccgcatgttgccgctgctgt

SEQ ID NO: 748725 - DNA, 75 bp, Homo sapiens
gagaagcccaactaaagccccacatttgcagctcattgaaggaaagatgctctacccatggtaccccaggaccag

SEQ ID NO: 748726 - DNA, 55 bp, Homo sapiens
agaagaacaaggaagcggagaggcaagagcgtggtgcctgagaaatgaaggtgtg

SEQ ID NO: 748727 - DNA, 76 bp, Homo sapiens
ggaataggtgtatcaagtaatggtgcaaagcctgaagcatgtggagaccccaaggcaaaaccatcctatcttatcg

SEQ ID NO: 748728 - DNA, 82 bp, Homo sapiens
caaggacacggtctacaccgacttcgacggtggatccataaagaacccagccaacccgcagagggaggggaggggctgagct

SEQ ID NO: 748729 - DNA, 75 bp, Homo sapiens
cttactcgattttccccacagcacacaatcacaaggtttacatctggcacaaacgtagtgaactgccaattgcgg

SEQ ID NO: 748730 - DNA, 91 bp, Homo sapiens
ctcgaagtgcgcaaacttgacactcaccctgaccggctactgcagcactggggtgtcagttgttggtccgacccagaacgcttcagttctg

SEQ ID NO: 748731 - DNA, 90 bp, Homo sapiens
gtggacccttggagccatcctctacaggacccgctttctaccattaaggagcctcctcaacaagcccaagagtgagatgaccccagagga

SEQ ID NO: 748732 - DNA, 101 bp, Homo sapiens
gaagaatgtggctaccagcgaaggaatacaggagtttccagaaaatataaaaaattgtaaagttttgacaattgtggaggccagtgtaaaccctatttcca

SEQ ID NO: 748733 - DNA, 98 bp, Homo sapiens
tgcccttgcccggactgctaaagatgcagctatttacagtggacagaaactgaaggggtgaaagaaaacccaagattttcgacaatgaagccaaagac

SEQ ID NO: 748734 - DNA, 50 bp, Homo sapiens
catgtccttcttccggcggaaaggctctcaataaacaagactgggtagat

SEQ ID NO: 748735 - DNA, 75 bp, Homo sapiens
tccgggccggagtacgtcgttcccgctgcgctaggggaagcgggcagactaatagggatgccaaaggaaaaatat

SEQ ID NO: 748736 - DNA, 100 bp, Homo sapiens
tcgcctggaggaccagtatttcccatggagggacctgaaggagaagaaggagaaggtggaggagaaggcaagccggaaagagcgaaagaaagaagtggtg

SEQ ID NO: 748737 - DNA, 107 bp, Homo sapiens
ttcaagggatggccggctcctctccaccgtcatccgtgccttggacacaccgagttggtgaggtaacatacgtggagctcttaatggacgctgaaggaaagtcaagg

SEQ ID NO: 748738 - DNA, 101 bp, Homo sapiens
gacgaggaatcagctttgaagtgggagcccagttggaagcccgggaccgtttaaaaaactgagatgcgaagtgtgggaagatccagtgtcagagctctgag

SEQ ID NO: 748739 - DNA, 100 bp, Homo sapiens
agcattctccagggaaaggatgacatatttttggacctgaaacagaaattctggaacacctatatggttatcaactggcaaacatctcttcacattccac

SEQ ID NO: 748740 - DNA, 96 bp, Homo sapiens
ggccctccgtcccgccccggccggctggcggtcacctggcacaccagcgcccgcaggatgcccaggtgaaattgatcttcaaattctctccaaagt

SEQ ID NO: 748741 - DNA, 100 bp, Homo sapiens
agatgatggagatttgcctgtgttctaatacccgatttacaattacattgaactacaaggatcccctcactggagatgaagagaccttggcttcatatgg

SEQ ID NO: 748742 - DNA, 101 bp, Homo sapiens
gccctctctatgatatgctaagaaagaatcttgtcactttagccactgctactacaggccttgctgcagcacacgtctgagcaggaggagatgcgggcgtt

SEQ ID NO: 748743 - DNA, 90 bp, Homo sapiens
cattcgagggcggatcctctctggcatggattccgtgaaggaacaacacctaaacccaagagggcagctgttgcagcatccagttcatct

SEQ ID NO: 748744 - DNA, 75 bp, Homo sapiens
gtgacatctttcagaaagagatgttgagaatgggaattcatattcctgaaaagagctgttgtcaccatcaccacg

SEQ ID NO: 748745 - DNA, 98 bp, Homo sapiens
aaccgcaaccattgacgccatgtcgggttattcgagtgaccgagaccgcggccgggaccgaggacatagggtacctccaactttccggggtttcagaa

SEQ ID NO: 748746 - DNA, 100 bp, Homo sapiens
gcggcggcggccgaggaggaggagggggaagcggcggcggcaaagggatcaagtcttccataccagggaccaggccaaaaccagactgccactgccccta

SEQ ID NO: 748747 - DNA, 124 bp, Homo sapiens
cagagtttgatcgactgaatgagatcaaaggtcacctggaaattgccttattggaaaaacatttcttaccatccagcacgtgtatggtgcccagcaccccccctttgatccactgttacatggc

SEQ ID NO: 748748 - DNA, 75 bp, Homo sapiens
ctgggtgttgcacagagatttgttgcaggaccagctctgccccctaattataaaagcagtagttcagattcatca

SEQ ID NO: 748749 - DNA, 113 bp, Homo sapiens
cggcccggctgcagcgagcgctggacggagaggaaagcggttctttggcatggacacaagttcagtgggaggattagaattgactgatcagactcctgttttattagggagta

SEQ ID NO: 748750 - DNA, 50 bp, Homo sapiens
ggccttcacccagatctcgagggagattgcccaaaataaactctacatgg

SEQ ID NO: 748751 - DNA, 100 bp, Homo sapiens
gccttgccccttttggaacagaaacaggcatgaggagctcgaccgtctggccagggagaaggatgcagtgctggtggcggtgaagggagcccacgtggag

SEQ ID NO: 748752 - DNA, 98 bp, Homo sapiens
ggaaactgagggagtttccccggggagcggccaaccacgacctgacggacaccacccgggcgggtaaaaatgtctccatcgtatcatcagtccaaagg

SEQ ID NO: 748753 - DNA, 100 bp, Homo sapiens
tggctcctaaagattttgcagaacagagatgacatgccagcccagactttcatttaattggccttggtcctcacagctccaaaaagaaacaggatctcga

SEQ ID NO: 748754 - DNA, 142 bp, Homo sapiens
gagtccccggggacacctcggcacgcagcggagatgcctctttttgccaccaatcccttcgatcaggatgttgcgccacccaagactgtcaaaccccctgaggatcaactgaagtcggagaacctcgaggtgtccagttcct

SEQ ID NO: 748755 - DNA, 82 bp, Homo sapiens
agctgcacgacgtggacttctacaaggcccgcatggaggctggaaatggaacatttaacagggcaaaactgttgaacgttgg

SEQ ID NO: 748756 - DNA, 50 bp, Homo sapiens
attaaaaccagggctccacagttaggagcaggggaaatgctgtctgtagc

SEQ ID NO: 748757 - DNA, 100 bp, Homo sapiens
cctgagcaatagcacgaggcctgttgtctaccaagtgcagtttaaatagctgctggaggctcagctgcaggcccagagcctggagcatgaggaggaggtg

SEQ ID NO: 748758 - DNA, 96 bp, Homo sapiens
cgactacaaggagatcgaggtggaagagaaagccaaacttggccctgctggcaacaaagtcatcagtccctctgaagacaggaaacaaccttccaa

SEQ ID NO: 748759 - DNA, 83 bp, Homo sapiens
agaactactccgtgacctggtacatcgccgagttcttcttgtgaaaatgccattgtgtgctggaaacctggcaagatggaaga

SEQ ID NO: 748760 - DNA, 80 bp, Homo sapiens
ggcgcggatggatccaacatggcggcgccgagcctgagccgagaacaatgcagatcttcgtgaagactctgactggtaag

SEQ ID NO: 748761 - DNA, 100 bp, Homo sapiens
taaagtctaccttacagggtataactttacattagcagatatactattgtactatggacttcatcgctttatagtgccccctgataagtgccgatgtgcc

SEQ ID NO: 748762 - DNA, 75 bp, Homo sapiens
accatggggactgtgcacgcccgggaacttggatacgattggtgttgctgttgatttgattcttctgtttcgtga

SEQ ID NO: 748763 - DNA, 100 bp, Homo sapiens
agcctcccatcttccaccgacaagccgtcgggaggagtatttgaagacttctgagcggaggagtcgcatgtcagagctgtccttcagaaagataaatcag

SEQ ID NO: 748764 - DNA, 100 bp, Homo sapiens
ggtcatctgtatgcataatatggaatgttcttaacccagaagtagctgaatgtgttactccattgctgaggagtgtagcaggacccagtgctccataaag

SEQ ID NO: 748765 - DNA, 74 bp, Homo sapiens
cagtgttgcggcgcgggatggcagttttacagtctccgcacaggtcagcccaaggccaaccccactgtcactct

SEQ ID NO: 748766 - DNA, 83 bp, Homo sapiens
ctactccaaatctttcgtcaaacacagtttcgaggtccagatggctgtggaggccaagtttgtccaggacaccctgaaaggag

SEQ ID NO: 748767 - DNA, 75 bp, Homo sapiens
cgaggcaggactgtgtcaaggagatcggcctcttgaagatacaaactggactctcaggacaaaacgacaccagcc

SEQ ID NO: 748768 - DNA, 50 bp, Homo sapiens
atcggcgccatccttcagaatgcagcaatccaagtcctgggcactgtcaa

SEQ ID NO: 748769 - DNA, 82 bp, Homo sapiens
cagagagggaagagattcagccagcacactcctcgcgagcaagaatccacattcatctcaatggaaggatcctgccttaagt

SEQ ID NO: 748770 - DNA, 82 bp, Homo sapiens
gagaaataagaatggctgtagaggaacttcagtctataataaagagatgtcccccaaatacatcaagatgtttgtactggat

SEQ ID NO: 748771 - DNA, 75 bp, Homo sapiens
cccgggacgctagagcaggcggttcctgggctgctccgttcacacaaaagatgttggacaatttctacaattttg

SEQ ID NO: 748772 - DNA, 100 bp, Homo sapiens
tgtttgattttactcatccatgtgaccatgaggaaatgagagaaatgcttacacacagaaatgcaaaacctgtgataagtcctcttgaacttcggatgga

SEQ ID NO: 748773 - DNA, 75 bp, Homo sapiens
cgcggcagggtcccgcatggcggcgcacaggaagcacggactcgctcagcagcagcctgaaaacttgctacaagt

SEQ ID NO: 748774 - DNA, 100 bp, Homo sapiens
tggagagaggaggcaccgtcccagccgaccttgaggctgccgccgcgagtctgccatcgtccaaggaggtggcagtgtccccaactcctgcccagccagt

SEQ ID NO: 748775 - DNA, 98 bp, Homo sapiens
ccccagtcctccgccccctcgcgtcgcggccctgggcgggcgccgcgagccgggttgtttgcattcgctccacttggaatgctctctctccaaagctg

SEQ ID NO: 748776 - DNA, 49 bp, Homo sapiens
tctcacccccaggatgtcatcgaggaaaagcaccaaggattctcttttg

SEQ ID NO: 748777 - DNA, 80 bp, Homo sapiens
ccggagcttctcagaagacagagggttttcttttgagattctgctcagcaatcctcagatgtggtggttaaatgattcca

SEQ ID NO: 748778 - DNA, 101 bp, Homo sapiens
cgcgatgcccaccatgcggaggaccgtgtcggagatccgctcgcgcgccgaagaatgaagaaggagccccacaggaaggaattctggaagatatgcctgtg

SEQ ID NO: 748779 - DNA, 88 bp, Homo sapiens
gagttgccaatcattatcacaggttcagaagatggttatggaggttttgatgactatggtggctataataattacggctatgggaatg

SEQ ID NO: 748780 - DNA, 75 bp, Homo sapiens
tcttgaatgactggaaactgattggaaactctttgggaaagccactcgaaaaggagattttggatcagctggagt

SEQ ID NO: 748781 - DNA, 96 bp, Homo sapiens
gggtgtctttccccttccgtgtgtctcacgtacctggcagagtccacaggcgaaaagatattgtacctgtggatgcatcttatgaagtaaaagaac

SEQ ID NO: 748782 - DNA, 48 bp, Homo sapiens
acggcggcagcagcggcattcaggtggtgaaggtgggtctggttgaag

SEQ ID NO: 748783 - DNA, 101 bp, Homo sapiens
agtcaccactggacctccaaggaagccacgtgcagacatctacaaccttcgatctcctgacgagagtctactcttcatcttgtgttgagacttcgtggtgg

SEQ ID NO: 748784 - DNA, 90 bp, Homo sapiens
ctctacaactgggaggtggccatcttcggaccccccaacaccctctacgaaggcggctacttcaagggctggtgaattaccatatctccg

SEQ ID NO: 748785 - DNA, 75 bp, Homo sapiens
ggcggacagtgcggaactaaagatagggccagatttgagtgtgtgaatttttgagtgaaacctggaacccaaatg

SEQ ID NO: 748786 - DNA, 75 bp, Homo sapiens
gcctcccccgtccggtccctctctccacggtaagggtgtctggaggtcgcagccgcctgcatctcattgatctcg

SEQ ID NO: 748787 - DNA, 74 bp, Homo sapiens
cgggaagtgtgaagcggccaatggcacggaggcctgcgtgatgctttggagtctgcaatgaagaatggcctgtg

SEQ ID NO: 748788 - DNA, 75 bp, Homo sapiens
ccgggacgccggcgccgccgcggagagggcaccggatgagccccgctagggccgccccgcgctgagagcccagcc

SEQ ID NO: 748789 - DNA, 100 bp, Homo sapiens
gaaaattttccttgacctttaggtgcttttatattcatctcaaaaacaaaattctgaactcaggacttggcaaggactatgttcggagtgaactggagtt

SEQ ID NO: 748790 - DNA, 100 bp, Homo sapiens
tgatgaccctcttccaggttacatacagcttacatcttgcatcctcaagcgttatgatggttaacggtgatcacaggataggtatttttgccaagagagc

SEQ ID NO: 748791 - DNA, 82 bp, Homo sapiens
cgcgcggaggcggaggcttgggcctaatgacagtgaagtggacatgtttggtgactatgatagctttactgaaaactccttt

SEQ ID NO: 748792 - DNA, 52 bp, Homo sapiens
ttcaaacccaaagaggtaagcattcaggaggctgtgacattcaaggatgtgg

SEQ ID NO: 748793 - DNA, 100 bp, Homo sapiens
agatgattgagaagaagcggaaaaaagaaaactctagaagtctggatgtcggtgggcctctgagatatgccgtttacggtgttttggagagccatttcca

SEQ ID NO: 748794 - DNA, 83 bp, Homo sapiens
gccgtatgagtcctacacagggcagaatgtgaagctacgtgcacgacctgcgacagcagatgacagccttgcagagccagctt

SEQ ID NO: 748795 - DNA, 98 bp, Homo sapiens
cgccgcgccaggccgggcggcagaaattattcttgacagaagtattttaaaagaaaaatctttacgatggcctcagcagtacttagttctgttcccac

SEQ ID NO: 748796 - DNA, 50 bp, Homo sapiens
cggcacccattacactgatgctcggacgcaaagtaccacatgcagcgctg

SEQ ID NO: 748797 - DNA, 100 bp, Homo sapiens
gaaaacattcctgctctgaaagctcttcttgaaaaatgcaaagatgtagatgagagaaatgagaaactggaggaagcagcatctcgtgcagcagaagagg

SEQ ID NO: 748798 - DNA, 75 bp, Homo sapiens
gttcattgtttgtcaccacaaaaaggacagttcacacaaaagatgttggacaatttctacaattttgcttcatca

SEQ ID NO: 748799 - DNA, 82 bp, Homo sapiens
tcctccagacctctcggcgcgggtaactactccagacccccagcgtatagtggggtgcccagtgcaagctacagcggcccag

SEQ ID NO: 748800 - DNA, 90 bp, Homo sapiens
gcctggcaggacgtgaaggggaagaggcccaccctggagtaaccctcactggagaatccagaggtggtcctggctctgccatatgacacc

SEQ ID NO: 748801 - DNA, 97 bp, Homo sapiens
aggagtcagccgccggtccgagccttcctgctcatctccaccctgaaggacaagcgcgggacccgctatgaggttcgatacaagaggctgttttcct

SEQ ID NO: 748802 - DNA, 134 bp, Homo sapiens
gttgacgtccatttaccagtcttccctggcaagattcttctgaattgtgctgccttggccaaaagagtcaccaggagactaaagtccatcaaaaacatccagaaaattaccaagtctatgaaaatggtagcggc

SEQ ID NO: 748803 - DNA, 100 bp, Homo sapiens
cattcagggcctcaaggagaagtttccacaggaggaagctatcattgacaagtatataaagctggttaagatgaaaggttgtatcaaagttcttaaggac

SEQ ID NO: 748804 - DNA, 87 bp, Homo sapiens
attattgaagcctgtgatgtgtgtctgaaggaggatgataaagctgataccccaatgtccttctttgactttgtggttgatcctcat

SEQ ID NO: 748805 - DNA, 74 bp, Homo sapiens
caccatcccgttttccagcaaggatgggatcgagcggtccctgggcgtgcagagggtctacaccctgcaggatt

SEQ ID NO: 748806 - DNA, 75 bp, Homo sapiens
ggaccctggaaaacctggccctcttcaatttctgacaaaagctgaggcaacttctcctagaatctcaatctcagc

SEQ ID NO: 748807 - DNA, 75 bp, Homo sapiens
gcccgaccccgtcccgaccctggccgccccgagcggagcctggagactgtgccctgtccacggtgcctcctgcat

SEQ ID NO: 748808 - DNA, 98 bp, Homo sapiens
atccttcgaaaagctgccaagttgaaaatggacgagtaatcgcctgctttgattcattgaaagaagcaagaggctactatgagcagactggagttgga

SEQ ID NO: 748809 - DNA, 100 bp, Homo sapiens
caatcagtgaagaaaaactccgtgagatatttgggctttatggacagaccacaggaaaggtcaaaatgcagatcttcgtgaaaacccttaccggcaagac

SEQ ID NO: 748810 - DNA, 101 bp, Homo sapiens
agatccttcaaaattaaaagaggagcagcatggcatttcagtcactggtttgcagagtccagttgacttgctggtgaaggtgggggaggttgtggacaagc

SEQ ID NO: 748811 - DNA, 50 bp, Homo sapiens
ccacagaagccctccgagcccagcctacagcctggctcccgcgacgccgg

SEQ ID NO: 748812 - DNA, 99 bp, Homo sapiens
agcgcgcggagaagaacggggagccagtgacttctgacagctctctccatggaaggaggcggcggccgcgatgagccttcagcctgccgggcaggggac

SEQ ID NO: 748813 - DNA, 100 bp, Homo sapiens
gtcgtgatccagaagtccagagctgaggactgcctgtttgcaggtgtgaccatgaagctcatggatgaggtcgccgggatcgtggctgcacgccactgca

SEQ ID NO: 748814 - DNA, 50 bp, Homo sapiens
ctttttgcaccccagggagctgctgctgactatgctccaggaagcccagg

SEQ ID NO: 748815 - DNA, 90 bp, Homo sapiens
ctcctcgccagcagccgtccggagccagccaacgagcggttgtggcagcactgcctgaaggtatgagaccagattctaatctttatggtt

SEQ ID NO: 748816 - DNA, 50 bp, Homo sapiens
tctgcaggcctttttccctggactgcaggacacagcattgttggttttgc

SEQ ID NO: 748817 - DNA, 83 bp, Homo sapiens
gggagtcgtaaacaaccctgaagagaacagccaggcctggcagaggtgtccaggacctgcctgctcacggttcgtgtcctgca

SEQ ID NO: 748818 - DNA, 100 bp, Homo sapiens
aagccctgaccttggcacctgccatccgtgacaaactggacatccttggggctgctgagacagataacggagggcagactttggcagggggtaataactg

SEQ ID NO: 748819 - DNA, 75 bp, Homo sapiens
gccgagcccgacctcgggcgccccgccggtcacctccgcgcggacaccagccctgaccctctattctgcaccctg

SEQ ID NO: 748820 - DNA, 99 bp, Homo sapiens
cttcggtggactccttcggcagtccacccaccgccgccgcctcccagctggagcagatccgcagggacatccgagacttccggtctagcgcggggctgg

SEQ ID NO: 748821 - DNA, 82 bp, Homo sapiens
cggcgcccgcgccgagcgccagccagaggagaaggcagagcccccccaggctatgaatgccctgatgcggttgaaccagctg

SEQ ID NO: 748822 - DNA, 109 bp, Homo sapiens
ctagaccctcagaagagatagaaaatggcagtagttcttcagatttctggagaccagaaggccaaaatcaaaagtatgggcaggcttgatttctttagaagactccagc

SEQ ID NO: 748823 - DNA, 75 bp, Homo sapiens
cctcatggggaaaatctccccggtgactttcaggttctgccatcttgaaacccccattctgtttccagcccagaa

SEQ ID NO: 748824 - DNA, 100 bp, Homo sapiens
ccaagtacatgatgtggttccagaggcacgaggagcccaagaccatcactgacgagtttgagcagggggtccactggacggggcctgagctacaacttca

SEQ ID NO: 748825 - DNA, 97 bp, Homo sapiens
aattctgggcttccacacaactccagtgctaactcaacagattgagaggatccagaatccagatctctggaatagctaccaggcaaagaaaaaaact

SEQ ID NO: 748826 - DNA, 75 bp, Homo sapiens
caaagcttatgaaaaagttggatgtcagttaagggttcgttaccgtgaacgcatcaccattcttcgagggaatca

SEQ ID NO: 748827 - DNA, 89 bp, Homo sapiens
gcagagatcagcaatccttggctcactgaggaggtttgcaaagaacagtctgaacttgatcaagatttggatgatgttgaagaagtaga

SEQ ID NO: 748828 - DNA, 100 bp, Homo sapiens
ccagcttcttcttggggaaggtgtgtttcctcgccacaggtggtgccacacctccctggatgatccaagatgaagaatacattgctgggaaccaagaaat

SEQ ID NO: 748829 - DNA, 96 bp, Homo sapiens
gccgcgaaccgcagtatcatgctggccaagaagatcatcattaaggacggaggcacggtatgatgatgtcaaacgtgatgctgatgctacagttac

SEQ ID NO: 748830 - DNA, 82 bp, Homo sapiens
cggccgtcggagacatgggagacccggggtcggaaacaatgcagatcttcgtgaagactctgactggtaagaccatcaccct

SEQ ID NO: 748831 - DNA, 100 bp, Homo sapiens
cagggaagaaggaatcatcgaggcatgggggtccacactgcaatgtttttgtggaacatggttgagactgagctaaagttaatctgttgtgacattctgg

SEQ ID NO: 748832 - DNA, 100 bp, Homo sapiens
atttgctgctcctttgaaatctttggtagctactttcattgtgaaagatcttctcatgaatgatcgggctgcctctaagaatcaaacttcactcttggga

SEQ ID NO: 748833 - DNA, 100 bp, Homo sapiens
tgtgaaagactgctcctggtgcagatttggagcaagaggtggtggtggccttcccccgaagaaatttggtaatcctggggagcgtttgcgtaaaaaaaag

SEQ ID NO: 748834 - DNA, 75 bp, Homo sapiens
ttaaatgccgagaaggccagtacggaaatcactcagaaaatcctagaagctgtggggaacattgccggctcttcc

SEQ ID NO: 748835 - DNA, 71 bp, Homo sapiens
aatgcaaagactgtgaggagaggtattacatgaaacctttcctaaacatacatttctgatgaacggcttaa

SEQ ID NO: 748836 - DNA, 83 bp, Homo sapiens
aggatgatgaggatgatgacaacacgttgtttgatgccaatcatcctcgaaggatttttagactctgaggagcagttggagct

SEQ ID NO: 748837 - DNA, 100 bp, Homo sapiens
caaatgtaaaaagaagaattgcacttacacacagataacagttggagacattggagcactctttaagattcgtattggtcataccaactctggatcctcc

SEQ ID NO: 748838 - DNA, 60 bp, Homo sapiens
ctggagcttgacgcgctggagcttgagaggaaagatgaatgggagggctgattttcgaga

SEQ ID NO: 748839 - DNA, 75 bp, Homo sapiens
atacaccttttccacagggaattgagttggttgcaattgtagctcaagacttggcagcattccatactgcctcat

SEQ ID NO: 748840 - DNA, 100 bp, Homo sapiens
gaatccagaattaaaaagctccacaaattgctcagttacaatctgcccttggaactggaaaacctgagaccctgcctttaaagctgccaacggctccctg

SEQ ID NO: 748841 - DNA, 74 bp, Homo sapiens
gttggtgagagcttcacagtgcagcggcgagttggaatcgaagcctcttaaaatggcagatgacttggacttcg

SEQ ID NO: 748842 - DNA, 114 bp, Homo sapiens
gggaccagctctttcggaacccgcaccaagctctgctccacactgccaaccggccagaggacgagtgtggattgctgtggaaactgcagcgacagcgaggaagagctccccacc

SEQ ID NO: 748843 - DNA, 108 bp, Homo sapiens
agaccctggagcctcagttggaagcagccgatccagcctgcggagcctgtggggcagggaacccgagcgtcatgttagggtgaagcagaggacctcagtgctgaacat

SEQ ID NO: 748844 - DNA, 51 bp, Homo sapiens
ccctctgctgggcgtcctgttcttccagggccctcgggaccaaggatcacg

SEQ ID NO: 748845 - DNA, 90 bp, Homo sapiens
gtctgctcttctgcctcttgatctccgccaccgtcttcaggccaggtggcaatcactgggcagcttggtgtgaagccccaaacaggcaac

SEQ ID NO: 748846 - DNA, 74 bp, Homo sapiens
ttaaaggactgatttttagaactccacatttgaggtgccaaatctgattccagttttgatgttcaaattgggaa

SEQ ID NO: 748847 - DNA, 100 bp, Homo sapiens
ggtagtgaataccgggagtcctggccccctaactcaacattccttcctagtagcttctgtatgtacactacgttgatagccatgactggatggtatatgg

SEQ ID NO: 748848 - DNA, 100 bp, Homo sapiens
aaaatagagtgtgtatcagcagagaccaccgaagactgcatcgccaagatcatggatctcaaagatttcatgagacaagctggggaagtaacgtttgcgg

SEQ ID NO: 748849 - DNA, 96 bp, Homo sapiens
ccgggacgccgagtatggcgccagcccggagcaggttgcagcgagtaaccagctcataaatcacatcgaacagtttttggatactaatgaaacacc

SEQ ID NO: 748850 - DNA, 100 bp, Homo sapiens
tctgaagatgattacacggcattaatctcccaaaatattctagaaggggaaaagctacttcaagagataatagtagcagaatttcacaaaaaaatcaaag

SEQ ID NO: 748851 - DNA, 75 bp, Homo sapiens
aaggatggtttagaaatggaaaaatgtcacaaacggcggcgtattgctctgaagaagcagcgtaccaagaaaaat

SEQ ID NO: 748852 - DNA, 74 bp, Homo sapiens
ccattaaccagtacctgcagcaggaaaccactgattgcttgtgtggagaaacagctattaggagaacatttaac

SEQ ID NO: 748853 - DNA, 100 bp, Homo sapiens
cacccacaaagattgaacgacatgccatgtactgcaatggtctgatggaggaagatacaggtgctatacgtggatgacctgcttagttttaatttttgga

SEQ ID NO: 748854 - DNA, 74 bp, Homo sapiens
caatcggccccagcctgctcatagcttttaagaagtacctgcaagaaacctactcaaagcaggtcaccagccag

SEQ ID NO: 748855 - DNA, 75 bp, Homo sapiens
ggaaggagactggatgatagaattgttcttgctgtgttgcccaggctggtcttgaatcctgaactcttgagctca

SEQ ID NO: 748856 - DNA, 75 bp, Homo sapiens
caccagattccatgccattcagggattgtatgtgacactgcttttagcccaggccatgctcttgtgatccctctg

SEQ ID NO: 748857 - DNA, 97 bp, Homo sapiens
cccagccacccatcaaatcagagagaaggaatccaccttcttacgctatggcaggtgacaagtttcggttggtcatagctagtaccttgtatgaaga

SEQ ID NO: 748858 - DNA, 83 bp, Homo sapiens
cgagcttatgccaaccacatgatcaaatatggccgcgtggaaagtgtcaaaattcttcccaagaggggatctgaaggaggagt

SEQ ID NO: 748859 - DNA, 100 bp, Homo sapiens
gacgaagcctttgaagaattaagaagagccagctgctccccgggaacaacttcaccaatgagtgcaacataccaggcaacttcatgtgcagcaatggacg

SEQ ID NO: 748860 - DNA, 96 bp, Homo sapiens
cctgggcccccactgtccccaggcctcaggtgcagcggaactgctgcctgacgctctgcaacttcagcatccccgaggagctggaattccagtacc

SEQ ID NO: 748861 - DNA, 98 bp, Homo sapiens
atagctgtggatcgagtgaacgctgctgatgggagataccatgtcctgtttctcggaacagtgccctctggtggtcagaagatgctgtgctgtctcgt

SEQ ID NO: 748862 - DNA, 100 bp, Homo sapiens
gagacaccgctatcacagctgctgcaatcgcttgggagagctcctgggccacccctcctttcaggtcaaggagctcgtgggcgacgtgttgagagacacg

SEQ ID NO: 748863 - DNA, 75 bp, Homo sapiens
tggtcctcaaagccagacacttgccgaagatggatatcaccggtctctcaggtaacagtctcgctctgttgccca

SEQ ID NO: 748864 - DNA, 101 bp, Homo sapiens
tgttgtcttacaactgactgctctgtgtactgttcattgttctcatcaaaacatgaactgatactggtagacacagtctgggccctctcttaccttactga

SEQ ID NO: 748865 - DNA, 87 bp, Homo sapiens
ctggatatgcccgttcagtttacagttcattttttgcttggtttggaaaaatttcattagagcatgttacaccagacagctatattc

SEQ ID NO: 748866 - DNA, 50 bp, Homo sapiens
agtggagacaaagagatgagcaggaatccagatcttacataagatggaag

SEQ ID NO: 748867 - DNA, 78 bp, Homo sapiens
gactcagtcccatcactccaaggagagaaggccattgaacacccagttcgaaccaatcagattccacgtcagattcct

SEQ ID NO: 748868 - DNA, 90 bp, Homo sapiens
catctgcaaagaaggttaaatcaggatggctggataaactctctcctcaaggatactctggatgaatattttgaatatgatgcagaggag

SEQ ID NO: 748869 - DNA, 105 bp, Homo sapiens
agtgacgttttccacaggcatcaaaatggttggcgtgcagtggtgtgatctcagctcattgcaacctctgcctcccggactcaagcaatcctcccacctcagcct

SEQ ID NO: 748870 - DNA, 50 bp, Homo sapiens
ctgatattcagccagttcttgaagcaagccatgaagaactgtactcaagt

SEQ ID NO: 748871 - DNA, 97 bp, Homo sapiens
gaagaagtcaccgtttctacctggatgttttcactccagaatgcaaattcaaggaatctgtgtttgaaaactactatgtgatctattcttccacact

SEQ ID NO: 748872 - DNA, 84 bp, Homo sapiens
ccaacgcctggctcggagcagcagcctctgaggtgacttaagagattaaaattaatttggttgctgttggttctgaacaaataa

SEQ ID NO: 748873 - DNA, 75 bp, Homo sapiens
agcaaaggatgagcggaaccttggaaaaggttaccccacagcctatccagcagctgcccctgcctacaatcccag

SEQ ID NO: 748874 - DNA, 83 bp, Homo sapiens
cagagccgggcctagcccagagacatggagagttgctacaacccaggcatggcctatctgcacgcgcagcactacatccaccg

SEQ ID NO: 748875 - DNA, 83 bp, Homo sapiens
accgaggctgaggatgatggtagattgccaggagggtgtgaagacagagaatgaccacatcaacctgaaggtggccgggcagg

SEQ ID NO: 748876 - DNA, 101 bp, Homo sapiens
aaaagctgtttctggaatcacccctagatctttcttgaagacttgaattagattacagcgatggggacacagaagtggaatcaactatgaaattataatca

SEQ ID NO: 748877 - DNA, 90 bp, Homo sapiens
gcatccctgaaagtcccaagtgtcatgaaggaaatgggacatttgagtgtggcgcgtgcaggtgtacccaggaaggatgtgggaaacact

SEQ ID NO: 748878 - DNA, 83 bp, Homo sapiens
gccagacaaacagcccgcccgaccccgtcccgaccctggccgccccgagcggagcctggagctctacgaactcgacggggacc

SEQ ID NO: 748879 - DNA, 75 bp, Homo sapiens
agcttgtgaaggcgctaaggcacatatactcaggggtcctcataaacagtgatgggcccccgacatgaaactggc

SEQ ID NO: 748880 - DNA, 50 bp, Homo sapiens
gtcgcagcgagctggagccgccggaggctaatgtaatgcttgaatatgat

SEQ ID NO: 748881 - DNA, 51 bp, Homo sapiens
ccggagcagagagctggcgagcaagctcaccatggatgatgatatcgccgc

SEQ ID NO: 748882 - DNA, 100 bp, Homo sapiens
cctagaggcctgcggcctgcgcccgcggcgccatggctcacgtcggctcccgcaagcgctcgaggagtcgcagccggtcccggggacgggggtcggaaaa

SEQ ID NO: 748883 - DNA, 97 bp, Homo sapiens
ggagaatgtcaaagttaagtggaaaagcagcggtatttctctgcctcctgtggacaaaaaaaggtgtgggccatgtttgaggattgccccagcattc

SEQ ID NO: 748884 - DNA, 75 bp, Homo sapiens
ctctcgtcttctgcggctctcggtgccctctccttttcgtttccggaaacatggaagctcttcgtgggcggtctt

SEQ ID NO: 748885 - DNA, 80 bp, Homo sapiens
aatcagtgaactgcgtgaacgtctctatgggaaaaaaattcagcaaattgtggctactaatttgccccctgaagatcaag

SEQ ID NO: 748886 - DNA, 100 bp, Homo sapiens
tctacagcagtggttgttgctgaacttttgaagataatggcctgcattttattggtctacaaagacagcaccccatctgctttgatatgattgaagaagc

SEQ ID NO: 748887 - DNA, 100 bp, Homo sapiens
cagagccgcccagccctgccagctgcgccgggacggagcttgaagaaatccgcaaatgtgggatgaaaaacttccgtaacatccaggttgatgaagctaa

SEQ ID NO: 748888 - DNA, 74 bp, Homo sapiens
ccaacagctcattttatgttgaaggcaattctcaagttcaactactcagtgcaggaggagagcgacacttgtct

SEQ ID NO: 748889 - DNA, 75 bp, Homo sapiens
atgacattgtggacagtgacagcgatgctgaggatcgaggaacgttgtctgccctcccaggcccaatacttcaaa

SEQ ID NO: 748890 - DNA, 75 bp, Homo sapiens
aggacatcgtgtataagctggtgcctggcttgcaagacacttcaacagctgcaggagcacttccctatcaggccc

SEQ ID NO: 748891 - DNA, 75 bp, Homo sapiens
gccttggagacacaatggctccagctggaacaagagctgagaccgtggagagggacaacatggaggaggacaatg

SEQ ID NO: 748892 - DNA, 75 bp, Homo sapiens
ggatatgtcaccaggactcctgacaaccaggaaggaggtgtttcatcagtacagacgcctcaccttcccacgcac

SEQ ID NO: 748893 - DNA, 100 bp, Homo sapiens
ataattgaaaaacagtaaagatggaaaaccagttattgaatatcaagaggaggagttgttgggttcgggtttgtcacgtttgagagtgaggacatcgtgg

SEQ ID NO: 748894 - DNA, 51 bp, Homo sapiens
catctcgtccaacgtcggggaagttgtctgtggtggacttgctttgtgaag

SEQ ID NO: 748895 - DNA, 101 bp, Homo sapiens
ctggaagaactcgtcatgctctttgtagcgtggtgcttctgttgctcacagggtatggtcagacaggtccaatttctcagcgagctggttatgatgctgtt

SEQ ID NO: 748896 - DNA, 87 bp, Homo sapiens
aggctgtcaccaggaagtttgtgcatgaagacagcagccacatcattgctttatgtgatgcctgaggaagtgcaccatggagaggag

SEQ ID NO: 748897 - DNA, 50 bp, Homo sapiens
cctggccctgtctaatgcaacagtgcagtgtcacttgtggacagggatac

SEQ ID NO: 748898 - DNA, 100 bp, Homo sapiens
gtcggttggcgcgcaacgggttctaggctgcaggcagctcgaggacccgcggccccgccccggctcggcctggcaggatttctctctgatcaaacggaca

SEQ ID NO: 748899 - DNA, 100 bp, Homo sapiens
atccttgaaagaagaagatggagaagaaatagttacctatgatcatataagcttaccaaagtcagcaacaatatgctacacagctgctttgctcaaagca

SEQ ID NO: 748900 - DNA, 82 bp, Homo sapiens
tgctgacccgcctgaagcacctgcgggcgctgctgggatttaagtgccctgtatgctcaaaatttgtatcctcagatgaaat

SEQ ID NO: 748901 - DNA, 112 bp, Homo sapiens
aaaagaatgggtcaaccaagaacgtcaaacactccaacgattgagagcatttaaagatctggagaatgctggaggagaccttaaggatggccaccaccactatgaaggagct

SEQ ID NO: 748902 - DNA, 100 bp, Homo sapiens
cgacgacttctacatcctgggcagtgggctgtgagaaagatcagtctaaagaaaaggagaagaaagtgaaaaaaacaattccttcctgggctaccctttc

SEQ ID NO: 748903 - DNA, 99 bp, Homo sapiens
cagcaccgcagatgttgtcaaggtggcctaccaggaggccaggggtgtcgccatggacagtcattttgtttactcattcagccctgttgcaggtcccaa

SEQ ID NO: 748904 - DNA, 100 bp, Homo sapiens
gcgacccggtgtgtggcgcgcccagagccccgcgtttcagccctagggaagatatgtgcagcgggggctacagcgagtggggctagatccccagctgcca

SEQ ID NO: 748905 - DNA, 90 bp, Homo sapiens
ctaaaacaccaccaaaaagttacagcacagccagacgttctagaagtgcaagcagtgcttttttaggaccaaaggatatatttccttact

SEQ ID NO: 748906 - DNA, 87 bp, Homo sapiens
ctccgcaccccggggtcccaggaagggcggcccaggatgcagcagtctcggccctggctgctctatgcagtgaatattacatgaagg

SEQ ID NO: 748907 - DNA, 98 bp, Homo sapiens
aagcctccagaggacataccacctccaggatcaggatgcagagatttaatgtgtgccgaccatttccttcagtgctggacaggctgctgtgaagggac

SEQ ID NO: 748908 - DNA, 100 bp, Homo sapiens
ccttcggggggccgcggctggagcgctcggccggcgtgggagcgccaaggccgcagagacggtgccgagacctcaaggccaagggaattttatttgtggg

SEQ ID NO: 748909 - DNA, 75 bp, Homo sapiens
gccagctgcgccgcgtccaggaccttgtgaggcagatgatgaggagtctgatgaggaagctgtgaagaaaaccaa

SEQ ID NO: 748910 - DNA, 100 bp, Homo sapiens
gaatatgatgtggaagcacatggaagctgtgctgaatggtttggtggccactgaggtgttgatgtggttttatgtcggagagattataggcaagcggggc

SEQ ID NO: 748911 - DNA, 100 bp, Homo sapiens
ggagatggcactttaccagaaaaaacatggtattaaactctataaacctctcattctccctgtgactcaggtcgttccaggggtagaggaggcatgaagg

SEQ ID NO: 748912 - DNA, 84 bp, Homo sapiens
agattcgcagtggtcgcttcttctccttgatgtatcggaacagtacaacatctaaagagtaaatttggaaaaggctactttttg

SEQ ID NO: 748913 - DNA, 75 bp, Homo sapiens
gctgaggcttatttgggaaagaaggaagaatcctgtaagtacaatcccaagtattctgttgctaatgacaccggc

SEQ ID NO: 748914 - DNA, 98 bp, Homo sapiens
tgaattacatctggatcagtcccttgaaatcagaatgcggacccagaatgattggagagcaagaagagcaatccacatagaagaagcacagagcaaag

SEQ ID NO: 748915 - DNA, 83 bp, Homo sapiens
gcgagacacgcctgggcccaggtgtggcgtctctgtccccatctggttttagcctcctgacaaggtgatccgggcgggccccg

SEQ ID NO: 748916 - DNA, 83 bp, Homo sapiens
ccgtggcccgggtcactggccagcaccccgaggtgatgtgtccaatctagatcccaacttctcatttgaaggcaccaaactgg

SEQ ID NO: 748917 - DNA, 90 bp, Homo sapiens
ttcctcaaaaccacgcaagtacgaagtagcagagcggatctcaaatccaggaatggtctgccgaaaaccgaccgacccggttgattggcc

SEQ ID NO: 748918 - DNA, 90 bp, Homo sapiens
cgtgagcgctggagcttcatccgggcacttcataagggatccgcagctgctcccgctctccaggttaaacccatccagagtaatggctgc

SEQ ID NO: 748919 - DNA, 96 bp, Homo sapiens
cattatcttaactgaggcacccaaaatggggtacacatctttctggaatgactgcatatcatcaggcctgcgagggggcatcctgatagagctggc

SEQ ID NO: 748920 - DNA, 50 bp, Homo sapiens
gcggatttcgaagagttgagggcggcagcagagacctccggggggcaaca

SEQ ID NO: 748921 - DNA, 98 bp, Homo sapiens
cgggacctatgcctgttttgtctctaacttggctactggccgcaataattccatagtcaagagcatcacagtctctgctccaccgggaactccacgcc

SEQ ID NO: 748922 - DNA, 75 bp, Homo sapiens
gatgttaccacttctgtggctgctaccccactcctgggccgtccctgaagcactttgacttgaatctgcggcagt

SEQ ID NO: 748923 - DNA, 75 bp, Homo sapiens
gaagaagaagcaggatgaactgaaacggattgccagagaattggcagaagtaggagagaagtttgctgaggaatg

SEQ ID NO: 748924 - DNA, 100 bp, Homo sapiens
aaaacgtagggaccacatcaaagacagctttcacagtttgcgggactcagtcccatcactccaaggagagaagtaccctcttatatatggactgattctt

SEQ ID NO: 748925 - DNA, 100 bp, Homo sapiens
caacgatgatcttctctccgagttccccgacaagtttggatcctgtgttccccatatcaaagctcagctctttgaaacatccagcaagacaggccagagt

SEQ ID NO: 748926 - DNA, 82 bp, Homo sapiens
cgcagcaccatggcgaccaccgtcagcactcagcgcgggccggtgctgaaggtcgccatcctggctgagaagtacgcggtgg

SEQ ID NO: 748927 - DNA, 74 bp, Homo sapiens
ttgttcagatttaagcatcttgcaactggaaactatttagctgcagagtgctgtgatcttggctaccatgcaag

SEQ ID NO: 748928 - DNA, 100 bp, Homo sapiens
gacctattggatatggagcctttggtgttgtctggtctacttccccagcaggacagcatcattctcctatatcttctagacatcactcatcttcctcaca

SEQ ID NO: 748929 - DNA, 80 bp, Homo sapiens
aagtagacattggtggaaacatttagtgagcggagaattagagtacatacactttgtttgccagtggtaagttcactagc

SEQ ID NO: 748930 - DNA, 90 bp, Homo sapiens
tggggcgccccagccgaggaagagccgggaaagggcgtcgccgctcatgtaggagatgattattgacagagtaaatggacaggctgttcc

SEQ ID NO: 748931 - DNA, 83 bp, Homo sapiens
gcctgtctacatcattatggaactggtttcagctgggctcaaaatgcagagaactcaaagatattcatttcggccagtgttac

SEQ ID NO: 748932 - DNA, 100 bp, Homo sapiens
atgaagcaactgaaaaaccccttggaaatagtcagcatacctgctggcgttttttaacatccccttgatggcttacatgtgttggagcttgctgcagcgg

SEQ ID NO: 748933 - DNA, 100 bp, Homo sapiens
aggtccaggaccttaggaaagctgcctgcagagaggtggagaggtctgccatcatggatgttctcgcagaagcaaatggcacctttgccttaaacctttt

SEQ ID NO: 748934 - DNA, 75 bp, Homo sapiens
caggcatagatgaccgcaagtgcatggccatcaccatcgaggctgagccaagagctgatggcagccgccggacca

SEQ ID NO: 748935 - DNA, 82 bp, Homo sapiens
cagcccactgaggccctgtccccagaagatggagccagcacagcactcattgcaggttttaaaatcaaagatgggaaaatcg

SEQ ID NO: 748936 - DNA, 76 bp, Homo sapiens
aaatatggcaaagaaggattaaatggtggaggaggaggtggaagtagagcttttgtcccggcagagcgggctctct

SEQ ID NO: 748937 - DNA, 74 bp, Homo sapiens
caaacgtacctgtggtccctggatccagtgctactgctacaaataaggattgtgcagactggtgcttaaaatgg

SEQ ID NO: 748938 - DNA, 101 bp, Homo sapiens
gtcttgctgattccactcaacggagctgtggccgtgaagatgcgcgccttccagtggctgagaagaccaaagagcaagtgacaaatgttggaggagcagtg

SEQ ID NO: 748939 - DNA, 100 bp, Homo sapiens
ttgacacacctcatggtatatttgcagccagtactctatatgaacaatccgtctggatcacggatgtaggaagtgctgcttgtcagacattgctgtctct

SEQ ID NO: 748940 - DNA, 50 bp, Homo sapiens
gatcaccgagggcatttacggcaggtttttcgttggaatatacgttgcac

SEQ ID NO: 748941 - DNA, 83 bp, Homo sapiens
gacgaggaagttttctactgtaaagtcaccaacgagatcttccgccactacgaggaaatgatggcgggaacacagcaaaggag

SEQ ID NO: 748942 - DNA, 75 bp, Homo sapiens
ttgatgcgggacttcagtcctagtggcattttcggagcgtttcaaagagcatcagaagagctaacaattgctgga

SEQ ID NO: 748943 - DNA, 82 bp, Homo sapiens
gtttgcggttcagccctttgatgaccgcagcaggtggaagatgctgtgccttttcccctgatgggaaagccttagcggttgg

SEQ ID NO: 748944 - DNA, 75 bp, Homo sapiens
ttgatagcaaagaagataaagttgacagcagaggcagaggacttcctgagctaaaggagaaaaaaaatatggtgg

SEQ ID NO: 748945 - DNA, 55 bp, Homo sapiens
cggagctggaatgactggcaacccagatccgggatcagttgaaggaagaggagat

SEQ ID NO: 748946 - DNA, 83 bp, Homo sapiens
cgttcgaactgtctcaccacttccctgcagctccctcgactcctttacatctagcagcgggctacaacagagttcgaatagtt

SEQ ID NO: 748947 - DNA, 97 bp, Homo sapiens
gttgattatgccagccagatgcagaagttcaccatgtctattctcaagatccatgccagggagatctttgactctcgcgggaatcccactgttgagg

SEQ ID NO: 748948 - DNA, 75 bp, Homo sapiens
gagctgggcggcgagtccaactttggttggatggcaagcatgtggtgtttggcaaagtgaaagaaggcatgaata

SEQ ID NO: 748949 - DNA, 82 bp, Homo sapiens
tgtggaacgggccaagcaggtgaccatggcagaactgaacgccatcattgggaggtgaaaagccaggcatccttcaagctag

SEQ ID NO: 748950 - DNA, 90 bp, Homo sapiens
gaggaaaacaacttcgagggcagagactctgtctactagtgacgatgtcgaagacagggaaaatgaaaagggtcgccttgaagaagccta

SEQ ID NO: 748951 - DNA, 100 bp, Homo sapiens
ggaagacctgcaccactgtcgccttcacacaggtgaactcgcacttaagtattcatcgaagagtcaccccagtagcggtgatcacagacatgaaaagatg

SEQ ID NO: 748952 - DNA, 100 bp, Homo sapiens
agcaagtttcatgttcacgagagcaaacctcatgccaatgcagtttctgggtccacttccaaaggcgctgcagtcaggctcagccgatgcttctttcctg

SEQ ID NO: 748953 - DNA, 101 bp, Homo sapiens
gctgtcttcatcggtggaatacaacataatggagttggaacaagaacttgaaaatgtaaagactcttaagacaaaattagacagggtctcactctgtcgcc

SEQ ID NO: 748954 - DNA, 75 bp, Homo sapiens
tccgtcctctgaggcgacggccgcggctgcacagaagctttgcatcgtccctatggttgtgatgttgaaccccag

SEQ ID NO: 748955 - DNA, 90 bp, Homo sapiens
taaaggatcaacgtaacgtgagcatgaggttttccaatcagaaatgagccgtcagactgctacagcattacctaccggtacctcgaagtg

SEQ ID NO: 748956 - DNA, 75 bp, Homo sapiens
tggagatattgttcgctttcacaggctgaagggcactccacagaaggatgttattatcaagtcagatgcaccgga

SEQ ID NO: 748957 - DNA, 98 bp, Homo sapiens
tcagcatgagcaaaaactccaaactcctctccaccagcgccaagagatacactctgtgcagttttagagagagacacactcagtattcgagaaagtcg

SEQ ID NO: 748958 - DNA, 50 bp, Homo sapiens
gaagattgtgaagcaatagcctaagatctatgcagttagatcagttgttc

SEQ ID NO: 748959 - DNA, 100 bp, Homo sapiens
ctcagaagagtgagagagagctattagagattgtgaagaagaatttcgatctccgccctggggtcattgtcagtgcttatgaggtgatcaaactcaaagg

SEQ ID NO: 748960 - DNA, 127 bp, Homo sapiens
actcaatccgagctagaccgcatcaatgcccagtacctggaagtcaagtgcggtgctatgatccttaagctgagctttcctgctgccccttaatcaggaagataacaccaacctggccagagttttg

SEQ ID NO: 748961 - DNA, 95 bp, Homo sapiens
atcacttaaaggagtggacattgctagcaatgagctcccaaagccatccagaacctgcaaccatggtcgtgccactagccagctcggaagcccag

SEQ ID NO: 748962 - DNA, 75 bp, Homo sapiens
ctttactggaaagacccagaatatgccaagtatctaaagcaatttgaatcaacccatagaagtgacagcgctgta

SEQ ID NO: 748963 - DNA, 75 bp, Homo sapiens
gactgaaaacatcctggaatcaaatagtgttacggcaacaagcaaagccttctagacaagctcagtggaatctga

SEQ ID NO: 748964 - DNA, 82 bp, Homo sapiens
ctgcccttcgccaaggagatcgtctctctcatcgaggcccaaaccgccaagaccggacaggaacatgagcttatcgagagca

SEQ ID NO: 748965 - DNA, 95 bp, Homo sapiens
aagagttggatactcagcgtcgctggcagccgctgtacttgcacttttcaggattagaagaggctgtgtatagaaacatacaagcttgcaaggag

SEQ ID NO: 748966 - DNA, 83 bp, Homo sapiens
ctggcgcccgccctgcgcactcaccatggcgtaaaggcatgacttcctggcaccacagggaaaatcgggtgcaagcccagaaa

SEQ ID NO: 748967 - DNA, 83 bp, Homo sapiens
ctgtagtcacaggagctgtagagaggaccccggtacatctgaaagccgggaaatgtacctggagtagaacagaaaaattatta

SEQ ID NO: 748968 - DNA, 90 bp, Homo sapiens
tctcatcaacagttgtggaatatggttttccctgatgaatttcacctccagactttgaatccttttcttcgggcctgtgctgagttacac

SEQ ID NO: 748969 - DNA, 99 bp, Homo sapiens
ctgggacttcccgtccgcggcgtggaggctgcagtacagcaatggcgatcagaaggtagaacagctgtatggctgcacattcccatcctccaaagccga

SEQ ID NO: 748970 - DNA, 80 bp, Homo sapiens
aagaagccaaagaactggctaggcaaataagctttaaggatgaccgttcattaataaatttgcatctcatgcacaccagt

SEQ ID NO: 748971 - DNA, 82 bp, Homo sapiens
cccgcttgcgtcagggacctgcccgactcagtggttgtactcgtaaaacaaggatcatcgatgttgtctacaatgcatctaa

SEQ ID NO: 748972 - DNA, 98 bp, Homo sapiens
aattacttggagcaaagggcagtcggcggagcttcgccaaggctggcgcagtcgagatcctgaaggagctagacgagtgctacgagcgcttcagtcgc

SEQ ID NO: 748973 - DNA, 76 bp, Homo sapiens
gctcccatcattgatgtggtgcgatcggaggaggactgagcttatctgactccagagctttcaggagggaagaaag

SEQ ID NO: 748974 - DNA, 101 bp, Homo sapiens
aatcctgtggaaaatggccttcagtgatcttacatcgaggactgtgcatctttatgataattggatcaaagatgctgcccagtgagtgcaaaaacaaaacc

SEQ ID NO: 748975 - DNA, 100 bp, Homo sapiens
ttctggaaattgaggacctgcaagtgaatcatgttatccaagataaattctgtgggattataaacatttcagtagaaggcctgcatgatgtcatgacgga

SEQ ID NO: 748976 - DNA, 100 bp, Homo sapiens
gttcacggcggacgttcttgttctgtggagaataacggctgcacctggagattgacgcagagtgggcggcggtggtggtcattatccagctcaggaaaac

SEQ ID NO: 748977 - DNA, 100 bp, Homo sapiens
agaggtcctacagcgaacacctgggatattttcctactgatctatttgcctggatcagttcttaagagcagccccggtaactggaggaatgggagccgtt

SEQ ID NO: 748978 - DNA, 101 bp, Homo sapiens
aggatgaccacttcaaatcctcccattccaatcaaacaaatcacaagccctccccagaccaggaagttcgtgaatgctaatcaagggctaaataaagtgga

SEQ ID NO: 748979 - DNA, 100 bp, Homo sapiens
gttttgttcgagtgacctttacaccaggaaaaactcctgttgatgggaaaacaattgctcaagtcttagttcatctacacagaaatgactatgtagctgc

SEQ ID NO: 748980 - DNA, 75 bp, Homo sapiens
cacacctcagaaatttatagataacaggatcatttcatctaaggtattatagctgcaaatgtccttgtattctgt

SEQ ID NO: 748981 - DNA, 83 bp, Homo sapiens
tttaaagatctcaaaaactttcatgtagacctttgtcgtccatttgctgctcactgctgtcggaaaaggtaacagaagatgga

SEQ ID NO: 748982 - DNA, 75 bp, Homo sapiens
tcaacatctccttcgcagccgcgcaaaaaaagtgccttacgggtgaacaaggtgattgagattaacccttacctg

SEQ ID NO: 748983 - DNA, 97 bp, Homo sapiens
atatgtcgagggaatgcagaaagagttaaggaaggcaggaaacgttttgatggtaaattacaatcagaatcaactaataatggaaaaaataagagag

SEQ ID NO: 748984 - DNA, 71 bp, Homo sapiens
taaaccatatttgggaagacgaggatttgtaggtgaaaatgcccagccaatcctagaaaataatattggaa

SEQ ID NO: 748985 - DNA, 101 bp, Homo sapiens
gcggatctggacacccagcggtctgacatcgcgacgctgctcaaaacctcgctccggaaaggggacacctgcctcagaagtcccgggctgaagacctgggc

SEQ ID NO: 748986 - DNA, 83 bp, Homo sapiens
ggaagaaggaaggagaagccttcacaggacagtctggcctctaactgctctgccaaagaaatttaacctgtggaagatctaca

SEQ ID NO: 748987 - DNA, 75 bp, Homo sapiens
accagacctgggccagatactttgtgaagtctcggtccagctcgacttccagctcaggctccagcaccagcactg

SEQ ID NO: 748988 - DNA, 50 bp, Homo sapiens
ttttcctccacctaccttcccgagttcttgctatattgccccaggctggt

SEQ ID NO: 748989 - DNA, 95 bp, Homo sapiens
tgaatggaaaaagaaactggaatctcccaacagagaaattattattttacacaatccaaagctgaagctaacccctgaatatctgcagctgatga

SEQ ID NO: 748990 - DNA, 74 bp, Homo sapiens
taatgaggatttgactgtgaagggccctccagaatttccacagcatacacctggacctgttcccaacagtttca

SEQ ID NO: 748991 - DNA, 101 bp, Homo sapiens
ggcctggagtgtgtgcccactgaggagtccaacatcaccatgcaggtagctacagcaagctgggtagcaggcagatccaaaggatatcatgaagtttccag

SEQ ID NO: 748992 - DNA, 100 bp, Homo sapiens
ccagtgtaatgattattgacaacagtgagaaagatcagtctaaagaaaaggagaagaaagtgaaaaaaacaattccttcctgggctaccctttctgccag

SEQ ID NO: 748993 - DNA, 50 bp, Homo sapiens
cagttcgctacacagcaatgcatcgagctctttcagtctcacatggcaac

SEQ ID NO: 748994 - DNA, 100 bp, Homo sapiens
tgctgaggattgtagagccatatattgcatgggggctgtgatgcgccgctggctgcctgccggagacgccttgttgcagatgatcaccatccacctgccc

SEQ ID NO: 748995 - DNA, 51 bp, Homo sapiens
tgttaaatagagctcaggaaaggccccaggctccccctccaccgccaccgc

SEQ ID NO: 748996 - DNA, 75 bp, Homo sapiens
ggacccccacggagaccaagccgtcatgacaacagtgcaagttaccaacttggcaagcctgtccgagctctaaat

SEQ ID NO: 748997 - DNA, 100 bp, Homo sapiens
caagtgtttccggaagtgtatagggaaacctgggggctccctggacaactccgagcaggccaagtcctgtatctgccatgtctgtggcgtccacctcaac

SEQ ID NO: 748998 - DNA, 75 bp, Homo sapiens
ggaggacaggaccacgctgctctatttttaccaacaggttcttgattattacagacctctttctgaaaagcccgg

SEQ ID NO: 748999 - DNA, 80 bp, Homo sapiens
tccgtggccttagctgtgctcgcgctactctctctttctggcctggaggctatccagcccagagcagctgagttccagat

SEQ ID NO: 749000 - DNA, 98 bp, Homo sapiens
ggcggcgcgcggcggcggcgctcggcgatggtaggcgtccctggagcggccgccttccagcgaaagaagcacttgtaaggaaatatagcatccattgt

SEQ ID NO: 749001 - DNA, 100 bp, Homo sapiens
gaggagcggccggagtcagcgatggtgcccggcgaggagaaccaactggtcccgaaagagcggggatctgatgagcttctttcttctggcatcattaacg

SEQ ID NO: 749002 - DNA, 80 bp, Homo sapiens
gctactctctctttctggcctggaggctatccagcgaggagctcaagcacttcgaagccaaaatcgagaagcacaaccac

SEQ ID NO: 749003 - DNA, 76 bp, Homo sapiens
gtcagaaaagagtagcctgggctgtctggaaatctgagaggctgggaggcggcagaatgcagccagaggagggcac

SEQ ID NO: 749004 - DNA, 114 bp, Homo sapiens
gtcccggaggatggccgaggcggcgtgtagcgcacactttctggtgctggagaatctggtaaaagcaccattgtgaagcagatgaggatcctgcatgttaatgggtttaatgga

SEQ ID NO: 749005 - DNA, 75 bp, Homo sapiens
aagagcacaacattttcaagaaaattcaagcgccgtgccgtccctgcagtgacaccgaggtgctcctagccgtct

SEQ ID NO: 749006 - DNA, 75 bp, Homo sapiens
cttttttgaatgggaggcattgatcatgtatggcatttcaaatatagatacaaccattgaaggaacgtcagatga

SEQ ID NO: 749007 - DNA, 80 bp, Homo sapiens
ggcctgtcgagagatagagaatgggcggcgatctagggcagccctgcagaggtacctgttctactgtaatcgctatatga

SEQ ID NO: 749008 - DNA, 83 bp, Homo sapiens
ccgtccccctgccccgttcacaatacatgtcatgctgcccaaggacatagccaagctggtccctaaaacccatctgatgtctg

SEQ ID NO: 749009 - DNA, 100 bp, Homo sapiens
cgaaggtggacctgagcacctccaccgactggaaggaggcgaaataaacccaccttgtcccatccacatcaggacatcccagctggagttcaaccttcat

SEQ ID NO: 749010 - DNA, 100 bp, Homo sapiens
atcaagcaggttttaaatcaagatttaacattccaacacataaaaattatttatccaacagctcctcccagagaaagaagtgtgtttggaagtcaaaatg

SEQ ID NO: 749011 - DNA, 100 bp, Homo sapiens
gccagtactctatatgaacaatccgtctggatcacggatgtaggaagtgtctctgctggatgaaccgaatcctaacagtccagccaatagccaggcagca

SEQ ID NO: 749012 - DNA, 75 bp, Homo sapiens
agctgcctcagttcttagcgcagactcctttgacccacttaataaaggacagggaatccaggcacgttcccgaac

SEQ ID NO: 749013 - DNA, 90 bp, Homo sapiens
gccagggattgggaaaatctcttcagggtggaatgaggtaccatctactgtctccagaggaccgagaagaacttgtagatggcacaagac

SEQ ID NO: 749014 - DNA, 100 bp, Homo sapiens
aagaacgtgagcaagcccaggcacagccgacgccgcggggtggagccgccaccaaaatgcagattttcgtgaaaacccttacggggaagaccatcaccct

SEQ ID NO: 749015 - DNA, 50 bp, Homo sapiens
gatcaggtgttttcaggttaaccgtcaggactcagcccaggagagtgtta

SEQ ID NO: 749016 - DNA, 100 bp, Homo sapiens
gcgagcgcggcgcggggccaccatgggggcccagctcagcacggctggcgcccatgcggctctacacgctctccaagcgccactttgtcctcgtgtttgt

SEQ ID NO: 749017 - DNA, 50 bp, Homo sapiens
cgtcaatcagagcgtcctgtgcgggacaaactctgcctgggcgagtcctt

SEQ ID NO: 749018 - DNA, 101 bp, Homo sapiens
cgaaataggactcattttaatcttctgcctaccttttattcctcctcagagaggcacatttgatatttatgtgaaatgtgatggtgttggaagatgtgttg

SEQ ID NO: 749019 - DNA, 101 bp, Homo sapiens
gtcggcgctgggctggaggcggcggagcgcgagagcttcgagcggactcagatgaatttcctgaaataaaccgagcctcaattcgacaggatcacaagggg

SEQ ID NO: 749020 - DNA, 82 bp, Homo sapiens
tgaaggacaagaacagcgccgtcaccagcaggtgatgtgtccaatctagatcccaacttctcatttgaaggcaccaaactgg

SEQ ID NO: 749021 - DNA, 75 bp, Homo sapiens
aacaatcttgaatcatgaagctactaaccagagccggctctttctcgccatcatcgtctacagactgccgtggac

SEQ ID NO: 749022 - DNA, 75 bp, Homo sapiens
atcccagaggaacttgggcgcctggtgtatttattgacagacaaaacagcaataagagctaactgccatcaagag

SEQ ID NO: 749023 - DNA, 100 bp, Homo sapiens
gcgggatctaacccaggagcagacagagaagctgctgcagtttcagtgatgatgatgatgattttgatgatgaggaagctgaagaaaaagcgccagtgaa

SEQ ID NO: 749024 - DNA, 50 bp, Homo sapiens
ggagagggggcgctgagctgttgggcatcaagatggtgctcatgtggacc

SEQ ID NO: 749025 - DNA, 74 bp, Homo sapiens
cggcggccccgggaccaaggagctcaccatggatgatgatatcgccgcgctcgtcgtcgacaacggctccggca

SEQ ID NO: 749026 - DNA, 98 bp, Homo sapiens
gaaaaagctgtggaaggctctggataaggaccagtacctgcccaggaaactgcttcttggacacttaatgattgttggcaagaaatgtgctgctgatc

SEQ ID NO: 749027 - DNA, 100 bp, Homo sapiens
caagacgggttcagttcgtcatggggctgtttggaaagacccaggagaagccgcccaaagaactggccagggagctggagagcagagaggcagagctaag

SEQ ID NO: 749028 - DNA, 103 bp, Homo sapiens
agcggatccctgagctcgtcaagcagctgtcggccaagctcatcgccaacgaattcaaggaagccttctccctatttgataaagatggcgatggcaccatcac

SEQ ID NO: 749029 - DNA, 75 bp, Homo sapiens
tattgggagatccacagccaagagccaggaccccctagaagtctagaaatgggatttagtgcaagaagaagaaca

SEQ ID NO: 749030 - DNA, 75 bp, Homo sapiens
aagcagcagaggagcacgaggatcgtgggagctaagaagatcacagaagaactgcagcttcctggggagcagttt

SEQ ID NO: 749031 - DNA, 50 bp, Homo sapiens
tcccaaggcaaatgtggagttcatggatgctgagagcagtttcagtgaag

SEQ ID NO: 749032 - DNA, 75 bp, Homo sapiens
aaagaagatgatgctccaagaacaatagcttgccctcataaaacctaactaccataatgaatgctgcatattaag

SEQ ID NO: 749033 - DNA, 102 bp, Homo sapiens
tacatgacaagatggcgactaagaggcgaaaacgccaataacggaaaactgcctgacaacaaagtcattgctagtgaactaggcagtatgccagaactgaag

SEQ ID NO: 749034 - DNA, 140 bp, Homo sapiens
caccgcagcactggagctgtcctgaaggtactctcgcaggaaatgggaattctacttgtgtgggaggattccagtgctggggaagacagtgttcatgacaggtttataggtccgcttccaagagaaggttctgggggttc

SEQ ID NO: 749035 - DNA, 85 bp, Homo sapiens
gctgcctgtcttcgtcttgatgcctgccagcaggggtctaatgtgatggaagagcaggacctgcgggacatcggcatcagcgacc

SEQ ID NO: 749036 - DNA, 80 bp, Homo sapiens
agcccgcgtcggggggagagcaggagccgcggccccagcaagcccaggaagcggggagaggtggtgagagatgacccctg

SEQ ID NO: 749037 - DNA, 100 bp, Homo sapiens
cagcagtcagggacatttctgaagcgagcgtcttcgatggggcctttacaacaactaaacggacaggcattccagccccacgggaattttcagtaactgt

SEQ ID NO: 749038 - DNA, 96 bp, Homo sapiens
tttggaaggtatcgggctaatcgagaaaaagtccaagaacagcatccagtggaaccgccgagtgcctatcagagaaggagacggaggagctcatgg

SEQ ID NO: 749039 - DNA, 98 bp, Homo sapiens
cgggcgccccggagccttgctgagaggcagatctcacattcttgaaggtggcattgaagagcactaagatcggaagatgagtgagcttgaccagttac

SEQ ID NO: 749040 - DNA, 75 bp, Homo sapiens
gtcttgggacccttgcatggtgtttcaaagggtggtgaagaactaagatattccgagtggtgtgcatctgtttgg

SEQ ID NO: 749041 - DNA, 73 bp, Homo sapiens
tgacaacttctccggctcaggtgcaggagcattgtccgtgatgccagccgtgcacaccttctctctctttgcg

SEQ ID NO: 749042 - DNA, 75 bp, Homo sapiens
ggctgccctgtggcctcgctcctcggaggtctcggagaaatctatgtgaagaggctttgttaaaaattaaaggtg

SEQ ID NO: 749043 - DNA, 98 bp, Homo sapiens
tcaagtcccaggagtcctgaccagagagcagggactgctgagatgtcctctattcttgaagagcgtattcttggagctgatacctctgttgatcttga

SEQ ID NO: 749044 - DNA, 89 bp, Homo sapiens
cagcggtcccagcggcagcagcagcggcgggaggagcctccgggctgtctgacaacatctacccggtggaggacctcgccgccacgtcg

SEQ ID NO: 749045 - DNA, 137 bp, Homo sapiens
gcacagctggttgtgattcttataccccaaaagtcatacagtgtcagaacaaaggctgggatgggtatgatgtacagtgagattacgtactataggtgaacttttagctcctgcagctccttttgacaagaaatgtg

SEQ ID NO: 749046 - DNA, 100 bp, Homo sapiens
gactgcgggcccgtagctgggctctgcgagggctcgtgcaatccgcttcagacaggatggtaacgaagccgtcggaggattcttctctcagattgggcag

SEQ ID NO: 749047 - DNA, 74 bp, Homo sapiens
ctacggctggggccgtcccagttcgcaatgagaaagctagatgctggtgtgccagaaaaaataagcctgatttc

SEQ ID NO: 749048 - DNA, 83 bp, Homo sapiens
gcgtcatcgagtgtgacgtggtgaaaggacttcctgatccatttgctaaggtggtggttgatggatctgggcaatgccattct

SEQ ID NO: 749049 - DNA, 75 bp, Homo sapiens
ctcaagtttcacctatcctcactgatccgtggacttctgtatgatcagtgacagtgatgaaaagcctctcaaagg

SEQ ID NO: 749050 - DNA, 131 bp, Homo sapiens
ctttgtgtcctgagatcaaatggcacttcattggccacctacagaaacaaaatgtcaacaaattgatgggtggtaataagctgcagtcaacaggaaataaagcagaagacataaaaggaaccgaatgtgtt

SEQ ID NO: 749051 - DNA, 100 bp, Homo sapiens
aggcacagcgtttcttgcaagaatgggagacatgtcatgctgcccaaggacatagccaagctggtccctaaaacccatctgatgtctgaatctgaatgga

SEQ ID NO: 749052 - DNA, 98 bp, Homo sapiens
ttcagcgggcgcatggaagtgctcaccgacagtgaagtaagactttgaccccgacgcaggcttcagtgattgccgcggatcagaagcctgagcacttt

SEQ ID NO: 749053 - DNA, 75 bp, Homo sapiens
agaagagttaaatgccctcaagtcgacaggggatgggaccctagtgaggaagggaaactgtctacctctcaagat

SEQ ID NO: 749054 - DNA, 98 bp, Homo sapiens
tctgctcctgcaggttctgaaaggtcacgagcccgggctggtacagttggtgaattactacaggggtgctgacaaactgtgtcgcaaagcttctttag

SEQ ID NO: 749055 - DNA, 90 bp, Homo sapiens
agaggacggctgtgtcgcagcctctcgggatgacaccactctgaatgcactgaacacagtgacagagctgaatgaacctctctccaatga

SEQ ID NO: 749056 - DNA, 75 bp, Homo sapiens
tccagcagctggcatctgaccttggcactcgaactgacctcaagctcaggtggaaaaggagggagctgctctcag

SEQ ID NO: 749057 - DNA, 50 bp, Homo sapiens
aaggagtcagggatggctcttcctcagttggatatgtcaagtgaccagat

SEQ ID NO: 749058 - DNA, 100 bp, Homo sapiens
cggagtcgaaaggtcaaatcttatctgtcagtgctgtgtgacagcatcgcaacgggatctgcagaacctgaactcggctatggaggctatgatgattaca

SEQ ID NO: 749059 - DNA, 100 bp, Homo sapiens
ccccgctcctcggagcggcggcggcggtggtgcctccggactgcacttgcgaagggagcttggggaggaagtatacactgaatatcctcgaagaaattgg

SEQ ID NO: 749060 - DNA, 62 bp, Homo sapiens
gagaagagatgctggcgtgaagggactcagtgactatctcttcacgctagccagatatgcag

SEQ ID NO: 749061 - DNA, 75 bp, Homo sapiens
tggcaatatgccttcaccagctatggcattagcccacaggccaagaccccttgttgaaatgggacagttggcagc

SEQ ID NO: 749062 - DNA, 88 bp, Homo sapiens
caccatcgagtgcacgggggcagaggcctccatccaggcgggcatctacgccactcgctctggtgggaccctcgtgcttgtggggctg

SEQ ID NO: 749063 - DNA, 96 bp, Homo sapiens
tgaagaagcagacatttgtggtacatgcagggacagatacaaacggagatatctttttcatggagaccccaccaacaactgaacgctttggtcagg

SEQ ID NO: 749064 - DNA, 89 bp, Homo sapiens
ctttgacaagtgcctggaagagttctatgcactctgtgaccagctggagctgtgcctggattactacagcatcccatttcccacaccca

SEQ ID NO: 749065 - DNA, 100 bp, Homo sapiens
aaggatctcatcggcaagtgtggaacagagacatgaaaatcgataattgtaactcagtatgaatccggacaatcagatagttcaaaccagcaaggagatg

SEQ ID NO: 749066 - DNA, 75 bp, Homo sapiens
cgaccgtgcccgctgcaagtacagtcacagtacaagagtcactttgttgcagccagtttaagtaatcagaaggct

SEQ ID NO: 749067 - DNA, 82 bp, Homo sapiens
ctcacaatgaggctccctgctcagctcctggggctgctaatgctctgggtctctgtgtcttctcagaaacaatcggcctgga

SEQ ID NO: 749068 - DNA, 100 bp, Homo sapiens
cggaagcggatcgggtggagtgtaggtcatatcgccgcggaggcagtaggggacacattagaagaactgtggatctcctacaattttattgagaagttga

SEQ ID NO: 749069 - DNA, 74 bp, Homo sapiens
gggacaagtacctttatgaaccagtgtatcccaacattccaagaatcaagcactacaaagtgatgagcgtagga

SEQ ID NO: 749070 - DNA, 75 bp, Homo sapiens
ccgagcggggctctgtggctgctcctggctctgcgcaccgtgcagagcagagcgggcggaggaccccgggcgcgg

SEQ ID NO: 749071 - DNA, 82 bp, Homo sapiens
agtcagccacctcgcgcgcgcctccaggagcaaggatggagaggctgcaggaacgaatgcaggaatttgggaactgagctgt

SEQ ID NO: 749072 - DNA, 100 bp, Homo sapiens
ctatatgaagtctttgagaaagtgtcttctgtggcttcagcgtcacctagtgcaggctgccattcaacaaacgcattgtcaacagtcaaccaaaagaaac

SEQ ID NO: 749073 - DNA, 83 bp, Homo sapiens
gaagagcggcggcggcagcggcggattatatctgtccaagatgcgagtctggttttatcgaggagcttccggaagagaccagg

SEQ ID NO: 749074 - DNA, 85 bp, Homo sapiens
ggaacccttgccgctgctgtcctgcgaccccaagcagtccagtgtgaaaaaagccagtattaaaatactgaaaaattttgatgaa

SEQ ID NO: 749075 - DNA, 74 bp, Homo sapiens
tttcatcgatgatctggcagacctcagctgcctggtgtagctaaaattggtgctttctgctgtggccttagttt

SEQ ID NO: 749076 - DNA, 50 bp, Homo sapiens
ccgccctggccatctaccatgtggtctcggcgcggaagatggccggcggc

SEQ ID NO: 749077 - DNA, 100 bp, Homo sapiens
gctggatatccaagcctctcagcttcggagaatggagtcttccatcaatcatatctcacagggtctggtcgccagcaacctgaatctcaaacctggagag

SEQ ID NO: 749078 - DNA, 83 bp, Homo sapiens
cagcctcgttgcggccatcgccctgccggaccgcgcctcaggctcccccagtgtcaacagcatctccaccctggagcctgtga

SEQ ID NO: 749079 - DNA, 83 bp, Homo sapiens
cgcggatctcaccgccgctcaggaaagaagcttccggttctgaggtcctggaggtgccatttccctctctgttgaagcaaagg

SEQ ID NO: 749080 - DNA, 100 bp, Homo sapiens
aacctggcgggggcaccggccctgatgccagaggagaggacaaggcttcatgatgaactggaagaagccaaggacaaagcccggcggagatccattggca

SEQ ID NO: 749081 - DNA, 100 bp, Homo sapiens
caattttcatgccgcagcctcctagctgggattacaggtcctatggccgggctccgaagatgattcacctagagtctaactttgttcaattcaaagagga

SEQ ID NO: 749082 - DNA, 76 bp, Homo sapiens
acagctatcccctgaggcccgacccaggaattacatgaacgacagccttcgcaccgacgtcttcgtgcggttccag

SEQ ID NO: 749083 - DNA, 82 bp, Homo sapiens
agaaaagaggcaaagcaagcgagaagtcgcgggcccagcccacagcaggggacccagacagcgtggtcctctgcctcttggc

SEQ ID NO: 749084 - DNA, 101 bp, Homo sapiens
ggaggggtgcctctgatcaaagcccccaagagaggtaaacgccctgcagaagatatggaagaggaacaagcatttaaaagatctagaaacactgatgagat

SEQ ID NO: 749085 - DNA, 100 bp, Homo sapiens
cgctggaaagtcggccaagaaagacaaagacccagtgaacaaatccgggggcaaggccaaaaagaagtcatccgtccttggctcaggatttggagagctt

SEQ ID NO: 749086 - DNA, 80 bp, Homo sapiens
gtcggctggcggagcggcgtgtgagaagccctaccactgcaactgggacggctgcggctggaagtttgcgcgctcagacg

SEQ ID NO: 749087 - DNA, 100 bp, Homo sapiens
tttctgttcataccttttaatcccctggccgaaagtcatcctttaatagacgaggctttccttaaagtttcccatgtctcaatggactcctgaatataac

SEQ ID NO: 749088 - DNA, 75 bp, Homo sapiens
gctcacctctcaccgcgcatgtttggaggttggagttgctgtgggtgagctgctgtggtctgtagccaagcatgc

SEQ ID NO: 749089 - DNA, 100 bp, Homo sapiens
ttctataatcaggcaattatgtcttctaaaaatattgcacagaaactaatggcagatcccggaaatccagacttgtatcatgtattaagtgttatctggc

SEQ ID NO: 749090 - DNA, 98 bp, Homo sapiens
cggaaggcctcctggctcggggctgtggcctggacttcctcaacagtcacgccgatgatggagctgaagcccaacgcaggtagcgaccgtgcctgggt

SEQ ID NO: 749091 - DNA, 90 bp, Homo sapiens
aacaccgatcacagaccaacaacctccacaaatgggaagtgttcctgtaatgacgcaaccaaccttaatatacagccagcctgtcatgag

SEQ ID NO: 749092 - DNA, 100 bp, Homo sapiens
gtggagcggttgcggcggcctgggctgctgactgcgcacttggaatagtagcaggcggcggcggcggaacgccaggcagtattggtaaaggttttcaagg

SEQ ID NO: 749093 - DNA, 104 bp, Homo sapiens
cttgcccctggatgaaatggtgctggtccttcttcaccccgctggtctgcatgaaaacaccagcagccccagcaaagaaaaccagcactaccttcaacatcgtg

SEQ ID NO: 749094 - DNA, 107 bp, Homo sapiens
aaaaccttcgactatgcagagacatgagatggtagccaacccctcaggaaagaccacagcaagattctttcattcgtctcctcctagcctgggggaccaggctcgaa

SEQ ID NO: 749095 - DNA, 98 bp, Homo sapiens
gccaaggcgccaggcaggacgacagcagcagcagcgcgtctccttcagatgatgattattccccaccttctaagagacaaagaccaacgagccaccac

SEQ ID NO: 749096 - DNA, 82 bp, Homo sapiens
gcgcagcccggaaatgtccggcaagatcgagaaagcagccttatgccagcctggaccatcttggaggcagtgtaggatcatg

SEQ ID NO: 749097 - DNA, 96 bp, Homo sapiens
cgccgcgcccggcgccccactccgcgcagcgggttgcctccgctccccatacggcggccccaggccggtctaattgaagccaacggagaactcaag

SEQ ID NO: 749098 - DNA, 87 bp, Homo sapiens
cccatatgggggttctggagagcggggtgtgggatcatgatgctgccgccaccgccgccaccacggagcgagaagcccagatagacg

SEQ ID NO: 749099 - DNA, 51 bp, Homo sapiens
ctctacttagctcagcaattcttaccttgattatattccatcacaacaaga

SEQ ID NO: 749100 - DNA, 100 bp, Homo sapiens
aggacgccacctactccaagcccccctcgcctatgccttcagacatcaccagccaggagctataccaccagtcctatgactgcgtctgcgtcatgtttgc

SEQ ID NO: 749101 - DNA, 100 bp, Homo sapiens
ttgggatcggctacagcgacacagcctggatctcctccatcctgctggccatgctctacgggacagggtggctgttgcaccacgccctccctcctgcccc

SEQ ID NO: 749102 - DNA, 74 bp, Homo sapiens
cattttctgttgactgtaaaggtgctggtaagatttcttctgggaatctggaaacatcaaagctggattagaac

SEQ ID NO: 749103 - DNA, 90 bp, Homo sapiens
cgggcggtgtagaggcggcggacgggccggagggaggatgttaaagccccgcgctgcaggtggagctggagcaagaataccaagacaaat

SEQ ID NO: 749104 - DNA, 98 bp, Homo sapiens
cagcaccatggaggacgtgaagctggagttcccttcccttccacagtgcaaggaagacgccgagattcctcgaggtctgaacaagaaccactgacgca

SEQ ID NO: 749105 - DNA, 100 bp, Homo sapiens
ctccccggctgccgccgccgccgcctcggccgaccagggacctgcccgcctgcggctgctccgggattgggccgagcctatgccctggcttttgcagaaa

SEQ ID NO: 749106 - DNA, 51 bp, Homo sapiens
ctcccaagtagctgggagtacagatgcctggaatgatgtcgtcagtaatgc

SEQ ID NO: 749107 - DNA, 97 bp, Homo sapiens
ccggcttattgaacacatcagaatccacacagaattagtaagctgtgtgggctggactactgctgaagagctgtattcatgtagtgatgatcaccag

SEQ ID NO: 749108 - DNA, 90 bp, Homo sapiens
aaacaggggagcaaggtgcaagagtccacaaagggacctgatgaagcgaagatcaaggtatatgggacaggttgctcatcaactcccaac

SEQ ID NO: 749109 - DNA, 83 bp, Homo sapiens
tgtggagtcctgccatgatatgcctgatctagttgaatctgaagatgtggacctgctgatgaagagggctgactgtatctaac

SEQ ID NO: 749110 - DNA, 83 bp, Homo sapiens
cggagagcggcctgcgggcgatcgggccgagggaaaccggctcctgaaatcaggtgtcccattccagccttccctgactctgt

SEQ ID NO: 749111 - DNA, 100 bp, Homo sapiens
agctgcagtctttgtgggacaaggctgaccccgcactacatctacccaccagccatcgtgcagcccagcgtggtgatcccagccgcccctgtcccgtcgc

SEQ ID NO: 749112 - DNA, 82 bp, Homo sapiens
tggtcttacattgctgcatcaagaaacccaagctgctgaggaaccaacgtccaagaggcccagaagatactcaacaacagcg

SEQ ID NO: 749113 - DNA, 97 bp, Homo sapiens
tcaactctatgaatcagctcaactctttgttgcagaaggaaaaccttcaagttgaacccactgtgagcctgataaaagggccagattctttaattga

SEQ ID NO: 749114 - DNA, 75 bp, Homo sapiens
gtcaacaagaacaaggaaatgtataagctacaggtgttatgaagcggagattgaggagatagatgaagaaaatgg

SEQ ID NO: 749115 - DNA, 119 bp, Homo sapiens
gccgagatgtctcgctccgtggccttagctgtgctcgcgctactctctctttctggcctggaggctatccagcagctggaagtcgagtgtgctactcaactcaggagatttggagacaa

SEQ ID NO: 749116 - DNA, 134 bp, Homo sapiens
tgtggatattatggctaataacacaacaagtttagggagtccatggccagaaaacttttggggtactccaaagattcaggtttactcacgtcatccagcagagaatggaaagtcaaatttcctgaattgctatg

SEQ ID NO: 749117 - DNA, 100 bp, Homo sapiens
ggctacgacctgaaactctacgaggataaccagacatgtctagtgaactagaaaatcacccaatgaatgaagaaggagaatcagaagagcttgcttctag

SEQ ID NO: 749118 - DNA, 98 bp, Homo sapiens
ccaaggcaattgatcccaagttgtcgacgaccgacagggtggtgaaaggtaagaatgattgatgttggctgatattggagtgctcattcacatgaagt

SEQ ID NO: 749119 - DNA, 90 bp, Homo sapiens
tcggaacagaaccaaaggctattggatcagctcagcaggatatgatggacgtggtcacctgcatgacctttctgagtacgatgctgagta

SEQ ID NO: 749120 - DNA, 100 bp, Homo sapiens
gtgatgtggaggaggaagagctcaggtggagaaactcttgatgaatgtgggttaaaatttcttttggctgttcgactccatacctttcttacaacttccc

SEQ ID NO: 749121 - DNA, 101 bp, Homo sapiens
ttgtcattgcctgagcgcgtcgagccagacagactgctgagcgactatattgagaaggaggtaaaggaatcactagatttgatctacttggcgactttgga

SEQ ID NO: 749122 - DNA, 100 bp, Homo sapiens
ccactccgtcccccgcgggtctgctctgtgtgccatggacggggctcctcgcacctaccccagcaactcaaattcaccacctcggactcctgcgaccgca

SEQ ID NO: 749123 - DNA, 75 bp, Homo sapiens
ttccggagcttctcagaagacagagggttttcttttgagccatgggcctgcgcgcgagccggaactgctccagga

SEQ ID NO: 749124 - DNA, 100 bp, Homo sapiens
gtcaacggcttcatcagcaccttgggtccaatatcagatggaaatgatgcggagccttcgccatgtaaacattgatcatcttcacgtgggctggtatcag

SEQ ID NO: 749125 - DNA, 74 bp, Homo sapiens
ggcgttctggatctcaaagcggtgagccgttctccaaccctttggcccccgatggccacgatgtggatgatcct

SEQ ID NO: 749126 - DNA, 100 bp, Homo sapiens
gtgatcttcaggctggaacaaggagaagaaccatggagactggaggaagaattcccaagccagagctttccagctcttgaagtcctattggctggataat

SEQ ID NO: 749127 - DNA, 82 bp, Homo sapiens
tggggccagggaaccctggtcaccgtctcctcaggtgggctggccaggtgagagctgctggcaggtgggcctggctgtggag

SEQ ID NO: 749128 - DNA, 75 bp, Homo sapiens
gttctccattgtgatgaaagcacatggtacaggatgtttcacgacgatgagcttgaagagtcagagaaattctac

SEQ ID NO: 749129 - DNA, 100 bp, Homo sapiens
atcgaacagcatcttcgactccttcccgacctactcgccgaccttcatccgcgtgtactaatggtcacttgatgtgcgctggctgttttatccacctact

SEQ ID NO: 749130 - DNA, 73 bp, Homo sapiens
agggctgaaatacttccatcactttaccctcagtctctgtggaaaccagattcaagtccagcatccagcggcc

SEQ ID NO: 749131 - DNA, 98 bp, Homo sapiens
gaaccttgggtgatttgttctgtatcagaagacaatatcatgcaagtgtggcaaatgcaggcagatagaagttcctgtcactttctccttttttacgg

SEQ ID NO: 749132 - DNA, 82 bp, Homo sapiens
cgttgcctatactttgccgacacattccttcgagatgacctgcctagagctggaacgttacctccagagcgagccctgctat

SEQ ID NO: 749133 - DNA, 75 bp, Homo sapiens
aacagctcacgggagcaagaacggctgcccaggctttgctgaggttctgcagaccttcagcacctgcaaggggat

SEQ ID NO: 749134 - DNA, 101 bp, Homo sapiens
aggagacccctctgctgcaccacttcatgcatttctggctgctcctcctgacccggggcctggtgggggtcggggaggccagttattccaccatcgcgccc

SEQ ID NO: 749135 - DNA, 51 bp, Homo sapiens
gccctgcctctccctgggctctgcaacacgctagaagggtttatgaaattc

SEQ ID NO: 749136 - DNA, 100 bp, Homo sapiens
ctcatggaaagcgaccccggggtcttcaccgagctcattaaaggattcgatgcttgtttgctactgatgggtgtgagcaagttagatattctataccgga

SEQ ID NO: 749137 - DNA, 88 bp, Homo sapiens
cgcccgccatggctttacttactgcggccgcccggctcttgggaaccaaggcaacagtgcatcccgacagcagcaacctgatccccaa

SEQ ID NO: 749138 - DNA, 101 bp, Homo sapiens
cttggtagcttgctcctggtatggccatcagattgtcacagacttttataaccctttgatccctaccaacattaatagagacggggtttcgccatgttggc

SEQ ID NO: 749139 - DNA, 50 bp, Homo sapiens
caccactgaagtgaccgaatgaggtttctacgataaagacagttcagggt

SEQ ID NO: 749140 - DNA, 100 bp, Homo sapiens
ttcaagaagtggccggagagttctgcatgttgattcgtgaatactgctatgcatgaggcaaaacttatggaagaatgtgacgagttggtagagatcatcc

SEQ ID NO: 749141 - DNA, 51 bp, Homo sapiens
atcatcattaaggacggaggcacgttcacagaagaaaagcttggccaggct

SEQ ID NO: 749142 - DNA, 100 bp, Homo sapiens
tgcacttgtgcagaccgggcgagcagagtaagaagcagctacattgtcacaggtgacattaaggggaacattaagttctatgatcacaccctgtctattg

SEQ ID NO: 749143 - DNA, 82 bp, Homo sapiens
ggggaggagcgttgcattgcctgcaagctctgcgaggccatctgccccgcccaggacagagcgggatgccaccagcttgtcc

SEQ ID NO: 749144 - DNA, 97 bp, Homo sapiens
ggcgccataaacgcccccaatttcccagctgctaaaggaagaggaagaaatgagccgtcagactgctacagcattacctaccggtacctcgaagtgt

SEQ ID NO: 749145 - DNA, 82 bp, Homo sapiens
caacactatactcaatcaacagatgaacagccaggatctcacatagcagaccatccgagagctgtttgatatgcccctggag

SEQ ID NO: 749146 - DNA, 80 bp, Homo sapiens
gtcgccgccgccaccatgcccaagagaaaggtacctggccaagctgtcgtcggtggggagcatctcagaggaggagacgt

SEQ ID NO: 749147 - DNA, 123 bp, Homo sapiens
ctgaagtcagttgttgcatcaaatacttcatatttggcttcaatgtcatattttggctgttccatttcctccaagtcaccggcttacagcaaaagaagtgtttgataatgatggaaaacctcg

SEQ ID NO: 749148 - DNA, 101 bp, Homo sapiens
ctgcgcctcccgccgcgcccgggatgtattcgtccccgctctgcctcacccagaaactggcgatggaatatgagaggagccctctggaaagaaaaggacag

SEQ ID NO: 749149 - DNA, 50 bp, Homo sapiens
acttaaaagatgccacctctaaggtgaccctggcaaagatgagagtgcac

SEQ ID NO: 749150 - DNA, 75 bp, Homo sapiens
gcggagggtcgaggcggcgcggcctgagctctttcaccatgcctggatcacttcctttgaatgcagaagcttgct

SEQ ID NO: 749151 - DNA, 98 bp, Homo sapiens
gatgatcacgcagctggctggcttcagtggaccaatcctcgtggtcattgaaccgctattgattgatgaagattactatgctagagtggaaggccgag

SEQ ID NO: 749152 - DNA, 100 bp, Homo sapiens
tcttctgggctgtgctggtcacagccacactctgcaccgctaggccgtccccgaccttgcctgaacaagttcgagaaaagataccagtgttaaaatcaaa

SEQ ID NO: 749153 - DNA, 111 bp, Homo sapiens
ctcccgccggccccaaagacgctaaacgtgccctactctgccccgggggagaggtgtggacactgccagcggctgcagccgacttggaatgacctgggagacaaatacaac

SEQ ID NO: 749154 - DNA, 75 bp, Homo sapiens
aggctggcagcgaagaagatcgaaaattaaacctcagtgggtaattccagaattgattggccataccattgtcac

SEQ ID NO: 749155 - DNA, 82 bp, Homo sapiens
catggacctaatgaacgggcaggcaagcagtgtcaatattgcagctactgcttctgagggtgaatcgaaacgcatcaccctg

SEQ ID NO: 749156 - DNA, 107 bp, Homo sapiens
acgaccggatcctgaggaggcagctgcggtggcagctgctgagttctcggtgaaggtgagaagccctaccactgcaactgggacggctgcggctggaagtttgcgcg

SEQ ID NO: 749157 - DNA, 101 bp, Homo sapiens
ggcgcctcgggtccccgcaccacctcctgctgccttcccgtcgccgctcccgaagcttttccagactattgcccagaagaaaagatgtttggttttcacaa

SEQ ID NO: 749158 - DNA, 100 bp, Homo sapiens
agatggagattcaggagatgcagctcaaagaggccaagcacattgcggaagaggctgaccgcaaatacgaggaggtgagaagccctaccactgcaactgg

SEQ ID NO: 749159 - DNA, 100 bp, Homo sapiens
gatggtcttgccttcaatgccctgatccaccggcacagaccagagctgattgagtatgacaagctgaggaaggtctatcatctcatgaagaactgctggg

SEQ ID NO: 749160 - DNA, 83 bp, Homo sapiens
ggcttgtccttgctggtgcatgcgtcgtcggcctctgggcagcagggcagtggaggagggcctgacgtacaaattccatgcgg

SEQ ID NO: 749161 - DNA, 96 bp, Homo sapiens
aaggaaacaaaattcgatttgcaaatcattcagtgaatcccaactgttatgccaaagtttatgtgaagaaccagctcagtgggactctacagatta

SEQ ID NO: 749162 - DNA, 83 bp, Homo sapiens
cctcgcctttgccgatccgccgcccgtccacacccgccgccaggccgatacaaagcaggggaaaaggagccagatcccaagac

SEQ ID NO: 749163 - DNA, 156 bp, Homo sapiens
gagaggagccaagaaaatcaatctaaacatttgtgggaagttgtattcatcaataatgaaatgctgactaaggaacaagaagtctggcaagttgatgagcagatagatcactacaaggaaagccaagacaaacttccttggcaagctgcattcata

SEQ ID NO: 749164 - DNA, 75 bp, Homo sapiens
cctggacctggagaagaatgagaagattgttgatcgaatcgacaatgatggggatggctttgtcactactgagga

SEQ ID NO: 749165 - DNA, 75 bp, Homo sapiens
tggcagcatgaaagttagcagtcagttctcctcgggtctcggggacttgacatatcccacatctcccagcgattg

SEQ ID NO: 749166 - DNA, 82 bp, Homo sapiens
accctttttaatattggccaatcatcaagacaagccagcagctcgctcagtacaagagtgtaaggagaggatgaggcccgtg

SEQ ID NO: 749167 - DNA, 75 bp, Homo sapiens
ggacaaggggctactcctgcgctgctacacgcagctgctacaggagctgagagaccctaccctcactttccgtct

SEQ ID NO: 749168 - DNA, 87 bp, Homo sapiens
ggaatcggggcgcttcgccccgggccccccagcatgaagaccccggcggacacaggagaactacgatgacccgcacaaaacccctgc

SEQ ID NO: 749169 - DNA, 98 bp, Homo sapiens
tcgttggcagcttaaccctggaatgtatcagcaccggacagtcatcgctgaccaagattggcatctctacactgaccctcgggagatctttgaggtgc

SEQ ID NO: 749170 - DNA, 83 bp, Homo sapiens
gatttactctttgagctgttgagagatgtgacgaaaacaccagaactaaagatgactcagagccatctggagaagaaacagta

SEQ ID NO: 749171 - DNA, 95 bp, Homo sapiens
gcagaggaaaataagaacacagtggatgtcgagaacggtgcttctatggcaggatatgaaatgcactcggtgatggaaagagagccactattctg

SEQ ID NO: 749172 - DNA, 75 bp, Homo sapiens
ttccccagctatgtggaactaggtgtggcgaaatcttgtttgagaaccccgatcagaatgccaaatgtgtttgca

SEQ ID NO: 749173 - DNA, 75 bp, Homo sapiens
cgacctcagatgctcccttctgctcctggtaggtgagctcgtgaaacaatatgaagaggagaaaatagcctttta

SEQ ID NO: 749174 - DNA, 82 bp, Homo sapiens
ctggagccctgcattcgcggcgtgtgcagactacagtggtagtggaggccgaagcggcgggaacagctacggctcaggcggg

SEQ ID NO: 749175 - DNA, 100 bp, Homo sapiens
aaaacaagactggggctgctcccatcattgatgtggtgcgatcgattgtccccttggggcggaaagaagccaaggccaaggagctggtgcggcagctgca

SEQ ID NO: 749176 - DNA, 100 bp, Homo sapiens
gggatccgcaagatgatggatgagtttgaggtggtggaagctacaatgattttgggaattacaacaatcagtcttcaaattttggacccatgaagggagg

SEQ ID NO: 749177 - DNA, 82 bp, Homo sapiens
gagctgctggaggacgagggccagctgacggagatggtgcagaagatggaggaggcgccatgtcagaaccggctggggatgt

SEQ ID NO: 749178 - DNA, 82 bp, Homo sapiens
gcgtgcttcgtggcccggcaccgttccgcggacgtgctcgttcagaatgaccgaagaagcatgccgaacacggagtcagaaa

SEQ ID NO: 749179 - DNA, 75 bp, Homo sapiens
cagatgccgaggtggatggtgtggatgaagaggaggaggacgaagctgggcaagtctgtggtggccaaagtgaaa

SEQ ID NO: 749180 - DNA, 75 bp, Homo sapiens
catccataaaactgaagatgtgaatactctggttgggagtcctcctcttgatcctactgagcgttttcttcctga

SEQ ID NO: 749181 - DNA, 100 bp, Homo sapiens
cacctggtcctgcgtctgagaggtggacattgatattaagatccgatcttgtcgagggtcatgcagtagggctttagctcgtgaagtagatctgaaggac

SEQ ID NO: 749182 - DNA, 101 bp, Homo sapiens
tggagccatggcggagtcggcgcctgctcggagcttggggcttccttggtcgcacccaccacctgcctgcccactggtcagccttcagggaccctgagcac

SEQ ID NO: 749183 - DNA, 100 bp, Homo sapiens
cgacgcagcgatgggcaacacggtgcaccggaccctgccagttgctctaggtcgtaaccagcctttgaaaaaggagaaaccaaaatggaaaagcgattat

SEQ ID NO: 749184 - DNA, 100 bp, Homo sapiens
cacggagaggagctgcctgctcaaagagctgcaccgcttcgagtctattgccattgcccaagtatggaacctcaaagtctttgtgacaatggaaaccaaa

SEQ ID NO: 749185 - DNA, 90 bp, Homo sapiens
ctggtttggcttatatatgtcagacgtatgagcgtttctcccatgttgccatgatcttgcaatggtacaacagctccatgaacgtgatct

SEQ ID NO: 749186 - DNA, 46 bp, Homo sapiens
tcctgtcaccaacaaagatttcagcatgaaaacattccttttgaag

SEQ ID NO: 749187 - DNA, 100 bp, Homo sapiens
cttggacagcagattttggtttaatatctgattgggacaacattcagacccatttccagtcatgagatccatcagttacacaagtgacaagaaatgttcc

SEQ ID NO: 749188 - DNA, 97 bp, Homo sapiens
ccctagcagcagccgccgccagagaggcccgcccaccagttcgcccgtccccctgccccgttcacaatttgatttatgaagactctatggatctaat

SEQ ID NO: 749189 - DNA, 100 bp, Homo sapiens
gacaccaacagtgtggtggagaaagcaatggatgaaatcaaatcccaagtccagggaccttgacccagcccctctcagcagacgcttcatgataggaagg

SEQ ID NO: 749190 - DNA, 100 bp, Homo sapiens
ccgccgccgccgccgcggtttgtcgccagaaggaagatggcggatctggaggagcagttgtctgatgaagagaaggactcacaccacccggcaagaactg

SEQ ID NO: 749191 - DNA, 98 bp, Homo sapiens
cctacgtgaacaacctgaacgtcaccgaggagaagtaccaggaggcgttggccaagggccttctttcaaggcaaattgaaaatcactggcaacatggg

SEQ ID NO: 749192 - DNA, 50 bp, Homo sapiens
gcttctcatcctggacatctgatggagttttaacattgaatgcggagaac

SEQ ID NO: 749193 - DNA, 100 bp, Homo sapiens
cttcgtttgccattttcttatggagaactgtccttgttacagccgctcaggaagcaatcttgcatgcgtctggaaatggcacaaccaaggactactgcat

SEQ ID NO: 749194 - DNA, 74 bp, Homo sapiens
cgcccgccaccctgcgctgccgccgctctgaggagttaaaggaatgaagccaagagtgatgaaagaagctgtat

SEQ ID NO: 749195 - DNA, 98 bp, Homo sapiens
ttgacgagatgaacatcgagatcatccgcaacaccctctacaagggaactctaatgatccaggacaaagaagttaccctggagtatgtatcaagcctg

SEQ ID NO: 749196 - DNA, 100 bp, Homo sapiens
gcaagtgacttgtccagagccactctgtcaaaaggggacttgagtcctcagggctgttgactccaaagctgacaagcagctgcatatctatgtgagactg

SEQ ID NO: 749197 - DNA, 73 bp, Homo sapiens
ggagacaagctctgtccgcggagaggagtgggacaactcctaaagtgctacagttgaaactccagcagcgccg

SEQ ID NO: 749198 - DNA, 75 bp, Homo sapiens
gttaaagagacccgttcagagtcctacagtggcaggaccctgatgcttggtgtgacctgagtaaatttgacctcc

SEQ ID NO: 749199 - DNA, 82 bp, Homo sapiens
ctgaagcgcccgtccattccaagaggccacaagaggaagctgaatgaagaggacgccgccagcgagtccagcagggagtcca

SEQ ID NO: 749200 - DNA, 75 bp, Homo sapiens
tggagccaaaatgctattgccctgtcttcatcaacatttaatcaaggcggggtttcaccatgttgcccagactgg

SEQ ID NO: 749201 - DNA, 95 bp, Homo sapiens
gctgaagaatctccggagcgaggaacagaagaagaagaaccggaagaaactgtccgagaagcccaaagaatactcccccagttgcaagaggcgca

SEQ ID NO: 749202 - DNA, 119 bp, Homo sapiens
catgtctcctatcgtgcagtataatgactggctggaagaggaggtattgttgcagcatctggcagtgagactgaggatgaggacagcatggacattcccttggacctttcttcatccgc

SEQ ID NO: 749203 - DNA, 74 bp, Homo sapiens
aggcgtcctgttcttcctgggggactggcaggtcaccctgctgattgccttcatctgtgtgcggagctccctgt

SEQ ID NO: 749204 - DNA, 90 bp, Homo sapiens
gagctctcagaggctaagaaggtggagaccggagaagctgtgagggccgcctttttgcctatcctgacactcaccgccatcgcctgggac

SEQ ID NO: 749205 - DNA, 100 bp, Homo sapiens
agcagcttccaagagaaccaatggaatggagaaggtatcgagaaccttccctgcgaacttcagaggaacttccagctgatgcgagagctggaccagagga

SEQ ID NO: 749206 - DNA, 98 bp, Homo sapiens
gtcgctccgtcatgcggacctcagttttctcatctgtccgacgaagacaatggcgatgaccactcagaaggaggcctggtggagaaccacgtggacag

SEQ ID NO: 749207 - DNA, 90 bp, Homo sapiens
ggccgacccttcctgtcgctgacggcgactgcgggaggccagagtaatcaagtcagaggattatatgacttttatctgcctagagaagaa

SEQ ID NO: 749208 - DNA, 80 bp, Homo sapiens
ccaggagatacaagcactttaaagtcacaacaacgtctattgaaagcccattcaacacttttccagccattaactccagg

SEQ ID NO: 749209 - DNA, 96 bp, Homo sapiens
tgaggatatgccctccattcttgctgatgtattctgcatattagatcttcttcagcagtatcgttctgctgtgtgcaaactagacagtgtgaataa

SEQ ID NO: 749210 - DNA, 95 bp, Homo sapiens
agaagccctttgaggagcactggaggaagcacaccctgtcctatgtggacgtcagcactgggaaggctggagtgcagtgacataatctcagctca

SEQ ID NO: 749211 - DNA, 51 bp, Homo sapiens
agacggtggagctccataagctaaagtttaagtgctgtggggctgctaact

SEQ ID NO: 749212 - DNA, 101 bp, Homo sapiens
gtccagcggctccaccgaggccatttaccggcgctacagcaagttttttgacctccagatctgtgccatcattggcgggaccttcaccgtcgccggcatcc

SEQ ID NO: 749213 - DNA, 100 bp, Homo sapiens
agctggatctagaggcataattaggataataaatcctataacaatgcagtgtataaaggttttggaacttgaaggtgaaaaaggagaatggggatttaaa

SEQ ID NO: 749214 - DNA, 96 bp, Homo sapiens
tttgcattgtcttggctgttgagtgaagaaaaagagcaggaagtcattacatgattgctctggaagcagccaaagcactggatgacaagaactgct

SEQ ID NO: 749215 - DNA, 100 bp, Homo sapiens
ctctgcgaaaggccgagagaagctggtcctgctcacgagagaaaaaggaggactacactttgttatatgaagaggcaaaatattttcagcttcagcccat

SEQ ID NO: 749216 - DNA, 101 bp, Homo sapiens
ctgatttcctgcttctccttttcatgagtgttcctgtggtctctgcacctcctttctgaactttatattgctgttggaatatctggagccatccaacattt

SEQ ID NO: 749217 - DNA, 75 bp, Homo sapiens
attcagctcaggaccaggcaccttctgtggaaggcatttatgtttgaatcatctttaagtctggcggtcacaaag

SEQ ID NO: 749218 - DNA, 100 bp, Homo sapiens
ggcaagaagcgctttgaagtgaaaaagacaattgtggcaattaataaagacccagaagctccaattttccaagtggcagattatggaatagttgcagatt

SEQ ID NO: 749219 - DNA, 88 bp, Homo sapiens
attgcgagtcgcactgcgcggagaaggggtccgagggcagtctgtgtcaaacgcagctactacccacagatggcatgatccgaaaaca

SEQ ID NO: 749220 - DNA, 75 bp, Homo sapiens
atccgccagcatgcccaagctcttcctgcacctggaaaagagagagaatctgggattctgggaagcctgcgagga

SEQ ID NO: 749221 - DNA, 90 bp, Homo sapiens
gagccggccgagcggcgacggaccgcgaggtcactacaggaaaagatatcttcattaaagtgcaacagcacactgagagcaacacaccac

SEQ ID NO: 749222 - DNA, 75 bp, Homo sapiens
acccctaaaagcacctggccccgctacagcaaaccagggatcaccttcctgtctggaggccagagtgaggaggag

SEQ ID NO: 749223 - DNA, 100 bp, Homo sapiens
tgtggctgatgctgatgcccgtcattggttacaactgagtcccaccgatgcttcaaatttaacagggttttttacacacattctattagatgaagctgcc

SEQ ID NO: 749224 - DNA, 75 bp, Homo sapiens
actatgcagagacatgagatggtagccaacccctcaggtgatgatgaacagtctacacagatggctgcaagttgg

SEQ ID NO: 749225 - DNA, 82 bp, Homo sapiens
ggagagaatcactagtcctgtgctcatgggggactgcttcaccagtttttctactggctccttctttgaactggatggacgt

SEQ ID NO: 749226 - DNA, 97 bp, Homo sapiens
cttgaatgtctgccgaaatgttcaagtttaccaaaagagaggcaccgctggaacactaatgagagtgatcagcagctggactgtgccttggacctaa

SEQ ID NO: 749227 - DNA, 75 bp, Homo sapiens
ggcgacccattcaggcacttatggccatttcagccaggtgtcagatgcctgatacattcaattcatggtttctta

SEQ ID NO: 749228 - DNA, 75 bp, Homo sapiens
cggccatcgtcatcctgctgctgaagatctggaagacgcgctcctgcgccggttgttatggagttgatggagaga

SEQ ID NO: 749229 - DNA, 75 bp, Homo sapiens
accagaggactagacctgaagtttcaaaggtgcgagaagatgtactaaattcattgaataacaactttcttcaaa

SEQ ID NO: 749230 - DNA, 83 bp, Homo sapiens
acaagttccatcccacctttgagtcagtactatactggcaattgctggagaagattttgcaattgttgcttctgatactcgat

SEQ ID NO: 749231 - DNA, 75 bp, Homo sapiens
ctattgtaagtgcagatggaacacaacagatgaggggtatgtctgataagtcactccgactagtgctgtccacat

SEQ ID NO: 749232 - DNA, 95 bp, Homo sapiens
gaagtttgtctcctgtcctcctgaccctcacaaagggatcggtcaaaaaaattccagtcatttattgagagctgcttggtaaagaatcacagcca

SEQ ID NO: 749233 - DNA, 100 bp, Homo sapiens
cttgggggagccctggagggcgggcttccagtggggggagagcccctggcaggaacccttctctgaagcaacagctcttctcctacgccattctgggctt

SEQ ID NO: 749234 - DNA, 80 bp, Homo sapiens
tcagttcaaagaaagaatgcagtctttctatacctggtaatggaactgctggtccatctgaataaacgtataaaaagccg

SEQ ID NO: 749235 - DNA, 100 bp, Homo sapiens
cggatggggaacccctgagccgcatggactcggaggacagccagcagccagcttcgggtgtagcctattctcatccaactacagttgctagctacactgt

SEQ ID NO: 749236 - DNA, 101 bp, Homo sapiens
aacctcagccctaacggtggtggagaacccaaagaaagtgactgagaccgaagatgatagtgatagtgacagcgatgatgatgaagatgatgttcatgtca

SEQ ID NO: 749237 - DNA, 74 bp, Homo sapiens
ccaattgaccggacagatgatgacattggttatatcttaagtgtggtgctgctaacattgcccaggcagcatct

SEQ ID NO: 749238 - DNA, 100 bp, Homo sapiens
ggtggcctggacagtgaagggagagaagtggatttgggagacatttaggagataaaataccatgaggagtttgagaagagccgcatgggccctagcgggg

SEQ ID NO: 749239 - DNA, 100 bp, Homo sapiens
caaagctacaacctgccagcctatgctccatacctgccctgcgagggaaagcaggcaggatgggagagtcgccgatagaaccacctcttccctgcctcct

SEQ ID NO: 749240 - DNA, 85 bp, Homo sapiens
ctcagcccaggacctccaggggaacaatgaggcctacgcagagctcatcgtccttggcatagaatgtcaagctaaccaggcgtcc

SEQ ID NO: 749241 - DNA, 51 bp, Homo sapiens
gccatggggatgaacatgatttcaaagtagagacggggtttcaccttgtta

SEQ ID NO: 749242 - DNA, 89 bp, Homo sapiens
ccgagccccgggccctggggcaggagcacgacatcaccctcttcgtcaaggaaaaatatattcagggggaagagatgtaatagatttca

SEQ ID NO: 749243 - DNA, 75 bp, Homo sapiens
gtctcaggggctgaagtttgtgagatcttcagtgtctattggatttttccaagagaaagtttgtaaaattcctta

SEQ ID NO: 749244 - DNA, 82 bp, Homo sapiens
ggcaaaggcaagagtaacagcagcgccgtcccgtccgacagccaggcccgggagaagtgtcagcatttgcaggtatacagga

SEQ ID NO: 749245 - DNA, 80 bp, Homo sapiens
cgggtccagacccacgcggcgccagttctccggcgggaaggaaaaccgcgcagagagatgaaggatttgggggcagagca

SEQ ID NO: 749246 - DNA, 75 bp, Homo sapiens
cttcgtgagaaagaaatcgacgtgctgttttcataggaggcgacaggaagaagggtattacagccgcctggaagc

SEQ ID NO: 749247 - DNA, 100 bp, Homo sapiens
gtgcacatccaggctggtcagtgtggcaaccagatcggtgccaaggtatccacggaagaagttctgggttgggaaacccattgctcgagtggttaaaaaa

SEQ ID NO: 749248 - DNA, 75 bp, Homo sapiens
ttcgattcaacggggttccggaccgcgctgcgctatggagcagggaccctccattttccatatccaggaaaatgt

SEQ ID NO: 749249 - DNA, 131 bp, Homo sapiens
cctagcaataccaccagcagcaccagcaacagtggcaatgagaccagtggaagcagcaccatcggggagacaagcaagctgctgcatctgaagccccccaggatgtgacctacgcccagctgcacagcttg

SEQ ID NO: 749250 - DNA, 75 bp, Homo sapiens
atagtgcctttcagccctaccaggttgttcagaatgaagaaaatgaaaactgtttgaagaaagtggatccccagc

SEQ ID NO: 749251 - DNA, 100 bp, Homo sapiens
tcgggaagctccatccgaatgtgtctgccccccaggacgctgtgcagagctgcaagtccgtatcactgaggctgtggccacagccactgagcagagagag

SEQ ID NO: 749252 - DNA, 75 bp, Homo sapiens
ccagagcgccgcgcacttcgtcatgttcttcgcgccctggtattagaaaactactcggatgctccaatgacacca

SEQ ID NO: 749253 - DNA, 95 bp, Homo sapiens
ctgagacctgtcaccccgactcaacgtgagacgcaccgcccggactcaccatggtaagaatgattgatgttggctgatattggagtgctcattca

SEQ ID NO: 749254 - DNA, 96 bp, Homo sapiens
aaggagtggacttgattgatatatatgctgacgaggagttcaaccagaacaccttccaccatgaccacctcagcaagttcccacttaaataaaggc

SEQ ID NO: 749255 - DNA, 118 bp, Homo sapiens
gcgaacgcaggaaagtcaggctaaaagtgtctgctgctgctgccgccccccactccgcctccgggagaggtgctggagaatctggtaaaagcaccattgtgaagcagatgaggatcct

SEQ ID NO: 749256 - DNA, 98 bp, Homo sapiens
gctgatgaaagatgacggctccttctgcgtctgtgaggccaatgcaaatgacctccaagcagaaacgcccctgggggacctgtggcatcatgacttct

SEQ ID NO: 749257 - DNA, 88 bp, Homo sapiens
tcagagttgtttcctccatttgctaaaggaatagtgtttggaaagcagatggtggagctgaatatgccacttaccagactaaatcaac

SEQ ID NO: 749258 - DNA, 135 bp, Homo sapiens
cacatgaaagttttcagcctcatccagcaggcggtgacccgctaccggaaggccatcgccaaggtagcagcaattgcagagacagatgaatctgcagaatcagaaggtgtaattgattctcataaacgtagagaa

SEQ ID NO: 749259 - DNA, 101 bp, Homo sapiens
gaaatataacattcttggcacaaatactattatggataagatgatgatcttgcaggagagagagttactgcctgtgaagaaatttgaaagtgagattctgg

SEQ ID NO: 749260 - DNA, 51 bp, Homo sapiens
tgagggctcccagacatatataatggaaaaagaagatgtccctgtggaaat

SEQ ID NO: 749261 - DNA, 83 bp, Homo sapiens
caagtatgcagccaagcgcctgagaaaggagccgaaaggcgaggccagctcttccaaccctgccacgcccatcaagatcccgg

SEQ ID NO: 749262 - DNA, 97 bp, Homo sapiens
tcaccccgcaacctggccatggaggcaagctctttttggagaccatgttaagaaaccccagagcctggaagacacggacttgagccggctctacaca

SEQ ID NO: 749263 - DNA, 100 bp, Homo sapiens
ccaagtctctttccagaggccaggctttatgggagcatgggttaccagcgacgcaccctgtagaaaatctggtgtattaactgtgaaaattttagagctg

SEQ ID NO: 749264 - DNA, 98 bp, Homo sapiens
cgcacccagcgcagaaggctgctgccgccggacgcctccattgtttgaccacaacaagggccggattctcacccagatgctcagtgacctccaggagt

SEQ ID NO: 749265 - DNA, 100 bp, Homo sapiens
tgtggcagttgtggtcagtttcgctttgattgctaccctggtatatgcacttttcagaattcaaagaagctttttcactatttgacaaagatggtgatgg

SEQ ID NO: 749266 - DNA, 100 bp, Homo sapiens
cagaaatctccactattttaacagtgatagggggaatcctagcaggacacagccttggatcaggacagagacttgggggccatcctgcccctccaacccg

SEQ ID NO: 749267 - DNA, 98 bp, Homo sapiens
ctcagctccatgagctccatgaaacccactctgtcgcacagcagccattgtttgatgtcctgtgactgagaaaccaggctttaaactttatgcctttg

SEQ ID NO: 749268 - DNA, 75 bp, Homo sapiens
tcttattgatcctccagtcgagagccatgtccattggagcccgttcccaatcagctcgtacttacttggagagac

SEQ ID NO: 749269 - DNA, 101 bp, Homo sapiens
caaactttgggcacaagtcatgaagccgacaagcccgggagacacagtgtcagaattacaaggtggtccagctgctcacctgtgacctgctactgtcgcta

SEQ ID NO: 749270 - DNA, 50 bp, Homo sapiens
ttaccaaatatatgatgtttccggggacaagatgccaactggcaagcagc

SEQ ID NO: 749271 - DNA, 82 bp, Homo sapiens
ccctccttcacgccacacacacggggatatgagactttctactcggaatatcctgagtgttgcgtggatgtaaaacccattt

SEQ ID NO: 749272 - DNA, 83 bp, Homo sapiens
ctcagctcctggggctgctaatgctctgggtctctgctctttcaccatgcctggatcacttcctttgaatgcagaagcttgct

SEQ ID NO: 749273 - DNA, 50 bp, Homo sapiens
acgaggaactcaaagtggatgaggaaaaacccagcgggtgccgcttctcc

SEQ ID NO: 749274 - DNA, 100 bp, Homo sapiens
cgaaaggaagcaagcagttcagaagagccaaggaataaacatgcaatgaacccaaaaggctccattgggtgtgatattcctggctggtatttgtgggtct

SEQ ID NO: 749275 - DNA, 100 bp, Homo sapiens
cagtagccgcagcaccgcagccttgggcctcgcgccggctatggccgtgccctggggctgagccctcagaaatgagccgtcagactgctacagcattacc

SEQ ID NO: 749276 - DNA, 82 bp, Homo sapiens
cttggtccgcggcatccgtaaccacaaggaggacgagctctacgaactcgacggggaccccaagaggaaggaattcctggat

SEQ ID NO: 749277 - DNA, 100 bp, Homo sapiens
gcacaatccaaagagacaaatggaaaccagtcaactgatattgatagtacattggccaacttcctagcggtgggatatgagcctcttcctccaacaatag

SEQ ID NO: 749278 - DNA, 82 bp, Homo sapiens
tccacaccccctccgtgggtgtgtggttgctgcttttgctcagaggacatccatgaccctaatggtctttttgttcaagata

SEQ ID NO: 749279 - DNA, 101 bp, Homo sapiens
cgagtccttccctggactccagtcccttgtgggaaacaatccctcgcctccggaggcggcgaggagcggcggcccatgaaacccctgaaggccaccgccac

SEQ ID NO: 749280 - DNA, 100 bp, Homo sapiens
cacattccagattgtgggcacgctgtccaagcctgacagcccgcggcctgactttgcggtggagacgtactctgagatctattgggaaactgattataac

SEQ ID NO: 749281 - DNA, 90 bp, Homo sapiens
catgatccataatcggtttcaagggctgctgtgaggtttcagtgagataacggcaagagactcgcccaggaaaccgatcattataacccc

SEQ ID NO: 749282 - DNA, 100 bp, Homo sapiens
aacacctctacctcctgcgaggcctcccgggctccgggaaaactacactggccagactaatagggatgccaaaggaaaaatatgatcctccagatcctcg

SEQ ID NO: 749283 - DNA, 75 bp, Homo sapiens
atccaaatgcgattagttgatgtggcctgcaaggtggccattaagcagatgaatcttcagcagcagcccaagaaa

SEQ ID NO: 749284 - DNA, 82 bp, Homo sapiens
gccactccagtcggtgttgagcacggcgagcagtctcaggcctttagtgatgatgttctttaaggaaaaacagtagtgctct

SEQ ID NO: 749285 - DNA, 90 bp, Homo sapiens
cagattcgcagtggtcgcttcttctccttgatgccatggacaatattaccaggcagaaccaattctacgatacccaagtcatcaaacaag

SEQ ID NO: 749286 - DNA, 75 bp, Homo sapiens
attccaagtaactcttatttgaaccttctgataacttaagagagattctccaaaatgtggccagattgcagggag

SEQ ID NO: 749287 - DNA, 82 bp, Homo sapiens
ttcattgtcttttccgcccgcttcgatcgcctcgcgccggctgctctttccggatacttccgggtcatcctcctcctcctcc

SEQ ID NO: 749288 - DNA, 50 bp, Homo sapiens
caaaaatagtgatagctttgataatgctgtccccggcataggtccatctc

SEQ ID NO: 749289 - DNA, 100 bp, Homo sapiens
tgacctgtaaatcatcctttagcagagagagatcatcattgcctgaatttagctttgtgactgcaagagcaagaccagttcctgtctggagacgactgtt

SEQ ID NO: 749290 - DNA, 99 bp, Homo sapiens
tctaaaggcttccaactcacccgacaggaaatagttgctcttttaaatgcttttggaagatgagaaaactgattctgagagattctgagtgatttgccc

SEQ ID NO: 749291 - DNA, 97 bp, Homo sapiens
agcaagagggaccccagaaactgatccgcaaagtgtctacctcggggcagatccggaccaagggaggttatattcaaaagaaaaaggaactgtgggg

SEQ ID NO: 749292 - DNA, 98 bp, Homo sapiens
tgccggactccgggccgcaggcagtcccgcggcagcaggatcacagctcagggtctgagttgtgcactgcctatgatccactccacagaagttctgat

SEQ ID NO: 749293 - DNA, 100 bp, Homo sapiens
ggtttcggcacatggagattgatgtgactcaggctgtagcaaagctggggatgtctcagattcctcagaaggaccttttggagactgttcgtgtaagaga

SEQ ID NO: 749294 - DNA, 75 bp, Homo sapiens
aagaaaacgacgagaaccagagaggagacgactttcttctccaaggacttaaagcccagtaatatagtagtaaaa

SEQ ID NO: 749295 - DNA, 100 bp, Homo sapiens
ctacctggtgcagggcctgattgaggactgccagctggcgctgcagctcaaatccttttaataaagaagagctgacagctattttgaaatttggagcaga

SEQ ID NO: 749296 - DNA, 82 bp, Homo sapiens
ctgcaagtcaccatggacgctgaaggccacggcagagacaacgtgtgtaccccaagtgcacatggctgaccacccctaaaag

SEQ ID NO: 749297 - DNA, 74 bp, Homo sapiens
tgggccgcactggcatttgcagctattcagcttcgtcagcaattgaagtggttgatatgtgaactctgcagttt

SEQ ID NO: 749298 - DNA, 101 bp, Homo sapiens
ctgcggcgcgcgcgagccgagtgtgagcggaaaggggcccggcgtctgcctcgagactgaagaccgggtatttgtggtgcagcagattcccaacagtaacc

SEQ ID NO: 749299 - DNA, 99 bp, Homo sapiens
tgggacacctgactacatcgccccagagccggactactttagttctgtggccacagtggtgtatcttcgcaaagagaactgcatgtaccaagcctgccc

SEQ ID NO: 749300 - DNA, 75 bp, Homo sapiens
gaaaactctctctgcaagtccttaactttgttcactcattccaggctggaatgataaaaagtgataatgaagagt

SEQ ID NO: 749301 - DNA, 95 bp, Homo sapiens
tacctgccacccattgtgtcttctcaagaaggaccgtataatagacgctggccccaaaggaaactactctcgatttatgaatcacagctgccagc

SEQ ID NO: 749302 - DNA, 100 bp, Homo sapiens
tgactacgtctttgactggaacatgctgaaattcggaattgatgttgatgctgaaaattgtgcagtgtgtattgaaaatttcaaagtaaaggatattatt

SEQ ID NO: 749303 - DNA, 80 bp, Homo sapiens
ggcgagtttccgatttaaagctgagctgcgaggaaaatggcggcgggagatgttcgcacacaagccatgtaccagatgat

SEQ ID NO: 749304 - DNA, 95 bp, Homo sapiens
gcagcaaatccaacattggcttttggtcagggtcttgctactggcatgccagctactgaagtggtgactgtgtttgtatttcaagaaccatcact

SEQ ID NO: 749305 - DNA, 75 bp, Homo sapiens
cgctgcttaagagacattctccaggctggttctcctgaactgagaagagcaggagttcacgtaacaaggaatggc

SEQ ID NO: 749306 - DNA, 75 bp, Homo sapiens
ctagcggactcttcttcgccttcgagcatgaacaaccgggaggtgctggagcaggtggagcgaggctacaggatg

SEQ ID NO: 749307 - DNA, 101 bp, Homo sapiens
agcacttcgaggtgctcatcagctaccaggaggaaactatggtccaggaggcagtggaggaagtgggggttatggtgggaggagccgatactgagcttctt

SEQ ID NO: 749308 - DNA, 75 bp, Homo sapiens
caaacttaatataccagacactgcaactgtttccaatgggtcctgggtcagatggtcccatgggtggattaggag

SEQ ID NO: 749309 - DNA, 75 bp, Homo sapiens
gggatgattacagttcttcctaaaaaagattttcttcatctcaactcacctcaccactacggatccaagcctgac

SEQ ID NO: 749310 - DNA, 100 bp, Homo sapiens
ctcagtctgcggccaagactccatcctgcaagacactggcttcatgtcctattgaccgtaaaccttttcaggcagtgtttaaattcagtgcattggaagg

SEQ ID NO: 749311 - DNA, 74 bp, Homo sapiens
cggagtgaggcgcagtcgttcgcccaggctttggcccggcttccggagagtactattaatcccgtagatgcaat

SEQ ID NO: 749312 - DNA, 100 bp, Homo sapiens
ctttgtgtaggttgttcaacagtgttgtgccagcctacaggaggaaaggccagactcacagaagggcccatctggttagacaatctccactgtactggca

SEQ ID NO: 749313 - DNA, 100 bp, Homo sapiens
ggtgatcctggaaccgttgattggagatatgcccttagttggagctttgtctatcttcttccttaggaaaccaatggtgtgggagagcggctgcgtggtg

SEQ ID NO: 749314 - DNA, 100 bp, Homo sapiens
tcggggcccccgggctccttcttcggattctcagtggagttttaccggccgggaacagacggggccaattcctgtccccccagcagcatggcatcgtgtg

SEQ ID NO: 749315 - DNA, 82 bp, Homo sapiens
gtgttcgactgctagagccgagcgaagctaaggtacctgccgtgggcagatctgagctttcttcttggacaccccataccca

SEQ ID NO: 749316 - DNA, 100 bp, Homo sapiens
ggcaacatctgcttctcctcctcagagattgactggggcgactttggggtagaggcagtgtctgaggggactgactctggcatctctgccgaggctgctg

SEQ ID NO: 749317 - DNA, 100 bp, Homo sapiens
aactgcacgtgtacaacacggctcgggttcatgacgctctcgatattcctgtgcagaaacctggaccacgtctacaaccggctcgctcgataccgttagg

SEQ ID NO: 749318 - DNA, 101 bp, Homo sapiens
cggggacgaggacgaggacgaggaaacctttgagctgcggaccccgagtccagcgggcggcgggagggtccagggagtcggtagtaagggatggcgggacg

SEQ ID NO: 749319 - DNA, 75 bp, Homo sapiens
cagacagccaccatgtcaccagatatgaacacatgtacatctgatcagttccagtgaaggcctcccccgtcgccg

SEQ ID NO: 749320 - DNA, 75 bp, Homo sapiens
cccgttcagcacaccagtggggcagtgcctcgctggtgaattctatagccaagacgtatgttggaacaaatgctt

SEQ ID NO: 749321 - DNA, 87 bp, Homo sapiens
cttcagtccgtggactttcccgctgcacactgccctccgaagtcggggacgcgggctcgtctgcaaaatgaatgttcaccgtcgatg

SEQ ID NO: 749322 - DNA, 82 bp, Homo sapiens
gaaggatgagctatgacttgctaaacaatctgttgcttggaagctcgaagtctggctgtggccatgggagatacagtagtgg

SEQ ID NO: 749323 - DNA, 82 bp, Homo sapiens
aaacccaaagatccccgttcctggagattctgattgaggtgtggacactgccagcggctgcagccgacttggaatgacctgg

SEQ ID NO: 749324 - DNA, 82 bp, Homo sapiens
ggatctcagagcggtatccctgtctcagcgaagtggtgaaagagcatcagatgacagtcatgtccctttccagggacctcaa

SEQ ID NO: 749325 - DNA, 123 bp, Homo sapiens
agaaattggctgctgctgtcttctcccttgccataaagctacaaccatccatcatctttatagatgaaatagaacattctagtatgccagtagaaaaaaatatcactttagaaaggccttcta

SEQ ID NO: 749326 - DNA, 100 bp, Homo sapiens
cgggaatccctggggatggtgttctccaccgtcaagacctttgagccgcctgagcgactaactcctgcgcccctgagggctctggctccgctactgcatc

SEQ ID NO: 749327 - DNA, 50 bp, Homo sapiens
accacaaaccgctgccagaaaaatcttgtagaaaatttcagctgtagccc

SEQ ID NO: 749328 - DNA, 75 bp, Homo sapiens
ggtggttgccactcacctgaggatgaaactggaggcgaccagtgcccagaatatcgagttcctacaggtgattgc

SEQ ID NO: 749329 - DNA, 97 bp, Homo sapiens
gcgccgagggcttggaatctcgagcgggaaaaggatgaagatgagctggattcccacaccatggtgaagactagtgtggagagtgtgggcaccatgc

SEQ ID NO: 749330 - DNA, 98 bp, Homo sapiens
ctgctggagacctgccatttccaggccttctggagactgagtcgccctgtgttgcccaggctggtcttgaactcctaggctcaagagatcctcctgcc

SEQ ID NO: 749331 - DNA, 50 bp, Homo sapiens
caggggctctgggagtggctgccagagtctcgctccgttgcccaggctgg

SEQ ID NO: 749332 - DNA, 82 bp, Homo sapiens
gggcggcttcctggcctgggcgctccggtggcggcggagggtctccctccactgctgtagtaacccgggtccggggcctcgg

SEQ ID NO: 749333 - DNA, 100 bp, Homo sapiens
cacagcatctttctgaagccgggagagggcctgtaggggcacttaaggaaagcttcataaaagccattggtgttggactaggatttgaattgcagcggct

SEQ ID NO: 749334 - DNA, 75 bp, Homo sapiens
cgcccccacccccgcccccgccgccccctcccggggctgaccgcgtcgtcaaagtttccaaccctttgtaatcag

SEQ ID NO: 749335 - DNA, 83 bp, Homo sapiens
aaatgcagtcggcttgtcctggctcttgccctcatcctggttctggaatcctcagttcaaggcagattttgacaacaaaccag

SEQ ID NO: 749336 - DNA, 90 bp, Homo sapiens
cctgaatcccagaattattgctgcaattaagaaaggaattgcattttccagatcacgtgcagtcatgaaactagagcgaggagaagagcc

SEQ ID NO: 749337 - DNA, 49 bp, Homo sapiens
gcaacggtggacacgtcattctgagagcatcagaagagctaacaattgc

SEQ ID NO: 749338 - DNA, 112 bp, Homo sapiens
gcggtccctgtgacctgtggagacacggccagatctgccctccatgaaaacgtgtggctctaatcttcaaggaccaagtggtacctttacatctcccaactttccgttccag

SEQ ID NO: 749339 - DNA, 95 bp, Homo sapiens
cttgcaacttcttgttaaatggggttgtagcatagaagatgtggactacaatggaaaccttccaggcaatttgaatcaacccatagaagtgacag

SEQ ID NO: 749340 - DNA, 51 bp, Homo sapiens
ctgtgatgcctggacagacacttgccctgaagatgggtgtgaacctgacac

SEQ ID NO: 749341 - DNA, 100 bp, Homo sapiens
aaagaatgttggcaatacttgttggtttagtgctgttattcagatcccttctgcttactatgacattacccagagccacggcggacagtggtgagagtgc

SEQ ID NO: 749342 - DNA, 73 bp, Homo sapiens
tgagaaaacatggtcaacgtcttgaaaggagtgcttatagaatggatctctatgaagcaccagaattatcagt

SEQ ID NO: 749343 - DNA, 100 bp, Homo sapiens
cctctgtggaagggactttcttttggccctaggccccttcctgcccctgtcgtcagcaggaacttgcttgctagaaaacaaagtgcaaggcttgacaaac

SEQ ID NO: 749344 - DNA, 82 bp, Homo sapiens
gacgaccggatcctgaggaggcagctgcggtggcagctgctgagttctcggtgaagcggaatagaagatgaactcaactgaa

SEQ ID NO: 749345 - DNA, 100 bp, Homo sapiens
caaggagttcatgtgggccctgaaaaacggagacttggatgaggtgaaagactatgtggccaaggcgcagtaacagtatctccaagtcccctggccccag

SEQ ID NO: 749346 - DNA, 82 bp, Homo sapiens
gcccacatgcccgctcacctgcgctgtgatgcctgcagagctgtggcttaccagctgctgcagaagaatattttgcctgctg

SEQ ID NO: 749347 - DNA, 50 bp, Homo sapiens
ccttacaaatgtgacagatatcatcaggcaagaaactatattcagtcttt

SEQ ID NO: 749348 - DNA, 71 bp, Homo sapiens
gatttctcagggtgatgacttggcaagttcttttagaactcatcaaattgaagctgttccaaccagctctg

SEQ ID NO: 749349 - DNA, 100 bp, Homo sapiens
tcccagctctctctgggcatctggaaagagttcctgagttggaggtagaagaagaaacccaagttcaagagatgactttagatgagtggaaaaatcttca

SEQ ID NO: 749350 - DNA, 100 bp, Homo sapiens
gggaaacctgtagggtatggtccagctgtgccgcaccgaggcgagcaggagcagggaacaggtaccaccgtagcactcattattcttgccttgggatttg

SEQ ID NO: 749351 - DNA, 75 bp, Homo sapiens
gcaaatgggtatctgaaaaatggatcaggaaaatcagttggagtggaaatgaacacccagaatgaactgatggag

SEQ ID NO: 749352 - DNA, 100 bp, Homo sapiens
cctggcctatcggaagaatgcagaccgggatgaggataaggcaaaggcctatgaattggagcagggcattttgtcagtgatgctgatctttgccttcttc

SEQ ID NO: 749353 - DNA, 73 bp, Homo sapiens
gcggagtcggggctcctgacgtgtacaagtccccagagtatgagtcccttggttttgagcttactgtggagag

SEQ ID NO: 749354 - DNA, 100 bp, Homo sapiens
gtggtatgcggccttctatgccaagaagatggacaagcccatgctgaagcaggccggctctggcgtccacgtcagccataatggcaggtgaagaaattaa

SEQ ID NO: 749355 - DNA, 74 bp, Homo sapiens
ccccaccaaaactttctactataaatcccggttttggctgcttaaactgctggacatgaaagatcagatgtcaa

SEQ ID NO: 749356 - DNA, 100 bp, Homo sapiens
cctagactgtgacaacgaccacgtctccaaaatgagtcgcatcttcaacccccatctggtgcccgggaaacatttgagaattactaccgaaaacagaggc

SEQ ID NO: 749357 - DNA, 50 bp, Homo sapiens
cagctaggttcctggtgctttgggggtgctggagaatctggtaaaagcac

SEQ ID NO: 749358 - DNA, 100 bp, Homo sapiens
caaaggggaaaattactgatacagagacgatggtcggaatcagatttgaaaatgaaagtctctctgatgtaaaggatggagtaaatcaagcagcacctgc

SEQ ID NO: 749359 - DNA, 51 bp, Homo sapiens
attcgacattcttctataatggagctgaagaagaagctgttcaaacgccgg

SEQ ID NO: 749360 - DNA, 90 bp, Homo sapiens
caggtccgccatggctgaggcgtcacggtggcaccgaggcgaaccgagctgaagctgccatggaattcttacaagaattaaatagcgatg

SEQ ID NO: 749361 - DNA, 87 bp, Homo sapiens
ttctgaagttaaagctgtgttaaatgatgaacgatatcaatccttcaaaagtacaggggctcaggtccaggtggcaggggatatgct

SEQ ID NO: 749362 - DNA, 75 bp, Homo sapiens
gatcgtggctgccatgcgccggatacggaacacgaagaggagctggaccaggaatttgagctggagactgacact

SEQ ID NO: 749363 - DNA, 100 bp, Homo sapiens
ttattattttgaagtaaaaattgtcagtaagggaagagatgggttaaaaagatcaagtggcatgagcagccttttggggaaaattggtgccaagaagcag

SEQ ID NO: 749364 - DNA, 97 bp, Homo sapiens
ccgcctcggagagtgactggagagtgagctgcctgggactcgccgcggacctgagagtcagtatactaagactgcccaggagattgtgaacgtctgt

SEQ ID NO: 749365 - DNA, 75 bp, Homo sapiens
aaaggctaatggcacaactgtccacgtaggcattcaccccagcaaggtggatgaagctgtagcagttctacaggc

SEQ ID NO: 749366 - DNA, 100 bp, Homo sapiens
cctggccctcgcggtggctgcctttaccatgcctgatggagctctggacacagctgtctgcgctgacgaagtggggagcgaggaggacctgtatgatgac

SEQ ID NO: 749367 - DNA, 98 bp, Homo sapiens
ttgattccaaagatcctgtgtcttccttgcaggtcattcctgtcccaatcagctgctctactactgatgacattaaagatgccttcattacccaggca

SEQ ID NO: 749368 - DNA, 106 bp, Homo sapiens
gaatgcatgggatgcttatggaatgtgcgagaacacgggtgttttattccaaacgtctatgctgctttgttcactgcagctcttgttcctttgacgtgcctcgtgg

SEQ ID NO: 749369 - DNA, 100 bp, Homo sapiens
tgggactggaaactgctcacctatgtcatggaggaagagagaattttctctacatgtgcacccatttaaaggactcggcttcaagggaagcagcttccac

SEQ ID NO: 749370 - DNA, 50 bp, Homo sapiens
gcggagttcgagcggcagcgaaaaatatgcaagttctgctggatcaacca

SEQ ID NO: 749371 - DNA, 83 bp, Homo sapiens
ctttgctctctcttctgccatctgataatagatgattcttttattaggccagtaactttttggattgttggggattttgatag

SEQ ID NO: 749372 - DNA, 83 bp, Homo sapiens
ccatgaggccaaaggcagttgtattgatgtggaagatgtgaaatttgtcatcaattatgactaccctaactcctcagaggatt

SEQ ID NO: 749373 - DNA, 100 bp, Homo sapiens
actgtaatgatttattgatctttcaaacacagccttattcactactcagggcgctattttcttggaaggtgttactgttaaaggtgtaactcaagtaaca

SEQ ID NO: 749374 - DNA, 82 bp, Homo sapiens
gtggcctcgcccaggccgacggaaatcttaaagaaactctccaccttttctaagtagtgtatcaaaatctaaaccaaggagt

SEQ ID NO: 749375 - DNA, 100 bp, Homo sapiens
ttggcattcatcattttctaatcatcagcatttacatgacagaaatcacctatgtttacagcgacagaattctgagggggatgcccagacgctgacggaa

SEQ ID NO: 749376 - DNA, 80 bp, Homo sapiens
gccgttggtcctgtgcggtcacttagccaaggagcatcagatccatgctgctgctgactcggagccccacagcttggcac

SEQ ID NO: 749377 - DNA, 101 bp, Homo sapiens
taggtcccggttggtagagggtttgagtccgcatcgccacagctgaaggctgcgagggactaagagcagagcatagaatgtcaagctaaccaggcgtccgc

SEQ ID NO: 749378 - DNA, 50 bp, Homo sapiens
ttcttgggacaaacttcatttggtatcctggatacagccatcgttgatcg

SEQ ID NO: 749379 - DNA, 83 bp, Homo sapiens
cgtgtagccgcgtcccctccagtccgctccgggcagactcgtttgtgaacagccaggagtggacgctgagccgctccgtaccg

SEQ ID NO: 749380 - DNA, 80 bp, Homo sapiens
tgctcaagcatttcaacgtgcgtgtcacccacgcagacatcttcagccgctgccagagctccacgcaggagatcggtgag

SEQ ID NO: 749381 - DNA, 96 bp, Homo sapiens
caggtcacagtaaggccaaaaatgtgcatactcacagagttagagagagggatggtgaatttcttgaggttggcaaaaagcagcctgctctggatg

SEQ ID NO: 749382 - DNA, 98 bp, Homo sapiens
ggggatcgctacggaccttaaaatacccgcaacagccccttcgtcccaagtcgggtcacaaatcttcgaagagtgacatatgttgttttagatgaagc

SEQ ID NO: 749383 - DNA, 50 bp, Homo sapiens
acggcgccgagccgcggtccgaatgtccagctcgccgctgtccaagaaac

SEQ ID NO: 749384 - DNA, 74 bp, Homo sapiens
cgatactctgaccgttttagtagtcgcagacctcgaaatgatagacggcatttcagaagatggacacaaagaag

SEQ ID NO: 749385 - DNA, 75 bp, Homo sapiens
ccaggatctacaaccagagcttcttccagagccttctcaaagccacaggtcgttccaggggtagaggaggcatga

SEQ ID NO: 749386 - DNA, 152 bp, Homo sapiens
aaaatggcctacaacatgacgtttttccctaatctgatgggtcattatgaccagagtattgccgcggtggaaatggagtataatggaatgtgcttacaagggccagcaggagtgcctggtcgagacgggagccctggggccaatggcattcc

SEQ ID NO: 749387 - DNA, 83 bp, Homo sapiens
ccctggtgtcacctatcagtaaaagtttgcctatctggggcgcctggctcacgaggttggctggaagtaccaggcagtgacag

SEQ ID NO: 749388 - DNA, 83 bp, Homo sapiens
ctcggacggccacgagactcgggttttggttatgaacaggattcggattcacgtcttgccaaccaatcgggggaggatcactc

SEQ ID NO: 749389 - DNA, 75 bp, Homo sapiens
cagagatgccggggctagccttccccaccagctgggtgccaagaaaggcctaggggcccagaaggtgagcagcca

SEQ ID NO: 749390 - DNA, 83 bp, Homo sapiens
gttgagatcacagagaatatactgacggcataaaagggcagaaccatagcagggtgcggcgccatgtcagaaccggctgggga

SEQ ID NO: 749391 - DNA, 100 bp, Homo sapiens
tgtttatgaagaatgcccatgtcacagaccccagggtggttgatcttctggtcattaagggaggagtagaagatgaagtgaccctctccgcctatatcac

SEQ ID NO: 749392 - DNA, 75 bp, Homo sapiens
ttcgcagtggtcgcttcttctccttgagttgtctgatgtcctgtgggccatgctgatgcgcgtgggcctccgcgt

SEQ ID NO: 749393 - DNA, 88 bp, Homo sapiens
gtggcctgccgggcgattggcatcctcagccgcttttctgccttcaggatcctccgctcccgaggctatcaagtactagctccaactg

SEQ ID NO: 749394 - DNA, 132 bp, Homo sapiens
tatttagttctggggagcgcctcgtcgacatgagtgatgtggaggaaaacaacttcgagggcagagttcagcagctggacatggagaaccaacgctcatcacctctgtcgttccccagtgttccacaagaag

SEQ ID NO: 749395 - DNA, 78 bp, Homo sapiens
ggacatcctggaagctgggaaaggagaaagatgctggtttcgagttttggagatccttgttttttatggaacacagtt

SEQ ID NO: 749396 - DNA, 96 bp, Homo sapiens
ctacttccacatggcctacaacgtcatcacgccctttctcttgctcaagaattatatccagatcgagagacagaagattctgaaagggttcaatga

SEQ ID NO: 749397 - DNA, 98 bp, Homo sapiens
ctggtttcacatgggtcagtcccacagctcttcagccaaatgcccattcgcaaaatgttgtgcaccatctccaggtgcttatgatgttaaaactttag

SEQ ID NO: 749398 - DNA, 100 bp, Homo sapiens
tcctttgaaaattaattgtgcaacatcctggatacatcctgatacaaaaggattttttatcaagcagaaatgcatcgaacaacgagaatcaagatcactg

SEQ ID NO: 749399 - DNA, 100 bp, Homo sapiens
gagactactggccgaaggggcgtctgcggctctccgccgtccccagccctgcctctccctgggctctgaaaagaggcacagttagatgaagaaggacagt

SEQ ID NO: 749400 - DNA, 75 bp, Homo sapiens
tgctgcaagacaggcttcttaaggacatggctcatggatttgagatcttatgctccaaatgtagcccacattttt

SEQ ID NO: 749401 - DNA, 128 bp, Homo sapiens
tcaatatctgtcttcggtggactccttcggcagtccacccaccgccgccgcctcccagttcaaatctgaacatcaatgatgtactagggaactactcattgactcttgttgatgcattggatacactt

SEQ ID NO: 749402 - DNA, 100 bp, Homo sapiens
gagacttcacagtttctgctctggtattaatcaagaagagctatgaccggaccaaacgtcagcgtcgtagaaactggaaattgaaagagcttgcaagaga

SEQ ID NO: 749403 - DNA, 99 bp, Homo sapiens
gacgggaagctcccggcccggcgaactaactggagcacggagctgcagccggttgggccggtgtactttcccggtctctaattaacagaagatggcaaa

SEQ ID NO: 749404 - DNA, 89 bp, Homo sapiens
ggcgcgcgggggcgacgcgcgggaacaacgcgagtcggcgcgcgggacgaagggaatatggagccattgatgatgtagatattgatctg

SEQ ID NO: 749405 - DNA, 75 bp, Homo sapiens
ccaaattgtcgccattaagaaaaggcagggcaggtgtgatacctatgccacagaattcgaccttgaagctgaaga

SEQ ID NO: 749406 - DNA, 98 bp, Homo sapiens
cgacaacctggccatccagcttgctgtgaacagtggtatagcagccactccagcctctgctgcagcagccaccctggatgtggctgttcggagaggcc

SEQ ID NO: 749407 - DNA, 89 bp, Homo sapiens
gcggccggaagcgcggagggagccgcgggatggaccgcaggctctgggttgggtgtgcccccacactcggaactcaccaacccagccag

SEQ ID NO: 749408 - DNA, 99 bp, Homo sapiens
gagggagcccgcgtcggctgagagcccacaggcccccacaggcctccggtgtggctgtctctgatggtgtcatcaaggtgttcaacgacatgaaggtgc

SEQ ID NO: 749409 - DNA, 90 bp, Homo sapiens
aaaggtgctaagaaagagaatgtaagacaggaaaataattaaatattcttaccgagactgaaatcgccaagagattgaatacgatttgtg

SEQ ID NO: 749410 - DNA, 74 bp, Homo sapiens
ctcggacgccagcggacacgcgggcgaggtgaatttgacaggcaagaagatgacattcacttagtgacattatg

SEQ ID NO: 749411 - DNA, 74 bp, Homo sapiens
ggtgctgggacttcccgtccgcggcgtggaggatgctggttgccaacattgacttgggtcctactattttggac

SEQ ID NO: 749412 - DNA, 50 bp, Homo sapiens
cgtgggcagccagggtcggtgaaggaggataagatcaatgccctcattaa

SEQ ID NO: 749413 - DNA, 100 bp, Homo sapiens
gatccatgaaaatgctttggaaattgacggataatatcaagtacgaggactgcgaggttttccgctgccccatgagtttctttgacaccatcccaatagg

SEQ ID NO: 749414 - DNA, 109 bp, Homo sapiens
gctccgtggccttagctgtgctcgcgctactctctctttctggcctggaggctatccagcggcgtgatggtgggcatgggtcagaaggattcctatgtgggcgacgagg

SEQ ID NO: 749415 - DNA, 98 bp, Homo sapiens
tcccgagtggctgggactacagtatcctagaaggaaaacatcaccatggctacagaaattggttctcctcctcgttttttccatatgccaaggttcca

SEQ ID NO: 749416 - DNA, 90 bp, Homo sapiens
tcggccaggaactgggtgctggtgcctatagcatgaggccagccatgtgactgccttcctcccctgcgggcagcagccgagcagctacgg

SEQ ID NO: 749417 - DNA, 75 bp, Homo sapiens
agaacgaacatcttctggacctttgtccaggaccctaaagtaaattggttgaagaaattagatcccaaagattct

SEQ ID NO: 749418 - DNA, 82 bp, Homo sapiens
ctgggagggagccgcgcgcctttgtgcgcgcgccgaggttattcagcttctcaaggctggaaaagcgaaggaagtttcctac

SEQ ID NO: 749419 - DNA, 82 bp, Homo sapiens
gtctcttctcgccctggcggggaaggatattagaaatggctactccccagtcaattttcatctttgcaatctgcattttaat

SEQ ID NO: 749420 - DNA, 127 bp, Homo sapiens
cgggagttgaagagggctgcaaggtgggaagtgaagtcagtgcctcagttgctggattggagaatccatgttgaccaaatgcaccagcacagaagtggaattgaatctgctctaaaggagaccaagg

SEQ ID NO: 749421 - DNA, 83 bp, Homo sapiens
tgcaattccaaaatgtgtaagacgggatattctcttctgtgctgtcaaggtaggagctgtggcgcggggccttccaggagtct

SEQ ID NO: 749422 - DNA, 100 bp, Homo sapiens
ggctcgctctccatccagctccctgcgtcccggccttcgctgtgctccctcagtactatactggcaattgctggagaagattttgcaattgttgcttctg

SEQ ID NO: 749423 - DNA, 117 bp, Homo sapiens
ctttattgtgaacaggtagagtacctgttgttgcagagttattttctgagtcagtttcagaactcccccactggaaaggattctgaaagaaatgaagtcagccctcagaaatgaagt

SEQ ID NO: 749424 - DNA, 101 bp, Homo sapiens
ctccggaggagccaaacatccaggtcaaccccctgggcatccctgtgaacagtaaggagcctgaggagcctatggaggctccagtcatgctgtgggatgag

SEQ ID NO: 749425 - DNA, 96 bp, Homo sapiens
ggcgaggtgcccaccatcgagtccctgatagatcctgtgttgccataagcccttggcccacatttaagtgggaatgcagctagcttggatgtctga

SEQ ID NO: 749426 - DNA, 75 bp, Homo sapiens
ctttatcctggtcatcttctatttccaaaattttaacctttgagaccaagaacccgtcggaattagcagaacgtt

SEQ ID NO: 749427 - DNA, 75 bp, Homo sapiens
ctcagtgctatgcaaatcaacagctatgatcctgataacttaagtgactctctcttttccggtgatgaagaaaat

SEQ ID NO: 749428 - DNA, 100 bp, Homo sapiens
ctcgcggcctggcccttggcctcctcctgctgctactgtgtccagcgcaggtgtcatggagaaactccagctgggcccagagattctgcagcgggaaaat

SEQ ID NO: 749429 - DNA, 51 bp, Homo sapiens
gtgctgccccgccccgctccacccgtgaggcgtaccagtaatgttcgatcc

SEQ ID NO: 749430 - DNA, 96 bp, Homo sapiens
ttcttcagctgctcggacagatgaagctccccaaggagctgcagcatttatctcccaatgataatgaaaacgatacgtcctatgtaattgagagtg

SEQ ID NO: 749431 - DNA, 75 bp, Homo sapiens
cgaaaagccacttgaagaaaagggtgaaggaggcgaattttcagttgatagatcgccacatcacagaatcgtatc

SEQ ID NO: 749432 - DNA, 75 bp, Homo sapiens
cgcagtggtcgcttcttctccttgttgcaatagctgctggccgaaaacttgcccatcgactttttgaatataagg

SEQ ID NO: 749433 - DNA, 74 bp, Homo sapiens
aattaaagaacaaaagacgacgctcattacggggagagcaaggacctgctgtttatcttgacagcgaagtacaa

SEQ ID NO: 749434 - DNA, 100 bp, Homo sapiens
tgttggcggtccctgtgacctgtggagacacggccagatctgccctccaagatccgtgctcagctcacagagcagatgaaatgcctggaccagcagtgtg

SEQ ID NO: 749435 - DNA, 110 bp, Homo sapiens
atcaaatcagcatttgccccctttggtaaaatatctgagaaagatcagtctaaagaaaaggagaagaaagtgaaaaaaacaattccttcctgggctaccctttctgccag

SEQ ID NO: 749436 - DNA, 100 bp, Homo sapiens
actggttccaacgcgaggagctcatcgggcagattagcgacatccgagtgcagaacctgcaaggagcacatctacaagctgatgaagagtgacagctatg

SEQ ID NO: 749437 - DNA, 90 bp, Homo sapiens
gaagggaagcctttggccttgccagtgagaacatcctacaaagcatttagtacaagatggaatgactgtgaagtgctgaccacactcacc

SEQ ID NO: 749438 - DNA, 50 bp, Homo sapiens
ggaggagcggggcggcgcaggcggagagcttgtttcatatccatatccca

SEQ ID NO: 749439 - DNA, 98 bp, Homo sapiens
ctatgggagttcccaattaacaatgaagcagacatgcacatgatggtgtccaagccagaacagtgggtaaagccaatggctgtagcaggagccaatca

SEQ ID NO: 749440 - DNA, 90 bp, Homo sapiens
cccagaaatgcccagccgaaagtgtcggagcccctgcagagtgtggtggaccacatggccacccaccttggggtgtccccaagcaggatc

SEQ ID NO: 749441 - DNA, 75 bp, Homo sapiens
agactttccttgttttggatgaccttgacagtttggaggaatcctggtgagaatgtgacagtgatgataacatgg

SEQ ID NO: 749442 - DNA, 130 bp, Homo sapiens
ggaagatggaccaccactgtccctgggtcaacaactgtgtaggcgagaacaaccagaagtacttcgtcctgtttacaggtcaaggtggaaggtccaaggactgagaaagaccctcgaaggcatccacttt

SEQ ID NO: 749443 - DNA, 51 bp, Homo sapiens
cagattcgcagtggtcgcttcttctccttgaaacatgcccctgattcagtg

SEQ ID NO: 749444 - DNA, 100 bp, Homo sapiens
atcatggtctcccaggccctcaggctcctctgccttctgcttgggcttcagggctgcctggctgcaggggaggagccccagccccgcgacgaggaggaag

SEQ ID NO: 749445 - DNA, 83 bp, Homo sapiens
aacgcatcatgccagggagccaagcgtcctgcccggccgtaagtgtggacactgccagcggctgcagccgacttggaatgacc

SEQ ID NO: 749446 - DNA, 75 bp, Homo sapiens
attattttgcaccactggatgttgtttactggtcagtaacagatccaagagatggaaagagagtagcgctcaaaa

SEQ ID NO: 749447 - DNA, 99 bp, Homo sapiens
tgaccgtcagcaccaggagcagcgaggcactcatcctgcacgccggcgagtgccagcgaggtcctgtccattttcgtgcctccttttatcagtaaagag

SEQ ID NO: 749448 - DNA, 100 bp, Homo sapiens
gctttttcagggcaaaactcctttgagaaaggctaatcttcagcaagctattgtcacacctttgaaaccaggtgtgtgtggtttcagcgcagcatggctg

SEQ ID NO: 749449 - DNA, 100 bp, Homo sapiens
accaggagcagctggagatttgtcaatttagagctcatttgccacgggagacgctcttggtgtccccagcaccgaagggagaagacagactgctgctttg

SEQ ID NO: 749450 - DNA, 98 bp, Homo sapiens
ttttgttctgctccagctgttcgaaggtgatccaggtggatacccttcgccatgttatcagccagacaggaggatacagtgatggactcgcagccagt

SEQ ID NO: 749451 - DNA, 119 bp, Homo sapiens
cggaacagcaggcccgagcccaccgcgccgggccccggacgccgcgcggaaaagacagcccacctgaggatattgaccataaggactcatatctcattacaagaagcatcatggccgag

SEQ ID NO: 749452 - DNA, 83 bp, Homo sapiens
ccgcgcgcagggcctgcagcgggagctggacggcgagcgcgagcggcgcgagaaagttctccttactatgacaatgtccgccc

SEQ ID NO: 749453 - DNA, 76 bp, Homo sapiens
agcccacagagatctacaaccttggagcccagagccacgtcaaagatatgaacgagactgccaaacaagaagatat

SEQ ID NO: 749454 - DNA, 100 bp, Homo sapiens
acgtcaatcaaattcaaaatccagctggtcgctgtgggcaagattcttgccaagagaattaatgtgcgtattgagcacattaagcactctaagagccgag

SEQ ID NO: 749455 - DNA, 89 bp, Homo sapiens
tggatttccacctgtgttggagcgatatacatcagtagtaaccttggtgaaacctcatttagtaaagttagttgatactactgtggagt

SEQ ID NO: 749456 - DNA, 88 bp, Homo sapiens
ctcaaggagcagaagtacgaccggcagctgagggtctctcattcatcacttttatctgctatgtggcgtcctcagcatctgccttcct

SEQ ID NO: 749457 - DNA, 100 bp, Homo sapiens
gagaataaggctgaacctggaacacatttatgcattgatgtggaagatgcaggctcttggtggtatcgctcaatacgctatagtggagaccagattctaa

SEQ ID NO: 749458 - DNA, 115 bp, Homo sapiens
caggagttcgtctcttacgtctgcggaagtgcagctgcctcagttcttagcgcaggtgggcaaacgcagaggcgggaacaaactagccctcaagacgggaatagtagccaagaag

SEQ ID NO: 749459 - DNA, 78 bp, Homo sapiens
aagaggtcccaatcccccactctttccgccctaatggaggtctccagtttcggcgctgccccatacctgaagaccaag

SEQ ID NO: 749460 - DNA, 82 bp, Homo sapiens
aatccattctcggattctagaacacttcatcactggtccagctgtaataccagggtacttctccgttgatgtgaataatgtg

SEQ ID NO: 749461 - DNA, 74 bp, Homo sapiens
gaaactttcagctcatgagggacctagaccaaagaacagaggtaccccgagattttccttatgaagaggactca

SEQ ID NO: 749462 - DNA, 90 bp, Homo sapiens
cgcttactccagaaacatgggtggaagctgggccagggattgggaaaatctcttcaggaaatggaatctatttggaatttgcagaagcaa

SEQ ID NO: 749463 - DNA, 101 bp, Homo sapiens
tgacgctgctgctcttctgcctgtgcgccttcctctcgctgtcctggtacgcggcactcagcggccagaaaggagttgcgggagcttcaggacgagaaggc

SEQ ID NO: 749464 - DNA, 100 bp, Homo sapiens
ctttgcctcatcccaggttgccttggaaaatgccaacgccgtgtctgaaggagaccagtatgatgtctgtgccatttgcctggatgaatatgaggatggg

SEQ ID NO: 749465 - DNA, 80 bp, Homo sapiens
cacccctaaaagcacctggccccgctacagcaaaccagatcctggtgaagtccatgctgaggaagcgttcctttgggaac

SEQ ID NO: 749466 - DNA, 75 bp, Homo sapiens
gttaatgtttgcaaatgcagaggaagaatttttctatgaggaaaccagaatccgggcaatggataaggatgccaa

SEQ ID NO: 749467 - DNA, 83 bp, Homo sapiens
tcaagcatatgaagattttgtagctggtcttggttgggagggttctctataaaggtgtcttaaaaaggttgattttgttatat

SEQ ID NO: 749468 - DNA, 75 bp, Homo sapiens
tgaaacatggggagaactgttgtcaaaatggtgtagctagcttgaaccagagtgcactgagccgtccaatgcaaa

SEQ ID NO: 749469 - DNA, 82 bp, Homo sapiens
aagaccttcaagcagcgccgcaccttcggagcacgtgaattgcctctgcttacgttcaggccctgtcctaaacccagccgtc

SEQ ID NO: 749470 - DNA, 74 bp, Homo sapiens
ggatgacatatttttggacctgaaacagaaattctggaacacctatatggtggaagcagggaaaggcctggaga

SEQ ID NO: 749471 - DNA, 75 bp, Homo sapiens
attgactgtatttgggctgcagcacagaatgtgacagtgatgataacatgggtgccaaaaatacttcaataggag

SEQ ID NO: 749472 - DNA, 96 bp, Homo sapiens
tggaaaggatcctgattcctcttcaaaggaacaggagtacagctgtgtagtaaagatgccttctggtgaatttgcacgtatatgccgagatctcag

SEQ ID NO: 749473 - DNA, 74 bp, Homo sapiens
cacagctcacatgtgactctgctcagaagtgccattctattggagagacaggagtgtctctgaagatacagtcc

SEQ ID NO: 749474 - DNA, 74 bp, Homo sapiens
attcagaacctcaagcttttcaggcatcctcatataattaaactgaacagattatggcctttgcaagcaaatga

SEQ ID NO: 749475 - DNA, 100 bp, Homo sapiens
agttatctggagcagaacaactagaagctttgaaagcttttgtggaagcaagtgctggagaatctggtaaaagcaccattgtgaagcagatgaggatcct

SEQ ID NO: 749476 - DNA, 96 bp, Homo sapiens
ggcgctgctgctcgggctgctcttggagtttgccaaggcacgagtaacaagctcacgcagttgggcacttttgaagatcattttctcagcctccag

SEQ ID NO: 749477 - DNA, 100 bp, Homo sapiens
agatggaggagctggtggtggaagtgcggggctccaatggcgctttctacaagggttcttttcctatgactccatcaattccagctaatcctcccatggc

SEQ ID NO: 749478 - DNA, 90 bp, Homo sapiens
cagagtcggcgtaactatcgcctgacagggtatctgaagtaaaaggggaaaacctcggatcaattctcagctggtggcacaacaagtggc

SEQ ID NO: 749479 - DNA, 83 bp, Homo sapiens
cctgggcctcctcgccccatttgcgacagcatttgctacctgctccagatccgtgggcgtgagcgcttcgagatgttccgaga

SEQ ID NO: 749480 - DNA, 96 bp, Homo sapiens
aagtgacatgatctcactggaccgcagcgtcaatgacttacgccaagaagaagagaagaagaaggaggttcctgctgtgccagaaacccttaagaa

SEQ ID NO: 749481 - DNA, 98 bp, Homo sapiens
aggcatttgacttgtttgatgttcgtgactttggaaaggagaataaaggcagccccgttgatgactgaaaatgacaaagcatccacctaacagacgag

SEQ ID NO: 749482 - DNA, 82 bp, Homo sapiens
cgcctcgggacccgcggtccccgctcttgctggttgcctgttcactctgatcgtagtattggaagttctggccaaggcaatc

SEQ ID NO: 749483 - DNA, 100 bp, Homo sapiens
tgctggtcagcactgcggctggaatgtcgttgtctgctgggtcttcccctcttcattcccccaagattactccacatacttctcctgctcccagaagaag

SEQ ID NO: 749484 - DNA, 117 bp, Homo sapiens
ggactacttcttgcggcgcctcggctcctcccaggtggcctcccgcgtgctggccatgaagttaagtgggcagaccaacatccacctcagcaaaaacttcttcctgacgaatcgcgc

SEQ ID NO: 749485 - DNA, 97 bp, Homo sapiens
tgtacctggaagctgagcagcagcttgccgctctagaaggttggaaagggcaaagaaattacaagaacagcgagaaaaggaaatggttgaaaaacaa

SEQ ID NO: 749486 - DNA, 129 bp, Homo sapiens
cctcagcagccctttgcggactctcaaccagctgccaagccagcccttcactgggagtcatttaatacttcatgattagaacaaatatgtgaaagttcccaccaaccagtgagaatttcttccttcaga

SEQ ID NO: 749487 - DNA, 99 bp, Homo sapiens
caggacaaagcccaggacaaagactttcagtaccagtcaaggtggtactgcagccacagtacataccgagcatcaaatattaaggcacccggagaacag

SEQ ID NO: 749488 - DNA, 75 bp, Homo sapiens
ctgttggatcgtttcatactttacgcttgtgtgataaaactgggagagctgtagtacacatggatgaacgacgag

SEQ ID NO: 749489 - DNA, 100 bp, Homo sapiens
atggttcctcttgctctttggcccgtggctccttaggaaggcagatgacctcagcaacccctttggacaaatgagccttagtcgccaaggttctactgaa

SEQ ID NO: 749490 - DNA, 82 bp, Homo sapiens
acgccaccccggactacgcagccggcctggtgtccacgcagaatgttgtaccatctttgggtaggcagacttccctgacgac

SEQ ID NO: 749491 - DNA, 100 bp, Homo sapiens
tcggagacgtctgacagtgacgatgagatcatggaagggaagtggttgctgtgtatgttactggtgcttggaactgctattgttgaggctcatgatggac

SEQ ID NO: 749492 - DNA, 75 bp, Homo sapiens
gatgctgaaaggacaatacaagggttcatgctcatcgggagtgacgttaagctgaacagcccctcatcactcatc

SEQ ID NO: 749493 - DNA, 98 bp, Homo sapiens
ctgagcctcctgcaacacctgcggcctcactgggacccccaggaggtgaccctgcaggtttgtaaccaaattattggaagatctcatattctttgttg

SEQ ID NO: 749494 - DNA, 82 bp, Homo sapiens
ggggaatccggaagggacacgctgaacaggtgagaagccctaccactgcaactgggacggctgcggctggaagtttgcgcgc

SEQ ID NO: 749495 - DNA, 98 bp, Homo sapiens
ctcaaggcctgagtagccggtaacaaacgagggttcccgggattggaccgacgcagccatgtatgagaataatgttatcactattgatctggttcaaa

SEQ ID NO: 749496 - DNA, 100 bp, Homo sapiens
ttggatccttgtgggcatgatccataatcggtttcaagggactacagctattcacttcttcctgagcctgcacccagctgtaactagcagcttccctagc

SEQ ID NO: 749497 - DNA, 75 bp, Homo sapiens
gatgtacttaatggtggaagagttcagcttgtggtttgccaagatggtggataagaatatttacatcattcaagg

SEQ ID NO: 749498 - DNA, 74 bp, Homo sapiens
ccggagccagcctcggggctggcagccctggccaaggtcttcgccttgatcgtgttctcctgcatctatggtga

SEQ ID NO: 749499 - DNA, 100 bp, Homo sapiens
caggcatcatccgctatgcaattgggtttggtggtaatccatttgcttccttggtgagcaatacatcctctggtgaaggtagtcaaccttcccgtacaga

SEQ ID NO: 749500 - DNA, 90 bp, Homo sapiens
ccgcgggagagtgtgcagccgagtcactactgcctgcctgcctgcctgctacgaggcggggtttcaccatgttgcccagactggtcttga

SEQ ID NO: 749501 - DNA, 101 bp, Homo sapiens
ttgaagctatgcagtatttctttggcatcactgcagctagtaatttgccttctggattcattgtcttcagtgttaagaaatgtggactcctgtgaggtgct

SEQ ID NO: 749502 - DNA, 100 bp, Homo sapiens
tcctacgaggcagaaatcagggagctggaggccctgcggcagcccacggtgcatttcgcagaggacgcactgctgcccggggatgacagggagatcgagg

SEQ ID NO: 749503 - DNA, 51 bp, Homo sapiens
catactaaagaacacatctggaaggcaccttttgatgtcccagcagaccct

SEQ ID NO: 749504 - DNA, 78 bp, Homo sapiens
gtgtggattcctcagagagtgaacttggaatcttggacctcatccagagcatgtcctttgcaacctgatcacacaaat

SEQ ID NO: 749505 - DNA, 100 bp, Homo sapiens
caactaagaccaagtcctcgctggactgctcagggtgccagacctcatcaggttttgtgtacaccacctccaaaaataaaaaatggaaaacacaccttta

SEQ ID NO: 749506 - DNA, 75 bp, Homo sapiens
cgcctaaagtctgagagagggaagtcgcctctgtgctcgacccgtgcatctcttccgactctcgggcaagtgctt

SEQ ID NO: 749507 - DNA, 83 bp, Homo sapiens
ctggctgttagaagaattcatgctcatccgggtatggacgacaaaggcgacccgagcaatgaggaggcacctaaggccatcaa

SEQ ID NO: 749508 - DNA, 100 bp, Homo sapiens
acgtggccctcgatgtgctctgcgtgttgctggcgcttctctgaagtagctttggaaagtagagaagaaaatccagtttgcttcttggagaacactggac

SEQ ID NO: 749509 - DNA, 50 bp, Homo sapiens
ccagggaactcaaacagcagatgcaggttgaaaattggtgtcctcattta

SEQ ID NO: 749510 - DNA, 75 bp, Homo sapiens
gttaatcctcaatttaagcctgatctaacccctagaaacaggaagggatgagaccatgcagcctgcgaaaccatc

SEQ ID NO: 749511 - DNA, 50 bp, Homo sapiens
gaactgcgactcagcatgcagaagacaatgcagatcttcgtgaagactct

SEQ ID NO: 749512 - DNA, 76 bp, Homo sapiens
ccgaggagcaggttcctgtggaggcagaacccatcaacacattccatgggatacatcaaaacgaggacgaacccat

SEQ ID NO: 749513 - DNA, 75 bp, Homo sapiens
ccttcgaggaacagagaaaatgaaaccagcagacagaatttgtcagcaaagccttctagacaagctcagtggaat

SEQ ID NO: 749514 - DNA, 80 bp, Homo sapiens
tggagcaagaccgctgacaagatcgagggcttctctgagtcagtgctgattctctcaaatagagcttgaaggataaatct

SEQ ID NO: 749515 - DNA, 75 bp, Homo sapiens
ggcacccagtaccatattctctggaggttttagacacgctgaccggttccctgatgtgttacctgcttctgctac

SEQ ID NO: 749516 - DNA, 82 bp, Homo sapiens
tacagtgaccgggttgtatcaccgtccaggttcgagaacatcatcgaaaattaagaaaggaggctaaaaagcggggtcacaa

SEQ ID NO: 749517 - DNA, 100 bp, Homo sapiens
agatgtgtgcacagaattactccctctaataaaaccccaagctgtccctttccccccaacacatcgcttgacatctgaagaagtatttgatttggatggg

SEQ ID NO: 749518 - DNA, 75 bp, Homo sapiens
tgtgctgggtgtcttctccctcgccagctgggactatggcagccagggacgccacttcaggcagcctgtcagagg

SEQ ID NO: 749519 - DNA, 90 bp, Homo sapiens
accgggatcgtgaccgagaccgtgaccgagagcgtgaccgagagcgcgaatatcgtcatcgttagaagattctacttcaaagaaatcctg

SEQ ID NO: 749520 - DNA, 96 bp, Homo sapiens
cttattgtatctggggcagatgatcgtcaagtgaagatctggcgcatgaatgacttgtattatttggctacagtcctggtgatggtgggcaagttt

SEQ ID NO: 749521 - DNA, 100 bp, Homo sapiens
ccctggtgaccttctgtgaagaactgggttccctgacatcgtggagttctgcgaggccatggccaacgccgggaagaccgtaattgtggctgcactggat

SEQ ID NO: 749522 - DNA, 99 bp, Homo sapiens
cttcctcagcgggtccgcggcccgctactctccgggaggggcgcttcccgacgccaaggaggaatcttcgagtatgcggacggccccaacgcccaggtc

SEQ ID NO: 749523 - DNA, 75 bp, Homo sapiens
gaaaacttgctggagagaaggaagaactactgtcacagaccatggcaaaagttataaccaccgtactgaagttcc

SEQ ID NO: 749524 - DNA, 100 bp, Homo sapiens
tgccctcagtgacggccaggtgccctgcaatgcgatacctgagctacatgtcaccaagccagttggcaggagccacctacatggaaattcaccaggccgg

SEQ ID NO: 749525 - DNA, 75 bp, Homo sapiens
gcgactttggggcccgtcaccctcaggttgaagaagcctcagcggaggcgatacggcctcctcgccaacactgag

SEQ ID NO: 749526 - DNA, 100 bp, Homo sapiens
ataagtgttttaagaaagtggacaaagagaggagtcaggatgactcactggttgtgtggaaggaagtcgatttgacccggctgtctgagaaggaacgtcg

SEQ ID NO: 749527 - DNA, 106 bp, Homo sapiens
ttcccccaaatgtctgactctgactctcggactgagaaacgcaagcccgtggaccgggagcccgtggaccgggagccggtggtgtgccaccccgacctggaggagc

SEQ ID NO: 749528 - DNA, 96 bp, Homo sapiens
cgagaacctcggcatcaccagtggcttcgtgaagcccaagctggagtgaagacatttccacctggacacctgaccatgtgcctgccctgagcagcg

SEQ ID NO: 749529 - DNA, 100 bp, Homo sapiens
agcccacagagcagtgcttgctgctttttctaactatttcaagatgatatttattcaccaaacaaggtatgggcactaggaaaagacttcttccatcaag

SEQ ID NO: 749530 - DNA, 100 bp, Homo sapiens
tacaagtggcagaagcatagaaataaaagatgaactaaagaaaaagaagaatctcaaccgatctggtggtatggtcaggaaaaagactacaatgtactag

SEQ ID NO: 749531 - DNA, 50 bp, Homo sapiens
aggaactgactatagcatcttggagatgaccttgaatgatgccatgagga

SEQ ID NO: 749532 - DNA, 101 bp, Homo sapiens
attccttcaatacactgttgatgctatgcagaaagcatgcttgaatggcagcaataacatccgcacttccactaatagccaagtagacaagctgaccctgt

SEQ ID NO: 749533 - DNA, 75 bp, Homo sapiens
tggaaatcccacactatcgtgatgctgacggaggtgcaggagagagagcaggatgtacagattatagtgtttcca

SEQ ID NO: 749534 - DNA, 90 bp, Homo sapiens
cgctttgcagttcggtctcctggtgtacggccaacgccaagtaggggattgcgttccctccagtcgcagatgccttcaattaagttgcag

SEQ ID NO: 749535 - DNA, 83 bp, Homo sapiens
aaacagtggttctgctggattgataaacccagctgctacaggttaatcatgttatcagccctctgttggatatctactttcct

SEQ ID NO: 749536 - DNA, 95 bp, Homo sapiens
tggacactgaaaccaccgtggaagtcgcctggtgtgaactgcagattggccaggtgaaacaggagctgtccagaaaggacacagaactactcgcc

SEQ ID NO: 749537 - DNA, 134 bp, Homo sapiens
ccttatgatgactacccggtggttttcttgcctgcctatgagaatcctccagcatggattcctcctcatgagatacctggactacagacgagtgcccaacagcaaccccccggagtatgagttcctctggggcc

SEQ ID NO: 749538 - DNA, 90 bp, Homo sapiens
ggtcctgtcactggcccgctccctggcggtgcagagaccagcatccttggagaaggcataagatgcacatttttctgctctggagccggg

SEQ ID NO: 749539 - DNA, 51 bp, Homo sapiens
gaaacgcatgcaagctaaggcagctgagtgggtaattccagaattgattgg

SEQ ID NO: 749540 - DNA, 83 bp, Homo sapiens
cgcagccccccaatgcggccgcgagaagcagcgggggggcaggcgatcgaagaatggtggtttggcctggagtgatgatgcag

SEQ ID NO: 749541 - DNA, 83 bp, Homo sapiens
cagcggtacccgaatccctataggccccttcacagatgtagtcactacaaatcttaaattgcgaaatccatcggatagaaaag

SEQ ID NO: 749542 - DNA, 100 bp, Homo sapiens
catggacagcttcgacttagccctgctccaggaatgggacctcgagtcactgtgtgccggtggtggtgtgcacattgagccccggtatagacagttcccc

SEQ ID NO: 749543 - DNA, 75 bp, Homo sapiens
cagacaattcattcccgtgagttaccagactgttatgtctttcagaatacggttttagatggagcaggattagat

SEQ ID NO: 749544 - DNA, 90 bp, Homo sapiens
tacagttgaaactccagcagcgccggacccgggaagaactggtgagccaagggatcatgccgcaacgtctcagccaaacctggagcgccc

SEQ ID NO: 749545 - DNA, 75 bp, Homo sapiens
tgaaaaccctgaatagtaatggtctgtgtatgatgaccaaccaaatgcgcacaagaagtttatggaaaagttaga

SEQ ID NO: 749546 - DNA, 82 bp, Homo sapiens
cgcggatctcaccgccgctcaggccaccattggttcaggcaatcttcagcggtgatccagaggagatccggatgctcatcca

SEQ ID NO: 749547 - DNA, 80 bp, Homo sapiens
tgaacaggtgaccataactctgccaaatatagaagatgaagtgtcctcttgctagcaccaataaaagatttctaattaac

SEQ ID NO: 749548 - DNA, 100 bp, Homo sapiens
tgcctcctcttctgggctgtgctggtcacagccacactctgcaccgctaggccgtccccgaccttgcctgaacaagctccaaagacaacaggccctccct

SEQ ID NO: 749549 - DNA, 90 bp, Homo sapiens
ggaaaataaagaattacatattgatgaggatgaaaagtcagggggctcgaatggttcgtgaactctttgaaatggccagaacaaaaaaag

SEQ ID NO: 749550 - DNA, 98 bp, Homo sapiens
tcaaatgcaagtccaagaggaggaggaggcggaggtccaagcggaaaggaacccagctatttagtggtcgaagtgactttagaatcactaccttgaaa

SEQ ID NO: 749551 - DNA, 83 bp, Homo sapiens
agacaatgccggtggaggaatttgtggctggctggatctctgctacaggcacgttcaaggccaaggcccttccctgccaatcc

SEQ ID NO: 749552 - DNA, 80 bp, Homo sapiens
ggttcaatcctaacaaccaccagtcagaacagactttatcagattgtgtggagattcttaaaaaatgtggagaccagaac

SEQ ID NO: 749553 - DNA, 50 bp, Homo sapiens
cccaccttcaaagaccactccttctttgccaaatttgagtttcatcatgg

SEQ ID NO: 749554 - DNA, 88 bp, Homo sapiens
agtgagagctccccaggggagttctctgtgtctgtgaagctgaccccgcactacatctacccaccagccatcgtgcagcccagcgtgg

SEQ ID NO: 749555 - DNA, 90 bp, Homo sapiens
tcggcccgcgggggagccccgggagccgcacggcaatggtggcttgctatccgggaaatggaacaggttatgttcgccacgtggacaacc

SEQ ID NO: 749556 - DNA, 100 bp, Homo sapiens
atggatttagtggacggcatctttttgaaccaaattatgctgcaaatgaaggaagcagccaccctcgccatggcctccccgcccgcctgcccctcggagg

SEQ ID NO: 749557 - DNA, 82 bp, Homo sapiens
gaaaataataacattaccatgagagtttggcttggattatctcaacattctgttggtttttcacgactgaaaacaacatagc

SEQ ID NO: 749558 - DNA, 82 bp, Homo sapiens
acggattcgattcaacggggttccggaccgcgctgcgctatggagcagacctcctgccccccgaggtctgcagtctcctgaa

SEQ ID NO: 749559 - DNA, 83 bp, Homo sapiens
ggaatttccccgtaccgcagcccccgggcacgacctctcggacacggtgcaggcaggaaaaatatattcagggggaagagatg

SEQ ID NO: 749560 - DNA, 75 bp, Homo sapiens
ctcgcgcctgactggccggaccctgcccctggcggaggtgccatggatgtagctttgggatcaggtgccactggg

SEQ ID NO: 749561 - DNA, 100 bp, Homo sapiens
gcctgcaaattaaactttgatttttcatcttgtgaaagcagtccttgttcctatggcctaatgaacaacttccaggaagatgttaccgagtacttcagtg

SEQ ID NO: 749562 - DNA, 90 bp, Homo sapiens
gcaaactcttccaccaccagtgttccagatgcttctgactaagctcccaacaattagtcagagtgcacatttggccatgatcgataccct

SEQ ID NO: 749563 - DNA, 100 bp, Homo sapiens
ctgacggagacgcagatgtggacttgaaagaagctgcagcggaggaaggcgaggtgggtgacatcaccatcctggtgaacaatgccgccgtggtccatgg

SEQ ID NO: 749564 - DNA, 100 bp, Homo sapiens
tgccaggcccgggctgcagccgcgtctgatcgccgagcgcgccgcgtagacctccgctcccccagcttcgtgctgaacctgggcaaagacagcaacaacc

SEQ ID NO: 749565 - DNA, 100 bp, Homo sapiens
cacaagtagctgctcttccaagcaaggaagtcgacagggtaattttgggagtgtggagatgtgccggtatgaccctctacaggacaacactggggaggtg

SEQ ID NO: 749566 - DNA, 51 bp, Homo sapiens
agcagaggaaccacacgctgatcatggactacaaagctgatgaagacccag

SEQ ID NO: 749567 - DNA, 96 bp, Homo sapiens
gtgcacacgccctgcatcgagcagctggagaagggtgtgggccgaagatatgctcatgtggtgttgaggaaagcagacattgacctcaccaagagg

SEQ ID NO: 749568 - DNA, 100 bp, Homo sapiens
ccatcttaatgcctacagcacccgggagcacacagcttactacatcaaggcgctgtccaaggatctgccgaaagaggcagccctggatgacctctgtgcc

SEQ ID NO: 749569 - DNA, 74 bp, Homo sapiens
tgctgagggtggcggccggatagaaaaggcgacggcggattgacagaagtatgattggagagcccacaaacttt

SEQ ID NO: 749570 - DNA, 50 bp, Homo sapiens
aagcaggatccaaaataccagtagttccatgccattgcagtgtcaactag

SEQ ID NO: 749571 - DNA, 75 bp, Homo sapiens
caacgaggccattgacttcataggtgtccctggccagtgtccttccacctgtccacaagcatggggaacatcttc

SEQ ID NO: 749572 - DNA, 82 bp, Homo sapiens
caggatatgacaggggtaacacccttccagatgatttttgaggctttatcctgtggataaacgcagagtgaacgagtttggg

SEQ ID NO: 749573 - DNA, 88 bp, Homo sapiens
agactaaaacattttaccaattttgcattgtttgtttgaaattgcattgacgactggcatctccttggaaacaatgccatctttgaat

SEQ ID NO: 749574 - DNA, 115 bp, Homo sapiens
cgagagctggagaagctgggattggagattccacccaaacttgctggtcactgggaggtcaaaatgcagatcttcgtgaaaacccttaccggcaagaccatcacccttgaggtgg

SEQ ID NO: 749575 - DNA, 100 bp, Homo sapiens
cacagtgaaatcagacatctacagcttttctatgatcatgcaggagattttaacagagtttcagattgccaaaagacaaaacgggtaccacaaggattgg

SEQ ID NO: 749576 - DNA, 74 bp, Homo sapiens
gagtgagtcggagctgccgcgctgcccaggccatggactgtgaggccacggcagagacaacgtgtgtaccccaa

SEQ ID NO: 749577 - DNA, 50 bp, Homo sapiens
acgatagacagcatattctggcagcaaatgccagaaaattcttgggaaaa

SEQ ID NO: 749578 - DNA, 74 bp, Homo sapiens
caatcaacagctctgggctgggctccatggtccccttctcgatgcgcatcttgcacgcggagcttcagcagtac

SEQ ID NO: 749579 - DNA, 75 bp, Homo sapiens
catttggacctgtggccagtgttgtcatggacaaggacaaggtccctagctgttggtagtaagtccggttataaa

SEQ ID NO: 749580 - DNA, 73 bp, Homo sapiens
aaacctccttatcctgcccttggagggaacatgaagaaggttgggtatctacagccattggttgctgttcagg

SEQ ID NO: 749581 - DNA, 82 bp, Homo sapiens
gacaagcttaataaaataaccgtccccgccagtcagaagttgagtgactgtgaagtgctgaccacactcaccccagacactg

SEQ ID NO: 749582 - DNA, 74 bp, Homo sapiens
gaggaagtaggggtgcacctcagcactatcccaagactgctggcaacaggaagaaggagagacgaccatcttgc

SEQ ID NO: 749583 - DNA, 82 bp, Homo sapiens
tcgcctcctcgcagcagcgccatgtgtgtgttttaatagaaaagttgtcactttccaaaatgccctttagaggtgacaccgt

SEQ ID NO: 749584 - DNA, 80 bp, Homo sapiens
cgacccttcccctccagtcacctggacaggtgatttggcttctgcacagttaggaggagcaccaaaccgatgggaggttt

SEQ ID NO: 749585 - DNA, 51 bp, Homo sapiens
cgaaggatatcggtttcattaagcatttgacattgtgcagcaaagaaatgg

SEQ ID NO: 749586 - DNA, 90 bp, Homo sapiens
ggcaggatgaagatgactgtggatttcgaggagtgtctgaaggactcgccccgcttcaggaatgttatgtgaaagaaatggatgccaata

SEQ ID NO: 749587 - DNA, 75 bp, Homo sapiens
caacaacaaagaggccgcgggcaggggaacaggaacctgataaagaatcaggagcctcagtggatgaagtagcaa

SEQ ID NO: 749588 - DNA, 97 bp, Homo sapiens
gtcgaatgacatttcagaggagacgatcaggacgaaggaaactgtggagggtactcaggatgacttttatatgcctaagctttcaggaagaatgtgt

SEQ ID NO: 749589 - DNA, 49 bp, Homo sapiens
tattggtcaagttgctgaccttgaagtgttagaggagtccaaatgcctc

SEQ ID NO: 749590 - DNA, 73 bp, Homo sapiens
gggcactgggcgactctgtgcctcgctgaggctgtcgcctggttgggcccggaaatgggacgtcgcgctttct

SEQ ID NO: 749591 - DNA, 101 bp, Homo sapiens
ccccctcctgggctcctttcagcagccctccagctacttcctgcctgccatgccccagggctctggaaggggaggctcaccgtgtgctatttgggtttgtg

SEQ ID NO: 749592 - DNA, 75 bp, Homo sapiens
cctgtgcgcctctgctgagtctctacgcctgcaagctctcagaccgggaacatccactctacctgcgtttggtag

SEQ ID NO: 749593 - DNA, 95 bp, Homo sapiens
ttcaaacattcgtctcggaaaccccgcctcttacagtcacgagaactttccatgactggatcacagggaaaaaccgaccgagctcaggaagccta

SEQ ID NO: 749594 - DNA, 100 bp, Homo sapiens
aaaatgtggtttgcaggttctaaaggtggaagaagagcccgaagaagaacctgaagagacagcagaagacacaacagaagacacagagcaagacgaagat

SEQ ID NO: 749595 - DNA, 50 bp, Homo sapiens
agtccctctaaagcagctcaaaaggaagtacaagtagtactagtggtagc

SEQ ID NO: 749596 - DNA, 98 bp, Homo sapiens
cgcaagcatgcccaccactgccacaaacgccgcaccaggtcttgtagcagcgcctcctcgggtcatctagtagcaggcacccaaatcaggcaactccc

SEQ ID NO: 749597 - DNA, 100 bp, Homo sapiens
cgacggaccagcgacccaagcgccgcggttaaccacgtctcgtccacgacctccctagggggaacacacctgaaactagaggaacagcttatgtggtcta

SEQ ID NO: 749598 - DNA, 83 bp, Homo sapiens
cccacgcaaccccagatccatttacactttacacacatgattaagtaccggtacatcccgttcacacatgggaagagaaggta

SEQ ID NO: 749599 - DNA, 51 bp, Homo sapiens
ccagcaaaaccatgtctattaaagaaagcaaagtgtgggatgctgtctcag

SEQ ID NO: 749600 - DNA, 75 bp, Homo sapiens
gcctagcgtcctggaattacttcaatcaaggaaagaatatggcaaagctgatgcaagatgggtttattttgatcc

SEQ ID NO: 749601 - DNA, 75 bp, Homo sapiens
ccacttttggactagcagctggcgtctttaccagacaaatgaccctgttaccaacatatgtcatgctgctgacaa

SEQ ID NO: 749602 - DNA, 100 bp, Homo sapiens
ttcttatttagccggagtgagaagcaagaaggccctggacacagcaatatctctgggctttcacagagaagaagttcgtgccccaattcctcaaaagcag

SEQ ID NO: 749603 - DNA, 100 bp, Homo sapiens
aaactgcccttgaaatgaagctggacttggagaaaaaaccgggaagatcctgacggagttcctccagttctatgaagaccagtatggcgtggctctcttc

SEQ ID NO: 749604 - DNA, 96 bp, Homo sapiens
gcggggggcccgggttcgccgagccgcaggagagacacgctgggccgaccccagagcggcgctggacagcttaacagagcgttccaaaaagaggac

SEQ ID NO: 749605 - DNA, 98 bp, Homo sapiens
gtggccgctagctccaaggaagtgtactaatggtcacttgatgtgcgctggctgttttatccacctactagcagatgcccggctgaaggaggagcagg

SEQ ID NO: 749606 - DNA, 100 bp, Homo sapiens
cttcaaggtcaagatggtggacgagcttaagagagacacgctgtttaatggtcttgggcttggagcagtaattggcctgggagttgctgcactgctgcta

SEQ ID NO: 749607 - DNA, 51 bp, Homo sapiens
tgccacctcgcctcccgccgctaccgagtgaactgaattcaaagctgcaag

SEQ ID NO: 749608 - DNA, 51 bp, Homo sapiens
gcggggacgccccggctgcgtaagtggcacttctgcctggtgtcgaaggtg

SEQ ID NO: 749609 - DNA, 75 bp, Homo sapiens
ctcttctgttctacagacctctctcctcttcctgctcatggatttaatccagagactgacttcactatagaaccc

SEQ ID NO: 749610 - DNA, 75 bp, Homo sapiens
gtccccaccactgcagccatgatctccttaacggacacgcagaagtcactcaagggaaaggattaatgccagatg

SEQ ID NO: 749611 - DNA, 82 bp, Homo sapiens
gttggctgggaccgtgcgcgtgcgcctgggggcaccgctgccgttccgaggtggtctttgggaagaagcttcctgcctttgc

SEQ ID NO: 749612 - DNA, 100 bp, Homo sapiens
gatgatgtcctcagtattgattcagatggagttttaacattgaatgcggagaacactaattatgcctatcaagttccaaacttccataaatgtgaaatct

SEQ ID NO: 749613 - DNA, 114 bp, Homo sapiens
aggacccttgcaccaccatatatgttgctgccacagagcctgtcccagagtctgtccaggtcggcttgggaaaccaaaaattacacagagtttaatggcatctgtgaacagcac

SEQ ID NO: 749614 - DNA, 75 bp, Homo sapiens
ctgccgtctgctcttctgcctcttgatctccgccaccgtcttcaggccaggattgtcagtggcttcgccccgagg

SEQ ID NO: 749615 - DNA, 100 bp, Homo sapiens
ggaaggtttgaaggaaagaaaactacaaaaagcagtggagagctttacctggaatattaccatcttaaagaataactgaagtgaagtgatggactccgat

SEQ ID NO: 749616 - DNA, 100 bp, Homo sapiens
cctctgcctggcaaccaccccgtctgagaagtgaggagcccctccgcccggcagctgccccgtctgagaatgttctggacagtcctagccgactggatga

SEQ ID NO: 749617 - DNA, 98 bp, Homo sapiens
ccaccatcaagctgtctaagtccaaagatttttacccagagtgccagctgatgaagacggagcggccccggcccaacaccttcatcatccgctgcctg

SEQ ID NO: 749618 - DNA, 74 bp, Homo sapiens
tcgccgggcagactttaatcggggtggtggcaatggtcgtggaggccgaggacggtcatgcagtggccaaaaag

SEQ ID NO: 749619 - DNA, 98 bp, Homo sapiens
cttgatcatcgcctaccacacacgtgaagtccaggggacgtgaccttggacccggacaccgccaaccctgagctgatcctgtctgaagacaggcggag

SEQ ID NO: 749620 - DNA, 100 bp, Homo sapiens
ctcccggcgccactggccggtgccctacaaggctgttgataatcaggtgtatgtggccacagcctctcctgcccgggatgacaaagcctcctatgttgcc

SEQ ID NO: 749621 - DNA, 100 bp, Homo sapiens
tggcgagaaaacactatgcatctgaggagatgcctcatgaatcaacggtggagcacacacacgtagatatcaatgagatggagtctcctcttgccacccg

SEQ ID NO: 749622 - DNA, 75 bp, Homo sapiens
ggtccagatgaaagagaagtttctggtcactccccaggattatgcgcggacgctgccaaggtctgcagagaattc

SEQ ID NO: 749623 - DNA, 100 bp, Homo sapiens
acatcagtatgactcccaccataccatggagtcctaacaggttgctccttgagggcaggacagttcttatggctttatccgttgcgtaagcacagagagg

SEQ ID NO: 749624 - DNA, 115 bp, Homo sapiens
ggctgcccagaaagcagttaacagtgccaccggtgttccaactgtttaaagcttttgatgaagccattgctgaacttgatacattaagtgaagagtcatacaaagacagcacgct

SEQ ID NO: 749625 - DNA, 99 bp, Homo sapiens
gatggtaggaggcagtagttccccgcttcccttccgcgggagggagagttaggtataattgaaatcctcaaaggaatgcaagaattgggagtacatcct

SEQ ID NO: 749626 - DNA, 90 bp, Homo sapiens
tatgccacatcgtgtacagctcaaaaaagggtgctgacaaccagggtgcaggagaacaaggtagaccagtgaggcagaatatgtatcggg

SEQ ID NO: 749627 - DNA, 100 bp, Homo sapiens
ctttcgcccgggtcctcctagaaattccccccgaagaagactcccccacatctggcggagctggagtttgttcagatcatcatcatcgtggtggtgatga

SEQ ID NO: 749628 - DNA, 96 bp, Homo sapiens
gcgaagtccacccagcgtttccgaggtgaaggcgccgcgccaggccggggggcggagcatatacaacgcagctgtttggtactatcatcactgcca

SEQ ID NO: 749629 - DNA, 83 bp, Homo sapiens
ctcgggcgaggagaggaggtgaccccgcgaaagatacttggtgcttgaaaaactgaagaaggaagacgctgaccgaattcata

SEQ ID NO: 749630 - DNA, 90 bp, Homo sapiens
gcctgtgagaccggctgccggctgacgtctccttgcgatggagcatatccggacgaccaaggatccattctggaacagaatgaagaagcc

SEQ ID NO: 749631 - DNA, 101 bp, Homo sapiens
cgccgaagaagcatcgttaaagtctctcttcaccctgccgtcatgtctaagtcagaggctaccgggaccgcagctatgaccctccatgcccaggccactgg

SEQ ID NO: 749632 - DNA, 100 bp, Homo sapiens
aagccatcaaatgtggaacctatggaaaagggaaaaagacctcgatgaagttctgcagacccactcagtgtttgtaaatgtttctaaaggtcaggttgcc

SEQ ID NO: 749633 - DNA, 101 bp, Homo sapiens
gccttgggtgatttacaggcctctgtctattcctgcatggcccagaggacagatgcaggtaagaatgattgatgttggctgatattggagtgctcattcac

SEQ ID NO: 749634 - DNA, 89 bp, Homo sapiens
taccagcagccccggaccccccgattcaccaacgagccctaacatatctgaagagatggattaagaatgctttggattaaggattgtgg

SEQ ID NO: 749635 - DNA, 88 bp, Homo sapiens
tttgaagagaaggggaataagactgcatctgttcatatgaggaactaccttgttctgcactagctccatccctagagccctgcttctc

SEQ ID NO: 749636 - DNA, 87 bp, Homo sapiens
aagtgagagccggacgggcactgggcgactctgtgcctcgctgagggctgcctgctgtttcccggggagatcatgaaacgaggtcgc

SEQ ID NO: 749637 - DNA, 75 bp, Homo sapiens
ctggaaattgtgactgcactcctgattacacaagaaaatcctgtaccatatgctcagtagatgaaggcgtttctg

SEQ ID NO: 749638 - DNA, 100 bp, Homo sapiens
cacggctccatcatcacccaggcgcggagggaagacgccctggtgctcaccaagcaagacccaggcacccccctgcctccagaccccacagccccgagcc

SEQ ID NO: 749639 - DNA, 74 bp, Homo sapiens
ggtacttgaaggcccttggaatacaccagactggccagaaaggtgatgtttgaggcaccatcagagttaacaca

SEQ ID NO: 749640 - DNA, 100 bp, Homo sapiens
ggcaagtaacatgactaaaaagaagcgggagaatctgggcgtcgctctagagcatggcacattacacttctgtggatttaaagtccttgcccctcagatc

SEQ ID NO: 749641 - DNA, 88 bp, Homo sapiens
ggcctaagaattttggcattggtgacctcacaaagttcggccgtggggatgcctcctccccagccccggccacaaccttggcccaacc

SEQ ID NO: 749642 - DNA, 115 bp, Homo sapiens
gagagagcgagctgagtggttgtgtggtcgcgtctcggaaaccggtagcgcttgcagcatggagcgagcccagggcgtggtgctgaaagtgctcacaaacttcaagagcagtgag

SEQ ID NO: 749643 - DNA, 50 bp, Homo sapiens
caacctcttgtatgagaaacgtttggacccaattaaatcctttgaagctc

SEQ ID NO: 749644 - DNA, 87 bp, Homo sapiens
ggggcttcgaggagcagtggtaccggcggccgctgtgggaggctacctcggacctgaacagctgcctgactgcctgaaaggttgtga

SEQ ID NO: 749645 - DNA, 83 bp, Homo sapiens
ttaacactccagtgggatgaacagacaaaccccacaagcactgcatacgagaaacttgcccaggccaaagaagagaacgtggg

SEQ ID NO: 749646 - DNA, 75 bp, Homo sapiens
attctctcattgattaatgtcaatgggtgtcttttatgaataatcaaaagcagcaaaagccaacgctatcaggcc

SEQ ID NO: 749647 - DNA, 82 bp, Homo sapiens
gaagccctacgagtgcaacatctgcaaggtccgcttcaccagatgcggcattccaaaagaactcactgtcctgattgggata

SEQ ID NO: 749648 - DNA, 78 bp, Homo sapiens
ttttggatgatgatggatccatttctcctattgaggagtcaacgtacgtcgtttcagagaaaccagacaaaaaaatac

SEQ ID NO: 749649 - DNA, 75 bp, Homo sapiens
tcaagaagacagcggaagctggaggagtgacaggctgcgggaacaccatcgggccaccattaaggtcattcgacg

SEQ ID NO: 749650 - DNA, 78 bp, Homo sapiens
cgggactgcggcggcgccggcctccggggagaaacgcaaatgcagccctgaggatttggctactgcatataacaacag

SEQ ID NO: 749651 - DNA, 101 bp, Homo sapiens
gaccgagtgctaaagaagcaggatgcattctacaaagaacagctggctagactggaggagaggggaggtggggaagacagggctccagctaccacaggacg

SEQ ID NO: 749652 - DNA, 97 bp, Homo sapiens
aactgcttgaacatcctttgactggttagccaggtgctggagaatctggtaaaagcaccattgtgaagcagatgaggatcctgcatgttaatgggtt

SEQ ID NO: 749653 - DNA, 83 bp, Homo sapiens
gttgttttgaatgggcgcccgtaagagagggggatatgagactttctactcggaatatcctgagtgttgcgtggatgtaaaac

SEQ ID NO: 749654 - DNA, 82 bp, Homo sapiens
ttgtcctgtgctggggctgacagacaaagtctcccgttgagagtactaccgaaccaccagcagttcgagcctctgaagagcg

SEQ ID NO: 749655 - DNA, 100 bp, Homo sapiens
ctggcatcagctttgccattcatggaaacttttctgttttctggatatgccgcagaaggatccgtgccagaagcaagcctgtgagatacagaaatgttta

SEQ ID NO: 749656 - DNA, 100 bp, Homo sapiens
cctcaaggcagccgtgatcgtggcgttcgcctttaccaccctcctcatcgcctgcctgctgctgcgcgtcttcaggaatactcccccagttgcaagaggc

SEQ ID NO: 749657 - DNA, 75 bp, Homo sapiens
atcatttgctgatgtacttcctgaagcagctgctctagtgaattggagaatctaatgctggacaaagatggccac

SEQ ID NO: 749658 - DNA, 75 bp, Homo sapiens
ggcgactggagccatggcggagtcggcgcctgctcgggaaggccaacagctcaggagaagccatgtcactgggga

SEQ ID NO: 749659 - DNA, 75 bp, Homo sapiens
aacagctagctgtggagctcagtaaggctgaggtgaatcatcctctacaatttcatctaaccagagtcaggagtc

SEQ ID NO: 749660 - DNA, 51 bp, Homo sapiens
gttttccacctaccatgctctcggtgcccgagaatatcatgtccagttttt

SEQ ID NO: 749661 - DNA, 98 bp, Homo sapiens
catgcccgagttcatggccaacctcaggctcagagaagcctgtgtctcccaaatcaggaacactgaagagccctcccaaaggatttgatacgactgcc

SEQ ID NO: 749662 - DNA, 89 bp, Homo sapiens
ggagagcgcctggccgagatggaggactacccggctgccttgcaggaacggcagagtcgaaacaaacaatgagggcgaaccagtttctt

SEQ ID NO: 749663 - DNA, 101 bp, Homo sapiens
ctgctccctctcagcacctgggcggacggtgaaatgacaatggatgctctgttggctcgattgaaacttctgaatccagatgaccttagagaagaaatcgt

SEQ ID NO: 749664 - DNA, 50 bp, Homo sapiens
gctgtccacagccatgagccactcctcatagagacggggtttcgccatgt

SEQ ID NO: 749665 - DNA, 100 bp, Homo sapiens
cctagcgccaacacgccctcaggtaaaggtggaagtaaatggccacgctgtattgacagagacagtgtttaagaatgaaagcctcaacgcagaatcaaaa

SEQ ID NO: 749666 - DNA, 82 bp, Homo sapiens
cgacaagccgctggcagccgcggatctcaccgccgctcaggtggtcccaggctgcacccatggcagaaggaggagggcagaa

SEQ ID NO: 749667 - DNA, 100 bp, Homo sapiens
ggacccagactgacttgttcacatgtggcaaatgtaaaaagaagaattgcacttacacacagtaggtgagtcaacacaagatggcaaatcaggatcaggt

SEQ ID NO: 749668 - DNA, 75 bp, Homo sapiens
cggaatccattatctttcgggaaagctctctggggcaggatccagggaccaaaggcctgaattccagttgtgcct

SEQ ID NO: 749669 - DNA, 73 bp, Homo sapiens
ggcgctcctactccctccccggactccgcggtgaataccagggcctggtgaagcacacaggaggctgccactg

SEQ ID NO: 749670 - DNA, 82 bp, Homo sapiens
tgctgactacctcgcccacgagagtcggaggagcagctgatgagccagatccgggagacgcagcagctctgccaccagaccc

SEQ ID NO: 749671 - DNA, 100 bp, Homo sapiens
tggggcaccgaccccgcaacgactgcccgggctgcgggaggggaggagagcagagaacgtccccagcactattcctgatcagagaactccagttgcttca

SEQ ID NO: 749672 - DNA, 144 bp, Homo sapiens
ttattgcccaggcagtgctctgggcaggaatgaaggcaacatctttcctaaccctgaagcgacttttgtcaaggaaattgatagatacagtgatgccagtgatgacagcttttcagagccaaggatagctgagttggaaataag

SEQ ID NO: 749673 - DNA, 101 bp, Homo sapiens
tttaagaattaaaagatgatgagaaataaggacaaaagccaagaggaggacagttcgctacacagcaatgcatcgagtggacagaggactgcagaaaatca

SEQ ID NO: 749674 - DNA, 90 bp, Homo sapiens
aaactattcaacatgtggaagtattttgttatgccaggttgtccttctattcaggccactcttcgttttccatgtactgcatgctgtttg

SEQ ID NO: 749675 - DNA, 75 bp, Homo sapiens
ggcggcttcctagtgagtcggcggctgatttagaaggaggttcaggctacggctgcatagagcctggacctgggc

SEQ ID NO: 749676 - DNA, 119 bp, Homo sapiens
gcagcagtaccgagtgccccggggaagccattccccaccccccaggtctcctctgagcctccggcctccataagacccaaaacagatgacacctcttcccagtcccccgcgccttccga

SEQ ID NO: 749677 - DNA, 100 bp, Homo sapiens
cacaggcctgctgaactgggtgctttatataggaaactaattctgaagcaagcccttatagttgtgctgcagtggtgtttcaatcacaattttagtgttc

SEQ ID NO: 749678 - DNA, 72 bp, Homo sapiens
ggacctggacccggacccaaagtgccatgtctttaataaatcatattccatgcccatcagcattgaatttca

SEQ ID NO: 749679 - DNA, 98 bp, Homo sapiens
agaacttcacaatcaagaaatgcagaaacgtaaagaaatgcaattgagcaaaccagtccagctacgggggcccagccagccagcagctgagtgggggt

SEQ ID NO: 749680 - DNA, 101 bp, Homo sapiens
gtgcctgagcccgtgcctgtcttcagatcttcacagcacagttcctgggaaggtggagccaccagcctctccctgagactctgacctgtttttgttggaca

SEQ ID NO: 749681 - DNA, 50 bp, Homo sapiens
cctggaataggttcgccgaagagagagtccagggccaaggcttgtgttca

SEQ ID NO: 749682 - DNA, 87 bp, Homo sapiens
ggtcctggaggctgctaacctcttccaggaattgaatgatctggcacgggaccctccagcacagtgttcagcaggtcctgttggaga

SEQ ID NO: 749683 - DNA, 78 bp, Homo sapiens
aattactacaggggtgctgacaaactgtgtcgcaaagcttctttagtgaaacatattttggaatggatgtctctgcag

SEQ ID NO: 749684 - DNA, 90 bp, Homo sapiens
aaattttaagaaacgagaatgtgtcttctttaccaaagattccaaggccacaacccctgaacagtgcccaagtgttgtctctttgttgtc

SEQ ID NO: 749685 - DNA, 75 bp, Homo sapiens
cgaaggcttggagagcatacgaggcggaatccggatcgagtaaagaaactgcagtctatcctaaaaccaatgatg

SEQ ID NO: 749686 - DNA, 90 bp, Homo sapiens
catgtactggtgtgtggggccggaggagtcagctgtgtgtccagaacgtgccatggagacgcttaacgctgatcttgcatctttaatgga

SEQ ID NO: 749687 - DNA, 100 bp, Homo sapiens
gtgggggtgtgcaaacccgagagaactgggatcagtggtcaattggtcaggacagggactacagaaattaggtccaaatttaccctgtgaagctgatatt

SEQ ID NO: 749688 - DNA, 100 bp, Homo sapiens
gaatttgtgcaatgtttagccaacccaaattaccttaattgttgcagctgttgattttgaatccaacaacattcgtcagcttgatgattttttggaagat

SEQ ID NO: 749689 - DNA, 82 bp, Homo sapiens
ccttcttggggttaattttccactctcctttccaaacctttgcagctgccctttgttaaagagtactcgggtggagtttgac

SEQ ID NO: 749690 - DNA, 100 bp, Homo sapiens
gggtctggagtgcgtgggggaccggctgttggcggggagtgcatccgccccaacccttttccccctcgtctcctgtgagaattccccgtcggatacgagc

SEQ ID NO: 749691 - DNA, 100 bp, Homo sapiens
ggagacgtgggcgccctccccgccaaggcccgtgcgagctatttctagtctgctggcatcagtgacgcttgacctcagccagtatgccatggacatcgtg

SEQ ID NO: 749692 - DNA, 100 bp, Homo sapiens
aagtcagagggacttcagcttaattttcagcagatgcgtgttttggacaagctgatggttgagcgactttctgcagagaggacggagtgcctgaaccgcc

SEQ ID NO: 749693 - DNA, 75 bp, Homo sapiens
gacatggacagcctccttctacaatgccgcatcctcgaaggtaccactcctcagagcgaggcagccgggggagtt

SEQ ID NO: 749694 - DNA, 82 bp, Homo sapiens
attgaagactcaacagacttctttaaatctggagcaagctcaatggatgttgccagaaggaccctctattgtcccaggcctg

SEQ ID NO: 749695 - DNA, 75 bp, Homo sapiens
gcgcctgttcccggggcagatccaggttcagggcttccttcctcggctccaccctgtggatgtaatggcggcccc

SEQ ID NO: 749696 - DNA, 101 bp, Homo sapiens
ttgggctcagccccccagctgaccctacagctgtacataagtgtcatgcagcaggacgtcactgttggaagaagctattttggcattctgctggatatatg

SEQ ID NO: 749697 - DNA, 83 bp, Homo sapiens
aaactagagcaaataaccgttttgaaattactggcatccttcgaaccaactgtgtggactgtttagatcgcaccaacacagca

SEQ ID NO: 749698 - DNA, 98 bp, Homo sapiens
ttgcagcctcgattcattcaactctttcagggcaaccactgagaaaacggaaccgaatagtcaagaggacaagaatgatggtggaaaatcaagaaaag

SEQ ID NO: 749699 - DNA, 83 bp, Homo sapiens
gaaaggctttgaagcaaaagtttgatgagattttttcagcaacaaggcaaatgaaatctccagccatcacagccaccctagag

SEQ ID NO: 749700 - DNA, 87 bp, Homo sapiens
tcgggtccccgcaccacctcctgctgccttcccgtcgccgctcccgaagcttttccaggttgtggcagcactgcctgaaggtatgag

SEQ ID NO: 749701 - DNA, 83 bp, Homo sapiens
ccggaacacaagctgtgaaacactagtttccccctttctagggtgaggatggttctacacagccacccggagttccttagttg

SEQ ID NO: 749702 - DNA, 82 bp, Homo sapiens
cagtgcctccagacgtgagacagttggtgagggcactgctccagcgagaggccagcaagagggtctccccagacacccgagc

SEQ ID NO: 749703 - DNA, 101 bp, Homo sapiens
cagagaacgacaacaccgtgctcctcgaccccccactgatcgcgctggataaagatgcgcctctgcgatttgcagctgataggaagatgtcttcaggaaat

SEQ ID NO: 749704 - DNA, 71 bp, Homo sapiens
tgcccctacgtgcacaacatcacccgcaagtcattccagccacagatctgtcagagcagatttccactgca

SEQ ID NO: 749705 - DNA, 74 bp, Homo sapiens
ctggggtcccttttgcctcagatactattttgaaggcaaccaagaatcccttctacctccatgtaggaatggat

SEQ ID NO: 749706 - DNA, 75 bp, Homo sapiens
ggacttctggcctttggcacgtcctgctccgtggtgctctatgaccccctgctgcctgtggaggaaccgattgtg

SEQ ID NO: 749707 - DNA, 75 bp, Homo sapiens
ggcctcggactccgcggccggcccggcgcggcccagcgccctcaggtacccagactcatggtatcgtgatatcac

SEQ ID NO: 749708 - DNA, 100 bp, Homo sapiens
cccagatctgggccgcttgcctcctgctcctcctcctcctcgccagcctgaccagtggctctgttttcccacaacaggaaccgagctgtggcctggggtt

SEQ ID NO: 749709 - DNA, 125 bp, Homo sapiens
ccaagatagatgtgtcctatgaataccgcttcctggagttcacgactctgagtgctggtgatgatgaacagtctacacagatggctgcaagttgggaagatgataaagttacagaagcatcttca

SEQ ID NO: 749710 - DNA, 90 bp, Homo sapiens
aagaaacaagccgtggaataggtgtatcaagtaatggtgcaaagcctgaactttggacatcagacagtgcaggagaagaatgtgatgcgg

SEQ ID NO: 749711 - DNA, 75 bp, Homo sapiens
tttatctataccacaagcaaccacatcaaatatgctgtcaccactgggcattcgtccctacaaatgcaacgtctg

SEQ ID NO: 749712 - DNA, 74 bp, Homo sapiens
ttctagtagaacggagctgaccctatccgaacaggcgaagaaggtagataatgactataatgcccttcgagaaa

SEQ ID NO: 749713 - DNA, 101 bp, Homo sapiens
gagctgtgccccccttcgtattcacgcgccgcgggttgcagagcctgaggcctgtgatcagatgtacgagagcttagcgcgactccattcaaactactaca

SEQ ID NO: 749714 - DNA, 83 bp, Homo sapiens
cgcagttcttgtttgtggatcgctgtgatcgtcacttgagggaccacagagcaccagcctgcatggaacttccttcctcactc

SEQ ID NO: 749715 - DNA, 118 bp, Homo sapiens
ccttcagagcgtcacggcgtacgccctcatggggaaaatctccccggtgactttcaggtggatgaagacctgatcattgaagttcaccagttatttttctcaagaatgtgaataacaa

SEQ ID NO: 749716 - DNA, 75 bp, Homo sapiens
cctgctaacagaactggaccttttcgggtctccaactgaattccttgaagagaaaatggcctaccaggaataccc

SEQ ID NO: 749717 - DNA, 99 bp, Homo sapiens
ctcaccacaggaaagcagtgtcaagattgtatgccaggttattatggagatccaaccaatggtggacagtgcacagcactgaacctaccagatgtattt

SEQ ID NO: 749718 - DNA, 88 bp, Homo sapiens
ttctgccatgattggaaatttcctgaggcctccccagaagcagaatcctgtacagcctgcagaattactgtcttctgaagattgatgt

SEQ ID NO: 749719 - DNA, 100 bp, Homo sapiens
ggccttcctcatccgggagagccagaccaggagaggtttttcgttggaatatacgttgcacatttatggcgattctgagtgtgagggcagacttctgcca

SEQ ID NO: 749720 - DNA, 82 bp, Homo sapiens
ccgcgcgggtctggcgggaccggtttggaagactttgccggcctgcaggtgtccctggccagtgtccttccacctgtccaca

SEQ ID NO: 749721 - DNA, 51 bp, Homo sapiens
ccggactgcaccagagccatggtcgagagttggaaactcaactattggaac

SEQ ID NO: 749722 - DNA, 90 bp, Homo sapiens
aacatcgcggtgcagcgaatcaagcgggagttcaaggaggtgctgaagagcgaggagaatccacacaggcgacagaccctacaagtgccc

SEQ ID NO: 749723 - DNA, 82 bp, Homo sapiens
aacaatggcatttacagaaagagtcaacagcagtggcaacagatgaaggatttgggggcagagcacttggcaggtcatgaag

SEQ ID NO: 749724 - DNA, 100 bp, Homo sapiens
ccctgcggtgtgcaagtccgactggaacagctcacagccagcgcctggtcaacgtgaagtcccggctgaagcaggcgcctcggtacccatcacttgcccg

SEQ ID NO: 749725 - DNA, 90 bp, Homo sapiens
gtgaattcctggtgaaggaggtgaccaagctgattgacaacaacaagactgagagtccctggcctatctcacagctgctacccatggctt

SEQ ID NO: 749726 - DNA, 100 bp, Homo sapiens
acttggtggacgttttctttgctgccaaaaccctccggaactacaaacccaacatggtggagaccatggaatggaagatgtcacatgtgatagaactgag

SEQ ID NO: 749727 - DNA, 75 bp, Homo sapiens
acctcttcctgtacgcctcctgccaacgggacagacagtataatggcagagaccacgcagaggctgcctttggat

SEQ ID NO: 749728 - DNA, 90 bp, Homo sapiens
gccccggcggcgcccgggcccacgcggaacgacggggcgagcttgctcacttccgacagagaaaaacaaaaggtgacagttcgcattcgg

SEQ ID NO: 749729 - DNA, 75 bp, Homo sapiens
aaaagattcccaggatgtgagcaacacgggaccggattggattcagcatcaaaatacatctactcatattgagag

SEQ ID NO: 749730 - DNA, 109 bp, Homo sapiens
aaataagaagacgggaggatgagtacagatttacaagtctcggaggaccccatcctagccctacctgtctcggcccgcaacctccccgaagccgtcggtgccactccca

SEQ ID NO: 749731 - DNA, 88 bp, Homo sapiens
ggacggcggcggcgcagctcggaacccgccagggtccagggtccaggttccagcgcccggcggcccagtccatctcaggttttgcgca

SEQ ID NO: 749732 - DNA, 51 bp, Homo sapiens
taattggagatcctgaacaccaaagaaagagttcctagagagagaagacaa

SEQ ID NO: 749733 - DNA, 75 bp, Homo sapiens
gtccgtgtggaccctgactcacaggaagctcttcgtgtggtgaagatcttacagaaccttgatccgccatttagc

SEQ ID NO: 749734 - DNA, 97 bp, Homo sapiens
aatgaagctcctgaagccgacctgggtcaaccacaatggtgctggagaatctggtaaaagcaccattgtgaagcagatgaggatcctgcatgttaat

SEQ ID NO: 749735 - DNA, 112 bp, Homo sapiens
gctggctttgttcccaatgacatgcaagttggacagacgggaaaaatagtagcaccaggcaatctagagcagccatgatacctcccaagcagccacgacagcccaagggagc

SEQ ID NO: 749736 - DNA, 91 bp, Homo sapiens
ggaacgaggcaaggagctaaagcagcgtgcgttcagccctggggacactcatgaggaccatgatacttccactgagaatacagacgagtcc

SEQ ID NO: 749737 - DNA, 80 bp, Homo sapiens
tattgggcatcacagcccctgcagacctgcgcagtctgtctggaagacttcaaggggaaggatgagttaggcgtgctccc

SEQ ID NO: 749738 - DNA, 75 bp, Homo sapiens
gttgcttgatcaggtggaacagattcagaaggagcaggattaccaaagggctgcatttgatgccagaaggcaaac

SEQ ID NO: 749739 - DNA, 83 bp, Homo sapiens
gctgcagtctttgtgggacaagaggtggggctggtgtccgagcacttctcgcaggccccgcagaggctgtccttctacagctg

SEQ ID NO: 749740 - DNA, 50 bp, Homo sapiens
cgacagccaggcccgcgagaagcaggatgtagccaatcaaatgtgcacca

SEQ ID NO: 749741 - DNA, 100 bp, Homo sapiens
gcccagaatccaccgtcaggcataaattgattattcctcgcccacatctgtgccagaggaggaagcttgacgctgtctattactatatgcgcagtttagc

SEQ ID NO: 749742 - DNA, 90 bp, Homo sapiens
gaaaagatccctggaatatgaagagacacagtatggtagccacacccccagctgtcaataccagcaaatatgcagaaagctatcggatcc

SEQ ID NO: 749743 - DNA, 75 bp, Homo sapiens
ccgtgttcggtgaccgcagcactggggaaacgatccgctcccaaaacggtagctttgcagtttggggagggctgt

SEQ ID NO: 749744 - DNA, 75 bp, Homo sapiens
cccagcgcgtgtgcatccagcgcaagcccctcagtcaaggcggataagaaggcggcacaagaaaagatgatccag

SEQ ID NO: 749745 - DNA, 99 bp, Homo sapiens
agcaaacagcgcagccagaaccgctccaagacgcccaagaaccaggaagccctgcggatggccaacgtggcagcgctaagctgcaacgaaaacgacgca

SEQ ID NO: 749746 - DNA, 83 bp, Homo sapiens
ctggggatcgctacggaccttaaaatacccgcaacagccccttcgtcccaaaccttaactgatgtaagaaatctcaaatttcc

SEQ ID NO: 749747 - DNA, 121 bp, Homo sapiens
agaaattctgtgtggcttcaagagactgatcaaattgtgagaggaaaacagcctacccgcctacagacctggtacctggatttttgcccgagatgattcctaccaccttactactgacgaa

SEQ ID NO: 749748 - DNA, 100 bp, Homo sapiens
gtccggcacaggaaaaacagccaccttcagtatctcagtcctccagtgtttggatattcaggaggagtttgcaaaccaaagctgatcagcaagtcaaaca

SEQ ID NO: 749749 - DNA, 97 bp, Homo sapiens
ggatgcagaagaagtatcaaatccgctgctaaattacattggagctgggctatcagtagtaagaacaagaaactcctttacgagaagatgaagggag

SEQ ID NO: 749750 - DNA, 100 bp, Homo sapiens
tgagacgcaggaagcagctgaaagagctattgaaaaaatgaatggaatgctcctaaatgatcgcaaagtgttagctgctgaatcaaagcttcaaacagaa

SEQ ID NO: 749751 - DNA, 74 bp, Homo sapiens
acgcacagaggaacgagctgagctggcagagtcttggtctcttcccatggcgatgtccatctgccaccgtggca

SEQ ID NO: 749752 - DNA, 50 bp, Homo sapiens
gaaacgctgacagagatgctgcagagctggtggtaataggagttcttcac

SEQ ID NO: 749753 - DNA, 75 bp, Homo sapiens
agaaaaagttcttgggacaaacttcatttggcattgcactgatgatgtggaatacgttcttagttaaaagatttt

SEQ ID NO: 749754 - DNA, 90 bp, Homo sapiens
aagacctcctccactggcaaagagtcacctaaagttaggcggcactccagccccagctcggttgtctgcattcaaaagagcattctatta

SEQ ID NO: 749755 - DNA, 75 bp, Homo sapiens
tggggccccgcattggccgactgcagcaggattgtgtgaatgaagctgcatctcaagagggagacaagccacagg

SEQ ID NO: 749756 - DNA, 83 bp, Homo sapiens
acgcctcctcccgcctgccccctcagccctgtggctgggggcagagctcagatttgcatctgctggtgatgatggaattgtag

SEQ ID NO: 749757 - DNA, 75 bp, Homo sapiens
tgggtctgcacgccctttctggatgaaacaggcgcctatttaatcgacagagaccccacctactttgggcctgtg

SEQ ID NO: 749758 - DNA, 100 bp, Homo sapiens
ctgtggatatagaggggaagaagatcaaactacaagtctgagctcgtccgcatggtgctgaatggctgaggaccttcccagtctccccagagtccgtgcc

SEQ ID NO: 749759 - DNA, 100 bp, Homo sapiens
tcaactggggtcagaaggacctctaccgagatgtgatgttggagaactacaggaacatggtcttgctggatgttgatgttagtgaagattcacctcctcc

SEQ ID NO: 749760 - DNA, 96 bp, Homo sapiens
aagaccacacactgggaaacatcattaaatctttcatgatcaacatgggagactcccacgtggacaccagctccaccgtgtccgaggcggtggccg

SEQ ID NO: 749761 - DNA, 75 bp, Homo sapiens
cggcagcatgtcggtggcggggctgaagaagcagttctacaaggcgagccaggcggcagccccaagggggacgtg

SEQ ID NO: 749762 - DNA, 74 bp, Homo sapiens
gtttgtggatcgctgtgatcgtcacttgtttgctggcctagacctgaactcttcagataatcagagtggaggaa

SEQ ID NO: 749763 - DNA, 75 bp, Homo sapiens
gagcaaggcatcaacgagtttctcaggaaaaacaccaccaggccataccacagcctgcccagtgaggcggtcttt

SEQ ID NO: 749764 - DNA, 100 bp, Homo sapiens
agatggcggatgccctgcagtacctgcagaaggtctctggagacatcttcagcaggccctgggaggagcggggacactgaggacctctctccaaattggc

SEQ ID NO: 749765 - DNA, 83 bp, Homo sapiens
caaaaactaccattcgcctgatgaactctcaggtgattgaagatagtactggagtccgccgggtggtggtcacaccccagtct

SEQ ID NO: 749766 - DNA, 90 bp, Homo sapiens
ctttgatagtcgtaccatatgcagaagctgctcctgctaaggccaagccggctgaagctcctgctgctgcagccccaaaagcagaaccta

SEQ ID NO: 749767 - DNA, 100 bp, Homo sapiens
agagttcaaggaggccttccagctgtttgaccgaacagtggatcaatcttcctgtcctacaactgacaaaggatcccctaaagacccctggaaggctgga

SEQ ID NO: 749768 - DNA, 75 bp, Homo sapiens
gatccagccgggcaaccccagctgcacgggagatacatctggggactataagaaagctcttctgctgctctgtgg

SEQ ID NO: 749769 - DNA, 76 bp, Homo sapiens
agggggcggctaccccgtgggaagtggagcagatcgaggctattgccaagtttgactacatggggcggtccccgcg

SEQ ID NO: 749770 - DNA, 97 bp, Homo sapiens
ccttaaaccttttaagcaaggaaattgaactaagaaatggagagcttgtgaaaaaacagttgaagaagcacctttcaggagaggagcatgagaaact

SEQ ID NO: 749771 - DNA, 73 bp, Homo sapiens
ttctgagctaaaagcttccatgaaggcagtcgatgatgtgaagaaaggttacatcaaagcagaagaaaagtcc

SEQ ID NO: 749772 - DNA, 74 bp, Homo sapiens
gcctcccgggctccgggaaaactacactggccagtctttcttctgagaacacccgatgtgtgtggatcggaagc

SEQ ID NO: 749773 - DNA, 98 bp, Homo sapiens
tttctattcatcatttcacatgtgatgaagagttctgctcagaaggaaaggtgtatttgtccatgttggaagacactggcttttggttagaaagcaaa

SEQ ID NO: 749774 - DNA, 122 bp, Homo sapiens
aaaaatttccagaaggtgcctgaccagaaaggaactcccaagcgactgcaggcagaagctgagacggctaaggatcgagatgaccacagccacccctctgggggataccaccttcttctcac

SEQ ID NO: 749775 - DNA, 83 bp, Homo sapiens
attcgcggctcttcccgcccgccttccgccgtctcttcgagttcttcgtgctgctcaagttgcagagtgggcaggatcttaag

SEQ ID NO: 749776 - DNA, 75 bp, Homo sapiens
tttctgttgcccttaccaaatctggagctgtttatacctgctatgctaagaaggaatctgatcttaatggcgccc

SEQ ID NO: 749777 - DNA, 145 bp, Homo sapiens
tgtcctctccaagatgcagttttttgatgctgaggagctcctggtcgatgaagaggatgatgtttttggtgaagaagaaaaagtcagcactttttgaagtgtctgaggttataccagtcatgacaaataattatgaagaaaatat

SEQ ID NO: 749778 - DNA, 97 bp, Homo sapiens
ccggtctccggtactggagccggcggctgcggccggcagccggcagctttgcagcggggtataaagacgctggctgtgtgtcccaacaacgatatga

SEQ ID NO: 749779 - DNA, 90 bp, Homo sapiens
gaactattaactgcctttcttctgtgggctgtgattttcagaggggaatgctaagaggccaaggctgcaggtgatgatgaggccatgttc

SEQ ID NO: 749780 - DNA, 98 bp, Homo sapiens
gatttgttaaggattccaagtaactcttatttggtaccaataataaagctcacagatcaggagactgaagtgaaagttgacatcagctttaacatgga

SEQ ID NO: 749781 - DNA, 100 bp, Homo sapiens
aacgccaacattaacctgttctgtgtggtcagttacatagcaaacttctggagacagagcgccaactaggggaagctcatggtaggctgaaggaacagag

SEQ ID NO: 749782 - DNA, 71 bp, Homo sapiens
ccactgaggatcagattttgaagagagatatgccaccagcatttattaagcttattctgtgtatgatgaag

SEQ ID NO: 749783 - DNA, 100 bp, Homo sapiens
agctgttcatccaagaggtgaaccacgccgtggaggctgtgtcagcgtgttatgatgccgtcccgtaccaacctggctactggaatccccagtagtaaag

SEQ ID NO: 749784 - DNA, 76 bp, Homo sapiens
ttattatgcaggtggtctgtgaagccacacagtgtccagatacgaggatgttgaacgtcgacgcatttacgatatc

SEQ ID NO: 749785 - DNA, 75 bp, Homo sapiens
actattgggattttcagccccaagacaccctgtagaccttgaatctgcagaaagcagctccgagccccagaccag

SEQ ID NO: 749786 - DNA, 83 bp, Homo sapiens
ctcggcctcggcgtgctgcgcctccgcggctgccctgcgccaggcttatgcaagcaaagatctggaggagcagttacggtctg

SEQ ID NO: 749787 - DNA, 82 bp, Homo sapiens
cacggagcgctgcggagcgaacctcacctttccagggcgcaaggtgaagatcatgacggagaaggaactcctggccgtggct

SEQ ID NO: 749788 - DNA, 90 bp, Homo sapiens
cgggaaaggaatcggtattttttgctgaaccacccttcaagaatcatctcccctgccccacaaacatgaaagaaaagacaagagaagcac

SEQ ID NO: 749789 - DNA, 75 bp, Homo sapiens
gctgagtattggagccaggagcctgccatgagtaacaacatgctgtaccccaaggaagacaaggagaaccgcatt

SEQ ID NO: 749790 - DNA, 90 bp, Homo sapiens
cagaaggtggctcaatgcaggtattcaagcagtctttgagtgattgcagtatgactccatttccctggtgcattcatataatagttcacc

SEQ ID NO: 749791 - DNA, 76 bp, Homo sapiens
cccctcctgactctgcctggcacagcctgtggccctggcctggtcagaatggcggcagtggagcatcgtcattctt

SEQ ID NO: 749792 - DNA, 75 bp, Homo sapiens
gttcattcctagctcagaaagcaacgttttgagccacaactgtcacaactccagaacaaagaactttgagtctgg

SEQ ID NO: 749793 - DNA, 75 bp, Homo sapiens
gttgaactcgcagctggaccttttggaaataatgaaaagatactggactaagcatgcccagtgatacttcactct

SEQ ID NO: 749794 - DNA, 141 bp, Homo sapiens
aagccttgaagcagcaattgcccttaaaacatcatccctgccctggatcggcctggagccagtgcccaagtgctggagaatctggtaaaagcaccattgtgaagcagatgaggatcctgcatgttaatgggtttaatggag

SEQ ID NO: 749795 - DNA, 73 bp, Homo sapiens
gggagatgctcttcggcctagtgcgccagggcctcaagtgcgatgctgagatctgtatctgtggacctgaatg

SEQ ID NO: 749796 - DNA, 100 bp, Homo sapiens
agaaacctgggtgaactttcacggacaacctcagaggacaacgaagtgttcggtattgttgcagcatctggcagtgagactgaggatgaggacagcatgg

SEQ ID NO: 749797 - DNA, 75 bp, Homo sapiens
cccgggaggggggagcggcgttggaggccaccgtttccaggattttacagtttttggaggcagtctgtcaggagc

SEQ ID NO: 749798 - DNA, 100 bp, Homo sapiens
atgctagtgtagctgaagcaagcacgaaaaatgctaacaacagcttcacgttgagtggtgattttatgcaatggcttcaagccacagttcttcaccagtg

SEQ ID NO: 749799 - DNA, 100 bp, Homo sapiens
aacgattgggctgagcagaggacgacatgttgcttttcgtggaggttttgaacgaagaatgtgatcagaactggtacaaggcagagcttaatggaaaaga

SEQ ID NO: 749800 - DNA, 90 bp, Homo sapiens
gagctggccctgctgcttatggagcaagacagaaacgaagaggccatcaaacttttggaatctgccaagaacaagttccagttccagtct

SEQ ID NO: 749801 - DNA, 73 bp, Homo sapiens
tcaggttgtccgagcatctgggaagaatgggtaccacagaccatgtcatcgtcctggcgtccacgaaccgagc

SEQ ID NO: 749802 - DNA, 82 bp, Homo sapiens
gaacagcctgaagaagggctccctcgtgaagaacctgaaggacacactagccgagcctcttgaagccattcttacagatgat

SEQ ID NO: 749803 - DNA, 75 bp, Homo sapiens
tgaaaagccttaggatattgctgttgtcccaggacagaaaccatgtttggtgcacctcgatttggaggaagtagg

SEQ ID NO: 749804 - DNA, 51 bp, Homo sapiens
gcagtgaaaatgatgagagatataatttttatggtgggacgaggatacctg

SEQ ID NO: 749805 - DNA, 82 bp, Homo sapiens
ggtcctcagcgactcttctgacctccgcgcgacgtacccgccgccgccgttggctggaggaacttacaatgtctcagaaaaa

SEQ ID NO: 749806 - DNA, 115 bp, Homo sapiens
gtgccaagttagatgccgattacccacttcgagtcctttattgtggaggctgcctgctgtttcccggggagatcatgaaacgaggtcgccttcccagcagcagtgaggattctga

SEQ ID NO: 749807 - DNA, 103 bp, Homo sapiens
ccctcgttcccttgggaaccgcctgggaactccgccatgtcatccacttcgcccaacctccagacagacaccaaaccagtgcagatgatgaacatggaggcca

SEQ ID NO: 749808 - DNA, 101 bp, Homo sapiens
ctggagcaaggcgacgaaccttggagagaggagaacgaacatcttctggacctttgtccaggaaaactaggtgtctgtgttcactccaggctgaagttaca

SEQ ID NO: 749809 - DNA, 75 bp, Homo sapiens
cgggcaccatgagcgacgtggctattgtgaaggagggttggctgcacaaacgagactgattcttgctattccaaa

SEQ ID NO: 749810 - DNA, 75 bp, Homo sapiens
gatgtggccatcaagctcaagttcctggaagaaaacaaggtctctgcatggattcccccagccctatggaccccc

SEQ ID NO: 749811 - DNA, 74 bp, Homo sapiens
ttgaaagagaagctcttcctgtgagattttgtacagcagcaatttcttactctctctgcaagttttcttcccag

SEQ ID NO: 749812 - DNA, 83 bp, Homo sapiens
ccgctgagggctagctacacacacgccctcacgcccggcgagcccgcgagggggatatgagactttctactcggaatatcctg

SEQ ID NO: 749813 - DNA, 100 bp, Homo sapiens
gtccggcacaggaaaaacagccaccttcagtatctcagtcctccagtgtttggatattcagtggagagactttgctaaagaagtggatgggttacttcga

SEQ ID NO: 749814 - DNA, 80 bp, Homo sapiens
gacacttcccctgcaagcccaccacgccatggagaagatggaagagtttgtgtacaaggaaagtaatggaccagtgaagg

SEQ ID NO: 749815 - DNA, 89 bp, Homo sapiens
caagcctctcagcttcggagaatggagtcttccatcaatcatatctcacagagccccaacggtaaactgactgatttcctgagcttcta

SEQ ID NO: 749816 - DNA, 100 bp, Homo sapiens
tgtgatcattgagaccatgaagtccaacccagaggaaggcgttttcacggtgacccctgacacaaaaagcaaggtctacctgaggacccccaactgggac

SEQ ID NO: 749817 - DNA, 74 bp, Homo sapiens
tcgacctgctaacagaactggaccttttcgaaactggcgatggaatatgagaggagccctctggaaagaaaagg

SEQ ID NO: 749818 - DNA, 100 bp, Homo sapiens
gaagaggcctggaagggaaggaacaggatttggtgctatggagaaatttttggtagaatataagagtgcagtggagaagaaactggcagagtacaaatgt

SEQ ID NO: 749819 - DNA, 74 bp, Homo sapiens
agagaagcagcggatcagcagaggtctatcagccacagtctctgcaagtttccaagagcagcagaaaatgaaca

SEQ ID NO: 749820 - DNA, 100 bp, Homo sapiens
cgaacatcttctggacctttgtccagatattgatgatgttaagaagttcaaaccgggttacctggaagctactcttaattggtttagattatataaggta

SEQ ID NO: 749821 - DNA, 100 bp, Homo sapiens
gctctctctatgagaacgactgcatctttgacaagtttgagtgttgctggaacggttcggatagaggtcatgacgccagtcagatcacactagccttggg

SEQ ID NO: 749822 - DNA, 75 bp, Homo sapiens
gacagaaagctggaagttgaaatggcaaattctgaacttgggggaatttggtcagtaggacaaagaatctggcag

SEQ ID NO: 749823 - DNA, 99 bp, Homo sapiens
tcctcgaacgcgaggccaacagccccgacatatgtagagtgtgtcggtcagaaggaacacctgagaaaccgctttatcatccttgtgtatgtactggca

SEQ ID NO: 749824 - DNA, 122 bp, Homo sapiens
gcaagagaccgactggcggagcaccgccttccggcagaagctggtcagtcaaatgcacaggtttagccccaacatgactgagcgcgaggctgcaaatttcatcatgaaggtcatccagagct

SEQ ID NO: 749825 - DNA, 75 bp, Homo sapiens
atgacatctgccttgacgaagtggcagaggaacttagagccagcaccgctctttgaccttgccatgcttgcctta

SEQ ID NO: 749826 - DNA, 140 bp, Homo sapiens
tttttttctctctctctctctcttaagaaaggaaaatatcccaaggactaatctgatcgggtcttccttcatgcagctgttaaatctaagaaagctacagatacctataaactctatgtggaaaaatatgcattagcaaa

SEQ ID NO: 749827 - DNA, 82 bp, Homo sapiens
gatccagaagtccagagctgaggactgcctgtttgcagacagccgctcaggaagcaatcttgcatgcgtctggaaatggcac

SEQ ID NO: 749828 - DNA, 90 bp, Homo sapiens
acggtccccactttcccctgagcctcagcacctgcttgtttggaaggaactgcaagcacatgttgaccagataactgaaatggcagcagt

SEQ ID NO: 749829 - DNA, 96 bp, Homo sapiens
gaagactttagtcctctctcacctgatgtgcctatgcatggggctgcttttggtccaccgcaaggtggatttcatcctccttattggcaaccagga

SEQ ID NO: 749830 - DNA, 98 bp, Homo sapiens
gaaggtgccggtggtgcgagtcttcggagcgaccccggcaggcaatggcagcagataaaagtgacgagtggtttgccaaacacaataaacccaaagct

SEQ ID NO: 749831 - DNA, 89 bp, Homo sapiens
gcacagataatgaagactttccatcaaggaaaaggccaaagttgttgagcccctggactatgagaatgttattgcccaaagaaaaaccc

SEQ ID NO: 749832 - DNA, 101 bp, Homo sapiens
cttactggagtccaagatgctaatggtagctacagcaagctgggtagcaggcagatccaaaggatatcatgaagtttccagggcctttggaaaaccagaga

SEQ ID NO: 749833 - DNA, 100 bp, Homo sapiens
tctggccggtcagcaagcagctctaccgccgcctcaactgccgcctcgcctactcactctggagccgaatgggtaccacagaccatgtcatcgtcctggc

SEQ ID NO: 749834 - DNA, 100 bp, Homo sapiens
ggccgccctgggccgggccccaccggacggaaagccatcaccaagtcgggcctccagcacctggccccccctccgcccacccctggggccccgtgcagcg

SEQ ID NO: 749835 - DNA, 82 bp, Homo sapiens
ggaaccgaagagagctctgttgttgcagcctacatacagatcacttttgtggagccctactttgatgagtatgagatgaaag

SEQ ID NO: 749836 - DNA, 90 bp, Homo sapiens
ctatcacaacagctggacaaagttgtaacaaccaattacaaacctgttgctaatcatcaatacaatggttcccttctggagaagagtcac

SEQ ID NO: 749837 - DNA, 98 bp, Homo sapiens
gcttctatagttgattgaatgctcttaacacggagaggtggatagatacttctcaagacatcacacagcgtgagtcaatcaaggagggaagccacaag

SEQ ID NO: 749838 - DNA, 48 bp, Homo sapiens
tgtgaatgatgtcaaaatgtgtgtggccttcctacagcaacttcccac

SEQ ID NO: 749839 - DNA, 90 bp, Homo sapiens
agctggctgaagatggctactctggagttgaggttgaagaagcctcagcggaggcgatacggcctcctcgccaacactgaggaccccacg

SEQ ID NO: 749840 - DNA, 100 bp, Homo sapiens
ccggcggtccacggccggaatggcagcaagctcagcctgcttagacgcctggtgactctcatttcgcagcaggccacgctgctggcctccaatgaagcct

SEQ ID NO: 749841 - DNA, 74 bp, Homo sapiens
ggcgccgtcttcccgggtcccgagcactctgtgccggagatgatgaggagtctgatgaggaagctgtgaagaaa

SEQ ID NO: 749842 - DNA, 74 bp, Homo sapiens
cgcagtggtcgcttcttctccttggtatgtgacgcattcccagactcttcagccaactgagcatcagcttcttc

SEQ ID NO: 749843 - DNA, 75 bp, Homo sapiens
tggacatcaagattaaaagagcgaataaagtttatcacgccggggagcactcactgtgggcctcgtgcgacagtg

SEQ ID NO: 749844 - DNA, 100 bp, Homo sapiens
ggtggatcctgtccttcatgcagtctctcattggcttctttgagactgaaatggcagctcatctttgggtgaaaaattgtcgggatcttctgcagtccag

SEQ ID NO: 749845 - DNA, 75 bp, Homo sapiens
cgaggggagaatctggtctcaatgacagtagagggacctcctcccaaagatgtttgtctgccattgtggatttcc

SEQ ID NO: 749846 - DNA, 100 bp, Homo sapiens
tggagcgggggccactccggacacggtgccggtggtggtgtgcacattgagccccggtatagacagttcccccagctgaccagatcccaggtgttccaga

SEQ ID NO: 749847 - DNA, 84 bp, Homo sapiens
ttgttaaggattccaagtaactcttatttggtaaagtcagtgataaatcttttgtttgctgcatatactggagatgtgtctgca

SEQ ID NO: 749848 - DNA, 75 bp, Homo sapiens
ccgaggccgcccccaaaaggaaactgtcatcgataggaatacaaggccaaatccttgtagctgtcttcttgcccc

SEQ ID NO: 749849 - DNA, 98 bp, Homo sapiens
cgcagccttcgctagccccgccccgtcctattcgggctcccgcctctgttcagaagtggtccaaaggcaaagttcgggacaagctcaataacttagtc

SEQ ID NO: 749850 - DNA, 75 bp, Homo sapiens
ttcgcagtggtcgcttcttctccttgatgctgggctcttgcactgtttggtggaaatggtgagacaggatttgag

SEQ ID NO: 749851 - DNA, 100 bp, Homo sapiens
atggtcaagattgagaacctgaccaaggtgggcaaacgcagaggcgggaacaaactagccctcaagacgggaatagtagccaagaagcagaagacggagg

SEQ ID NO: 749852 - DNA, 88 bp, Homo sapiens
caaccagcagcccgaggtcttctgcaaccaggtgaagtcccgcttggcttttgggaagcccctggtggagcagggcacagtgctggcg

SEQ ID NO: 749853 - DNA, 74 bp, Homo sapiens
cctgtttgagaaaaggcctaagaattttggcattggttaccttttcgacaaaatgattcatctagtcattgcca

SEQ ID NO: 749854 - DNA, 50 bp, Homo sapiens
tgaagattctacagataaatcagtgatggggggccccgagtcccgcggcg

SEQ ID NO: 749855 - DNA, 83 bp, Homo sapiens
cagaccctggagcctcagttggaagcagccgatccagcctgcggagcctgtggggcagctatgctaagaaggaatctgatctt

SEQ ID NO: 749856 - DNA, 100 bp, Homo sapiens
aaatcatcaggaaatactacgagactgtctcagcccatccctacaaagctctcagcatggcggctcctctacgtcacttgcgtccaccaaagtctgcagc

SEQ ID NO: 749857 - DNA, 82 bp, Homo sapiens
tctggagtgcgtgggggaccggctgttggcggcaaacggggattcagcgtccgatcctttggaacagggactcacgtgaagc

SEQ ID NO: 749858 - DNA, 89 bp, Homo sapiens
cccctcatcgcagcctgaaagtgggcgaggtggatagaggtgttcatccccagattttccatttctgcctcctacaatctggaaaccat

SEQ ID NO: 749859 - DNA, 83 bp, Homo sapiens
cgaggccctgcggagctgcttcgccgctgcgccctgggcgctgcctatggcacagccaagagcggtaccggcattgcggccat

SEQ ID NO: 749860 - DNA, 83 bp, Homo sapiens
ctcaagtccctgctggagcactctctgccttggccagagaagagaacagagaaaattcctgttccaagagaaaataaggcaac

SEQ ID NO: 749861 - DNA, 90 bp, Homo sapiens
catcattgatgtggtgcgatcgcgggagggcaccctgatgggcacagccattggcacctgcttcggctactggctgggagtctcatcctt

SEQ ID NO: 749862 - DNA, 50 bp, Homo sapiens
cccaggacccgcctggctgcgagatatgtcgccactgggacactgtgaac

SEQ ID NO: 749863 - DNA, 100 bp, Homo sapiens
ctcgggcaaaagttgtgcattggcccgatcaagcctgacttctagccaagggaaatcctcattgacgattcaatttgttgaaggccaatttgtggactcc

SEQ ID NO: 749864 - DNA, 90 bp, Homo sapiens
aacagtctgtggagagaatctgcctcctttaacttatgaccagcacggctgtgggaactttgtccgtgtaattcagactttcaatcgcac

SEQ ID NO: 749865 - DNA, 95 bp, Homo sapiens
gctttacccgactctttgggccgttatctcacgacttgatcatcttccctgacgactgtgagttcaagcgggtgccgcagtgccccagcgggagg

SEQ ID NO: 749866 - DNA, 83 bp, Homo sapiens
tatttctcttttgtctgcccctattgtaagtgcagatggaacacaacagcagaattacctgattctaggacaaaggaaattga

SEQ ID NO: 749867 - DNA, 100 bp, Homo sapiens
gtggagtgtagagatatagttggcaacctcactgagttagaatcagaggatggaactccaacctcgaaaacatttgaacacgtgaccagtgaaattggag

SEQ ID NO: 749868 - DNA, 75 bp, Homo sapiens
ggtattgccgctgttactgatatacctttagccctactgccaataaagggaaaataagagatgctcatcgacgaa

SEQ ID NO: 749869 - DNA, 83 bp, Homo sapiens
aaaaaggaaggagaaaagatccggaagaaatatccggacagggtccccttggctggagttgtcttccttggagtcgggctgtg

SEQ ID NO: 749870 - DNA, 75 bp, Homo sapiens
aataggcagctatttcacacttcagatgctgaagcgagtccctgagctcccgctcggggtgtggttttctctcgg

SEQ ID NO: 749871 - DNA, 96 bp, Homo sapiens
cagctcctcaagtgcaacaagtcccacttccgaaaccacaagtttgccgatgtggttccacgagtgtttgggcgcatggtgggtaaaagccgggag

SEQ ID NO: 749872 - DNA, 101 bp, Homo sapiens
tctgatgagaagctgttcctcgttctcttttttgataataagagaagttggagcatcagatccatgctgctgctgactcggagccccacagcttggcacag

SEQ ID NO: 749873 - DNA, 90 bp, Homo sapiens
gctaggccatctgaataactttactaaggctggacgtaaagaaagaagtgatgcactcaattctgcaatagataaaatgaccaagaagac

SEQ ID NO: 749874 - DNA, 49 bp, Homo sapiens
gttttgtgcagattgccagtctaaagacaccattcgcttttcacccaag

SEQ ID NO: 749875 - DNA, 98 bp, Homo sapiens
ttgtgtggtcgcgtctcggaaaccggtagcgcttgcagcatggagaggcagatgcgaaccagaacaatgggacctcctctcaggacacagcggtgact

SEQ ID NO: 749876 - DNA, 89 bp, Homo sapiens
atttcactgcctgagctgaagggctgcctgggtgttagcaaagaagacaagttggatggcttgaggactggtactaaaaggaaacgtga

SEQ ID NO: 749877 - DNA, 50 bp, Homo sapiens
agcctgccaagagctgggactacagcttgaacaggaattggagctatctc

SEQ ID NO: 749878 - DNA, 90 bp, Homo sapiens
atctgaagaaatacttggattctatccctcctggtcagtacatggattcttcacttgttaaggttacagaaattatctcagagattcggg

SEQ ID NO: 749879 - DNA, 100 bp, Homo sapiens
cagccaacagagctgtggttggtgtggcatgcagcattttggaaggaaaattgaagacgtgttcaagaaaacatgaacagaagcaaatgatgaaaatgag

SEQ ID NO: 749880 - DNA, 75 bp, Homo sapiens
cttatcttagagccacactgagattggaacccgcaaaatatgccagcctcacttttaactttctggaacgcaccc

SEQ ID NO: 749881 - DNA, 74 bp, Homo sapiens
taaaacatttttcagggacgtagccatccagaggtggggaccaatgccatggacagccccctcctcaagtacag

SEQ ID NO: 749882 - DNA, 100 bp, Homo sapiens
gctgctcagccagctcctgcgaccgccctgcgcttcgtgcaccggggcggtccgttgccaaagccaggtggaacggcacatgtgtgatggggacattgtt

SEQ ID NO: 749883 - DNA, 100 bp, Homo sapiens
ggtgccccacaggccactgtgcaggatctccactcggccctgacacagatttcctcgtcctgtgactgtggagcccatggaccagttagatgatgaagag

SEQ ID NO: 749884 - DNA, 100 bp, Homo sapiens
gaagtacaggcagtcaaccctaaacagtggactcaacttcaaagacgttctcaaggagaaggcagacctggagctgaagaagcaggtggagagtgccgag

SEQ ID NO: 749885 - DNA, 100 bp, Homo sapiens
cgaggacctagactgtgacaacgaccacgtctccaaaatgagtcgcatcttcaacccccatctgttacacttccaggggctccccactcagtccccagtc

SEQ ID NO: 749886 - DNA, 103 bp, Homo sapiens
ggcctcccagccgacatgtctctagtggcggaagccttcgtctcccagattgcaggtattggtggcatggatggaacacaacagcagatttttaaaatgttag

SEQ ID NO: 749887 - DNA, 75 bp, Homo sapiens
gtgaacactcaagtgaagcaaaagccttccatgattacatgtctttggtggacttgggaaagaggttgctagaag

SEQ ID NO: 749888 - DNA, 75 bp, Homo sapiens
tcagcggtctgatgcctggagcaccactgcagccagaaagcgaggctgaaggggatgctaagggagataaagcaa

SEQ ID NO: 749889 - DNA, 100 bp, Homo sapiens
tgaaaattttccccagcagcactatgctaaggaaactccaaggcttgccttcaagaataactgcgaactacttataccatgtttgtgtggaagtgccccg

SEQ ID NO: 749890 - DNA, 74 bp, Homo sapiens
attgctggacggccagtgggagagcgaggcctgagcctctgcgtctaggacctaatgcactgcacagcatttgc

SEQ ID NO: 749891 - DNA, 76 bp, Homo sapiens
gacgagatgatcaaacgcctgaagtacaaaattggacagctgtacatgatcagcaaacacagccatgaacagagtg

SEQ ID NO: 749892 - DNA, 100 bp, Homo sapiens
ctttctggactaattgaagaaaaaagtaaactacttgaaaaatttagccttgttcaaaaagaggccagtgactacttctcaaaagctttaaaatttgatc

SEQ ID NO: 749893 - DNA, 83 bp, Homo sapiens
cctgggcgctccggtggcggcggaggagtacaaaccaccaggaacccgtaaacttcataacattcttggagtggaaacaggag

SEQ ID NO: 749894 - DNA, 98 bp, Homo sapiens
aactttgaggacaggaatgcatttgtcacgggcattgcaaggtacattgagcaggctacagtccactccagcatgaattaaacaaccaccatgtcgag

SEQ ID NO: 749895 - DNA, 85 bp, Homo sapiens
agtttgcccgtgtctgtgaagtagacaatgagttgcgtatttgtgctagagataagcgtgagtgcatctccatccacgttggcca

SEQ ID NO: 749896 - DNA, 98 bp, Homo sapiens
cagccttcccagtagctgggaccacagatcatggaggacacccaggctattgactgggatgttgaagaagaggaggagacagagcaatccagtgaatc

SEQ ID NO: 749897 - DNA, 100 bp, Homo sapiens
cggaagtgccccttagcgggtgggggaagctggtaggcacgggcggctccgcagtgaccggactcgggggagacttgcacacctacccctgtggagcgtg

SEQ ID NO: 749898 - DNA, 98 bp, Homo sapiens
gaaaatgtgataaaaacaaggtggaagattcttccaaggaaccagtgcgaagactctgaagaagaagctatggagactacaccagccaaaggaaagaa

SEQ ID NO: 749899 - DNA, 108 bp, Homo sapiens
gaccacatcaccacagatgtacagggacaaaagctgctggctgggcgctggccttttgatcacaatgactttggcgtatttctttgcaagctgttcccctttttgcag

SEQ ID NO: 749900 - DNA, 101 bp, Homo sapiens
gtgagcggtggcagtcgcgaccgcgggtgcatccagtttctgcgcccagggcgacataccttctgttgaataccttttacaaaatggaagtgatccaaatg

SEQ ID NO: 749901 - DNA, 75 bp, Homo sapiens
gccgaggtggcggcggctcctcagggaagagtgtatcacagccattgggaactttcttcacccatcaaagcctca

SEQ ID NO: 749902 - DNA, 101 bp, Homo sapiens
cgagtttgtcttttcttacctgagactgggcctgaagggagagtttcagttcttcattgacgtatgtgcagaagcttataatcctgatgaagaagaagatg

SEQ ID NO: 749903 - DNA, 96 bp, Homo sapiens
gaaaggttggagctgccgccgcctgcagtcggtgaccgcgcgactcggcgcccgcccgcggggtattccctcagcggatactacacccatccattt

SEQ ID NO: 749904 - DNA, 100 bp, Homo sapiens
gtcgggccgattttcccaggatgacagagctgaggcagagggtggcccatgagccggttgcgccacccgaggacaagaaagctctgggtgtgcggcagta

SEQ ID NO: 749905 - DNA, 100 bp, Homo sapiens
tgcatagcctggacccacgacggcaggaattattggaggccaggtttactggagtaggtgttagtaaggttttcccatcatatgattcccggtcctcctg

SEQ ID NO: 749906 - DNA, 90 bp, Homo sapiens
cgccagccatcaccctcgagagcccggacatcaagtacccgctgcggctcatcgaccgggagggtttggaatcacttgctaggagtcttg

SEQ ID NO: 749907 - DNA, 100 bp, Homo sapiens
ttactgcctcctcactctggaaccaaatgccttactacgatatttgcacagttccaacacagtcgagaaaaagcacttccctcagataacataaggcatg

SEQ ID NO: 749908 - DNA, 75 bp, Homo sapiens
attcggcagcgtcgtcgcttcactgtggctcatacatggttcgagaacttgtcttggacaattgcaaatcaaatg

SEQ ID NO: 749909 - DNA, 96 bp, Homo sapiens
gtcggcagcaagaacagagagagaggtggacagatctgagagatactgaggttcatctgcagaagccagcggacgcctctgttcaacttgtgggtt

SEQ ID NO: 749910 - DNA, 50 bp, Homo sapiens
ctcccggtgtggccacgagtcggttttcggctttgtgagaaaccttacca

SEQ ID NO: 749911 - DNA, 100 bp, Homo sapiens
ctcgggggtaggcaagacctgcctcctgttccgcttctcagaggacgccttcaacaccaccttcatctccaccatcgatttttacatgagttagcccaga

SEQ ID NO: 749912 - DNA, 82 bp, Homo sapiens
accgaattaaaatttatacttcgcaaaactcagcaattttttgatgagagatggggacttgcttggggtcttgctgcccagg

SEQ ID NO: 749913 - DNA, 96 bp, Homo sapiens
cctgggagccatcttccagctcatctgtgtgctggccatcatcgtacccattcccaagtcccacgaggcgccctgcatgaattccccaatgacatc

SEQ ID NO: 749914 - DNA, 75 bp, Homo sapiens
gggtcctcgcttgcagttcagcgaccacggtgctccagctgctgctcctgcccctgcctcagtcccacagatatc

SEQ ID NO: 749915 - DNA, 100 bp, Homo sapiens
tgatggagattttgatgtggatgatgccaaagttttattagggttcgaaaccgccaagtcttttgccctccatggtgcacatgtgatcttggcctgcagg

SEQ ID NO: 749916 - DNA, 83 bp, Homo sapiens
atttcgtagagtgtttgcttcggcagaaaacgcgtcgagggcgaggcccccagcagtgagactggcacatccctggacagccc

SEQ ID NO: 749917 - DNA, 83 bp, Homo sapiens
aagaacatccgagggtgcctgggaatcggtcgcctggaggaccagtatttcccatggaggggaggcttgtggatcagaatctg

SEQ ID NO: 749918 - DNA, 100 bp, Homo sapiens
gctgcttatggctataaaattacaggtcgctacccacaggagaacaagggaacctacatcccagtgcctatagtctcagagttacaaagtggaaagtggg

SEQ ID NO: 749919 - DNA, 82 bp, Homo sapiens
aagcctggaagaactcgtcatgctctttgtagcgtggtgcttctgttgctcacaggttggccttggggaggcactattagag

SEQ ID NO: 749920 - DNA, 100 bp, Homo sapiens
ctgagtactcaacatattgactgtatttgggctgcagcacagccaaaacctattgatgtacaagtcattacacaccacatgcagcgatatgcagtttggt

SEQ ID NO: 749921 - DNA, 96 bp, Homo sapiens
tatgttgctattggtcaaaagagatccactgttgcccagttggtgaagagacttacagatgcagatgcctgaggaagtgcaccatggagaggagga

SEQ ID NO: 749922 - DNA, 75 bp, Homo sapiens
tccaggtcctgctgcaggcggccgagttcctggagcgccgtgagagaggaatgagctcagtgaccacttggatgc

SEQ ID NO: 749923 - DNA, 100 bp, Homo sapiens
cagagcgccgaggaggctttcctgctggtggcaaccgcctacgagacactcaaggttccaatcgttgcacttactgctactgcaagttcttcaatccggg

SEQ ID NO: 749924 - DNA, 100 bp, Homo sapiens
gagtatcgttctatttctctagctattgccttattttttctcatggatgttcttcttcgagtatttgtagaaggatggatctgagaacgctgtctgggct

SEQ ID NO: 749925 - DNA, 100 bp, Homo sapiens
ctgggaggccggccggtgccagcacctttcggcttctgagacggcggcagcagcggcattcagaacttcttccttgacatggtcctttggaaagttgtgt

SEQ ID NO: 749926 - DNA, 96 bp, Homo sapiens
cggagatcctgatgaagttcgagcactaatatttaagaaagaagatgttaactttcaggttgtttttgagcacgttcactctcgcagtgtcagctg

SEQ ID NO: 749927 - DNA, 90 bp, Homo sapiens
gtggaattgcatgggaaaatcatggaagttgattactcagtctctaaaaagctaaggttgggggccgtcccgctcctaaggcaggaagat

SEQ ID NO: 749928 - DNA, 89 bp, Homo sapiens
cggcggccgcggtaatgctggtggtctgcatcaccaccggatcaacttcgacaaataaaactaatctggattcactccctctggttgat

SEQ ID NO: 749929 - DNA, 98 bp, Homo sapiens
cagattccagaaaaattacagcacatctcagtgaatttgcaagtggccttcatggtgaaacacctcttggagtatacccaggcaacagagtctaacct

SEQ ID NO: 749930 - DNA, 100 bp, Homo sapiens
agcagtaatcagatgtttgccatgaaagaaataaggcttcccaaggagtctactcttcatcttgtgttgagacttcgtggtggtgctaagaaaaggaaga

SEQ ID NO: 749931 - DNA, 100 bp, Homo sapiens
gttgaaggtgggacgagcctaatgaagtgtttacagaagcacttgcagaactcatcagaagccaccccgcttatcagcagatctcaagagagcgttcggt

SEQ ID NO: 749932 - DNA, 75 bp, Homo sapiens
ggacttctcagcctccagaactttggagtgcctcaagcttattgcctctcaaaaatttacagacaaacgcattgg

SEQ ID NO: 749933 - DNA, 110 bp, Homo sapiens
atgaaattgcccgcctgaaaaaggagaataaagaactggcagaagtagcagaacatgtacagtatatggcagagctaatagagagagaaaaggaacagttccgtaagctc

SEQ ID NO: 749934 - DNA, 83 bp, Homo sapiens
ctggacactgtcacactcaacatcacctctcaggctgaaggtgatgtggccgccctcaaccgacgcatccagctcgttgagga

SEQ ID NO: 749935 - DNA, 100 bp, Homo sapiens
cgacaggctaagctggattatcaggtgattcgcatctaggtggcggcagtcgagaaggctcgtttaaagaaacaataacattaaagtggtgtacaccaag

SEQ ID NO: 749936 - DNA, 80 bp, Homo sapiens
ttttcctctgttataagagagggagagataaaccaccgcttacagatattgggtgtgttccagagaacaagccttcagac

SEQ ID NO: 749937 - DNA, 83 bp, Homo sapiens
cctggacaggccatggcccttccatggaggattcctctgctgtcctcatggaaagcctaaagatggcgaggtgcagctgtgcc

SEQ ID NO: 749938 - DNA, 52 bp, Homo sapiens
ccaggaatgcaagaagaccatcatgccagaagcggccagcttgatgtccggg

SEQ ID NO: 749939 - DNA, 100 bp, Homo sapiens
tcgtcgagaagcctatcatcggttatgagtgccagtgagccgccttagatagaagcatcgtcagcactttattaatgatggatagtgagaataaacccga

SEQ ID NO: 749940 - DNA, 75 bp, Homo sapiens
ccggattcctccacaccacccacacaccagtcggcagcctccctggttcctccactttggcggtggccctctgct

SEQ ID NO: 749941 - DNA, 100 bp, Homo sapiens
acaacatcgccctgtggatgactgagtacctgaaccggcacctgcacacctggatccaggataacggaggctgggttatgaagacagtatggagtttcca

SEQ ID NO: 749942 - DNA, 116 bp, Homo sapiens
aagagtcacttctttacttggtgcaggaaggcagtctttgctacgtacagcaaaagggctgaaagacacacagaagtcttcatggatatagttgatacatttaatcatttaattcc

SEQ ID NO: 749943 - DNA, 83 bp, Homo sapiens
tgtttgtggatcgctgtgatcgtcacttggtaatattaacggctgctatttgaactattacttttttcttctggctgctattc

SEQ ID NO: 749944 - DNA, 83 bp, Homo sapiens
cccagctcggcccgcgggggagccccgggagccgcacgattaactgctgaagtactgatcgagttctgcatttcttcaatgag

SEQ ID NO: 749945 - DNA, 75 bp, Homo sapiens
ccgaggtggagctgcggggccctggcatgaaaggctgaagctcagggccctgtctgctctgtggactcaacagtt

SEQ ID NO: 749946 - DNA, 101 bp, Homo sapiens
gaggtgaagacagatcatgggactgataaattgcttggtgctaacagtggtttgcacatcatcatctttgatgaaattgatgccatctgcaagcagagagg

SEQ ID NO: 749947 - DNA, 100 bp, Homo sapiens
agctcaaatctttcactggatgttttgaggggtaatgatgagactattggatttgaggatattcttaatggttttagtttccacagcaactctagcttgg

SEQ ID NO: 749948 - DNA, 82 bp, Homo sapiens
caaggagctaaagcagcgtgcgttcagccctgggggccatgtttatgagtggactaagtgaaagcaaacaaacccatgtaca

SEQ ID NO: 749949 - DNA, 80 bp, Homo sapiens
gtccgcgctggtccgccatgcagcttagcagtgtctgcaaaaacgaatcttttcctacaacctgttaactgactggactg

SEQ ID NO: 749950 - DNA, 100 bp, Homo sapiens
gcaagagtactggaagcagtcagctaacacacaaggaagcctgggaggaagaacaggaagttgctgagctatgctgcctcgaactctgtcactgagaccc

SEQ ID NO: 749951 - DNA, 100 bp, Homo sapiens
ccagacaagcccaaggaggagctggagaaggacttcatctcccagggagccgatatgtggatttactcccttgatggaagcagctgctgctggccatgag

SEQ ID NO: 749952 - DNA, 88 bp, Homo sapiens
tgtaaaggccaagatccaggataaggaagggattgtcaatgaggcagatcagattccgatttgacgggcaaccaatcaatgaaacaga

SEQ ID NO: 749953 - DNA, 106 bp, Homo sapiens
gacccggtcacacaaagcttcagcatgtcatgtggttaatttcacctaccagtttttgaaaaagaagttctatatatttagccaatttatgtatgatgaacacatc

SEQ ID NO: 749954 - DNA, 102 bp, Homo sapiens
caaacaggcggaggagcccagagggaagtcgcggccactgcctgtgtgacggatgtgaccccgctgggcctgaagctgggccctcactggcctgtccctgct

SEQ ID NO: 749955 - DNA, 100 bp, Homo sapiens
gcgagagcagctcctcctggaaaaagcaagctgaagacatcaagaagatcttcgagttcaaagagaccctcggaactattctaccttgtaaatactgtta

SEQ ID NO: 749956 - DNA, 122 bp, Homo sapiens
tgtttccaaaccagtcagctgggctgatgaaacggatgacctggaaggagatggaaactaaaacccagtgcgtacgcattgctacaaaaggtaagaggtttgctttttttgcttgttttaac

SEQ ID NO: 749957 - DNA, 74 bp, Homo sapiens
tcgttgctgccttcttcgtcaagctgatcactggagattccatcgttagtgctgaggcagtatgggatcacgtc

SEQ ID NO: 749958 - DNA, 75 bp, Homo sapiens
ctcttacagcttatcatagtctcctatgtgcatatgtttttaagataaaattggctgcagcattggcaagatgtc

SEQ ID NO: 749959 - DNA, 74 bp, Homo sapiens
gaaccccaaggccaacagagagaagatgactcaggttatcaatactctggctgaccatcatcatcgtgggactg

SEQ ID NO: 749960 - DNA, 51 bp, Homo sapiens
attcagcctcttcatcctcaaacagatggagttttaacattgaatgcggag

SEQ ID NO: 749961 - DNA, 115 bp, Homo sapiens
aacttttcacccatctgtacatcctatgtcaactgcttctcaggtagcaagtacatggggagaaatcgaaacgagttggctgagactcttgcactcctgaaagcacaaattgatc

SEQ ID NO: 749962 - DNA, 50 bp, Homo sapiens
ggtctgtccatgctaacgtacaggaagtggactccaggtggcaagaatac

SEQ ID NO: 749963 - DNA, 87 bp, Homo sapiens
tcaaggcaccaagacgcaggggggatatccacagttcgatcaaggtctacttccccagcaggacagcatcattctcctatatcttct

SEQ ID NO: 749964 - DNA, 101 bp, Homo sapiens
attggaagtgaatggccccatggtgacggtggccctgtcagtggctctcttggccctcctgaaatgcatgactttgttcgacgagaccggccactacgtgt

SEQ ID NO: 749965 - DNA, 89 bp, Homo sapiens
gaggtggttgtgcaggatggcgacggcggcctacgagcagctgaagctagataatcattcaggtcttcgtgagctaaggccaaacaaac

SEQ ID NO: 749966 - DNA, 50 bp, Homo sapiens
cggccgtctccttaacaccgaacacctaccatggggcgcaagttggaccc

SEQ ID NO: 749967 - DNA, 137 bp, Homo sapiens
ttaaggaataatttatgaagctccgttgactaccgtggagagatcataatttggggttcaagattccaggttcttgggtgtctctggggagtccctgggccagaccttcctccagactccagcccacctcttcggag

SEQ ID NO: 749968 - DNA, 98 bp, Homo sapiens
gagcccaaggcaattgatcccaagttgtcgacgaccgacagggtggtgaaaggaaaccacccctactcctaatcccccgactacagaagaggagaaaa

SEQ ID NO: 749969 - DNA, 88 bp, Homo sapiens
tattttctcttcttctgaaaaagagatcttgatgaagaagatgactttatgtgtaagaaggcggcctctaaatcaaaagagaatggaa

SEQ ID NO: 749970 - DNA, 82 bp, Homo sapiens
ggacatcacggacatccagaagaagatgctcatgaagcagcaggaccggctggaggagcgagagcaggacattgaggaccag

SEQ ID NO: 749971 - DNA, 101 bp, Homo sapiens
gccttcttccccgcgccctgcggggctgtccaacgccttccagctccggctcccgctgcctgcaccatgtccgccagagatctggaaagcatgaagactgg

SEQ ID NO: 749972 - DNA, 83 bp, Homo sapiens
ggcgtgagcctccgcgcccggccgagcctggcagagagcaggtgtgtgatacacgtcgtcaggtgactgaccgaggaattcag

SEQ ID NO: 749973 - DNA, 82 bp, Homo sapiens
gaactagtttcccaaacagatgttaagacattcttggaagccttaccggttttcttggagcagaagaaaatgttaaaaagtg

SEQ ID NO: 749974 - DNA, 100 bp, Homo sapiens
tgttccaagtttatctcctttctgtttaaagatggaaacttatttaaggatggctgacttaccgtatcaggtgatggtgtttgtacatgctcgaaatgcc

SEQ ID NO: 749975 - DNA, 82 bp, Homo sapiens
atgcacgttccatccggcgctcagctgggcttgaggttgaaatcacaaagattagacacctttttagataggtgttcttcag

SEQ ID NO: 749976 - DNA, 75 bp, Homo sapiens
gaaaggaaggaatatatcctgactgattttcctcagtctcccatggccgcagccgcatcgcccgcctccccagca

SEQ ID NO: 749977 - DNA, 100 bp, Homo sapiens
cggggtaggggtctcccgcgaggaaacttggatttaactggccagaagcaggtattcaaagcagagaacaatccctgggtgacccccattgcagaccagt

SEQ ID NO: 749978 - DNA, 75 bp, Homo sapiens
cctggtgcagaggatcctggaggcctgggaagccaacgaccacacgcaggactggtgattgcagctggaagtgcc

SEQ ID NO: 749979 - DNA, 90 bp, Homo sapiens
ggagctccttttcctccacctaccttcccgagtagcagaaggtcaagaaatttgtgtgattgaagccatgaaaatgcagaatagtatgac

SEQ ID NO: 749980 - DNA, 82 bp, Homo sapiens
cacattcatctgggcatgcctgcagtactcttggcccatggacctgaaggagaagcacctgcagcagtgttgtactgctact

SEQ ID NO: 749981 - DNA, 83 bp, Homo sapiens
ctctcctgaccaccacacccggccccactgtgagagctgtcggcactgtaactctggaactgtggctgcaccatctgtcttca

SEQ ID NO: 749982 - DNA, 75 bp, Homo sapiens
ttgtaccaggccaagccttttgctcacatacagatattgatgatgttaagaagttcaaaccgggttacctggaag

SEQ ID NO: 749983 - DNA, 98 bp, Homo sapiens
tggctagatcaggaagcctatgtcaactatggaacaacaacttgcagctcatctctattgatggattgtgcagactggtgcttaaaatggaagtcgat

SEQ ID NO: 749984 - DNA, 75 bp, Homo sapiens
gcggaaggggaaagcctggagtcctggctcaagcaacattttgcagatgttgtacttagtgaagaatttctcaat

SEQ ID NO: 749985 - DNA, 100 bp, Homo sapiens
ctgcggggtcatggtgtgcttccgcctcttcccggttccgggctcagggctcgttctggtctgcctagtcctggtttgctatgaagattatggaatcaga

SEQ ID NO: 749986 - DNA, 98 bp, Homo sapiens
ttttgagtgagcttaaagaagtggagcccaaattagccgcctggatccaaaaacttaatagctttggttaatgttcgtgaagaaattgaagagttttt

SEQ ID NO: 749987 - DNA, 117 bp, Homo sapiens
ccaacatccaggctgtactgctccccaagaagactgagagtcaccacaaggccaaggggtagaagagcagaggatggctctgtcattgattatgaactgattgaccaagatgctcgg

SEQ ID NO: 749988 - DNA, 83 bp, Homo sapiens
gcccggcagccaccccgtctgggaatcaccccagactatgtccctcctcttggaaactttgatgtggaaactttagatataac

SEQ ID NO: 749989 - DNA, 75 bp, Homo sapiens
cgaaagggaccgaaatggagagcaaagatggcgtttaatgattgcttcagtttgaactaccctggcaacccctgc

SEQ ID NO: 749990 - DNA, 97 bp, Homo sapiens
gttgagcgcattgcatcacatgattttgaccccacaggaagctgcacagtgggatgaagacgtacgggtgcgagctctgcgggaagcggttcctgga

SEQ ID NO: 749991 - DNA, 100 bp, Homo sapiens
tcttattatgctggcacaggctcaagaagtattttttttaaaagccacaagagattttaccaaatgttgcaagaactctggagttcttatggtagtaaaa

SEQ ID NO: 749992 - DNA, 50 bp, Homo sapiens
tcttcttcgagtatttgtagaagggctgtgggtgagcgtggaggatgctc

SEQ ID NO: 749993 - DNA, 100 bp, Homo sapiens
agtgtgggatctggcaagaggagtcaaaatacgatcttatttcaatatgaactgtttgaggcgaagagatgctggtttgttgaatcagttgcaagagctt

SEQ ID NO: 749994 - DNA, 75 bp, Homo sapiens
caaaaactaagcatccagaggccctgagcagctttcagcactggagttcctgtgccttaagaacattagaacctt

SEQ ID NO: 749995 - DNA, 100 bp, Homo sapiens
ctcgatggaaactccctgtgtgacaccttccgagaccagtccacctacatcaggttctccccatgacaccacctgaacgtctcttcctcccaagggtgtg

SEQ ID NO: 749996 - DNA, 83 bp, Homo sapiens
gagaagtcaaaggaaatgctgcttggggatgagcatacacgatgaggcgagtggtacgacagagcaagtttcggcatgtattt

SEQ ID NO: 749997 - DNA, 83 bp, Homo sapiens
cgagggtactgcacggatgtgtctgcggactttgcacaggctgccatctttgccataggaaaatctggagagctgaagagttg

SEQ ID NO: 749998 - DNA, 134 bp, Homo sapiens
tgaagatgatgaggatgaagacctttatgatgatccacttctacttattaaatagagcttgtacctccaggcccatacatccttccaaagctcccaactaccctacagagggaaaccaccgagtagaattcaac

SEQ ID NO: 749999 - DNA, 101 bp, Homo sapiens
aggagagagagctcaccatgctcagggaggaaataatgctggccatacagttgttgtggattctgtggaatatgattttcatctcttacccagtggaataa

SEQ ID NO: 750000 - DNA, 100 bp, Homo sapiens
gtacctcaaagctgcaagtcagattctgatattgaaagattgttctggacttggtgcctctttctgttatatgctttcctatttagttgggagaccagtt

SEQ ID NO: 750001 - DNA, 98 bp, Homo sapiens
gctgggtctggagacgccgtggcagcctgaacggagtgtgcgacggattgggagtcaccacgttctgcgcttttccgagtcggacatatgagcagcgt

SEQ ID NO: 750002 - DNA, 83 bp, Homo sapiens
agctgggcgcggattcgccgaggcaccgaggcactcagaggaggacgtagacaagtttggcaacgagatcacccagctggccc

SEQ ID NO: 750003 - DNA, 88 bp, Homo sapiens
agattcgcagtggtcgcttcttctccttggttacgaagtgacagtgctggtgcgggactcctccaggctgccatcagaggggccccgg

SEQ ID NO: 750004 - DNA, 82 bp, Homo sapiens
taccaccaaagaggcgatgcagagattatgatggaacgagttgaagcagttaatatggctgaaggaatcattcacgacacag

SEQ ID NO: 750005 - DNA, 75 bp, Homo sapiens
gttctgcttcctgctgctctgtctcagcgccgcctccctgcttcttaacagggctacagagttatagaagagaaa

SEQ ID NO: 750006 - DNA, 99 bp, Homo sapiens
ggcggcgctggaggagcgaggcagctgtactaggactgggaacgggaaatccttttgtactattgctcattcatacttgttcatcaaagcctggagtcc

SEQ ID NO: 750007 - DNA, 90 bp, Homo sapiens
aaaatacagtaatgatagactatgtcttgcctgacttcagtacaattaaaaagggcttttgtaaggtaactataactacccaatattgca

SEQ ID NO: 750008 - DNA, 50 bp, Homo sapiens
aattctcaaggaaaaactgaaggtggagatcctagaaggcaaggatgccg

SEQ ID NO: 750009 - DNA, 74 bp, Homo sapiens
ttaccttgtgtttgatgaagcagatcgaatgtttgacatgggatttgtttaattggttggggtcagataagaag

SEQ ID NO: 750010 - DNA, 100 bp, Homo sapiens
actgattgccctttaacagtcaatatgttggaggcatgctaaggaaattgcccggcatttacgccctggaactctcagagcaatctttggtaaaactaag

SEQ ID NO: 750011 - DNA, 100 bp, Homo sapiens
gcagcatgcagtgctttctgggttccagtgtgtgttccaagtgctgccaaagtgcctcagcccagagacacccctgcctagcgtgctgctggctgttgag

SEQ ID NO: 750012 - DNA, 90 bp, Homo sapiens
cgaccgagatggcacacactttggacgtggacgaatgtcgcgagcgaggcccagccctgtgcgggtcgcagcgctgtgagaactctcccg

SEQ ID NO: 750013 - DNA, 103 bp, Homo sapiens
gcgggggattgtgggagtctccgcgtcccgctcgctgggagagaggtatcgagaaccttccctgcgaacttcagaggaacttccagctgatgcgagagctgga

SEQ ID NO: 750014 - DNA, 82 bp, Homo sapiens
gagtttccgatttaaagctgagctgcgaggaaaatggcggcgggaggtatcatgaactgatcactaaatatgggaagttgga

SEQ ID NO: 750015 - DNA, 80 bp, Homo sapiens
tcgagggacgcccggcccaagtggttcgagaacttgtcttggacaattgcaaatcaaatgatggaaaaattgagggctta

SEQ ID NO: 750016 - DNA, 100 bp, Homo sapiens
caacaaatggggatggtgtagcaccccgtccagttccacaggcgcatgggccacgtttccagtgcttggtggccatgtggggctgacgtgcgaaacctta

SEQ ID NO: 750017 - DNA, 74 bp, Homo sapiens
tttgataaaatcagagtgtggctgcaaagtgaaaagcttgaacgaagaagcactgcatgggtttcgagtgagtg

SEQ ID NO: 750018 - DNA, 50 bp, Homo sapiens
gaggaggttcgaagctgagtatgtgacagcatggggtaaccttggaaatg

SEQ ID NO: 750019 - DNA, 98 bp, Homo sapiens
taaaggagtggacattgctagcaatgagctcccaaagccatccagatgaagacagtcagtgttgccttagttttgtgcctgaatgttggtgtggaccc

SEQ ID NO: 750020 - DNA, 90 bp, Homo sapiens
aaaagatcttcaaaaggagcagaaaactttacaggtggcccgggagagtggcccaccccacatgaagaactttgtgaccaaggtttcggt

SEQ ID NO: 750021 - DNA, 74 bp, Homo sapiens
acgagtgcacattctgaaaacaggaaatggagttgttttttccttcaagtggaggttgtgggccggcaaacact

SEQ ID NO: 750022 - DNA, 75 bp, Homo sapiens
cgcgcgccagcaagaagatcctgctgcccgagcccaggctctgacgcccgctctgcggcttcggtgtttgaacag

SEQ ID NO: 750023 - DNA, 90 bp, Homo sapiens
gctgagctctgtcggtatctttccaaggtcctagaactcaggaagagtgatgtggttttggataaggttattcaaggacacggaaaagcc

SEQ ID NO: 750024 - DNA, 100 bp, Homo sapiens
atgataccattcagattgatttggagactggcaagattactgatttcatcaagttcgacactggtaaccaaggagcagtgaacagcagctactacagtag

SEQ ID NO: 750025 - DNA, 101 bp, Homo sapiens
gctgtctccagtgccgcagcagcagaatatctcaggagtatatccttgccggtacctgtgctggtggaggacaccagcagcagcagtgagtacggctcagt

SEQ ID NO: 750026 - DNA, 75 bp, Homo sapiens
cagcagctacgggcagcagagcctccaagggctgcagttctacaggctacaccgggaagaaaggcccaactaccg

SEQ ID NO: 750027 - DNA, 75 bp, Homo sapiens
acgtcgtcttccaggctcaaaaggagccacaccccctgcagtttctcagggagtgcatccgccccaacccttttc

SEQ ID NO: 750028 - DNA, 97 bp, Homo sapiens
cgtcggtttgctatcgggactcggcgaggacgtctagagcatgtttggaaaggattcaagaattagaggacttgcttgctaaagaaaaagacaactc

SEQ ID NO: 750029 - DNA, 89 bp, Homo sapiens
gatgggatctttccggatcaatccagatggcagccagtcagtggtggagtgtcttcattggctgctctggcatggagctgatatcacac

SEQ ID NO: 750030 - DNA, 50 bp, Homo sapiens
gagaggaagcagtgatgcattgagaatttctagaagtggatgaataccca

SEQ ID NO: 750031 - DNA, 87 bp, Homo sapiens
ctccaatgatatctacagcacctatcacttgttccctccaagacaactgaatggctttcatgagaaggacaagaagccatattgccg

SEQ ID NO: 750032 - DNA, 90 bp, Homo sapiens
ggaccctaaatacgccgaccttcccggcattgaggatcgtttaaaaattgatgtaattgactggttggtatttgacccagcgcagagggc

SEQ ID NO: 750033 - DNA, 100 bp, Homo sapiens
gtgctcactgtcaccgagccgctgcggccaggcatgggcaagaaggacgaccccaagctgatgcaggagtggttcaagctagtgcaggagaagaacgcca

SEQ ID NO: 750034 - DNA, 104 bp, Homo sapiens
gctgaaagctgccgactgcgacctgcagatcaccaatgcgcagacgaaagaagatgtttcaggacccagtggcctttgaggatgtggctgtgaacttcacccag

SEQ ID NO: 750035 - DNA, 82 bp, Homo sapiens
aggagacggcggccttcgaggaggtcatgaaggacctgagcctgacgcgggccgcgcggatggcatccgccacagactcgcg

SEQ ID NO: 750036 - DNA, 100 bp, Homo sapiens
gcccacccgcgccaggaggccgaacgcggactcgccacccgggaaactgttaaggcagcaataatagaagagcagaaacgaagtgaaaaggctgtggaag

SEQ ID NO: 750037 - DNA, 51 bp, Homo sapiens
atccatctccctcaaggcagcttttggtgtttcagtcacctccagtaacac

SEQ ID NO: 750038 - DNA, 83 bp, Homo sapiens
gttcttgtttgtggatcgctgtgatcgtcacttggctactgcagcactggggtgtcagttgttggtccgacccagaacgcttc

SEQ ID NO: 750039 - DNA, 100 bp, Homo sapiens
gatggctgcccacgggggctccgcggcgtcctcggcgctgaaggggttaattcaacagttcaccaccattaccggtggtcagccgtgaattaagaatgcc

SEQ ID NO: 750040 - DNA, 75 bp, Homo sapiens
aaatcatcgaattgaaagacctggtcatggggacagacgccaagttgcacgtgcattatttaatcacatagacaa

SEQ ID NO: 750041 - DNA, 82 bp, Homo sapiens
tagtaaacggggctgctggtgggccgcgtcgaagacatggaccagggctacggagaacccagcgggtgccgcttctccaccc

SEQ ID NO: 750042 - DNA, 101 bp, Homo sapiens
gggaagcgctccgggcctggaatccctacgcgtccctttgggtttagcacgatgagctcaatcggcactgggaccaagatcactccatggatgaaatgaca

SEQ ID NO: 750043 - DNA, 100 bp, Homo sapiens
aatcttcaagaacttcctcgcactgtgacatgtctgatcccttgctcccatccctgcagcatgaacaagactagacgcttgaagcaaagctgccatccca

SEQ ID NO: 750044 - DNA, 96 bp, Homo sapiens
gtttcctgggaggagtataaaaatgccacctacggctacgttttagggtgtcgtagtcattcttcagcacaattcttaattggagaccaagaaccc

SEQ ID NO: 750045 - DNA, 82 bp, Homo sapiens
cagctcgacaaagatggggttgtcctctttaagaagacaatgcagatcttcgtgaagactctgactggtaagaccatcaccc

SEQ ID NO: 750046 - DNA, 85 bp, Homo sapiens
ggagttgatcctgaatgaaagtggcgcgccgcccctgacgttacccggatcggagaggttttaaaatcaaagatgggaaaatcgg

SEQ ID NO: 750047 - DNA, 97 bp, Homo sapiens
ggtgaccttcctttctattcacccatctggcaagttggccctgtcggttggtacagataaaactttaaggtctccatcatcaccagttccagtagtg

SEQ ID NO: 750048 - DNA, 83 bp, Homo sapiens
caaaaactcaggcttcgccacctgcgtgcaaagatcctggtgcacctgagccgtggaggggctgaagtccagatctttgctcc

SEQ ID NO: 750049 - DNA, 100 bp, Homo sapiens
cacgatcctgtaactgccaaacccaagttggttggagatgtggattttgaaggaagatgagaagtttttgtctgaagtttttgcacaattaacagatgag

SEQ ID NO: 750050 - DNA, 75 bp, Homo sapiens
tacagtcatagcagtacccgagatggaagacgcgacaggaagaacagtcattgggacaccagatgaagagaccat

SEQ ID NO: 750051 - DNA, 85 bp, Homo sapiens
cacagaaggactgggatgatacaccttttccacagggaattgagttgaatatactgatgataatgctctgattcctaagaattct

SEQ ID NO: 750052 - DNA, 74 bp, Homo sapiens
gaagaagagcagaaaatagcagccaggaaccaagaaaacttgatagggccagatttgagtgtgtgaatttttga

SEQ ID NO: 750053 - DNA, 82 bp, Homo sapiens
ccgtcgccgccgccgccgccgccgcccggaccccggcgcgctgaatgcagatgaaggatttgggggcagagcacttggcagg

SEQ ID NO: 750054 - DNA, 75 bp, Homo sapiens
cgccagcctggagcgcgggccctggggccgcaacccgcgccgggcgaggagctcattttgcagctctcaagcttt

SEQ ID NO: 750055 - DNA, 83 bp, Homo sapiens
gtgtccctgaccatggctccctgcagtaccctttaacggacaatgtgttgaacatcattaaccagatcatggatgagtgcatc

SEQ ID NO: 750056 - DNA, 82 bp, Homo sapiens
cagaccaaggctctgtcccacatataggtggattaactgtctggcaaaggcaggtatgatctcgtgaaatcttgagagaaac

SEQ ID NO: 750057 - DNA, 98 bp, Homo sapiens
ctcggattctcgtagctgtgccgggaaccaaagaggttgttgtaaatgtggatgatgatggagtcatttcattgaacttcgagtgtgataagatgact

SEQ ID NO: 750058 - DNA, 74 bp, Homo sapiens
ctgcaaagaaggttaaatcaggatggctggataaactctctcctcaagggttcacagtgtcttcacctggaata

SEQ ID NO: 750059 - DNA, 100 bp, Homo sapiens
ggcctgcgagggttgaagattgtgaagcaatagcctaagctctacattaatcatactcctccaccactgtccaagagtaaggagagagaaatggacaaga

SEQ ID NO: 750060 - DNA, 98 bp, Homo sapiens
ggcggccatggcccggctggctgactacttcatcgtggtaggctatgaccacgagaagccagccctggaaaggaaaatatctatgaggcaaagcagag

SEQ ID NO: 750061 - DNA, 90 bp, Homo sapiens
ctgatgaagaagttattcaagatggtgttggaggtacttctgaaaatgatgacccttccaaaatggttatggttctggcagctactaatt

SEQ ID NO: 750062 - DNA, 90 bp, Homo sapiens
tgtaccctcccccgggagagcaagccgggcggcctgccccgccggagcagcatcatcaagcaatgctccaaggatgctttggaagactca

SEQ ID NO: 750063 - DNA, 82 bp, Homo sapiens
agcagctcaccgaggacggggactcgtccagggagtcggtagtaagggatggcgggacgtcaccacctttttttcggggaaa

SEQ ID NO: 750064 - DNA, 51 bp, Homo sapiens
aacttcaacagaatgtggcaaccagaggaactggggagtgatgaagatgat

SEQ ID NO: 750065 - DNA, 90 bp, Homo sapiens
cccggcctcccttttcatcaggacgggaagaccatatactccttgacgacagggactaccaccttcaccttcatgcccacaaggtgtcac

SEQ ID NO: 750066 - DNA, 82 bp, Homo sapiens
gtgggtttcttatagatggcttttattacattgagcagccgaatccagtggagcagcgttacatggagctcttagccttacg

SEQ ID NO: 750067 - DNA, 98 bp, Homo sapiens
gtttcggaatgcttttgtgctgctcacagtcaccgctgtcattgtgggtgctggagaatctggtaaaagcaccattgtgaagcagatgaggatcctgc

SEQ ID NO: 750068 - DNA, 83 bp, Homo sapiens
gggggaggcgacgctaagttgctgatcgtggcgaagtcaatgaaaggattctattttgcaaagctgtattatgaagctaaaga

SEQ ID NO: 750069 - DNA, 100 bp, Homo sapiens
gcgggccgcgcctggtgatcggctccttaccagctcacctctcaccgcgcatgtttggagaaacagactgaatttgatctgattaatgtgaaggactggc

SEQ ID NO: 750070 - DNA, 75 bp, Homo sapiens
tgatgtgttccctgatgcctgcaaagagtttcaagatgcaggtgaacaggtccacacgttccgaggcccacactg

SEQ ID NO: 750071 - DNA, 100 bp, Homo sapiens
atcgagctgtccgacaaccctggcgtccatgagcctggtgaccaagaatatggcccaggtgaccaaagccctggacaaggccctgagcaccatggacctg

SEQ ID NO: 750072 - DNA, 75 bp, Homo sapiens
ggccaggagaacaggaacagaactgagcaggggcaggtctccaaggtcaaaatgcagatcttcgtgaaaaccctt

SEQ ID NO: 750073 - DNA, 75 bp, Homo sapiens
acgccactacagttcatcaacatcaactacgtccctctgaaggctggagtgcaatggtgtgatctcagctcactg

SEQ ID NO: 750074 - DNA, 100 bp, Homo sapiens
caaaagaaaagaatctcaaagtgaaaggaccagttcgaatgcctaccaaggatgccgaggaatgtgacagggctgggagtgtggccacctgccaggccgt

SEQ ID NO: 750075 - DNA, 89 bp, Homo sapiens
gggaaacccggagaccaaatccttgaactttacagactagcatggcaaagcttctctccgatcttagtgtggacagtgctcgctgcaag

SEQ ID NO: 750076 - DNA, 100 bp, Homo sapiens
gcccaaagagacagctcactggttggcagtggcaatgacccctggtcagcctggagtgcctccaaatctgggaactgggaaagctcagaaggctgggggg

SEQ ID NO: 750077 - DNA, 75 bp, Homo sapiens
ccctgaaaaagtatcgtcgagaagcctatcatcgttttctggatatgccgcagaaggatccgtgccagaagcaag

SEQ ID NO: 750078 - DNA, 88 bp, Homo sapiens
agccgttttgccccaaaacgagagagactgctgagaaggaagaatttgaacatcaacagaaagagctggagaaagtttgcaaccccat

SEQ ID NO: 750079 - DNA, 75 bp, Homo sapiens
gcgccgagctgcacgtcctcgaacgcgaggccaacagccccgatacatccagaaagtgcccagaagaaacttcct

SEQ ID NO: 750080 - DNA, 100 bp, Homo sapiens
ttggaactcctttataagtgtcagctgtgagaaaactcttccagtcttccccaaaggaaacgaagtccaaattaaagttttgaatataggaaacaatacc

SEQ ID NO: 750081 - DNA, 120 bp, Homo sapiens
tgattgaggtcggcagctcccgagaagcaggagaagcagagtttttgcagatctaagcctttcccacgttatggttataaaccctccccaccgaatggatgtggctctccactgtttggt

SEQ ID NO: 750082 - DNA, 75 bp, Homo sapiens
cgcggatgtcggcgaagagttcaaccagaatagcctaacatggcagaccagagacagcgctcactgtctacctct

SEQ ID NO: 750083 - DNA, 95 bp, Homo sapiens
caacagccccgcgctcaacatgcacctagtcaagagccaccgcctgcagaaagatttgatcaccaggagatttttcgggacattaccaaaccact

SEQ ID NO: 750084 - DNA, 75 bp, Homo sapiens
cagggagggcggcttatcaaacacgagtcgttccaggggtagaggaggcatgaaggatgaccgtcgggacagata

SEQ ID NO: 750085 - DNA, 140 bp, Homo sapiens
tgatgattgatgccatcaaagtttctgctgctcacagggcccgatacttctggggcaacctacccgggatgaacagatggcagtgaacgtatactcaacgtcagtgaccagtgataacctaagtcgacatgacatgctgg

SEQ ID NO: 750086 - DNA, 100 bp, Homo sapiens
agagactgcagcccggactcaagtgggtgccagaaactcccgtgccagcttttacaaagttgatcacagtaaatggacaagaatatcatcttcaacttgt

SEQ ID NO: 750087 - DNA, 75 bp, Homo sapiens
atgcagtatcggcatgatggagcttgcccaacaactagttacaagatgttcacctaagattgagacctagtgact

SEQ ID NO: 750088 - DNA, 98 bp, Homo sapiens
aacaagcagcagtgaggacaccaaagctttgactctcccggatcttgcagagcagtttgcccctcctgacattgccccgcctcttcttatcaagctcg

SEQ ID NO: 750089 - DNA, 74 bp, Homo sapiens
gcatgagtccggcgcgtgtcgggttttgagctgccgcggtcccgggactgaggcaccccccgagcccagctcca

SEQ ID NO: 750090 - DNA, 75 bp, Homo sapiens
agccagtgggctggggactcacggccgggacactcagggcaggtgtggcctttggcctcaggccggctggggcag

SEQ ID NO: 750091 - DNA, 98 bp, Homo sapiens
agacattgctgcccgcctcaacatcccagtcagccaggtgaaccccaggtctaccaggtccagaaggtcctccaggtctccctggaaatggaggtatt

SEQ ID NO: 750092 - DNA, 98 bp, Homo sapiens
cgcccaccttgtggccctgggctttaccatctttgtggctgtgcttgccaggcctggctccatgtcccagaagcttttgttgacaattccagtttccg

SEQ ID NO: 750093 - DNA, 100 bp, Homo sapiens
gctggtgagaagggtccctctggagaggctggtactgctgcgtccctttcccttgcacctgttaacatctttaaggcaggagctgatgaagagagagcag

SEQ ID NO: 750094 - DNA, 88 bp, Homo sapiens
acaaaaccttgctagtgtgggagctgagctctggacccacggccgacgctttgcatgtgattttcttccacccccacctccacctcta

SEQ ID NO: 750095 - DNA, 101 bp, Homo sapiens
ggaacaatcttttgttggattgaaacagctaatccatgccaatgaagatgtggaaagaatgttactaggaaacaagtgtgatatggacgacaaaagagttg

SEQ ID NO: 750096 - DNA, 108 bp, Homo sapiens
cagggaggatgtcgggacaccccggaagctgggaaatgagccaaatctcctcagccacctgttgaagaagaagatgaacacttcgatgacacagtggtttgtcttgat

SEQ ID NO: 750097 - DNA, 90 bp, Homo sapiens
catgaagcagtattacctgctggaggaccagacaggctggcctgctgtctgccttgggctccctgatattgatgatttggctgatggcaa

SEQ ID NO: 750098 - DNA, 82 bp, Homo sapiens
gcgtgagaatagagaccaccgaggtacatgtcccagagcaagcacacggaggcccgggagctcatgtactcgggagccctgc

SEQ ID NO: 750099 - DNA, 100 bp, Homo sapiens
taaaatgcgaattccacattctcatgcatttattgatctgactgaagattttacagcaggagaccaagacacattccaccccagtggggggtcccatacc

SEQ ID NO: 750100 - DNA, 91 bp, Homo sapiens
tcgctgacggcgactgcgggaggccaggcaccaccaggaccagctgatcattccagcccacagcaatggagccacatgactcctcccacat

SEQ ID NO: 750101 - DNA, 82 bp, Homo sapiens
ctgagcctcctgcaacacctgcggcctcactgggacccccaggaggtgaccctgcaggtgactagttgtgcttgggtgcctg

SEQ ID NO: 750102 - DNA, 90 bp, Homo sapiens
gtaccagtgtgtgttgatcttggcttgattcagtctgccttgtaacaggctgtggaaaatctctgttctcacaaagtctccccaatgctc

SEQ ID NO: 750103 - DNA, 100 bp, Homo sapiens
gttggaccttccggagcttctcagaagacagagggttttcttttgagaaataaatcccccctcccctgccaggtgaaaggaaatattgcactttctgttc

SEQ ID NO: 750104 - DNA, 98 bp, Homo sapiens
aaaatgaacagctaaagcaggaaaataaaactcttttgaaagttgtgggtcagctgaccaggtactaggttttgacaagcttgcatcatgcgtgagta

SEQ ID NO: 750105 - DNA, 50 bp, Homo sapiens
cgtggcctgaccaaggacctccaagctccatccttggagcagcttccagg

SEQ ID NO: 750106 - DNA, 100 bp, Homo sapiens
cggtttgggaccttgaacaaggcaaatatggttttggtaaaataccatgaagattttgaaaaaacaaaggggagaggctttactcccgtcgtggacgatc

SEQ ID NO: 750107 - DNA, 101 bp, Homo sapiens
tgggacttcccgtccgcggcgtggaggctgttgacagatctatgactgccagtctgagtgacgctcgggatgctctagtgaatgcagtcattgactccctt

SEQ ID NO: 750108 - DNA, 74 bp, Homo sapiens
ttcagagcgagtatggagcagaaacgattgcagggtttcaccaggtttatgatgataaagactacaggagaatt

SEQ ID NO: 750109 - DNA, 108 bp, Homo sapiens
gtcgaggacggtcggactcccgcggcgggaggagcctgttcccctgaggctgtctgtccccagaccccagagcacgtccggcaccaccatgactgggctgttgaagag

SEQ ID NO: 750110 - DNA, 88 bp, Homo sapiens
tcaaatgcagtcggcttgtcctggctcttgccctcatcctggttctggaatcctcagttcaaggcaaacgaatgcacgtgcagttgtc

SEQ ID NO: 750111 - DNA, 83 bp, Homo sapiens
aggagccgcgggcggcgcggcccagctcgttccaggctcttgtcaggatggtgaagctgttcatcggaaacctgccccgggag

SEQ ID NO: 750112 - DNA, 100 bp, Homo sapiens
cacgggactcaccatccttcaagtgaacaattgatgcctgaaatgtgcagatgccccgtgtcagaagagctgtccaactaatcttgatattaaatcattc

SEQ ID NO: 750113 - DNA, 74 bp, Homo sapiens
ggctcagttgtccatgaccctgaaggtccaggagtacccgaccctcaaggctccaggaccatcaatgtcctttc

SEQ ID NO: 750114 - DNA, 50 bp, Homo sapiens
gtggtgtctggaggcctgtgtccagacggagtttcactcttgttgcccag

SEQ ID NO: 750115 - DNA, 82 bp, Homo sapiens
cctgagcccgcccttgatcttcgctgtggcatggcggacgaggggaagtcgtacagcgcttaatgaattccagtgaagcagc

SEQ ID NO: 750116 - DNA, 100 bp, Homo sapiens
acttcacagtctccgggccgcctgacctccgcacgggtatatgggatggaagcgggaccctcgggagcagctgctgtgtccccaacacctggaagaactg

SEQ ID NO: 750117 - DNA, 83 bp, Homo sapiens
cttagccctctacttttcaagacaccaagtgagaggccaaccaggatttttagactctgaggagcagttggagctaatccaca

SEQ ID NO: 750118 - DNA, 88 bp, Homo sapiens
gcagcagtacagatgagggaaaagaaaagaccaaattgctattagagagattgaaagctctagaggaccatggccaacctggagcgca

SEQ ID NO: 750119 - DNA, 75 bp, Homo sapiens
aacttcatgcagctggtggaactagatgtgtctcgaaatgctgaggagtacctgtcatttgcctttgagcattgt

SEQ ID NO: 750120 - DNA, 60 bp, Homo sapiens
gcgacatactacctctggccccgagatcagaatgccgccctccatcctctacagctcagc

SEQ ID NO: 750121 - DNA, 100 bp, Homo sapiens
cttcggcggagtctgcgcgatgggcgacccggaaaggccggaagcggccgggctggatcaggatgagcatacggcggcatcaagaaaggagagcaatttt

SEQ ID NO: 750122 - DNA, 96 bp, Homo sapiens
gtgctcatccgcagccgcaaagtggggctcatgaaccgcgccgtgcaactgctcatcctggcctacgtcatcggcaacctgggctggctgagttat

SEQ ID NO: 750123 - DNA, 82 bp, Homo sapiens
cttatcatagtctcctatgtgcatatgtgtacaggtgaacaaaggcagagtaaactgtcaccccagatgcaggtacatcaag

SEQ ID NO: 750124 - DNA, 100 bp, Homo sapiens
tggaagcgggcgaggacgtgggtcagctacgagttccagggagctctgtcctggtgaccgtgcccgggttatgacgactaatcccaaaccgaataaggca

SEQ ID NO: 750125 - DNA, 74 bp, Homo sapiens
tcctgattaagggtgcaactaaaacagtttgcatgaaggttatctaccttgcctgctcctatgccacagtgtac

SEQ ID NO: 750126 - DNA, 82 bp, Homo sapiens
ttgcgacggaaatgtgtcatcgaaagccagaccaccgctgaaacttcacttctacacagaggctttctttcccagaaaccca

SEQ ID NO: 750127 - DNA, 51 bp, Homo sapiens
ctgtgtgcattagtacaaatgacagatgcaccatcaggaatggaattacag

SEQ ID NO: 750128 - DNA, 75 bp, Homo sapiens
ctacctggtgcaggtgaagcccatggcaggatctgtgccagttcagaagcaggcgagcctcttccctgatgaaaa

SEQ ID NO: 750129 - DNA, 100 bp, Homo sapiens
tggtggagttggcaggtgtgcgcaggccagataaacacttactgccagaacatcaaggagttcactgcccaaaacttaggcaagctcttcatggcccagg

SEQ ID NO: 750130 - DNA, 110 bp, Homo sapiens
gacaacaggggatcctgtcaccgagggcttaaatttgaaggcgcctttaaatataaaatggtggtaagttttcttcatacagttcttttgtgtgacaaactggatttcag

SEQ ID NO: 750131 - DNA, 82 bp, Homo sapiens
acagcagcgactggcccaagttctttgaaaaggtgatattatacccaacttctaatagctccaaatcagctgaattacaccg

SEQ ID NO: 750132 - DNA, 100 bp, Homo sapiens
aggtcagactataacccagccggggaagcctggcttgcctggtaacccaggcagagatggtgatgtaggtcttccaggatggtgccatgacaatggtgtg

SEQ ID NO: 750133 - DNA, 82 bp, Homo sapiens
cgcggcgggaagcggcggcggcggctccagcgtcctaagaggttctggaggacacgtgccggcggcaggacttcaacccctg

SEQ ID NO: 750134 - DNA, 83 bp, Homo sapiens
tgcctggagcctcaccgcttcaatgacacagagcccacttcgatgtgttgttcttgtcgcacttagggacatcaatcaaggag

SEQ ID NO: 750135 - DNA, 50 bp, Homo sapiens
atgattccccactgtgtgacaagatggggcattctcttctcccaccctcg

SEQ ID NO: 750136 - DNA, 98 bp, Homo sapiens
ggcttttacagtattatacctggtctgaaaagaagatggaattgtcaaagcttgtcgacttatggctttgcaggaagatagaaaaaacaagaaatgga

SEQ ID NO: 750137 - DNA, 100 bp, Homo sapiens
aatagggaaagtgaggcagctgcaaggagggcggcgggactgcactcgagtgtccagacctgctcgatgaaaaaatgtgagcgctattggcctttgtatg

SEQ ID NO: 750138 - DNA, 96 bp, Homo sapiens
tggtcggcggcgcccggatgggcagctgaggtatattcaagagcaaatgaccaagagccatgtgggtggtggttggctaaagttcggatgatgaaa

SEQ ID NO: 750139 - DNA, 100 bp, Homo sapiens
gtcgaggggacgattggaatgacaggccaacaagctggcggagaagcggaaagcccacgatgaggcggtgaggtctgagaagaaggccaagaaggcaagg

SEQ ID NO: 750140 - DNA, 87 bp, Homo sapiens
gaaatttatcagtggatttgtgataacttcccatattatagagaggctggcagtggttggaaggtctctaattaacagaagatggca

SEQ ID NO: 750141 - DNA, 88 bp, Homo sapiens
ccttggggatcaaaaactagttgagaggcttcatatgggaagtgttcgccagttactacatgaaaagataagagatgcttatactcac

SEQ ID NO: 750142 - DNA, 97 bp, Homo sapiens
tgaccacaatggggaggacaacttcgcccgggacttcatggtggatgacaatattccacttagggtaatgctgcttctcatggatgaagtattcgac

SEQ ID NO: 750143 - DNA, 100 bp, Homo sapiens
aatgacgacagcacatccttagatctagagtgggaagatgaagaaggcttgtctggagcgggaaagactactgtgagcatggccttggaggagtacctgg

SEQ ID NO: 750144 - DNA, 82 bp, Homo sapiens
cgggatccactgtccggcagagatcaggcacaacctctcagaagtgcttcttgccaccatgaacatcttgttcacacagttt

SEQ ID NO: 750145 - DNA, 99 bp, Homo sapiens
ctacagcaggaacttcagggcattcacagtttccggttggtgaaagatgctccttgggatgaggtcccgcttgctcactccctggttggttttgccact

SEQ ID NO: 750146 - DNA, 100 bp, Homo sapiens
gcaggacccgcgtgtcgcccctcagcagtgtgaagagaaacggattcgggaattctaccagtcccgaggtttggaccgggtcacccagcccactggggaa

SEQ ID NO: 750147 - DNA, 82 bp, Homo sapiens
gacaacaccgggacacccgcgaggccggaaaatgtgtactaatggtcacttgatgtgcgctggctgttttatccacctacta

SEQ ID NO: 750148 - DNA, 89 bp, Homo sapiens
aagcaactatacttctttgctatttccacctatgtgcagaggagaatgccatataacagctaagacagagatcagagccatgcagctgc

SEQ ID NO: 750149 - DNA, 100 bp, Homo sapiens
cacctttcggcttctgagacggcggcagcagcggcattcagattttgggaaccagtaggacattgacatacatccgagaacattctgtggtggatccagt

SEQ ID NO: 750150 - DNA, 90 bp, Homo sapiens
gttggtctcttcccatggcgatgtccatctgccaccgtggcactggtattgctttgagtgcagattggctctaccagtgcacctggacag

SEQ ID NO: 750151 - DNA, 90 bp, Homo sapiens
gagcagagaatgatccctttgttagaccaaatttaccacaactggccatcgatgcacccctcggagctaatagcggagatgagaaacagt

SEQ ID NO: 750152 - DNA, 75 bp, Homo sapiens
actatgtcactgaagagatcaagaatcctgagagtcgtagtcgagatcgggatcggtatagacggagaaatagtc

SEQ ID NO: 750153 - DNA, 75 bp, Homo sapiens
gttgcagcgcagcatttcctccctgctgaggtttgccgccggtgaagatggggctggagcacagtggcgtgatct

SEQ ID NO: 750154 - DNA, 98 bp, Homo sapiens
ccgaaggctgaaggaaaaagagcaacagatccagggagcattcacctgccctgtctccaaacagctttatcttcaagccaggatgaagggagactggg

SEQ ID NO: 750155 - DNA, 90 bp, Homo sapiens
gcgggtcctacgaggagggctgtcagagcctcatggagtacggttttttgcatgtctgacacccatgactccacctggaccttatggctc

SEQ ID NO: 750156 - DNA, 75 bp, Homo sapiens
gtaaccccttccgggagcctagatcctgtgctttactctgaagactcgtgtttcagggtaactctaactttcggg

SEQ ID NO: 750157 - DNA, 82 bp, Homo sapiens
tcaggaagagggatgtacatgtggtcgaattccacagacagagccctgcaaaaatactggatgttgacaatgcgtctctggc

SEQ ID NO: 750158 - DNA, 51 bp, Homo sapiens
aaggattccaagtaactcttatttggcaagatcgtggacgccgtgattcag

SEQ ID NO: 750159 - DNA, 100 bp, Homo sapiens
ccgtgacctggggatcgctacggaccttaaaatacccgcaacagccccttcgtcccaaattttaccaaatgttgcaagaactctggagttcttatggtag

SEQ ID NO: 750160 - DNA, 100 bp, Homo sapiens
caattcacgctttgccaaagtacacatcctgtatgtggggtccatgcctcttaagaactcttttcgaggaactatccggaactctaatgaatcattgatt

SEQ ID NO: 750161 - DNA, 101 bp, Homo sapiens
gctggtgttctatactggaagaggcatgccagaggtagagcagacatatctgaagagatggattaagaatgctttggattaaggattgtggagcacatttc

SEQ ID NO: 750162 - DNA, 98 bp, Homo sapiens
gcgacaaaaggattcctgggttcaaatttgacaattcgttgatcaaccagatagaggagagtgggcgctccctttctcttcctggaagatcagtccca

SEQ ID NO: 750163 - DNA, 75 bp, Homo sapiens
gtgtcttggggccctttgggacgagtgctgtgactgtgttgggcagctgcaatgactctccgcacggtattattg

SEQ ID NO: 750164 - DNA, 74 bp, Homo sapiens
acatttaattttagggtcctttatatagaagggagagtagggtttggatccagctcgagtcaacgtccctgtca

SEQ ID NO: 750165 - DNA, 75 bp, Homo sapiens
agccattggagggcgcggggactgcaaccctaatcagctatgtttccagtgtcctctgggtgtttccaagagcaa

SEQ ID NO: 750166 - DNA, 76 bp, Homo sapiens
caggttgtggaacgacacaacaagccggaagtggaagtcaggaatcttgcctccacaccacgagtcccatgccaag

SEQ ID NO: 750167 - DNA, 100 bp, Homo sapiens
caggaactgtagcaggtgtaagacgggcttcacacagctggggacctcctgcatcaccaaccacacgtgcagcaacggctggagggcagtggcatgatct

SEQ ID NO: 750168 - DNA, 90 bp, Homo sapiens
ggcgatcttcctgtttgtggataagacagtcccacagtccagataaacgaattaagctttacatgagaaggctactttgtcttccaagcc

SEQ ID NO: 750169 - DNA, 100 bp, Homo sapiens
aaaaacggccaagaggcagacctaggaaatgggttctgccattactgcaatagccacatctgtgtgtcacggcccaccctgtcgccagcttcatcatgcc

SEQ ID NO: 750170 - DNA, 106 bp, Homo sapiens
ttgggtcgcagttcttgtttgtggatcgctgtgatcgtcacttgggcgtgatggtgggcatgggtcagaaggattcctatgtgggcgacgaggcccagagcaagag

SEQ ID NO: 750171 - DNA, 75 bp, Homo sapiens
acttacaccatgtggaaagatgtcaatattaacattatagatactcctgaatcgatgatgcaaccaacttggtcc

SEQ ID NO: 750172 - DNA, 88 bp, Homo sapiens
aaacagagccgtatcataattaccgagagctgtatagccagacgtatgatgagattggagtcatgtttgcctccctgcccaactttgc

SEQ ID NO: 750173 - DNA, 100 bp, Homo sapiens
agagcgactttcattagaaggagagcgacagcccaagtcaccaggtgaaatagcccaatttttggtatgtgctcatagtttagcatatgatgaaaagcca

SEQ ID NO: 750174 - DNA, 96 bp, Homo sapiens
atccttcagtggggctattggactgacttttcttatgctgggatgtgccttagaggattatggatggatgagatcaaagggaaagaccgtgtgatt

SEQ ID NO: 750175 - DNA, 82 bp, Homo sapiens
acccgcggtccccgctcttgctgacctgcctagagctggaacgttacctccagagcgagccctgctatgtttcagcctcaga

SEQ ID NO: 750176 - DNA, 74 bp, Homo sapiens
cccactgctcctgtgacagcagggataacacactgcaagtggacatcaacgcaacctcaaacagacaccatggt

SEQ ID NO: 750177 - DNA, 100 bp, Homo sapiens
tcttacctaactgggaaacaatatgtccagctcgccgctgtccaagaaacgtcgcgtgtccgggcctgatccaaagccgggttctaactgctcccctgcc

SEQ ID NO: 750178 - DNA, 96 bp, Homo sapiens
ggaacctccacctcgactccagcggccccgacagcacggaagcagctggataaagaacagggtgtgaaggagctgtgtctgctgctgcttaaccag

SEQ ID NO: 750179 - DNA, 100 bp, Homo sapiens
cggggacaagaaactagagcaaataaccgttttgaaattataattctaaggcactgatagcatttctggcatttctgattattgtgacatcaatagccct

SEQ ID NO: 750180 - DNA, 86 bp, Homo sapiens
actggaaagtatgcaccagctgtcatcgtttgtcagaagaaagcagctggctcagaaaacaggcattgaatgccccagaggagccc

SEQ ID NO: 750181 - DNA, 87 bp, Homo sapiens
aagccgtgcccgttcttcctggagggaaagtgccgctttaaggagaactgcaggctgtgggtgagcgtggaggatgctcagatgcac

SEQ ID NO: 750182 - DNA, 100 bp, Homo sapiens
acaaattagagcgagcaaccaatatagaagttctgtcaaatacatttcagttcactaatgaagcccgagaaatgattgaagacccggaagaaccagaccc

SEQ ID NO: 750183 - DNA, 100 bp, Homo sapiens
tttgcagaaacttcataaatatatgcaggctgaagggtatgtgattggcagctgtattaaacacattccaatcgcaggacgagatataacatattttatt

SEQ ID NO: 750184 - DNA, 90 bp, Homo sapiens
tgtattcagagattttttagtctaaatgatgggcagtcatggtcccagaaacgtcactatcaagaaggtgaatgtaatccacacggccaa

SEQ ID NO: 750185 - DNA, 50 bp, Homo sapiens
tcaaactagcatggatgaactcctggagagaaaggccttgggaaaacaac

SEQ ID NO: 750186 - DNA, 78 bp, Homo sapiens
agcgcgcccgtggccgctgccgcctccgccccagaaatacatgctacaggatttaactatcagaatgaagatgaaaaa

SEQ ID NO: 750187 - DNA, 100 bp, Homo sapiens
accgggagctggctctggaggctgcggaggcgacgccggagagaacgaagcctcggctgggagcggcctatggcatgtctgcgttacctttaaatctgat

SEQ ID NO: 750188 - DNA, 77 bp, Homo sapiens
ccaggatctcgggctcggaacgagactgcacgatgtgttcagagcaacattgttttgttgacacaagcatttagaag

SEQ ID NO: 750189 - DNA, 100 bp, Homo sapiens
tcatctcgctcggctgcgggaaatcgggctgaagcgactgagtccgcgatggagggtgttgaaagcagcaggggcctagaagacattaaaccgataccac

SEQ ID NO: 750190 - DNA, 95 bp, Homo sapiens
ccacatccctggttgttttgcttcagcctcagataaaccgagaaaactggtgtacaatagagccatgccctgatgcagcatctcttctggcttcc

SEQ ID NO: 750191 - DNA, 75 bp, Homo sapiens
gcaaaaatgacccaccaatggaagcagctggcttcactgctcaggtggtaaataaagatgtcctggacgtttaca

SEQ ID NO: 750192 - DNA, 95 bp, Homo sapiens
gcctgccatactacattcgcttaaattttgcagagaaagggaaactgaacagccaagactcctataacaattttaccaacaacaaccctggcaac

SEQ ID NO: 750193 - DNA, 98 bp, Homo sapiens
cgacggggccaggaagcaattctggaagcgcagcaacagcaagctcccgggcaggtatctgcccaaactggaacttatgctgtagacatttctttgtg

SEQ ID NO: 750194 - DNA, 80 bp, Homo sapiens
atgctccttctcctggagacgcaactcaagtgccctgtgggacatcgagaccggccagcagacgaccacgtttaccggac

SEQ ID NO: 750195 - DNA, 100 bp, Homo sapiens
gcttcccagagctttcacgaaggcaccgacgtcatcatgctgaccaccaatcagatccgtaaggccccttcccagctgcctgcctgccctagccagctcc

SEQ ID NO: 750196 - DNA, 82 bp, Homo sapiens
ttcggggggccaccgaatcgctgtcacgccggcagggtggcccagttgaaatccttcccttcctctaccttggaagtgccta

SEQ ID NO: 750197 - DNA, 75 bp, Homo sapiens
tactggggccagggaaccctggtcaccgtctcctcagacgcccagcggcagcaggatgagtgcggaggcaagcgc

SEQ ID NO: 750198 - DNA, 82 bp, Homo sapiens
agccttgaaaaagctgccctgagacggtgtcccgccgaaaggtggacaagagcaaggaccaagtgtggaaggtcttaatgta

SEQ ID NO: 750199 - DNA, 101 bp, Homo sapiens
tctaggttctgcggcacgggatggcggaggcgcctcctgtctcaggatttggagttccatggagtgatgagattttattttcaagataaagctgctggaaa

SEQ ID NO: 750200 - DNA, 73 bp, Homo sapiens
aagcctccgctcctccttcctgcaccctggggctcctgaaactcacatgaagcctgccctggactgctcacag

SEQ ID NO: 750201 - DNA, 100 bp, Homo sapiens
agtatccccgttcgccaccaattatgggagggctggccaacttctgctacagacgactcaacaggggttgatttgactaaagacaacatggcacttcaga

SEQ ID NO: 750202 - DNA, 114 bp, Homo sapiens
acctccaggagggattacagttgacaacagggtacagacagaccctcagaaacccagaggagatgtgttcaagtatctgactgtcttctctcagatgattgcatttcatgatcc

SEQ ID NO: 750203 - DNA, 106 bp, Homo sapiens
ctctgctgtgggcgctgctggcgctctggctgtgctgcgcgacccccgcgcatgggcgccctgcgtccggcagaggaggcgagcatcccgctcaggtgatgaggaa

SEQ ID NO: 750204 - DNA, 100 bp, Homo sapiens
actatatagggaagaaggcttggcctacatctggatgccaacaccagatatgagcaccgaagagttcacagttaccagccaagaaaacttgaaaatgagc

SEQ ID NO: 750205 - DNA, 89 bp, Homo sapiens
agaaaaaaattccttcaaaagaatggacgatgaggataaacaggaacactatagctctctgaaaggtcttaccctcagctggatcgggg

SEQ ID NO: 750206 - DNA, 96 bp, Homo sapiens
ttacaggcacgtgccaccacgccagcttgccatttttgaaaaagaaagtgtcggatgaaataacttatgctgaagatactgctaattcaattgcac

SEQ ID NO: 750207 - DNA, 100 bp, Homo sapiens
ttggaaagtcaggaccgcgacggcagcagagcagcaaatcctgatcctaactgttgtcttggagtatttgggctgagcttgtacaccacagaaagagatc

SEQ ID NO: 750208 - DNA, 75 bp, Homo sapiens
gccacgagacctgtaacgcctccaagggattgaaaaggctgtggtgtctcagcgcctgacagaatctccgtgtgc

SEQ ID NO: 750209 - DNA, 75 bp, Homo sapiens
tatgatatgctaagaaagaatcttgtcactttagccactgctactacaggaacctggaggagaagcggctcactt

SEQ ID NO: 750210 - DNA, 100 bp, Homo sapiens
gatctcccacaaacaaattttcgtcgtttaccttttgaccactgcagcttttcctccgcaaccatgtctgacaaacccgatatggctgagatcgagaaat

SEQ ID NO: 750211 - DNA, 73 bp, Homo sapiens
cgagctggacccggaccggttttgggacagagcgggatgccaccagcttgtccaaagggaagttccaggagct

SEQ ID NO: 750212 - DNA, 74 bp, Homo sapiens
ggagcctctggaatcacccgggtcgctgttcctgaggtgaatcaaaaactctggttttaagcaacctctcctac

SEQ ID NO: 750213 - DNA, 82 bp, Homo sapiens
ccgcgctgcggcctggcggcttccaggcgcactaccgcgggactttgaacatgtcggggatcgccctcagcagactcgccca

SEQ ID NO: 750214 - DNA, 90 bp, Homo sapiens
tatcctcggtgctgtggtgcagagctagttcctctccagctcagccgcgtaggaacttagtgatttggcccgtgaccctccagcacaatg

SEQ ID NO: 750215 - DNA, 100 bp, Homo sapiens
cgtgaagcaagtgcagatagatggccttctctccactgtggtttgaatccacggggtattgatcaccctgcccatgctgaaggtattaaactgcaaattg

SEQ ID NO: 750216 - DNA, 100 bp, Homo sapiens
tctacagttactacaagtgcaagctggcgctggagcagcagcagcacgaagttatacggaagcgtctcctcattgatggagatggtgctggagatgatcg

SEQ ID NO: 750217 - DNA, 90 bp, Homo sapiens
attccatccaaaaccggcagctgttagccgagcaagaaggaaaggaggtgagctggcctcagctgtccacgcctacacaaaaacaggaga

SEQ ID NO: 750218 - DNA, 100 bp, Homo sapiens
ccatggactcagtattatcaagtttcatgagacccttgaacagcggctgcttgtaactgaactgatgcggctcttaggtcctagccaggagagggagata

SEQ ID NO: 750219 - DNA, 89 bp, Homo sapiens
cagagggacacaggttcccacgctggcgcccggcgaccgggtggggctgcggaccacggaggggtgatcgtgaacatcactgccaccct

SEQ ID NO: 750220 - DNA, 83 bp, Homo sapiens
tcctgcgaggcctcccgggctccgggaaaactacactggccagggagtgcatccgccccaacccttttccccctcgtctcctg

SEQ ID NO: 750221 - DNA, 89 bp, Homo sapiens
ggacctggtgaagctctgtcaaccatgagttttgatcatcctgagaaaaatgggccttggcctgcagacccaataaaccttccctccca

SEQ ID NO: 750222 - DNA, 78 bp, Homo sapiens
cagtggtcgcttcttctccttgcatatattttgtgaagagtgcatgaccttatggtttaacagagagaaaacatgtcc

SEQ ID NO: 750223 - DNA, 98 bp, Homo sapiens
tggctggagaaggaagcaaaggaccttctggtgaaggattttttatcaagcagaaatgcatcgaacaacgagaatcaagatcactgagctaaatcccc

SEQ ID NO: 750224 - DNA, 100 bp, Homo sapiens
ttccttgcagaggccatggaggacgaggagagacagaagaagctggaggccggcaaagccaagatattatcagacgcgacacagcctcttgaaagtcaga

SEQ ID NO: 750225 - DNA, 75 bp, Homo sapiens
ttccacttaggcaagattgaggagcttctcagtggaggtctacgacgttcctccatcggtgagcaaggatgtgcc

SEQ ID NO: 750226 - DNA, 50 bp, Homo sapiens
tcgcagccgccccgaaggagccaggtaatgtttgaaacttaccagttttc

SEQ ID NO: 750227 - DNA, 100 bp, Homo sapiens
ttatctgcgccccctgctggttgtgcgaaccccgggcagcccgggaaatctccaagtcagaaaggagatgcgctctgtgctgcggaaggcgggctccccg

SEQ ID NO: 750228 - DNA, 100 bp, Homo sapiens
atctttgaaagccatcatgaaagggggaaccctgagctggagcagcaggccaggctcggagacctttccccccgcagaggcatttcatccttcatgaagc

SEQ ID NO: 750229 - DNA, 82 bp, Homo sapiens
tgaaaccggatgctgagtaccctgaatggtgctgactgggttacttttttaaacactaggaatggtaatttctactcttctg

SEQ ID NO: 750230 - DNA, 75 bp, Homo sapiens
ttgttctatggtactcggaccatggagccatacagaatggacagcaaattatggatgaacctatgggagaggagg

SEQ ID NO: 750231 - DNA, 90 bp, Homo sapiens
ccgagtcggagggggcgaagattgacgccagtaagaacgaggaggatgaagggagattacctggggcaattgatgttatcggtcagacta

SEQ ID NO: 750232 - DNA, 75 bp, Homo sapiens
cagacacgacaccatgcatctcctcggcccctggctcctgctcctggtgattacagcaacataaaggcagcatat

SEQ ID NO: 750233 - DNA, 100 bp, Homo sapiens
gatgacttgggttcaggaccagttggatgatgagacgttatttccatcaaaaattggcaaaattgaagaagtagttcttgaagctagaactattgagaga

SEQ ID NO: 750234 - DNA, 83 bp, Homo sapiens
cacagagcctcgcctttgccgatccgccgcccgtccacacccgccgccagacccaacatgagtgaagtttcctgcaagaaacg

SEQ ID NO: 750235 - DNA, 75 bp, Homo sapiens
aggatgagcagtttgagcagtgcgtccagaatttcaacaagcagctgcaaattgtggctactaatttgccccctg

SEQ ID NO: 750236 - DNA, 75 bp, Homo sapiens
tcaggcctgcacggacggtgttggttgggccatcctgagaggcctgaagaagaaaggcattcaccacccaacacc

SEQ ID NO: 750237 - DNA, 100 bp, Homo sapiens
gaagtggaggtgtcactggccccggcctttgccccaatcttgtgtgggcactgaagggggactacaggttcgagaacttaattcagtgcacaaatgagat

SEQ ID NO: 750238 - DNA, 83 bp, Homo sapiens
cttggactgagtcctgcaggacacaggcttgatccagatggaagctgtgaaagtgaaaacattaaagtctttgacggaacctc

SEQ ID NO: 750239 - DNA, 97 bp, Homo sapiens
acagatgtggccgtcctgcggtaccagccaccccctgagtatggggtaacgagatgtgaaaggaccacccacccaccgtctgtcttgtggtcagtca

SEQ ID NO: 750240 - DNA, 100 bp, Homo sapiens
cgtgaccgagagcgcgaatatcgtcatcgttagaaggccagctgcgggccgtccagcggctgtgccacttctacagcgccgtcatgcccagcgaggccca

SEQ ID NO: 750241 - DNA, 116 bp, Homo sapiens
ccgcgcgcagggcctgcagcgggagctggacggcgagcgcgagcggcgcgagaaagtaactaggatttctacctcaaccgcgagacctatgcaaggacggtgtggaccaactcgcg

SEQ ID NO: 750242 - DNA, 107 bp, Homo sapiens
cgtggttgcattgtggatgcaaatctgagcgttctcaacttggttattgtaaaaaaagattttgatgaacagacagccgatgactgggatgtggacatgagtgtgta

SEQ ID NO: 750243 - DNA, 50 bp, Homo sapiens
cggggctgaccgcgtcgtcaaagcctgccacagtgactcaggtcactcaa

SEQ ID NO: 750244 - DNA, 75 bp, Homo sapiens
agtaaagatcaaaagaattcgaagggagttggtaaacgctgcaaagaacagtctgaacttgatcaagatttggat

SEQ ID NO: 750245 - DNA, 100 bp, Homo sapiens
ggaacaaactcaaccaactccactacagctgttcccagcttggttgcacttgagaaaattaatgtggcaggttacactcctggcacaccttacaaagtgt

SEQ ID NO: 750246 - DNA, 83 bp, Homo sapiens
aaggctgctattgaaagagagtatgcacagatcacagattctgctggccatattctctactccaaagaggatgcaaccaaggg

SEQ ID NO: 750247 - DNA, 89 bp, Homo sapiens
cgccatcacccgcaacccggtgttcccgcgctttatcaagattatcgagggagcatttcctgaagacgtagtcatgcagcacgtcagca

SEQ ID NO: 750248 - DNA, 82 bp, Homo sapiens
gacagattcgcagtggtcgcttcttctccttggtagatttcgggcagacaacttgaacaagctgaagaacctatgcagcaag

SEQ ID NO: 750249 - DNA, 87 bp, Homo sapiens
gcccagaagaattgggttttcttcgctacttgaaacaatccaagaatctcacaaactatgatctctgcagcatttttcttggaacct

SEQ ID NO: 750250 - DNA, 100 bp, Homo sapiens
atatctttcttcactcctcttcacttcttcagtaattccagtggagaagctagtgaaaggacgtttccaggacaacctggattttattcaatggtttaag

SEQ ID NO: 750251 - DNA, 74 bp, Homo sapiens
gagcacattgccaaccggagttccccaagtgtgaccgcaacaagggaaaacatggcttatactgtggaatgcct

SEQ ID NO: 750252 - DNA, 75 bp, Homo sapiens
atgctcagggaccctgtggagaggctcttgtcaggatggtgaagctgttcatcggaaacctgccccgggaggcta

SEQ ID NO: 750253 - DNA, 100 bp, Homo sapiens
tgatcttgttggtcgtattgctgacagggtgaagctctatgagggaccccagcttgtggcggattctggggtgatcattgacacatccatgcgagggggg

SEQ ID NO: 750254 - DNA, 100 bp, Homo sapiens
ccaacagatgagggaagccatttttctgcaatggaattaaatggccaaatgtgtcagaagaattggatacaaaactccctcttgatggtggattagacaa

SEQ ID NO: 750255 - DNA, 75 bp, Homo sapiens
tataatgaagttcctactttccaactggaggttacttgcatagactatcagactttgtttgatccaaagtcgaat

SEQ ID NO: 750256 - DNA, 100 bp, Homo sapiens
agtcacagtggtccaagacctcgcagcctggtgtttcccatgatgaattgcttgacttagcaaagtttcatttcggtgactctttatgcacacacaaagg

SEQ ID NO: 750257 - DNA, 100 bp, Homo sapiens
accaccctggtatcccggctaagcccaccctttatcaccaaggtgttagaaataaatcttgcagcagctccaccagcagctggttgaagctgaacgtagg

SEQ ID NO: 750258 - DNA, 100 bp, Homo sapiens
ttcgaatcccatcctcgtcggctgcatagcaagccttttgttccaggaatcacaaatgatatgctggtcagattctccgaagaaggatcctctaggctgg

SEQ ID NO: 750259 - DNA, 50 bp, Homo sapiens
tcccggaaccgcgattcggcgtgtcagaactacagttcctgaggaagaac

SEQ ID NO: 750260 - DNA, 101 bp, Homo sapiens
ggcgccgagaggccgtgcgggacgcgggcgccaggaccggccgaacgcagaggtgctgttgggaacacagaggaagtgactggctgggggttcagggaaag

SEQ ID NO: 750261 - DNA, 83 bp, Homo sapiens
ctggactgcagtgactatgttctagttgttgacctcctgtactggagagacattaagaagactggagtggtgtttggtgccag

SEQ ID NO: 750262 - DNA, 99 bp, Homo sapiens
gaaagaactatgtgaatgggaagactttccttgagaaaagtgatcaccagcagcttgcaaaacttatccaggagtcgccaaccgttgaactgaaagaca

SEQ ID NO: 750263 - DNA, 100 bp, Homo sapiens
gacctgcatgtgtgtgcgcgcgaaggagcggaagaatggcagtgctcaaactcaccgaccagaatagcctaacatggcagaccagagacagcgctcactg

SEQ ID NO: 750264 - DNA, 100 bp, Homo sapiens
gaccaacttttcgttcagtgggacttgcttcacggtcagaatggcggcagtggagcatcgtcattcttcaggattgccctactggccctacctcacagct

SEQ ID NO: 750265 - DNA, 98 bp, Homo sapiens
gcttttgtaacttttgatgatcatgatacagttgataaaattgttgagcctccattatggcatgctgaatttaccaaagaagaattggttcagaagct

SEQ ID NO: 750266 - DNA, 75 bp, Homo sapiens
aacaatgagcaactgcccatgctgggccggcgccctggggccccggagagactcagacgatgccctgctgaagat

SEQ ID NO: 750267 - DNA, 98 bp, Homo sapiens
ctacatcctgggcgtcttcccaggctgtcatataactcctgagaatagtggttcttaactcttttacgtttaataagaaggagacctgtaagcttgtt

SEQ ID NO: 750268 - DNA, 76 bp, Homo sapiens
aaggacaaaagatcctggctaactgttcttctccctaccaggtactccaaagattcaggtttactcacgtcatcca

SEQ ID NO: 750269 - DNA, 74 bp, Homo sapiens
acgcggaggcagagaagggaacgcccggcccagccccgtaaatgagctggatggtatcccgttgatcctggaca

SEQ ID NO: 750270 - DNA, 83 bp, Homo sapiens
cagctccatccaggccaccactgcggcgggctctggatcaatgagctgagcaatgttcctgttcctgtcatgctaatgccaga

SEQ ID NO: 750271 - DNA, 82 bp, Homo sapiens
cccagacaagatggacaccgcggaggaaggtgcgcgcggagccatggttatcatgtcggagttcagcgcggaccccgcgggc

SEQ ID NO: 750272 - DNA, 76 bp, Homo sapiens
gctggtattggaacagtctttggcagccttatcattggttatgccagcttagcagtgtctgcaaaaacgaatcttt

SEQ ID NO: 750273 - DNA, 83 bp, Homo sapiens
gctggcaagtctgaaggtcaacgacagggtctcactgtattgcccaggttggtctcgaactcctggcttcaagcgattctccc

SEQ ID NO: 750274 - DNA, 100 bp, Homo sapiens
cacgtccatacttaactactgaatgtgaagatgtcctcttagtgcttggcagattagtactaaagaacatgtgctgggtccttctctggggttcgcaaac

SEQ ID NO: 750275 - DNA, 100 bp, Homo sapiens
attgataggcagcatattcctgatacatatctatgtgaacgttgtcagcctagacggtctggaaaatcccgaagcagaagcccgtattcatctaggcatt

SEQ ID NO: 750276 - DNA, 100 bp, Homo sapiens
cccctctgctgcaccacttcatggacccatgcggactgcccgcagctcctggatacagaggacatggtgcggcttcgagagcctgactggaagtgcgtgt

SEQ ID NO: 750277 - DNA, 100 bp, Homo sapiens
gaagaaccttgcagaagctgttaggggctactaccactgctacagcccaaagatggaggagcatggggaagtgattgactgtgtgcaggagctgagccac

SEQ ID NO: 750278 - DNA, 78 bp, Homo sapiens
agagctccagctgttcaaaaataaggaaaccagtgttgccattgaggctaccggctctctgaccagttccacgacatc

SEQ ID NO: 750279 - DNA, 100 bp, Homo sapiens
ggaaccagcgcttctccaccaggatcacgtttgagtgtgctcagatatcgaattatatccagatcgagagacagaagattctgaaagggttcaatgaaat

SEQ ID NO: 750280 - DNA, 100 bp, Homo sapiens
gctagaactcagttgtgcgttgcggccagtcgccactgctgaggcactggctacaattaggcttctcgacgtcctgtgcgaaatgactgtgaatactgag

SEQ ID NO: 750281 - DNA, 100 bp, Homo sapiens
cttggagaaccaccgcatcaagagcttcaagaacaagggccgcgatgtggaaaattcagcggggtgccaagtcgttttctgtgtgggttgagagacaggc

SEQ ID NO: 750282 - DNA, 87 bp, Homo sapiens
gcacgagcagatcctggtcctcgatccgcccacagacctcaaattcaaagagcatacctgaagagagatacaagatgaagagcaagc

SEQ ID NO: 750283 - DNA, 100 bp, Homo sapiens
aaatctggctacttcctgtgccttagttctctgggcagcctagagaagagccgaatgcacataaggtcgccagcccaccctccggacccgcataccccga

SEQ ID NO: 750284 - DNA, 51 bp, Homo sapiens
gtggaagtcattaggaacaatggtgcaagaacccttaggagaaatcttgag

SEQ ID NO: 750285 - DNA, 50 bp, Homo sapiens
aacgcagcatttatatacagtccattgagacacctatggctgccgatgaa

SEQ ID NO: 750286 - DNA, 90 bp, Homo sapiens
tcattgagtctcccgagggtacggaggagctcaagtggacagctttcactttcctcaagcacctatttgccctggctgtggatgatgacc

SEQ ID NO: 750287 - DNA, 100 bp, Homo sapiens
aatcccccactctttccgccctaatggaggtctccagtttcggaatgaatctgaagtctgctgcagtaaaacacagaaggctttaaaatgttttcttgca

SEQ ID NO: 750288 - DNA, 82 bp, Homo sapiens
gcagcagacaagcaactatttgctgggtctcctggcacaccaggtccacggtcctgaacgaggctgtgggggccctgatgta

SEQ ID NO: 750289 - DNA, 80 bp, Homo sapiens
cttggaaaaacgtgtgggtacgaccttggttcctacaaacttgatgacttttgagtagaagcctgagaaaaaaagagagg

SEQ ID NO: 750290 - DNA, 75 bp, Homo sapiens
tcttcagaaagaaaaaagaagaagtccccgagttcaccaaaattcagacattaggtcctgggcctatgtcaagaa

SEQ ID NO: 750291 - DNA, 83 bp, Homo sapiens
caagagggtgttcgactgctagagccgagcgaagcgaactgtggctgcaccatctgtcttcatcttcccgccatctgatgagc

SEQ ID NO: 750292 - DNA, 80 bp, Homo sapiens
gagcctcagttggaagcagccgatccagcctgcggagcctgtggggcaggtgaactggcacaaaggttaatctcaagatg

SEQ ID NO: 750293 - DNA, 100 bp, Homo sapiens
cacaaggcagctcgctctgggagcctagaatgcatcagtgcccttgtggcgaatggggctcacgtcgagacactgcccatctctaagataagaacctgga

SEQ ID NO: 750294 - DNA, 100 bp, Homo sapiens
ctggttgcaggtggtgctgggaggatggagacagaacactgaagattctgctctcagggtgttgattgacgtctggaaggcagagactcgtggattagca

SEQ ID NO: 750295 - DNA, 100 bp, Homo sapiens
cgccaaccccttcgagcaagacgtggatttgtagccaaaccgtgcgccatagccctcaacattcaggccaatggaccacaaattgctccgcccaatgcca

SEQ ID NO: 750296 - DNA, 100 bp, Homo sapiens
tgaagctcttagacaaatctatctctctggacttcattcctggaaaaagaagttcatcagattcaagatgatgaggagtctgatgaggaagctgtgaaga

SEQ ID NO: 750297 - DNA, 83 bp, Homo sapiens
gcgcgcagggcctgcagcgggagctggacggcgagcgcgagcggcgcgagaaagtcagaagttgagtagcaggggcctaggag

SEQ ID NO: 750298 - DNA, 147 bp, Homo sapiens
ggggggaaaggaggagctggagacagattgtaggaccgagcgcgggcaggcgggaggcaacggagctaccagccggtgctggagaatctggtaaaagcaccattgtgaagcagatgaggatcctgcatgttaatgggtttaatggag

SEQ ID NO: 750299 - DNA, 90 bp, Homo sapiens
aggaccagtccctcggggggaacgtggtcatcagtggtcagtggggatttagctttggagtcaaacccttctgaccatccaagggcaagc

SEQ ID NO: 750300 - DNA, 103 bp, Homo sapiens
tatgatcggctccttttccgtcggactcttcgtcaaccgctttggcaggcacaactacaagagcggaatgaccctcagcaactgctattagatgccaagcaca

SEQ ID NO: 750301 - DNA, 50 bp, Homo sapiens
gccacagcatcctccagcacctcagcctttcatccgctgtagtttacaat

SEQ ID NO: 750302 - DNA, 83 bp, Homo sapiens
cgccgaggcaccgaggcactcagaggagtcattgcacgtgcagaagagcgacgtggacctgatgagaacgaagctccggcgcc

SEQ ID NO: 750303 - DNA, 98 bp, Homo sapiens
gtgactccgttatctgcaggtattgggagatgcacagctaagatgccaggaccacctggaagcctagaaatgacgcatcttctctccagactgccgat

SEQ ID NO: 750304 - DNA, 119 bp, Homo sapiens
tttggattaaggaacagcgagctgtttgacccctttgacctcttcgatgtgcgagactttggaaagatatgttgatgatgtgatcagccgcattgacaggatgtttcctgaaatgtcca

SEQ ID NO: 750305 - DNA, 100 bp, Homo sapiens
acctgggaagtggaaccggatatttaagtacaatggtgggcttaattttaggaaaagatcttggtctggcatttgaaataccaccacatatgaaaaacca

SEQ ID NO: 750306 - DNA, 98 bp, Homo sapiens
taaaattgacagagaggggaaaccccgtaaagtggttggttgcagttgtgtagtagttaaggaagaccatgtactcagctgcagcttctaaatccaga

SEQ ID NO: 750307 - DNA, 75 bp, Homo sapiens
tcatgtcagctgttctgcaggatcccatgagaagcatgcttttcacttccactgcatctctcgctggctcaaaac

SEQ ID NO: 750308 - DNA, 75 bp, Homo sapiens
ggaccccgatcatctctgagagtcctaagacatggacttgaggttatcaatactctggctgaccatcatcatcgt

SEQ ID NO: 750309 - DNA, 83 bp, Homo sapiens
cagaaggaacttgcagaaatcacattggaccctcctcccaactgtaggaggtgtgattgcctatatcagttcttccagctcag

SEQ ID NO: 750310 - DNA, 76 bp, Homo sapiens
aacaggcaccaggctgaaggttttagcaagtcatactccctgtcacaaactccagctgaactaacttggaggagga

SEQ ID NO: 750311 - DNA, 100 bp, Homo sapiens
ggggacagttcatccgaccctgctaacccagactcacataagaggaaaggatcgccatgtgacacactggcatcaagctgccactgcagagccccgccat

SEQ ID NO: 750312 - DNA, 100 bp, Homo sapiens
gctttctctcgatgaggataacatccctccagaagatgaccaagatcactccatggatgaaatgacagctgtggtgaaaattgaaaaaggagttggtggc

SEQ ID NO: 750313 - DNA, 101 bp, Homo sapiens
ggctcctttaagacggtctacaaaggtctggacactgaaaccaccgtggaagtcgcctggtgtgaactgcagataacaacgaacttgatgcaagtgatagg

SEQ ID NO: 750314 - DNA, 75 bp, Homo sapiens
aagcaaatctcctgcctcagcctcttgagtagcctgagtagctgggactaaagctctctatcaatatcagctcac

SEQ ID NO: 750315 - DNA, 100 bp, Homo sapiens
gccagcaagaggatcgtcctgccggagcccagatggtgatggaatttcctgataatgtgttaaatctcgatggacatcagaataatggtgcacagctaaa

SEQ ID NO: 750316 - DNA, 100 bp, Homo sapiens
ttggcggctcgcacgtcatgcaggtcatctacacggacgacgccggcaggccccagactgcctacctgcagtgcaagatcgagaacggctactttgtaca

SEQ ID NO: 750317 - DNA, 90 bp, Homo sapiens
cggaacccgcagcaggactacgaactcgtccagagggtcggcagcggcacctacggggacgtctataagctccctagatctttagcttct

SEQ ID NO: 750318 - DNA, 100 bp, Homo sapiens
aatttggcctttaccatcgcccatgagctgggccacaatgcatgactcctgatcagctgatgacattatgcaaagcaggcattcatagtagtaatgtcgg

SEQ ID NO: 750319 - DNA, 100 bp, Homo sapiens
aaaggagccagaaaagccggcaaaaccacttacagctgaaaagttgacggactggacaaagcttctatagcaaactcagatggccccacagcaggttccc

SEQ ID NO: 750320 - DNA, 100 bp, Homo sapiens
tttaagaaacatcagcagctgaaaatccatcagtgccagcataccaatgaacctctattcaagtgatgggctttggcctctacctaatggatggaaatgt

SEQ ID NO: 750321 - DNA, 100 bp, Homo sapiens
gtgatggcatcaatataagacaaacttgtaatctgattttcagcctgtgtcgatacaataatcgacttgcagaacatgtgtttggagaagagggattgac

SEQ ID NO: 750322 - DNA, 75 bp, Homo sapiens
cccaagggggtggagcccccagcggaggaggagctctcaaaagtttgcagatggcgtgtacctggttctgctcat

SEQ ID NO: 750323 - DNA, 132 bp, Homo sapiens
cggccgcaggccgcctccagcgccgcgggatgtagcgcgggggaccgcggcccccagcagagcccgcctgcccggctgtttttcgttggaatatacgttgcacatttatggcgattctgagtgtgagggcag

SEQ ID NO: 750324 - DNA, 80 bp, Homo sapiens
tgttcttttggggtagtgtctgggatccagtacgagttgaatcattgttcaaataaggccctggccaacgtcaacattgg

SEQ ID NO: 750325 - DNA, 97 bp, Homo sapiens
ccagatctcagaggagcctggctaagcaaaaccctgcagaacggctgcctaatttacagcaaccatgaggttcctgacggagacttcgcccttcatg

SEQ ID NO: 750326 - DNA, 82 bp, Homo sapiens
cttctgtctcgactgcactttgagaagtttggtgccctggttgtcagatgttggaaagcagtaggacggaacatactcttcg

SEQ ID NO: 750327 - DNA, 101 bp, Homo sapiens
gtgtcccggcaccccgcacccgggcacacaaaaaacgggtcgcccgcgattctcagggattgatcgcctcttcaggataaaagaatcagagtgtctcaacc

SEQ ID NO: 750328 - DNA, 88 bp, Homo sapiens
gcagacgcagtggtggccctggagcagtatgccagcaagctgccactgcagagccccgccatggaagacacgccgttggtgatatcga

SEQ ID NO: 750329 - DNA, 100 bp, Homo sapiens
agctgctcaaggagcagaagtacgaccggcagctgaggtgaagatggttctggtaaaacaaccctcatgactaaactacaaggagctgagcatggcaaaa

SEQ ID NO: 750330 - DNA, 50 bp, Homo sapiens
ctttgatccagaacttgcagcaacaatagagctaatgtcaaaccccgaaa

SEQ ID NO: 750331 - DNA, 98 bp, Homo sapiens
tccttccggagccatgtcagaaggagtggacttgattgatatatatgctgacgaggagttcaaccaggtgctgccatgcttactgagtcccttctctc

SEQ ID NO: 750332 - DNA, 100 bp, Homo sapiens
ctcgaggccggacattgtgcccccagaggctacaggctctggatgaagcctgctgggagcgtgaatgacatggccctggatgccttcgacttggaccgga

SEQ ID NO: 750333 - DNA, 100 bp, Homo sapiens
gagctgaggagaacgactgggttcgcctgcccagcaaatgcgaagggaggtgttcctgtgggcttagcatctaaaccttttcagattctttatggacaca

SEQ ID NO: 750334 - DNA, 100 bp, Homo sapiens
gcaaaatggcggaccgcttctcccgcttcaacgaagaccgagactttcaggtaacagttaacctcttccacatgcagcatctgcaggctgcttcccttgc

SEQ ID NO: 750335 - DNA, 100 bp, Homo sapiens
gagtgtttagagaagaggaagatatcctggctggcactctttcagttgacagagagtgcactcctgtaggaggcctgctgatggcatttcagaagtactc

SEQ ID NO: 750336 - DNA, 90 bp, Homo sapiens
tttgggggcaagagacaagttttgagagatcccggttttctagcaggtcatcttccaaacagggtcctggcggcagagaccacgtcccag

SEQ ID NO: 750337 - DNA, 82 bp, Homo sapiens
atctgggtgtatatcaaacggcaagatgtccagtaatgtcccggcggatatggaatgtcgttgtctgctgggtcttcccctc

SEQ ID NO: 750338 - DNA, 75 bp, Homo sapiens
ccaggcctatgccaatcagcatttcacattcctcatggttggttcaaaggactccctggaggaaaagcggaagcg

SEQ ID NO: 750339 - DNA, 82 bp, Homo sapiens
tcagaaacaagtgaggaccctgaagttgaggtgactattgaaggactatcctattaagtgtaatctcactgcttaatgagcc

SEQ ID NO: 750340 - DNA, 75 bp, Homo sapiens
aatggcactcagcagcaagcacagagtatgaccaccactattaatgggcgacagatgcgaaagaaacgagttcca

SEQ ID NO: 750341 - DNA, 75 bp, Homo sapiens
ctgggggtcctctctgagtcaaatccagtggaagggcctgtcccagtcggctttaccctatcgacgcagcgtccc

SEQ ID NO: 750342 - DNA, 98 bp, Homo sapiens
agatgaagctccccaaggagctgcagctacaccatttccaaatagcttcaagtgctttacttgtgaaaacgcaggggataattataactgcaatcgat

SEQ ID NO: 750343 - DNA, 80 bp, Homo sapiens
tattgcaccacgcccggggggacgctcttctccaccacaccgggaggaatactcccccagttgcaagaggcgcaggaccg

SEQ ID NO: 750344 - DNA, 50 bp, Homo sapiens
gatgagatattctgctgagtggaagggttcaccagtaaagccagtagcca

SEQ ID NO: 750345 - DNA, 100 bp, Homo sapiens
ggatgacgcaccagtcgtgcatgttcttggtgaagtcggccagcctgagcaagcggaggacctacgccggcctgggtataattgaaatcctcaaaggaat

SEQ ID NO: 750346 - DNA, 96 bp, Homo sapiens
tttatctatgggccattggatcctgtaaatccctatccagagtttttggagctgtacagaatgcaggctcaacagtaccagcagcagcgtcgaaaa

SEQ ID NO: 750347 - DNA, 75 bp, Homo sapiens
gctgcagtagataccattgttcatgggcaaagcctggccttacaccacttccagcagctctggggctacctcctg

SEQ ID NO: 750348 - DNA, 100 bp, Homo sapiens
atcacagccagagaaggggccagtcggaaagtaccagctggaggatgagtctgcgcatttggatgaaatgccactaatgatgtctgaagaaggctttgag

SEQ ID NO: 750349 - DNA, 82 bp, Homo sapiens
gggccgtggcgctcggctgcgcgctgctcctcgccctcaagttcacctgcagattgtcactgctgttccaagggcacacgca

SEQ ID NO: 750350 - DNA, 75 bp, Homo sapiens
gcacttcttttttgagaaaggaaggaatatatcctgactgattgtacaccaggggttggaaaaaccacactaggc

SEQ ID NO: 750351 - DNA, 82 bp, Homo sapiens
tgtttcgaacacagccacagaaataaaagatgaacaaaaatctgggacaggtagaccctgactttgaggaagaatgcctgga

SEQ ID NO: 750352 - DNA, 112 bp, Homo sapiens
atgttctcgatgccaatctctgcttgaaaggagaagacttggattctcagcaacacagtcactcctggcggcaaaccaaacaaaaccagagtcatctggggaaaagtaactc

SEQ ID NO: 750353 - DNA, 74 bp, Homo sapiens
actccgtcccccgcgggtctgctctgtgtgccatggacggggacctcaggatggaaaccagcagcctgcaccgc

SEQ ID NO: 750354 - DNA, 117 bp, Homo sapiens
tcatcacgaggccacccagtcccacttcaaacattcgtctcggaaaccccgcctcttacagtcacgaggaaaagaattccatggcaacatcattaaagtgtcctttgccactagaag

SEQ ID NO: 750355 - DNA, 75 bp, Homo sapiens
cagccgcggcggcagcagcagtgagagcatcaagatggtgctcatgtggaccagtggtgacgccttcaagacggc

SEQ ID NO: 750356 - DNA, 100 bp, Homo sapiens
agcatccgcagtgtcatgcagaagtacctggaggaccggggcgaggtgacctttgagaagatcttttcccagaagctggaaggccagggatgtaccgcct

SEQ ID NO: 750357 - DNA, 80 bp, Homo sapiens
ccgagccagccgagacctgccgtgggaccccagagattcccagatttccatttaaacagggttaatttggaagaatcttc

SEQ ID NO: 750358 - DNA, 82 bp, Homo sapiens
accgctgaggcttatttgggaaagaagttactgaatcaaatggatggatttgatactctgcatagagttaaaatgatcatgg

SEQ ID NO: 750359 - DNA, 75 bp, Homo sapiens
cctgagcccatggcagctccagcctctgcctcccagaaactcagctctggattaatcgaattacagctgctagcc

SEQ ID NO: 750360 - DNA, 50 bp, Homo sapiens
gctcttctacattcattgccatcaaaacctgatgtagcttcaagtgatgc

SEQ ID NO: 750361 - DNA, 100 bp, Homo sapiens
caagaccattgaagagctccgggacaagatcctgttcatcttcatcgacagcgaccacaccgacaaccagcgcatcctcgagttctttggcctgaagaag

SEQ ID NO: 750362 - DNA, 100 bp, Homo sapiens
catcgagacggagggccagagagtcacggcggcgtaggttcctttctcctgtactctgtgcatgagggaatcaggggaattcccctggatcccaatgaca

SEQ ID NO: 750363 - DNA, 96 bp, Homo sapiens
cttgaatgtctacaaaagattgattgacgtcccaggtttggtgcctggaatgctgacctagatctggaaactagcccagatgaaagcaagaatgat

SEQ ID NO: 750364 - DNA, 74 bp, Homo sapiens
tccgagcgcaaggacagcgcgaggtccgcgcagcccagcgcagccatgttcatgatcaagagggcccaaggacg

SEQ ID NO: 750365 - DNA, 100 bp, Homo sapiens
ctctcggcgtgctccggcacttggcagctggacaggcagagtgctgatgtgaaaaataccacgacaaaaccaccctagcagaagaaatccttagacaaga

SEQ ID NO: 750366 - DNA, 100 bp, Homo sapiens
aggaaaagatccctggaatatgaagggacacagtacggtagtcaaacccccaggaaagaaccggaggctgaagcaggccaaagaagaagctcaggctgaa

SEQ ID NO: 750367 - DNA, 100 bp, Homo sapiens
ccgctttgacgtgatggtgaacggcaagaatatgtgaaccagccagatgttcggccccagcccccttcgccccgagagggccctctgcctgctgcccgac

SEQ ID NO: 750368 - DNA, 95 bp, Homo sapiens
ggggagatggaggcgaagacaagagagctcattggctgaactcacgggaatcaaatggcgtaggtacaattttggagggcatggggactgtggac

SEQ ID NO: 750369 - DNA, 90 bp, Homo sapiens
tgcaagtggtgcgggaggagaccctcgagctgggcctggagcctgaaaattatgacgcgaggctctcacggatcgacatcgccaacacac

SEQ ID NO: 750370 - DNA, 90 bp, Homo sapiens
aagttttggtggcacgcagcctggggactctgcctcgtgccgctgagcctggcgcagatcggcaagccgattttttcagttgatattcac

SEQ ID NO: 750371 - DNA, 82 bp, Homo sapiens
tttcctgaggccaccccagacctgcagaattccctggcctagtgtgtccaacctggccaaggacttcattgaccgcctgctg

SEQ ID NO: 750372 - DNA, 75 bp, Homo sapiens
cctgcctcagcctcctgggtagctgggactacagatgatgaagaacgagagcttcaaatggatcctgcagactat

SEQ ID NO: 750373 - DNA, 80 bp, Homo sapiens
gggagcggaaggtgcctgtgacgaggattggccggctggccaacttcggagaacatccagtcatggataaaaatgagctg

SEQ ID NO: 750374 - DNA, 75 bp, Homo sapiens
acgtgagggaagcctttggccagaagatcggccacttccaggatgaatttacaggaattgaacccttgagcgagg

SEQ ID NO: 750375 - DNA, 74 bp, Homo sapiens
gctgcctcatctgcagtccggactcatctagcctcggcttagaccatgctcagcctccaagcagccttgtcatc

SEQ ID NO: 750376 - DNA, 83 bp, Homo sapiens
accggggtcacttagactaccccaggaacccgcgccgcgagggctccttccctcagggtacagctcgcagaaagaagaaggtg

SEQ ID NO: 750377 - DNA, 75 bp, Homo sapiens
catggacagacatgtcttcccatggagctttacaagccacgctttttgtgcgacatccagaaacagggaagttgc

SEQ ID NO: 750378 - DNA, 75 bp, Homo sapiens
ggaactgatagcttatggttctccattgtgatgaaagcacatggtacagtactatactggcaattgctggagaag

SEQ ID NO: 750379 - DNA, 87 bp, Homo sapiens
acagcgcgaggtccgcgcagcccagcgcagccatggtgctttcttctgcgacctggtactcatctacctcatcaaaaagagagagtt

SEQ ID NO: 750380 - DNA, 100 bp, Homo sapiens
gcagagtacctgctctcgagatggcaggagtcgggagctgcggcaactgatggagaaggtccagaacatccacggagctttcaatgctctcgggggagca

SEQ ID NO: 750381 - DNA, 96 bp, Homo sapiens
gaatgatagagatggattgacagatatgactcttttacattatacctgcaaatctggagctcatggtattggtggattttcggaaaagacatatga

SEQ ID NO: 750382 - DNA, 113 bp, Homo sapiens
ctactcgaccaggggcgacggcgtactttgggcttcatcatggaggactacctgcagggttgtcgagctgctctgcaggtctgcaatcgaagagggtaaagggatttataata

SEQ ID NO: 750383 - DNA, 78 bp, Homo sapiens
tgatgtttctcagtgccattgtgatgatgaagaaccgcagatccagtgaccccaaaggagccatgataacccatcaaa

SEQ ID NO: 750384 - DNA, 75 bp, Homo sapiens
taagcagcagaggagcacgaggatcgtgggagctaagaacaatgttgagaatgacagaagaccatgtgcttcccg

SEQ ID NO: 750385 - DNA, 83 bp, Homo sapiens
ggcggccttcgaggaggtcatgaaggacctgagcctgacgcgggccgcgcggaaaatgtggtgacctggaagaagaactcaag

SEQ ID NO: 750386 - DNA, 50 bp, Homo sapiens
tcttatgggacttgaggccctcaagatttatccacctatcaatgtgctgc

SEQ ID NO: 750387 - DNA, 110 bp, Homo sapiens
ctgaagagcgacaagccgctggcagccgcggatctcaccgccgctcaggtttggtgccctggttgtcagatgttggaaagcagtaggacggaacatactcttcgtggttg

SEQ ID NO: 750388 - DNA, 96 bp, Homo sapiens
atgagaacagctctgcgcggctttttgagcggtcccgcatcaaggctctggcagccttgccttacacccagacaaaactctcgttgcaactggcca

SEQ ID NO: 750389 - DNA, 100 bp, Homo sapiens
cgaccacaccaaggggctggaatgcaacttcggcgccagctccaccgctctgaaggggatctgcagagggacagagatcagggaaataaaggcagaaggc

SEQ ID NO: 750390 - DNA, 75 bp, Homo sapiens
ctcaatttaagcctgatctaacccctagaaacaggaattacatgaacgacagccttcgcaccgacgtcttcgtgc

SEQ ID NO: 750391 - DNA, 100 bp, Homo sapiens
agaggccccgagccccgtggatccgctggagcggagccggccgtacgcggtgctgcgagggcagaacctgggggttcaactagatatagcttcacaatct

SEQ ID NO: 750392 - DNA, 97 bp, Homo sapiens
ctggactcccggctttgggctggcaggagtcgttcacgcctactgaggagcatgtgttggtggtgcgcctgctgctgaagcacctgcacgcctttgc

SEQ ID NO: 750393 - DNA, 96 bp, Homo sapiens
gcgcagtccgcgcagccctcatcgcaactgggcccgcgcgcagatccaaaaagttggcagctcttgcagaagccttaaaggaagtctcccttacaa

SEQ ID NO: 750394 - DNA, 100 bp, Homo sapiens
cgtagcctgccactccgtgcctcacggacacagacctaattaaacagtgtatagatgaatgcacagccaggattgaaattggactgcattacaagattcc

SEQ ID NO: 750395 - DNA, 98 bp, Homo sapiens
gaaattttgagccatttcgaatcacttaaaggagtggacattgctagcaatgagctcccaaagccatccaggaattgtcttagaagaaagaaggcaag

SEQ ID NO: 750396 - DNA, 98 bp, Homo sapiens
tacaattaccaaacagaatggacaagcttaataaaataaccgtccccgccagtcagaagttgagcttcttccagaccagctggtcttgcttctggagc

SEQ ID NO: 750397 - DNA, 100 bp, Homo sapiens
gccgacaacagcctggcgtccgccacggtgcactacatcctccaggaggtggtgatgggtgggatggtgttggaaacaaacatgaatgaaatcgtggctc

SEQ ID NO: 750398 - DNA, 100 bp, Homo sapiens
caagggaaaccgagataggccatggagcaattctaggggcttatagctccaataatggaatgtcagaacagtccggccgaagacttccaggagccgtgcc

SEQ ID NO: 750399 - DNA, 50 bp, Homo sapiens
gctcaatgcctcagaaattcattgattcatgttacatgtaaagctgtcct

SEQ ID NO: 750400 - DNA, 101 bp, Homo sapiens
gagttgggaggacccgggacaccgcacagccgggaaatgcttggatcctagcatgactatacattgtgacatggtcattacatatggattagaccaactgg

SEQ ID NO: 750401 - DNA, 99 bp, Homo sapiens
cttctccatatggcagcagcctggacctcagcactggcagcaaaccagtccagctacgggggcccagccagccagcagctgagtgggggttacggaggc

SEQ ID NO: 750402 - DNA, 97 bp, Homo sapiens
cacttttctgatctcctccttcccttctgtgagctatgtctcaggtgatggttgctgaagccttggatatttccagagaaacctacctggcaattct

SEQ ID NO: 750403 - DNA, 100 bp, Homo sapiens
ctcccagtgggaaatatagcagcaatttgggcaactttaattatgggcatcattaacttgggcaccagtgagaacaaactctgctttgacctgctgtcct

SEQ ID NO: 750404 - DNA, 51 bp, Homo sapiens
ctgcagatgacttcagaaccaagtttgagacggaacaggctctgcgcatga

SEQ ID NO: 750405 - DNA, 101 bp, Homo sapiens
atctaacatcgtaaccagagaagaaaggagactcacttatgtgcacaatgagaagagaaggtgttcttagatcagaagatgccattgtattaggtgacggc

SEQ ID NO: 750406 - DNA, 98 bp, Homo sapiens
tctccttatctggacacgtgcaggctggctgtcattatttgtatcaaaaacaaagaatttgaaaaggcttcaaaaattttgaaaaaacatatgtccaa

SEQ ID NO: 750407 - DNA, 122 bp, Homo sapiens
cacatgtcattataccttcacccagcatttcatccctcgtcgaaaggattggattggcatctttagaggcatgagccagaaggagagctctaagtctgccatgatgtatattcaggagttga

SEQ ID NO: 750408 - DNA, 50 bp, Homo sapiens
attcctcgcccacatctgtgccagctaatcacatatggctctgatagaac

SEQ ID NO: 750409 - DNA, 75 bp, Homo sapiens
gcagacgccaaggcccctccggccagggccgggagccgggccggcctagccaggctgtagcaaggtgctgctgag

SEQ ID NO: 750410 - DNA, 101 bp, Homo sapiens
gtggtgcgagtcttcggagcgaccccggcagatgatcacagtcgtgttaaactgcaaaatgctgagaatgattatattaatgccagtttagttgacataga

SEQ ID NO: 750411 - DNA, 100 bp, Homo sapiens
caccctttctgcgggggacgatttcgtcggtgatcttctggtgaccccacttctcgctgctcatgccgctgggactggggcggcggaaaaaggcgccccc

SEQ ID NO: 750412 - DNA, 74 bp, Homo sapiens
cgagaagctgcagcgggacctggaggcggagcatgtggtggagccgccaccaaaatgcagattttcgtgaaaac

SEQ ID NO: 750413 - DNA, 95 bp, Homo sapiens
aataaaaagcaggtgtaatagaatggtgaatcaacctgtggaatttactccccaggaagccaaagccgaatttgccacatacctgaatttctgcc

SEQ ID NO: 750414 - DNA, 83 bp, Homo sapiens
gtccgaagtcggcgacagcggccggggcgcaggcgcccgtgcggaatggcaggttaaagatcgaggtccggaagccactagga

SEQ ID NO: 750415 - DNA, 76 bp, Homo sapiens
gtggacctcatcaagatccggttgcagatgcagacacaaccgtttcgggacggttgctccttgagggcaggacagt

SEQ ID NO: 750416 - DNA, 100 bp, Homo sapiens
ggccatggacctggcggatccggcctgccctggcccagctcaacacctgatttcgaccgagacatgggtgcccggcaccgcgcccgagcccactccattc

SEQ ID NO: 750417 - DNA, 82 bp, Homo sapiens
gttccatcccacctttgagtcaggacacagaatttccaggtgttgtggtgcgaccaattggtgaatttcgtagttccataga

SEQ ID NO: 750418 - DNA, 90 bp, Homo sapiens
cccgaactcgcccggccgggagccgccgcgggcaggacgcgcgctgcagatgccatggacaatattaccaggcagaaccaattctacgat

SEQ ID NO: 750419 - DNA, 96 bp, Homo sapiens
tttgtctagacaagaaatgcaggaagttcagagttctaggagtggaagaggaggtaactatggccaagatcaatcctccatgagtagtggtggtgg

SEQ ID NO: 750420 - DNA, 108 bp, Homo sapiens
gtggcgtcccccatggacgacgggtttgtgagcctggactcgccctcctatgtcctgtacagctttggcagcatgtaagcagctgtttgccaagaacccaggtcactg

SEQ ID NO: 750421 - DNA, 100 bp, Homo sapiens
gggctcccgtgtctgctcgccctccgacgctgctcaggtgtctcactttgtcgcccaggctggagtacagtggtgcgatcttgactgactgcaacctgca

SEQ ID NO: 750422 - DNA, 100 bp, Homo sapiens
gatcagctgaccgaagaacagattgctggagtataatgtctcaggaaggcgattatgggaggtggaccatatctagtagtgatgaaagtgaggaagaaaa

SEQ ID NO: 750423 - DNA, 97 bp, Homo sapiens
cgccgccgcgacagcagcagccatggaggacgagatgcccaagactctgatcttatggttggtgatgaggcaagtgaattacgatcaatgttagaag

SEQ ID NO: 750424 - DNA, 75 bp, Homo sapiens
gaaaagccttcattacaagtactcggcaagttgtcagggtaccaaccaagaagctgaagaaatatgagaaagaat

SEQ ID NO: 750425 - DNA, 100 bp, Homo sapiens
tggaagccccaggaggctgtgcagggaccttgtgctcatcaagaatacagacgtgcaggcagcccgcctgggaaacatcatccacgccatgatcatgtat

SEQ ID NO: 750426 - DNA, 83 bp, Homo sapiens
gtggggcagacggtggaactgggcgagctgcggctgcgggtgcggcgggtcctggccgaaggctgatcagctgaccgaagaac

SEQ ID NO: 750427 - DNA, 98 bp, Homo sapiens
gaacagccatcgagctccaaggacacaacatctccttggtgaacaaggccgctgtcgactacttcttcgtggagctgcacctggaggcgcactatgag

SEQ ID NO: 750428 - DNA, 75 bp, Homo sapiens
tgatactcctactttctaccaaactctggctggagtcacacattattctggaacttttcaaagcctgactctctt

SEQ ID NO: 750429 - DNA, 144 bp, Homo sapiens
cccggggacacctcggcacgcagcggagatgcctctttttgccaccaatcccttcgatcaggatgttgcatgaacaggctgaacactttgccacgaggcttcggctccctgccagctcttgaggttctggacttgacgtacaac

SEQ ID NO: 750430 - DNA, 100 bp, Homo sapiens
agaggtgcacctggagaggaactgaggcctcccaccaaaaccaagcactgacatgccactcatgggtttcagagcagcgatggagaaattaaatacttgc

SEQ ID NO: 750431 - DNA, 100 bp, Homo sapiens
cccggaaccgcgattcggcgtgtcaggagatatacgactaaggggtcagacgggggttcgtgctgaacgccgtggctcctacccattcattgacttccgc

SEQ ID NO: 750432 - DNA, 82 bp, Homo sapiens
tcattccatcttcattcatgactccagacagtgaattgccagtttcctatctggaaccgaagctccaagacactatcaaggc

SEQ ID NO: 750433 - DNA, 100 bp, Homo sapiens
gtttaggaggatgtgagcacatcttctgtaggcacttggactagtaccctgcatgaaagttcatttcaaggcaaacagaacaatattcttggaatgggag

SEQ ID NO: 750434 - DNA, 90 bp, Homo sapiens
caccctcacagtttgctctgctcttccaacaccagtggaagatgatcacatcccaggaggaggtgcgccagtctgtaactcctgccgagc

SEQ ID NO: 750435 - DNA, 98 bp, Homo sapiens
ttgttgcttgtggcccagatgactgctctgagctttggctttggaatgtacaattaattggccttggtcctcacagctccaaaaagaaacaggatctc

SEQ ID NO: 750436 - DNA, 100 bp, Homo sapiens
tcttgctgaagctagaagggcaattactggatggaatgatattccagcaagtaactggcagaagttttggtgataaagattttcggacaggtttagaaaa

SEQ ID NO: 750437 - DNA, 98 bp, Homo sapiens
ggtcacatgctgtctcatggtgatttggtattagaaaactactcggatgctccaatgacaccaaaacagattctgcaggtcatagaggcagaaggact

SEQ ID NO: 750438 - DNA, 75 bp, Homo sapiens
cgagtctccccgagtcggttggcattaagagctcagaattctgcaaatgcagattttgcaaactttgatgcattt

SEQ ID NO: 750439 - DNA, 100 bp, Homo sapiens
aacaagaagaagagaaccctgcggaggagaccggcgaggagaagcagaaatgagccgtcagactgctacagcattacctaccggtacctcgaagtgtcca

SEQ ID NO: 750440 - DNA, 99 bp, Homo sapiens
ttgagctcattcaaagtggcccagtatgtggtacgggaagaagaaatggggctaatggcagcattagccgctgttgggcctcctaatcctcgggcagat

SEQ ID NO: 750441 - DNA, 109 bp, Homo sapiens
gttgctgcgggggattgtgggagtctccgcgtcccgctcgctgggagagagatgtgaagttcatttccaatccgccctccatggtggcagcggggagcgtggtggccgc

SEQ ID NO: 750442 - DNA, 50 bp, Homo sapiens
catcaacgtggagagcttgctgggagatgcagttaaagacttgatgcttc

SEQ ID NO: 750443 - DNA, 75 bp, Homo sapiens
aagcgactgagtccgcgatggagttgagtcagcagatactggagttatttgaaacatgtcagcagcaaataagtg

SEQ ID NO: 750444 - DNA, 101 bp, Homo sapiens
ttttggctctgcgtgagtgtggtctacgagctgtttctcatctttatactcttccaggaaacccctcctggagtttccccaaagccatggacagccctagt

SEQ ID NO: 750445 - DNA, 100 bp, Homo sapiens
gcgtccaaagtcacagatgctatagtctggtatcaaaagaagaagaagaagaggacagtgctccagtgaaagtggaagaacaaaggaagatgagtcagga

SEQ ID NO: 750446 - DNA, 101 bp, Homo sapiens
ggctgcattcctgtggcaccaccaggtggaagatggaggtatgttctcagcctgtggacatctctacagcaatgagtgaacgggcacttgctcagaaaaga

SEQ ID NO: 750447 - DNA, 75 bp, Homo sapiens
cgagaaacacgggagactcccggtaacccccaacttgccgatgccttcaattaagttgcagagttctgatggaga

SEQ ID NO: 750448 - DNA, 100 bp, Homo sapiens
ctgggatctaaccgcatccggacttaattcagtgcacaaatgagatgaatgtgaacatcccacagttggcagacagtttatttgaaagaactactaatag

SEQ ID NO: 750449 - DNA, 100 bp, Homo sapiens
ttaaagctcaattgacctagccttcaggaatgtggcttcggctatggggaggatgcacagtgtgtgacgtgccggctgcacaggttcaaggaggactggg

SEQ ID NO: 750450 - DNA, 96 bp, Homo sapiens
gagtagctggtttggcttgagagaagccaaggacccgactcagaaacccaggcattatcctgcactgaaaactctggaacatctagagcataccta

SEQ ID NO: 750451 - DNA, 74 bp, Homo sapiens
aactctttttaacttgctatcaagagtacaagaagatcatcctattatgtcttttactatttcaaaaaatggcc

SEQ ID NO: 750452 - DNA, 75 bp, Homo sapiens
cggcatgctcacccgcctctacaacatcaagaagggtgttaaataccacattatttgaaagctgggagatcgttg

SEQ ID NO: 750453 - DNA, 100 bp, Homo sapiens
cacatatcagagggcattatgaacgaattctcaacccctacaacttattcctgtccggagacagcctaaggagctttcattgttgaggttcctcagtgct

SEQ ID NO: 750454 - DNA, 101 bp, Homo sapiens
ggatttgaaaatccaatgtttgcttgtctggaaatggattatgagggatttccacaagatcaaattcgattgtggcccatgcaagcaaggagtaatggaac

SEQ ID NO: 750455 - DNA, 74 bp, Homo sapiens
tcagccccaacggcaagcaacttgcctcctgacaaggtgatccgggcgggccccgcaggaattttatcccctca

SEQ ID NO: 750456 - DNA, 100 bp, Homo sapiens
ggtgagttcatgcaaagcgctgagaacaggaccccccgcccccgatttgcagatttacagaatggctgcacattaatggaaagagaagcataaacctatc

SEQ ID NO: 750457 - DNA, 76 bp, Homo sapiens
gggagcagacggaacaagcgtgctgatgaccaagatcactccatggatgaaatgacagctgtggtgaaaattgaaa

SEQ ID NO: 750458 - DNA, 74 bp, Homo sapiens
ctctggataaggaccagtacctgcccaggaaactggtcctagcagaagatgtgactcagactgcctctgggtgg

SEQ ID NO: 750459 - DNA, 100 bp, Homo sapiens
cctgtccagcgctatgtcccactaaaggatcaacgtaacgtgagcatgaggttttccaatcagaaagtgaagtcactgcttttgctgtcttggatcaaga

SEQ ID NO: 750460 - DNA, 82 bp, Homo sapiens
agatgcggagaggtggctccatggacacagacctgctgtgtgtgcttctgcgccccaggtgctggagaatctggtaaaagca

SEQ ID NO: 750461 - DNA, 90 bp, Homo sapiens
gcgaaggccgggacccggttccccggcccacagtgggggtgtgcaaacccgagagaactgggctctgtgtgctccgggatggagcaggtg

SEQ ID NO: 750462 - DNA, 100 bp, Homo sapiens
ttggaagagggagtcaccactggacctccaaggaagccacgtgcagacatctacaaccttcgatctcctgacgagtttttcgttggaatatacgttgcac

SEQ ID NO: 750463 - DNA, 100 bp, Homo sapiens
gtgtactcctttctattttaaagagccaagcctcagagagaggagatgttaaagtaacccatcttgcaggacgacattgaagattggtcttctgttgatc

SEQ ID NO: 750464 - DNA, 80 bp, Homo sapiens
agccgatccagcctgcggagcctgtggggcaggtaccgtctggagcagctggagggaagatggctgaatctccctgctcc

SEQ ID NO: 750465 - DNA, 95 bp, Homo sapiens
gaacccaaacatagacttgcaagatgcagagatttaagttggccctctagttatggagacactcctactgtttctataaaaggaatacttacatt

SEQ ID NO: 750466 - DNA, 90 bp, Homo sapiens
atgatgcttatgagtactgcaactgcattctatagattgacaagaaagcacaccacacaaatgagtgatgaggaagaggatgatgatggc

SEQ ID NO: 750467 - DNA, 90 bp, Homo sapiens
ccttcgtccgtcccccgcggccggcagctcccggggcgtctggcacaggaagtcctggagaacctgaaggaccgctggtaccaggcggac

SEQ ID NO: 750468 - DNA, 100 bp, Homo sapiens
ccccgcagcaagccccagccaaaggcaaggtgaaccctactcagtgtgaagcaatgaccatggttgcagcccaagtcatggggaaccatgttgctgtcac

SEQ ID NO: 750469 - DNA, 80 bp, Homo sapiens
gctgtgtgcggtgctgctgagcttggcctcggcgtcctcgggccaaaggtgtccaaactatacagacccacagaatctaa

SEQ ID NO: 750470 - DNA, 74 bp, Homo sapiens
atgcagttatgggctctgtcgccgtggaagatgattgaagaatcactgaagattaaaataaaaaaggaattaga

SEQ ID NO: 750471 - DNA, 90 bp, Homo sapiens
tcactgcccacactgaggctctcctgcagaaggtctcggcgcggaagatggccggcggcgtggacggccccatcgggatcccgttccccg

SEQ ID NO: 750472 - DNA, 95 bp, Homo sapiens
cagggcttgtgccctctcgcttcctgacgctcctggcgcatctggtggtcgtcatcaccttattctggtcccggattgttttacaaggacatgct

SEQ ID NO: 750473 - DNA, 75 bp, Homo sapiens
ctcttctcccctgattcaagactcctctgctttggactgaagtttatgttccatctgagaagatctccatttctt

SEQ ID NO: 750474 - DNA, 86 bp, Homo sapiens
gaccctgtgtgtctgaaaatatgagtaacgaaagaggctttgaaaatgtagaactgggagtcataggaaaaaagaagaaagtccca

SEQ ID NO: 750475 - DNA, 100 bp, Homo sapiens
caaagtaaatgctgtcttttcccaaaagacaggctcttcacctgaagacattgcctaagatactgagccatatcgccccagcattttgcatgagcagctg

SEQ ID NO: 750476 - DNA, 100 bp, Homo sapiens
aagaggcccaccctggagtaaccctcactggagaatccagaggaaacttttgacgctgggctgcaggccttccagcaggaaggcattgccaacatcactg

SEQ ID NO: 750477 - DNA, 89 bp, Homo sapiens
acccaatggtggaatattgtatacctagtttcagattgccaaaagacaaaacgggtaccacaaggattggtgacctcgcaccccaggac

SEQ ID NO: 750478 - DNA, 75 bp, Homo sapiens
cccagacgggcgggcagggccgggctccgcagactgattcttgctattccaaatcctcttccacgttgacagccc

SEQ ID NO: 750479 - DNA, 50 bp, Homo sapiens
gtgactttttacttgatccatacaagggcatgattaatctgtatggagct

SEQ ID NO: 750480 - DNA, 100 bp, Homo sapiens
ttgagaccctgagactttcagaaacttattcacagttaccaaagctggattgactcagtcagcattgacacccttatcttcactttggagtttactaatt

SEQ ID NO: 750481 - DNA, 90 bp, Homo sapiens
cagaccaatggacaccttctaagagtttggcgagtcagtgactgaagcgcccgtccattccaagggggacagccgcgccgctgctgcttt

SEQ ID NO: 750482 - DNA, 100 bp, Homo sapiens
ccaggaagttcagagagaacaggctcctatggatattccaggtttaaacctgagtcaacaagaatactacccctatgtgtactacaagattgattgcaac

SEQ ID NO: 750483 - DNA, 50 bp, Homo sapiens
gagtctgcactcttcagtctttgcagtcacccacaaaagctgtatataat

SEQ ID NO: 750484 - DNA, 101 bp, Homo sapiens
atcccaggttgccttggaaaatgccaacgccgtgtctgaagatgtagcgctggctgcagttcttgtccctgtgctggtcatggtcctcactactctcattc

SEQ ID NO: 750485 - DNA, 80 bp, Homo sapiens
cctggaaaatatctgttaacagactgcttttacacctacggcactgaaggctttgtggaactacctgagccagaagggag

SEQ ID NO: 750486 - DNA, 88 bp, Homo sapiens
gaatgcacattaaagccatgcccgaggatgctaaggggcagtccaacatgtttaccgtggctgatgtgttgagtcaagatgaactgcg

SEQ ID NO: 750487 - DNA, 83 bp, Homo sapiens
aggaagggttggaggtcgggccacccgaggtgctggacaccctgtcgcagcttctgaagatctaccccaacgagagacacagt

SEQ ID NO: 750488 - DNA, 80 bp, Homo sapiens
ggagatatggcgcaactgcggcgcgttgttggcatggagccaaggatgaggaggtaccttccaagcagtgtgtttctgta

SEQ ID NO: 750489 - DNA, 96 bp, Homo sapiens
cacaggtgctggatggtacctcggggttctctcctgcccccaagctgggatatatcccctggggcagctggtggggctgaagatggtttctttgtg

SEQ ID NO: 750490 - DNA, 88 bp, Homo sapiens
ttcaagaaagacttgatggtctggtagaaacaccaacaggatacattgaaaggaaacctcgacctgtctcccagttggttgcacagca

SEQ ID NO: 750491 - DNA, 74 bp, Homo sapiens
aactctcagttcgagagtaaagatctctggaaacatggctacagaacatgttaatggaaatggtactgaagagc

SEQ ID NO: 750492 - DNA, 75 bp, Homo sapiens
atcttttgaaacacgttctgattaaccaagggaactgcaagcacatgttgaccagataactgaaatggcagcagt

SEQ ID NO: 750493 - DNA, 100 bp, Homo sapiens
acacaattgtctgtgacagtaacagtacttgggatcccccagttccaaagtgtcttaaaggatctgtgccagttcagaagcaggcgagcctcttccctga

SEQ ID NO: 750494 - DNA, 51 bp, Homo sapiens
aaagttacgttgttagaatgtagcagggtcatctcaggctggctgcatgcc

SEQ ID NO: 750495 - DNA, 100 bp, Homo sapiens
ccggaggtacagcaagttctttgacctgcaggcttacctccaattccttcaacttccagaacaggctttgcagaattttccatgaggggacgcatgaggg

SEQ ID NO: 750496 - DNA, 75 bp, Homo sapiens
tcgaggttgtatcagtaagaagggagcacggaacagattcaagctcagattcatgatgttgctatcaaaagttga

SEQ ID NO: 750497 - DNA, 100 bp, Homo sapiens
gagaagagaccccaagagtgttgagcagcccatcgtgcttaaagaaggtgacctgaccaacggtgcagatgggatgctggccacaagctccaatgggtct

SEQ ID NO: 750498 - DNA, 100 bp, Homo sapiens
tccaatcataaaagatgctgctgctaaaggtatccaggaaattgctgactctgtaaaggtcaagaacttcactgaggtccaccctgactacgggagccac

SEQ ID NO: 750499 - DNA, 97 bp, Homo sapiens
gaaagagtctatgcagatgcaggtggaggcttccattctggtggcaaccggggtcgtggtcggggaggaaaaagaggaaaccagtcggggaagaatg

SEQ ID NO: 750500 - DNA, 50 bp, Homo sapiens
ccttcatcctcaacgccctcacctggatttttagactctgaggagcagtt

SEQ ID NO: 750501 - DNA, 100 bp, Homo sapiens
accttcacccagcatttcatccctcgtcgaaaggattggattggcatctttagagtgtcggtgtcagaggtcaaagcagtggctgaaatgcagtttgggg

SEQ ID NO: 750502 - DNA, 83 bp, Homo sapiens
agcaagctgaagacatcaagaagatcttcgagttcaaagagaccctcggaacgaatcgggcgcctgattgctgagtgtcatct

SEQ ID NO: 750503 - DNA, 100 bp, Homo sapiens
agaggaagagaagatgaaggaagactgtctgccgagttctcacgtgcccatcagtgacagcaagtccattcagaagaattatgtttcgcagaaaagtgtc

SEQ ID NO: 750504 - DNA, 100 bp, Homo sapiens
tggagatcgtcccgcgcctgccggcatcctggagatccgctctgtacacgtgggcgtcgtggtcatcaaagcagtgtcctcaggcttctacgtggccatg

SEQ ID NO: 750505 - DNA, 101 bp, Homo sapiens
cgcctgagtaacccggggcaagggcatgctgttgaagcgaagtggcaaatcgttgaataaagagtggaaaaagaaatatgtcaccctgtgtgacaatggcg

SEQ ID NO: 750506 - DNA, 95 bp, Homo sapiens
ctcagtccacactcccaaaagggaaagacagaaagaatttactttcaggttttcttacctaaagggagcaaagagaagagcaaaccaatgttctt

SEQ ID NO: 750507 - DNA, 83 bp, Homo sapiens
ggaaaaggaatcgtatcgtatgtccgctatccagaacctccactctttcggtcccgcagcccccggaagccaatagactccct

SEQ ID NO: 750508 - DNA, 101 bp, Homo sapiens
cctgagccatgcccatcgcagccgccccgaaggagccagttgttgacctcctgtactggagagacattaagaagactggagtggtgtttggtgccagccta

SEQ ID NO: 750509 - DNA, 123 bp, Homo sapiens
cggcagcatgtcggtggcggggctgaagaagcagttctacaaggcgagccagctgatccaccttgagatcaagccggccatccggaaccagatcatccgcgagctgcaggtcctgcacgaatg

SEQ ID NO: 750510 - DNA, 75 bp, Homo sapiens
aagtcagtttctgaggaatttcatcagggtctgaaaagccctcaagaaagcctcagtgatcttggtgccatagag

SEQ ID NO: 750511 - DNA, 100 bp, Homo sapiens
gagtgacccccacaaggccaagactatgctgaaccgaatcccacttggcaagtttgctgccctgggcgctgcctatggcacagccaagagcggtaccggc

SEQ ID NO: 750512 - DNA, 90 bp, Homo sapiens
gaaagagtcaacagcagtggcaacagtttaaggaagaaatctctaaacgttttaaatcacatactgaccaacttgtgttgatatttgctg

SEQ ID NO: 750513 - DNA, 100 bp, Homo sapiens
ccaagcggctgccgaagatggcggaggtgcaggaagtgctggactccctggtcagcaatgtcaacattgagctgctcaatgccctccgctaccatatggt

SEQ ID NO: 750514 - DNA, 148 bp, Homo sapiens
agatgtctcgctccgtggccttagctgtgctcgcgctactctctctttctggcctggaggctatccagcgacatggatttgattgacatactttggaggcaagatatagatcttggagtaagtcgagaagtatttgacttcagtcagc

SEQ ID NO: 750515 - DNA, 75 bp, Homo sapiens
gccgtggcagcctgaacggagtgtgcgacggattgggagctcaccttgcagagcgccaagtcccgagtggccttc

SEQ ID NO: 750516 - DNA, 83 bp, Homo sapiens
cgtcgctggtcgtgcgacccaagcccctgcattcctgtacgggctactgcagcactggggtgtcagttgttggtccgacccag

SEQ ID NO: 750517 - DNA, 100 bp, Homo sapiens
cccagccccttgtcagccagggctgaacccccgcagtgccggtggtggtgtgcacattgagccccggtatagacagttcccccagctgaccagatcccag

SEQ ID NO: 750518 - DNA, 95 bp, Homo sapiens
cggtaccaggcagacatcaccgacttgttaaaagaaggttaatttggagtggcccctggagtcagtttcctacaccatccgaggccccacccagc

SEQ ID NO: 750519 - DNA, 75 bp, Homo sapiens
gcttcttggttcctcggagtactcaacacagattgacatgtgtggcttacagaagagacgaaatgtggtctgagg

SEQ ID NO: 750520 - DNA, 59 bp, Homo sapiens
ggacatattcgatgccatcgtgatggcggatgagagattggttcgagtgagtaaaaact

SEQ ID NO: 750521 - DNA, 100 bp, Homo sapiens
cctatgcctgtgatttttctccaagagccattgaatatgttaaggaactagcttctaaaaaatccctgcctatgaattattacacagtattctaccatgt

SEQ ID NO: 750522 - DNA, 100 bp, Homo sapiens
ctctctccgtgctcatcttcatcgccctggctctgaatggctttggtgggatgtgtatgaccttcacctcattaacagtactccaaagattcaggtttac

SEQ ID NO: 750523 - DNA, 82 bp, Homo sapiens
tgtgacttgcagtcatcatccattaccacaaaattaggacataagcagctctatgaccaatagcacagctgccagtagaccc

SEQ ID NO: 750524 - DNA, 82 bp, Homo sapiens
ttcctgagtgcttctttcttggagctgaccatgatccaccaaaagacaatggcggagcaaccatcaataaatatgtagtgga

SEQ ID NO: 750525 - DNA, 101 bp, Homo sapiens
cagaaacaaaatgtcaacaaattgatggtctatccttcactggagtctgatgatgatgaccctgctttgaaatctcgacccaagaaaaagaagaattcaga

SEQ ID NO: 750526 - DNA, 132 bp, Homo sapiens
ttcagatcttcatgtgtctcttctaagctgaataaagctgttttggaactgtcaggtacctcaaagccagcaagatgaagagcgacgtcggcagctgagagagagagctcgtcagctaatagcagaagctcg

SEQ ID NO: 750527 - DNA, 76 bp, Homo sapiens
gcagacgtcaaaggcaagtacatctgtattcaactgggtaaagggtcttgctctgtggcccaggctggagtgcagt

SEQ ID NO: 750528 - DNA, 74 bp, Homo sapiens
ggaaaaggaaaaaaatcgccaagtggagttccaagcaggggctagtgacatttgaagatgtagctgtggatttc

SEQ ID NO: 750529 - DNA, 123 bp, Homo sapiens
gtcttcagacctgaaactgaattggagactgttaggcccagaagaacaattagggtgacgtgtgcattgagtaaacagaggaagatgtctacattggatatttgcctctggcccatgttctag

SEQ ID NO: 750530 - DNA, 75 bp, Homo sapiens
tcttcttgcagctggagccatggcaggttggatggcaagcatgtggtgtttggcaaagtgaaagaaggcatgaat

SEQ ID NO: 750531 - DNA, 100 bp, Homo sapiens
gttctatgaaacagtgtatcaaagtgtggactgaggaagatgtatcattacatggatataaaaaatacttgctgtcacaatcttcccctgccccactgac

SEQ ID NO: 750532 - DNA, 100 bp, Homo sapiens
cggtactcagacgctggcgggcgcagtttctcacgacgggccgagcctgccactgaagatgttggatccagggttgatgacgtgttccaagcaagctatg

SEQ ID NO: 750533 - DNA, 100 bp, Homo sapiens
agaagaaatcatagacgatgatgatgatgacatcacccttacaggttttgatgatgatggttcagaatttcatgaacatatatttctggagaaacacctg

SEQ ID NO: 750534 - DNA, 101 bp, Homo sapiens
aacgctctcggaattatggcggcggtggatatccgagcgagtaaccagctcataaatcacatcgaacagtttttggatactaatgaaacaccgtattttat

SEQ ID NO: 750535 - DNA, 74 bp, Homo sapiens
aagtcatctctggacagaaaaccacattgtttacacaggcttgttttcctgctcagaacaaagtgacttccctg

SEQ ID NO: 750536 - DNA, 88 bp, Homo sapiens
aacaaggtgttgatgccgccggacgattcagaccaggatgtagcactcaaacttgcccaggagcgagctgaaatagttgctaaatatg

SEQ ID NO: 750537 - DNA, 100 bp, Homo sapiens
gaaactgtaaccattgaattgaagaacggaacacaggtccatggaacaatcacaggtgctggagaatctggtaaaagcaccattgtgaagcagatgagga

SEQ ID NO: 750538 - DNA, 100 bp, Homo sapiens
attcacgtgtgcccaggccctgaggtgggccggacctgggagtggcagtctgcgggccaggcatcgacatccgcaacgactatcagcagctgaagcgcct

SEQ ID NO: 750539 - DNA, 83 bp, Homo sapiens
ccccgagctgctggagaactgaaggcggacagtctcctgcgaaaccaggcaatgggctgaaggtgatgtggccgccctcaacc

SEQ ID NO: 750540 - DNA, 73 bp, Homo sapiens
cactgccaaggctgccgtggaatggtttgatgatctcaggaaacaggctcgacagctggaaaatgaacttgac

SEQ ID NO: 750541 - DNA, 99 bp, Homo sapiens
gcctgggagttcgaggctgcggtgagctgtgattgcaccactgcactccagcctgggtgtcttcccggaccagcggtgcagtcccgccaaaggaagagg

SEQ ID NO: 750542 - DNA, 84 bp, Homo sapiens
cgccgaacctgcctggctagccggcgacttgagtgacgatacctggagtagaacagaaaaattattatgtctgtgttcccttgg

SEQ ID NO: 750543 - DNA, 90 bp, Homo sapiens
ctgctactggccctgctgggctggctgctgctggccgaagcgaagggcgacgccaagccggaggtgcaccgtccaggtgaggttagagct

SEQ ID NO: 750544 - DNA, 98 bp, Homo sapiens
aagaaaccgtgctcagaaactagccagattgaagctacccactgctgaaactccccttgccaggaacaggacctgtggaattcaccacccctgtgaag

SEQ ID NO: 750545 - DNA, 100 bp, Homo sapiens
cagtctgctgtccagaaattggaaacaaacacgacggagtgtggcgatgaggattgtctcaaagcttgccaggagcagattgaggcggtgctcctcaata

SEQ ID NO: 750546 - DNA, 82 bp, Homo sapiens
tggatctagaggcataattaggataataaatcctataacaatgcagtgtataaaggagctttctcttgcataccctcgctta

SEQ ID NO: 750547 - DNA, 100 bp, Homo sapiens
aatgtgtgatttcagtggaataaatggcgtccaaagtcacagatgctatagtctggtatcaaaagaagagactctgacctgtttttgttggacacccgtg

SEQ ID NO: 750548 - DNA, 100 bp, Homo sapiens
tctatgccccagaagctccatatacttcccatgataaacttaaggtagctacagcaagctgggtagcaggcagatccaaaggatatcatgaagtttccag

SEQ ID NO: 750549 - DNA, 82 bp, Homo sapiens
tccctaccatcgttgagagagagccttgggacggcagggatggcgaggctcttgtcaggatggtgaagctgttcatcggaaa

SEQ ID NO: 750550 - DNA, 98 bp, Homo sapiens
aaggattcttttcaatacatcctaaaacagtttctgtttcagatgatcgggctgaacaacgaacctgtctcatttgtggggaccgcgctacaggcttg

SEQ ID NO: 750551 - DNA, 114 bp, Homo sapiens
actgagcgcgtccaggcctgacagctctgcggctcgggccctgaggtaaacgcaaagcactgaagttgaattttgcaaatccacctttcaaatctacagcaaggtttactctga

SEQ ID NO: 750552 - DNA, 82 bp, Homo sapiens
ccaagatcatggcatatttccctggaactggaaggactgatcaagaaacacagctagttttgaatcaggaaattgaagcgtt

SEQ ID NO: 750553 - DNA, 98 bp, Homo sapiens
ctctctttgcctccaagaagtgtaaccgccttgaagagctgatgaagtgcaaaatggcaactcttaaggaaaaactcattgcaccagttgcggaagaa

SEQ ID NO: 750554 - DNA, 89 bp, Homo sapiens
gaacccacgagaagctgatcccatgactaaagtgcaggccgaactagatgagaccaaaatcattctgggcaaggggacgcgagataagg

SEQ ID NO: 750555 - DNA, 100 bp, Homo sapiens
ccgagagcgtgaccgagagcgcgaatatcgtcatcgttagaaggtggactgggtggttatggatcaggagacagtgaagatgagaggagtgacagaggat

SEQ ID NO: 750556 - DNA, 100 bp, Homo sapiens
ggccctcggcagcgatggcactgaaggactacgcgctagagaaggatctctggaaacatggctacagaacatgttaatggaaatggtactgaagagccca

SEQ ID NO: 750557 - DNA, 99 bp, Homo sapiens
tgggaggctgaggcgggcagatcacgaggtgcgatttgaaggtttaacaggaaacgtgcagtttaatgagaaaggacgccggaccaactacacgctcca

SEQ ID NO: 750558 - DNA, 83 bp, Homo sapiens
gcgaagagcaggcggaggaacaaaggcgacccaagacacccagagagggacagaagtcccgggcccagagcccggccagcagg

SEQ ID NO: 750559 - DNA, 82 bp, Homo sapiens
ccagtccctgagccgcccctacacccacaggttcccaacaaggctacgcagaagaacccccttgactgaagcaatggagggg

SEQ ID NO: 750560 - DNA, 101 bp, Homo sapiens
ccagcggccgccggctcccccacgaggctccataaaaatacagactcaccagttcctgctttgatgtgacatgtgactccccagaatacaccttgcttctg

SEQ ID NO: 750561 - DNA, 100 bp, Homo sapiens
ataccagctgtagcaaaagtgggaagccaagcctttcctcccggaagccagttgagggaagttctccatgaatgtacgtcacaatgatgatgaccgacca

SEQ ID NO: 750562 - DNA, 100 bp, Homo sapiens
gatgattgacagtgtggagagccgtgatatgttccagttgcacatttcctgcaaggactccaaagtggtgaggttggatggcaagcatgtggtgtttggc

SEQ ID NO: 750563 - DNA, 102 bp, Homo sapiens
ggcgggaccataagggcttaactcatatatttaacccccctccaaaaaggacttgagtgagaacgccatccaggccatccccaggaaagcttttcggggagc

SEQ ID NO: 750564 - DNA, 100 bp, Homo sapiens
ttccaccgggccgtggaacagcacaatgattgaggtggtgccttctgcctctgccctgatcatcaaagccctcaaggaaccaccaagagacagaaagaaa

SEQ ID NO: 750565 - DNA, 90 bp, Homo sapiens
tgatgacatggcttctcccaaactcaagctgagaggcaagtgaggcctatctggttggcctttttgaagacaccaacctgtgtgctatcc

SEQ ID NO: 750566 - DNA, 90 bp, Homo sapiens
accggccctggcagcgcgccacagcccgcgaagccaacgagtgcgtggaggatgatgtggacctggaagccctggtgaacgatatgaatg

SEQ ID NO: 750567 - DNA, 75 bp, Homo sapiens
agtccaacttgcctggaccagcttaatggttctgcttcttggacacttaatgattgttggcaagaaatgtgctgc

SEQ ID NO: 750568 - DNA, 74 bp, Homo sapiens
ctccagcggggacctgctccgggacaacatgctgcggggcacaggtgaaagacttggtcgccaggatacatgga

SEQ ID NO: 750569 - DNA, 96 bp, Homo sapiens
cgcggagcccagacctacccgggcgaagcgggcgagcggtggtttggacgccggcggagacgcgggcgagagacatgaggctgagctggttccggg

SEQ ID NO: 750570 - DNA, 95 bp, Homo sapiens
gaggccccctttcaaggggatcagaggtccctggagtttctgcttcctccagagccaggagggtgaggacaaaatcttcttaatcaacaagcttc

SEQ ID NO: 750571 - DNA, 100 bp, Homo sapiens
agagggccagagcgtcggggaggcaagatgatccaccagcggttccatcctacacttggctgacatgggttttgccagattattcaattctcctctaaag

SEQ ID NO: 750572 - DNA, 100 bp, Homo sapiens
ctgaggacccaaagtcatttcccaggctggcggagaactccaattccagggtttcagaaccgcatcgcagcatctttcctgaaatgcactcagactcagc

SEQ ID NO: 750573 - DNA, 109 bp, Homo sapiens
ctcgatcttgggacccaccgctgccctcagctccgagtccagggcgaggattttttatcaagcagaaatgcatcgaacaacgagaatcaagatcactgagctaaatccc

SEQ ID NO: 750574 - DNA, 100 bp, Homo sapiens
tgaacctatcgaaggacatgaagactaccacatgatggatgatcacggacgtgcagctcgccatcttcgccaacatgctgggcgtgtcgctcttcttgct

SEQ ID NO: 750575 - DNA, 100 bp, Homo sapiens
aaacagtcgtgctagttcctcatccatgaaaattccccttaacaagaaatgatttgcagctgagtgaatcaggaagtgacagtgatgactgaagaaatat

SEQ ID NO: 750576 - DNA, 98 bp, Homo sapiens
gtgaggaggcggcacacgcccgcgccgacgcggccccgcaagccagacctgcaggtgtacctgccgcgacaccgagccccgtgctgatcccattccaa

SEQ ID NO: 750577 - DNA, 100 bp, Homo sapiens
cttcccccaggacgagctcaaccccatccactgccgcggccgtgggcccgaccgcggggacccgccaggagtggtggctcacacctgtaatcccagctct

SEQ ID NO: 750578 - DNA, 90 bp, Homo sapiens
ttttagggtcctttatatagaagggagagtagcaaagcggaccgagagcacgcaccccagcagaaatcgggagagaatgccaacatccag

SEQ ID NO: 750579 - DNA, 100 bp, Homo sapiens
cagcacacagaagccgagacgtgggtaattccagaattgattggccataccattgtcactgtattactgctcatgtcattgcactggttcatcttccttc

SEQ ID NO: 750580 - DNA, 75 bp, Homo sapiens
ccggggcgcccgaggtctggaaggcgcagatcttgtagaaaatttcagctgtagcccttggactagaagctgaaa

SEQ ID NO: 750581 - DNA, 82 bp, Homo sapiens
ttgtgaaatcatgcctctgcaaaggtcagcccaaggccaaccccactgtcactctgttcccgccctcctctgaggagctcca

SEQ ID NO: 750582 - DNA, 85 bp, Homo sapiens
cccgcggaagccggcatgctggagaagctggagttcgaggacgaagcacagacgcagtcttcagcaaggaagtgctgggaacgcc

SEQ ID NO: 750583 - DNA, 78 bp, Homo sapiens
tggcattgacctctcagatcccaaacaactggcagaatttgctagaaatcttacaggctggtgttaaaggaacttcgg

SEQ ID NO: 750584 - DNA, 75 bp, Homo sapiens
gtctcttcccacggacgcgcgagacaatgaggagctctcatttcactcttcagtgttcctgttatttatgaacgg

SEQ ID NO: 750585 - DNA, 80 bp, Homo sapiens
gcctgcggagcctgtggggcaggattgccccctgtgggtcactttctcagtcattttgagctcagcctaatcaaagactg

SEQ ID NO: 750586 - DNA, 83 bp, Homo sapiens
ggcgggagcggcgccgagaggccgtgcgggacgcgggcgccaggaccggccgaacgcagagttgggccggtgcacaaacagcg

SEQ ID NO: 750587 - DNA, 75 bp, Homo sapiens
gcaagggttcggccgtgccctccgacagccaggcccgcgagaagtcaaaatgcagatcttcgtgaaaacccttac

SEQ ID NO: 750588 - DNA, 100 bp, Homo sapiens
tgaagctgttagtcattacaagttgctgcttcagcaaaacaagaaatttcaaaacttgatcaagtatcaagtggggcagctgtattctgtggctgaggcc

SEQ ID NO: 750589 - DNA, 113 bp, Homo sapiens
cgagcacggcctcttgcgctacgccctggatgagatgacgacaggatctgctcgccacccttcatggagctcacgagcctgtgcggggatgacaccatgcggctgctggagaa

SEQ ID NO: 750590 - DNA, 76 bp, Homo sapiens
accttccccaagcgcggccagacctgcgtggtgcactacaccggatatgtgatggcgtccagtttggagctgggat

SEQ ID NO: 750591 - DNA, 80 bp, Homo sapiens
gactattctaggtacttcatgccctcttgccagaaaagttctttctccacagaccaacaggaagttccctaagtactatg

SEQ ID NO: 750592 - DNA, 75 bp, Homo sapiens
atggacccaagagtcagcggtatattagttcagttaccactaccaggatgcagaaaatgcgattgtgcatatggg

SEQ ID NO: 750593 - DNA, 74 bp, Homo sapiens
cagattcgcagtggtcgcttcttctccttgtgctctggtgctactgattgctcaagagaaggaaagaaacatat

SEQ ID NO: 750594 - DNA, 75 bp, Homo sapiens
tggtgtggcagctggaattgggggcctcgaggttgtgaaggttggaattgtggagccatcctcggccacatcagg

SEQ ID NO: 750595 - DNA, 87 bp, Homo sapiens
cagtatcatgctggccaagaagatcatcattaaggacggaggcacgatgatgttgaatttgaagtatcatcggaccgacggactggg

SEQ ID NO: 750596 - DNA, 75 bp, Homo sapiens
atcggcctctgcaggcttgccgaagaagggaggtgtggttacagaggaggctacatggaggtgatcaacctgcac

SEQ ID NO: 750597 - DNA, 74 bp, Homo sapiens
gaacatgtctgtacacctgtccccctgcttcagaatttacatagtacatgacgaagttaaggataaagcttttg

SEQ ID NO: 750598 - DNA, 83 bp, Homo sapiens
gcagaagtcgcgtgtctaggtgagtcgcggtgggtcctcgcttgcagttcagcgaccacgcattgtcccagatatagccgttg

SEQ ID NO: 750599 - DNA, 75 bp, Homo sapiens
acaccgacatggaacagggactcactggggggttattttggagctgttggagcactccttgagctgttgaagatc

SEQ ID NO: 750600 - DNA, 114 bp, Homo sapiens
tcctgctggtcctgctggtcctcggggaagccctggtgatcgtggtgaaaatggctctcctggtgcccctggcgctcctggtcatccaggcccacctggtcctgtcggtccagc

SEQ ID NO: 750601 - DNA, 75 bp, Homo sapiens
ggggacccgctgatcttccagctcccctcacccaacgtcgtgtgtaattgaaaagtgatcctctcttcagagatg

SEQ ID NO: 750602 - DNA, 75 bp, Homo sapiens
tgtttatgaaattcaaggtgtgatgaaatatcggacagctggcttttaaaggaatgaagagactcaatagaatcc

SEQ ID NO: 750603 - DNA, 76 bp, Homo sapiens
ctgtactgctccccaagaagactgagagtcaccacaaggccaaggtcaccaggagactaaagtccatcaaaaacat

SEQ ID NO: 750604 - DNA, 101 bp, Homo sapiens
ggaagacttggtggtagcccctgcaggcatcacactgaaggaggcaaatgaaattctgcagcgcagcaagaaggctgtgatgaattccactggtggcagta

SEQ ID NO: 750605 - DNA, 97 bp, Homo sapiens
caggcggagagacccgccgccagatgttctgccttactcaatacgggtcttgttggaagctgctgtacgaaattgtgatggctttttaatgaagaag

SEQ ID NO: 750606 - DNA, 90 bp, Homo sapiens
tgaactacaggtgattaaaggaaatggcaggaccacagaatactggccatggtgcaacttctggttttggcagtgcttttacaggacaac

SEQ ID NO: 750607 - DNA, 50 bp, Homo sapiens
catgttggaagatcaaaggcacagccagagactgctgctactttgaaacg

SEQ ID NO: 750608 - DNA, 100 bp, Homo sapiens
ctaagtgatggccagcggactgtgacagagtcgtccttgtctactccactaccaaatgttgaagttcttcaagaatcagtcctttggaggtgatgtcatt

SEQ ID NO: 750609 - DNA, 100 bp, Homo sapiens
ttttccgccatcctccccatgggggccattgacgtaagatgtaacctcgggtatggtgaaagacccaccggacgtcttggacaggcaaaaatgccttgac

SEQ ID NO: 750610 - DNA, 82 bp, Homo sapiens
gccaatttcatgaatttcaagagagtaccattggggatatgtgtcacaaagatgtctacacggaactgccagggaatggact

SEQ ID NO: 750611 - DNA, 82 bp, Homo sapiens
gcagtggtcgcttcttctccttgcctggtccgacccccagtggcactaacgtgggatcctcagggcgctctcccagcaaagc

SEQ ID NO: 750612 - DNA, 48 bp, Homo sapiens
gcagtggtcgcttcttctccttggaatgggaatggaaggcataggatt

SEQ ID NO: 750613 - DNA, 101 bp, Homo sapiens
attatccgtcatgccacagcttgaattcaaactaaagcacgagaagccctgccaacgtgggataagcagatccaatcactttgtttccaagtgaataacct

SEQ ID NO: 750614 - DNA, 100 bp, Homo sapiens
ctagatgccttctattatgagaacaatctttggggtgatcagcccatgacctaaacctccagacaaaataaaacggaaaatttgctagaatcaagaatga

SEQ ID NO: 750615 - DNA, 75 bp, Homo sapiens
ctgccggcacgcgactccccccgggcccaaaggcagctggtggaatttttgaagaaaatggaatctcgaggcccc

SEQ ID NO: 750616 - DNA, 82 bp, Homo sapiens
ggatccccgcccaggaagcccctctgaagcctcctcgccgccgtttctgagaagccattggatttaatgtagagacggtgac

SEQ ID NO: 750617 - DNA, 115 bp, Homo sapiens
ggggaggcctacgatatcattgctgaagacattcaaggaaccgtctttttcgctggtcaccgactggaggacaaccctggtgtgcggcgacacttagtgaaaaagccctcccgga

SEQ ID NO: 750618 - DNA, 100 bp, Homo sapiens
aatgagaactataagagcctggtgagacggagctatcggcgccgcggcaagagccaggttaatttggagtggcccctggagtcagtttcctacaccatcc

SEQ ID NO: 750619 - DNA, 100 bp, Homo sapiens
gatgaaatgacattcagagaagcagcccttgccttttctcttgcagcaacagcccaggctgctccaaggatcattactgggcctgcgccggttctcccac

SEQ ID NO: 750620 - DNA, 88 bp, Homo sapiens
ccatcgcagcactccgtacccactcgaaacccaccttgtcccatccacatcaggacatcccagctggagttcaaccttcatcccttct

SEQ ID NO: 750621 - DNA, 101 bp, Homo sapiens
ggggagagcgcgccgctgctcccggaccgggccgcgcacgccgcctcaggagcggaaagaatgtcggagcgggccgcggatgacgtcaggggggagccgcg

SEQ ID NO: 750622 - DNA, 98 bp, Homo sapiens
atgcagactgggttgaaggctattccatggaatatttgtcccggcactggctcttcagtcccttcaacgcgttccttcacctcgggcagaataacttt

SEQ ID NO: 750623 - DNA, 82 bp, Homo sapiens
ggcagacggcgacagtggcggcggcgccatggcagggcttgcagtggaagatagatgataagcctgtaaaaattgacaagtg

SEQ ID NO: 750624 - DNA, 87 bp, Homo sapiens
gagtcggggacccaggagtttcctgtgtccagcgctgccggagccgcctgagtggactgctgggacgggcccgatgggaagccggtc

SEQ ID NO: 750625 - DNA, 95 bp, Homo sapiens
cggcagcatgtcggtggcggggctgaagaagcagttctacaaggcgagccaggtgaatgaaaactttgccattgatttgatagcagagcagcccg

SEQ ID NO: 750626 - DNA, 80 bp, Homo sapiens
ccgcagactccttctccagcatgggctcgcctgtcaacgcgcaggtgagaagccctaccactgcaactgggacggctgcg

SEQ ID NO: 750627 - DNA, 51 bp, Homo sapiens
cagccctggtgtcacctatcagtaaaaggactctagtatgggattcctttc

SEQ ID NO: 750628 - DNA, 82 bp, Homo sapiens
gccgatccagcctgcggagcctgtggggcaggctataccccagctttggcctgtgctcccaataaggatgtggctgattgcc

SEQ ID NO: 750629 - DNA, 100 bp, Homo sapiens
ggagcgaaggctgaggtggcagcggcaggagagtccggccgcgacaggacgaatgatatggaacctagcaaagctgttccactgaatgcatctaagcaag

SEQ ID NO: 750630 - DNA, 80 bp, Homo sapiens
cagggcctgggccgccgctgctacctgcagcgccgtgtggcacgacacaaaaatcaggctcttgattgcggggactaact

SEQ ID NO: 750631 - DNA, 75 bp, Homo sapiens
ttgaaaatcaacgacaacttgagcacagagccttgcaaaggaccatcgcatgaaacttatgcaacaacaacagga

SEQ ID NO: 750632 - DNA, 83 bp, Homo sapiens
tttgaacagatactccaacttctacaacaagactttagccagggccctctgaaggatgcacccaacctcatctgcacccccca

SEQ ID NO: 750633 - DNA, 75 bp, Homo sapiens
ctctacctctgcacatcgcacccaggtggttcagctcgcatagtgagacgagttgtactgctgtcacaggaaatg

SEQ ID NO: 750634 - DNA, 82 bp, Homo sapiens
cgccaccacccactccggacacagggaacggcaggagcagctgatgggatatcggaagagagggccgaagcccaaaccgcta

SEQ ID NO: 750635 - DNA, 98 bp, Homo sapiens
gttggccctgtgatccctcaagactggtccacggagtgtatgaccacaaacagccatcaagtgttccttgcctgtatctccccttggttcaatagcta

SEQ ID NO: 750636 - DNA, 75 bp, Homo sapiens
accgcctgggaactccgccatgtcatccacttcgcccaacctccagattgaccctcttgctggaatgacatctct

SEQ ID NO: 750637 - DNA, 76 bp, Homo sapiens
tgccacccaagaacctggccaaagctatgaagcctcagcaggtagagcagatggaaataccacctgtagagcttcc

SEQ ID NO: 750638 - DNA, 100 bp, Homo sapiens
gccccagcatcactgtggagttttccgactgcaaagcttctctccagctccccatggagaagtgaaactggaacgccaagctgaagaagaacgaatacgg

SEQ ID NO: 750639 - DNA, 78 bp, Homo sapiens
tgaacctgagccttcagtcaagaccctccagcttgcctgctatggtgaactaaacggtaatgctggagaaagagaaat

SEQ ID NO: 750640 - DNA, 82 bp, Homo sapiens
cgaatccgcgtcgggctgtaactcgagtgccagggacccagacatggagctgcgggaagaagcctggtctccggggccgctg

SEQ ID NO: 750641 - DNA, 100 bp, Homo sapiens
tctttaaatcctgagtatgagagagaaccaaatcacaataagtctttagctgcaggtgtgtggggtgatgatgaccaaacggaccaaagacatgggcaag

SEQ ID NO: 750642 - DNA, 74 bp, Homo sapiens
agtagcaagtggccatggggagcctcagcggtctgcgcctggcagcaggactacactttgttatatgaagaggc

SEQ ID NO: 750643 - DNA, 50 bp, Homo sapiens
aggtctggagctcgaccgggccaggttcttatttgaaaaccagacaccag

SEQ ID NO: 750644 - DNA, 100 bp, Homo sapiens
aaatgacaagattttaaaaaaatcccatgaggagaaggcattctaatttaggattctgagaaacgaacccctcttcatgtggccgcatttctgggagatg

SEQ ID NO: 750645 - DNA, 83 bp, Homo sapiens
ctaacgctggccgacaacagcctggcgtccgccacgctcttggagtttgacaaggagttgtctgtctttaaggacagactgta

SEQ ID NO: 750646 - DNA, 50 bp, Homo sapiens
ctgaaggactcgccccgcttcaggctggagaatcgggaagggagaaggct

SEQ ID NO: 750647 - DNA, 75 bp, Homo sapiens
aattcagtcccttctccatgaaatggtacacgcagaacatggatggcaccaagcattatgaaaagcctaatggac

SEQ ID NO: 750648 - DNA, 100 bp, Homo sapiens
gcgccatgttcaagaaactgaagcaaaagatcagcgaggagcagcagcagctccagcaggcgctggctcctgctcagtaccttccactggaagaatctca

SEQ ID NO: 750649 - DNA, 97 bp, Homo sapiens
ttggtgctgtggctgatgcatttcatggctatcatctacactgccaccatggcaactgcaccatacaactactcttacatctttaaatatattatta

SEQ ID NO: 750650 - DNA, 80 bp, Homo sapiens
ctgcagaagcgtgtcgttctgcaccagcgccttgatcgagtacttgaggtgctggagaatctggtaaaagcaccattgtg

SEQ ID NO: 750651 - DNA, 97 bp, Homo sapiens
caaagattctttgtagcagacactgcaaatgaagctctcgaggctgctaagagactaaacgaagttatacggaagcgtctcctcattgatggagatg

SEQ ID NO: 750652 - DNA, 83 bp, Homo sapiens
ctgccctccgagggcttcagtctggagccgcccagaggttgaaggtcgaggagctggaaggcgagcggagtcggctggaggag

SEQ ID NO: 750653 - DNA, 100 bp, Homo sapiens
ataagagcaaagaacactgttgttgccacagggtatgagaagatgatcagtggtatgtacctgggtgaaatcgtccgcaacatcttaatcgacttcacca

SEQ ID NO: 750654 - DNA, 100 bp, Homo sapiens
tgtgaagaagaatttcgatctccgccctggggtcattgtcagattttattgtcaagatatccgagcttatgacattttatttggagatacaccgcggcct

SEQ ID NO: 750655 - DNA, 100 bp, Homo sapiens
gtgcgcgccctggcgggtccggaccaaggatcttagaaatgaagttgaaaaattacgcaatgaagtgaatgaaagagagaaagcaatggaaaatcgttac

SEQ ID NO: 750656 - DNA, 82 bp, Homo sapiens
gcgaaggctgaggtggcagcggcaggagagtccggccgcgacaggacgatatttagcttcctgtggtatactgatgagcaga

SEQ ID NO: 750657 - DNA, 82 bp, Homo sapiens
cttagctgtgctcgcgctactctctctttctggcctggaggcattggttcctgtcaccattgaagtagaggtgccctttgac

SEQ ID NO: 750658 - DNA, 103 bp, Homo sapiens
ggtcctgaagtcagttgttgcatcaaatacttcatatttggcttcaatgtcatattttgggtgatctgtgaaaatggttcgctattcacttgacccggagaac

SEQ ID NO: 750659 - DNA, 82 bp, Homo sapiens
cagaagtcgcgtgtctaggtgagtcgcggtgggtcctcgcttgcagttcagcgaccacgggtgaggtggctttgaccccggg

SEQ ID NO: 750660 - DNA, 51 bp, Homo sapiens
gcaacatggtgcggtcggggaataagatgcttgctttaaatcgagtaacag

SEQ ID NO: 750661 - DNA, 100 bp, Homo sapiens
aaaaattcaaagtcgaatatcatgctggtggctctacccagaattcaattaaagtggctcaggtgttcaggcgcttcgtggaggttggccgggtggccta

SEQ ID NO: 750662 - DNA, 75 bp, Homo sapiens
ctgcggccgcttcttccagaagggccaagggacttgcttttatttcgggtgacacatctggagactacaggaaag

SEQ ID NO: 750663 - DNA, 96 bp, Homo sapiens
gggccgcagaacactggtgctgacaaacctcttaggattacaggagacccatataaagttcaaggcaagctggggcgcatcggacctcctggctgc

SEQ ID NO: 750664 - DNA, 100 bp, Homo sapiens
tgtaaggtgcgcagcagaaagcatttaaccagcatggctacttcatattttggaaagcagtttttaagacaagttcctggtacagttcagacaggacaaa

SEQ ID NO: 750665 - DNA, 50 bp, Homo sapiens
cagagcaagagctggatctcgtctttctgccggctgttcggacggaagca

SEQ ID NO: 750666 - DNA, 100 bp, Homo sapiens
cctgggcattggggctgaggtgtggtggaaccttgtgccgcgtaagacagtgtcttctggggagcagctggctgctgccaaggcccaacaggagcaggag

SEQ ID NO: 750667 - DNA, 83 bp, Homo sapiens
ctgttgaaagcgacaagtggaggcgccgctctagcggccgggactctgaactatggcgaatcctgcaaaaatgtctctctatc

SEQ ID NO: 750668 - DNA, 75 bp, Homo sapiens
gcggctgtcggctggtgcttggcggcagggacgattgggatgaagctctcttgactatgagtaaaggagaaaagg

SEQ ID NO: 750669 - DNA, 100 bp, Homo sapiens
ggtatgataacaacgattgctgtgaaagtcaacccggagcgtgaggacagtgagactcgaacaagtgcccttatgcctgcacagttgttttttaagacgg

SEQ ID NO: 750670 - DNA, 82 bp, Homo sapiens
gatgtcggcgaagagttcaaccagtactatactggcaattgctggagaagattttgcaattgttgcttctgatactcgattg

SEQ ID NO: 750671 - DNA, 75 bp, Homo sapiens
ctgagtggttgtgtggtcgcgtctcggaaaccggtagcgcttgcagcatggctcacggaatttgaagacaccccc

SEQ ID NO: 750672 - DNA, 100 bp, Homo sapiens
ggtggaaacagctctactccaacaaccctggggcagcctggcatcctcgctacaacctcattgttgtgggccgatacccagatcctaatttcaaaagttg

SEQ ID NO: 750673 - DNA, 102 bp, Homo sapiens
tcctcatcggtctacatggtggccatacattctggatatagccctagaggtggtagatgctttctgcagtcgctacccccatgagaccttagagttcttttg

SEQ ID NO: 750674 - DNA, 75 bp, Homo sapiens
tcagctgcactgtggcaaggcttttgcttccaaatacaagctgtataggcatacccagagtatcttatcacttac

SEQ ID NO: 750675 - DNA, 102 bp, Homo sapiens
tgattcaagtgcctgcctctgccccttggtgggctgaagcttcatggaggtactccaaagattcaggtttactcacgtcatccagcagagaatggaaagtca

SEQ ID NO: 750676 - DNA, 73 bp, Homo sapiens
gcagccccaacccatctccagagagaccaagaggctggcgaaggttcctgccagtgggcttggtgtgaacgtg

SEQ ID NO: 750677 - DNA, 75 bp, Homo sapiens
gtgggtgctgggacttcccgtccgcggcgtggaggaactgataaatttcaaacggaagagagtggcagcatttag

SEQ ID NO: 750678 - DNA, 90 bp, Homo sapiens
cgggggatttgccgaactcatcgacgtcggtggactccgctgtggccatcaacgacctgtcggtggtggtggacctcctgaacatcgtca

SEQ ID NO: 750679 - DNA, 75 bp, Homo sapiens
aacgaatggggttgtgatggcccaggttcttcaaaagatgaccttcctgcagacggtgagcagtgagaaggtccg

SEQ ID NO: 750680 - DNA, 82 bp, Homo sapiens
tgagattgcactgctgcagtccaggctgaagacagagggctctgatctgtgcgacagaggggatatgagactttctactcgg

SEQ ID NO: 750681 - DNA, 98 bp, Homo sapiens
gatgcattgtccattcgaagtgttggcagtcacagggtgagagatgctgcaatattggctatagtggagatttatagacatgtgggagaaaaagtgag

SEQ ID NO: 750682 - DNA, 82 bp, Homo sapiens
gtcttcggaactgggaccaaggtcaccgtcctaggcaaagccatgactacagtagtggtacatgtggactccaaagctgagc

SEQ ID NO: 750683 - DNA, 50 bp, Homo sapiens
cagactgttactacaacctcgggcgtctgagtgtgatgctggatcttgcc

SEQ ID NO: 750684 - DNA, 75 bp, Homo sapiens
cggaaaccgaaggggagccatggcggctgacagtcgggaggagaaagtaactctcaggagccttctccgcagttg

SEQ ID NO: 750685 - DNA, 100 bp, Homo sapiens
gttctacaacctggtgcgcttccggatcgggggcaagcggaaggtgatgcccaagatggaccagatacagttgtctcctccagctgctgtaccagtttag

SEQ ID NO: 750686 - DNA, 50 bp, Homo sapiens
gaacaggccgggcaccaaggcgcagggcttaaaagacaaccttcttgctt

SEQ ID NO: 750687 - DNA, 98 bp, Homo sapiens
catgaagtctttcttccgtagactgagtttcactcccgacggatctttgcttctcacgccagacctcagttggatgaacccattccactgtatgaggc

SEQ ID NO: 750688 - DNA, 98 bp, Homo sapiens
ggagatcttcttcttttcttaactggtcaagagggcttcgtgctgtgtcactccatcgctgggggtacgggttctggcctgggctcctacctcctgga

SEQ ID NO: 750689 - DNA, 100 bp, Homo sapiens
tcaggagtgtcattgctcatatagaagacccagaggacactaaccaaggttgcagccccacccacgtcacggtgtacagcgagtatggcgtggacgtctt

SEQ ID NO: 750690 - DNA, 100 bp, Homo sapiens
tggccctgagcttgcggctggcgctggcgcggagcggcgcggagcgcggccacggcatatgcctccaaggacggggtcctcactgaggccatgatggacg

SEQ ID NO: 750691 - DNA, 100 bp, Homo sapiens
caggtctggagctcgaccgggccaggtggcttcccacacttctgactcggacgttccttccggtgtcactgaggtggtcgtgaagctctttgactctgat

SEQ ID NO: 750692 - DNA, 124 bp, Homo sapiens
gcgggccccgggacctgggctgggaacccgcggtggagcgggacacgaacgtgggcgtctctggccgagcctctttttgtggaaaacgacagcagcagcagtggcctggaagacgccaccgcta

SEQ ID NO: 750693 - DNA, 82 bp, Homo sapiens
ctactaactacagatgacttgccatttcatttacaaaggttgttgatcattatgaaaatcctagaaacgtggggtcccttga

SEQ ID NO: 750694 - DNA, 97 bp, Homo sapiens
tgtagtccaacccacatcagcaggtgaccaagaatatggcccaggtgaccaaagccctggacaaggccctgagcaccatggacctgcagaaggtctc

SEQ ID NO: 750695 - DNA, 87 bp, Homo sapiens
aatatccaagaagcagtagagggtgccatgcacattcagacctaatctgggagcctgcaagtgacaacagcctttgcggtccttaga

SEQ ID NO: 750696 - DNA, 75 bp, Homo sapiens
gtgatatttctcttttgtctgcccctattgtaagtgcagatggaacacaacaggctcaagaggagcagaccagct

SEQ ID NO: 750697 - DNA, 100 bp, Homo sapiens
ccccagggaatgccacagcatcctccagcacctcagacacagtgcctgaggactttgagccattccggaggcagctgctccagggaagggtgtgaggagg

SEQ ID NO: 750698 - DNA, 75 bp, Homo sapiens
gagtggaattcgtgtgttgtacagacccttaaggtgccaatgttaacagggctacagccaataatgatcatacag

SEQ ID NO: 750699 - DNA, 50 bp, Homo sapiens
cgccgaatcgctcctgcagcagaggaggatacgaagcgttttcggcttcc

SEQ ID NO: 750700 - DNA, 75 bp, Homo sapiens
ttcggccctgggaccaaagtggatatcaaacatattgatgatgttaagaagttcaaaccgggttacctggaagct

SEQ ID NO: 750701 - DNA, 83 bp, Homo sapiens
cgagtcaagccgccgcctcgacccagggcccgcgggccaggagagcgctcggcggcaaacggggattcagcgtccgatccttt

SEQ ID NO: 750702 - DNA, 90 bp, Homo sapiens
gttgctttccactgacaggacagaagaccctgctgggatctttgagcttgtggaggtggtcggcaatggaacctacggacaggtgtacaa

SEQ ID NO: 750703 - DNA, 100 bp, Homo sapiens
tttagagttggaaaaaaaattggatgtggcaattttggagaattacgattagtttctgatgaagaattgaaaagaagagtagctgaggagctggcattgg

SEQ ID NO: 750704 - DNA, 75 bp, Homo sapiens
catttggagatcttgacaaagcctcttctgtttccaatgggactgaagttgctgaagatcctcaacaagtttcaa

SEQ ID NO: 750705 - DNA, 98 bp, Homo sapiens
aagcttccctgaggaagagctgataacaccttaaacctcctctggattcaagttaaagagagaagtggagatcctgatgtttctcagtgccattgtga

SEQ ID NO: 750706 - DNA, 74 bp, Homo sapiens
gctgccaggatttgggccgccaggcttgggctggggctgggcgtctgcgtcctgcacaactgtatctatgctgc

SEQ ID NO: 750707 - DNA, 98 bp, Homo sapiens
agtaattgagcctcaaaatgaagatggcacatggcccaggcagaccttgcagtcaaaatcaacttccagccagacccagccaggcacaggctgggtcc

SEQ ID NO: 750708 - DNA, 95 bp, Homo sapiens
tgatgaagacctcaaactttctgatcttttaaaatattacttaagagaatctcaagctgctaagggctggtgaattaccatatctccgtcaagtg

SEQ ID NO: 750709 - DNA, 100 bp, Homo sapiens
gacgttgaactctcagtggtcctacctggggatattatcaaatctactactgttcatggcagcgtttgctgccaattgatggggcaaatgatctcttttt

SEQ ID NO: 750710 - DNA, 51 bp, Homo sapiens
gtaaccaaatattatggatcctatctgaagcggcccagcccaatccagctt

SEQ ID NO: 750711 - DNA, 100 bp, Homo sapiens
ggaataaaaagattcccaggatgtgagcaacacgggaccgatatgcacccaatgtccagggagcgtgcaaaatttgtcaaaagtggccttttattgtaaa

SEQ ID NO: 750712 - DNA, 75 bp, Homo sapiens
agaatgttggctcaattaagaaacatcagggagataaattcaacccagtggtacaccaggggttggaaaaaccac

SEQ ID NO: 750713 - DNA, 78 bp, Homo sapiens
ctaaaaagactgcaatggctgctgctaaggtaattgagggttttctgagcaaagaagtaagttacatcgtgtccagcc

SEQ ID NO: 750714 - DNA, 100 bp, Homo sapiens
tgcacagcgccttgttccagcagggcctgatccaggaacttacaatgtctcagaaaaatggtgggaatgttcttcagatgatgtatgagaaacctgaacg

SEQ ID NO: 750715 - DNA, 100 bp, Homo sapiens
cgacgcctccgccgccgcctgaggaggcgagctagccgggagttacaccgccaccgccaggccactgcagaacaaattagacttgcacagatgatttcgg

SEQ ID NO: 750716 - DNA, 83 bp, Homo sapiens
caggtgtccgcggggcagacgtcggtgtatgccctggatgagaatgggaagatcagttttcctgccatccaggctgctccctc

SEQ ID NO: 750717 - DNA, 75 bp, Homo sapiens
cagtttacagacaagaggtttcagccagtgcatgaccttactattggcccgatgagagaaagggaaagttaagga

SEQ ID NO: 750718 - DNA, 100 bp, Homo sapiens
ggatgtcctggtgttggatgaggcagacagacttctggacatggggtttgaggcaagggcagctgcaatgactctccgcacggtattattgtcattgcaa

SEQ ID NO: 750719 - DNA, 98 bp, Homo sapiens
tgacctgcttcaaaagaacaggaccccgtacgtcactaccactgtctctgctcacagtgccaaggcgccaagcccatctttgtgtgcttgcatccaac

SEQ ID NO: 750720 - DNA, 78 bp, Homo sapiens
gtgcaacagcacatagccaacataagacaggggcaagtgtccgagtggtgaatcagctacttacagagatggatggtc

SEQ ID NO: 750721 - DNA, 90 bp, Homo sapiens
aaagacaaaaggagattctgatgaagaagttattcaagatgagagaagaagaaggaggttcctgctgtgccagaaacccttaagaaaaag

SEQ ID NO: 750722 - DNA, 89 bp, Homo sapiens
cggccggagccacgcagccgcggcttccggagccctcggggcggcggactggctcgcggtgcagtatgaaaacccatggacaatcccga

SEQ ID NO: 750723 - DNA, 82 bp, Homo sapiens
agcaatatttcgagcagtttggcaagattatcttagaagacctaggactccaaaaatgtttcccctgaaggacgctgaaatg

SEQ ID NO: 750724 - DNA, 74 bp, Homo sapiens
tccggtcagggtcaagtcgtgttctgatcactactgacttgttggatcaggagcgtctgggcaagcagctcaag

SEQ ID NO: 750725 - DNA, 75 bp, Homo sapiens
gacgacgttgccgggtacaagtgcaactgcctgctgccctacacaggctccagaagggcaaagcctgcccagatg

SEQ ID NO: 750726 - DNA, 75 bp, Homo sapiens
gtgtccgagggcaccaaggcggtcaccaagtacaccagctcgaagccaccagcccctcgggttccaagatgcagc

SEQ ID NO: 750727 - DNA, 100 bp, Homo sapiens
ttgccggctcccctctcaggacaacccagatgtgcaacaaagtgcgatgttctttggggtgactttcaagatggactctactctaacagcaagtgaaatc

SEQ ID NO: 750728 - DNA, 96 bp, Homo sapiens
gcgacctcaagaagcagctccacgaaaggcagccgcggatcgccgcgctcagcgacaaacaagaagctcttcgtgggcggtcttgactggagcacg

SEQ ID NO: 750729 - DNA, 100 bp, Homo sapiens
gtgctgctcacagtcaccgctgtcattgtggagtgtgaacatggctacgcctcttcattcccgtccatgccgagcccccgactgcagcattcaaagcccc

SEQ ID NO: 750730 - DNA, 83 bp, Homo sapiens
cctctggcgagtacaagaagactctgctgaagctgtctgggggagatgatgaaacactctgctccagccaaggtggtgagggc

SEQ ID NO: 750731 - DNA, 100 bp, Homo sapiens
tccgaaatcaacttggaaagtcaaattacgtgtggcatatggactcctgacgaccaacagaaatgcactcggtgatggaaagagagccactattctgaag

SEQ ID NO: 750732 - DNA, 98 bp, Homo sapiens
gtgctactggggaacaccacctccccacccctcaaccagtctcaggcccagatgtatctacgggggctggctgtgggcaatggactctcctcctatga

SEQ ID NO: 750733 - DNA, 76 bp, Homo sapiens
gagattggatggatgcacaatcggagacaaagagaacgccagatcaagtgtcccaagtgtgataagctgttcttga

SEQ ID NO: 750734 - DNA, 87 bp, Homo sapiens
gtaccaggcgaagctggccgagcaggctgagcgatacgacggtgtctgacttccagcaactgctggcctgtgccagggtgcaagctg

SEQ ID NO: 750735 - DNA, 88 bp, Homo sapiens
tgccatacaaattctaaaaattgcaatggtgactatccagatattgctatatggagatttgccaaaaaataaagaaaatataatatat

SEQ ID NO: 750736 - DNA, 83 bp, Homo sapiens
ggacaatggtcaccgtctcttcagggcgccctgcaaggccgcaggcaggatgaacattctggcacccgtgcggagggatcgcg

SEQ ID NO: 750737 - DNA, 87 bp, Homo sapiens
gcggggaccttgccttgcccggggctcggggcccccagttcccgccccagacctcttgatgcagatcaagcaggagggtgagctcca

SEQ ID NO: 750738 - DNA, 90 bp, Homo sapiens
gggatggggccggccccgctgccgctgctgctgggcctcttcctccccgcgctctggcgtagagacacgatgaggcgagtggtacgacag

SEQ ID NO: 750739 - DNA, 89 bp, Homo sapiens
tgccttgagagcttcaggggaaatggcttcagcgcagtatattactgcagagatgtggtcttgctatgttgcccaagctgatcttcaac

SEQ ID NO: 750740 - DNA, 75 bp, Homo sapiens
tcgaggccctgcggagctgcttcgccgctgcgatgcagacaatctctttgaacatgaattgggggctctcaatat

SEQ ID NO: 750741 - DNA, 75 bp, Homo sapiens
gccaggcctcggacgaggaggacgcgcccgccaccgacatctactttgttttaaaatcaaagatgggaaaatcgg

SEQ ID NO: 750742 - DNA, 90 bp, Homo sapiens
gagcacgtgtacctcatccacagggcctcctgccagccccagcccctggagaggatgcaggtagacctggtggactgggtggacaacatg

SEQ ID NO: 750743 - DNA, 59 bp, Homo sapiens
tttaaacagccaaaacagttcattcatattcagctggccaatccgccatggtatagttg

SEQ ID NO: 750744 - DNA, 100 bp, Homo sapiens
gtcctactccagcggcggcggcggccagcagttggaatcgaagcctcttaaaatggcagatgacttggacttcgagacaggagatgcaggggcctcagcc

SEQ ID NO: 750745 - DNA, 51 bp, Homo sapiens
ggaagatttactttcgaagctataaaggattgcggcctgttggcagaagag

SEQ ID NO: 750746 - DNA, 82 bp, Homo sapiens
ctcgggaaccgggactgcgagcggcccttcctggatctggagagagcagctgctgctgccccaccacctgccaggcccggcc

SEQ ID NO: 750747 - DNA, 110 bp, Homo sapiens
caagaagtccgagacacgcggtgaggcggcgacgggctccgggctgatgtttcagacaccgcaggaaatgggcttaatagtgatcgcggcccggcagaccgagggcaaag

SEQ ID NO: 750748 - DNA, 74 bp, Homo sapiens
cggaaactgtagaggggcaagcagtggtccggcctctttggcctacccccgttggctccgctgccccaggtcga

SEQ ID NO: 750749 - DNA, 102 bp, Homo sapiens
gtgtccctgtacgcggagggctcggtcaacggcttcatcagcaccttggggatgtaatccctgttcattactacttaatacctccaccaacaaagactaaga

SEQ ID NO: 750750 - DNA, 80 bp, Homo sapiens
cagcagccggcccttgttaactacaacagaccatctgcattttgaaagcgaagcagaagccgtagaatcagcggcgagcc

SEQ ID NO: 750751 - DNA, 143 bp, Homo sapiens
tgattacaaagtggcttctcctgccctgagagccgtgggtaacatcgtcactggggatgacatccagacccagctatcagaggactcctgaaacctggagagctacctgctgtataaaggctggcctgagggcatttgctgaa

SEQ ID NO: 750752 - DNA, 100 bp, Homo sapiens
ttgcttttgaagttattaaagtctgttggtgcacaaaaagacacttatactatgaaagagttgattggctgcataatcgggcgtcaaggcgccaaaatca

SEQ ID NO: 750753 - DNA, 75 bp, Homo sapiens
ccatcgttgctgccttcttcgtcaagaatggacagcaaattatggatgaacctatgggagaggaggagattaacc

SEQ ID NO: 750754 - DNA, 100 bp, Homo sapiens
ttacctatttgatgaagatgtcttttgaaaggtgtactgcaaggaacaaaatgtttgtaaattctccttttaccaaggaggaagccagtgaaggtggagg

SEQ ID NO: 750755 - DNA, 101 bp, Homo sapiens
gtcaagagctttctctccaaaatccccagtgtcgtcacagacaagttggatggcttgaggactggtactaaaaggaaacgtgactgggaggccattgccag

SEQ ID NO: 750756 - DNA, 50 bp, Homo sapiens
ctgccaccgctgcccgagcccgaaatgagccgtcagactgctacagcatt

SEQ ID NO: 750757 - DNA, 51 bp, Homo sapiens
ctgcctgggagaatgttgactctactgcagaaaactgtcgctgaaaagcag

SEQ ID NO: 750758 - DNA, 100 bp, Homo sapiens
ggaactctgagtatgtgaccgaaccgatccaggcctacatcatcccatcgggagatgctcatcagtttcttgcagaacataaattattaggaaacattaa

SEQ ID NO: 750759 - DNA, 82 bp, Homo sapiens
cgcggcacagagagggcctgggagcttgctgcagcttcagggtcctcactgagcagcgagtcgtcccccgtgtcctctccgg

SEQ ID NO: 750760 - DNA, 100 bp, Homo sapiens
ccgaagtcagttccttgtggagccggagctgggcgcggattcgccgaggcaccgaggcactcagaggaggtcaacaacggttccagcctcagggatgagt

SEQ ID NO: 750761 - DNA, 96 bp, Homo sapiens
cgcgggaatggagctcggaggcggcgaggagcgcctgcctgaggagagcagtgtcttgggacaaggtgcgcattcctggtgtgctgcagcgattgg

SEQ ID NO: 750762 - DNA, 100 bp, Homo sapiens
cctgagcccgtgcctgtcttcagatcttcacagcacagttcctgggaaggtggagccaccagcctctccttgggcggcgactggcggcgcgatggacctg

SEQ ID NO: 750763 - DNA, 82 bp, Homo sapiens
gttttctcactatgctgggacattgctgctacttctggcaggtgtggcctgcctccgagggacatggatgaagctggaaacc

SEQ ID NO: 750764 - DNA, 90 bp, Homo sapiens
gaggattaccatcaccggaactttggacatcagacagtgcaggagaagaatgtgatgcggcagaaggggctgaaaactaaatccatacag

SEQ ID NO: 750765 - DNA, 51 bp, Homo sapiens
gctgtggagagcccgtccgacagcgctgagacctacacgggcccttttgtt

SEQ ID NO: 750766 - DNA, 83 bp, Homo sapiens
aagcaagctgaagacatcaagaagatcttcgagttcaaagagaccctcggaacatgatatcatcaagttgaatcgaaaggaag

SEQ ID NO: 750767 - DNA, 100 bp, Homo sapiens
ggacggtggtctaccgacagccggggaccgcggccatgggagggctcgcagacaaactgggaagattgagcctgtggtcctgccgctgctctggtttgca

SEQ ID NO: 750768 - DNA, 101 bp, Homo sapiens
cctcccgggttccagtgattctcctgcctcagcctctcaggtagctgggattacagctgcacagttggggatcttcaaaccaagatagatggcttggaaaa

SEQ ID NO: 750769 - DNA, 75 bp, Homo sapiens
tcaagacaggattcttctactataataaccaactgggacccagatggaaggatgctcttagatatttttgatgaa

SEQ ID NO: 750770 - DNA, 100 bp, Homo sapiens
gcaggaagaacccatcgggcagctacacatcttgaaagagaagctcttcctgtgagaggagaaggcagagcccccccaggctatgaatgccctgatgcgg

SEQ ID NO: 750771 - DNA, 100 bp, Homo sapiens
ggcatttgctctgagcatcagtcacggggcgatgagggtggagagcgggtgctacagcagcgctggacctccttcctcaaggcccagctgctgtgctcac

SEQ ID NO: 750772 - DNA, 87 bp, Homo sapiens
cccaatgggccccagccccccagctgaagggagcactggcgacttcgctcttccagttggactcagaattcatgattgaagaaatgc

SEQ ID NO: 750773 - DNA, 73 bp, Homo sapiens
atgaaacttgtgagggaatttgagcccatgctacaagtgaagaatgacatctctgaaaaggagcaacgatggg

SEQ ID NO: 750774 - DNA, 100 bp, Homo sapiens
atcgagaggatctggtgtaccaggcgaagctggccgagcaggctgagcgatacgacgagcgagctgttcagcggctgtcggggtgccagcgtgacgccga

SEQ ID NO: 750775 - DNA, 98 bp, Homo sapiens
gagaacgcggggagaagcccacccgtgaggagccagctgccgcgacgaacccggcagtgggcaggtgtttgtgacttcagagaaccaacttgtgtatt

SEQ ID NO: 750776 - DNA, 101 bp, Homo sapiens
gcctgaagaccccggagcccctttagccatgtggatacctacggagcacgagaaatacggcgtggcccaacctcagcgcttgcctcagcttcagacttcag

SEQ ID NO: 750777 - DNA, 98 bp, Homo sapiens
agaggatcaggtgttttcaggttaaccgtcagggggattcccgaagtcttccgttttctgagaatgtgagtgctgttcaaaaattagacttttcagat

SEQ ID NO: 750778 - DNA, 96 bp, Homo sapiens
aaaaggaagagaaaaagagagaaaaggagccagaaaagccggcaaaaccacttacagctgaaaaggcactactgcagtcttcagttaagcaacaag

SEQ ID NO: 750779 - DNA, 122 bp, Homo sapiens
cgggaactgataactgtagtgtatcctctgccttttttcttatctattggaggaagctcagactataatgtaactgcaaactccaagctggtcattatcacggctggggcacgtcagcaaga

SEQ ID NO: 750780 - DNA, 82 bp, Homo sapiens
gctcctgtcgtccgttctctcaggctcccgttcaggaatcccttggcaccatgtcctgtgtgcattataaattttcctctaa

SEQ ID NO: 750781 - DNA, 100 bp, Homo sapiens
ccggtgcccgaggaggcagccaagctcgtagcctgccactccgtgcgttcgatctggggctaatgttctaatttgtggtccaaatggctgcggaaagagt

SEQ ID NO: 750782 - DNA, 50 bp, Homo sapiens
attgtgagcaagcaaaatcagtaattgtgttggctggatctattattggc

SEQ ID NO: 750783 - DNA, 75 bp, Homo sapiens
tccccacacaggagatccaggtcaccagcatccactggagctacaagaggctgggttacgacccctacaaccctg

SEQ ID NO: 750784 - DNA, 100 bp, Homo sapiens
ctgaacttagctcgacggggctgaccgctctggcccagggtgaacctaaaggcagacccagaagagctttttacaaaactagagaaaattgggaagggct

SEQ ID NO: 750785 - DNA, 100 bp, Homo sapiens
ggtttctccccgacggcgtcgggaggagttgatccccctcatattgtgtacagcatgtctacatcctgagcctaaagagcgagatcagcttctccacata

SEQ ID NO: 750786 - DNA, 100 bp, Homo sapiens
gcgactgcccgcaccccctccgcgggggtcccccagagagacagcctggagctgttgcccaaagaattggaagtcatttagttccaactgctactttatt

SEQ ID NO: 750787 - DNA, 104 bp, Homo sapiens
acaacaaaatggttttccactccattgttgttagaagccagtccaagccttatgcatttgatcgggtgttccagtcaagcacatctcaagagcaagtgtataat

SEQ ID NO: 750788 - DNA, 100 bp, Homo sapiens
ccgcactgtccagcccaagcctgactatggtatgatctcatgtaccagtgctggagtgctgaccccaagcagcgcccgagctttacttgtctgcgaatgg

SEQ ID NO: 750789 - DNA, 73 bp, Homo sapiens
gcaccacctcctgctgccttcccgtcgccgctcccgaagcttttccaggttactgaagctaaaggagatgttt

SEQ ID NO: 750790 - DNA, 98 bp, Homo sapiens
catctactgggtcagcttcatcctcggcggcggtggccgctagctccaaggaagagccatcgcctgtgacactgggtcgaaggagttctggccgacag

SEQ ID NO: 750791 - DNA, 88 bp, Homo sapiens
cgggaacgtccactcccgcgcgcccctctcggggaccagggcggcctcccaggaggagcttgcttatttgcactaatcttgatgaact

SEQ ID NO: 750792 - DNA, 50 bp, Homo sapiens
attggacctcaatacctataacgtcgaaataggaaggttgttgattactc

SEQ ID NO: 750793 - DNA, 100 bp, Homo sapiens
tcaggggaatataatcctgaggtgtttgacaaaacataccaattcttgaatgacatccgagcgaaagagaaagagaacctcaagaaggcatgaagccagc

SEQ ID NO: 750794 - DNA, 85 bp, Homo sapiens
tcgaagtgcgcaaacttgacactcaccctgaccgtttggctttggttgaaataagaatttagcctgtatgtactgctttaactcc

SEQ ID NO: 750795 - DNA, 74 bp, Homo sapiens
ttcctggtgatattgtagaaattgctgatactgcaggcaaacagctcgccgaggtgtcccatgggggtttaaaa

SEQ ID NO: 750796 - DNA, 50 bp, Homo sapiens
ctttttgatgcttttgtcagtgtactggcattccagttggcttttgagtg

SEQ ID NO: 750797 - DNA, 50 bp, Homo sapiens
gagacctactgcggaaagtcgggaatcaggaaacccaggcccaacggcag

SEQ ID NO: 750798 - DNA, 101 bp, Homo sapiens
cagcagccaaggtgtttccaggaagttcagagagaacagcaacatggccaacgccctggccagcgccacttgcgagcgctgcaagggcggctttgcgcccg

SEQ ID NO: 750799 - DNA, 100 bp, Homo sapiens
ccgacatgtctctagtggcggaagccttcgtctcccagattgcagggccatcgatgcacccctcggagctaatagcggagatgagaaacagtgggtttgc

SEQ ID NO: 750800 - DNA, 51 bp, Homo sapiens
aacttcatagatgaacagcatgattcagactctcaaagatgaagacttttg

SEQ ID NO: 750801 - DNA, 97 bp, Homo sapiens
agctcctattctgattgctacagatgtggcctccagagggctagggcaaatgtgccagcaaagccatgtactccattgacatcaacgatgtgcagga

SEQ ID NO: 750802 - DNA, 82 bp, Homo sapiens
gccgagcaggctgagcgatacgacgacccctttgctgatgcaagtaagggtgatgacctgcttcctgctggcactgaggatt

SEQ ID NO: 750803 - DNA, 110 bp, Homo sapiens
cgcgagcgccgcgaacttggtggccagcgccgcgcccggggccgtgcgctctcgggccactcggccgcaggtgtatacatttccaaatactccgactgtcttcattcaag

SEQ ID NO: 750804 - DNA, 122 bp, Homo sapiens
ggaagaccgcgcgcagggcctgcagcgggagctggacggcgagcgcgagcggcgcgagaaacaaattgtggctactaatttgccccctgaagatcaagatggctctggggatgactctgaca

SEQ ID NO: 750805 - DNA, 75 bp, Homo sapiens
agataaaatgacgacgtccttctggaagaggcgaaactggtgttggagcgggccggagagaagtagagtgggctg

SEQ ID NO: 750806 - DNA, 75 bp, Homo sapiens
agatgatgcggtggtgggggacctgccggcacgcgactccccccgggcccaaattcaaaaggtgatgacctatca

SEQ ID NO: 750807 - DNA, 75 bp, Homo sapiens
gcatcaaactcagaacttactcctagtgagagccttgctactactgatgatgatgctaaagagcaggtaagccct

SEQ ID NO: 750808 - DNA, 100 bp, Homo sapiens
cctttcattgtatgtatgacctatgccttccataccccagataaactctgcttcatcctggatctgatgaacgcttggaagctcgaagtctggctgtggc

SEQ ID NO: 750809 - DNA, 100 bp, Homo sapiens
gacatgatgcaatcttcaggaaagtaagagggcagaggtgtccaggacctgcctgctcacggttcgtgtcctgcaggcccatcgcctaccctctaaggac

SEQ ID NO: 750810 - DNA, 51 bp, Homo sapiens
gaaattgaaagagaagtgctcttagaaaagagcaagcaccagaagcaccag

SEQ ID NO: 750811 - DNA, 82 bp, Homo sapiens
ggaccgtgtgctgccactgcgggggcaagacgaaggactggagactgatgcatgagggggctacggaggcgcaggagcggtg

SEQ ID NO: 750812 - DNA, 82 bp, Homo sapiens
cgcgcaggagcctcccggagctggtcaaaatgcagatcttcgtgaaaacccttaccggcaagaccatcacccttgaggtgga

SEQ ID NO: 750813 - DNA, 83 bp, Homo sapiens
ttcatctcttgggtgagaagatcctgggcagcctccagcagggacctgtgacagacttcccagactcccggccagccatcgag

SEQ ID NO: 750814 - DNA, 98 bp, Homo sapiens
gctgcttcccgtccgctgtcctctgctgccagtcccctgccccgggcaaagcccatctggtccgccgagcaggtaaagggagaagatgaggaagagaa

SEQ ID NO: 750815 - DNA, 98 bp, Homo sapiens
tggatccccttactagtttctctgtgagagaaacttccactccattggaaggattaatggagcctggagaaaaattgtatggcgacttcttgagctgg

SEQ ID NO: 750816 - DNA, 82 bp, Homo sapiens
cacacacgttctgcaaagtcgacaagaatctcaataacagtatggtgatcgaggaaacatctcaacatcttctaaaccagcc

SEQ ID NO: 750817 - DNA, 100 bp, Homo sapiens
tggtgcccggcgaggagaaccaactggtcccgaaagaggtctcagtcagtctctccacctccagttctctccccaccaaggagtcccatctacccgctca

SEQ ID NO: 750818 - DNA, 100 bp, Homo sapiens
aagtccgggagctgggcggccatttaccagccactgtcagaccacggaatgatgtggcccacaagcagctctcagcttttggagagtatgtggctgaaat

SEQ ID NO: 750819 - DNA, 83 bp, Homo sapiens
ccgtgaaccttagggacaacaccgggacacccgcgaggccggaaaatggctaaccttgccgcgggccgagccctgcctcgcca

SEQ ID NO: 750820 - DNA, 114 bp, Homo sapiens
gaacccgggaaaagaggaactaaggcggaggaactgagacgtttcgaattccagttggtagctggcagtgttgtgatggcttttgaagaagtatgcccggacagaatagatctg

SEQ ID NO: 750821 - DNA, 89 bp, Homo sapiens
ccaccattttcaaggtgtttaataggaataataataaagtcttcgaatgtggtcaggtcttattgaagttaaaacagatgagtttcctc

SEQ ID NO: 750822 - DNA, 100 bp, Homo sapiens
ggaacactctctgaggaagcccaactcctatgagctcctctctggcaggtgtcatggagaaactccagctgggcccagagattctgcagcgggaaaatcc

SEQ ID NO: 750823 - DNA, 75 bp, Homo sapiens
cagtttcaactttatcagaggttaaaatttgaaagaggtgctggagaatctggtaaaagcaccattgtgaagcag

SEQ ID NO: 750824 - DNA, 73 bp, Homo sapiens
acaaatccgggggcaaggccaaaaagaaggatatgggccctcacattttccaaacctgtccatctgctaacta

SEQ ID NO: 750825 - DNA, 75 bp, Homo sapiens
gaatgggcggatctcatatcttcacttggcaaactcaacaaggcatgttatttgaaagcaattgagacgcaaccg

SEQ ID NO: 750826 - DNA, 100 bp, Homo sapiens
ggagggcgagcgaggaggatggcggagtcggggctcctgacgacttatgaaaatatgcatcagtttaatactgtcttggaattcatgagatggaagcata

SEQ ID NO: 750827 - DNA, 50 bp, Homo sapiens
cgtttgaatccaggaaagggaggtctgagtgtacggtttgcagatatgcc

SEQ ID NO: 750828 - DNA, 98 bp, Homo sapiens
aagacgccctggtgctcaccaagcaaggagagctggagctgctggcaggagaggtgccggcccgaagccctggggcgtttgacatgagtggggtcagg

SEQ ID NO: 750829 - DNA, 75 bp, Homo sapiens
ctgggtgatgacatgggacttggaaaaacagtacagcttcagaatggcagaagatgatccatatttgggaaggcc

SEQ ID NO: 750830 - DNA, 90 bp, Homo sapiens
gccttactatttgaaacatccctcacattgaaatatggattggtagcttatgtcgatcttgatgaaagagcaattgatgctctcagggaa

SEQ ID NO: 750831 - DNA, 75 bp, Homo sapiens
gggatggagaaggaggaggaatcggtggagcccgagaagttgaagacactaacagaaggtttggaagcctacagc

SEQ ID NO: 750832 - DNA, 78 bp, Homo sapiens
acatgtactacagccagtcttctatgtttccacatcggtcagaaaaagatgtacctagtcgatagtcgctggttcaaa

SEQ ID NO: 750833 - DNA, 98 bp, Homo sapiens
actttagttcatgtgacagactggatagagaagaaactggagcaagagtttcagatgtctttggtggacttgggaaagaggttgctagaagcagcaag

SEQ ID NO: 750834 - DNA, 112 bp, Homo sapiens
ccgaactccaggacagcatccaggcctcattggacagcattcgaggaccaagaatcgccttcagccctgtctggtgcatccttggcagaaagtgaggaggaaaacaccccca

SEQ ID NO: 750835 - DNA, 75 bp, Homo sapiens
cagaagaagggaaggcgcgagtgaggaaaggaggtactgtaggactttctgaagaccttttcccccgatgtcttc

SEQ ID NO: 750836 - DNA, 90 bp, Homo sapiens
ccgcttcaggtcctgggtcgatgtctgtctatggaataaagccccgtcagaatgttatggaacagttcaatcctgggctgcgaaatttaa

SEQ ID NO: 750837 - DNA, 100 bp, Homo sapiens
cgcagtggtcgcttcttctccttgagcacgaacttccaggagccggtgcagccgctgacacagcagcaggtggcgcagatgcagctgaagtactacaact

SEQ ID NO: 750838 - DNA, 80 bp, Homo sapiens
tacatggacttactcatttcattttcactgcagcctagagcgtaagtctatgctccatcagcaagcactgccgactacaa

SEQ ID NO: 750839 - DNA, 141 bp, Homo sapiens
cgtgaaaaaaaagacctgctttgccctgggaaatagtaaccctgccaaatacatcagcttgtaggagacagaggtttcagaaaagggatccctaacatcagaagagtttgctaagcttgtgggaatgtctgtcctcctagc

SEQ ID NO: 750840 - DNA, 100 bp, Homo sapiens
cctggctccccatactagtcgccggctttggccaaagagttgcaaaatgatgtccatgtggtaaggcgacaaataagagagcttaaaaaaatgaagaaaa

SEQ ID NO: 750841 - DNA, 100 bp, Homo sapiens
tgggcatgtacaacaccgacgagatcgagaacggctactttgtacactactttgcccccgagggcctaaccacaatgcccaagaatgtggtctttgtcat

SEQ ID NO: 750842 - DNA, 74 bp, Homo sapiens
ggtggactcggcccgcggcggcgcgctcacccgccccgttcaggttatgaagacagtatggagtttccagacca

SEQ ID NO: 750843 - DNA, 100 bp, Homo sapiens
gcacagggaacagtccagcttgaagttgtggaagtctggcaagttgatgagcagatagatcactacaaggaaagccaagacaaacttccttggcaagctg

SEQ ID NO: 750844 - DNA, 75 bp, Homo sapiens
ctcctgcgagaagcaagcggaacttcctgaggtcttgagtcaccacgtccgaatataattcttgggttagtaatc

SEQ ID NO: 750845 - DNA, 51 bp, Homo sapiens
gtttgtgccttctataataaaaaggtacatcaggaacgtctctatcaagaa

SEQ ID NO: 750846 - DNA, 100 bp, Homo sapiens
ctgacaggaggaccagccccagggagcctgcaggaccccagcaccccactcctgaacctgaatgagcccctggagacgaggtttccccatgttgcccagg

SEQ ID NO: 750847 - DNA, 75 bp, Homo sapiens
ccaaggggcagacccaaaaaactggtgaccctggcagcaaccccaacaaacgccagaggcagccccctctcctgg

SEQ ID NO: 750848 - DNA, 96 bp, Homo sapiens
gtcgacatgagtgatgtggaggaaaacaacttcgagggcagagaagatgatgagaagcttattgaggaaatccagaaggaggctgaagaggaacag

SEQ ID NO: 750849 - DNA, 101 bp, Homo sapiens
aaatccgggggcaaggccaaaaagaaggtgaagggaatttggccgcagcccatgccaacactggtcccgaggagtcagaaaatgaggatgatgggtatgat

SEQ ID NO: 750850 - DNA, 100 bp, Homo sapiens
ccggagccgcggcaacgtgcagctggaagcgggcgaggacgtgggtcaggtgcgcgcggagccatggttatcatgtcggagttcagcgcggaccccgcgg

SEQ ID NO: 750851 - DNA, 73 bp, Homo sapiens
tttgtggataagacagtcccacagtccagattcatgatgttgctatcaaaagttgagaaattgtcagaagaaa

SEQ ID NO: 750852 - DNA, 98 bp, Homo sapiens
ttaagaaacatcgagtcactttgcctggacaggaggaaccctgctaccacatactgttgattgtgatgaaatgccagttgaagcacctgtcctgcgag

SEQ ID NO: 750853 - DNA, 100 bp, Homo sapiens
gactgtggtgcgcctgcagctctgggatatcgcagtgaaccaaggactgggttttgctctggaagcctgtcctgattgcttctgtaatctggcgctatgc

SEQ ID NO: 750854 - DNA, 90 bp, Homo sapiens
ggggatgaggacgacgatgaagtcagtgaggaggaattacatgaacgacagccttcgcaccgacgtcttcgtgcggttccagccagagag

SEQ ID NO: 750855 - DNA, 100 bp, Homo sapiens
tttgcgttcgggctgggagcgtgctttccacgacggtgacacgcttccctggattggaattatatccagatcgagagacagaagattctgaaagggttca

SEQ ID NO: 750856 - DNA, 100 bp, Homo sapiens
cccagagactgctgagcccgtccgtccgccgccaccacccactccggacacagtctctgctttctatccgtcaagatgataaagtcgtgtgcccgagaac

SEQ ID NO: 750857 - DNA, 99 bp, Homo sapiens
tgcagtgttaagttatgctgtggaggaagaacatgcatatttgggtccaactgtgaagccagatgataaggagctcttgtccctggcaaagcgaaagcg

SEQ ID NO: 750858 - DNA, 98 bp, Homo sapiens
ctgtaagaacagaaaatcgtcttatagttgagaatttatcctcaagagtcagctggcaggcatggaggagtgacggcaggaactttctgtgctctgac

SEQ ID NO: 750859 - DNA, 100 bp, Homo sapiens
tcctgccaagcttccaaagccacccgttggacccaagccagcaagccttcaatgccacggctgtggtgcggcacatgaggaaactgcagctgggcaccag

SEQ ID NO: 750860 - DNA, 100 bp, Homo sapiens
gcaggatgaagaaggacgagtcgttcctgggcaagctgggcggcaccctggccaggaagcggagggcgcgcgaggaccatcatcaaagaggggatgctga

SEQ ID NO: 750861 - DNA, 75 bp, Homo sapiens
agcgcatctaccagggctccagcggaagctacttcgtcaaggaccctcaggggcctgaaaatgaaatttcttcag

SEQ ID NO: 750862 - DNA, 75 bp, Homo sapiens
aaaaatgtgcatactcacagagttagagagagggatggtgctctgcagtggaggatcagtgactgaccttgtgaa

SEQ ID NO: 750863 - DNA, 98 bp, Homo sapiens
tacggagcataggaggaaaattcatcatctggtgtctgtttcatgtggaatacctgacttcaggtcaagggatggtatttatgctcgccttgctgtag

SEQ ID NO: 750864 - DNA, 100 bp, Homo sapiens
gtctcacccttcggcctccgcacttctccatatggcagcagcctggacctcagcactggcagatggtgtcggacggcatgacaggcagcaatcctgtgtc

SEQ ID NO: 750865 - DNA, 100 bp, Homo sapiens
ctcccacaccttcgtccccatcttgggcattcatgggggcgcatctatgatcatggctgacaaggatgaacgtgaagccagagaaaatgtgaagagagag

SEQ ID NO: 750866 - DNA, 98 bp, Homo sapiens
aaccgcagtatcatgctggccaagaagatcatcattaaggacggaggcacggttggtgttcgaggaagagacattgttgttcttggtgtggagaagaa

SEQ ID NO: 750867 - DNA, 99 bp, Homo sapiens
ggttgcagggtgtccgcttcctcaggggctatcaacagcaggacgcccatgaattcatgcgctaccttttggaccacctacacttggaacttcagggcg

SEQ ID NO: 750868 - DNA, 100 bp, Homo sapiens
gccttccatagggctgagtctgggaccgaggttatgatgtgattgctcaagcccaatctgggactgggaaaacggccacatttgccatatcgattctgca

SEQ ID NO: 750869 - DNA, 100 bp, Homo sapiens
cggtggcaggagggccggcggagcgccatggcctgcatcctgaagattggagacccacagttggtgatctgtatggactgctcggcagacaccatgacca

SEQ ID NO: 750870 - DNA, 87 bp, Homo sapiens
ttttccccagcatcatcttccccacacaatatatggtgagcaagcacttattttagaggagattgcaattgattgtcataataagga

SEQ ID NO: 750871 - DNA, 90 bp, Homo sapiens
accactcaagagtcataggattagatgatccaagtcaccaagaaattactgtctcaagtgatacggcgtcacaatgtagcagggacccca

SEQ ID NO: 750872 - DNA, 98 bp, Homo sapiens
cgctggtggagcacgcagctgacgaagctcgggacaggatcaaccggttcctcccaggcggcaaggtgaaagaacttgtcctggacaacagtcggtcg

SEQ ID NO: 750873 - DNA, 75 bp, Homo sapiens
agccgatccagcctgcggagcctgtggggcagcagcgtccgtctccaagagagtatgaagagagtgcgtctgtag

SEQ ID NO: 750874 - DNA, 100 bp, Homo sapiens
gcaacgtgttggaccttccggagcttctcagaagacagagggttttcttttgagtgaacagcagagaatttcaaaggaccttgctaatatctgtaagacg

SEQ ID NO: 750875 - DNA, 90 bp, Homo sapiens
cgccgcccaggagacccctctgctgcaccacttcatggttgaaattgtaacacacactggaccccatagacgtctgtggatgggtccaca

SEQ ID NO: 750876 - DNA, 75 bp, Homo sapiens
gtcagccatgtgagcactgggggtggtgccagtttggagctcctggaaggtatgacgattactactattatggtc

SEQ ID NO: 750877 - DNA, 83 bp, Homo sapiens
gaacatgacgcaggtgcaggtgtctcttctcgccctggcggggaagattgaggacgagacgcaggtgtcacgggccactcagg

SEQ ID NO: 750878 - DNA, 100 bp, Homo sapiens
gagatggtcaggtctggagctcgaccgggccagaccagttaaagaccctgcagaggaattacggcaggctgcagcaggatgtcctccagtttcagaagaa

SEQ ID NO: 750879 - DNA, 50 bp, Homo sapiens
ctgaagagggaagacacgcggaaacaggagacagaagaaattctggcaga

SEQ ID NO: 750880 - DNA, 100 bp, Homo sapiens
ctgttccctgcgcggcatggaggggacggccgtggccgtgttcgagcggaacggaagccgccccttttcaacatgaatgcaatgagtgccttatatcaca

SEQ ID NO: 750881 - DNA, 100 bp, Homo sapiens
gccgcacccggtcctcagcgactcttctgacctccgcgcgacgtacccgccgccgccgttggctggagacatccacgacagcgatggcagttccagcagc

SEQ ID NO: 750882 - DNA, 100 bp, Homo sapiens
ctacgaggacatcgctcagggcaccaagtgcaccctggagttccaggccacccacgagccagcgggaaaggattgccagccagagaaagacgaactccga

SEQ ID NO: 750883 - DNA, 75 bp, Homo sapiens
tggagacactggcattggaacttcctgttctgatagcgtggaagagagtcccacgaactggctgggtatacagaa

SEQ ID NO: 750884 - DNA, 101 bp, Homo sapiens
taggaagctcgggcgctccggctgtaaggagccgcggcggggggaaaatggagcccttcaccaatgatgtacagatcagctctcaaaatgtcttctgtgtc

SEQ ID NO: 750885 - DNA, 75 bp, Homo sapiens
gccagctacggtccgcggctggggttccctcctccgtttctgtatccccacgagcctgccacagtgactcaggtc

SEQ ID NO: 750886 - DNA, 82 bp, Homo sapiens
ggagtaggacttgtgcattcaaacatagcaactgaggatgtctcagtggtacgaacttcagcagcttgactcaaaattcctg

SEQ ID NO: 750887 - DNA, 98 bp, Homo sapiens
cgtggagcacgtgcacagcttcacgccctggatccaggcccacgggggctggaaggagcatttctaccagaggcagcaccggctgcccgagccctcct

SEQ ID NO: 750888 - DNA, 100 bp, Homo sapiens
ctggaacagagcggcactcggcctgagcgggtgaaaattgatttgcaagtgaccatgcctcacagctacccctatgtagcattgcagctgtttggacggt

SEQ ID NO: 750889 - DNA, 98 bp, Homo sapiens
tccaactgatgcttattacaagctgcgccacattgtggatgaggtcaatggattaataagacacatcatctcagagttggagcacctgacgtttgtca

SEQ ID NO: 750890 - DNA, 80 bp, Homo sapiens
cggatggaaatcctaatgacagtctccaaattcgcctccatctgtaccatgttactccacaggatccgctgaacatagga

SEQ ID NO: 750891 - DNA, 101 bp, Homo sapiens
caggccgcggaggaggaggaggtggagttgctgcccttccggagtccgccccgtgaggagaatgctgcaagctttcttcctggtggcagatgacatcatgg

SEQ ID NO: 750892 - DNA, 106 bp, Homo sapiens
ctcggacttccaatatgagaatgccaacatgtggttcaagaaccttgacaagctcatccggctggtaaatgcgcagaaatcctaagtaatgcactgaagagaggag

SEQ ID NO: 750893 - DNA, 80 bp, Homo sapiens
gaagaactcttagattcttatcacaaccaagtagaactggctcttcaaattgaatatacaattggaccgtggatgaggtg

SEQ ID NO: 750894 - DNA, 100 bp, Homo sapiens
actgtcaccgagccgctgcggccagacctgcagccagttacctactgcgagccggccttctggtgctccatctcctactacgagctgaaccagcgcgtcg

SEQ ID NO: 750895 - DNA, 101 bp, Homo sapiens
gctgcggcctgtatcaccagaggagattagacgtagcagattaggtccaccttcatccgaagaggctgaatcataaatataacccagtgtcacttcccaaa

SEQ ID NO: 750896 - DNA, 83 bp, Homo sapiens
taggatttaaccgctctctgcctcccaggtgtccctggccagtgtccttccacctgtccacaagcatggggaacatcttcgcc

SEQ ID NO: 750897 - DNA, 98 bp, Homo sapiens
gagatctgatcctgattgcagaaccttccctgattacagaatcttgggtgagacatggaatccattaaaattgcattatcagttaagaaatgtacggg

SEQ ID NO: 750898 - DNA, 98 bp, Homo sapiens
ggacatctccctggacgaactcatcaggaagcgcggggcggcggcgaaaggacgatttggagcaagaggtggtggtggccttcccccgaagaaatttg

SEQ ID NO: 750899 - DNA, 99 bp, Homo sapiens
cggattcctctgccaatgaccgtggaggagtaccgcatcgcccagctgtacatgatacaggttaatgttcgtgaagaaattgaagagttttttccaaga

SEQ ID NO: 750900 - DNA, 82 bp, Homo sapiens
cgaactgggtggcgaacggggcgagcctggaggattgtcactccaacctcttttcgctggtgacttaagagattaaaattaa

SEQ ID NO: 750901 - DNA, 100 bp, Homo sapiens
gacaagaagattatgacagattacgccccctatcctatccgcaaacagccttctccacagtaggcactcctgactacattgctcctgaggtgttcatgca

SEQ ID NO: 750902 - DNA, 100 bp, Homo sapiens
cttcaagacagctgccacctttgctcggcgcctactagaactcgggcccaagcctgaggtggcccaacagaccccccaccccctggattttccttctccc

SEQ ID NO: 750903 - DNA, 100 bp, Homo sapiens
tgcttcctctacccctgtatttcgctgggctctctaaatggattcagctccagtgagaaggcaaccaaagtgcaggacatcaaaaacaacctgaaagagg

SEQ ID NO: 750904 - DNA, 88 bp, Homo sapiens
aacagttctctcaatacataaagaacagcgtaactccagacatggttctgtggatggagttataaaggaagtgaatgtgagcccatgc

SEQ ID NO: 750905 - DNA, 82 bp, Homo sapiens
gagcccgcggagtatacaccatgagcaaagctcaccctcccgagttgaaaaattgaaacattgtagtcggtatatacatgac

SEQ ID NO: 750906 - DNA, 95 bp, Homo sapiens
aacttccttaaaagacaaaatattggagttgcaacctttataggtttagataagggtgatcttgatactgcagcagtaaaagtggaatttgatga

SEQ ID NO: 750907 - DNA, 97 bp, Homo sapiens
agaggatgagcaccagatccagtttgctgtgccacagtgggctatttagatcaagaaggtaatcctatggggtttgctggacttgtatcacatttgc

SEQ ID NO: 750908 - DNA, 74 bp, Homo sapiens
tttatatcctgacactatgaatgctacttggatgcctcttaagtatgccatggaacctaattatctgcatattt

SEQ ID NO: 750909 - DNA, 90 bp, Homo sapiens
gtttacttgtaaatatgcagattatatttctagggacaaacctatcacatttactcaggtggccagacaagcacaaacctctcaggagcc

SEQ ID NO: 750910 - DNA, 100 bp, Homo sapiens
ccacccatcaccccctcctcttcattccgcagcagcactccgacagcaactcaagcatcccaaccttgttaacctcctggaagtcttcaggaggaaacgg

SEQ ID NO: 750911 - DNA, 74 bp, Homo sapiens
gactcttctcaaatgccttctcatccccacataatcaacaaactccatttatgtaaacccctaattagagcaat

SEQ ID NO: 750912 - DNA, 75 bp, Homo sapiens
attgaacgggtcgagatgccgacggacatcgcggtggaggaagatctcagcagcactcccctattgaaagacctg

SEQ ID NO: 750913 - DNA, 50 bp, Homo sapiens
ttggtcacttgaaccttgggaatattgagctatctcacgtgagagggcag

SEQ ID NO: 750914 - DNA, 75 bp, Homo sapiens
tctgaccaccgtgatgagcccctgtggaggtgaagacattgtggcaaaccagtccagctacgggggcccagccag

SEQ ID NO: 750915 - DNA, 50 bp, Homo sapiens
cggaagtagcaaggctgacaccaggacaacaccttccatccacatatggg

SEQ ID NO: 750916 - DNA, 100 bp, Homo sapiens
acctgacctctgcaaaattccttctctaccttggtcattctctctctacttggactgcagcagaagttggaataattgagagtattcacctaaaaaactt

SEQ ID NO: 750917 - DNA, 91 bp, Homo sapiens
gaggcgaggcgaggaagggagctggaataacaaaggggaggacgaggaagaaacgaacgtgatagttctcagctacccccagtactgccgg

SEQ ID NO: 750918 - DNA, 100 bp, Homo sapiens
ttacgcagcaaaccatccagaaggacacagcattgttggttttgccatgtactattttacctatgacccgtggattggcaagttattgtatcttgaggac

SEQ ID NO: 750919 - DNA, 74 bp, Homo sapiens
aggaagagggttggaggcaaagttccgaatagggatgaggcatacgtgaacatacatatgatagttgagaaaga

SEQ ID NO: 750920 - DNA, 82 bp, Homo sapiens
cgcggatctcaccgccgctcaggttatagctgaggtggtaccagtttaagaagtgagaacttcttcactgactgaaatttgc

SEQ ID NO: 750921 - DNA, 88 bp, Homo sapiens
gggctgggccgggctgggctacgcgcacgggctcggccgccgcccctgccggtattgttgcagcatctggcagtgagactgaggatga

SEQ ID NO: 750922 - DNA, 100 bp, Homo sapiens
attgaaattacctccgagggaaacaagaaaacatcaaagaggtctagcaaagggtagaatggttttgaagaagaaaaaacctgctttctgactgattttg

SEQ ID NO: 750923 - DNA, 101 bp, Homo sapiens
tgcgcggcttcctcaacttcacgctggcgcgagccccgtcctccttcgccgccgcgcacaaccgcacgtgcagcactctcgagtggaccctgaggagctct

SEQ ID NO: 750924 - DNA, 100 bp, Homo sapiens
acccatgcctatgatattcttctcctggttaatcaagaattctctatttctgctccgtcatccatgccactatgccttcaattaagttgcagagttctga

SEQ ID NO: 750925 - DNA, 75 bp, Homo sapiens
cgtgggtggaaacaccccaaggaaggtactcgtcctcacaagtgcccagactgcgacatggcctttgtgaccagt

SEQ ID NO: 750926 - DNA, 98 bp, Homo sapiens
tacgcctagaacagtgccctctgcagctgaataacccttttaacgagtattccaaatttgatggcaaggtccttaatcacttgcataaaaagttgaag

SEQ ID NO: 750927 - DNA, 83 bp, Homo sapiens
cgcttcctggcatgtcagagaacccctccgtctatgtgcctgagcgccgccctgtgctgggctgccgggagctcgtcttcagg

SEQ ID NO: 750928 - DNA, 82 bp, Homo sapiens
gctggcgagcgccaccgcatggatgcggcattccaaaagaactcactgtcctgattgggatagcagagaaagctggggacat

SEQ ID NO: 750929 - DNA, 99 bp, Homo sapiens
tctggacgtcctgtcactccacctcgaacagctaatccgccgaagaaaagtgacttctgacagctctctccatggaaggaggcggcggccgcgatgagc

SEQ ID NO: 750930 - DNA, 78 bp, Homo sapiens
gtgcgcaaacttgacactcaccctgaccgtagtattattgattccacagaatacagccaacctccaggtttcagtggc

SEQ ID NO: 750931 - DNA, 75 bp, Homo sapiens
tccgatcgacccggtaccaagaaggggagtgcccgcggcaggaaagaccacagcaagattctttcattcgtctcc

SEQ ID NO: 750932 - DNA, 74 bp, Homo sapiens
ccgaagccccctgcaggaactctacaacccaatccagcagcagcagctccaggcgcagcacctctcccatgcca

SEQ ID NO: 750933 - DNA, 82 bp, Homo sapiens
cggctcccgcaccatggaggaggacgacagctacggtgtggacactgccagcggctgcagccgacttggaatgacctgggag

SEQ ID NO: 750934 - DNA, 108 bp, Homo sapiens
cacgctgagagggacacgcagtgacgagcggccgaagcagctttgcggcctcattgctacgatttcagagtaccctggtaatagctgagcatgcaaatgattccctag

SEQ ID NO: 750935 - DNA, 98 bp, Homo sapiens
ttagctcagcaattcttaccttgaaagaccacagcaagattctttcattcgtctcctcctagcctgggggaccaggctcgaactgaccctggacatca

SEQ ID NO: 750936 - DNA, 125 bp, Homo sapiens
tagcaaatgaagctgaatttatcctgagcaggcagagagcagaagatattcacagacatgcggaatttgaggcagatatccaagtagagcagaaccggcaacacttctatgaactgtctctcgag

SEQ ID NO: 750937 - DNA, 75 bp, Homo sapiens
gttaaagagagacagtggacagtattggccaagcgtataccatgcaatgccttatcacagtgaaagctgtagccc

SEQ ID NO: 750938 - DNA, 95 bp, Homo sapiens
aaaattacaacacaaagaattggagtcacaggaacagattgaaatcagcaagggatgtggttaccagaacaggacactcattggccttggggtcc

SEQ ID NO: 750939 - DNA, 100 bp, Homo sapiens
tcggtttctgagtccagccaacagcagaagagaaagccagttatccacggactggaagatcaaaagagggcagttgcagtggtgcagaatggctgacctc

SEQ ID NO: 750940 - DNA, 100 bp, Homo sapiens
gaagccccaggcacagtgctgcgccttattcaggatgcagtcacaggcctccagtacagcccagtccaggggggagatccatcagagaataagaagaagg

SEQ ID NO: 750941 - DNA, 75 bp, Homo sapiens
tctgcaacacctgtcaactccatctgcagtgttcaaggtggaaagttaccgaggctggacagtgtagtgagactg

SEQ ID NO: 750942 - DNA, 100 bp, Homo sapiens
gtggccgcgtcccactcctcaggccggggcgcacgtcggctcccacgcttagccagctcccgctgatggtgagaccattctaaaaggcctccagtccatt

SEQ ID NO: 750943 - DNA, 75 bp, Homo sapiens
agtgccctgaggaccagcttcctctggactatgccaaggccccatcacaggtatatggaggagtgacctactata

SEQ ID NO: 750944 - DNA, 75 bp, Homo sapiens
tacaagctttgtctccttcgacttggagtctttgtccaggacggaactgtggctgcaccatctgtcttcatcttc

SEQ ID NO: 750945 - DNA, 100 bp, Homo sapiens
agctgcggctcggacgccagcggacacgcgggcgaggatccctcatggaaccaccgggtataccgactggccctcgccaagctctcccctcctgtcatcc

SEQ ID NO: 750946 - DNA, 82 bp, Homo sapiens
tcgaatctcttctccctccccttcttgtttgtgaatagcacaatggaagaagctggactttgtgggttaagagagaaagcag

SEQ ID NO: 750947 - DNA, 50 bp, Homo sapiens
ttatacgtatgataatctggctcctagaaactggcgatggaatatgagag

SEQ ID NO: 750948 - DNA, 139 bp, Homo sapiens
agaagaccattcagatgggatctttccggatcaatccagatggcagccagtcagtggtggagtttttggctttcacccccaaccagtgaccaaagacttgaccactcaaagtccagctccccagaacactgctcgacat

SEQ ID NO: 750949 - DNA, 50 bp, Homo sapiens
acgcgggatagccccaaatgttacaaatttatcagactactgtcccctgt

SEQ ID NO: 750950 - DNA, 134 bp, Homo sapiens
tctgtctttgtgtcctgagatcaaatggcacttcattggccacctacagaaacaaaatgtcaacaaattgatggaaactggcgatggaatatgagaggagccctctggaaagaaaaggacagaccctgtgcttt

SEQ ID NO: 750951 - DNA, 100 bp, Homo sapiens
cacccgttctacgacgtggccagacatggcattctgcaggtggcagcatcctgaggttagcattacacttctcccagtggagcccatgacttctgatcag

SEQ ID NO: 750952 - DNA, 90 bp, Homo sapiens
agaaactgaggcctggaatttgattaactcattcaaggttacccagttgagatttcctggggaccaaggaggtatcactgctactgatgg

SEQ ID NO: 750953 - DNA, 78 bp, Homo sapiens
gggctgctggtgggccgcgtcgaagacatggaccagggctacggagcaggttacgggcaggacttgagtggcttcgga

SEQ ID NO: 750954 - DNA, 98 bp, Homo sapiens
cgcttcagtccgaaggaggaagggaaccaacccactttctcggcgccgcggctcttttctaaaagtttggtaggaggacagtttgatctggaaatgaa

SEQ ID NO: 750955 - DNA, 120 bp, Homo sapiens
ccgggatcgtgaccgagaccgtgaccgagagcgtgaccgagagcgcgaatatcgtcatcgttagaaggtgctggagaatctggtaaaagcaccattgtgaagcagatgaggatcctgcat

SEQ ID NO: 750956 - DNA, 75 bp, Homo sapiens
ttgctccattggcagaaaatgtaccttccactggaagaatctcaaacagcgctacttactcaggatcagtggcac

SEQ ID NO: 750957 - DNA, 73 bp, Homo sapiens
cccattattgacaatccaaaggtgcagaaagcactctgacaagtgaaactactgggccatggacagccactta

SEQ ID NO: 750958 - DNA, 74 bp, Homo sapiens
ccaaggtgcagacagctgtgactatgaagggggtggtttgttctggatgcagaaaccagagatctagtttctat

SEQ ID NO: 750959 - DNA, 90 bp, Homo sapiens
gggcaggggcggaggcggaggcagaggtggaggcgctttgaaagattgtcctgggtcacataatgccagctgagcgtaaaaagccagcaa

SEQ ID NO: 750960 - DNA, 82 bp, Homo sapiens
tggatactcagcgtcgctggcagccgctgtacttggatgaccgagtgggagacagcagcaccagcggtggcagagaccccag

SEQ ID NO: 750961 - DNA, 100 bp, Homo sapiens
ccgctggacgtcccgcggtccgccctcccgtgcgtccgtctgccggtgagcccgcccgcccgccggcccaggtgctggagaatctggtaaaagcaccatt

SEQ ID NO: 750962 - DNA, 80 bp, Homo sapiens
ccacagtccttctgcagtccctcgtccagccacccccagaaaaactgcttaaggttgaaaagagaaatttaagaaattgc

SEQ ID NO: 750963 - DNA, 74 bp, Homo sapiens
taagaagcaaaaaattcaagaaactgactaaagctatatgtggactggcatccaggctggagaagcagaacagc

SEQ ID NO: 750964 - DNA, 83 bp, Homo sapiens
gaaggcatttccagcccgcccacccagacaatgcagatcttcgtgaagactctgactggtaagaccatcaccctcgaggttga

SEQ ID NO: 750965 - DNA, 100 bp, Homo sapiens
gcactgactttcagctatggaatcgatcttatgccttcattcatccggcatggtccaacaattccaagacgaactgatatctgtcttccagattcaagcc

SEQ ID NO: 750966 - DNA, 102 bp, Homo sapiens
ccgccccgcgagcacagagcctcgcctttgccgatccgccgcccgtccacacccgccgccaggctgaaggggatgctaagggagataaagcaaaggtgaagg

SEQ ID NO: 750967 - DNA, 101 bp, Homo sapiens
cgcaagggatgtttatgttccaaacactacttacagcacaacattctgaaattttttggttattgtaatgatgttgatcgggagttgagaaaatgcctgaa

SEQ ID NO: 750968 - DNA, 100 bp, Homo sapiens
ccggtttctcccacatcgacctggttggtcctgcactttggtggtggtggcttcctggcattttataattgtcagttgtcttggagctcttccccagtgg

SEQ ID NO: 750969 - DNA, 75 bp, Homo sapiens
agctggaggtggacgccatcgtcaacgccggtgtcgtgaaaactacccctaaaagccaaaatgggaaaggaaaag

SEQ ID NO: 750970 - DNA, 82 bp, Homo sapiens
gcggaagaaaatacaaatcacacgcataatggatgaaaggaaccgacaggaaatgactataccctggtgcttaaggagagcg

SEQ ID NO: 750971 - DNA, 101 bp, Homo sapiens
ggcctcccagagtgttgggattacagtatttgtgtggaagtaatcgaaaagacaacatatttattgatcctggataccaaacatttgagcaagaattgaat

SEQ ID NO: 750972 - DNA, 82 bp, Homo sapiens
gcccctttcaactctacttcaacccgcaccttgtgttccggaagttccaggtgtgggcaagagcagtttactgttgcgtttt

SEQ ID NO: 750973 - DNA, 74 bp, Homo sapiens
aaggatttgatacgactgccataaacaaaagctattacaatgtggtgtacgaagccatcgacagcagagatgga

SEQ ID NO: 750974 - DNA, 82 bp, Homo sapiens
tgtttctctgctgcaccgacctcgacgtcttgcctgtgtcccacttgttcgcggcctatagagctgcaagcgtttgctcacc

SEQ ID NO: 750975 - DNA, 111 bp, Homo sapiens
aaggagattctgatgaagaagttattcaagatggtgttccattgcctaaagaggagaacatttctgctcccttgatctccagctccccagtgaaggcagcccgggagtatg

SEQ ID NO: 750976 - DNA, 101 bp, Homo sapiens
gaagacccacctttgtttcctagtgagaaccgagtcagtgctcttacccagcatgcaatgatgctacctgttctgacccatcatatccgctaccaccaatg

SEQ ID NO: 750977 - DNA, 83 bp, Homo sapiens
gccaagccgtgtggggtgcgcctgagcggggaagcccgcaaacagctgctggagccagttctgcttctcggcaaggagcgatt

SEQ ID NO: 750978 - DNA, 98 bp, Homo sapiens
gaggaggggggggtaccacacaacaccccagcaaacctccgggcccccaggcatggctagctcgactgtgccctgtccacggtgcctcctgcatgtcc

SEQ ID NO: 750979 - DNA, 83 bp, Homo sapiens
tgagaagaagcccagtagcgtgagggctctgtccattgtcctccccatcgggatgctgagaacttgctggagtcacagccact

SEQ ID NO: 750980 - DNA, 80 bp, Homo sapiens
cttcctctcgctgtcctggtacgcggcactcagcggccagaaaggtgtcgtgaaaactacccctaaaagccaaaatggga

SEQ ID NO: 750981 - DNA, 83 bp, Homo sapiens
gtctggactgatgaaaatccatatgagagatcaatgtcttattgtgatgagtctcgactgtcaaatcttcttcagaggatcac

SEQ ID NO: 750982 - DNA, 50 bp, Homo sapiens
gtccctggagcggccgccttccagcgacctacaagaacagtgaggagctt

SEQ ID NO: 750983 - DNA, 50 bp, Homo sapiens
ctaaaaattactgcggtgaacagattcttctaacagagaaaatgccattg

SEQ ID NO: 750984 - DNA, 103 bp, Homo sapiens
gtctgtctgctcctggcatgccctgccacagccactggtacaggtttgcagattccgccagcagcacagcaagctctacagatgagtggctctttggcatttg

SEQ ID NO: 750985 - DNA, 98 bp, Homo sapiens
tgcaacctccgcctcccgggttcaagcaattctcctgcctcagcctcctaagtagctgggactacagggaaggtggccatccagaaggaggacttgca

SEQ ID NO: 750986 - DNA, 97 bp, Homo sapiens
atcacaaagatacgaatctcttaaggggttctgattcaaaggagtctatgtctactgtgccggctgactttgagacagatgaaagtgtcctaatgag

SEQ ID NO: 750987 - DNA, 100 bp, Homo sapiens
cggaaggagatccgcagaggacagtcatcaggcagaagattttcgcaagctctggaaaactccacctcgagagaaagcaggcttccttcaccacgtcaag

SEQ ID NO: 750988 - DNA, 98 bp, Homo sapiens
ctgatgtggtgcttttgaaccactggaaagtgaggaattttgaagtacaccgtggtgacattgtatcattggtcggctccatactggatcacagcccc

SEQ ID NO: 750989 - DNA, 82 bp, Homo sapiens
gacaagctggggaagtaacgtttgcggatgcacaccgacctaaattaaatgaagggcgatcagtgggtgaccgcggctgcga

SEQ ID NO: 750990 - DNA, 83 bp, Homo sapiens
ggatggtccagaattcacttttactaccccaaagtttgagactctccaacatgtgccttctgaccatacaaatgaaacttcca

SEQ ID NO: 750991 - DNA, 73 bp, Homo sapiens
cacccataccttttgggcttcagaatgcagtgttttcggttctaagctggtctatgtccatcaccttcttgga

SEQ ID NO: 750992 - DNA, 100 bp, Homo sapiens
cggcgtccccggcgcgaagaggctggactcggattcgttgcctgaggcctttgaagactattacctggaccagaagcccacggtgaaagctttgctggag

SEQ ID NO: 750993 - DNA, 100 bp, Homo sapiens
ggcgtgcgcggacggtgtgcgggcctccagcacaaaggggcgcatggtgatgtctcgaggtggggagctagtaatggtgcccaatgttgaagcaatcctg

SEQ ID NO: 750994 - DNA, 49 bp, Homo sapiens
ttaccgtcatattccacccattactaagaattctccactttaccaatac

SEQ ID NO: 750995 - DNA, 132 bp, Homo sapiens
cggccctgaggatggacccaggagatcccgctggtgaccctgccgctggcgagcgccaccgcatggctgcatcttcctcccgtgaggctggccgagctccacgctgatctgaagatacaggagagggacgaa

SEQ ID NO: 750996 - DNA, 98 bp, Homo sapiens
tcctccctcttctcccgactatttggcaagaagcagatgcgcattttgatgggacaaacagaggatgtgcagatgctcctgcgctttggggcagatcc

SEQ ID NO: 750997 - DNA, 100 bp, Homo sapiens
gaagcacagtcagcaaaagcaaagacccctcggggctgctcatctctgtgatcagacaacagcagttctgtagagagtttaaatatgaaggaatggcagg

SEQ ID NO: 750998 - DNA, 80 bp, Homo sapiens
ggcggcgcgggaggtgaagttgctgctgttggaccatggtgaatccgggcagcagctcgcagccgcccccggtgacggcc

SEQ ID NO: 750999 - DNA, 74 bp, Homo sapiens
ccagagctacaaaagtttttccaggagtctactcttcatcttgtgttgagacttcgtggtggtgctaagaaaag

SEQ ID NO: 751000 - DNA, 98 bp, Homo sapiens
cagacagatgaagaaggcgttcgcaccggaaaatgtagcttcccggttaaggcactaagtgaccgcttcagcggtgagatccccgatgaccagatggc

SEQ ID NO: 751001 - DNA, 100 bp, Homo sapiens
tcagcggggaccgagcctgggaggccggccggtgccagcacctttcggcttctgagacggcggcagcagcggcattcagatgccggtggccgtgggtccc

SEQ ID NO: 751002 - DNA, 83 bp, Homo sapiens
ttgggcctcgcgccggctatggccgtgccctggggctgagccctcaggcattgccgtctgcaacgtgcccgcggcgtctgtgg

SEQ ID NO: 751003 - DNA, 76 bp, Homo sapiens
atgaatgccaaatgggacacgactggattatggacagaacttggaaatattgagaataatttcttaaagccacttc

SEQ ID NO: 751004 - DNA, 83 bp, Homo sapiens
ccagcagcgccggacccgggaagaactggtgagccaagggatcatgccgcgtataatgggtctctcccaaatggcgatagagg

SEQ ID NO: 751005 - DNA, 90 bp, Homo sapiens
cgcggcgcagtcttcctgctttggcgttgtctctcagataaactcatcctgaaagtcgctgttgttctcctgctgagcaagaatggaggc

SEQ ID NO: 751006 - DNA, 100 bp, Homo sapiens
ctcagcaacaggaatgtggtgcagtccgaagccaggttgctgaaggatgtgtctcacaaagaggaggaacccgttttcactagacaagacagcaatcgca

SEQ ID NO: 751007 - DNA, 82 bp, Homo sapiens
ctgctttggacgtgggagtcacctgaaagccaggaaatggctcaggatatcaaaaaactccccaggaatgggccccacaaac

SEQ ID NO: 751008 - DNA, 83 bp, Homo sapiens
tctgggtcacgggctggggacacacccagtatggaggagtgcctgtgaagaaaacggggtattgccctgaggcttatattctg

SEQ ID NO: 751009 - DNA, 82 bp, Homo sapiens
cccttctgggcccacgcggggatgtggcaaaggagcagagaactttgacaagttcttcacacgaggacagcccgtcttaaca

SEQ ID NO: 751010 - DNA, 74 bp, Homo sapiens
cagcgcggacctagacctggaatcgcccaagtccctctactcgcgagcatcctggtggggaagaagttttaagg

SEQ ID NO: 751011 - DNA, 74 bp, Homo sapiens
cggagtaccagcacttcatccagcagtgcacaggagaaggaagccaacatccttttggagccatgaatattgtc

SEQ ID NO: 751012 - DNA, 75 bp, Homo sapiens
caggactgaacagggagccaactgtttctttgaacagtaaatcaggattctcagctggtagctggtgttgcattc

SEQ ID NO: 751013 - DNA, 75 bp, Homo sapiens
tgagacggtgtcccgccgaaaggttcctgttgctagagcaagtattctttggctaattggagaaaactgtgaacg

SEQ ID NO: 751014 - DNA, 75 bp, Homo sapiens
acatctgggtgtatatcaaacggcaagatgtccagtaatgtcccggcggatatgaacctaaaggcagacccagaa

SEQ ID NO: 751015 - DNA, 95 bp, Homo sapiens
gactttcaaacatctgaagatgacaatttattagatggtgacactgcagttgctggacagactccaccacgtccacccttaggtcctccaggccc

SEQ ID NO: 751016 - DNA, 82 bp, Homo sapiens
tcagccttaccaagcaacaagtgaaattgaggtcacaccttcagtccttcgagcaagtctctaattaacagaagatggcaaa

SEQ ID NO: 751017 - DNA, 130 bp, Homo sapiens
caccggagacttttggggggaaactaggtcgatggtcggcggcgcccggatgggcagctgagctggagaatgctggaggagaccttaaggatggccaccaccactatgaaggagctgttgtcattctgga

SEQ ID NO: 751018 - DNA, 100 bp, Homo sapiens
actgccttcctcctgtaggataaaagtaaggacagaactgtaccgctctctttttggccagctccaccctcccgacgaaggccacggggattgacatcgc

SEQ ID NO: 751019 - DNA, 75 bp, Homo sapiens
gtcttccccggccggtccctcgcctcccggccgagctgacgttgttgacctcctgtactggagagacattaagaa

SEQ ID NO: 751020 - DNA, 54 bp, Homo sapiens
gcaactctccgggcggccgcacctgccagaacttcatggaggaacacggagtga

SEQ ID NO: 751021 - DNA, 76 bp, Homo sapiens
agatggccgacttcgatgatcgtgtgtcggatgaggagaaggaaggtgcattcgcgctggttttcaagagtgtcca

SEQ ID NO: 751022 - DNA, 83 bp, Homo sapiens
ccttcttcccttagaagaactgctgaaccgactctgagaaatttggctatgactttgcagccgtcctggagtggttcgcggag

SEQ ID NO: 751023 - DNA, 98 bp, Homo sapiens
cgcgagcagagccgcccagccctgccagctgcgccgggacgtgtgacaagtacaagactggagttattgatgggcctgcatgtaacagcctttgtgtt

SEQ ID NO: 751024 - DNA, 75 bp, Homo sapiens
gccaggccagccgggacggacgccgatgcccggggctgcgacggctgcagaaaggcctaaagaatgtatttgacg

SEQ ID NO: 751025 - DNA, 75 bp, Homo sapiens
agatgtttccagccctgcctcggcggaccaaagggttggatggcaagcatgtggtgtttggcaaagtgaaagaag

SEQ ID NO: 751026 - DNA, 51 bp, Homo sapiens
aacggggccggcaagaccaccaccctatgagaacgggattcccagtagtcc

SEQ ID NO: 751027 - DNA, 90 bp, Homo sapiens
gcaagagcaagatcaccgtgacatccgaggtgcctttctccaaaaggcggctgagccagaggccaactgcagaggaactggaacagagga

SEQ ID NO: 751028 - DNA, 98 bp, Homo sapiens
cagcgcgacctggccagctgccgcgactgggaggagcgccggaacgccgaggcccagatggtttccacggtgatgtgtacctaacagtgaagctgctg

SEQ ID NO: 751029 - DNA, 100 bp, Homo sapiens
ttggatggtgccaagggagatgctggtcctgctggtcctaagggctgccggggagcgctatcgcagggagatgctggcccacggtggaggcagggagccc

SEQ ID NO: 751030 - DNA, 95 bp, Homo sapiens
tgagatccatctgcaccacggtgctgggtaagatgataatgcaagataaattggaaaaagaaaggaatgatgctaaaaatgcagttgaggaatat

SEQ ID NO: 751031 - DNA, 49 bp, Homo sapiens
gccggaggagcccctcaggcctggatgacgtagtagatgaaagtgatga

SEQ ID NO: 751032 - DNA, 100 bp, Homo sapiens
gacccttctcctggcatcgtggcatttccgagattggagcctaacagtgtagatcctgagaacatcaccgaaatatcctaattatctcatggctaatgaa

SEQ ID NO: 751033 - DNA, 100 bp, Homo sapiens
cttaaaggagtggacattgctagcaatgagctcccaaagccatccaggctgaaggtgatgtggccgccctcaaccgacgcatccagctcgttgaggagga

SEQ ID NO: 751034 - DNA, 119 bp, Homo sapiens
aacccgttcttgcctcaggccagtcgcctccaggccaagagggatccttcacccgtgtctggacccttgaacatctgtgaagaaatgactattctgcatggaggcttcttgctggccga

SEQ ID NO: 751035 - DNA, 100 bp, Homo sapiens
gtcgacctgacgctctacacgatcaaggagttgttgaagaagctggagcagctttcagaagaggttctagcaattcggggagaaaatgctcgccttgccc

SEQ ID NO: 751036 - DNA, 75 bp, Homo sapiens
ggaagatcctggaggtggatctgaagaacggagctggagataagatgggtagactgctacttcccttttacacat

SEQ ID NO: 751037 - DNA, 100 bp, Homo sapiens
aaagacaggtgagacttcgagagccctgtcatcttctaaacagagcagcagcagcagagatgataacatgtttcagggctggtgaattaccatatctccg

SEQ ID NO: 751038 - DNA, 50 bp, Homo sapiens
ctgtggagttcgggaaccagctggaggtggcaggatcccattttctcact

SEQ ID NO: 751039 - DNA, 83 bp, Homo sapiens
tgcaggacttggtccgcggcatccgtaaccacaaggaggacgagggtttgccttcccggattgggcctacaagccagagtcgt

SEQ ID NO: 751040 - DNA, 75 bp, Homo sapiens
cctgcctcatcttaccaatctctttgtcggatgggttccaggtactctgtggatatccccttggacaaaactgtc

SEQ ID NO: 751041 - DNA, 100 bp, Homo sapiens
ctggttgctacccattttttcaagggaggacatgtatgcccaggactctatagagctactaacaacatctggtatccagtttaaaaaacatgaggaggaa

SEQ ID NO: 751042 - DNA, 77 bp, Homo sapiens
ctgctggtgggccgcgtcgaagacatggaccagggctacggaggtgacaccggaaactggtactcaagtgatgagga

SEQ ID NO: 751043 - DNA, 100 bp, Homo sapiens
gagaaggacgacaagcccatccgaggtacaccaggggttggaaaaaccacactaggcaaagaacttgcgtcaaaatcaggactgaaatacattaatgtgg

SEQ ID NO: 751044 - DNA, 100 bp, Homo sapiens
tgcaataaaacccagagtaaactcttagataaaatgacgacgtccttctggaagaggcgaaactggagcatggcggcatttgcaggaatgtgtgatggag

SEQ ID NO: 751045 - DNA, 100 bp, Homo sapiens
atccttcccgaagaatcactgatgagttcatcgagaagagtgtctctgaggccctggcatcttttaatgcacgtgtggttctcaaatataggcattctga

SEQ ID NO: 751046 - DNA, 101 bp, Homo sapiens
tcactgatgtctgctacagatccagggttgtctcctcacagactatgagctccttgaaagagggaatcgtgtcttactcatctttgtatccccagtgtcta

SEQ ID NO: 751047 - DNA, 74 bp, Homo sapiens
atcatcgaacggctccttcagcagctccaggtgacggggctgagcgtgaccagcggaggagaccagctggtggt

SEQ ID NO: 751048 - DNA, 83 bp, Homo sapiens
agtatctggtgaagtggaaaggatggcccccaaaatctggtggctggacccagagctgacctatggctgcgccaagcccttcg

SEQ ID NO: 751049 - DNA, 75 bp, Homo sapiens
tgctgcttatggcggcgctggagagggggcgctgagctgttgggggcgtctctggccgagcctctttttgtggaa

SEQ ID NO: 751050 - DNA, 89 bp, Homo sapiens
ccactgcatggtgttccggttcccgggcttcccggatctgtatgagcctgtcatggaggccatcaagatatggaatgtgcagatgtccc

SEQ ID NO: 751051 - DNA, 75 bp, Homo sapiens
cctgctgatgtggggactgctcacgttcatcatggtgcctggctgccaggcagacttatcaccagaccccaccac

SEQ ID NO: 751052 - DNA, 75 bp, Homo sapiens
tcggctacaaaggctccaccttccacagggtgatcccttccttcatgtgccaggccccccggacagaccacccag

SEQ ID NO: 751053 - DNA, 100 bp, Homo sapiens
tgcagccatggtgcattgcagttgcgtgttgttcagaaagttggttgaatctggcgatgtggaacccatggatatggagggctgactatatacaccatgt

SEQ ID NO: 751054 - DNA, 118 bp, Homo sapiens
tgaagaggaagacggggcggaagaccaagatcatcgagatggtgtcttctctttagggatggtgaggttggaaaaaggctcctgtaaccctcctccaggatgaaccacctgccagaag

SEQ ID NO: 751055 - DNA, 101 bp, Homo sapiens
gcgatgggaaaatcctttgatgggttgggcatcaacgaatcgacaaggagaacgttgaactctcccctaccactggccactgtaacagtggacgaactcgc

SEQ ID NO: 751056 - DNA, 109 bp, Homo sapiens
ttccccggggagtcagttcctccccgggcccctgagccatgcccatcgcagccgccccgaaggagccagatcttagcaaagcaatgtctcaagatggtgcttctcagtt

SEQ ID NO: 751057 - DNA, 83 bp, Homo sapiens
cagcaatcagctggcctggtttgatactgacctgtaaatcatcctttaggtgatttgaagatattaaagctagaaattggaac

SEQ ID NO: 751058 - DNA, 50 bp, Homo sapiens
gcattatccaacggctgctggaagcaatggctgccatccggaagaaactg

SEQ ID NO: 751059 - DNA, 90 bp, Homo sapiens
ctgaccagcaccagccctgatccaggtgcctgcctccctgctgcgcctggccacgtggaaacccctgtagctccctggctgtgcaggagc

SEQ ID NO: 751060 - DNA, 100 bp, Homo sapiens
gactgcagtgctgttccgtgagcttcttgaatgacatcgtacagtatctccgacgcacagttgtggcagcactgcctgaaggtatgagaccagattctaa

SEQ ID NO: 751061 - DNA, 74 bp, Homo sapiens
gtctgaagactgaaagagtcgaatggtttgttggcagggacatggcttgcagtgtggcaggcataacttctgat

SEQ ID NO: 751062 - DNA, 100 bp, Homo sapiens
cccagacctgtgcttctgactatcttctcttcaccagctcttcagatcaatatgggtgtccgcaatgttgccagtgtctgtctgcagattggctacccaa

SEQ ID NO: 751063 - DNA, 51 bp, Homo sapiens
aaatggttcccactgccgggcgaggtcttattatggaggactaactttgat

SEQ ID NO: 751064 - DNA, 75 bp, Homo sapiens
ccgattcatgctggaatccaacaagggcaaatcaatgttggagttccagcttcttggacacttaatgattgttgg

SEQ ID NO: 751065 - DNA, 100 bp, Homo sapiens
caccacccatgaggacgtggaggtgggaaggtgtgtccggaggtttgcaggggtgcagtgtgtctggtcttatgaggaatctgtcttgaactatcgtttc

SEQ ID NO: 751066 - DNA, 100 bp, Homo sapiens
cagagattcatatgagagttatgacaccatccggaagatgaagaacgatttccggaagatggaggatgagatggaccggctggccaccaacatggcagtg

SEQ ID NO: 751067 - DNA, 76 bp, Homo sapiens
tccactgatcaagaacttcttctgaggacagacaggttgatgataattagaagcatgctttccactgaacttcccg

SEQ ID NO: 751068 - DNA, 100 bp, Homo sapiens
ggtggaggacctggatatggcaaccagggtgggggctacggaggtggttatgacaactatggaggaggtcttcagagagctggaacctgcggtgctgtcc

SEQ ID NO: 751069 - DNA, 147 bp, Homo sapiens
tgtcctgaaaaattcagatggaagttatcgaatattcagcaagggtgcatctgagataattctgaaaaagcttctctctgggctccacggtgcagtctcacactaaaggaatctggatgtggtgtgtgccccaccccaagaagccag

SEQ ID NO: 751070 - DNA, 95 bp, Homo sapiens
gcggggaccgctgtgctctcggtcagaagccaatgacctggccctgaggctggctcgccactacacgggacaccaggacgtggtggtattagatc

SEQ ID NO: 751071 - DNA, 82 bp, Homo sapiens
ggctggagagccgggagtcgctgggtgcgtggggctgcctcgccgcgtctcgccacggtctgaaaactccaaatggctgtga

SEQ ID NO: 751072 - DNA, 75 bp, Homo sapiens
atggaatccctggccctgtctaatgcaacaggtgtctcttctcacgtggaatcacagcattggatggactgaaaa

SEQ ID NO: 751073 - DNA, 50 bp, Homo sapiens
cgacgggccgagcctgccactcttcaaggttactgactttttatgatgtt

SEQ ID NO: 751074 - DNA, 100 bp, Homo sapiens
ccctgaagagggaagacacgcggaaacagccccccagcgtccacgcggagcatgaacattgaggatggcgcgtgcccgcggctccccgtgccccccgctg

SEQ ID NO: 751075 - DNA, 102 bp, Homo sapiens
catgtcgggttattcgagtgaccgagaccgcggccgggaccgagggcggcgtgcaggaccagcggcggccgtgcaggcggaggacttcggcgcggctcctcc

SEQ ID NO: 751076 - DNA, 75 bp, Homo sapiens
catccaagtggaggttcctacagagattcatatgagagttatgaagctgaaatattccagaagaaacttgatgag

SEQ ID NO: 751077 - DNA, 100 bp, Homo sapiens
gcatctgaagaagttcatcgccaaaaaactcaacctttcatcctttaacgaggctcaccagctggattccctcctgggggcttcattcccaaaacggcca

SEQ ID NO: 751078 - DNA, 50 bp, Homo sapiens
atgcacccccagcagccaccggcagatggagtctcgctctgttgcccagg

SEQ ID NO: 751079 - DNA, 82 bp, Homo sapiens
ccggattggggatgagtatgcggaggacagctctgatgaggagggctgtgactccctgacgcagatccagtgcggccagctg

SEQ ID NO: 751080 - DNA, 97 bp, Homo sapiens
acaaataatttttcatggcggataatgctctaccacaagaaaatggcctctcacctggggccattgctggcattgtgattggagtagtggccctggt

SEQ ID NO: 751081 - DNA, 100 bp, Homo sapiens
caccattggagctcatcagactgaccgtgtcttacatcagttcagagaggcgggaggcagcaccgggctcttgatggacttggcagccaatgaaaaggcc

SEQ ID NO: 751082 - DNA, 101 bp, Homo sapiens
gctgagtacttgcagccctcggccaaacggccagacgccgacgtcgaccagcagagactggaaacttggatttaactggccagaagcaggtattcaaagca

SEQ ID NO: 751083 - DNA, 75 bp, Homo sapiens
cccttggacagtctgcaccttctcttactgctggcctgcttaagagttggacagtggaggaccttcagaagaggc

SEQ ID NO: 751084 - DNA, 100 bp, Homo sapiens
gtgccctttcgctcagaggtcctgggctgggaccccgacagccttgctgactatttcaagaagcttcaaacactccagagtgaaaattcgaacctcagga

SEQ ID NO: 751085 - DNA, 89 bp, Homo sapiens
cagctgaagagcgacaagccgctggcagccgcggatctcaccgccgctcagggtaaggggcctggataccaagaagtgactgctcatct

SEQ ID NO: 751086 - DNA, 50 bp, Homo sapiens
ggaacagggtcacagctctcacccagctggagatggagctgaagatgctg

SEQ ID NO: 751087 - DNA, 96 bp, Homo sapiens
cctggagctgggccaggcgctggaggccctccacgcccttcaggaggagcaggccagactcaagatgaggctgtgggacctgcagcagctgagaaa

SEQ ID NO: 751088 - DNA, 52 bp, Homo sapiens
cctcgatgtgctctgcgtgttgctggggtccaaggacgtaaccagatcatac

SEQ ID NO: 751089 - DNA, 82 bp, Homo sapiens
ccaactctgtccattctatccccagaagtagccctgaagcaaattgtggctactaatttgccccctgaagatcaagatggct

SEQ ID NO: 751090 - DNA, 83 bp, Homo sapiens
ccgggagctgggcggccatttaccagttacagaatgtctgaaggggacagtgtgggagaatccgtccatgggaaaccttcggt

SEQ ID NO: 751091 - DNA, 100 bp, Homo sapiens
cctctgttcttcgagaggacctgggtcaactggaatacaagtttcaggccaatagcttcaccgtctcctctgtcgccgccccttcctggcttcaccgttt

SEQ ID NO: 751092 - DNA, 75 bp, Homo sapiens
cgagatggacggatgctcatcaagctgctggaggtcctctctggagagaggctgttcactgagacttttttgacg

SEQ ID NO: 751093 - DNA, 101 bp, Homo sapiens
ttgagtgctgcagcggcagtcgtcgcccctgccgccgctgccaccgaaggaagcatcccagacaccgggaagatgaagttggagcccttgtttttgacatt

SEQ ID NO: 751094 - DNA, 100 bp, Homo sapiens
tggaagatgtaaagcaatatttcgagcagtttggcaaggcaggaaaaatactattgtattacaaggctcggaccaaagacatcctgattcgattcactgc

SEQ ID NO: 751095 - DNA, 119 bp, Homo sapiens
aattctgtggattttcgtctaaaaataacaagaatgggaggagaaggacactcctagaatatgcagagaaatggaaaacttcagaagatcctttacctttattggaggtatacacagtg

SEQ ID NO: 751096 - DNA, 50 bp, Homo sapiens
atacttcattgctccttcaggacatggggtcttactgaagtaacacaaag

SEQ ID NO: 751097 - DNA, 75 bp, Homo sapiens
attgtgacatatcgttggacccagaattgagggctgatggagttatgagaacaatgaacacagaaaaactcctaa

SEQ ID NO: 751098 - DNA, 78 bp, Homo sapiens
ccgctggctgtcagacagcttcaaggagacgcctgtcttagaagtgatctgctcccgaatgcgctacatctcctccca

SEQ ID NO: 751099 - DNA, 100 bp, Homo sapiens
gttttgcctttagtgcacccgctgccagaagggctgagggcttctgcagatgctaagaagcccaccattgattgccaatggattgataacactcattgaa

SEQ ID NO: 751100 - DNA, 82 bp, Homo sapiens
ctcgggagaagcagcgcctgttcccggggcagatccaggttcaggtcttgaggaccggcccagctcaggctcctggggcagc

SEQ ID NO: 751101 - DNA, 100 bp, Homo sapiens
gttcgctgaggagcagctgcgagccgaccatgtcttcatttgcttccacaagaaccgcgaggacagaggtcgcctgcgaggccgctggccaggcctgagc

SEQ ID NO: 751102 - DNA, 101 bp, Homo sapiens
cgcagatgttgtcaaggtggcctaccaggaggccaggggtgtcgccatggtctctgcaatgaaatgtggcctcttgccaatctccccggaggcgctttccc

SEQ ID NO: 751103 - DNA, 101 bp, Homo sapiens
gagctgcgtccggcaggagacgaagagcccgggcggcgctcgtacttctggccactgggcgagcgtctggcagtgtttgggaaatgggaagtaatgacagc

SEQ ID NO: 751104 - DNA, 100 bp, Homo sapiens
ggaacccggccgggagccgcgcgaggcgagctcagccggtctatcagtgtcgatttagcagaaagcaaacggcttggctgtctcctgctttccagtttcc

SEQ ID NO: 751105 - DNA, 75 bp, Homo sapiens
tcggcgagcccccgcggcgacagctccagggttccttgaaaagaaaacaggtagttaacctatctcctgccaaca

SEQ ID NO: 751106 - DNA, 83 bp, Homo sapiens
ctcagcaaacaggacgggaagatttacagaagccgagacccacagctgactattggaaatgcacttcatgcaatgaaatgaat

SEQ ID NO: 751107 - DNA, 75 bp, Homo sapiens
attactaccgttacttggctgaggttgccgctggtgatgacaagaaaggtattgcttttcccaccagcatttcgg

SEQ ID NO: 751108 - DNA, 90 bp, Homo sapiens
tagggtatcatttttacgggccttctggagatgcttccgaactgtgggcaaaaatggcggccaagtttcttcctaacagtggtgattcta

SEQ ID NO: 751109 - DNA, 82 bp, Homo sapiens
ccttcgcctgcacctggccaggctgcggctggagacaatgcagatcttcgtgaagactctgactggtaagaccatcaccctc

SEQ ID NO: 751110 - DNA, 100 bp, Homo sapiens
caaggagtgacacccgccatttacagacacgtagtgaagccttctccttccaaaaagtttcggtctggctcatctttctctcggcgagcaggctccagtg

SEQ ID NO: 751111 - DNA, 87 bp, Homo sapiens
cggacgaggatgaggaggagggggacgagcagcagcggctcctcaacacccctcgaaggtgtacgaagccatcgacagcagagatgg

SEQ ID NO: 751112 - DNA, 75 bp, Homo sapiens
agcctcacctttaatgccaacccagatgagagctcttcagtatccccatcagccagtttccgaggtgctgagaag

SEQ ID NO: 751113 - DNA, 80 bp, Homo sapiens
cgcgtcaggccgcgacgagggcgctgagatgaaggatttgggggcagagcacttggcaggtcatgaaggggtccaacttc

SEQ ID NO: 751114 - DNA, 96 bp, Homo sapiens
tggacttcggaccctggcctcttgggatgcaaagtactatactggcaattgctggagaagattttgcaattgttgcttctgatactcgattgagtg

SEQ ID NO: 751115 - DNA, 100 bp, Homo sapiens
cgacgcaaagcgaggaggaggaaaagtctggcctcggcgccaagatcccagtcacaattatcaccgggtatttagacttgtctgaaagcagcaactgggg

SEQ ID NO: 751116 - DNA, 100 bp, Homo sapiens
aacttcagaatcaaaactatgaccctagggagtgaggaggagagtgaaaaatgcatatcaatgatgtcaaacggctgaaacctggctacttagaagctac

SEQ ID NO: 751117 - DNA, 50 bp, Homo sapiens
gagtcagggatggctcttcctcagggtctactgacattcagggatgtggc

SEQ ID NO: 751118 - DNA, 97 bp, Homo sapiens
gagtcttcccccaactccaaccctgctacctcgcccgggggcatcaggtttttctcccgctccagaaaaacaaatggttatgagccttagagtttct

SEQ ID NO: 751119 - DNA, 95 bp, Homo sapiens
ggagaccctcgaagtgcgcaaacttgacactcaccctgaccggtgttcctccaagaaaagctggttatattgaagacctggttttgatgctgcct

SEQ ID NO: 751120 - DNA, 100 bp, Homo sapiens
tgcgcgaccacagctatgcgaccgaagatttgggaatggatgatgaaggagatgatgacccagttcctctaccaaatgtgaatgcagcaatattaaaaaa

SEQ ID NO: 751121 - DNA, 100 bp, Homo sapiens
ggctagtgatcaaatcagaagtgccgtccttatctcatcaaagccaggctgctttattgcaggtgctgatatcaaatataaagacctgatgccacatgat

SEQ ID NO: 751122 - DNA, 88 bp, Homo sapiens
gaactcaggcgcctcttcttagttgatgatttagttgattctctgaagggcaatgtattccaagatgcagtcttcaatcaaacagtta

SEQ ID NO: 751123 - DNA, 98 bp, Homo sapiens
tatgtgtgcagcacctggctcaaagaccacacagttaattgaaatgctacatgccgacatgaatgtcccctttccagatggagtctcgctctgttgcc

SEQ ID NO: 751124 - DNA, 75 bp, Homo sapiens
cagcaagcctgtgctcaccacaaaagtccttctggggcaggatgagggcacaagagactatagtccccggcagat

SEQ ID NO: 751125 - DNA, 100 bp, Homo sapiens
aaaaagctgccctgagacggtgtcccgccgaaaggttaacatgtttgttgaaggattccacgatgccatcctcctctacgtcttggctctacatgaagta

SEQ ID NO: 751126 - DNA, 75 bp, Homo sapiens
agagtgattgagagtggaccacactgcgccaacacagaaattatgttgccaactttgcaacaatggaagatgaag

SEQ ID NO: 751127 - DNA, 89 bp, Homo sapiens
cgctggaccttttgaataacaagctgcagcaaaatatatcctggaagaagacaatagtaatcaaatgcaaagcagctgtgctatgggag

SEQ ID NO: 751128 - DNA, 100 bp, Homo sapiens
ttgttaaggattccaagtaactcttatttgctgaaactgatgtaaatgtggtcatgcttcaggaatcccaagtttgtgaaaagcgtgccagccaacaatt

SEQ ID NO: 751129 - DNA, 100 bp, Homo sapiens
cgtctggatcacggatgtaggaagtggtgtgatgaatgcagactctgctaccattttggctgtttggatcctcctttgaaaaagtctcctaaacagacag

SEQ ID NO: 751130 - DNA, 75 bp, Homo sapiens
accgaagcgttcgtatctggaagacttgccttcaaggtgtgcaagtaaggacttatctccagaaaagaacactta

SEQ ID NO: 751131 - DNA, 98 bp, Homo sapiens
gctcagtacaactgtgcctggaaccagatgccctgtccgtcggcgctggttttcctccagcttatggaggcatatctgaggtgaatcaacctgccgaa

SEQ ID NO: 751132 - DNA, 98 bp, Homo sapiens
ctacacgaagaactaagaatattattagcacaagagcaccatactttgagggctggacgtaaagaaagaagtgatgcactcaattctgcaatagataa

SEQ ID NO: 751133 - DNA, 76 bp, Homo sapiens
ggacaagagctattgatagaagatgtgtatatctcatgattgatatggagaaactagtcatgggccaaaggtcaag

SEQ ID NO: 751134 - DNA, 75 bp, Homo sapiens
aagattttgaagaagcttgtcgagagactctccaacatgtgccttctgaccatacaaatgaaacttccaacagta

SEQ ID NO: 751135 - DNA, 100 bp, Homo sapiens
acctgtctgacgatagtccaaaaactgaagaagatggtggataagcccacccagctgtctcactctgccagaccaacaaaaactgagactgaagtcgcca

SEQ ID NO: 751136 - DNA, 90 bp, Homo sapiens
cattgccaaatcccaagatgctgagagcaagcacgttttccacctcactgtctccatcctccacctctgagatggacacttaagagacgg

SEQ ID NO: 751137 - DNA, 78 bp, Homo sapiens
gaatatttaatggaaaatcgcttggttaaaacctgacacttttaacaggactcagaattcatgattgaagaaatgcag

SEQ ID NO: 751138 - DNA, 74 bp, Homo sapiens
agcagatgcgcattttgatgggatgtcctggaacaggtggaggcctatcaagctgaggctcgtgaggctctggc

SEQ ID NO: 751139 - DNA, 90 bp, Homo sapiens
tagcatggactcgaaagcaaatattgtacatgggaaatcctcattgacgattcaatttgttgaaggccaatttgtggactcctacgatcc

SEQ ID NO: 751140 - DNA, 87 bp, Homo sapiens
gagccattctatataaaacacgattcttaccactcagttctaggtctcgttccagatcatattctccagctcataacagagaaagaa

SEQ ID NO: 751141 - DNA, 89 bp, Homo sapiens
gcttgatgatgtcacctaccatggcttccccagcctgcaggccctggctgcaaaccctcctggggcttgcccatagatgctgttcagtg

SEQ ID NO: 751142 - DNA, 100 bp, Homo sapiens
gtctactacaacctggtgaaggccccgccgtgcggcggcatgggcaacctgcggggccgcacggccgtggtcacggaggcctaacatcgtgtcccagctc

SEQ ID NO: 751143 - DNA, 82 bp, Homo sapiens
tgcaacgactcggctctggactacaacgaggcagagcccccggagccatggccagcccttccggcagctccaaagccactgg

SEQ ID NO: 751144 - DNA, 80 bp, Homo sapiens
gtcggtgctggccgagcgctgcaagaagaacaatggcaaggctgagttctggggccatgcagctcccatcctctacgcgg

SEQ ID NO: 751145 - DNA, 90 bp, Homo sapiens
ggtcccgccgttgttgcctaatccgtatattatggctccagggctgttacatgcctacccgattttgggaaccagtaggacattgacata

SEQ ID NO: 751146 - DNA, 75 bp, Homo sapiens
ccgcggatcgtttaggaaagccggccaggctagcttgtcactttctgcaaaggtttccctcagggagcctcctgc

SEQ ID NO: 751147 - DNA, 90 bp, Homo sapiens
cggtactgaccctgagagccttcgcagggcccctgagtccagccaagtcaccaggagactaaagtccatcaaaaacatccagaaaattac

SEQ ID NO: 751148 - DNA, 83 bp, Homo sapiens
ggccaggcagctgaagagctgcatgaagccggtgaggcgcaggacagtgaacatggaaccagcctgaacagggaaatggacag

SEQ ID NO: 751149 - DNA, 109 bp, Homo sapiens
tggccaacgagccatccgtggccctgtaccggctgcaggagcatgtgcgtcgctccctccccgagctggcccagcacaagctgcaaggcacaatcctgcagtacgtgaa

SEQ ID NO: 751150 - DNA, 100 bp, Homo sapiens
cccggagcgtgccctcgccgctggttttttattggcacctcagtctcaacattttcttttcggattcatgaggaaagagaaatcctggggttggacccca

SEQ ID NO: 751151 - DNA, 90 bp, Homo sapiens
tgctgatggagctaaggctgcaattctgggttttacatcaccggtctgggcagtgaccaagaatatggcccaggtgaccaaagccctgga

SEQ ID NO: 751152 - DNA, 82 bp, Homo sapiens
gacttgactcttcaaacacaaagcagccgactgaggcacatcatggccgagatgatcgccacagagagggagtacattcggt

SEQ ID NO: 751153 - DNA, 97 bp, Homo sapiens
attcataatggagctactgtactggctattggaaggaggagattctgaagataaggagaaaccgaaacttcattgccccttcaatgtgggaatccag

SEQ ID NO: 751154 - DNA, 80 bp, Homo sapiens
cgaaggtactcgcagcacttggagcgcagaaccggccgcgcccgatgacttcaaacctgcttctattgacacttcttctg

SEQ ID NO: 751155 - DNA, 105 bp, Homo sapiens
agctgccctcagctgcactgtggcaaggcttttgcttccaaatacaagctgtatagaagaattttggcacctggtgaagaagagaatttggaatttgaagaagat

SEQ ID NO: 751156 - DNA, 100 bp, Homo sapiens
aaacaaaatgtcaacaaattgatggattcagaatctgataattcagataacaacacaatctttgtgcaaggacttggggagggtgtgtctacagatcaag

SEQ ID NO: 751157 - DNA, 100 bp, Homo sapiens
cagaagatgggcagagtctgcatgtggctgcaggacctctgtcagagaatgaaacactcatcgcatgaatctggcaatgggggcaggagctgttggagct

SEQ ID NO: 751158 - DNA, 98 bp, Homo sapiens
aggcatgcagttgcttgcttcctgacacgaggggacctgtggattagttgggaagaaggaatgaagattatgcggatcaaacctcaccaaggccagca

SEQ ID NO: 751159 - DNA, 100 bp, Homo sapiens
attctttgtgtgtgacacccataggccagtcaatgtcgtcaatgtatacaacgatacccagattgtatctgaggaaaggaagaggggaaaccagaatctg

SEQ ID NO: 751160 - DNA, 74 bp, Homo sapiens
agaaatctgagcctcagcaagagaaattaaccctatacctctgacccaggagccctctggcacaaatggaagaa

SEQ ID NO: 751161 - DNA, 90 bp, Homo sapiens
agatcctgtctcagccagctgttcaggagactggaagtgttcacacaggtttgctggtgaggcccatgacccgctagttgaagcactagt

SEQ ID NO: 751162 - DNA, 75 bp, Homo sapiens
atgtaatgtcaactttactgagaattttccacctcctgacacaacaccactcacctagatgatgaactggattct

SEQ ID NO: 751163 - DNA, 99 bp, Homo sapiens
attcccggaatcagacggtgccccatagatggccagctttcccccgagggtcaacgagaaagagatcgactttcaaacctctggttgaaagaaatatac

SEQ ID NO: 751164 - DNA, 49 bp, Homo sapiens
atgccggggctagccttccccaccagatgacgtccggttgtttgccttc

SEQ ID NO: 751165 - DNA, 87 bp, Homo sapiens
gagggtgtacaaatacccctttgaattaattatggctggaatgcagagagcaaccaatgtcacctaccaagcccatcatgtcagcag

SEQ ID NO: 751166 - DNA, 100 bp, Homo sapiens
gcggcggagccgggcacggagccgcccgcgcacttccaggtgcacagcgcgggagccgtcacggtgctcaagcaaatgaagaaacacccctgccgccagt

SEQ ID NO: 751167 - DNA, 50 bp, Homo sapiens
ttacactgtgatacgactgactgacatggatttgattgacatactttgga

SEQ ID NO: 751168 - DNA, 75 bp, Homo sapiens
agggtcaaaggagagcacaaccatcgcagttggaagcccatggggcagcaaaatcaccaggacagccaatacaag

SEQ ID NO: 751169 - DNA, 118 bp, Homo sapiens
cgtcgggaacagccatgcaaaggcaggggaggaagccacctcgaggtactccaaagattcaggtttactcacgtcatccagcagagaatggaaagtcaaatttcctgaattgctatgt

SEQ ID NO: 751170 - DNA, 75 bp, Homo sapiens
cagtccgaaatggcggggactgttggtctcggccctgcggaagccatgacagttgaaaaagcaagtccagtgggt

SEQ ID NO: 751171 - DNA, 75 bp, Homo sapiens
tcagcactgactttcagctatggaatcgccgtgcttcctcaaagactgggaaatgcacgtccacttcaaagtcca

SEQ ID NO: 751172 - DNA, 75 bp, Homo sapiens
tggagaatgaactggaggctgctcaggtgcaaacggaggttcttcagaagaggcagcaggagaaagcccatatga

SEQ ID NO: 751173 - DNA, 83 bp, Homo sapiens
agcagcctcctcctgtcgcagctcaccagcctggacccccagtatgacccatatagcaaagtcctatccagagaacactatga

SEQ ID NO: 751174 - DNA, 83 bp, Homo sapiens
ccagcttccagttagtggatatagcacaccatccccagccatgttgctaacaaccacaagcagaatttgatgacggtggcaaa

SEQ ID NO: 751175 - DNA, 75 bp, Homo sapiens
cggcagtctgagccagcagcgccccctctagaagtttctgaggaacaggatccagtttatggaaaaggaaaactt

SEQ ID NO: 751176 - DNA, 82 bp, Homo sapiens
cttgaaaataaaacttgccaggttccagactctatgacatctgctgcctgtgccaccatggcaactgcaccatacaactact

SEQ ID NO: 751177 - DNA, 88 bp, Homo sapiens
ctcagttggaagcagccgatccagcctgcggagcctgtggggcagaacctgtggcatattccttggagtatctccaggttgagaattc

SEQ ID NO: 751178 - DNA, 95 bp, Homo sapiens
gctgggattacaggcacgcgccaccactcccagagttgccatggagaaaattccagtgtcagcattcttgctccttgtggccctctcctacactc

SEQ ID NO: 751179 - DNA, 100 bp, Homo sapiens
ccttatcaaccccaccaaaactttctactataaatcccggttttggctgcttaaactgctgctggagccgagatggtcataaactcgtgagtgcttccac

SEQ ID NO: 751180 - DNA, 100 bp, Homo sapiens
ggacaaaggcgcaagtcgagaggaaactgttgtgcctcttcatattggcgatcctgttgtgaatgaatctgaagtctgctgcagtaaaacacagaaggct

SEQ ID NO: 751181 - DNA, 100 bp, Homo sapiens
cccaaatcctcttctccaagaagagggagaaccgaagattacaggaggccagcatgaggttggaacaagagaatgatgaccttgcccatgaactagtaac

SEQ ID NO: 751182 - DNA, 100 bp, Homo sapiens
ctgtggccaacagcaacagagagagtccagcctcatgtttgactgttggagatttatcctgtgcaagagacctggaagcaacagttattcttccccacaa

SEQ ID NO: 751183 - DNA, 83 bp, Homo sapiens
acgttctgcagaggaccatccagtgtgcaaaagctacgagttccagggagctctgtcctggtgaccgtgcccgggttatgacg

SEQ ID NO: 751184 - DNA, 51 bp, Homo sapiens
ctagcaccttcgccctctccagccaggacctgaaggagaagaaggagaagg

SEQ ID NO: 751185 - DNA, 83 bp, Homo sapiens
ctggcagcatgtatatcttttactgcaaaattcaaaatggggctcaaggtattcgtttcatctacaccagagaaggcagacca

SEQ ID NO: 751186 - DNA, 90 bp, Homo sapiens
ctctcttcttgatctcactcccagaaaagacactgaaggagcagaggtgtggacgcctcatactgcacaaatgtttatgggtcagcccag

SEQ ID NO: 751187 - DNA, 75 bp, Homo sapiens
cggctggatgggaagttaatgtttacggcgaagtctactcaacgtttccaagggagtgcatccgccccaaccctt

SEQ ID NO: 751188 - DNA, 95 bp, Homo sapiens
ccttgtgaaacctcctagtagaaaaagttcttgggacaaacttcatttgtttgcagaaaaaacttcagcatgtgccaggaacacaacctcacctt

SEQ ID NO: 751189 - DNA, 96 bp, Homo sapiens
catgagcggtggtgaagtggtctgctccggatggctccgcaagtcccccccggagaaaaagttgaagcgttatgtccttccatagtgacgcccccc

SEQ ID NO: 751190 - DNA, 101 bp, Homo sapiens
ttggagacggacttgcttccggaagaagctgggagagttcttccagaccaagtacgattgggatctgctggctgcccgttccatctgggcttttggccctg

SEQ ID NO: 751191 - DNA, 100 bp, Homo sapiens
ggcatctgcaaaattcggccgcccaagatcttgcttctgaaatatctacctgggatggagtgatagtaacaccttcagaaaaggcttatgagaagccacc

SEQ ID NO: 751192 - DNA, 99 bp, Homo sapiens
cggagtagcaagtggccatggggagcctcagcggtctgcgcctggcagcagaattacttactgtcatctacctttccagagtaaatggctttatgttgg

SEQ ID NO: 751193 - DNA, 83 bp, Homo sapiens
tgaagaagcatatacacttacagaggtccccagtcccaagcggaagttggaagaaccagttctggagttcaggcctccccgag

SEQ ID NO: 751194 - DNA, 75 bp, Homo sapiens
taaaccaccgcttacagatattggtgcttttttaggaccaaaggatatatttccttactcagaaaataaggaaaa

SEQ ID NO: 751195 - DNA, 98 bp, Homo sapiens
ccttagctgtgctcgcgctactctctctttctggcctggaggctatccagcgccccagggagcgccatggcccgcgcacgccaggagggcagctcccc

SEQ ID NO: 751196 - DNA, 100 bp, Homo sapiens
atcgactgctggacaatgaggatggggaaaacccccagcggcagcgcataaagcgcattctccaggtggacccccaaaagtacaagggcatatttaacgg

SEQ ID NO: 751197 - DNA, 100 bp, Homo sapiens
agaatatacaaagacaaaaggagattctgatgaagaagttattcaagatggatggcagaatagctgtgaaggcatgtgaaggcttgatgctgttagtaag

SEQ ID NO: 751198 - DNA, 88 bp, Homo sapiens
gtggacgtggatttggggatggctataatgggtatggaggaggacctggaggctctggctgggctttgaccttcgctccgaccctggc

SEQ ID NO: 751199 - DNA, 90 bp, Homo sapiens
agccagggaagctgactgaagccttcaaatacttcctgcaaggcatgggctacagtttgggccgacacgcggaaggccgggtggagccca

SEQ ID NO: 751200 - DNA, 75 bp, Homo sapiens
gtggaggtgctgccctgggcactcaggagtgagctgcgaggaaggtcagaagagatcaattctacagaaatttcc

SEQ ID NO: 751201 - DNA, 50 bp, Homo sapiens
cgaagtgtcggcacaacttccggagccggggcaactgtcagacccaaggg

SEQ ID NO: 751202 - DNA, 50 bp, Homo sapiens
ctgacctgcagctggaagtgtttgggatttcaaatatgcgtgcattagag

SEQ ID NO: 751203 - DNA, 90 bp, Homo sapiens
gatgcaagcggtttgggaccttgaacaaggcaaatatggttttggttcagcaggccccgttcacccgctggtcgaccccctgactgccgg

SEQ ID NO: 751204 - DNA, 83 bp, Homo sapiens
ctaaagcagcgtgcgttcagccctgggatgcagaggccaggatgtgggcccagccctgtgccaggaggctggctggaataaag

SEQ ID NO: 751205 - DNA, 90 bp, Homo sapiens
agagattggactgggagggcaacgagcacaacaggagctacgaggagttgagttgacgggcgccgacctgaaggactgcgtcagcaacaa

SEQ ID NO: 751206 - DNA, 100 bp, Homo sapiens
caaggagctaaagcagcgtgcgttcagccctggggtccagacatcatctggtctccctgaacctgaaatcacaccatggatgattttgagcgtcgcagag

SEQ ID NO: 751207 - DNA, 75 bp, Homo sapiens
gaagacttgcagcaaggcttgctgaggctcacagaagatagccccagggaagaggaagaacgtctgagaaataaa

SEQ ID NO: 751208 - DNA, 83 bp, Homo sapiens
atggaagctgccggcagccctgcggctacggagacaggtcagaatggcggcagtggagcatcgtcattcttcaggattgccct

SEQ ID NO: 751209 - DNA, 75 bp, Homo sapiens
aaaatgacagatgaaaatagaaaagtgtggctggtctgaaggaattgaatgatctggcacgggaccctccagcac

SEQ ID NO: 751210 - DNA, 83 bp, Homo sapiens
aattcagaaggagctagctgaaataacccttgatcctcctcctaattgcagcatgacgtatcccagactttactcaaggcaac

SEQ ID NO: 751211 - DNA, 83 bp, Homo sapiens
atctagtctttccgcttcttgaatttctctctgtaaaggagaacatccagtcatggataaaaatgagctggttcagaaggcca

SEQ ID NO: 751212 - DNA, 88 bp, Homo sapiens
ccggggccctacggccgcccgccaccaggatcatgcggccagatgatgccaacgtggccggcaatgtccacggggggaccatcctgaa

SEQ ID NO: 751213 - DNA, 100 bp, Homo sapiens
ccggatgagtacgataccgaagcgggctgtgtgccccttctccacccagagataccccatgtttccccatcactcgaggagtctgggcagagactggact

SEQ ID NO: 751214 - DNA, 100 bp, Homo sapiens
ctgcctcagcctcccgagtggctgggattacagagcaactaagaggtctttcttggctctatgagaacctggtgggattcctgaagataaagtccacaaa

SEQ ID NO: 751215 - DNA, 82 bp, Homo sapiens
ggaagaccgatgggaatggttaagactgaaaacaaggtccaactaatccaatgctgtttcatcttgttcgagacgtcaaaca

SEQ ID NO: 751216 - DNA, 121 bp, Homo sapiens
gaagaggcagtgaaatggggtgaatcatttgacaaactgctttcccatagaggtactagcaaaggccagacgtcttactcaacaacttccctgccaccacctccaccatcccatccggcca

SEQ ID NO: 751217 - DNA, 100 bp, Homo sapiens
gaactagatacaaatggaatttaaccaagaaacaacttatttaagcagggcgactttgtcagtaccccaaactgtccccgcatgaggtcactctgcacgg

SEQ ID NO: 751218 - DNA, 75 bp, Homo sapiens
tgggaaatcaagtcgtaaaaacaggtcaagtgacttctgaatgaacagtgaatctattactgaggaaaaccagag

SEQ ID NO: 751219 - DNA, 98 bp, Homo sapiens
atgctagacctacaggtggagttggagcagtagctctgctaattgggccaaatgctcctttaatttttgaacgaggctaggtttggccttccttgata

SEQ ID NO: 751220 - DNA, 101 bp, Homo sapiens
ggaggaggaagatggcggccggcaagagcggcggtagcgcaggggagattacttttctggaagcctcgccgctcctgctatttgccaaccgccgggacgta

SEQ ID NO: 751221 - DNA, 90 bp, Homo sapiens
gcgggcccgggccatggccgccgccgatgccgagctctggattaatcgaattacagctgctagccaggaacatggactgaagtatccagc

SEQ ID NO: 751222 - DNA, 50 bp, Homo sapiens
gtttgacgacactgatggtttgatgatgattattccccaccttctaagag

SEQ ID NO: 751223 - DNA, 101 bp, Homo sapiens
gaagcaaagacctttgatcagctgacaccagaagagagcaaggaaaggcttggacgtgaacttatgaattcaacaggtgaagatttacaacttgataaatc

SEQ ID NO: 751224 - DNA, 101 bp, Homo sapiens
gtggttgcgggcgcagcgggcagtgtcggaggccagcggggccggaagcggcggcgcagaaaaaatgtgagcgctattggcctttgtatggagaagacccc

SEQ ID NO: 751225 - DNA, 51 bp, Homo sapiens
aagagctggtgcatgatgacgagataattcgtgtccagtccccggatggag

SEQ ID NO: 751226 - DNA, 83 bp, Homo sapiens
cccgaatgccagcgcctcttctaccggggcaagcaggatattgactgggtacagacagagaagcacgtgtttgagcaggcatc

SEQ ID NO: 751227 - DNA, 82 bp, Homo sapiens
aggaaggcatggaaagttccagccggttcgagagctaggtgtcgtgaaaactacccctaaaagccaaaatgggaaaggaaaa

SEQ ID NO: 751228 - DNA, 100 bp, Homo sapiens
gaagaattgaaaagaagagtagctgaggagctggcattggagcaagccaagaaagaatccgaagatcagaaacgtttatcatctggacttcaagctgcag

SEQ ID NO: 751229 - DNA, 97 bp, Homo sapiens
ggcgtggttatgagtattgtcgactggatggacaaaccccgcatgaagaaagagagtttgtttatcaagcctggattactgatcctaaaacagcact

SEQ ID NO: 751230 - DNA, 100 bp, Homo sapiens
caaaggtgctgctgatcatctgaggttgcctgcatggcagtgaagaacatggacctttggcaggtagcatctaaaggaactggtttaaatcctaatgcca

SEQ ID NO: 751231 - DNA, 100 bp, Homo sapiens
ggtacctctccttttccctctccctttccctaagctgttgagtggaatgtcatggccagctcctcggacagtgaagatgacagtttcatggctgtggacc

SEQ ID NO: 751232 - DNA, 65 bp, Homo sapiens
tagatgacttggagaatgccgaagagtgacgaggaattgacaatggccatgtcctacgtgaagga

SEQ ID NO: 751233 - DNA, 82 bp, Homo sapiens
agagctgtgatgttttggggattccactctccagtgtaatgattattgacaacagatgtcatgggaacagacatgtcttgga

SEQ ID NO: 751234 - DNA, 100 bp, Homo sapiens
ggagccgccgccgccgccgccgccgccggagctaacctcggggaccgagatgcaggtatggacctgtctgccaatcaggacgaggagaccgaccaggaga

SEQ ID NO: 751235 - DNA, 75 bp, Homo sapiens
gacttcctgcctggactccaaagccttcttattgactcctaggaatcaagtgatactgtcggcagaagccctggc

SEQ ID NO: 751236 - DNA, 75 bp, Homo sapiens
aaaacaacttcgagggcagaacagtaaggattgtatcctggagccgctttccctgccagaaagtccaggtggcac

SEQ ID NO: 751237 - DNA, 89 bp, Homo sapiens
cagctcctcagtcaacagctacagccaattttgctaactttgcacatttcaacagtcatgcagggtccaccaggaccaccagggccaca

SEQ ID NO: 751238 - DNA, 96 bp, Homo sapiens
gtatgagccacacatccccgaccacttgcggcctgagtatggcatgagccatgagcccaagtccccttcgctagggatgctttccaccgcgaccag

SEQ ID NO: 751239 - DNA, 83 bp, Homo sapiens
cgccggccccatgaggagggacgtgaacggagtgaccaagagcaggtttgagaatagcctaacatggcagaccagagacagcg

SEQ ID NO: 751240 - DNA, 100 bp, Homo sapiens
ttttggggctccctcgggcacctccggtaccgctgcagccaccgcggcccccgcgggtgccaagtcctgccctgccaacttcttggcagctgccgacgac

SEQ ID NO: 751241 - DNA, 82 bp, Homo sapiens
ccctgcgcagctgccccatgtgccagaaggagttcgcccccaggtggtcttcgagggatagcacgaggtggtctgacaggac

SEQ ID NO: 751242 - DNA, 99 bp, Homo sapiens
ctgtgatcaccctgatgtcaccgaatggccacagcttgtaaaaggggttccagaaactttagcagttgcagtgcagaggactttgagaagttaacttta

SEQ ID NO: 751243 - DNA, 101 bp, Homo sapiens
cagcggatctgagcaacttgtcagacgagagagttgtggcagcaggccccttcacagatgtagtcactacaaatcttaaattgcgaaatccatcggataga

SEQ ID NO: 751244 - DNA, 73 bp, Homo sapiens
aaaaaatggttgacctcacccagaattttccagttcatatgaagaggtgatctctcaaataaatacgtcatta

SEQ ID NO: 751245 - DNA, 106 bp, Homo sapiens
gttagtgtgctctgagggagggtccgagccagccgctgttttgccggaggagcccctcaggccggtgcgatagcgaactcgctgacctgcgtgcagctgcacaaga

SEQ ID NO: 751246 - DNA, 101 bp, Homo sapiens
gtttgacgacactgatggtttgggaccagttactctccacaagaaaattcacacaaccacagtgctcttcatagttcaaattcacattcttctaatccaag

SEQ ID NO: 751247 - DNA, 98 bp, Homo sapiens
aacttgttggcagctgcagacaaagatattttggaactcttagaaaaaagagtgaagtcaagattttctcaccggcagatacacttaatgaattcatt

SEQ ID NO: 751248 - DNA, 75 bp, Homo sapiens
cgacttgagcgaagttttatgcaagatgcatttcatcttctcagatacagcggtgcttctgtttgatttctggag

SEQ ID NO: 751249 - DNA, 98 bp, Homo sapiens
gccgggatcaaagtgtaccagtcggcagcatggcctccctgcccttcgctatcctgacgctggtgaacgccccgtacaagcgaggattttactgcggg

SEQ ID NO: 751250 - DNA, 100 bp, Homo sapiens
ctggggagtacagctgtgaggctgggggccagagagtctccttccacctgcacatcacagaaaaagctgttggctggacctgtgactttgttggtagtta

SEQ ID NO: 751251 - DNA, 113 bp, Homo sapiens
aaacagctctcacaggacctggctgtcaacctccttgttgcccccactgttgccttgagaattgaagacatctactaggttttagagggtgagatccgaatcctggaattgga

SEQ ID NO: 751252 - DNA, 104 bp, Homo sapiens
gccatgtcgggttattcgagtgaccgagaccgcggccgggaccgagggccctgggctgcatcttgtacctgctgtgcttccggcagcacccttttgaggatgga

SEQ ID NO: 751253 - DNA, 112 bp, Homo sapiens
cgcgggcgccaatggggagcagaaggactcggacacaggccaccagcccctcgggttccaagatgcagctactggagacagagttctcacacaccgtgggcgagctcatcga

SEQ ID NO: 751254 - DNA, 50 bp, Homo sapiens
agaattatggaaacctggtctcactggctattgaacaaagttttgatcag

SEQ ID NO: 751255 - DNA, 100 bp, Homo sapiens
cggcctccaggcctcaggccccctcaccatcctagaggtcaagatcagctctggctagactggagcgctgctcagcgctttcgttcagctgtgccacatt

SEQ ID NO: 751256 - DNA, 74 bp, Homo sapiens
cttggcagcactgggcatccagtaccagacaaatgaaccaaggatcgggatagcagtataaaattagaatcaag

SEQ ID NO: 751257 - DNA, 75 bp, Homo sapiens
aaaacagcaaacaacaatgctgtacagagaagttttccacctggaccaatacggaattccgatacctggaggatg

SEQ ID NO: 751258 - DNA, 97 bp, Homo sapiens
aggccttccagctgtttgaccgaacaggtatctagaagagcagaagacagagaatggaaaagataaggaacagaaacaaacaaataccgataaagaa

SEQ ID NO: 751259 - DNA, 74 bp, Homo sapiens
tgaaggtccaggagtacccgaccctcaagttgaactgctggcttataaagtagagcaggagaagtgcattgctg

SEQ ID NO: 751260 - DNA, 88 bp, Homo sapiens
gaaattttgccaaagaagtgagccatgaaatggatggacttatttttcagcctactggagttgtccgagcggaactgcattgagattg

SEQ ID NO: 751261 - DNA, 75 bp, Homo sapiens
cttgcttgaagaagatggaattgctcaatgacgacagtgaaggaatttgaaaggcactcaaaaggctatgagaat

SEQ ID NO: 751262 - DNA, 107 bp, Homo sapiens
accgccgcctccgccgctgcctcaggagcggaacaacgtcggcgagcgggaactgtaagagtaaatgggtccagtaattggaatgactccagataagagagctgaaa

SEQ ID NO: 751263 - DNA, 98 bp, Homo sapiens
ctggacacagaagtatttgtgacaggctttgatgcggcctggaagaattgatagaatcatctatgtgcctttaccggatgcagcaacaagaagggaaa

SEQ ID NO: 751264 - DNA, 50 bp, Homo sapiens
agaagtgaaattaacttacctggacaccccgtagacagaagaggcttttc

SEQ ID NO: 751265 - DNA, 83 bp, Homo sapiens
cactctcatcgctctcggcctcggcctcggcctccgacacgctgcaagctttcttcctggtggcagatgacatcatggattca

SEQ ID NO: 751266 - DNA, 96 bp, Homo sapiens
ctcaggatcaatggtgttaaggtatacactgaaaatgtagacaaaaggcaaattattttggaccttcagattagggggccgaaggccagagaccag

SEQ ID NO: 751267 - DNA, 100 bp, Homo sapiens
ttgcgacatcccagagagcttccagagaaatcttcagaggaactagacatggacaaggtgacagcagcaatggtactaaccagcttgtcgactagccctt

SEQ ID NO: 751268 - DNA, 100 bp, Homo sapiens
gctgtaatgttccaggacacctgccatcatggagggttatccagcacctggaggatacctgctaccttggacaggttgctggaccccgccaacagagccc

SEQ ID NO: 751269 - DNA, 100 bp, Homo sapiens
tgtcattgatttttcaccatttggagaaccaatatttttgggcaattgaaggaacagactaaaaatcgtgtcctggaaggaaactacaggtactaccagg

SEQ ID NO: 751270 - DNA, 50 bp, Homo sapiens
cttcttctgaaaaagagatcttgggactttgaatccaaagcaaaccatct

SEQ ID NO: 751271 - DNA, 73 bp, Homo sapiens
tactacataggcaagtcaccaatctcttgcatggcaccaagaatgttaccaattcaagcagtttaagattgcc

SEQ ID NO: 751272 - DNA, 74 bp, Homo sapiens
gactctggagctgacagcgcgcacttcacccgcagttgatgaaggatttgggggcagagcacttggcaggtcat

SEQ ID NO: 751273 - DNA, 89 bp, Homo sapiens
ccggcgggcccggagcagccgccgccgcagcgcgaacatggacgccgtcaacgccttcaaccaggaggccgaatacatcaagcaatggt

SEQ ID NO: 751274 - DNA, 83 bp, Homo sapiens
ctgcatgccgctcaccgtagacgaggactgatgaagcccatgatgccccaggagtccctcaatgggacaggctgtcgctctga

SEQ ID NO: 751275 - DNA, 100 bp, Homo sapiens
gggtcccgaagccccctgcaggaactctacaacccaatccagtgtgaaaaactcaaattactgtcttccatcatataccgcttataagaactatgattat

SEQ ID NO: 751276 - DNA, 75 bp, Homo sapiens
agcctcagttggaagcagccgatccagcctgcggagcctgtggggcagctcttcagtaggttacctgcaacatcc

SEQ ID NO: 751277 - DNA, 150 bp, Homo sapiens
agaatcacgcccagaataaagccaagctcatctctgagacccggaggaggttcgaagctgagtatgtgacaggctgctttgaatgctgcatcaagtgtctgggaggagtcccctacgcctccctggtggccaccatcctctgcttctccg

SEQ ID NO: 751278 - DNA, 80 bp, Homo sapiens
tgtctgcccattgatagaggccagattgtcttggaagttccaaagttgcaacgatttctatttccatgaggacaacttac

SEQ ID NO: 751279 - DNA, 100 bp, Homo sapiens
aagaaaacatgaccctcacagaaaattatcctaagaaatccggtaaccaataagaagcattacagattgtatgtgatttataaagttccgcaagtcagag

SEQ ID NO: 751280 - DNA, 82 bp, Homo sapiens
tccacccaccgccgccgcctcccagtgtgtgttttaatagaaaagttgtcactttccaaaatgccctttagaggtgacaccg

SEQ ID NO: 751281 - DNA, 80 bp, Homo sapiens
cttctatgaggcagagatcaatcttcagttgcaggacgaggagcggaggcggcagcagcagttagaagagatgcgcaagc

SEQ ID NO: 751282 - DNA, 100 bp, Homo sapiens
cgggccctctggaccctggagtacaccccgcagcacagccgcgacttcaagttatcaaatgcttgatggaaaatcttgaggaagaagtatctcaggctga

SEQ ID NO: 751283 - DNA, 51 bp, Homo sapiens
ccttttccatgcactggaggagaggcaaccactgagaaaacggaaccgaat

SEQ ID NO: 751284 - DNA, 100 bp, Homo sapiens
agctttctgaaatggtgtcccaccgcaaggactggagaaggattgtgcttcaagaagaccatagggaagaacgcattttcatcttgctgcaaaagttgca

SEQ ID NO: 751285 - DNA, 75 bp, Homo sapiens
ccgctgacgtttttagatttcatccaggcagacatctggtccctgggcataacagctattgaacttgcaagaggg

SEQ ID NO: 751286 - DNA, 80 bp, Homo sapiens
atgaatgcaagaggcgtttctataagaattggtcttccccagggaggtcctgaactacacagctgagaacatctgtaagt

SEQ ID NO: 751287 - DNA, 101 bp, Homo sapiens
aggaaaggcaggaacttgcttctaaaattaaagaggatcttgctctgtcacccaggctgcagtgcagtggcgtgatcatagttcactgcagcctgaaactc

SEQ ID NO: 751288 - DNA, 100 bp, Homo sapiens
gctccatccgggaagccggtggggccttcggaaagagagagcaggctgaagaggaacgatatttccgagcctaaaaccattggccaaccgtcacgcaact

SEQ ID NO: 751289 - DNA, 82 bp, Homo sapiens
ccggggtgtcgagggatttattcccaagaactacatccgcgtcaagccccatccaatgtcacaggtagactaatggttggcc

SEQ ID NO: 751290 - DNA, 98 bp, Homo sapiens
aacctggatccttggatacaggaaaccaacagtcacacatgtacattacagacatggcagggaggtttaatagacatggataagaagtccactcacag

SEQ ID NO: 751291 - DNA, 101 bp, Homo sapiens
ggatttaacatctacgtcagtgataaaatctccttgaatcgctctctcccagatatccggcacccaaagtgtgattcccttcagtacggcggcaccgtgga

SEQ ID NO: 751292 - DNA, 100 bp, Homo sapiens
ccagaagtgagtctcctgggagaatggatgagcctaagcaacccagctcccaggtcagtgactggtgggaggaatttgtgtacctgcgctcccgaaatcc

SEQ ID NO: 751293 - DNA, 83 bp, Homo sapiens
gcaaaacagaaccttccaaatttccttttccaactaaggtgaaatgacaatggatgctctgttggctcgattgaaacttctga

SEQ ID NO: 751294 - DNA, 75 bp, Homo sapiens
cttccccgttagaactcgcgtttccacttcagagatctgggtgtccgcaatgttgccagtgtctgtctgcagatt

SEQ ID NO: 751295 - DNA, 75 bp, Homo sapiens
gaacagcctgaagaagggctccctcgtgaagaacctgaaggacacactaggatggtgattgctcacaccaaagcc

SEQ ID NO: 751296 - DNA, 98 bp, Homo sapiens
agcccctgctggcaagtcaagtggcaactccgtcagctcgttagaaagtcggacgaggaaggcagccaggagaaaggaggggacgacagccagcagaa

SEQ ID NO: 751297 - DNA, 83 bp, Homo sapiens
gcgcttcatgtgcaaccttgactgccaggaagagccagattcctgcatcagaaatcctaagtaatgcactgaagagaggagag

SEQ ID NO: 751298 - DNA, 98 bp, Homo sapiens
tggatacatagcagcccatccttcgcaaacggaacctccagcagccagctctctacccccaagtctaagcagtctcccatctctacgcccaccagtcc

SEQ ID NO: 751299 - DNA, 50 bp, Homo sapiens
gccctgaggcaagagaagaaagggtcatcgagcagctcggtgggaagcag

SEQ ID NO: 751300 - DNA, 75 bp, Homo sapiens
ccatacccaataaccaggtgcttggcaaaatcgagcgggccattggtactccaaagattcaggtttactcacgtc

SEQ ID NO: 751301 - DNA, 100 bp, Homo sapiens
cgagaatagacacggcagcgcagtgcagatccgcaggcgcaaggcttcaggcgacccgtactgggcctactctggtggtcctgccatcatggctgtcctc

SEQ ID NO: 751302 - DNA, 98 bp, Homo sapiens
tcgcctgcgccccgcacccctccgagcagcccggggatccagcacgcaggaatatgcactttctggttggaatttgaataacatgcctgtcctggaac

SEQ ID NO: 751303 - DNA, 87 bp, Homo sapiens
accctctcaccctccgtgcgccagggggctcagcatctgctgcgaatctccggcctcggtctccacctctgggcaggagagttgccg

SEQ ID NO: 751304 - DNA, 82 bp, Homo sapiens
gagttcaccgtgtaccgcatgcagcagtacgacctgcagggccagccctacgctgtgagccgtgagctttgaggcggtggga

SEQ ID NO: 751305 - DNA, 83 bp, Homo sapiens
actccaaccacgacggggccgacgagacctcaggtctgatacgtggcgcctggtgaacccaccagcacggccccaccttgaaa

SEQ ID NO: 751306 - DNA, 98 bp, Homo sapiens
gcaacccgaagacagggaaatttaggtgatcctagaccttgaggaagaaaggcagcggcatgcacaggatacggctgaaggagatgatgtcacctaca

SEQ ID NO: 751307 - DNA, 90 bp, Homo sapiens
aggtcatgaaggacctgagcctgacgcgggccgcgcggacgtccttctatggccgcttcaggcacttcttggatatcatcgaccctcgca

SEQ ID NO: 751308 - DNA, 60 bp, Homo sapiens
cttcatcaaaaatagtgatagctttgataaccttgcccctcttgctcgccttgaaaatgg

SEQ ID NO: 751309 - DNA, 98 bp, Homo sapiens
gatgcaagaagtttctaggaaaggccggacaccagatgagttttgatcatcctgagaaaaatgggccttggcctgcagacccaataaaccttccctcc

SEQ ID NO: 751310 - DNA, 98 bp, Homo sapiens
cggaccccatctgagctccacaatgataacttctccctctccaccattgccgagggctctcacccaaatgcaaagtgtttcatggatttcaaagctgg

SEQ ID NO: 751311 - DNA, 100 bp, Homo sapiens
cttacaaccaccaccaccactaccacctccaccttattcctgtgatccaagcggcagtgatttgcctcaaggaagaagccatggatttaataaatagaga

SEQ ID NO: 751312 - DNA, 75 bp, Homo sapiens
cttggaagacctggcttcccaggtgggcctacgcactcaggtgtgccagaaggctggcgagatctccctcctgaa

SEQ ID NO: 751313 - DNA, 98 bp, Homo sapiens
atgcagaatgccaccaagtatggcaacatgacagaggaccatgtgatgcacctgctccagaggatgtcacccccatcccctctgacagcactcgcagg

SEQ ID NO: 751314 - DNA, 124 bp, Homo sapiens
acagatgttaccacttctgtggctgctaccccactcctgggccgtccctgaaggagcacggtctgaatctgcacagagcaagatgctgagtggagtcgggggctttgtgctgggcctgctcttc

SEQ ID NO: 751315 - DNA, 75 bp, Homo sapiens
ccgagagcgtgaccgagagcgcgaatatcgtcatcgttagaagtgcctttcagaatttgcccactcatctggtat

SEQ ID NO: 751316 - DNA, 100 bp, Homo sapiens
cgcaaaccaaggatctggggatcttcgcactatcccaaggaagcggtgactttcaaggatgtgatagtggactttacccaggaagaatggaaacagctgg

SEQ ID NO: 751317 - DNA, 82 bp, Homo sapiens
tcagcgactgtttgatgacgtcccgcagaatgattacggacctgaagccaaagaacaagatgcgctagtggacagattgctg

SEQ ID NO: 751318 - DNA, 83 bp, Homo sapiens
ggcgtcgcgcgcgcctgtagctcgcgggcctcgcagaggttgacggatatattcagacgttacgacacggatcaggacggctg

SEQ ID NO: 751319 - DNA, 82 bp, Homo sapiens
ccgcaacgccgagcgcaccgacatctgcctgctcaaagggcgaactttctgaccaagtatacaactacccagagggcctagg

SEQ ID NO: 751320 - DNA, 98 bp, Homo sapiens
catcgcctccaagaagggcaactacaggtatggcccatctcctgtacgcttggagcgacctttggctacgtggctggccttgttatttcaccactctg

SEQ ID NO: 751321 - DNA, 80 bp, Homo sapiens
ggtattaccaagagctgtccaattgcatttgtgtcttttggacttctctgagcggtaagaatgattgatgttggctgata

SEQ ID NO: 751322 - DNA, 82 bp, Homo sapiens
tcgtcttctttagctgccgttccatcagatgaaggatttgggggcagagcacttggcaggtcatgaaggggtccaacttctc

SEQ ID NO: 751323 - DNA, 98 bp, Homo sapiens
cccaccgccgcccgccgggaggaccgagcctaagagggcagccgcctgaaggaacgcgacggcggcgcccgcagggtgtcaaattgagaaccaggtag

SEQ ID NO: 751324 - DNA, 82 bp, Homo sapiens
tcgggaggaggagagcttcacctgtcggcttggagagatccagctgtcgcctggttgggcccggaaatgggacgtcgcgctt

SEQ ID NO: 751325 - DNA, 74 bp, Homo sapiens
ctcgtgcctggcggcgtgggcccgggcgagcagccctgcctccggacggttgtggaaaatgcccttaaagtgaa

SEQ ID NO: 751326 - DNA, 75 bp, Homo sapiens
tgatgtctgacaacgtggatcgttgttttgaaacgagttcatgatcaagtgttgcccacaccaaatgcttcatcc

SEQ ID NO: 751327 - DNA, 75 bp, Homo sapiens
ccggtttctcccacatcgacctggcttgggcactgtttaaaggaaagttccgagaaggcatcgacaagccggacc

SEQ ID NO: 751328 - DNA, 83 bp, Homo sapiens
cggagcctggcgggcgtgggaacccaggccccgccgaggcggccagtgtactaatggtcacttgatgtgcgctggctgtttta

SEQ ID NO: 751329 - DNA, 100 bp, Homo sapiens
cttggatccttgtgggcatgatccataatcggtttcaaggaaaaccagtagattcccagacatcgcgaagtgaatctgaaattgtgccaaaagttgctaa

SEQ ID NO: 751330 - DNA, 75 bp, Homo sapiens
tagtccttccgatggaagcactagacaaagttcacctgagaccagcagaagtagacactgtggatgcattccagg

SEQ ID NO: 751331 - DNA, 96 bp, Homo sapiens
ctctagaggagctgaaagtagatgagggatcgcttacacctgagacgaactacagaacagcacgtaccagaggtggaagtccaagtcaaacgcaga

SEQ ID NO: 751332 - DNA, 75 bp, Homo sapiens
atgatgcctgatgctgctttgaaggcagaaaaccaacagtgagatcaagaattttcggcagaaggttctggagag

SEQ ID NO: 751333 - DNA, 78 bp, Homo sapiens
aggcctccaggagccgctgggagctgccgccaggagctgtcaccatgacgaccaagatcactccatggatgaaatgac

SEQ ID NO: 751334 - DNA, 82 bp, Homo sapiens
gtattctttacctgcttcccaatcccactgatgaggatcagcccatgtttaaggaatttctggggacctacaataaacttac

SEQ ID NO: 751335 - DNA, 96 bp, Homo sapiens
agaggcaaaggggaggttacgcagcaaaccatccagaagtgccggtggtggtgtgcacattgagccccggtatagacagttcccccagctgaccag

SEQ ID NO: 751336 - DNA, 100 bp, Homo sapiens
accccgttgacaaggcactgctttttcatgacggttattcagcttctcaaggctggaaaagcgaaggaagtttcctacaatgcactagcctcacacataa

SEQ ID NO: 751337 - DNA, 74 bp, Homo sapiens
ctgcaaggactccaaagtggtgagggttctcatgtatcagccatcttctgtaagggtgcccagtgtgacttcgg

SEQ ID NO: 751338 - DNA, 75 bp, Homo sapiens
gactatggaaaagttgccaaattgtatgaagtgtaacagaacagactttaccacctgaaactgctgcttcaagtt

SEQ ID NO: 751339 - DNA, 96 bp, Homo sapiens
tctacgagcttgagagaattctgaacagggctgtgtttgatgtggacaagaagaaagggttgactctgattgagctctgggaaggcctgacagtgg

SEQ ID NO: 751340 - DNA, 96 bp, Homo sapiens
ccgagtgcagaagatctgggtgcccgtggaccacaggccctcgttgcccagatatgatatcatcaagttgaatcgaaaggaagggaagaagcagaa

SEQ ID NO: 751341 - DNA, 88 bp, Homo sapiens
gtgagagccggacgggcactgggcgactctgtgcctcgctgaggaattcaattcgtcataatctgtccctacacagcaagttcattcg

SEQ ID NO: 751342 - DNA, 82 bp, Homo sapiens
cccttccccacgcaaccccagatccatttacactttacagcgatcagtgggtgaccgcggctgcgagggactttgtcatccg

SEQ ID NO: 751343 - DNA, 100 bp, Homo sapiens
ataaaagtggccattagtactgtgagcatgaaccttgagctgcagaagaaagatcagcaactggagcctaaaaaaagtaccagccctaaaaaagctgcgg

SEQ ID NO: 751344 - DNA, 108 bp, Homo sapiens
acctgtgcaacaacctcttgaggatcgaatcttcactcccgctgtctcagcagtctacagcacggtgctggagaatctggtaaaagcaccattgtgaagcagatgagg

SEQ ID NO: 751345 - DNA, 82 bp, Homo sapiens
tggacacacaagcaccccaataacctcaaggtactccaaagattcaggtttactcacgtcatccagcagagaatggaaagtc

SEQ ID NO: 751346 - DNA, 75 bp, Homo sapiens
gtgttccgggagcaccggggctccgtcatctgtctggaggatcgaatcatcaatttagttgttggcagcttaaca

SEQ ID NO: 751347 - DNA, 100 bp, Homo sapiens
caacgctggaaaatttgatgcccaggactgccctacatttggcctgtgccactggccaaccggaaatggtacatctcctggtgtccagaagatgtgagct

SEQ ID NO: 751348 - DNA, 82 bp, Homo sapiens
acagctcctcacccccgtgccgtccctcgtgttcacggcaatgtcccctgatggggaggccatcgtcactggtgctggagac

SEQ ID NO: 751349 - DNA, 97 bp, Homo sapiens
tcctggtctacatcctgcgggtgcctttgaaaatcaacgacaacttgagcacaggatcgaatcatcaatttagttgttggcagcttaacatccttat

SEQ ID NO: 751350 - DNA, 75 bp, Homo sapiens
tgaagttgttcattgtttgtcaccacaaaaaggacaggcatttataagacgctgtttggcatatcgaaaagaaga

SEQ ID NO: 751351 - DNA, 75 bp, Homo sapiens
cagaaacacactgatctcctggatggcaagtttctgcaccacagtccatttctaatgtcagtgcttccatctctg

SEQ ID NO: 751352 - DNA, 90 bp, Homo sapiens
tgcgcgccttgtcactggagtgcaagaagaaattcccacctgtcaaagagctttaaggaagcctcctatttcagtttctcaacatgaaag

SEQ ID NO: 751353 - DNA, 100 bp, Homo sapiens
cgctgcatcttcgcactggctgtgcgggtggcttcccacacttctgactcggacgttccttccggtgtcactgaggtggtcgtgaagctctttgactctg

SEQ ID NO: 751354 - DNA, 75 bp, Homo sapiens
gaattatgcaagcacagatttgcttttacaccaacttcgcagaatcaagaacggctatgtgcgtttaaagatccg

SEQ ID NO: 751355 - DNA, 96 bp, Homo sapiens
tgaccaagcccgatccaagaaccttctggactaatgatgatccaggctgacggggtacgggatccaccactgctttgccaggagcatgatgggcca

SEQ ID NO: 751356 - DNA, 75 bp, Homo sapiens
tggttttgcatatagatggccttgatgatacggtggagattctggacgcaaagacaagggagaagctgtgtttct

SEQ ID NO: 751357 - DNA, 50 bp, Homo sapiens
gaactgataaaacccaccagtctagcacttttccagccattaactccagg

SEQ ID NO: 751358 - DNA, 74 bp, Homo sapiens
agaatgatgatgcagtccggccggaaaggggagtcctgtgtatggaaactcacatgagtcagctcagtctagaa

SEQ ID NO: 751359 - DNA, 88 bp, Homo sapiens
agctggaataatgttacttttgagaagcattcgactgctggagaatgctggaggagaccttaaggatggccaccaccactatgaagga

SEQ ID NO: 751360 - DNA, 75 bp, Homo sapiens
ggtacctctccttttccctctccctttccctaaggtaaaaaagagtgtcaagtggacatgcaaagcttgtggaga

SEQ ID NO: 751361 - DNA, 100 bp, Homo sapiens
tttgtggagacatcaatgtatttcttaccaaaagacactttcagctttggcagcatgtaagcagctgtttgccaagaacccaggtcactgctaagaaagg

SEQ ID NO: 751362 - DNA, 74 bp, Homo sapiens
ccatctgaattggctcaatgatgagataacgaaggaggcccaacttcattcaataaggagcctgacggatttat

SEQ ID NO: 751363 - DNA, 100 bp, Homo sapiens
gaaattcgtcattcgaaacatagtggaggccgcagcagtcagggacatttctgaagcgagcgtcttcgatgagacccctggcacaagatccctgccctgg

SEQ ID NO: 751364 - DNA, 82 bp, Homo sapiens
tttgcagaggaatattggacctcaatacctataacgtcgggctgggtataagtaagcaagaagagggcctgggagaagagtc

SEQ ID NO: 751365 - DNA, 100 bp, Homo sapiens
aatatggaactggccaagatcaagcaaaaatgcccactttatgaagccaacggacaagctcaatggtacagcagttccatgaaagtcatttgcgtgtggt

SEQ ID NO: 751366 - DNA, 99 bp, Homo sapiens
agagaatgtgtcagccgatgcaccgagtccagcccaggaaaatggagaggaaccactgtgtctcttgaaacaacaaatagtctcttggatttattgtgt

SEQ ID NO: 751367 - DNA, 82 bp, Homo sapiens
gcgtgccctggcatctccgacaccatggtggcccagctcgtgcagcggctccagaggtgctggagaatctggtaaaagcacc

SEQ ID NO: 751368 - DNA, 96 bp, Homo sapiens
ggtgatggcgcgactctcgcggcccgagcggccggaccttgtcttcacgcaaacatgcagatctttgtgaagaccctcactggcaaaaccatcacc

SEQ ID NO: 751369 - DNA, 75 bp, Homo sapiens
ggcgaacggggcgagcctggaggattgtcactccaacctcttttcgctggctgaaggggatgctaagggagataa

SEQ ID NO: 751370 - DNA, 90 bp, Homo sapiens
gaaaggctactgtaaccccggaatccacctggcaattgaaggaacagactaaaaatcgtgtcctggaaggaaactacaggtactaccagg

SEQ ID NO: 751371 - DNA, 82 bp, Homo sapiens
gctgagtggttgtgtggtcgcgtctcggaaaccggtagcgcttgcagcatgatggcctgcacagcgtgacggcgcagtgtgt

SEQ ID NO: 751372 - DNA, 51 bp, Homo sapiens
gtggaaccagcactatgatctaaatggaatctatttggaatttgcagaagc

SEQ ID NO: 751373 - DNA, 75 bp, Homo sapiens
gacccggtgtctgctcctgtcgccttcgcctcctaatccctagccactatggtatctacgagaccccagcaggca

SEQ ID NO: 751374 - DNA, 73 bp, Homo sapiens
gaagataccggaagtagagtcacggagaggtatgagccagagcgggatgagtggcacttggtggccccaatgc

SEQ ID NO: 751375 - DNA, 85 bp, Homo sapiens
cgcggccgagtcgcggaggcgcctccgctgcagtcgctgcgtctccaagtgacatattcgatgccatgttccctgtcactcacat

SEQ ID NO: 751376 - DNA, 83 bp, Homo sapiens
ctagaactcagttgtgcgttgcggccagtcgccactgctgtcagactatgatgactggagaccgtctctggccagtttgcttc

SEQ ID NO: 751377 - DNA, 82 bp, Homo sapiens
agagaaggaggaggtgaccacgcgcgaggtcttgaggaccggcccagctcaggctcctggggcagcggcgaccagagcagct

SEQ ID NO: 751378 - DNA, 82 bp, Homo sapiens
ctgaggaccgtgtggactttggcttccgagtggacctgccaatcaagtcggcccgctaccgtggccagtacaacacctatcc

SEQ ID NO: 751379 - DNA, 127 bp, Homo sapiens
agaaaacttatcacttctgaagaggaacggtcccctgccaagcgaggtcgcaagtctgccacagtaaaacctgatgatgaagaacgagagcttcaaatggatcctgcagactatggaaagcaacatt

SEQ ID NO: 751380 - DNA, 82 bp, Homo sapiens
catctttcagcagttggcacacatggttaaggaacaggaggaaaccattcagaggtccttctggcactcctctggtggaccg

SEQ ID NO: 751381 - DNA, 83 bp, Homo sapiens
cgccgccaccatgcccaagagaaaggtggtacagaagttggtcctgccctttgggcgactgaactacctgcccctggaacagc

SEQ ID NO: 751382 - DNA, 74 bp, Homo sapiens
gggcgcgtcgcctcggacgtccactgcaccctgcgcgagaaggaactctttgctgaatttggaacgctgaagaa

SEQ ID NO: 751383 - DNA, 100 bp, Homo sapiens
catggactgaagtatccagcgctcattgggaatttagttaaggtgctgggtaggccaggtttcagcatcgcagacaagaagcgcaggacaggctgcattg

SEQ ID NO: 751384 - DNA, 75 bp, Homo sapiens
ttccccagcatcatcttccccacacaatatatggtgagcaaggcagcacaacaagattcgcagcgtggaggggag

SEQ ID NO: 751385 - DNA, 97 bp, Homo sapiens
catgatgctgcagccaattttaacatacatggcctgtggatatatgggcagacaaggaagaattggacattgatctaaaggatatttactacaaaat

SEQ ID NO: 751386 - DNA, 95 bp, Homo sapiens
atgaacccagaggtcgtggaggtggccgtggaggcagaggtggcatgggccatggtctgaaaaagttcttttcttgtcgtggaattgcaattgca

SEQ ID NO: 751387 - DNA, 90 bp, Homo sapiens
aggagaaatacagtcgcaagccaaatgttgggtacaggtttgcagattccgccagcagcacagcaagctctacagatgagtggctctttg

SEQ ID NO: 751388 - DNA, 82 bp, Homo sapiens
cctgcccttgccagaatttcctgcgctgttccacctcattcaacttcagtgcctatgattacacaataccacctatggagaa

SEQ ID NO: 751389 - DNA, 95 bp, Homo sapiens
aaggcagagcggctcccccctttcggtggtgatagtggactggatgggttaggaggaccaggtgtacaactaggaagcccagataagaaaaagcg

SEQ ID NO: 751390 - DNA, 100 bp, Homo sapiens
tccgtggccttagctgtgctcgcgctactctctctttctggcctggaggctatccagcgcccgcgatgctcccagcccggtgagacctgcctgaatggcg

SEQ ID NO: 751391 - DNA, 90 bp, Homo sapiens
gctggagcgcatggagaccaagtggaggaacggggacatcgtccagccagtcctcaacccaggggccggccaggacgtgggccgaagctg

SEQ ID NO: 751392 - DNA, 75 bp, Homo sapiens
ggggagattccggcctggagctcccagggccgaggattttttatcaagcagaaatgcatcgaacaacgagaatca

SEQ ID NO: 751393 - DNA, 82 bp, Homo sapiens
aactctcagttcgagagtaaagatcctgcagctcctgaaaggcaagctggtggtgggtcatgacctgaagcacgacttccag

SEQ ID NO: 751394 - DNA, 51 bp, Homo sapiens
ctgtgcagtatttccagtctgtctcagcggatgtgatgctggtacaaccca

SEQ ID NO: 751395 - DNA, 101 bp, Homo sapiens
caggtccgcccagcagccgcgcttcagccaggttttgacaagcttgcatcatgcgtgagtataagctagtcgttcttggctcaggaggcgttggaaagtct

SEQ ID NO: 751396 - DNA, 50 bp, Homo sapiens
gaaggggaaggcgcctgaagaggacgaagatgctggcaagtcaaccattg

SEQ ID NO: 751397 - DNA, 100 bp, Homo sapiens
ggctgaagcgagccctggggaggagtgttatgaaagaaggtaaagatgatgattcttttgatcggaaatcagtgtaccgaggctcgctgacacagagaaa

SEQ ID NO: 751398 - DNA, 100 bp, Homo sapiens
cgaaggagcggaagaatggcagtgctcaaactcaccgaccagctgtgccgaagcgagtgccacttgtctgcagggccgtaccgcggaaccctctttgccg

SEQ ID NO: 751399 - DNA, 80 bp, Homo sapiens
tgtagaagtggctttgtggaatattcccatctcctgcctcctaatagctttgaggctgcaagctttcttcctggtggcag

SEQ ID NO: 751400 - DNA, 145 bp, Homo sapiens
ctacatcatggctgacatctacagcttcggcctaatcatttgggagatggctcgtcgttgtatcacaggagatggcgagtaacccatgggccaggtagcgttctatgccaaccttgaatgccatcaggaagtcactggacagcaa

SEQ ID NO: 751401 - DNA, 74 bp, Homo sapiens
agcacctccatcaggtacaacctcgaggagctctaccaggtagcaaattatggagttggaggacagtatgaacc

SEQ ID NO: 751402 - DNA, 100 bp, Homo sapiens
tcgttctatttctctagctattgccttattttttctcatggatgttcttcttcgagtatttgtagaaggaaccttctgaggaaaggaggccatacagaaa

SEQ ID NO: 751403 - DNA, 90 bp, Homo sapiens
gcggatctggaggagcagttgtctgatgaagagaaggaggtgagtgcctttggggaagacggcgagggcgacgacctggacctatggaca

SEQ ID NO: 751404 - DNA, 100 bp, Homo sapiens
ctcatcgccacggccaagcatactccggaagaaacctgccacagatgggtgctactcgtgagcagtagtcgccatccagacagatggattgtccctggag

SEQ ID NO: 751405 - DNA, 90 bp, Homo sapiens
tccttgacagcccgggccgagaaggtgttcagcacttactccaacgaggattacgatcgtcgcaacgaggatgtggatcccatggcagcc

SEQ ID NO: 751406 - DNA, 97 bp, Homo sapiens
cctatgtctaagcacagctcatcttcacaaactgaagtggatcttgatttctggaaatgtccaaataatggagagacagcgtctggagaccatcctc

SEQ ID NO: 751407 - DNA, 105 bp, Homo sapiens
taccggaacggcggcgacaagggtgttcccgaactagagtggtccacctggaaggccgctgtggtggaaggatgtttgactgcagagatgtggcattcactgtgg

SEQ ID NO: 751408 - DNA, 75 bp, Homo sapiens
ctgcaactgtgtctgatggcggcaaagaggccatgctgcgacagaaggactatgagaccgccaccctctcggaga

SEQ ID NO: 751409 - DNA, 100 bp, Homo sapiens
caaagtgtgtggagtttgcaaacaaattattgacggtcaaggtatttcatgccgagagccctatgagtttgtctctctggaatggctgcaaaagtggttg

SEQ ID NO: 751410 - DNA, 121 bp, Homo sapiens
aacggtccttgaagttctattccagggctcccaggcagcagaatctgcccacagagttcgggggtgacagaggccgtggtcgtggtgggcgctttggttccagaggaggcccaggaggagg

SEQ ID NO: 751411 - DNA, 87 bp, Homo sapiens
aaacggcgagagtgggcgagaacgtccactgcgggccggcgaaagctgtaccatggggcgcaagttggaccctacgaaggagaagcg

SEQ ID NO: 751412 - DNA, 75 bp, Homo sapiens
gaggaatgaagtgattgctgacattaattgcaaagaccattcctcaagaattttgtatccaaggcccaaaagttt

SEQ ID NO: 751413 - DNA, 51 bp, Homo sapiens
ggtttcctggacccattccgactcagtgaaagagtttctagccaaagccaa

SEQ ID NO: 751414 - DNA, 100 bp, Homo sapiens
aacaggatgctgatagtctccagcgggcctggactgtgggctggtgtgtggaactgaaacttctgcagcatccagaactgagtaatagtcaacttctggc

SEQ ID NO: 751415 - DNA, 73 bp, Homo sapiens
gaccctgggctgcagctgcctaatgaggaatcaaccctgcctaccggactgaggatgccaatgaggacaccat

SEQ ID NO: 751416 - DNA, 100 bp, Homo sapiens
gacacagacggggtggagcccatggaatcggtcctggaggacaggatacagacgtccctcaccagtgccagcttggggtctgcagatgagaactccgtgg

SEQ ID NO: 751417 - DNA, 76 bp, Homo sapiens
tttcagttttggtcatcggaagtggtgccttcagcacagtttggcaatgaggagcagcagctggcgtgggccaagc

SEQ ID NO: 751418 - DNA, 50 bp, Homo sapiens
tttccacacgcccatcatggtgactaaggctgaccccgcactacatctac

SEQ ID NO: 751419 - DNA, 75 bp, Homo sapiens
tactttctcagaaaccttcacatcttggtcaaggaactgcaagcacatgttgaccagataactgaaatggcagca

SEQ ID NO: 751420 - DNA, 100 bp, Homo sapiens
aagggcagtggctgtagctgccctttccgtttccagggttccgaccagggaacagacatccttggaagagggagaaattccttggttacagtacaatgaa

SEQ ID NO: 751421 - DNA, 100 bp, Homo sapiens
cttcagagcgtcacggcgtacgccctcatggggaaaatctccccggtgactttcaggagtctcatagaagagaaagtcaatgaaattaaagaagacagtc

SEQ ID NO: 751422 - DNA, 100 bp, Homo sapiens
ctgatcccttgctcccatccctgcagcatgaacaagagagatggaaaacttgatgactagctccaccctaccgcccctttttgcagatgaagacggttcc

SEQ ID NO: 751423 - DNA, 83 bp, Homo sapiens
gtggacattgccatcccatgcaacaacaaggccgccatggcatcagatgaaggcaaactttttgttggagggctgagttttga

SEQ ID NO: 751424 - DNA, 51 bp, Homo sapiens
attcgggggcgcgagctgccccaggtacaacttggccaagtagaaatcaaa

SEQ ID NO: 751425 - DNA, 100 bp, Homo sapiens
acgccttgaaggacgaggtcagagaactgaagcagatggtggatgcttccaaaagcatcgaagctgtccatgaggacatccgcgtgctctctgaggacgc

SEQ ID NO: 751426 - DNA, 98 bp, Homo sapiens
aagcggggcgcagactaggcaccagcatgcagagtagttcagccctatgtagctacaacctaaagccttctgaatacactacatctccaaaatcttct

SEQ ID NO: 751427 - DNA, 100 bp, Homo sapiens
cccgcaagaagtacaaagtggagcctctacaaccccacgtcagagtgtgggattctgttactctatccacactgcagattattggacttggcacttttga

SEQ ID NO: 751428 - DNA, 74 bp, Homo sapiens
gattcctcagctacgaggaggcgctgaggagagatgcggaaaacgccatgcggtacataaatgggacgcgtctg

SEQ ID NO: 751429 - DNA, 74 bp, Homo sapiens
gactagccttcttctctcctgcttatgctgcctcgggaggacctggtgtgaattattcagggtgtcagatcaca

SEQ ID NO: 751430 - DNA, 73 bp, Homo sapiens
ctttgtaaagtgaaggcactaactcaaagatgaacctctagtcttgctttgaaaaaatcattctgtgtaactc

SEQ ID NO: 751431 - DNA, 75 bp, Homo sapiens
caggcacagcccgagaaaccgcagcactacacggacaggcattagagcccaaacaggatgctttccaaggccaag

SEQ ID NO: 751432 - DNA, 83 bp, Homo sapiens
agcagagcgacaggcagtgaacttcgtggtgcaagaccttgtgccggagccgactactggagatgacagtgatgctgccacct

SEQ ID NO: 751433 - DNA, 75 bp, Homo sapiens
gctgctactgcctgggggctgaggatgacaaaaaagccttcatagcatcaatcctttccatataacaaaaatgga

SEQ ID NO: 751434 - DNA, 106 bp, Homo sapiens
gaaagcactgctgcttggcatacttcttgtagtaaccctgtcaccgtctgctttttgaagctaaactagctgttccatttcctccaagtcaccggcttacagcaaa

SEQ ID NO: 751435 - DNA, 75 bp, Homo sapiens
ctcctggttaatcaagaattctctatttctgctccgtcatccatgccactgatcagctcagctactatttaataa

SEQ ID NO: 751436 - DNA, 59 bp, Homo sapiens
gactgatttttagaactccacatttgaggcctgacggagatggcggtcttcagttgtga

SEQ ID NO: 751437 - DNA, 100 bp, Homo sapiens
gacggaagtgcgagtccgggccctgtatgactatgaggggcaggagcatgatgagctgagcttcaaggctgacacctggatttcattagcatcatgacct

SEQ ID NO: 751438 - DNA, 95 bp, Homo sapiens
cggccggcaccaccgctgcaagagccggattatggtgacaagctgaacatggagctgagtgagaaatacaagctggacaaagagagctacccagt

SEQ ID NO: 751439 - DNA, 75 bp, Homo sapiens
ctctctttctggcctggaggctatccagctgtgtgttttaatagaaaagttgtcactttccaaaatgccctttag

SEQ ID NO: 751440 - DNA, 110 bp, Homo sapiens
ttttgcatctagaggaattgaaaatctcagtgaccagctgctggaggtggtcggcttggaaggagccatggagatggggcaaatatacacaggcctgaaaagtgctggcc

SEQ ID NO: 751441 - DNA, 90 bp, Homo sapiens
ctggcttgggacgaaagtgtcaaggcattacggctcccattgagatcaacaggcggtccttcgggtcggagtggacatcggatggtggcc

SEQ ID NO: 751442 - DNA, 90 bp, Homo sapiens
ggaaaactaagcagtgatgaagacctcgaaataattgttgatcaaaagcagctgtctgtgatcctggaaacatacgtgtgactgaagctc

SEQ ID NO: 751443 - DNA, 83 bp, Homo sapiens
caacaccaaaaagctttctgctaggggagcatcagatccatgctgctgctgactcggagccccacagcttggcacaggctctc

SEQ ID NO: 751444 - DNA, 75 bp, Homo sapiens
gcttcactgagttcattgaacagtacacgggccatgtgcaacagcagtccttaatggatcagtactttgcccgaa

SEQ ID NO: 751445 - DNA, 75 bp, Homo sapiens
caatgaagaactgaagaagctggagttgctcagacagggtctctcattcatcacttttatctgctatgtggcgtc

SEQ ID NO: 751446 - DNA, 95 bp, Homo sapiens
gaagcctgaaaagtcgcagcgagctggagccgccggagaattaaatgtgagggagtctgacgtaagagtttgtgatgagtcatcatgtaaatatg

SEQ ID NO: 751447 - DNA, 96 bp, Homo sapiens
actattctactgctggaagctcaagtgatatggagtttggacctccaacagttaatgataaactaatgagattttttgatcactgtgagaagtttt

SEQ ID NO: 751448 - DNA, 107 bp, Homo sapiens
gtcaccgactacaagggagagaccgtcttccattatgctgtccagggtgacaattctcaggtgctgcaggaggccagatgctccagtgcctgatggcgaaagtgaga

SEQ ID NO: 751449 - DNA, 50 bp, Homo sapiens
ctccagattatctacaacactgatgagctggcgtccagcttccaggccac

SEQ ID NO: 751450 - DNA, 75 bp, Homo sapiens
ggggaaactgcaccacatcagtgaaggagcgggatcgttacgcctacaagattcatcttccagaaacagtagagc

SEQ ID NO: 751451 - DNA, 83 bp, Homo sapiens
gccttcacctacagcatcgtgggcgccggctcccagtttgggtccttttactgtgccatggcaggcagtctcggcttgggccc

SEQ ID NO: 751452 - DNA, 75 bp, Homo sapiens
gcgtctctctgctgcggcgcggggaccgctgtgctctcgattgatgactacagcatggttcgatttttaccttac

SEQ ID NO: 751453 - DNA, 51 bp, Homo sapiens
ccactgcccctggcctaggcagcaggtacgtgaacacactcctgaaactca

SEQ ID NO: 751454 - DNA, 98 bp, Homo sapiens
acagaaacacctaggaagggagaactgttttcggctttgtgagaaaccttaccatcaaacacgatggccagcaacgttaccaacaagacagatcctcg

SEQ ID NO: 751455 - DNA, 83 bp, Homo sapiens
ggatgacatatttttggacctgaaacagaaattctggaacacctatatgggggatatgagactttctactcggaatatcctga

SEQ ID NO: 751456 - DNA, 100 bp, Homo sapiens
ggccaagtacgagcgacaggagttcatctacccggagaagcaggagccctactcggcaggtggtgatgatgtccagcaactctgtgaagcaggagaagag

SEQ ID NO: 751457 - DNA, 90 bp, Homo sapiens
tgacagcctctgggtcctcggtcggtacagtctctgcacctcgcgccccagcagtataactttgaaaatgcatctcagacatttgatgac

SEQ ID NO: 751458 - DNA, 74 bp, Homo sapiens
taccatctaaaatacgaaggtttctggctgggatactcatccagatcatcaggatattctgaaagcaatcgtag

SEQ ID NO: 751459 - DNA, 101 bp, Homo sapiens
tgcggccggagcgggcggctgagacaaaggcgacggacccagatgatgtggtaccagttggccaaagaagagcctggtgttggtgcatgtgctttggacta

SEQ ID NO: 751460 - DNA, 73 bp, Homo sapiens
tgcttttatattcatctcaaaaacaaaattctgaactcaggacttggcaaaaaagagctggaagtcttcctgc

SEQ ID NO: 751461 - DNA, 83 bp, Homo sapiens
agaaaaggcaacatcctgtcacaggccatgctctggcaaaaacaaggaagaggcccagcagaagggactcgctgagccacccc

SEQ ID NO: 751462 - DNA, 100 bp, Homo sapiens
tcgcggaggtgcggagagactccttgggggtcgagcacataacggggttcgggtgtctcgtgtgtgaacatcacagggaggagagagcgatggctttttt

SEQ ID NO: 751463 - DNA, 97 bp, Homo sapiens
gttccttttctccggcaggctcctaagcctaggagagcccgaactggaggcgggcgctaatattgacacctgctcagaagaccagaggaccccgttg

SEQ ID NO: 751464 - DNA, 80 bp, Homo sapiens
ttacgcggatgtcggcgaagagttcaaccagaccatggtgaatccgggcagcagctcgcagccgcccccggtgacggccg

SEQ ID NO: 751465 - DNA, 74 bp, Homo sapiens
cttattggaaaaacatttcttacgagagcactgtgaggtggatgcccgctcaggccgctgtgccaacggggtgt

SEQ ID NO: 751466 - DNA, 100 bp, Homo sapiens
tggaacagcctcggccaccaaggctgatcccaaagaactaatcaagatggtcaccaggcatgtgactcgacatgagcacgaagcctggcctgaagacctt

SEQ ID NO: 751467 - DNA, 51 bp, Homo sapiens
ttttaggcatacaagtaccctggctgaatctcacaaactatgatctctgca

SEQ ID NO: 751468 - DNA, 90 bp, Homo sapiens
cggcgcaggcccacggtagcgcagccgctctgaggtgaggacaccagtgatgaattctgaagcaaaagttctggtgcctgggattcctgg

SEQ ID NO: 751469 - DNA, 103 bp, Homo sapiens
gttcccagagatgaaacaattgttgatctgcatttgagttggtattatctgtttgcttggggtccagccattcaggacggagtctcgctctgtcgcccaggct

SEQ ID NO: 751470 - DNA, 50 bp, Homo sapiens
catccggcacaagcggaccatggtcaaggagaacatcgagctggcgtttg

SEQ ID NO: 751471 - DNA, 82 bp, Homo sapiens
attgtttaaagaatggggagactcctcaagcaggccctgttggaattgaagaagataatgggtgagaactctgtctcagtcg

SEQ ID NO: 751472 - DNA, 113 bp, Homo sapiens
aggaagcgtgcgtccctggcgcttccttcttctcttccggcggagaggtggaacgtgtgatcaccattatgcagaatccacgccagtacaagatcccagactggttcttgaac

SEQ ID NO: 751473 - DNA, 75 bp, Homo sapiens
ctgatatctcaaaaggtgatctggacaaaggaacaggtatctcagtgtgtgttttaatagaaaagttgtcacttt

SEQ ID NO: 751474 - DNA, 101 bp, Homo sapiens
gtgatggaagcaggtggaattatgccctgttggttccaatgctgggattggctgcttttcgtgaaaggaaagcaagccaggatggatatttacgacactca

SEQ ID NO: 751475 - DNA, 82 bp, Homo sapiens
agaaactcacatgagacaaatgcgctcagcttcaattgcaatcccacagagtattgatgaggaaactgaagtttggagcgat

SEQ ID NO: 751476 - DNA, 95 bp, Homo sapiens
tgctccaggaatgggacctcgagtcactgtgggccgagtcttccggagtcagcagagagcctggatggatcacaggaggataagcctcggggctc

SEQ ID NO: 751477 - DNA, 83 bp, Homo sapiens
gtagtttaaatgatacctatcactcaagagactcttcatttagattggattctgaatatcagaaaaagcttgtggtgaagggg

SEQ ID NO: 751478 - DNA, 82 bp, Homo sapiens
cgcaattcgagaatcaaagggccgggagcgatgatgaccgcacctcgagcaggagtggggatgccacgtctgcccccagcgc

SEQ ID NO: 751479 - DNA, 88 bp, Homo sapiens
ggcgagtttccgatttaaagctgagctgcgaggaaaatggcggcgggagaagtccattggaatattaagcccaggagttgctttgggg

SEQ ID NO: 751480 - DNA, 90 bp, Homo sapiens
atcaggtacaacctcgaggagctctaccagatattctctaagccgctttcatcatgggagaaatagagcagaggccgaccccaggatcac

SEQ ID NO: 751481 - DNA, 92 bp, Homo sapiens
ctaagtctacagtaaataaatggagtgggaaatatggctatgagagtatctacgctgccctgaggagcatctatcacagtgaggggcaccgg

SEQ ID NO: 751482 - DNA, 87 bp, Homo sapiens
cgcgccgccgccaacgccgcgcccgacgcagcgatgggcaacacggtgcaccggaccctgccaggtccccggcaacttccacgtgtc

SEQ ID NO: 751483 - DNA, 50 bp, Homo sapiens
ttgtgatatccgatagtgatggagaggcgcagttgtgtagcagttgagta

SEQ ID NO: 751484 - DNA, 101 bp, Homo sapiens
agctgcctccaggtgtttgaatcgctgagcgatatcacagaacacaagattaatcaatgtcaactgacagttgaaaacaatcctcgaacaggaaatcttgg

SEQ ID NO: 751485 - DNA, 75 bp, Homo sapiens
atccagtcctgcaggtcccaacacatgtggaagacatgttggcagataaattgaacatgactccagaagaagctg

SEQ ID NO: 751486 - DNA, 83 bp, Homo sapiens
gttcagatcccagaagacctctccccagtgtatcagtcgaggttatggaggttttgatgactatggtggctataataattacg

SEQ ID NO: 751487 - DNA, 135 bp, Homo sapiens
tccaggagttcgtctcttacgtctgcggaagtgcagctgcctcagttcttagcgcagtgttttccaagcagtgaagcacttgccgtgttgaactgaatgcactactggagaatgttctgggtccaagatgctctt

SEQ ID NO: 751488 - DNA, 98 bp, Homo sapiens
aagaggagaatgtcagagccaccgaggctgtggttgcactctgccaggttctgccgcaccacggcctccacgcagcagggttcttcattgccttcctc

SEQ ID NO: 751489 - DNA, 96 bp, Homo sapiens
cacgggcaaggcggagagtgacggagtcggcgagcccccgcggcgacaggctgatgggaaccaccctgtagaggtccatctgcgttcagacccaga

SEQ ID NO: 751490 - DNA, 90 bp, Homo sapiens
tctacagaagagcttctcctcatcaactggggatgattacagttcttcctaaaaaagatcttcaaagctgctgcgggcattctatgtccc

SEQ ID NO: 751491 - DNA, 82 bp, Homo sapiens
ccggaaaaactacaccaagcacatgttcatccactcggtgcctccggagccagcgtggtggccatagacaacaagatcgaac

SEQ ID NO: 751492 - DNA, 101 bp, Homo sapiens
ttgctgctgctcaaagctgctgccgccccttgggctaaaagatatggctcgtggacagcagaaaattcagtctcagcagaaaaatgccaaaaagcaagctg

SEQ ID NO: 751493 - DNA, 88 bp, Homo sapiens
tttcttcgtcttatctttgggaccctagttcaaagagcgatcgcctcaccggcccatcctccaagccggactgccggcaaatgcctcc

SEQ ID NO: 751494 - DNA, 80 bp, Homo sapiens
ttgaaccagttgagctgcggatccaccctcagcagcagccccaggaggagaagtctgtggtgagtggctgtgatggaatc

SEQ ID NO: 751495 - DNA, 90 bp, Homo sapiens
ggcatacatctttcttcgacaaaggatggttaccataagcgaacagacaggaaatccagaatcattgcaaaaaatgtatctacctccaaa

SEQ ID NO: 751496 - DNA, 48 bp, Homo sapiens
gagccggagcagaagcaaagagacatgggagtcccaccgtattgtcca

SEQ ID NO: 751497 - DNA, 100 bp, Homo sapiens
atggtggacgagcttaagagagactccgccgtggtcatggaggagggaagtccgggcgaggttcctgtgctggtggagcccccagggttggaggacgttg

SEQ ID NO: 751498 - DNA, 75 bp, Homo sapiens
ctctggcagtgacgaggacgaagtgtccgaggggatggtggatccaggagagaagattagtgccacactgaaaag

SEQ ID NO: 751499 - DNA, 49 bp, Homo sapiens
ctgccatgtgttcgagtcggaggatatgtgcactcccagcaacacccct

SEQ ID NO: 751500 - DNA, 75 bp, Homo sapiens
cggcggcggaggatgagcctgcagagcgcgcagtacctccggtgacttaagagattaaaattaatttggttgctg

SEQ ID NO: 751501 - DNA, 50 bp, Homo sapiens
ctagaaggcattgtggaaacaactgcgagtaaccagctcataaatcacat

SEQ ID NO: 751502 - DNA, 100 bp, Homo sapiens
gggaggacatctttatggagaccctgaaagacatcgtggagtattacaacgacagtaacggaaccaaagaggttgttgtaaatgtggatgatgatggagt

SEQ ID NO: 751503 - DNA, 82 bp, Homo sapiens
catggagggagtggacatcagccccaaacaggacgaaggcgtgctgaaggccccagggagcgccatggcccgcgcacgccag

SEQ ID NO: 751504 - DNA, 100 bp, Homo sapiens
ttagcaagaactttgctgctctacttgaggaacatgacatttttgttccagaggatgatgatgatgatgactaacaggttcaagtgattctcctgcctca

SEQ ID NO: 751505 - DNA, 74 bp, Homo sapiens
ttgtgaacaaggatctggatatttattataagactcttgaccaaaaaggcgacggcggattgacagaagtatga

SEQ ID NO: 751506 - DNA, 100 bp, Homo sapiens
tgtacccaactcgaaggcctgcagagcacagtcacaggccacgtagaacgtgcccttgagactcggcacgagcaggaactgtggcgggcgtgtttgtgtg

SEQ ID NO: 751507 - DNA, 90 bp, Homo sapiens
ggaaatgaattttgaaacttcacggtgtgccaccctacagtactgccctgacccttacatccagcggttccgtttgtcaaatgtgtgcga

SEQ ID NO: 751508 - DNA, 100 bp, Homo sapiens
ggatcatgacccaggcgggggtcgccgccgtcgccgccgccaccgcggccgagaccgcgcagccggcgggacagagcgggatgccaccagcttgtccaaa

SEQ ID NO: 751509 - DNA, 50 bp, Homo sapiens
cactgaatcacccatggcttaaggtgttcagctcccgacaggcactgaat

SEQ ID NO: 751510 - DNA, 83 bp, Homo sapiens
ctctccgccgcccgcaccgccgcccgcgccctcaccaggccaccagcttgggctccccacggagggcagcaagtgggacttgg

SEQ ID NO: 751511 - DNA, 74 bp, Homo sapiens
gctgctgcgggatattttgcagaaggactgcctccgggcctgccaggagcagatcgaagccctgctggagtcaa

SEQ ID NO: 751512 - DNA, 76 bp, Homo sapiens
gcggaacgaaagtgaacaggagccgctcttaggcgacacacctggaagcagataatctcagtgataccttgaagaa

SEQ ID NO: 751513 - DNA, 100 bp, Homo sapiens
ttctctgtcagctctttccccgtcagcatcccagccgtgctcacggtcgcacggggcaggcggttgcagttcgagccaaggcctttggattcagcgtcat

SEQ ID NO: 751514 - DNA, 75 bp, Homo sapiens
gtgaagatcatggactatgaagatacctgatggatccagacacattcactttcaactttaataatgaccctttgg

SEQ ID NO: 751515 - DNA, 90 bp, Homo sapiens
gaaagacagcaaacacctgaggtggtacctgatgattctggaactttctatgatcaggcagttgtcagcgcacataaaatccaaatccca

SEQ ID NO: 751516 - DNA, 49 bp, Homo sapiens
ctcaggcgtgcgcggacggtgtgcgggttgtccatctgggactttcaag

SEQ ID NO: 751517 - DNA, 90 bp, Homo sapiens
ggccagaggcatggagtacttggcttcccaaaaagaattgaatgatctggcacgggaccctccagcacagtgttcagcaggtcctgttgg

SEQ ID NO: 751518 - DNA, 90 bp, Homo sapiens
agcataggtgctgggttcatttaccctttggtcggaacggaattgaaagatgttggccatcgtgatcagatggctgcagctagaggaatc

SEQ ID NO: 751519 - DNA, 80 bp, Homo sapiens
gctgacggagatggtgcagaagatggaggagtcaccttcaggccattcagaggaggaaagagaggggaatatgaagtcag

SEQ ID NO: 751520 - DNA, 98 bp, Homo sapiens
ggggatctggtggtcgtgaaactgcttcccgaggagcattggaaggctgaccggttccctgatgtgttacctgcttctgctactgatccaaactgcag

SEQ ID NO: 751521 - DNA, 75 bp, Homo sapiens
tttggaagcgcccttcctagttggcattgaaggttcactcaaaggcaggatgacacagcaagaaggccctcacca

SEQ ID NO: 751522 - DNA, 75 bp, Homo sapiens
aactcattgtattcctcctgagataataatgaagcatcactgcaaaacttgaaagagcgttagaaaaagttgctc

SEQ ID NO: 751523 - DNA, 95 bp, Homo sapiens
tactggagctttggacaggaggtcatacagctgatactacccacccccggttacgcctgtcacataaagtttgcagaattactctcctatgatgg

SEQ ID NO: 751524 - DNA, 82 bp, Homo sapiens
gtcgtgatccagaagtccagagctgaggactgcctgtttgcagctgccttcctatttcaaggaaagacgccaaggtaatttt

SEQ ID NO: 751525 - DNA, 100 bp, Homo sapiens
tttgcgggaggaatatgttaaaacaaactcaagatacgaaatgagacttttgaagtgcctttgatttctggaggagagaacacgtcttacaggatggaag

SEQ ID NO: 751526 - DNA, 75 bp, Homo sapiens
cgcgtccaggaccttgtgaggcagggtggatgtgaacactgaccggaagatcagtgccaaggagatgcagcgctg

SEQ ID NO: 751527 - DNA, 100 bp, Homo sapiens
atcaaaaaggacaccagcaagctgttcaatgaggaggagttcattcaaaagtgcctgcagtctgagcctgctcgcagaccaacagccagagaacttctgt

SEQ ID NO: 751528 - DNA, 90 bp, Homo sapiens
caaaataccaaaatttctacccagctagattttgcttctaaacgacaaatgtgtctgctgctgcccagaggagaaaaatgtgcctgtttg

SEQ ID NO: 751529 - DNA, 74 bp, Homo sapiens
ctgtggaaagaagttgcaaaacactgggtgctgctgatgtagagaaggtggaggaaaagtcagcaatagatctg

SEQ ID NO: 751530 - DNA, 51 bp, Homo sapiens
gagatgaagcctaagaatatgatcagctgagtcagtgctgattctctcaaa

SEQ ID NO: 751531 - DNA, 101 bp, Homo sapiens
acgggaaggtaccaggaggcaaccctgagggaggggctggagacaggtctgaggaggaggcgtcatccacggagaaaccaaccaaagccttgcccaggaag

SEQ ID NO: 751532 - DNA, 98 bp, Homo sapiens
caaagcatgtctgcaacccagccattttcaggttgatgccggcccaggatggatcagacctgtgaactacccagaagaaattgtctgctgcccttttc

SEQ ID NO: 751533 - DNA, 100 bp, Homo sapiens
tgagagacccacggaggcttcgcgggaagacgcggcggcggcggcggaggatgagcctgcagagcgcgcagtacctccgacaatacaatggtgggtgaag

SEQ ID NO: 751534 - DNA, 100 bp, Homo sapiens
ctcccttgatgacttccttgctactgcagaacttgcaggaacagagtttgtagctgtgtttacaggcattggagtttttacatgctaatcaagtgatcca

SEQ ID NO: 751535 - DNA, 74 bp, Homo sapiens
aagcagaatgtccagcgggtcctggaggctgctaacctcttccagccttctgagagaaattgagtggatccgga

SEQ ID NO: 751536 - DNA, 101 bp, Homo sapiens
tcgaaaggagcaagagcaagatcaccgtgacatccgaggtgcctttctccaaaagtgtggggtgatcagccccagatttgacgtgcaactcaaagacctgg

SEQ ID NO: 751537 - DNA, 100 bp, Homo sapiens
cggctgcaggactgggcacagcatgagatccaaaggcagggcaaggaaactggccacaaatgaggacggggacttggttgccttttccagtgacgaggaa

SEQ ID NO: 751538 - DNA, 100 bp, Homo sapiens
ctggacaccagtttgaatcttcctttgagctccggaaagttggctgtggaaccctactaatattggatccagatgaagctgggctaaggctttttagaag

SEQ ID NO: 751539 - DNA, 50 bp, Homo sapiens
cacagagcccatcaagcccgagcagggtattttaagcctggaatattgtg

SEQ ID NO: 751540 - DNA, 100 bp, Homo sapiens
cgcccgcttcctccttgccaggagattgatgcactgagtaaaagaagcaaggaagctgaagcagctttcttgaatgtctacaaaagattgattgacgtcc

SEQ ID NO: 751541 - DNA, 75 bp, Homo sapiens
actaggctatgagaggaaactccagaaaccacagaccattcctcaagaattttgtatccaaggcccaaaagtttg

SEQ ID NO: 751542 - DNA, 75 bp, Homo sapiens
cggcaacccggagaaggtctacagagcggcctgcgccagcgagtggtatggtcaggaaaaagactacaatgtact

SEQ ID NO: 751543 - DNA, 96 bp, Homo sapiens
gtccgacgaggatatcgtgtctggagcagtggagcccaaagacccctggagacatggctgttcggctcttgaatcccagcgatgaaaccaggaact

SEQ ID NO: 751544 - DNA, 75 bp, Homo sapiens
taggtgagtcgcggtgggtcctcgcttgcagttcagcgaccacggatgacattttgattaacaggccagcaaaga

SEQ ID NO: 751545 - DNA, 82 bp, Homo sapiens
ggaaagcggcggactatgtccgaagcaaggatttccgggactacctcatgaggcctgggttctgaggaaaacgcaatggtgg

SEQ ID NO: 751546 - DNA, 90 bp, Homo sapiens
cgccgcgctcagcgacaaacaatgtcttgggacaaggtgcgcattcctggtgtgctgcagcgattgggagtgacatactttgtggttgct

SEQ ID NO: 751547 - DNA, 75 bp, Homo sapiens
cactgctttccactcggctcctgtcgtccgttctctcaggctcccgttcaggggcactatggcagacaaagttag

SEQ ID NO: 751548 - DNA, 96 bp, Homo sapiens
tgggaaatgaaagagcgccttgggacagggggatttggaaatgtcatccgatggcacaatcaggcaatctgaaggcaaatcctgtttagacccagg

SEQ ID NO: 751549 - DNA, 100 bp, Homo sapiens
cctcccaccctgagcagagccgccgaggatgataaacacccaggacagactggcccgggagcaagcgcgagtgtgcgaactgcagagtgggaaccagcag

SEQ ID NO: 751550 - DNA, 82 bp, Homo sapiens
ctgggccgccgaatctccggccgaagagcggcggcggcagcggcgatggcttcgtgcccctgggcaccctcctgcagttgcc

SEQ ID NO: 751551 - DNA, 73 bp, Homo sapiens
gtatctgtcatggagcggcccaagacttgtggagatcacccaatcaggaatgcagctatatgtaaaccaaagg

SEQ ID NO: 751552 - DNA, 82 bp, Homo sapiens
cccccgagaagtacttaaaaaaacattggaattctgcttatctagcaattctgtggtgttcttggtcacacatttatggagt

SEQ ID NO: 751553 - DNA, 100 bp, Homo sapiens
gccgccgcctgaggaggcgagctagccgggagttacaccgccaccgccaggttcaacttgcctcgaaccctgtgctggatgcctggtacggtgctcgtga

SEQ ID NO: 751554 - DNA, 74 bp, Homo sapiens
tcagcgcagtatattactgcagaatccagcaagctaaagtgcaaattcttcccgaatgtgtgttgccttcaacc

SEQ ID NO: 751555 - DNA, 90 bp, Homo sapiens
cgaagttggaagtgtctcttagcagcgcgcggagaagaacggggagccagcaaagccttctagacaagctcagtggaatctgaagggccc

SEQ ID NO: 751556 - DNA, 100 bp, Homo sapiens
tccgaaaaacactgaatgctggggcgtactccaaagttgttcaggaacgcgcgatgtacaatacggtgtggagtatggaccgcgatgacgcagactggag

SEQ ID NO: 751557 - DNA, 83 bp, Homo sapiens
tccagatccatcacgtggggcaggacggtcaggtgagaagccctaccactgcaactgggacggctgcggctggaagtttgcgc

SEQ ID NO: 751558 - DNA, 83 bp, Homo sapiens
ggacattcaggaattctcctgccaccgcgtggtgcttgccgcagccagcaactatttcaggaggaagttaacatccctaatag

SEQ ID NO: 751559 - DNA, 100 bp, Homo sapiens
ctggagctcttcgacccacccaagcttcttctcagcctgttgataaccatgttagcccatcttccttcttgggccagacaccagcatctccagccagata

SEQ ID NO: 751560 - DNA, 82 bp, Homo sapiens
cagctgtgaaaaactctttggatgattctgccaaaaaggccacgcccagatttcttctaccgctgcttccctgatgggctag

SEQ ID NO: 751561 - DNA, 117 bp, Homo sapiens
ctttctacctgcccggcctggcgcccgtcaacttctgcgacgaagaaaaaaagagcgacgagtgcaaggaaagcgtctctagcagctgatatccccagacttggatatagttcctca

SEQ ID NO: 751562 - DNA, 100 bp, Homo sapiens
aggacaagctggactttgcccctcccaccccaccccattaccctccacatgtgagacggtttaagcggaagcatcttactgccattgactgccagcattt

SEQ ID NO: 751563 - DNA, 100 bp, Homo sapiens
aaacacgttctgattaaccaagggaaagatatgatccgccaaatgatgattaaaatatttcgctgcattgagccagagctgaacaacctaattgcattag

SEQ ID NO: 751564 - DNA, 100 bp, Homo sapiens
ttcctatggaggccctgtctgcaatgatcatgaaaccgtcgtgccaccagatgttccaagctacctctcttctcaggggaccctttctgaccgacaagaa

SEQ ID NO: 751565 - DNA, 80 bp, Homo sapiens
ggaagtgagagcagcggcagccggcggtgcagcagccggccgacccagagtttactccacaggatccgctgaacatagga

SEQ ID NO: 751566 - DNA, 100 bp, Homo sapiens
gagcgatcgctattgctgaaatgtacagaggggccaggtgtaagcatctctgaagagagacaaagtctggctgaaaactctgggacaacggttgtttaca

SEQ ID NO: 751567 - DNA, 50 bp, Homo sapiens
caacgacttcgagcgtggcgcggatcttggcctcactactgtttgggaag

SEQ ID NO: 751568 - DNA, 100 bp, Homo sapiens
ctcctgtttaatatggccggggtgacattccggccaggagcacctctccacccactgctgctggtctgaccgccttcctggaagtccctcttgaggcagg

SEQ ID NO: 751569 - DNA, 100 bp, Homo sapiens
ccagggccggttctgcaccatcttcaggtcctactccaggggcgctcagggcgaagctgtgctcaggcccgggctggacgcagagccagagctgtcccca

SEQ ID NO: 751570 - DNA, 51 bp, Homo sapiens
ttcaggctgaaggtttagcgggtgccgctggtggaggccattgtcttgcca

SEQ ID NO: 751571 - DNA, 90 bp, Homo sapiens
gctctatatggagcagaaaaacgagcgcctggagttgcgaggaggtggtggcagcagaggtagttatggaggaggtgatggtggatataa

SEQ ID NO: 751572 - DNA, 100 bp, Homo sapiens
tggaccagacccacttctacctgggcagtgccaacatggactggcgttcactgacccagatcctgaaggacacgcaggtgactcgacaggccttaaatga

SEQ ID NO: 751573 - DNA, 100 bp, Homo sapiens
ctccaagaaagtgaagaagaagagagggaggagaggtctggcctccaactaagtcttgaacaaggacacagcattgttggttttgccatgtactatttta

SEQ ID NO: 751574 - DNA, 75 bp, Homo sapiens
ttgcagcacttgttccccaaacaagtgctcctacattctgccactgaggcggctcccagctgcgttggcgacatg

SEQ ID NO: 751575 - DNA, 100 bp, Homo sapiens
gagtggtccagtgcatttcagagctgggcatctttggggtctatgtcagctgagcttcagtcattgtctattcctggaacttaccaagagaagatcaccc

SEQ ID NO: 751576 - DNA, 76 bp, Homo sapiens
tcctgctggaacacagcatagcatgattgcaaccacaggaaaagtgtccgcaaatatggtaaagattttcaagcta

SEQ ID NO: 751577 - DNA, 95 bp, Homo sapiens
agcccatcccgttctctgatttgcagcaggttgatgaaaagcccagaaccttgatgacagattgtctggttataaagcattttttacgtaaaatc

SEQ ID NO: 751578 - DNA, 97 bp, Homo sapiens
atgccctgaaaaagtatcgtcgagaagcctatcatcggtcaattctttgtgatgatgtcaccacaagaagtactgcagggaggaagccagcgctcaa

SEQ ID NO: 751579 - DNA, 108 bp, Homo sapiens
gataggagaaggatgtggactgcagtgctgcagtgccagtcccaagagtactatgatccctattttcaagatgtggcatctgagatgttgagaagacacacagccagc

SEQ ID NO: 751580 - DNA, 100 bp, Homo sapiens
cggccatctttgctcctccctgcaactaactccattcttaattggccagaagcctgtcttagatgttcatgcagaactagacagaattacacgaaaacca

SEQ ID NO: 751581 - DNA, 98 bp, Homo sapiens
ccataaaactgaagatgtgaatactctggtaatagcctgcagctggtgttttgagaagccctactgctgaaaacttaacaattttgtgtaataaaaat

SEQ ID NO: 751582 - DNA, 100 bp, Homo sapiens
aaaccctagtgaataaagccaagagagaccttggagtaattcgtcgacagaaggacgcatgctgtttcttagggacacggctgacttccagatatgacca

SEQ ID NO: 751583 - DNA, 75 bp, Homo sapiens
caatccttggctcactgaggaggtttgaaagttcaggagccctggaaaggagaaggaataagacggcaggaggaa

SEQ ID NO: 751584 - DNA, 51 bp, Homo sapiens
catgaacgcctttggagacatgggtcagtgtggctcttgttgggcttttag

SEQ ID NO: 751585 - DNA, 82 bp, Homo sapiens
aagtatgtggcatgattctgtgctatatttggctcctggttcttcttcttcacaagcacagatatcacaatttctggctgta

SEQ ID NO: 751586 - DNA, 100 bp, Homo sapiens
tactgtgacactgaccaccaggccaacttaacatcagcagatatcctgtctcagatgaagaggaagaggatgaaatggattctggcacgatggttcgagc

SEQ ID NO: 751587 - DNA, 76 bp, Homo sapiens
cattttcctaattttcaaattgttgagctgtttgccataatggccattcaaactcctccccacgacactctgaagc

SEQ ID NO: 751588 - DNA, 102 bp, Homo sapiens
cctcaccttgatgaggacgttgtcgtagctggtgggattcatgacgtcatagcagatgagcacgagatgtctctgcccacccacgcaacccagactatgaag

SEQ ID NO: 751589 - DNA, 98 bp, Homo sapiens
tgctggagcaagaggcagagctgtgggcggtggagtctagacttccccaaggcgtgtacccaggctgtgggtgagcgtggaggatgctcagatgcaca

SEQ ID NO: 751590 - DNA, 107 bp, Homo sapiens
aggagctgtaatcaattgtgctgacaacacaggtgtgatgaatgcagactctgctaccattttggctgtttggatcctcctttgaaaaagtctcctaaacagacagg

SEQ ID NO: 751591 - DNA, 100 bp, Homo sapiens
ccgtccccagaacgcagatcagaggtagtcggacctttcccgctggcgcgcagcctcagctagagtacaggggctcaggtccaggtggcaggggatatgc

SEQ ID NO: 751592 - DNA, 100 bp, Homo sapiens
ctccatatgcaaagtattataggactgaagattttgagggtaataaatgaacccacagcagcagctatggcctatggtctccacaaggctgacgtcttcc

SEQ ID NO: 751593 - DNA, 96 bp, Homo sapiens
cgctgtctccaagtcctttttccaccagctcagatagcacagactttagctgctgataaagatgatagttcagaagacatttcagtgccgagtagt

SEQ ID NO: 751594 - DNA, 50 bp, Homo sapiens
cgactactcaccccgagtgtaaagattttggaaataatcagggttatttt

SEQ ID NO: 751595 - DNA, 88 bp, Homo sapiens
ggagaattacccgaaaaacaaccacactgcttcgatcctggacaggatgcaggcagatgacataagcagctctatgaccaatagcaca

SEQ ID NO: 751596 - DNA, 100 bp, Homo sapiens
ctggagcggagccggccgtacgcggtgctgcgagggcagaacctggtgcccaccagaagtatgtccgacaagcctggcagaaggcagacatcaatacaaa

SEQ ID NO: 751597 - DNA, 90 bp, Homo sapiens
gttcccggctccgtggggccgtcttcccggcgagtccgcgacggtcgccgcccacggcgaggtcgggatcaagaaccagagatcgcagga

SEQ ID NO: 751598 - DNA, 101 bp, Homo sapiens
catcgcgacgctgctcaaaacctcgctccggaaaggggacacctggagctcatgggacacatgtagctagtatagctgctggacactttccagaagaacct

SEQ ID NO: 751599 - DNA, 100 bp, Homo sapiens
aagaatgccaccaaagcaggcgatgacgagccagagtacgagctctgtgacttcctggagactcacttcctagatgaggaagtgaagcttatcaagaaga

SEQ ID NO: 751600 - DNA, 80 bp, Homo sapiens
acaacattttgtgttgcagttgactccctcaatggattggtttacataggtcaagcaagatgatgatgaatgaagtcctg

SEQ ID NO: 751601 - DNA, 82 bp, Homo sapiens
gtgggtgtaatacatcatgaactgcaggtgcaggtcgtaatctgaaggagtggctgagggagcaattttgtgatcatccgct

SEQ ID NO: 751602 - DNA, 100 bp, Homo sapiens
caggaactcataaatgccacctcaacaattcagagactgtggatattcataaggagaaagtggcacgaagagagattggtattttgacaacaaataagaa

SEQ ID NO: 751603 - DNA, 100 bp, Homo sapiens
gcagttcctgcggggagctcgggccatgtgcatcgagtcttgggctcgtttctctctgatctgttcagcctgtgtgcgctgtaagagctgtggggcaact

SEQ ID NO: 751604 - DNA, 82 bp, Homo sapiens
ccctgcccctacatttggagcctggacacgcagtacagcaagagacaagaggagcagcagcggcaccgcccctcaccctgga

SEQ ID NO: 751605 - DNA, 75 bp, Homo sapiens
gcgatggtagatcaacccccaggccaggagtggtggctcacacctgtaatcccagctctgggaggccaaggccag

SEQ ID NO: 751606 - DNA, 75 bp, Homo sapiens
actggctgggaagaagcatatacttttgaaggtgcaagatactatataaatagccggatcgagctgggagatgtg

SEQ ID NO: 751607 - DNA, 95 bp, Homo sapiens
cccgcgtccgccgattcctcctccttggtcgccgcgtccttggctggcgtgactggactcgggccatatccgtggtgccgtcaacatgcctttca

SEQ ID NO: 751608 - DNA, 83 bp, Homo sapiens
atcagtcactgtcagcgacagacccctcggggtgtccatcacaaaagccgaggccctcgggaccaaggatcacgtcatgactc

SEQ ID NO: 751609 - DNA, 88 bp, Homo sapiens
cgagaccggctacttctcggcgctgccgtctctggaggagtactggcaacaggattttttatcaagcagaaatgcatcgaacaacgag

SEQ ID NO: 751610 - DNA, 90 bp, Homo sapiens
cggagacggtgtcccagctggattcggtgcgggtctggctgggcaagcactacaagaagagttatgcccagccaagtcttcagtatatcc

SEQ ID NO: 751611 - DNA, 87 bp, Homo sapiens
gattctgatgatgagcttactgtagaacaacgacgacagtccattggtgaatctgtaaaatatttcctggataacttggataaactt

SEQ ID NO: 751612 - DNA, 90 bp, Homo sapiens
gaagctattaaaaatgtgaacacagcactaaatacaactcagcaggaggatgcattagcacaacaggcctttgaagaggctcggagaagg

SEQ ID NO: 751613 - DNA, 138 bp, Homo sapiens
gccgggaggtgacggctagcagcgtgagaaggccgctggctcctgagaaatccccctcctccagatgagtataggatcaaaccagtggaagaggtcaaatacatgaaaaatggggcagaagaagagcagaaaatagca

SEQ ID NO: 751614 - DNA, 100 bp, Homo sapiens
gcttcaacccaattcgtgaaggtatcaacacaggctaccagcagaaaactgagcttccggtcacagagaacgtgcagacgattcccccgccatatgtggt

SEQ ID NO: 751615 - DNA, 50 bp, Homo sapiens
cgccaagccgcggagcctccagacgggccagaagcggactcctagaagag

SEQ ID NO: 751616 - DNA, 90 bp, Homo sapiens
caaatacatttataataggagtccagctattgctgctgttgggcaagtgtccagagaatggctgggatgaaagtacacttgaactctttt

SEQ ID NO: 751617 - DNA, 74 bp, Homo sapiens
tttgcagagaagtgatcgtgacagttggtagacaacatcgggtactccagcgttatgtttggtggaagaaaagt

SEQ ID NO: 751618 - DNA, 50 bp, Homo sapiens
cctccagcggggatgacacagaagcgaccgtggcagccatgtattacagc

SEQ ID NO: 751619 - DNA, 100 bp, Homo sapiens
gcgtgccccaccatgtcagacgcagccgtagacaccagctccgaaatcaccaccaagatataattggtgattacaactttcctctataaattaactcttg

SEQ ID NO: 751620 - DNA, 100 bp, Homo sapiens
tcagcgctgttgcaagggatcacagagaccatattctacggggctttcagcaaatcaaagccaggggttatggttttgtgaaattcacagatgaactgga

SEQ ID NO: 751621 - DNA, 82 bp, Homo sapiens
ttcggcagtccacccaccgccgccgcctcccaggtactgtcctagatgttaaggacacaacattgagcaaaaacatgcatag

SEQ ID NO: 751622 - DNA, 98 bp, Homo sapiens
caagaatttgcaagaaataatctcatgggcgatgacatattctgttattatttcaaacttttccagaattacctgaagacatcaggagaatacaaact

SEQ ID NO: 751623 - DNA, 100 bp, Homo sapiens
acatgcctgcggccaagaagcagaagctgagcagtgacgagaacagcaatccagacctctctggagacgagaatgccatttcataattctgaatcatgtc

SEQ ID NO: 751624 - DNA, 75 bp, Homo sapiens
tcgagcgtgcccgagacccgaggtgaggaaaatagcagctgaatactatgacaacctccctcactacaattcctg

SEQ ID NO: 751625 - DNA, 83 bp, Homo sapiens
aaccaaggtatgaagaatgctaattgagttggatggcaagcatgtggtgtttggcaaagtgaaagaaggcatgaatattgtgg

SEQ ID NO: 751626 - DNA, 95 bp, Homo sapiens
aaagatgcaagcctggcattttttgatgattgtgtagataaaattggtggaacgagaatgcctacacgcagccacaggaatccagtttccatgga

SEQ ID NO: 751627 - DNA, 74 bp, Homo sapiens
tgtgccccaggtgaaggccagtgctctcaaggatgaatctggttatagatggacaagagacgatcattctgcaa

SEQ ID NO: 751628 - DNA, 82 bp, Homo sapiens
ggaacaggtaatgagaatcttcgccttgcgccctgggcgctgcctatggcacagccaagagcggtaccggcattgcggccat

SEQ ID NO: 751629 - DNA, 75 bp, Homo sapiens
cctgaagtgacacaacacatgttttcttctggtatctggctaaaagacggtctcgccacattgcccagactggtc

SEQ ID NO: 751630 - DNA, 101 bp, Homo sapiens
acttggtcaaattcaatagctgttacctcgacgagtacatcgcaaggatggttcaagcccacaggcggttttgtgagctgcttccccaggagcagcggagc

SEQ ID NO: 751631 - DNA, 98 bp, Homo sapiens
cctcctcttcattccgcagcagcactccgacaggactctgacaccaccataccaatggacgaatcactgcagtttaactcctccctccagaaagttca

SEQ ID NO: 751632 - DNA, 100 bp, Homo sapiens
ctccgagggtggcacggctgcgggcgcgggcctagactcgctgcacaagaacagcgtcagctgggacgatgccggagtgtgaaggagtttgagaagctga

SEQ ID NO: 751633 - DNA, 89 bp, Homo sapiens
gtggtaaagacacttgtggggtgagtcatccctactcccaacatctggaggggaaaggctgctgctcctgctgccctgtgggctgtgcc

SEQ ID NO: 751634 - DNA, 83 bp, Homo sapiens
gctaaagcagcgtgcgttcagccctgggtgtccccaactcctgcccagccagtccacgcggtgccggctcctccagttaccgc

SEQ ID NO: 751635 - DNA, 90 bp, Homo sapiens
ggtggggcccgagaggccggcggggcctcccgggaggagaacggggaggtgaagccgctgccccgagaggagaaggcagagcccccccag

SEQ ID NO: 751636 - DNA, 98 bp, Homo sapiens
tatgtctcaccatgcagcagctctcaagaaagtttcctacactactgaggtttaggggcactgtgaagcaaaagccacgcctcagaatcccaggcgga

SEQ ID NO: 751637 - DNA, 75 bp, Homo sapiens
cagcctggggatcacctgactgacatcaccttaaaggtggcagaaatgggtgggtgcacccttcactggctccag

SEQ ID NO: 751638 - DNA, 100 bp, Homo sapiens
tacctgcacatcccaccccctcagctctcccctgcccttcactcatggaagtcttcaggtctcggaggaccccatcctagccctacctgtctcggcccgc

SEQ ID NO: 751639 - DNA, 100 bp, Homo sapiens
caacaaccttatttcgtgctgtgaatccagagctcttcattaaacctggagagaagtcttttttcctccagccaggagagcagctggaacaaggcatcca

SEQ ID NO: 751640 - DNA, 74 bp, Homo sapiens
cggccgagcggcgacggaccgcgaggatggcactggatctttaaaacgcagtggttcctttagcaaactccggg

SEQ ID NO: 751641 - DNA, 97 bp, Homo sapiens
cgacggcagtgtcatcgtctgccatggcatggtgtacaagttggtgttcgaggaagagacattgttgttcttggtgtggagaagaagtcagtggcca

SEQ ID NO: 751642 - DNA, 100 bp, Homo sapiens
ttactccagccacggccactggctcctccccgtctcctgtgctaggccagcacttagtcggtcggctaattggcaagcaggggcgctatgtgagttttct

SEQ ID NO: 751643 - DNA, 88 bp, Homo sapiens
tttggtgcagactttgctgagggtgacccagctagtatgttcaacacaccaggaatgcagagcttgttgcaacaaataactgaaaacc

SEQ ID NO: 751644 - DNA, 80 bp, Homo sapiens
cgcgccttcggaagcccgttcggcctggaggagccgcagtgggtcccggacaaggaggcgcatattaaatttcctattga

SEQ ID NO: 751645 - DNA, 75 bp, Homo sapiens
tcctgctaatgggactgggccaagtgagctgaagaaggggaacaaggaacccaaccctatggtacaactgtcaat

SEQ ID NO: 751646 - DNA, 51 bp, Homo sapiens
gcctcccgaagtgctgggattacagctctctgatgtaaaggatggagtaaa

SEQ ID NO: 751647 - DNA, 75 bp, Homo sapiens
ggcccacaagatccagtccccacaggagtgggaggcgatccaggccttgacggaaaaccgtcttcagatacagtc

SEQ ID NO: 751648 - DNA, 101 bp, Homo sapiens
gcatctgggccatcttcaatgttgcttagccagacaatgaaggatcatctagtaagagtagcaaatgaagctgaatttatcctgagcaggcagagagcaga

SEQ ID NO: 751649 - DNA, 74 bp, Homo sapiens
gaattcaatgaacattcctgctcttgttggcaaaagtgttctgccagttctggataatccactgtccaagaagg

SEQ ID NO: 751650 - DNA, 100 bp, Homo sapiens
cctgccctggcagcatggctcagactgcatgacagggctccaaggtgggcaaactgaccctcaagaccacagagatggagaccatctacgacctgggcac

SEQ ID NO: 751651 - DNA, 97 bp, Homo sapiens
aatgtcacctctatcatgtttctagtagcgcttagtgaatatgatcaagttctcgtggagtcagacaatgagagtgaagggaatattttgattgccc

SEQ ID NO: 751652 - DNA, 75 bp, Homo sapiens
aaattcctgacgttcattgatctgatgggcaccagttgcgtcttgaagtgccatcagctgtaaccaaagttccac

SEQ ID NO: 751653 - DNA, 97 bp, Homo sapiens
aagaagcagctccacgaaaggcagccgcggatcgccgcgctcagcgacaaacaaccaaagaagcctaaagccccagacaatccatttcatggcattg

SEQ ID NO: 751654 - DNA, 75 bp, Homo sapiens
aaactggtcagcgtttccctggagaggaagaggcaaggccaccaccacctatcatgacagatggtgaagatgcgg

SEQ ID NO: 751655 - DNA, 100 bp, Homo sapiens
taaggattccaagtaactcttatttgctaagtatgtagattcaaaacttcgtgcaggcaacaaagaagctacagatgaagaacttgagaaaatgttggat

SEQ ID NO: 751656 - DNA, 82 bp, Homo sapiens
caaccatgctcaacttcggtgcctctctccagcagactgcgtgcctccggagccagcgtggtggccatagacaacaagatcg

SEQ ID NO: 751657 - DNA, 101 bp, Homo sapiens
gcacccggtgtaccgcggcgagaagccccagctgcactacgcgatcttagcaaagcaatgtctcaagatggtgcttctcagttccaagaagtcattcggca

SEQ ID NO: 751658 - DNA, 100 bp, Homo sapiens
tcagcttcccagcctaccactggaccctctgctgcctctccaggaatcctgcaatatggcgaacataagagaatattatgagagagctttgagagagttt

SEQ ID NO: 751659 - DNA, 51 bp, Homo sapiens
catttttgtgggctggataataaacaagcttccacagcgcggcacctgtac

SEQ ID NO: 751660 - DNA, 100 bp, Homo sapiens
gccggaggagcccctcaggccgtatcatgatattagctggtttgacatcaagtcatttgtgagtcatcagatcttctcctgaaaatgggagacacagtag

SEQ ID NO: 751661 - DNA, 50 bp, Homo sapiens
ctttgggcgtcccattgccatggatcttttgccagaaatgagggcatact

SEQ ID NO: 751662 - DNA, 90 bp, Homo sapiens
ggagtgggcgccggagcctatgtgctggccaagtttgcaatttccacaagacggcaccctatgtcgtcactggcagcgtagatcaaacag

SEQ ID NO: 751663 - DNA, 100 bp, Homo sapiens
ggagcattgaggaccgtgttcaagaggaagcccgctgccttgtggaggagttgagaaaaaccaaggttcgatcctttggtacagaagacagaccgacaga

SEQ ID NO: 751664 - DNA, 100 bp, Homo sapiens
ggcctctcaaagtgctggtattacagagtcattcttatagaagagcatcagaggaagataaaaaagaatcctcaatgtcaggcccctgagcccaagctaa

SEQ ID NO: 751665 - DNA, 100 bp, Homo sapiens
tttctatgcccctctatgcagtcatgtatcctgtgtttaatgaggcataatgattataaagtggtttctcctgctttgcgagctgtgggaaacattgtca

SEQ ID NO: 751666 - DNA, 97 bp, Homo sapiens
agaggccagctcagacctcccggctcgacaggcggcgcgggcggcggaaactactttgcttcgcactttttcatgggaggagagaaattcgacaccc

SEQ ID NO: 751667 - DNA, 100 bp, Homo sapiens
aggcctgattcaggtggccagcagggagcagctcttgtacctgtatgccaggtacaaacaggcaattaagttggaatatgcaaggttggttaagttggcc

SEQ ID NO: 751668 - DNA, 90 bp, Homo sapiens
gggggtcatcacagagaaggagacccaggtgggaggcacactgttcgaagctgacttctccctgctggatgggatcaaggccaacgtcat

SEQ ID NO: 751669 - DNA, 75 bp, Homo sapiens
ggagtcggcgagcccccgcggcgacagattcaagatggaaaaggtgatgtaaccattacaaatgatggtgctacc

SEQ ID NO: 751670 - DNA, 82 bp, Homo sapiens
tgcccttcaccgcgggcgccaatggggagcagaaggactcggacacagacgctgaccggaaaggagattgagattgacattg

SEQ ID NO: 751671 - DNA, 90 bp, Homo sapiens
gcctttaccaacgccatcaccgacctcatcagtgagctgtccctgctggaggagcgcttccgggactggaaggatcaccagcacatatgc

SEQ ID NO: 751672 - DNA, 82 bp, Homo sapiens
cccagatgatgcggtggtgggggacctgccggcacgcgactccccccgggcccaaagttaattatagaaaatgccaagtagg

SEQ ID NO: 751673 - DNA, 100 bp, Homo sapiens
gccacccatcaaatcagagagaaggaatccaccttcttacgctatggcaggagtccaacctataccttctcagggaggcaaactagaaatagctggcact

SEQ ID NO: 751674 - DNA, 90 bp, Homo sapiens
tagcagctagtaacttcacttatttcagggcacagactgtggggctcccagtgaccatgcattcaccgaacatgaggctgctgcgatctg

SEQ ID NO: 751675 - DNA, 83 bp, Homo sapiens
cttggcctccatggtgtcagagcaaggagaagctgttgacctgcctagagctggaacgttacctccagagcgagccctgctat

SEQ ID NO: 751676 - DNA, 100 bp, Homo sapiens
tgcaaattcatgacaggattattgagaaactggcgatggaatatgagaggagccctctggaaagaaaaggacagaccctgtgctttcatgaaagtgaaga

SEQ ID NO: 751677 - DNA, 116 bp, Homo sapiens
ctgcgctctccgcaccgcggcttaaatgatgtattttgtgatcgcagcgatgaaaggagaatggggtactaagagaaaagcacgaagctgtggatcatagttcccagcatgaggaa

SEQ ID NO: 751678 - DNA, 115 bp, Homo sapiens
caacatcgcggtgcagcgaatcaagcgggagttcaaggaggtgctgaagagcgaggaggacctctggccatgtagacaaatttgctgacttcatggtgaaagacgtaaaaaatgg

SEQ ID NO: 751679 - DNA, 90 bp, Homo sapiens
ggtaaagtcctgggcacaagccagcgtcacccatggagcacatggagatggcaaaatggcaatacctgtgctttggaagtttctggagaa

SEQ ID NO: 751680 - DNA, 75 bp, Homo sapiens
tctccgggcgcaagtgcctccccagtttatttccccccaggacttgattattcttagaaatgcacttgacctgct

SEQ ID NO: 751681 - DNA, 89 bp, Homo sapiens
cccatcccctaccagcgagggcgcctccgaaggctgggaggcggcagaatgcagccagaggagggcacaggctggctgctggagctgct

SEQ ID NO: 751682 - DNA, 82 bp, Homo sapiens
gaaagatctaccttctggaagctactactacgtggtgcttggaaaggtgtttgatttcaccaccatagacttgacatctgag

SEQ ID NO: 751683 - DNA, 96 bp, Homo sapiens
tggccaccgcctccagcttgccaccaaagacctgcgactttgctcaggcgaagttcttctgtgttgtgcaggcggagctgaaccattgcaacagca

SEQ ID NO: 751684 - DNA, 104 bp, Homo sapiens
ccgcgcagggagctgctgacacagccctgcaggcagctggaggagcagctgagccgccttcagcgtgagaagaatgagatccagaaccggctggaggaagatca

SEQ ID NO: 751685 - DNA, 83 bp, Homo sapiens
caaaggatgcctccacacctaccactacccgtgtgccagcgatgcaggcaaaacccatttatggcggttggctgctcctggct

SEQ ID NO: 751686 - DNA, 75 bp, Homo sapiens
agaaatctagcactggagaaacagccacccagagttccctcactgaagatctgagcatgacccgggacgaggcac

SEQ ID NO: 751687 - DNA, 100 bp, Homo sapiens
aaacaagaacttcaacatccatggaacgtattcacaggcctccactgggctctcagtaggtgggatttgtcagcagttctcattgcctgagaacatccag

SEQ ID NO: 751688 - DNA, 75 bp, Homo sapiens
cggacgggcactgggcgactctgtgcctcgctgagggcaagccggtatattcggggcccaggagcaaggaaaagt

SEQ ID NO: 751689 - DNA, 100 bp, Homo sapiens
caagagagagccctcaccaggaacgattggaccagcaccttgatcttggattttctagcctccagaactgtacaccaggggttggaaaaaccacactagg

SEQ ID NO: 751690 - DNA, 98 bp, Homo sapiens
cggcgccgtgttcgtggacaaggagaacctcaccatgccgggcctcaggttcgacaacatccagtatgagaataatgttatcactattgatctggttc

SEQ ID NO: 751691 - DNA, 76 bp, Homo sapiens
cctgctgtcacccagacccgcggtgcgacagataatttctgctgctgaaacattgacattgcatccatctagtaaa

SEQ ID NO: 751692 - DNA, 100 bp, Homo sapiens
ctagctttgtaggagcatggcttggagcacttcctattccactggattgggaaagaccatggcagggatgaattgtaaaagcaacatcagcttgaccagt

SEQ ID NO: 751693 - DNA, 90 bp, Homo sapiens
gagagaatttgtgatgatgagctgatcttaatcaaaaagtactcaccagatgagctgcggtatctgccattaaacacagccctgtatgag

SEQ ID NO: 751694 - DNA, 100 bp, Homo sapiens
cgacagtgccctgagggccttcgagagctaccgcgccagacagagcgggacaaggagaaccggcatcggaagcgcagccacagccgctctcggagccggg

SEQ ID NO: 751695 - DNA, 100 bp, Homo sapiens
cactgatcttgcaaactcagatgcgctgaagctagctaaagaagttgatcctcaagatgccattctaaatatggtgaatattgctgctaatattctggga

SEQ ID NO: 751696 - DNA, 96 bp, Homo sapiens
actgaggcacgagcgggtgacgctgggcctgcagcgcggagcagaaagcagaacccgcagctgcagtgagaagaggagtttgttactttaaacaga

SEQ ID NO: 751697 - DNA, 75 bp, Homo sapiens
ttagaccccaatgagaccaatgaaatcgccaatgccaactcccgaaacccctcctggagtttccccaaagccatg

SEQ ID NO: 751698 - DNA, 74 bp, Homo sapiens
tcaagaagatccagaatgatgctggcgtgcggatacagttcaagcaagggccaagccacagacattgccatcca

SEQ ID NO: 751699 - DNA, 78 bp, Homo sapiens
gaacaaaatctggcctgaaataaaagggccttggtgtaccttgttgtagtgtttgaaaacatctgaggctgcatccat

SEQ ID NO: 751700 - DNA, 98 bp, Homo sapiens
gccatttccgagaactcccatcagtttctgtatagtgtaaaagattacatcgtcagcccaaacatctccttgcatttttgttggctgaattgggtaca

SEQ ID NO: 751701 - DNA, 99 bp, Homo sapiens
acagtgccctctgcagctgaataacccttttaacgagtattccaaatttgatggcaaggtggagccgccaccaaaatgcagattttcgtgaaaaccctt

SEQ ID NO: 751702 - DNA, 96 bp, Homo sapiens
cagcctcatttgttttctggtgtcatcgtaggtggccacctatggcttttggggtcagccctgacaaaggtcagctagccccttgaggacatcagc

SEQ ID NO: 751703 - DNA, 49 bp, Homo sapiens
aagccgtccccggccacgcgggacggggccatgtgaaactttctgactt

SEQ ID NO: 751704 - DNA, 50 bp, Homo sapiens
ctccggagaagagaggctgcagcaggtgtgggcccatcgctggatggatc

SEQ ID NO: 751705 - DNA, 100 bp, Homo sapiens
cgcaagacattgtttctctccctctgcccccccttccccacgcaaccccagatccatttacactttacagttgtgaccgagattcccgacgagagagact

SEQ ID NO: 751706 - DNA, 75 bp, Homo sapiens
ctggctccgggctgagcttcctggagaagaggaaggttccagttacagccatcccttgtcataacttttgaactg

SEQ ID NO: 751707 - DNA, 89 bp, Homo sapiens
atatttggcatactttgtgcatgcagcagcggatattcaactcctttgtttacactgagaaaatctcaaatggagaaagtgaagtacag

SEQ ID NO: 751708 - DNA, 96 bp, Homo sapiens
cggtgcccgaggaggcagccaagctcatggcctgccactgcgtgcccacaatggtgcgcatgaatgtcctggcagatgctctcaagagtatcaaca

SEQ ID NO: 751709 - DNA, 100 bp, Homo sapiens
tggtggtgcagcttcttcagttccaggaagatgcctttgggaagcatgtcaccaacccggccttcaccaaactccctgcagttgcagtggtgcagaatgg

SEQ ID NO: 751710 - DNA, 85 bp, Homo sapiens
ctgcaactctctctccattaaagtcgaggaaagctcttgttcagcttctggaatttctgagcagccctcgtcagtacaagatgga

SEQ ID NO: 751711 - DNA, 50 bp, Homo sapiens
tgttagcctttgcagtctcgacataagttttttgttccagcagctgggaa

SEQ ID NO: 751712 - DNA, 125 bp, Homo sapiens
gtaaatatctagcggatcctagtaatctctttgtggtttcttctgatttctgccattgggctaaaccaggtggacaggtgaaatgtcagtatatctctgctgtggataaagttatatttgtggat

SEQ ID NO: 751713 - DNA, 75 bp, Homo sapiens
tgttcaccgccaaccccttcgagcaagacgtgggtttatcttgcagattatggactttcctacagatattgtccc

SEQ ID NO: 751714 - DNA, 82 bp, Homo sapiens
tgctggctgcttccagtgttcgccgagagggcccccagatgccgacggccctctctacctcccctacaagacgctggtctcc

SEQ ID NO: 751715 - DNA, 133 bp, Homo sapiens
gaaacagtatctcacctccctaaactggttaatagtggcatggaagatccatttggacaggaagatgtcacccaagcgcatagctaaaagaaggtcccccccagcagatgccatccccaaaagcaagaaggtg

SEQ ID NO: 751716 - DNA, 78 bp, Homo sapiens
gaaaaaggcagtgagggggaaccaggaataagagtgggactcttccctggacactgtgttgagttaattaaccaaaaa

SEQ ID NO: 751717 - DNA, 96 bp, Homo sapiens
gtggtctaaggcgccagactcaaggaaactgttaaggcagcaataatagaagagcagaaacgaagtgaaaaggctgtggaagaggcagtgaaaaga

SEQ ID NO: 751718 - DNA, 83 bp, Homo sapiens
cctggcggccggcttggagaggccgagggtttgatgaaggtggaggcagcgcggctctcaggagaaccaggtgcatcagcgca

SEQ ID NO: 751719 - DNA, 100 bp, Homo sapiens
gggacccagggcccgggatcgccgagcccgacctcgggcgccccgccggtcacctccgcgcggacaccagacgcatcttctctccagactgccgatccca

SEQ ID NO: 751720 - DNA, 100 bp, Homo sapiens
gtcgggctggtgtcttcagagtggctgtgtcagaagggcctcgtgtatgacagaaggtctctggcatcagcatggacgtggctgtgcccgaggaaaccgg

SEQ ID NO: 751721 - DNA, 75 bp, Homo sapiens
ttacacaggagctgcagtgctgtactctaaggtggatccataaagaacccagccaacccgcagagggaggggagg

SEQ ID NO: 751722 - DNA, 83 bp, Homo sapiens
cttagctgtgctcgcgctactctctctttctggcctggaggctatccagcgccagaagaatgtttgaaggtgagatggcaagt

SEQ ID NO: 751723 - DNA, 87 bp, Homo sapiens
caagtatctttttacaggacttaaattgggatccacaaatgctaaagagctgtcttccaagggagtgaaaatctgggatgccaatgg

SEQ ID NO: 751724 - DNA, 75 bp, Homo sapiens
gatgatgtacagcagagcttttttcttgctgaaacattaaaattgcttcacctgtggtatcagacatcacaacat

SEQ ID NO: 751725 - DNA, 80 bp, Homo sapiens
aaaatcagtagaagaaatacgccacatttattctaccggggaagacagtgggtatatgaatgacctaaaggtacaaataa

SEQ ID NO: 751726 - DNA, 83 bp, Homo sapiens
gtctcaatctctggaaaaacttcttgccaaccaaataggttcagctgcagcccggaaagaaatcataagaaacaaaattcgag

SEQ ID NO: 751727 - DNA, 107 bp, Homo sapiens
gggcctccgcagcgacaacatggaggccgtgaagaccttcaatagcgagataccatgtttgtgtggaagtgccccgtgtttgctatgccgatgctgtcctagtggaa

SEQ ID NO: 751728 - DNA, 75 bp, Homo sapiens
ccgcagggttcggatgagaccagcggtttgctgtgtttcaaagaagggtgctgaccacagtagtgctcccccagc

SEQ ID NO: 751729 - DNA, 98 bp, Homo sapiens
ttggtaggcatgaagttgttggataagatttcctccgttccccatggggaactgtcttgcaaacctgagccagcagaagagtacactgagcaaagtga

SEQ ID NO: 751730 - DNA, 95 bp, Homo sapiens
ggcttgatgaaggcgtggatagcctgaaggcagccattcaggaggtgttcctgctcatatgtttggcgtgacaaagtttggggataacattgagg

SEQ ID NO: 751731 - DNA, 83 bp, Homo sapiens
tggcccagcaaatgcaactagccaatgccatgatgcctggtgccccattacaacccgtgctcaaagcattcagcaaaccaggg

SEQ ID NO: 751732 - DNA, 109 bp, Homo sapiens
ttcagtcctgctcgtcggaggacccggttgccatggtgaaggaaaaaggttcgagaacttgtcttggacaattgcaaatcaaatgatggaaaaattgagggcttaacag

SEQ ID NO: 751733 - DNA, 51 bp, Homo sapiens
gctgatcctacgggagagccccagggggaaatttgcagtggtgagaaaatg

SEQ ID NO: 751734 - DNA, 95 bp, Homo sapiens
gacatcgccctggatgtcttcgcgctctggctggtctcccctctgctgggttaatttggagtggcccctggagtcagtttcctacaccatccgag

SEQ ID NO: 751735 - DNA, 90 bp, Homo sapiens
gcatctggacagtcaacacgggcaccatgaagcacttcctgagattgctcgctgtaagcagctcatctgtgaccccagctacgtaaaaga

SEQ ID NO: 751736 - DNA, 75 bp, Homo sapiens
atttggtagcctttgcatacaagaatgtgaaatttgttctcaagcacaaagttgtggaaagtaaaaatgtagccc

SEQ ID NO: 751737 - DNA, 108 bp, Homo sapiens
gacgatatctaatattacagctggaaatagggcacagatccaggttggatggcaagcatgtggtgtttggcaaagtgaaagaaggcatgaatattgtggaggccatgg

SEQ ID NO: 751738 - DNA, 98 bp, Homo sapiens
ggtggcctaccaggaggccaggggtgtcgccatgggcaattgaaggaacagactaaaaatcgtgtcctggaaggaaactacaggtactaccagggatt

SEQ ID NO: 751739 - DNA, 87 bp, Homo sapiens
ctcgggagaagcagcgcctgttcccggggcagatccaggttcaggaccatggccaacctggagcgcaccttcatcgccatcaagccg

SEQ ID NO: 751740 - DNA, 82 bp, Homo sapiens
gccaccctcgctccctctgctcttcctcccttcgctcgcaccatggtccggacaggccgagatgacgccgagccccctgttg

SEQ ID NO: 751741 - DNA, 74 bp, Homo sapiens
cccgaggacaccgactaccagcagacctcctgccccccgaggtctgcagtctcctgaacccagcagccatctac

SEQ ID NO: 751742 - DNA, 82 bp, Homo sapiens
ggaggattcagggaataggagctggggagcccttctgcgccacaggtgaagatggagctggaaaaacaagcttaataagaaa

SEQ ID NO: 751743 - DNA, 98 bp, Homo sapiens
cattctgggtgacctgaatacagcccaccgccccattgaccactgggatgcagtcaacctggcctgccgaggaggaactgaagacgaagaacatggat

SEQ ID NO: 751744 - DNA, 83 bp, Homo sapiens
tgaagagcgacaagccgctggcagccgcggatctcaccgccgctcagggatgctccagaccttgtatgattacttctggtggg

SEQ ID NO: 751745 - DNA, 100 bp, Homo sapiens
ccttattttttctcatggatgttcttcttcgagtatttgtagaaggatcattcgtaactgaggcacacttgccttttgcaactaagctctactgaattcc

SEQ ID NO: 751746 - DNA, 100 bp, Homo sapiens
ccacaggctcctgccctggactaccgagatctttaaatggatgagatggctaccactcagatttccaaagatgagcttgatgaactcaaagaggcctttg

SEQ ID NO: 751747 - DNA, 100 bp, Homo sapiens
atgtcttcagaaatgcaatcacagacgtcacaaggtttttacagatggactctcactctgtcgcccaggctggagtgcattggaacgatctcagctcact

SEQ ID NO: 751748 - DNA, 82 bp, Homo sapiens
gtgagattcccttgcaaatttacatacgagaatggcttgtgaaatcatgcctctgcaaagatggcgttcaggaagtggctta

SEQ ID NO: 751749 - DNA, 75 bp, Homo sapiens
ccgccgctgagccgtcgcggagccgcgcagccctcggagcacgccgccaagctgagccaccaaagaaggaggctg

SEQ ID NO: 751750 - DNA, 83 bp, Homo sapiens
atcagccaactgaaagaccagcaggatgtcttctgcttccgatataagatccaggccaaaggccggaaggtggtggtcgtacg

SEQ ID NO: 751751 - DNA, 101 bp, Homo sapiens
caaaaatgggcctggttgaaacaaaattggcgattattcctggtggagatgattcacctccagcagaaagggaaccaggagaagttgtggacagcctggta

SEQ ID NO: 751752 - DNA, 50 bp, Homo sapiens
ggcccacctccccaccaaggaaggggatcctcttggtgtatgacatcacc

SEQ ID NO: 751753 - DNA, 75 bp, Homo sapiens
tgcagttctccatcgtgccaaacccttaggagaaatcttgagagtggacagcaattgtgaagatcgccagagagt

SEQ ID NO: 751754 - DNA, 74 bp, Homo sapiens
atccatttctcctattgaggagtcaacgtttcccaaatgtggggaaaagcagcattatcaatagcttaaaacaa

SEQ ID NO: 751755 - DNA, 75 bp, Homo sapiens
agttggaccccatcctcgtgctggaggaacaggattatatctgtccaagatgcgagtctggttttatcgaggagc

SEQ ID NO: 751756 - DNA, 100 bp, Homo sapiens
aagacctttgaagttctgtccaacaaagtatatgaagacctttactacccaggagaccatcacgaatgcagagacggcgaaggagtggtttctccaggcg

SEQ ID NO: 751757 - DNA, 90 bp, Homo sapiens
cagacatcggcctccatgacctgcgctctcagctgaccatcatcccgcagctctctggtgatgaattctactctgacgtggccaaaggca

SEQ ID NO: 751758 - DNA, 75 bp, Homo sapiens
gcaggtgctagcggccccttcgccctgcaggtcagctggccgccggcacctgtgagattgtgaccttggaccggg

SEQ ID NO: 751759 - DNA, 75 bp, Homo sapiens
ccatggcctctcctggactggctgcgtgaccccgacggctgcttctgggtgtggacactgccagcggctgcagcc

SEQ ID NO: 751760 - DNA, 96 bp, Homo sapiens
taattatattagaaattgcagccatagtatcattgggcctttctttttatcagcctccagaaggggataatgcaccttcgcagaatcaagaacggc

SEQ ID NO: 751761 - DNA, 99 bp, Homo sapiens
gtgccattaacgagctggcgaagatgggcgacccggatctcctggaagtgttggcggaggaagctcaccatctgctacctggatatgctgatgaccagt

SEQ ID NO: 751762 - DNA, 90 bp, Homo sapiens
gaattccaacccagcattgccaaaaaatatatagatcagaaatttgtattacagctctctctcactctcttggagattgtttatgctgag

SEQ ID NO: 751763 - DNA, 82 bp, Homo sapiens
ctttccactcggctcctgtcgtccgttctctcaggctcccgttcagatgcagctgactttgcctgtagcctcatagaaccca

SEQ ID NO: 751764 - DNA, 96 bp, Homo sapiens
gccagtgggaactctaatattggatgttccctttctacagctgctggaggactggactgctactactactcctggctgtggcagtgagagaatcct

SEQ ID NO: 751765 - DNA, 83 bp, Homo sapiens
cggccgccgaggggcccgcagtagctgcgctcccggggaaggagccccacagtccccagacaatgcagatcttcgtgaagact

SEQ ID NO: 751766 - DNA, 106 bp, Homo sapiens
tcgacaagaccatgctggcaagtctgaaggtcaacctgcctagggtagttaaaagacgagtgaatgctctcaaaaacctgcaagttaaatgtgcacagatagaagc

SEQ ID NO: 751767 - DNA, 100 bp, Homo sapiens
ggaatacctcgtatgcaacctcaggcttcagccagctttgatgaactaggtggacttctcaaaccaacagtggcctctcagaaccagaaccttcctgttg

SEQ ID NO: 751768 - DNA, 75 bp, Homo sapiens
gcaggaaggccactcacagggcttcaacaagctagctgagggtgtccgcaatgttgccagtgtctgtctgcagat

SEQ ID NO: 751769 - DNA, 100 bp, Homo sapiens
ctgccccttgtcaacagctacacacgtgtgcccccactgggtgtgggccgaagatatgctcatgtggtgttgaggaaagcagacattgacctcaccaaga

SEQ ID NO: 751770 - DNA, 100 bp, Homo sapiens
ctgtgcagtaattgtcacacagaagaaagtacctaatctcactctgttgcccaggctgaagttcatggcgcgatctcggctcgctgcaacctccacctcc

SEQ ID NO: 751771 - DNA, 82 bp, Homo sapiens
gaagactccactgatttcttcaagtcaggggccgcgtctgtggacgttgtgaggtccactccatactcggcatacgacccag

SEQ ID NO: 751772 - DNA, 104 bp, Homo sapiens
tataatcctgaggtgtttgacaaaacataccaattcttgaatgacatccgagcgaaagagaaagagagacgagttgtactgctgtcacaggaaatggacgctgg

SEQ ID NO: 751773 - DNA, 75 bp, Homo sapiens
gaaccatcaagtgaggaaagtgatctagagggagcactatgtctgcggaagtccccgaggcagcctccgcggagg

SEQ ID NO: 751774 - DNA, 80 bp, Homo sapiens
ccgcgctgacaggggggcctggccgcgcagccggtcagcccaaggccaaccccactgtcactctgttcccgccctcctct

SEQ ID NO: 751775 - DNA, 100 bp, Homo sapiens
ctgctctactgcttcccctcctgtctccagttctccacgctctgtctcctcaacctctacctggcggagccggaaatcactgtggaaaatcttcccagtt

SEQ ID NO: 751776 - DNA, 82 bp, Homo sapiens
taaaaaccgaaagccagtggtcatgaagataaaaccggggcattccagaaagatgaggatatttgctgtctttatattcatg

SEQ ID NO: 751777 - DNA, 75 bp, Homo sapiens
cagatcctgccccgtggccgcggccgtctcgtagacaaagccacagacccaagcatgtcggaacaggattggtca

SEQ ID NO: 751778 - DNA, 75 bp, Homo sapiens
gcagacgacgagctgagcttcaaaaggggggacatcctcaagaagggagaattccacaagttggctgatgccaag

SEQ ID NO: 751779 - DNA, 100 bp, Homo sapiens
cccaacgaggtgtggaaccccttcttgctggaactccacggagagactgatttcgggcagacaacttgaacaagctgaagaacctatgcagcaagacaat

SEQ ID NO: 751780 - DNA, 74 bp, Homo sapiens
acaaggggaaatttggcttgcaattcatcactttgaaaaggctgtcagcttgttggaagaggtcatcactcccc

SEQ ID NO: 751781 - DNA, 100 bp, Homo sapiens
gacaaattatgctgcagcatattgtactggcctgctgctggcccgcaggtcctcacacaggtattcaggaataccaggatggcgtgcccaagattccaac

SEQ ID NO: 751782 - DNA, 87 bp, Homo sapiens
cacggttatactctgcaaggtggtgttccagtggcaaacagctgtataaactcttgtaaacagctgctcagataaagaatttgatga

SEQ ID NO: 751783 - DNA, 100 bp, Homo sapiens
cagaccctggagcctcagttggaagcagccgatccagcctgcggagcctgtggggcaggctcaccagctggattccctcctgggggcttcattcccaaaa

SEQ ID NO: 751784 - DNA, 111 bp, Homo sapiens
gtggtgaatcccctgtttgagaaaaggcctaagaattttggcattggttatgatgtgattgctcaagcccaatctgggactgggaaaacggccacatttgccatatcgatt

SEQ ID NO: 751785 - DNA, 75 bp, Homo sapiens
cggaggcacccgaatgctgcccgggtgaggctcaagaatgggacatggacgcccggcggccaatgccttttcagt

SEQ ID NO: 751786 - DNA, 88 bp, Homo sapiens
ctggtggggctcacggcgcctgccttggcgctggccggctacatcgagactttatattcagagcaccaatcaaattaagcaagcctgg

SEQ ID NO: 751787 - DNA, 75 bp, Homo sapiens
cggatgggcaccctgggctcgatctccagcagtacccgcggctacgggaggagatggagcgcatcgtgaccaccc

SEQ ID NO: 751788 - DNA, 100 bp, Homo sapiens
tgagatagtttatgcagccaccaccagtttgcggcaagcaaatcaggccttgcattgcatcctgaacgagtgttggtagcaacaggacaagttgggaaag

SEQ ID NO: 751789 - DNA, 80 bp, Homo sapiens
atcgaaaggagagcccgtcattagcgtgaaaaccacaagcaggtccaaagagagagcagctgagtatgtcccagagaagg

SEQ ID NO: 751790 - DNA, 83 bp, Homo sapiens
tccagatattagttccactgtacccattccagagtccaaaattgaagacattagagcagaacaagagagagaaggtgagaagc

SEQ ID NO: 751791 - DNA, 126 bp, Homo sapiens
ccaccacgcgcccatgagccccgggagcagcggcggcggggggcagccgctcgcccggacccctcagatatgcacccaatgtccagggagcgtgcaaaatttgtcaaaagtggccttttattgtaa

SEQ ID NO: 751792 - DNA, 75 bp, Homo sapiens
gaccttcaatccagttccaaggactccacggggaacaaatgtggtatctggggctggcggtctgagaagatggaa

SEQ ID NO: 751793 - DNA, 83 bp, Homo sapiens
gaaagacttggtaatggcgacgggtttgatgccatggacaatattaccaggcagaaccaattctacgatacccaagtcatcaa

SEQ ID NO: 751794 - DNA, 74 bp, Homo sapiens
tccgtgcggagaagaagctgcggccgcacctggccaagtttgctgacctctctgaggctgccaaccggaacaat

SEQ ID NO: 751795 - DNA, 75 bp, Homo sapiens
gaagaatattcccaagtccttcacccggcatgcagcagattggaataaatatgatgaccgattgatgaaagcagc

SEQ ID NO: 751796 - DNA, 98 bp, Homo sapiens
cgcccgccttccgccgtctcttcgagttcttcgtgctgctcaagatgtgaagttcatttccaatccgccctccatggtggcagcggggagcgtggtgg

SEQ ID NO: 751797 - DNA, 90 bp, Homo sapiens
gaggtacagccctcggcctacaagctctttagtgttgctaacaaccacaagcagaatttgatgacggtggcaaaccttggtgtggtgttt

SEQ ID NO: 751798 - DNA, 100 bp, Homo sapiens
aagaagaggtcccaatcccccactctttccgccctaatggaggtctccagtttcgctatgctaagaaggaatctgatcttaatggcgcccagatcaagct

SEQ ID NO: 751799 - DNA, 83 bp, Homo sapiens
cttggactgagtcctgcaggacacaggtctattacaatggctaccatggagacacctctgaaacatttttggtgggcaatgtg

SEQ ID NO: 751800 - DNA, 58 bp, Homo sapiens
ccctgagtgaatacccagaaaatttcatggtctagacagtttcaaagtgaaacagaag

SEQ ID NO: 751801 - DNA, 48 bp, Homo sapiens
gtctccggctgcacagcgctcagaacacttcagttatggaagatcaaa

SEQ ID NO: 751802 - DNA, 100 bp, Homo sapiens
ccctcctgggtctggcaagaccatgacactcttcagcgccctccgggccttgcctgacatggaggtggtagtggataccagtttggagagcccagctggc

SEQ ID NO: 751803 - DNA, 100 bp, Homo sapiens
cctttttccatctgcaggactatgaccaggcccgccactacctcctggctgccgtgaataggcagcctaaaggcttttgaacacttgcagcaattagaat

SEQ ID NO: 751804 - DNA, 75 bp, Homo sapiens
gagccctctatcttttgttctctggcatggaaggggtcctcagagttactgggcctccagggtcgtatagacctc

SEQ ID NO: 751805 - DNA, 75 bp, Homo sapiens
cagcccgtgccgcgagcgcggcctgcaggaggcagtgaaaaagcagtctggctcccgaggtccaccccttatacc

SEQ ID NO: 751806 - DNA, 78 bp, Homo sapiens
aaacaagtaatggaggagaagctgaatgcaacaaacattgaggtctggccagcatgacccagaacttagagccacttc

SEQ ID NO: 751807 - DNA, 89 bp, Homo sapiens
cgaatctgagcaaaggcacgggcagccggaaggacaccaagatgcggatccgggcctttccggcagctggctaagagtcttgggcaggc

SEQ ID NO: 751808 - DNA, 75 bp, Homo sapiens
cagttgttgcatcaaatacttcatatttggcttcaatgtcatattttggatattgatgatgttaagaagttcaaa

SEQ ID NO: 751809 - DNA, 100 bp, Homo sapiens
tcaggctcaaatgaatgaaaggaggatgttaaaggcatttctcattgcaattgtggtaccagatgttgagacattatgttcctgggcccaaaagagagga

SEQ ID NO: 751810 - DNA, 100 bp, Homo sapiens
ccaccctcgaccctgaactggaataattagaaaaagcagagagatcttgctaagatgagaaaatgtctcagaccagaagaactgacaaaccagatgaacc

SEQ ID NO: 751811 - DNA, 75 bp, Homo sapiens
ccgggcacacccggctccccggacgcctcggactggaatgtcacgtggaataccagcaaccccgacttcaccaag

SEQ ID NO: 751812 - DNA, 100 bp, Homo sapiens
tgcaaagttagaaaaagctgaaatattgcaaatgacagtggatcatttgaagatgcttcaggcaacagggggtaaagggttacgactcactgattaaaaa

SEQ ID NO: 751813 - DNA, 50 bp, Homo sapiens
caacagtaacgaaaaacagggctacaatgcagatcttcgtgaagactctg

SEQ ID NO: 751814 - DNA, 75 bp, Homo sapiens
tgagaacacttgaaaataagaataacttactggaaattgaagtggtcactgcagccagaggggtccagaagagag

SEQ ID NO: 751815 - DNA, 82 bp, Homo sapiens
caacactgtggggagtattcttagtagagaagctacactgcagtttgcctagttctccggggtgctgcaccagtgtcacatt

SEQ ID NO: 751816 - DNA, 83 bp, Homo sapiens
cgacccctccctgccatgtatccgcagggcagacatccggtgctggagaatctggtaaaagcaccattgtgaagcagatgagg

SEQ ID NO: 751817 - DNA, 98 bp, Homo sapiens
aggactctggagctgacagcgcgcacttcacccgcagttgacctgcctagagctggaacgttacctccagagcgagccctgctatgtttcagcctcag

SEQ ID NO: 751818 - DNA, 98 bp, Homo sapiens
cagcgcgagctggaccacgagaggaagctgagggagaccactgtgccctgtccacggtgcctcctgcatgtcctgctgccctgagctgtcccgagcta

SEQ ID NO: 751819 - DNA, 74 bp, Homo sapiens
ctacagcttctgataatcaaccaactgttacaatcaaggtctatgaagatcctacagatgtttatacttggggc

SEQ ID NO: 751820 - DNA, 75 bp, Homo sapiens
caggagaccagctggtccaacttgatgcgatgaagagagttgaagaaatcaaacagaagcgccaagctaaattta

SEQ ID NO: 751821 - DNA, 98 bp, Homo sapiens
gcttgtcacggcttcttacgataccaatgtgattatgtgggacccctacaccggcgaaaggctgaggtcactccaggttgaaaaataccggccacaga

SEQ ID NO: 751822 - DNA, 83 bp, Homo sapiens
caagaagccagtcaagcggccagatctttgtggagttcacctctgtgtttgactgccagaaagccatgcagggcctgacgggc

SEQ ID NO: 751823 - DNA, 100 bp, Homo sapiens
ataacgggaggtgaatttccatgtcaacatagtcctgtgaaactggaacgccaagctgaagaagaacgaatacggaagcacaaagcagctgctgagaaag

SEQ ID NO: 751824 - DNA, 98 bp, Homo sapiens
aacaattaagcttctgtccagagcagtcatgcatgctgtgtgtgagcaggtaaataccagctgtcccctacagtgaatatgccccaagatgacactgt

SEQ ID NO: 751825 - DNA, 98 bp, Homo sapiens
cctgcaggaaacaagctcctacttccagaaaaagtgctcctgggactccaggataccagtgcaagccagcagtaagccgcagcaggtcttccagttta

SEQ ID NO: 751826 - DNA, 100 bp, Homo sapiens
gccgccccgcgggggagggcggagctggcgcggcccctagctttctccttctggtgtggggcccgaggatcttaagattgaaagtgatgttcaagaacca

SEQ ID NO: 751827 - DNA, 74 bp, Homo sapiens
agcgtcacggcgtacgccctcatggggaaaatctccccggtgactttcagggcagctgcaatgactctccgcac

SEQ ID NO: 751828 - DNA, 100 bp, Homo sapiens
gcctgtagtcccagcactttgggagcctgaaggtatgatctcagagtcacttgataacttggaatccatgatgcccaacaaggtcaggaagattggcgag

SEQ ID NO: 751829 - DNA, 100 bp, Homo sapiens
cccattccttacatcttggctgataatttgggttatgaagttcatggaatggaaaaaataccagaagatggaccagcacttataattttttatcatggag

SEQ ID NO: 751830 - DNA, 100 bp, Homo sapiens
gacaggatgggcctatcacggtgcactgcagtgctggaattggccggacagggacgttcattgtgattgatattcttattgacatcatcagagagaaagg

SEQ ID NO: 751831 - DNA, 75 bp, Homo sapiens
tcggtgtgccgtgggtccgcgctgcttccacccaacttcctgttaggctgcaagaaagcgtaagattgccattcg

SEQ ID NO: 751832 - DNA, 100 bp, Homo sapiens
aatgttaccaatacagcaattgctttaagttttctcatttattttatatctgcactctttgggtacctcactttttatgctcctcaagagttactgatct

SEQ ID NO: 751833 - DNA, 101 bp, Homo sapiens
catacccccaggagtaagagcccatagcagtctgccagacaatagagcatatggggaaatcgtggaacacatggtccagcactttaaaacacagatctttg

SEQ ID NO: 751834 - DNA, 98 bp, Homo sapiens
tagtatcactagtgattctgggagcagcagtctttctgatatctaccagcacacagcacaccagttgatatgccaagcagaggacagaatgaagacag

SEQ ID NO: 751835 - DNA, 75 bp, Homo sapiens
tgcagatccgcaggcgcaaggcttcaggcgacccgtactgggcctactctgtgccgcagaatggaattcggcatt

SEQ ID NO: 751836 - DNA, 121 bp, Homo sapiens
ctcttgggattgttattcttctgcttgttgatgtgatatgggttgcttcctctgaacttacttcgtttgctaatccagactttacacaacctatctcagaagttgtagatgaagtaattca

SEQ ID NO: 751837 - DNA, 100 bp, Homo sapiens
ggcccaggcaggttaccgggtcctagctatggacatgaaaggctatggagagtcatctgctcctcccggtctaaggcttcttggcataggaagaaaccag

SEQ ID NO: 751838 - DNA, 74 bp, Homo sapiens
tgttgggccaactacacagaccttactccccttagaacagctccaaaaggaattcttcatttgtctcctgatgt

SEQ ID NO: 751839 - DNA, 100 bp, Homo sapiens
accgaggaaatgcgcttcctgagggagtgggtggagagatgccctgtacagacttttggggaactgggtactgatgaacccgaacaggagttgcttctgg

SEQ ID NO: 751840 - DNA, 124 bp, Homo sapiens
ggcagcagcgctgccgccgcgtcctcagccaccgctccctcttcccacggctgacgttcctcagggagtgattcgagtgcaagctccccatctttcgaaagtttccatggcaatacagctaact

SEQ ID NO: 751841 - DNA, 50 bp, Homo sapiens
gactacatctttctcgggctcaggtggtttgtgatgaaaatggttccaag

SEQ ID NO: 751842 - DNA, 98 bp, Homo sapiens
ggcggcggcggaacgccaggcagtgtgatctgtccccttgggcagtgagccgggaccagattgaccggttcagtaaagagaacggtttcacaggttgg

SEQ ID NO: 751843 - DNA, 51 bp, Homo sapiens
tggagaactacaggaacctggagtctgtggtcgaggctttgggcaatccaa

SEQ ID NO: 751844 - DNA, 75 bp, Homo sapiens
ctgtcactaacaagctgcgtgatcttcgaaacttattggagaagtgtttaatattgtgagccaacagtctactgc

SEQ ID NO: 751845 - DNA, 130 bp, Homo sapiens
tggaggtgtcagtgttaaaggaacctctacaacgaaggtgaagccacggaagataagagtaatcaagtcagaggattatatgacttttatctgcctagagaagaactatggatctacaacatggagactg

SEQ ID NO: 751846 - DNA, 100 bp, Homo sapiens
ttaatgcttttcggactcctgatggcatgcctgtaaagaacttgcagttgaaggagtataacacagtgagcggtttctggtaagactgaacaagaatggt

SEQ ID NO: 751847 - DNA, 100 bp, Homo sapiens
tctgagtgtctgtccccagagcctcagtttgtgcaggacaccgacatggaacagggactcactgggggttgaagctccattcataccaaagtttagaggc

SEQ ID NO: 751848 - DNA, 100 bp, Homo sapiens
ctcctgcgatggcggcggaagaggaggctgcggcgggaggttagtggatgacagatgtgtggtgcacccagaggccggggaccttgccaaccctcccaag

SEQ ID NO: 751849 - DNA, 110 bp, Homo sapiens
cgaggagcgcgtcgtgcgcctgggggtgcgcgcctgcgacctgcccgcctggaaggagaacttatggattgtgatggaaaatcagaatctagtcctgagcgggaagctgt

SEQ ID NO: 751850 - DNA, 98 bp, Homo sapiens
caacgcagaagcccggcgccgggaagcctcagctcgcctgaaggaatactcccccagttgcaagaggcgcaggaccgtggaagacttcaacaaattct

SEQ ID NO: 751851 - DNA, 145 bp, Homo sapiens
ggacgagcaccatgtcgaatctgagcaaaggcacgggcagccggaaggacaccaagatgcggatccgggcctttccggtatggcatttcaaatatagatacaaccattgaaggaacgtcagatgacctgactgttgtagatgcag

SEQ ID NO: 751852 - DNA, 50 bp, Homo sapiens
ttcaaatcctagcactctgggagaggaaaatgtttataggaggccttagc

SEQ ID NO: 751853 - DNA, 120 bp, Homo sapiens
ccgggcacctccgagcgcaaggacagcgcgaggtccgcgcagcccagcgcagccatatgtgaagttcatttccaatccgccctccatggtggcagcggggagcgtggtggccgcagtgca

SEQ ID NO: 751854 - DNA, 74 bp, Homo sapiens
atgacagcggcgaggagaacgtcccgctggatctgacccgaggtcgttgaggacttccacatggagattggcac

SEQ ID NO: 751855 - DNA, 100 bp, Homo sapiens
gatggctgaactctggccggggcgacgaagcttccgaggaagggcagaatggaagcagtcccaagtcgaagactaagaagtggtccaaaggcaaagttcg

SEQ ID NO: 751856 - DNA, 82 bp, Homo sapiens
cagcccgtgccgcgagcgcggcctgcaggaggtcttccactttcgccttggtgcctgtcttcgcccacctgagcatcctcca

SEQ ID NO: 751857 - DNA, 74 bp, Homo sapiens
gccacaaatgggaagcaagagaaaaagaacattactgtcttgggtaaaccagacttgaatacaacattgccaat

SEQ ID NO: 751858 - DNA, 100 bp, Homo sapiens
taagacggtctacaaaggtctggacactgaaaccaccgtggaagtcgcctggtgtgaactgcagcatttgacattgtgcagcaaagaaatggttatggag

SEQ ID NO: 751859 - DNA, 100 bp, Homo sapiens
ggaggaggaggaagaggagaagccaaagcgagggagcattggagaaaatcaggcatttgcctggtggcctgatttattggctgaacatgcagagaaattt

SEQ ID NO: 751860 - DNA, 50 bp, Homo sapiens
gcagcatgtaaagtcagtgacagccccatcaacgtggaaggaaccagagg

SEQ ID NO: 751861 - DNA, 100 bp, Homo sapiens
catcattaaggacggaggcacgctaaagtctccagtgaatattgaattgctgaggattttgggaaaagacaaatcaaagttcccattccatggatccctt

SEQ ID NO: 751862 - DNA, 101 bp, Homo sapiens
gattggtggtgtggcctgtgagccactgcctgacagatacacggtgtcggaggacctggtccgacccccagtggcactaacgtgggatcctcagggcgctc

SEQ ID NO: 751863 - DNA, 50 bp, Homo sapiens
tagccttcaacagactactggagtatagatgctgttgtttccattttcag

SEQ ID NO: 751864 - DNA, 101 bp, Homo sapiens
gaattgttcacaaatacacgttctgatcttggctctgaaagtgttccagctgaaatttcagatcggacagactcgctgcggctccggaggcagtgattcca

SEQ ID NO: 751865 - DNA, 100 bp, Homo sapiens
cccaagttatcaaatccaagggcggtgttgtgggcatcaagtacacctgaagcggcacttcatgttccggaaccacctgtgcctggtatttgagctgctg

SEQ ID NO: 751866 - DNA, 74 bp, Homo sapiens
tacaatcctttgtggcttcgaattggtctagaggaattaaggataacctagacgacataaagaggataattaaa

SEQ ID NO: 751867 - DNA, 100 bp, Homo sapiens
tgatggaaccagaacaccccgagatgagaggagaagagcccagcacaacgaaggcaacgccctgctgcggcggctggtccgcattggggtgctggatgag

SEQ ID NO: 751868 - DNA, 75 bp, Homo sapiens
gcagctgccacaatgggacatgtgcaaggaccctaacctccaaaagaggtacccattggcgctcaaccgaattgc

SEQ ID NO: 751869 - DNA, 100 bp, Homo sapiens
ctttgacgagatcatcctctccactgcccgcatgaaccgggtcctcagcttccacagcgtgtctgagcatgggggtccctcgtaccccttcacggacagt

SEQ ID NO: 751870 - DNA, 83 bp, Homo sapiens
ttggtgtggacgttgtctaaatttcggtagccatggcacaagaatataggaagaggaagaacgtctgagaaataaaattcgag

SEQ ID NO: 751871 - DNA, 95 bp, Homo sapiens
gagtgccattaaggggaaattacaagaattaggagcttatgttggtcaaaagaaggaggagcggttaaactgtgggatcaggaactgaggcggtg

SEQ ID NO: 751872 - DNA, 87 bp, Homo sapiens
gaagataatcgtcaagcacgtgacggtcatcggcggcgggctgatgggcgccggcattgcccaggtaaccctgtatcatttgctaaa

SEQ ID NO: 751873 - DNA, 100 bp, Homo sapiens
ggaactgatgtttaaaatcattggaccatttagtaagaagaattccagtcttataaaggacaggagagagtggcaagagtacgtttatcaagcagatgag

SEQ ID NO: 751874 - DNA, 100 bp, Homo sapiens
cacacagctcagaacagctggatcttgctcacactctttcaagagaagcttccttgctggagctccgttactctcatggggactttgagaatggtatctg

SEQ ID NO: 751875 - DNA, 98 bp, Homo sapiens
aggaagtgggcaagcggtaccgcgagcggcagcgacagcacaaggatggtcatccagaggataagccaacgcacatcatcttcggttctgacagtgaa

SEQ ID NO: 751876 - DNA, 100 bp, Homo sapiens
aagatccttttccagcagccataattttaaaagttgctttgaatatggcaagagggttaaagaaactagaagctgatagtcttgaagttaaagcaagcaa

SEQ ID NO: 751877 - DNA, 100 bp, Homo sapiens
acgaggtcctcaagctgctgcaccgcggcgccgacatcaattacgccaatgtggacggactcactgccctgcaccagatgttcgaagaagaacaatttat

SEQ ID NO: 751878 - DNA, 82 bp, Homo sapiens
tgcacgcagccgtgagcacagccgagaaaaatggctacaaacttcctagcacatgagaagatctggttcgacaagttcaaat

SEQ ID NO: 751879 - DNA, 101 bp, Homo sapiens
ctctacttccccaccaaaaagtggcacacactggagagatatcatggaatgcagtagccctctgggcctgggatattgtggttgataactgtgccatctgc

SEQ ID NO: 751880 - DNA, 98 bp, Homo sapiens
ggactcccacttccaagaggtggctcagaaattccaaggtacatcgagaagtctgcagaggagctggacgaggaagtagagtatgacatggacgagga

SEQ ID NO: 751881 - DNA, 98 bp, Homo sapiens
ggcggaagcggagagcaacagcgcgccgtcaccaggagactaaagtccatcaaaaacatccagaaaattaccaagtctatgaaaatggtagcggcagc

SEQ ID NO: 751882 - DNA, 100 bp, Homo sapiens
gaaaagagaggaggaaaaggactcgactttcacattggaacaaccttctttccagtgctaaaggatctctgatctggagagcagagctgacatctgataa

SEQ ID NO: 751883 - DNA, 100 bp, Homo sapiens
acatgatccaggaagagcagtaagggactgagctgctggccctgacccacgtgtcagaggactgtttccctttgctagatggctgcagaaagaacaggca

SEQ ID NO: 751884 - DNA, 74 bp, Homo sapiens
accatctaaaatacgaaggtttctggctgggttctgtgtaatctgttagcagtagatggtgtaaatgagcctga

SEQ ID NO: 751885 - DNA, 98 bp, Homo sapiens
tgttgtctcagggagcacagaaatgagctctctccggaacagcacaacctttctttatactccatggagctcgtgctgaagaaaagcactgggcacag

SEQ ID NO: 751886 - DNA, 100 bp, Homo sapiens
cgtggctgtgctgagggtggcggccggatagaccccaagactgcttctgagacagaaacagatatctgtgctgaatgggagataaagaccatcactagtg

SEQ ID NO: 751887 - DNA, 98 bp, Homo sapiens
actggaatctcacaacaataccttagttgacccttgtgctttctccatatttacgtgcttgtaactctggcatgacctttgctccagtctctaccaga

SEQ ID NO: 751888 - DNA, 90 bp, Homo sapiens
ctcacctccctaaactggttaatagtggcatggaagatccatttggaattgaatgatctggcacgggaccctccagcacagtgttcagca

SEQ ID NO: 751889 - DNA, 80 bp, Homo sapiens
gaactcagcatacaggatgtacagggtttaatgaagaaattcattcgatgttctacacgtgtaactgtgggaactattaa

SEQ ID NO: 751890 - DNA, 74 bp, Homo sapiens
catggctgcggcggcccagctctctctgacacaggaattgcttacttaggaggtgtgtgcagtgctaagaggaa

SEQ ID NO: 751891 - DNA, 82 bp, Homo sapiens
cctcgcttgcagttcagcgaccacggccctgggaggagcggggacactgaggacctctctccaaattggcctctcaactcac

SEQ ID NO: 751892 - DNA, 100 bp, Homo sapiens
catgcagaaggggggcaacatgaaggaggcatgttggagacttgggcaatgtgactgctgacaaagatggtgtggccgatgtgtctattgaagattctgt

SEQ ID NO: 751893 - DNA, 114 bp, Homo sapiens
tgtggtggtgcctatgtgaaactgctttctaaaacaccagaactcaacctgagcgtcacggggttcggacgtcagatgatcgagaaaaccaagcagctggtggagtctaagtac

SEQ ID NO: 751894 - DNA, 51 bp, Homo sapiens
catcgcagttggaagcccatggggcaggtcttaaacgtggaaaggaatcaa

SEQ ID NO: 751895 - DNA, 75 bp, Homo sapiens
ggtccaaatggcacattccgataccgtcgggacattagtcatgagtgccgagtgtgcggggtcacagaagtgggt

SEQ ID NO: 751896 - DNA, 115 bp, Homo sapiens
tgtcgctctgcctttgacaggagaggctgcttcttgtagagatcaggatcctcatgaccagccaaagagaagaagaattaggaagcataaatcaaagaaaaaatttaaaaatccc

SEQ ID NO: 751897 - DNA, 100 bp, Homo sapiens
ctcctggacccgacggaggagacggttcgccgtcggtgccgagaccccatcaacgtggagggcctgctggctcaggccacagggtcaccacatacatcgc

SEQ ID NO: 751898 - DNA, 100 bp, Homo sapiens
caagctctccaagttcagcatccccaagcagggggaggaggaagaacgtgcaaaacgtgaggagctagagcgaatactggaagagaataaccgaaaaatt

SEQ ID NO: 751899 - DNA, 75 bp, Homo sapiens
ttattgattgtttcctgatcaaaatggaacaggtcactcctggaagcaaggcggctctagctaatttatgtattg

SEQ ID NO: 751900 - DNA, 71 bp, Homo sapiens
ggggcgcagggaaggagggcgtccgagtcaacaaccgcttcgagctggtctcggcgcggaagatggccggc

SEQ ID NO: 751901 - DNA, 98 bp, Homo sapiens
ctacagttgtaacttctgtgagaaatccttccgccagctctcccaccttcagcagcacacccggtattatcgggggacccacggggtcattgtggttt

SEQ ID NO: 751902 - DNA, 97 bp, Homo sapiens
gatgcccagcccagaattgttcagtggaagcccctgcttggatgcctgtccaccactgtacttacaagtatcaagtaaatgtggatgggaccgtggc

SEQ ID NO: 751903 - DNA, 100 bp, Homo sapiens
cggcgagagatggtcaggtctggagctcgaccgggccaggatgtgaacagatgcattgaggccttggatgaacttgcttcacttcaggtcacaatgcaac

SEQ ID NO: 751904 - DNA, 75 bp, Homo sapiens
cgcagcaggagcaggggacgaaggaggcaggtggaagtcatcataaagtttctgtttcacccgtcgtccatgttc

SEQ ID NO: 751905 - DNA, 50 bp, Homo sapiens
ctattacagacaatacaatcgggatgtcaagtcatcagcccacaaagtag

SEQ ID NO: 751906 - DNA, 50 bp, Homo sapiens
tgacaaccgagtgtatacctgcaaggtcgttccaggggtagaggaggcat

SEQ ID NO: 751907 - DNA, 75 bp, Homo sapiens
agtcatgaggagaaatgaacagctgaccctacatgatgagaggtttgagaagcagagagagatcatcattgcctg

SEQ ID NO: 751908 - DNA, 98 bp, Homo sapiens
taacaactatgataaatccaaaccagtcacctccccacccccaccgccaagcagccacgagaaaggaggacaagaagacctcattctttcctatgagc

SEQ ID NO: 751909 - DNA, 87 bp, Homo sapiens
ggagatcgagagcaccgacaccgcctgtgtggggcccaccctccgttgttggaattggaagcggaacaaaaatgttgaccagtatgt

SEQ ID NO: 751910 - DNA, 78 bp, Homo sapiens
tgcccaaggagcgcctggctcttctccacaaagacacgggaacgcccttttgcttgtgactggcagggctgcgacaag

SEQ ID NO: 751911 - DNA, 100 bp, Homo sapiens
cctgctgcacccacgaatctgcccacccctcctgtaacccagcctgtttcacttcttgcaaatgcagccctgaggatttggctactgcatataacaacag

SEQ ID NO: 751912 - DNA, 100 bp, Homo sapiens
cgagtgatgataatccggaccatgctgtatactccacaggaaatgaaacagggccctgctggtcagcagggtgcaatcggcagtccaggacctgcaggcc

SEQ ID NO: 751913 - DNA, 100 bp, Homo sapiens
atctgctggcctcggcctctcaaggtgtcagttgtacccgaggcgttctcagcagcagcaagtacctgtggtggatttccaggctgaactgaggcaggca

SEQ ID NO: 751914 - DNA, 75 bp, Homo sapiens
agaagtacctgaagctgcaggatacctgccgtactcaggtagttgagagtggtggtcctgagattttaaaaggcc

SEQ ID NO: 751915 - DNA, 100 bp, Homo sapiens
tgtgaacagacaaggttcaaaaactaagcatccagaggccctgagcagctttcagcactggagcattgcagtgtcgagatggctatgaaccctgtgtaaa

SEQ ID NO: 751916 - DNA, 82 bp, Homo sapiens
gagcggagggagccccagacacgtgtactaatggtcacttgatgtgcgctggctgttttatccacctactagcagatgcccg

SEQ ID NO: 751917 - DNA, 100 bp, Homo sapiens
cccacgggctctacctgaccctgcagaaaggcctaaagaatgtatttgacgaagcaatattggctgccctggagcctccagaaccgaagaagagccgcag

SEQ ID NO: 751918 - DNA, 100 bp, Homo sapiens
gccatccacctgtgcctcttcaccatgttcggaatgctgctgttcgctggtgggaagacagctttctctgacttcctgatgggcagctccaaggacctgg

SEQ ID NO: 751919 - DNA, 97 bp, Homo sapiens
tcagcacaatgacattgacaaacggggtggaattgcgtttgttgccataaaaggagcatttaaagtttacttcaaacagcagcaatatttacgacag

SEQ ID NO: 751920 - DNA, 100 bp, Homo sapiens
ctcaccaaggaaaagaaagatcttcttggagaactatcaaaagttcttaggtgtggtgtggaacctataggccagagtatgcggttaactccattaaaac

SEQ ID NO: 751921 - DNA, 51 bp, Homo sapiens
agcccgagtcggtcagcgccggaggatcctgggtatgtttacatcccaaca

SEQ ID NO: 751922 - DNA, 74 bp, Homo sapiens
aatcctcaatttaagcctgatctaacccctagaaacagatctgtgactttggcctggcccgtgttgcagatcca

SEQ ID NO: 751923 - DNA, 100 bp, Homo sapiens
gtccttccaacggggtgacctcatccgtattctgagcaagaaatgggcaagttcatgaaacctgggaaggtggtgcttgtcctggctggacgctactccg

SEQ ID NO: 751924 - DNA, 98 bp, Homo sapiens
ataaagaaatattggtcctcatggaagaagagcaagatttaccagagcaaccagaaaacctgattggcgccctcttggcgatcttcgggcacctcgtg

SEQ ID NO: 751925 - DNA, 75 bp, Homo sapiens
acttccccaccggaggtttatcacaagagacgctctcctggtctgtgttctgactctttggaaaagagcttaagg

SEQ ID NO: 751926 - DNA, 100 bp, Homo sapiens
cgcgacggacgcaagatggcgacggcgaccatagctctcgttaaacccatccagagtaatggctgcggccttacccaggaccctgggggagttgcagctg

SEQ ID NO: 751927 - DNA, 100 bp, Homo sapiens
aagctgctgctgggcatcgccttgctggcctacgtcgcctcctcccaaagtgaaatgcctgaccaagatctggcaccccaacatcacagagacaggggaa

SEQ ID NO: 751928 - DNA, 51 bp, Homo sapiens
gctggattgaactcagagaagccgggctctttcaccatgcctggatcactt

SEQ ID NO: 751929 - DNA, 100 bp, Homo sapiens
agatctcagaggagcctggctaagcaaaaccctgcagaacggctgcctaatttacagcaaccatgagcgaggagctgaagtgcacttagttccctggaac

SEQ ID NO: 751930 - DNA, 100 bp, Homo sapiens
ggaaaacattgtggagttgaaggaagcatttcgtcggaggggaaagttgtacttggtgtttgagtatgttgaaaaagtgcttacactccagagcccctca

SEQ ID NO: 751931 - DNA, 83 bp, Homo sapiens
gggtctcgggggccgctctgggatcccggccaccagcaattgtccggttggcttcaatgctgaggaagcccacaatattgtca

SEQ ID NO: 751932 - DNA, 50 bp, Homo sapiens
atctcgctgtaatgcagtgggagaacaactctgctcatggtgattacatg

SEQ ID NO: 751933 - DNA, 71 bp, Homo sapiens
acgcagacactacaggccaatgagtcggttatcttgacgaatcagattacaacccatctgagtggagccct

SEQ ID NO: 751934 - DNA, 50 bp, Homo sapiens
tgctcttcctcccttcgctcgcaccatggccctgatccttcaccagctag

SEQ ID NO: 751935 - DNA, 82 bp, Homo sapiens
agagaacagttcattgaagctatcactgtcagtgctgttgtcgagatgtccacagaaggaggatttggtggtactagcagca

SEQ ID NO: 751936 - DNA, 50 bp, Homo sapiens
aaacagattcagtggcctgcattgatcatggaagggaagtggttgctgtg

SEQ ID NO: 751937 - DNA, 83 bp, Homo sapiens
cgcgcggactgaaggagactgaaggtggtctacatagcctgctccttcaccacggtctggttgatttatagcaagttcaaagc

SEQ ID NO: 751938 - DNA, 82 bp, Homo sapiens
aaagggtcctcctgctcacagtgtgaataacagggtcctgcagttctgagcttgggttccctttgcctggacaccaaccaag

SEQ ID NO: 751939 - DNA, 87 bp, Homo sapiens
tacccagaggaagctgtaccgagatgtcatggtggagaacttcaagaacctggttgcagtggctgaataccactagaaacatacctg

SEQ ID NO: 751940 - DNA, 75 bp, Homo sapiens
atttttccaagttacagctacctaggtgtggtggctcacgtctgtaatcccagcactttgacaggctgagcgagg

SEQ ID NO: 751941 - DNA, 100 bp, Homo sapiens
aacatgattgaccagaaccgtgatggcttcattgacaaggaggacctgcacgacatgctggcctcgctgggaacagcatatgccatatatgagctggctg

SEQ ID NO: 751942 - DNA, 100 bp, Homo sapiens
cagcgagccagcgagccgccgacccgccgagcaaaatgatgatcatgacgcagtcctgaggtttaatggggcacccacagccaacttccaacaagatgtg

SEQ ID NO: 751943 - DNA, 75 bp, Homo sapiens
gggaacaacgcgagtcggcgcgcgggacgaaggaggaaaaggcttctcttttacatcgtactcaggaagaaagaa

SEQ ID NO: 751944 - DNA, 100 bp, Homo sapiens
cgggcagccgagaaggtgtccgaggcccgcaaaagcaggagtagggctgattggagccattgtacagtgtcgggaacataccaggacactgagaatagtg

SEQ ID NO: 751945 - DNA, 74 bp, Homo sapiens
gcactcccacgcccccgtctctggtcctacctgggtccaaggccgatgtggtggaaagccagatgacatcaccg

SEQ ID NO: 751946 - DNA, 100 bp, Homo sapiens
agcacgagtgggctcggttcgagatggagcgggcgcactgggaggtggaacgggccgaactgcagcggactctgacaagcgtcatgccagtgacttcgcc

SEQ ID NO: 751947 - DNA, 75 bp, Homo sapiens
gagcaccaggcccaccgtgaaaggtgtttcccattaaacactaccaggacaaaatcaggccttacatccagctgc

SEQ ID NO: 751948 - DNA, 100 bp, Homo sapiens
gcttctccgaggacgccttcaactccacttttatctccaccatagcgcgagcttcggcctcggctctgtaccatgaagaagggccccagtggctatggct

SEQ ID NO: 751949 - DNA, 100 bp, Homo sapiens
gtcccgcctccctgggagctccgcacggacttgggatgtagctttatcacggactgctagagcatggggaaaaaaatgtttgtttacgcataatatttat

SEQ ID NO: 751950 - DNA, 102 bp, Homo sapiens
agctcgcgccggatgcggagcgcggtgctgccggtggagcttcagcatctgcaggggctgctgagagtaaatacttggcgcctccagctgctggccaaggag

SEQ ID NO: 751951 - DNA, 90 bp, Homo sapiens
acgactcgcttattcacttctgctggaaggacaggacgtccgggaacgtggaagacgcgcagcccagcctcgaaatgcagaacgacgccg

SEQ ID NO: 751952 - DNA, 90 bp, Homo sapiens
gcagattaccaggatatgcttcacatcaagtaggagttgcaggttttagcagcttggtgctaaattgctgtctcaaaatgcagaggatct

SEQ ID NO: 751953 - DNA, 75 bp, Homo sapiens
taagactctgggacactcctgaagtcgggaaatgcgggtccatatggaatatttgctggtagggatgcctccaga

SEQ ID NO: 751954 - DNA, 99 bp, Homo sapiens
atcgggtacagcaacaacggctcggactggaagatgatcatggatgacagcaaacgcaaggcgaagattagtgatgatgaaccaggttatgaccttgat

SEQ ID NO: 751955 - DNA, 90 bp, Homo sapiens
gtccgctgtgcccgggcctgcaccatgagcgtcccggccttcatcgacatcagtgaagaagatcagttttcggctttgtgagaaacctta

SEQ ID NO: 751956 - DNA, 74 bp, Homo sapiens
tctgaatcgagatcggatgtcagcagctctgccttaacagcctcagactatggcatgaaactgccaatcctgcg

SEQ ID NO: 751957 - DNA, 98 bp, Homo sapiens
gggaggacgcgccgcggccaggcagggaggagaccggcacccagacaggtggcgaaggcagaggagaatatgaagacaaggctggaagacctagcaag

SEQ ID NO: 751958 - DNA, 100 bp, Homo sapiens
cgggaagcggcggcggcggctccagcgtcctaagagaaagaagcttccggttctgaggtcctggaggtgccatttccctctctgttgaagcaaaggccgg

SEQ ID NO: 751959 - DNA, 100 bp, Homo sapiens
ctcaagtgcgtgaagaagagcaagcggcggcgctccaacaggtcccagaagaggaggccagtcacaatggacagcgccggggcctccccaaggccgtgtg

SEQ ID NO: 751960 - DNA, 95 bp, Homo sapiens
gcaaaatattcaggagaccgtcgttgccttgtatttccagagaacagactaatagggatgccaaaggaaaaatatgatcctccagatcctcgcag

SEQ ID NO: 751961 - DNA, 83 bp, Homo sapiens
gaactacgggattccaccggtcaaccgtgcccaggatcttattgtctacgatgtgacgatccgtggagaaagtagcagatggg

SEQ ID NO: 751962 - DNA, 95 bp, Homo sapiens
agaccttaaggtgtttgttgacctcttacctgctacacagtgtacaaaagcaagatgatgatgaatgaagtcctggcagcttcctgtgtcccagg

SEQ ID NO: 751963 - DNA, 90 bp, Homo sapiens
ttgtggccctgggctttaccatctttgtggctgtgcttgccaggcctggctccaacacgttggtcgtcattgcctccgagcccactttag

SEQ ID NO: 751964 - DNA, 50 bp, Homo sapiens
catgagctggggcaccgagctctggtctgatcatcggatatcatggagtc

SEQ ID NO: 751965 - DNA, 75 bp, Homo sapiens
gcccgcccgaccaagcgtcggacgcggcccggcgccgagccatgatctttgatggaaaacagattccacagagaa

SEQ ID NO: 751966 - DNA, 82 bp, Homo sapiens
acccactgaagacgtctgcgtgagaatagagaccaccgagagatgccctgtatccaagcccaatatgggacaccagcaccga

SEQ ID NO: 751967 - DNA, 100 bp, Homo sapiens
aggcagctcaccagggtggacaaatcgccagagatgtgagtcagatgtaatgggaagaggccatgcacgcctggtgcatgttgaagagcctcacacggag

SEQ ID NO: 751968 - DNA, 87 bp, Homo sapiens
cagttcctccccgggcccctgagccatgcccatcgcagccgccccgaaggagccaggccctagcaacagaccacctatcagagccga

SEQ ID NO: 751969 - DNA, 82 bp, Homo sapiens
gcttctcccctacgcgctacacaagtggagctccttttcctccacctaccttcccgaaaggagaacttatggattgtgatgg

SEQ ID NO: 751970 - DNA, 98 bp, Homo sapiens
gggtgctggagctgttccgggccgcgcagctgccgaacgacgtggtcctacaggaggcaggtggaagtcatcataaagtttctgtttcacccgtcgtc

SEQ ID NO: 751971 - DNA, 100 bp, Homo sapiens
aacctacaggatgaaagtttcaccaggggtcgaagtgaccggggcagtggccagggagactcgctctacccagtcggttacttggacaagcaagtgcctg

SEQ ID NO: 751972 - DNA, 104 bp, Homo sapiens
agcattgcttcaaagcatggggctaactccagaatcccccattgttgttgacctcctgtactggagagacattaagaagactggagtggtgtttggtgccagcc

SEQ ID NO: 751973 - DNA, 100 bp, Homo sapiens
aaaaagactgcaccaaagtgaagtgctatagggttctgatgactgtcttgtgaaaatatgggcaacagatgatgggaggttgttagctaccttaagagga

SEQ ID NO: 751974 - DNA, 75 bp, Homo sapiens
tcctgaaggaagtcagccacccgttcctcatcaggctgagaatgtactactcatcacctcccacctgtgaaagcc

SEQ ID NO: 751975 - DNA, 75 bp, Homo sapiens
tgctgctttttctaactatttcaagatgatatttattcaccaaacaaggatgaaaactttcggaagagaaagttg

SEQ ID NO: 751976 - DNA, 100 bp, Homo sapiens
cttggccccgcgcagcgtctggtcactcgctctcctctggggactgcagagaagcaggacctcgggccatggatgttgggatgagagtcggagccgaata

SEQ ID NO: 751977 - DNA, 90 bp, Homo sapiens
cagttggaagcagccgatccagcctgcggagcctgtggggcaggctccttcctcagagaagcttcctgttatgtaccttatggattctat

SEQ ID NO: 751978 - DNA, 96 bp, Homo sapiens
gccgtctccaagatgtagctaatgaccgtggttcccactgaggcttcagcaaccaggagggattgactgagatcttaacaacagcagcaacgatac

SEQ ID NO: 751979 - DNA, 83 bp, Homo sapiens
ccactacccctcactatgtgcgctgtatcaagcctaatgacttcaagttcccattcaccttaaagcttttcaagccaggccaa

SEQ ID NO: 751980 - DNA, 100 bp, Homo sapiens
attcacaatatctgtgtcgttcttggcagaaattatattttccagcccgtgtctgcaggtatgaggatacatgggctgcacttcacagaagagccaaaga

SEQ ID NO: 751981 - DNA, 100 bp, Homo sapiens
aagaaagacaaagacccagtgaacaaatccgggggcaaggccaaaaagaagaccattcccggagtaataaatccagttggagcagcagtgatgagaagag

SEQ ID NO: 751982 - DNA, 90 bp, Homo sapiens
agggcttccgccgactggaggagtggtccagctgctcacctgtgacctgctactgtcgctacggacagcgctctggcaaaaacaggccag

SEQ ID NO: 751983 - DNA, 80 bp, Homo sapiens
ggtcccttttgcctcagatactattttgaagccagggatgctaccctcttctgtgagccctggaccctgaacatgcagcc

SEQ ID NO: 751984 - DNA, 96 bp, Homo sapiens
gcagagcgtgctgtggtcagagtcgctggacagtgtggcactgaaggggggccgtggcagtgcttccatggtccagaagtgcaagctgtgtgcaag

SEQ ID NO: 751985 - DNA, 50 bp, Homo sapiens
cagcaagagaaaacatcgaccttcaagaatcccatttaccacattgagtt

SEQ ID NO: 751986 - DNA, 100 bp, Homo sapiens
cgggccgcgaaccgcagtatcatgctggccaagaagatcatcattaaggacggaggcacgtgtgctggaattgatgttcgtctgtgtgatgttggtgagg

SEQ ID NO: 751987 - DNA, 100 bp, Homo sapiens
tcctttgggttgtactcatagattgtgtaggcgttggtcttctgatagcaactttaatgtggtgtctcaatgcttgtacctactgcaaaactaaacacgc

SEQ ID NO: 751988 - DNA, 98 bp, Homo sapiens
gaagacgtcgctgctgatggtcttcgccgatggggccttccccgaggaaaaccagtagattcccagacatcgcgaagtgaatctgaaattgtgccaaa

SEQ ID NO: 751989 - DNA, 75 bp, Homo sapiens
aaaaacgtgtgggtacgaccttgatgtgcactcccagcaacacccctgccacgccgcccaacttccccgatgcgc

SEQ ID NO: 751990 - DNA, 120 bp, Homo sapiens
ctccaacagcatgcccttcctgaaggtgtgtacagagccaggcccagcctgtgaggccacccgggccagcatctgaggtggagtggcagggtcccagccagtgagtgagaagcagttggc

SEQ ID NO: 751991 - DNA, 90 bp, Homo sapiens
atcagaggtagtcggacctttcccgctggcgcgcagcctcagctagaaagacccaaatgggaccagtagtttgccaactggaagttctct

SEQ ID NO: 751992 - DNA, 100 bp, Homo sapiens
taaatctcatcttctttatcttgtgtacctttgtccagatgttcctcctgctgatcaagagaagctttttatccagaagttacgtcagtgttgcgtcctc

SEQ ID NO: 751993 - DNA, 75 bp, Homo sapiens
ctaggccgtgtgcctgagttatttgccaaccgtggtggccggcaaggcctcgattcatgttacatgtaaagctgt

SEQ ID NO: 751994 - DNA, 75 bp, Homo sapiens
aggggatcagaggtccctggagtttctgcttcctccagagccaggacataagcagctctatgaccaatagcacag

SEQ ID NO: 751995 - DNA, 129 bp, Homo sapiens
cgacggcgtcctcaggagctgtggggtcccctgctagaagtgggggactcggcgggcaagagtgagccatggagctacgtgtggggaacaagtaccgcctgggacggaagatcgggagcgggtccttcg

SEQ ID NO: 751996 - DNA, 90 bp, Homo sapiens
gcatttcacagcactctgggcgaaaattggatgtgaaaatgaagccagaccgaggcgaccgactggaccccacggccgtgaacatcctgc

SEQ ID NO: 751997 - DNA, 95 bp, Homo sapiens
tggaggcgtgatgcttaagctggtggagaaactcggagagcacagaatggggattcaacacctcggcaatgcccttttagtgtgcgagcaaccac

SEQ ID NO: 751998 - DNA, 75 bp, Homo sapiens
accaccctcgtgtctgccaccatcttcgacttgagcgaagttttatgcaagagctgcatgcttctgggaggccgg

SEQ ID NO: 751999 - DNA, 82 bp, Homo sapiens
cgagaggctcaccgcagtcgtgcaggatctgaaggagaacctggatgacagtgtgttttcgaagcggcatgcaaaactggag

SEQ ID NO: 752000 - DNA, 75 bp, Homo sapiens
ctgacattcacctgacttctgcagaacaatgggctatgtgcgggagtatattctgtgggcagcgtctaaatccca

SEQ ID NO: 752001 - DNA, 46 bp, Homo sapiens
cgccgacccgccgagcaaaatgagcttagatgtcatacagaattga

SEQ ID NO: 752002 - DNA, 100 bp, Homo sapiens
ccgggagcgagacttcctgaagaaagtccacgagaccgtggagcgtggtgggaagacctgaaaatgcaacagcgcatcatgaacctgatctgtgacccgg

SEQ ID NO: 752003 - DNA, 106 bp, Homo sapiens
cacgatgattgaccccacttccaaggaagaccccaagttcaaggaactggtcaaggtgccatggatgtagctttgggatcaggtgccactggggtctttaccaatt

SEQ ID NO: 752004 - DNA, 75 bp, Homo sapiens
ccaaggcccaaaagcgtcaaactcaccaaaaacaacatctttccagaaagagtgtttgaaagatgtatggtgatc

SEQ ID NO: 752005 - DNA, 75 bp, Homo sapiens
gtacacaagcgaagactttccagctcagagagtgaagtctataggatcgggtgaaccaccaaccggcaattgaaa

SEQ ID NO: 752006 - DNA, 75 bp, Homo sapiens
aaatattgtgccaccatataatgctttctcagcccaaggcatgccagaggtgctgtcatctatatgatctcagta

SEQ ID NO: 752007 - DNA, 142 bp, Homo sapiens
ttagttctggggagcgcctcgtcgacatgagtgatgtggaggaaaacaacttcgagggcagaacaatgcagatcttcgtgaagactctgactggtaagaccatcaccctcgaggttgagcccagtgacaccatcgagaatgt

SEQ ID NO: 752008 - DNA, 100 bp, Homo sapiens
gccccggtttaagatctccaggtgaagtagatttttattgcagaactggggctcccttgcatcttccagttacaaattcagtgccttctgcagtttcccc

SEQ ID NO: 752009 - DNA, 100 bp, Homo sapiens
aggccatgggcaagatatctcagtgttctccgctctcataggtcagtgatcggagggtatggttggcatggaattgaatttcatctgtctgtgggaattg

SEQ ID NO: 752010 - DNA, 98 bp, Homo sapiens
gggtggcgtggcaagccggactaaggaccggggacttcttgattgagtggacagcggactgcagcgaaccgctggacagcagctgttccttctcccga

SEQ ID NO: 752011 - DNA, 75 bp, Homo sapiens
attccctgcggtgtgcaagtccgactggaacagaacaccttccaccatgaccacctcagcaagttcccacttaaa

SEQ ID NO: 752012 - DNA, 90 bp, Homo sapiens
taccaggtcacacactgttgcagcgcagcttcgagagctgtgcccaggagtgaacaaccagccctacctctgtgagagtggtcactgctg

SEQ ID NO: 752013 - DNA, 75 bp, Homo sapiens
atcaacctcacgctgcacctggaacgaaaagggtcttggtcagagaggaggaattctagtattgttggcagacga

SEQ ID NO: 752014 - DNA, 90 bp, Homo sapiens
gtcaccatgatgcctgtcactgggggcaccattaacatgatggagtacctgttgcaggacgcaaacatgcagatctttgtgaagaccctc

SEQ ID NO: 752015 - DNA, 83 bp, Homo sapiens
ctcaaggataatcactaaattctgccgaaaggactgaggaacggtgcctggaaaagccatcactggtgcaagctatatttaac

SEQ ID NO: 752016 - DNA, 118 bp, Homo sapiens
gaagggcaggacgaggtgtcggcgcgggagcagcacttccacagccaagtgcgggagtccacgtatggaacctcaaagtctttgtgacaatggaaaccaaaaaattaattggtaaacc

SEQ ID NO: 752017 - DNA, 99 bp, Homo sapiens
ctgtgcgctcgatccagcaccatggggaagcgggacaatcgggtggatcacagaagaactgcagcttcctggggagcagtttcacctccacaggcatcg

SEQ ID NO: 752018 - DNA, 50 bp, Homo sapiens
gctcccatcattgatgtggtgcgatcgatggctcagcgacttcttctgag

SEQ ID NO: 752019 - DNA, 50 bp, Homo sapiens
gccaggtgtccatccccgtgctgaggaatacaggagtttccagaaaatat

SEQ ID NO: 752020 - DNA, 129 bp, Homo sapiens
cgtgaagaagcaggaggctaagaaagtggtgaatcccctgtttgagaaaaggcctaagaattttggcattggtgtgatgaatgcagactctgctaccattttggctgtttggatcctcctttgaaaaag

SEQ ID NO: 752021 - DNA, 76 bp, Homo sapiens
ctgcactggttaaagccatcgccacaacctggacaggcagcaaggcagctatttttgctatgataatcctgctgcc

SEQ ID NO: 752022 - DNA, 76 bp, Homo sapiens
tcatgtgaaaacaaagcatgccaatcttttagacattccattggaagatgccatggctagtccagggaaagataac

SEQ ID NO: 752023 - DNA, 95 bp, Homo sapiens
ccttgccttgagtcagtgcgccgctctccagcccgcttgaacgccttatgccagcctggaccatcttggaggcagtgtaggatcatggaagaact

SEQ ID NO: 752024 - DNA, 75 bp, Homo sapiens
cactgcttctccgtgggcagcattggcgaccagcgcttcacgtctagagcatgtttggaaaggattcaagaatta

SEQ ID NO: 752025 - DNA, 74 bp, Homo sapiens
cgaggaggagcggccaaagcagtacagctgggatcagcgcgagaaggctggagccagacatcctgcttcgggcc

SEQ ID NO: 752026 - DNA, 82 bp, Homo sapiens
ggggccagggaaccctggtcaccgtctcctcagggaacggcaggagcagctgatgggatatcggaagagagggccgaagccc

SEQ ID NO: 752027 - DNA, 98 bp, Homo sapiens
cggcgcaacacgcgccaaggaccacgggctggagaagtgtggtaaactggaccccactttcgccagtgcaactttactgtttcagaaagaccccccag

SEQ ID NO: 752028 - DNA, 75 bp, Homo sapiens
tatacctagaagtctactaatggacagttagtcacccacctacatgttgaggcattgaatgccccagaggagccc

SEQ ID NO: 752029 - DNA, 95 bp, Homo sapiens
ggcaaccgcgagaaggcccagcgcttcctgcagaaggccgagaagctctacccactgccctcggcccgcggtgaaatgacaatggatgctctgtt

SEQ ID NO: 752030 - DNA, 75 bp, Homo sapiens
ttttttctaatggctattcaagcaccaatgttgttatgaattattcagagatcgagtctaaggttcgagaggcaa

SEQ ID NO: 752031 - DNA, 100 bp, Homo sapiens
caggccagtcgtgtctccagtgatgtcattgaccagaaggtgtatgagatccaggacatctatgagaacaggaacatggagctgatccaggacacctccc

SEQ ID NO: 752032 - DNA, 85 bp, Homo sapiens
agagcacaggtcagccggacacatgatgccgccgccatgtctgcgcatctgcaatggatggtcgtgcggaactgctccagtttcc

SEQ ID NO: 752033 - DNA, 100 bp, Homo sapiens
gccctgggtcactttcagtgagtcatcgctgacagctgaggaagtctgcatccacattgcacataaagttggcatccgtgtcattctggaccttactccc

SEQ ID NO: 752034 - DNA, 100 bp, Homo sapiens
tccttcctctgccactttttaccttggggacctcagggacacttgacattcagggacgtggccatagaattctctcaggaggagtggaaatgcctggacc

SEQ ID NO: 752035 - DNA, 100 bp, Homo sapiens
cagggactccaaggggtggagctgggaacattcctcataaagcgagtcgtcaaggagttgcagtggtacatgatcagcattgtccacatttacaatcgat

SEQ ID NO: 752036 - DNA, 75 bp, Homo sapiens
gaaaggtggtgaagagccaattgaggcaaccccattccagctgccattgaagaaatgcgcggtggtgggaaatgg

SEQ ID NO: 752037 - DNA, 75 bp, Homo sapiens
tcacgactccggatgaacactgcatgactaagagatatcgtgaaattacaactcaacaatgaattacagcacagg

SEQ ID NO: 752038 - DNA, 85 bp, Homo sapiens
cccgcgggggagccccgggagccgcacggcataatgattataaagtggtttctcctgctttgcgagctgtgggaaacattgtcac

SEQ ID NO: 752039 - DNA, 83 bp, Homo sapiens
gtcgcgtgtctaggtgagtcgcggtgggtcctcgcttgcagttcagcgaccacgattgatccaaatcctgatcagtcagcaga

SEQ ID NO: 752040 - DNA, 75 bp, Homo sapiens
tcgaatccagtagaaaactggtcaaggaagctatccggaccatcgccatcatagctgaaggcatccctgaggccc

SEQ ID NO: 752041 - DNA, 75 bp, Homo sapiens
cgcggaaggagctggagacggtcgtagctgcggtcgcgccgagaaagcaggaactcagggagtgagctacaagtg

SEQ ID NO: 752042 - DNA, 100 bp, Homo sapiens
ccttcatgcccaaatcccggaaactccagcgtgtctccagccgtggacatccaggcagaaattgatgcccacaatgacatatttaaaagcattgacggaa

SEQ ID NO: 752043 - DNA, 75 bp, Homo sapiens
gctcgcgctactctctctttctggcctggaggctatccagcgcaaaatacatatctcagtgcattgatgagatca

SEQ ID NO: 752044 - DNA, 96 bp, Homo sapiens
ctttgggaagtatgttaatttcatggtacatgagtggctatcatactggctattatatggtttattacccagaactctttgtctgggtcagtcaag

SEQ ID NO: 752045 - DNA, 75 bp, Homo sapiens
ggcgagcaccgggaaggggagcgtggggccgctgagggaatctggaaaaattgcaatcaaaacatcatttctcta

SEQ ID NO: 752046 - DNA, 50 bp, Homo sapiens
ttacaagaaggagaattcttattacagcaattctggggtcagaagccatg

SEQ ID NO: 752047 - DNA, 73 bp, Homo sapiens
atcgtggtgtatgacgtcactgaccagggcaattgaaggaacagactaaaaatcgtgtcctggaaggaaacta

SEQ ID NO: 752048 - DNA, 83 bp, Homo sapiens
aactacccgctccgagacgggattgatgacgagtcctatgaggccattttcaagccggaggacgaatccatgaaccaaccagg

SEQ ID NO: 752049 - DNA, 83 bp, Homo sapiens
ttggggccactgcgaggccgttttagttgatattcactgatggactccaaagaatcattaactcctggtagagaagaaaaccc

SEQ ID NO: 752050 - DNA, 87 bp, Homo sapiens
tcaacttcctcaagtcgcccaaagcttggtttatggcagctccaggacctcgcaccccgagacggacatcttacaccgccaggccta

SEQ ID NO: 752051 - DNA, 97 bp, Homo sapiens
cccctgggcatcaccaacatagccatcgacttcggggagcagctgggaagttatcaattccaaaccagatgaaagacccaggctcagccactgtatt

SEQ ID NO: 752052 - DNA, 75 bp, Homo sapiens
agactcatacgcaacctcaatgccgagccgctgccgctcatggatttgtgccgtcgctcggtgcgcctggccctg

SEQ ID NO: 752053 - DNA, 82 bp, Homo sapiens
cagttcgctacacagcaatgcatcgaggaaagtgatgaagcattgggcccaacaatgatgagttggaatgcagttgaaaagt

SEQ ID NO: 752054 - DNA, 75 bp, Homo sapiens
gatcaggatttttggcctaccctccaaagaaaaggtgcaagtgaaagtgtaggaaaacatatgcttgaagcgtgc

SEQ ID NO: 752055 - DNA, 73 bp, Homo sapiens
gggcatcctggtgctgggcgccattgctgagggaagccttgggagcaggtccccaaaaagccaaagcggaaga

SEQ ID NO: 752056 - DNA, 100 bp, Homo sapiens
ttttggtggttggatcatttgaagtggtgtctacacttataaaaattacagtagaatgcacattccttgactatataatgggaggatgtcagctgaattt

SEQ ID NO: 752057 - DNA, 100 bp, Homo sapiens
tggagccaagaaatgagtatagagccccccaagatgaacccagtggtggagccactgtcctggatgctgggcacctggctgtcggacccacctggagccg

SEQ ID NO: 752058 - DNA, 100 bp, Homo sapiens
acagagaaactttcagctcatgagggacctagaccaaagaacagaggcatggtggtggaacaccccgagttcctcaaggcagggaaggagcctggcctgc

SEQ ID NO: 752059 - DNA, 100 bp, Homo sapiens
gcagttacaactggagcctggattttaactggaggagtaaacacagaacatccttcaaagagttcatgcatcttactgaggacacctgaccttttgaagc

SEQ ID NO: 752060 - DNA, 82 bp, Homo sapiens
cccaggtgtaagcgcagaaagcaggcgaacccgcggcgcaataacgttacagaatgtctgaaggggacagtgtgggagaatc

SEQ ID NO: 752061 - DNA, 82 bp, Homo sapiens
caaggagctaaagcagcgtgcgttcagccctgggctggagcagttcaacatgatggagaacgccatcagctccagcagcctg

SEQ ID NO: 752062 - DNA, 50 bp, Homo sapiens
tacaaggcgaggcggaaagatggtgagagtagcatgtttgtctccaagag

SEQ ID NO: 752063 - DNA, 50 bp, Homo sapiens
ctttgttccctgcagccctcccacggtcctcgatgggcttcctggaatat

SEQ ID NO: 752064 - DNA, 82 bp, Homo sapiens
ccattttggatggtgaaccctgaagtcggtgtctgctgcgttcacggcaggattcggttagatacagatcacttggattcag

SEQ ID NO: 752065 - DNA, 100 bp, Homo sapiens
tcaggtacgaccaaaactgccgcttttgaagattttgcatgcagcaggtgcgcaaggtgaaatgttcactgttaaagagccctggtacctgacagtgtaa

SEQ ID NO: 752066 - DNA, 80 bp, Homo sapiens
acatccaggctggtcagtgtggcaaccagatcggtgccaaggttcccctccagactctttgcaccaaagctccctctgag

SEQ ID NO: 752067 - DNA, 100 bp, Homo sapiens
gacctggagtttcaggaaggggatataatcctggtgttatcaaaggttgatcataccagggttgtcctacacgatggtgatcccaatgagcctgtttcag

SEQ ID NO: 752068 - DNA, 75 bp, Homo sapiens
caccagtttccatatgtaatgcaaggattgttgtgtccactgtatcctggcttgcttgttctgcgaattcctgac

SEQ ID NO: 752069 - DNA, 83 bp, Homo sapiens
gcccacgctaccgggagctggtcaagaactggtgaaatgacaatggatgctctgttggctcgattgaaacttctgaatccaga

SEQ ID NO: 752070 - DNA, 100 bp, Homo sapiens
agtcgcagcgagctggagccgccggagaggtcctgctgtactagccaccaaagcagctgctggtactaagaaatatgatcttagtaaatggaaatatgca

SEQ ID NO: 752071 - DNA, 74 bp, Homo sapiens
tctatggtgttgtgaagttctttaagcccccatatctaagcaaaggaactggaacatgtttgacaagctgaacc

SEQ ID NO: 752072 - DNA, 75 bp, Homo sapiens
tggaagatgcagatgagaaggttcagttggcaaaccagatatatgacttgcctccaacttgaaactctcctcgag

SEQ ID NO: 752073 - DNA, 100 bp, Homo sapiens
acccacccatttgagtttgacttctatctgtgcagccacgcaggcatccaggttgaagaagaggatgaacttgaatctggagaccaagaggatgaggatg

SEQ ID NO: 752074 - DNA, 99 bp, Homo sapiens
aagcccaggaacgtggcgctcatcaccggtatcacaggccaggtggttgaccagattgacaccctgacctctgacctacagctggaggatgagatgact

SEQ ID NO: 752075 - DNA, 100 bp, Homo sapiens
ggcctggacaagcggaccccggcccaggcggccttcgagaaaatgcaggagaagcgggcttctccagggaaagtgaccgaggcagtgaaagaggccattg

SEQ ID NO: 752076 - DNA, 144 bp, Homo sapiens
gcgctactgaggccgcggagccggactgcggttggggcgggaagagccggggccgtggctgacatggagcaggaaggcgctggccccagcattcagctccagctgcaggaggtgaagacgggcaaggcaagccagttctttggg

SEQ ID NO: 752077 - DNA, 50 bp, Homo sapiens
caagtcgtaaaaacaggtcaagtgaaatatggctacacacacctttctgc

SEQ ID NO: 752078 - DNA, 96 bp, Homo sapiens
gatccaaagccattcccaaattatagagctaattacaactttcggggcatgtacaatcagaggcccgatgagagaaagggaaagttaaggatgctg

SEQ ID NO: 752079 - DNA, 90 bp, Homo sapiens
tctggaactttctatgatcaggcagttgtcagaattcagacctaccttcagtcaacaaagccaattattgacttatatgaagaaatgggg

SEQ ID NO: 752080 - DNA, 100 bp, Homo sapiens
ctcagccttgctgatcatctcgtacagcagcagaaaatgaccatgttacaggagtcaactgagagttcaaatacaacaattgaggatgaagatgtgaaag

SEQ ID NO: 752081 - DNA, 82 bp, Homo sapiens
ctcctgcgaaaccaggcaatgggtacaatgactcttcttgcttttcacctaagttgaataagcaccctgtgcactttaatct

SEQ ID NO: 752082 - DNA, 98 bp, Homo sapiens
gcagaagatatgctgggcttctgatgatggctgcactgcatggttcttgggtgtctctggggagtccctgggccagaccttcctccagactccagccc

SEQ ID NO: 752083 - DNA, 96 bp, Homo sapiens
tgcccatccgaaaggatgatgaagttcagcttagcagtgtctgcaaaaacgaatcttttcctacaacctgttaactgactggactgttggtaacaa

SEQ ID NO: 752084 - DNA, 100 bp, Homo sapiens
tgacgcttgatgagaaggacccacggcgtctgttcgaagggcgcaaaccagaagaagagggtgtggaagataacgggctggaggaaaactctggggatgg

SEQ ID NO: 752085 - DNA, 75 bp, Homo sapiens
ggcctgccaggcagccgcggcctcggagctcggacctcagtggtttggagaaaaaggtagcagcactgcctaaac

SEQ ID NO: 752086 - DNA, 128 bp, Homo sapiens
ataacctgggcaattttaccaaactctgctgaagacgaacaaacctcacagccagagccagaggtttaactatagatcaacacatcatcttgcatctcatgggttctatgaatttttaaattggtttg

SEQ ID NO: 752087 - DNA, 75 bp, Homo sapiens
ctcaatgttgccaaaatgtttcctaaagttcgtgaatctcaacttgaaaacggacgatgtattactaagctggaa

SEQ ID NO: 752088 - DNA, 83 bp, Homo sapiens
tgtttatgaatctagtgtgaaagttttaatcacatcacaaggctatgaacaaatatgcaaatgacacaattggtactgcctgg

SEQ ID NO: 752089 - DNA, 83 bp, Homo sapiens
aagaggtcccaatcccccactctttccgccctaatggaggtctccagtttcgacctagaggatcaagacataatgggagcatt

SEQ ID NO: 752090 - DNA, 83 bp, Homo sapiens
cagaacaccaggacatcccagagtctgggaaatgcagcctcccgcgacgatgcccctcaacgttagcttcaccaacaggaact

SEQ ID NO: 752091 - DNA, 75 bp, Homo sapiens
tcataaagagaaaagaaaaggccatcaagacagttgtggacctctcagaatttcttcacatggctcctggagaag

SEQ ID NO: 752092 - DNA, 75 bp, Homo sapiens
ggagattttgatgtggatgatgccaaagttttattagctgaggagtacctgtcatttgcctttgagcattgtcac

SEQ ID NO: 752093 - DNA, 100 bp, Homo sapiens
ccttatatgaagattttcaacaagagtgtgaacatcatgcaccgtctgagagaagaaatggaagaaatcacacagcagcagctggtacacgacaagtact

SEQ ID NO: 752094 - DNA, 83 bp, Homo sapiens
gctgctcaccatgtggtttggggagtctgaggccaatgtcagagaaatctttgacaaggtctgtccagggttttggtggctgg

SEQ ID NO: 752095 - DNA, 96 bp, Homo sapiens
ctgctcttccacttcaaggagacaacggccacacactgtggggtacctggcaaagaattctgcaactttgttcagtgccagcgattatgaagtggc

SEQ ID NO: 752096 - DNA, 82 bp, Homo sapiens
cgtagaaagctggcctattgaaggcatttgatgaagcaattgctgaattggatacgctgaatgaagagtcttataaagacag

SEQ ID NO: 752097 - DNA, 100 bp, Homo sapiens
ttgaggatgaatgtttgcaaatcattttgaaattgccaagtgccacatacagacaacataacgatgcacggatgaaccttgccattgctctgactgctgc

SEQ ID NO: 752098 - DNA, 50 bp, Homo sapiens
atctctgatttctggagttcagcactagtccatgaacatcctgacctccg

SEQ ID NO: 752099 - DNA, 129 bp, Homo sapiens
tgaaacggagccagcggctgaggaggggccccagcagcccccgaaggccctatcaggacatggagtatgaaagacgggcggcgactggcggcgcgatggacctgaccgggctcctgctggacgaagaag

SEQ ID NO: 752100 - DNA, 87 bp, Homo sapiens
acaatccaaaacaaacgctattcctctcacgtttctgctgatgtactccacggttctgtgcagctattacaattcagccctgacgac

SEQ ID NO: 752101 - DNA, 74 bp, Homo sapiens
gactccaccatcacccaatctgttgattctccattgggaaaggcatttacaggagagaaggttgcacatgtaca

SEQ ID NO: 752102 - DNA, 99 bp, Homo sapiens
taggatatggtttcggaactttcaggctggaatatttcaggagtttaaagttcaggaagagtctgttacttttcgaattaatttaactgtccttttaga

SEQ ID NO: 752103 - DNA, 82 bp, Homo sapiens
tcaatttgctggatttaagcactgctgcactttatgagagctccaaacgagaatggaagccgctggaggaccgtagctgcac

SEQ ID NO: 752104 - DNA, 90 bp, Homo sapiens
gggctgtctcggcaccttcacctccctgctgctgctggcgtcgacagggtcacggagactcaccagttggcagaattaaatgagaagaag

SEQ ID NO: 752105 - DNA, 74 bp, Homo sapiens
cgtataaaggatatatctggaactatggtgccatccctcagaaaaccatgagctgttttccaagagcttcatct

SEQ ID NO: 752106 - DNA, 97 bp, Homo sapiens
tctgggccaccatttgccagggcctcgctcgagactggtcgaattgacaaatcttaccctacagtatgtggccacacaggaccagtgctggacatag

SEQ ID NO: 752107 - DNA, 75 bp, Homo sapiens
gtggtggccaagtatgcgcccagcggattctacattgcctccggagacagtgatctgacacaaacacagctgaag

SEQ ID NO: 752108 - DNA, 75 bp, Homo sapiens
gcgcgaggagttccgccccaccatctacagcaacgtgatcaaaggcctgagacctgggaggaagctggagaaaag

SEQ ID NO: 752109 - DNA, 82 bp, Homo sapiens
aggatggggtcaccgccctcagtgtctacctcacccccaagaccagatccgagccaggagacactgagcctttggagttagg

SEQ ID NO: 752110 - DNA, 98 bp, Homo sapiens
tgttgacctcttacctgctacacagtgtacaaaagttgaaaatggtgtatttgtagccaacccacttcaggaacgtacaattctaatgagaaaagagg

SEQ ID NO: 752111 - DNA, 75 bp, Homo sapiens
gcggaaaccagtggccacagcatctttgtctagccccagtgcagacgctgttggaagctctgactgtggcagttg

SEQ ID NO: 752112 - DNA, 101 bp, Homo sapiens
agaatctctccaaagaaattcctcaaacagaatttcacacagggtattccatggagaatgaggtattgctattgattgacattcaagtctcttacatcaac

SEQ ID NO: 752113 - DNA, 100 bp, Homo sapiens
gatggacgcccccaggccccccagtcttgctgtccctggagcagcatcgaggcccgggaggtaagaatgattgatgttggctgatattggagtgctcatt

SEQ ID NO: 752114 - DNA, 98 bp, Homo sapiens
cgcctttcaccattaagaggaaagcgatggaggagctgagcgctgatgagatccccctgaggtgaccgtgtttcccaaggagcctgtggagctgggcc

SEQ ID NO: 752115 - DNA, 97 bp, Homo sapiens
ctgcgctatgccctgctgtagtcacaggagctgtagagaggaccccggtacatctgaaagccgggaaatgagatcctcaccatggagaaggaagtgg

SEQ ID NO: 752116 - DNA, 108 bp, Homo sapiens
ctgctgccgaccggtccaaatggcacattccgataccgtcggtagccacatgggagaagcagatctacacatgctgtcgagacggtcttgtacgacgctaccagcttt

SEQ ID NO: 752117 - DNA, 100 bp, Homo sapiens
gggggccggccccggcctggtcctggccccggagctgttgctggacccctggcaggagatggagtttcactgtgtcagccaggatggtctcgatctcctg

SEQ ID NO: 752118 - DNA, 80 bp, Homo sapiens
gcagcactggctcagagggtcaggaacagagtcaatttcaggggctcacacagtcgacaaaagaaaacgtttttcttggg

SEQ ID NO: 752119 - DNA, 98 bp, Homo sapiens
tcaagtaatggtgcaaagcctgaaactggatacacgtctgtttaactacgcaaaaggtaatgctggcatggcttactgggaccctaagtgtggcgaag

SEQ ID NO: 752120 - DNA, 85 bp, Homo sapiens
agatccgcgtagtgaggaatcgtctccaccgtcatggggggcggagacctgttcttggcacagctgaagatcatggactacagcc

SEQ ID NO: 752121 - DNA, 100 bp, Homo sapiens
gttcctttcgtgctggcgccgcgacctccggatgacccgggcttcggcccccaccagagactcgatattaatgaatgtcagctacaaggtgtatgcccta

SEQ ID NO: 752122 - DNA, 82 bp, Homo sapiens
ctaagccacgttcaacttcctgacctgtcagcaaattgtggctactaatttgccccctgaagatcaagatggctctggggat

SEQ ID NO: 752123 - DNA, 100 bp, Homo sapiens
gccaagctcgtagcctgccactccgtgcgtataagaacagcactcctggaatcagatgagcacacatgtccgacgtgtcatcaaaatgatgtttctcctg

SEQ ID NO: 752124 - DNA, 90 bp, Homo sapiens
acctgggggctccctggacaactccgagcaggattatatctgtccaagatgcgagtctggttttatcgaggagcttccggaagagaccag

SEQ ID NO: 752125 - DNA, 100 bp, Homo sapiens
atcttcggaccccccaacaccctctacgaaggcggctacttcaagggcagcagaagaagcctttgtaaatgacattgacgagtcgtccccaggcactgag

SEQ ID NO: 752126 - DNA, 101 bp, Homo sapiens
tttggattgataagatcttgacaactgaaattggacttcacgatttaaggaagaagatgtcaatcatacctcagaacctaaaggcagacccagaagagctt

SEQ ID NO: 752127 - DNA, 96 bp, Homo sapiens
actgcaagcttgagcaccagcagctctgctggccgtccgctctgactaccactgtgccgtgtggaagtttggtaaacagtggcagccaacccttct

SEQ ID NO: 752128 - DNA, 100 bp, Homo sapiens
gtggcaaccagatcggtgccaagaacatccagtcatggataaaaatgagctggttcagaaggccaaactggccgagcaggctgagcgatatgatgacatg

SEQ ID NO: 752129 - DNA, 50 bp, Homo sapiens
gaggagtctcagagctgtcagaaaggtatcccaagtagataccatctgtg

SEQ ID NO: 752130 - DNA, 58 bp, Homo sapiens
cttaaattgatttcaagtttgaacaaggtatccagctcacatagaagacattgactac

SEQ ID NO: 752131 - DNA, 80 bp, Homo sapiens
ttcaattttcctgcaagaatatctacaggtgactggtatagtggtcccgcaactgaacttgatactgaacctgatgatga

SEQ ID NO: 752132 - DNA, 92 bp, Homo sapiens
cagtcccttggacagtctgcaccttctcttactgctggcctgccttccttgaatccagaagctggcaaacagcatcagccatgcagacctat

SEQ ID NO: 752133 - DNA, 83 bp, Homo sapiens
ggaccctccggccgcagccatgtgggacccgcgggcagctagtaagactttgaccccgacgcaggcttcagtgattgccgcgg

SEQ ID NO: 752134 - DNA, 83 bp, Homo sapiens
ctaccactgtaatgtgcagactccaagcactgccagtgaaagatgtagaagataaacctgaacaacaaaccagaacaagagag

SEQ ID NO: 752135 - DNA, 100 bp, Homo sapiens
cgccctgtcctcccgcgtggctgagtgggattccaccgagaagatcggggacctcttcgtggcctcggatccacctgatggctggccgagtaccccaggg

SEQ ID NO: 752136 - DNA, 90 bp, Homo sapiens
gcaactattcgcagtccgagcggaggcagaggttgcagtgagctgagattttgcgactacactccaacctgggcaacagagcgggactcc

SEQ ID NO: 752137 - DNA, 100 bp, Homo sapiens
tggagaagaacattcttacatgctgggcgaaatgaccctgaatgtgacctgtgtggtggagacccagaaaagaaatgtcattcttgctcctgtcgtgtat

SEQ ID NO: 752138 - DNA, 98 bp, Homo sapiens
gcacttaacagtaaattgggcaaacacgcccatttttccagccgaaaggtcagccccagttgatgctgacagcaggacccagtgttgccgtccctccc

SEQ ID NO: 752139 - DNA, 95 bp, Homo sapiens
ccgaagcagcgtgtcctccgtgggagcccgaggaccagttgctcttctgtgatgactgcgatcgtggctaccacatgtactgtctcaccccgtcc

SEQ ID NO: 752140 - DNA, 114 bp, Homo sapiens
aagagagaaagcaaccggggacatctatgctatgaaagtgatgaagaagaaggctttattggcccaggagcaggatttccagcaaagtgttactgtggtcctctttcaagacga

SEQ ID NO: 752141 - DNA, 135 bp, Homo sapiens
gatggagtaattcgttgtttaaaaagaatgcacattaaagccatgcccgaggatgctaaggggcaggatctagtgaaaagccatttgatgtatgcggtcagagaagaagtggaggtcctcaaagagcaaatcaaa

SEQ ID NO: 752142 - DNA, 100 bp, Homo sapiens
ccaggccgactggaccggcacgtcttcattgatctccccacgctgcagctgaacatctccttcccagccactggctgccagaaactcattgaagtggacg

SEQ ID NO: 752143 - DNA, 50 bp, Homo sapiens
cttggacttcccagcctccagaaccacagagtctcgctctgttgcccagg

SEQ ID NO: 752144 - DNA, 138 bp, Homo sapiens
gcagagtgtcagataatagctcattttagtagagggcaataaatgccacatgagatgatcacctcagcagaaaactgcagttgcagtggtgcagaatggctgacctcagtcttgcagatgcattaacagaaccatctc

SEQ ID NO: 752145 - DNA, 97 bp, Homo sapiens
taagaacctggaaaggggactctgttggccattggaaattgcagaataatgtctcagaataccctctaccatctgctttggtcagggtgccgctcga

SEQ ID NO: 752146 - DNA, 101 bp, Homo sapiens
gccatgtgaagggaatgctgtggaaataattatgtgcaacattaggccttgcccaggggcataaggaaatggtggcaggcacttcctcctaacaagaagga

SEQ ID NO: 752147 - DNA, 75 bp, Homo sapiens
ccagaactacaggggctctggccatcttcgtgaagttcaccatgtctattctcaagatccatgccagggagatct

SEQ ID NO: 752148 - DNA, 51 bp, Homo sapiens
ctttgacgccagcttcttttctgccactattgaactctgcagtacccatgc

SEQ ID NO: 752149 - DNA, 98 bp, Homo sapiens
tgactttggagccagcctgctaggggctgaattctgactcagccatttactaactgtgtgaccttaggttcaaaccttgtactactcagctgatcaca

SEQ ID NO: 752150 - DNA, 100 bp, Homo sapiens
ctgcgtcgcccgaggcgaggaggagcgctggcgagctgaagaagcaggtggagagtgccgagctgaagaaccagcggctcaaggaggttttccagaccaa

SEQ ID NO: 752151 - DNA, 89 bp, Homo sapiens
ctgccgccgcccccggagctgctggtttcattcgaggtttcgggccgaatcggcaaggttggaaaccagaagcgtgttgttggtgtgct

SEQ ID NO: 752152 - DNA, 98 bp, Homo sapiens
cgaaatcgagcctggccttgagggtccacaccgcgagggaagatgcgtgcgcccattgaccctgctgggatctttgagcttgtggaggtggtcggcaa

SEQ ID NO: 752153 - DNA, 76 bp, Homo sapiens
gcaagcatgggtgttttcatcatcggctgtcttgaatcctttctacaaggagtggaagaagctgggaccactctga

SEQ ID NO: 752154 - DNA, 90 bp, Homo sapiens
ccacaggctccgatggcggcggccacgctgagggaccccgctcaggattacctgagctggaattggaagcaattgataaccaatttggac

SEQ ID NO: 752155 - DNA, 100 bp, Homo sapiens
accatcacatctcattttgcaaagggaaccagctcatgtttggaaaaggaatcttccactgaaacatttggatacccgacgttctccctggacacttggc

SEQ ID NO: 752156 - DNA, 76 bp, Homo sapiens
tggagataaaattttttgaaaatcgggcaaatggccagtcaaaggggtataatattgagcccagcctatattgccc

SEQ ID NO: 752157 - DNA, 80 bp, Homo sapiens
cccgggtccccgcgttcacagccccagcgcagctggagatggagctgaagatgctgaagtctcagtccagctctgccgaa

SEQ ID NO: 752158 - DNA, 82 bp, Homo sapiens
ctgctcatcaccaaggccaagaacgggcacctggctgtgggggtgaatctctacattaagaacttggatgacactattgatg

SEQ ID NO: 752159 - DNA, 75 bp, Homo sapiens
tcctttatatagaagggagagtagatcggcttcaccaccgaccctcggatggcccgctcctccccctaccccact

SEQ ID NO: 752160 - DNA, 90 bp, Homo sapiens
cctgtacagtggatggaatctgctttgttgggagtgatggatggacaggtacaagcaacagctgtccctggcagtggaaagggagcggag

SEQ ID NO: 752161 - DNA, 75 bp, Homo sapiens
ttctgccgaaaggactgaggaacggtgcctggaaaagccaaaatgaagtttaatccctttgtgacttccgaccga

SEQ ID NO: 752162 - DNA, 90 bp, Homo sapiens
gactatgggcgaatagctctgaccacccggcgaagtgtttgggaaatgggaagtaatgacagctggcacctgaactaagtacttttatag

SEQ ID NO: 752163 - DNA, 51 bp, Homo sapiens
caaaaacaactaactactctacagctttgaccgccattgaaggcacagcac

SEQ ID NO: 752164 - DNA, 50 bp, Homo sapiens
caaccccagatccatttacactttacagggatcatggaagctgataaaga

SEQ ID NO: 752165 - DNA, 82 bp, Homo sapiens
tgggtcaccatcctgtgcatggcacggctcaagacagtcctgaaatacaaaaactgcttaaggttgaaaagagaaatttaag

SEQ ID NO: 752166 - DNA, 82 bp, Homo sapiens
gcgcgggacccggaggaccgtatccccagcccactgggctacgcagcaagagtgagccatggagctacgtgtggggaacaag

SEQ ID NO: 752167 - DNA, 100 bp, Homo sapiens
agagctgagggagcaagaggtgtcggaggtctcatctttgaactactgccggagcttctgccagggaaccttctgaccagcctcatgggctcctcagagc

SEQ ID NO: 752168 - DNA, 100 bp, Homo sapiens
gacattgtggcaatcatcctgaatgaatttagagccaaactgtccaaggctttggcagcacgtgggccgtggcccggctgggtcggctgaagaactgcgg

SEQ ID NO: 752169 - DNA, 80 bp, Homo sapiens
ccacgttccactttcctcaccccaaatatgtggacctgtacaagatggtcagtaggacagaaggtaacattgatgactcg

SEQ ID NO: 752170 - DNA, 101 bp, Homo sapiens
cggagaccccgcgccggaccctgaggcagcgaaaatccccggcttcctgactgatgaagagtgtcggctcatcatccatctggcgcagatgaaggggttac

SEQ ID NO: 752171 - DNA, 75 bp, Homo sapiens
acggggatgtgatgttggagaactacagccatctagtttccctgggttgaaatcacaaagattagacaccttttt

SEQ ID NO: 752172 - DNA, 75 bp, Homo sapiens
cttggagctagtctacaatcaacatgagaatgaagcaaagtcattctttgagaaattgaaatcatggcaggtcca

SEQ ID NO: 752173 - DNA, 100 bp, Homo sapiens
tggaaaggagagctaccatcactaagcttgcctgggaccagtggcagggaccccggaacctgaaggtgctgacaaagatgacctgctgctgttgagtgag

SEQ ID NO: 752174 - DNA, 82 bp, Homo sapiens
ggagtacgcgcgagagccttggtttacccaaggtccagcctagcccctaggcaccatgtcggacagtgatctaggtgaggac

SEQ ID NO: 752175 - DNA, 100 bp, Homo sapiens
aggtggtgatgcagggatgcctggaatagaagagaatgacctagcaaaagttgatgatcttccccctggtgagatttcaatggaaaaagtgaaggtaaag

SEQ ID NO: 752176 - DNA, 75 bp, Homo sapiens
gggaacgggacttctaaaaggaactatgtctggaaggcagtcgatgatgtgaagaaaggttacatcaaagcagaa

SEQ ID NO: 752177 - DNA, 82 bp, Homo sapiens
atgtcagccttcccagtagctgggaccacaggacagagggcttggtggactccttttctcagggactggaaaggtcatacgc

SEQ ID NO: 752178 - DNA, 75 bp, Homo sapiens
ttgtgactgcctgcttgcaggctgtgtcacagaagagaaccccatctgtgacttcctagaactccagcgccgtta

SEQ ID NO: 752179 - DNA, 100 bp, Homo sapiens
cgctagaactcagttgtgcgttgcggccagtcgccactgctttcgatcctttggtacagaagacagaccgacagatcgtccaataccacctcgagatgaa

SEQ ID NO: 752180 - DNA, 82 bp, Homo sapiens
ctcaactgcccagcgtgaccagtggccacctctgcagtgtcttccacaacctggtcatgttgtcataggaacaactggagaa

SEQ ID NO: 752181 - DNA, 100 bp, Homo sapiens
aagggagcgaaggtttttgctgcgccaacgcagtgaccgaaggctccgctcacgcccggcagccagacccggtccgtttggaatgcctgggatggtgccg

SEQ ID NO: 752182 - DNA, 49 bp, Homo sapiens
cggaaccgccacagcactcaagtaacttgggtttttactcctgtaacaa

SEQ ID NO: 752183 - DNA, 50 bp, Homo sapiens
cttggagtagggagaatattcaggctattcaaggccgaaatgagagctgt

SEQ ID NO: 752184 - DNA, 101 bp, Homo sapiens
cgggagccatgccggagaagcgcgcgggcgcgcaggccgcggggagcacctgggctactgcagcactggggtgtcagttgttggtccgacccagaacgctt

SEQ ID NO: 752185 - DNA, 101 bp, Homo sapiens
ctggaagcagaggaagtagtttaaatgatacctatcactcaagagactcttcatttagattggattctgaatatcagctttcttggactccgtactgttgg

SEQ ID NO: 752186 - DNA, 51 bp, Homo sapiens
ttaaaagaactacgtgttttatccaacagagcacaggctgcaaagccctgc

SEQ ID NO: 752187 - DNA, 74 bp, Homo sapiens
ggagtttgagccccggaggcagagcggctgccatgatggtgaccctgataactatattgcttattatcggaggg

SEQ ID NO: 752188 - DNA, 87 bp, Homo sapiens
tttatggagaagggctgttgctaatgctaaaagcattggacaccttatttttggaagtgcattttcagctgagcacctcaaacttca

SEQ ID NO: 752189 - DNA, 100 bp, Homo sapiens
cggcggccgaagacactgcgactccggagacagcccaaatatcctcggaagagcgctcccaggagaaacaaatctcacattcttgaaggtggcattgaag

SEQ ID NO: 752190 - DNA, 83 bp, Homo sapiens
ccttcggcagtccacccaccgccgccgcctcccaggctgagtttgagaaagctgcagaggaggttaggcaccttaagaccaag

SEQ ID NO: 752191 - DNA, 83 bp, Homo sapiens
cttccttgcttctttggagaatgatatcaaaccagtttgtgaatttcccagaccagccggtggtgtggagagaaatcagcatt

SEQ ID NO: 752192 - DNA, 100 bp, Homo sapiens
atgtgaggctgatgaagaggaaaacaggtacttcaagcgtagcgagggcctggagcgccaccttcgacgagctgataggcagacccatcggggagttctc

SEQ ID NO: 752193 - DNA, 100 bp, Homo sapiens
gttcaaagtactcaagatgaatttgaggaaaatgtttataggaggccttagctgggacactacaaagaaagatctgaaggactacttttccaaatttggt

SEQ ID NO: 752194 - DNA, 97 bp, Homo sapiens
atgatgagaagccctgtacagtcttgtcaagaaataccctgagccagtctctgagacgcttcgaccagcagaagtagacactgtggatgcattccag

SEQ ID NO: 752195 - DNA, 82 bp, Homo sapiens
agaccgcgcgcagggcctgcagcgggagctggacggcgagcgcgagcggcgcgagaaagaccgcctgtattttcatcctaca

SEQ ID NO: 752196 - DNA, 100 bp, Homo sapiens
gtgaaggacactgcccacgactttcggaacaaaatccagtctcatagcagaggagaatataatgtttacagcaccttccagagccatgaaccagagtttg

SEQ ID NO: 752197 - DNA, 82 bp, Homo sapiens
ggaggctgcgcccctccaggtacgagaggggcttccagacgatgcagtttcaaggaaaactaaaattcctgtttggacagaa

SEQ ID NO: 752198 - DNA, 100 bp, Homo sapiens
cgctggccgggggcgcgggcggcggcgccggcaggaaggtggtgcccaggcaacatgggtgactggagcgccttaggcaaactccttgacaaggttcaag

SEQ ID NO: 752199 - DNA, 98 bp, Homo sapiens
cgagatggccatcgcactctggaacaacatggttctaatagaagactgtatcccggtactgaagaggtacgccaaagaagggagagaatttgattatg

SEQ ID NO: 752200 - DNA, 98 bp, Homo sapiens
ccttgacccaaactttctggatgcttatatcaatttaggaaatgtcttgaaagaggcacgcatttttgacagttgcccattggacgtcaatgtgtaaa

SEQ ID NO: 752201 - DNA, 75 bp, Homo sapiens
aagtgcccttcgagcagattctcagccttccagagctcaagggagctactttgcccgagatgctgcatattccca

SEQ ID NO: 752202 - DNA, 75 bp, Homo sapiens
ccgcccgaccccgtcccgaccctggccgccccgagcggagcctggaggatcatccagcagctcgtcaacggcatc

SEQ ID NO: 752203 - DNA, 74 bp, Homo sapiens
agtgtgtgtgtttggaatcatgaaacacagattgtgttcaattagaccttcaggacctctccaagaagcctccg

SEQ ID NO: 752204 - DNA, 100 bp, Homo sapiens
tacattaggaaacatgctagaattacctggaacttcatcatcatctacttcacaggaattgccatttgggaaaccctcagtaaaaccagcccaggtcaaa

SEQ ID NO: 752205 - DNA, 80 bp, Homo sapiens
gaccaaaattgtggaaaagtcactctgtaagactttgaccccgacgcaggcttcagtgattgccgcggatcagaagcctg

SEQ ID NO: 752206 - DNA, 75 bp, Homo sapiens
tgcagaagatgggcctccagaactcctggggaaaacatatccatttcggggcgcctttccaccagtatggaatcc

SEQ ID NO: 752207 - DNA, 90 bp, Homo sapiens
gctgctccgtggccacgaggacgtcaccatgagaggccaatgagacttgaaccctgagcctaagttgtcaccagcaggactgatgtgcac

SEQ ID NO: 752208 - DNA, 100 bp, Homo sapiens
gatgacctgatgcctgtgtactgtggcaatgaggtgactccaaccgaggcacagaatcaaaagtttctgtgggaattttaaatataaaacttgaaatgta

SEQ ID NO: 752209 - DNA, 98 bp, Homo sapiens
cagaagaggcttcaagctgttagtgagtccacggttccgccaaggaggaagattatccaggagctattcagttgtgccttgaatgtcaaaaagctgcc

SEQ ID NO: 752210 - DNA, 100 bp, Homo sapiens
tacgattcctgtaactcggaagaaatacagagaaagcttaatgagcagcaggttcagcaaaaggatgtcactgaaattgatattttagttaagaaccggg

SEQ ID NO: 752211 - DNA, 90 bp, Homo sapiens
ggggtgctcatcgcagtcctggacacgggggtcgacccgggggctccgggcatgcagttttgagtatccgaggagcccaggaggaggaac

SEQ ID NO: 752212 - DNA, 75 bp, Homo sapiens
agccagaaacagatctcagccccgggctcccagctgcccacctcataggccaaccccttcaaggagcgaatctgc

SEQ ID NO: 752213 - DNA, 74 bp, Homo sapiens
ccggacctcgaccctgagctctatctcagtgtacacggtcggaacgagctgattgcccgctacatcaagctccg

SEQ ID NO: 752214 - DNA, 100 bp, Homo sapiens
aatatggatctttacatgttgaatccttgcagcactaaaatttgtgagaaagatcagtctaaagaaaaggagaagaaagtgaaaaaaacaattccttcct

SEQ ID NO: 752215 - DNA, 74 bp, Homo sapiens
cagaagtcagaagaaggccatccattcaagccaccctgaggcacaaactaactgtcatgtacagtcagatcaac

SEQ ID NO: 752216 - DNA, 101 bp, Homo sapiens
cgggcggcagagcagggcggcggcgactcgaatttctctgcaaagaatgtccaaaaattcatattcacattgatcgtatcgacaaaaaagatgtcccagaa

SEQ ID NO: 752217 - DNA, 89 bp, Homo sapiens
aaaataaagaaatccagaaattggcagagcagtttgtcctcctcaatctggttatggaatcgccacttatatatgtttcagttttgctt

SEQ ID NO: 752218 - DNA, 123 bp, Homo sapiens
cggcgccgcggcctcttcggctgcggaccctgccattccggaggaggtatctcagatgaagacatcatcaacattactcttcctactggagtccccattcttctggaattggatgaaaacctg

SEQ ID NO: 752219 - DNA, 100 bp, Homo sapiens
acaacatggcagacattgacaactggaccagctattccttctgttgtggcgtatccgaaaaggagtcagaccagcactgcagatagtgacctcaaagaag

SEQ ID NO: 752220 - DNA, 98 bp, Homo sapiens
gtgatccctcaagactggtccacggagtgtatgaccacaaacagccatcaagggtgccaaggactcacccgtacgtcgggctgtgaaagacacccttt

SEQ ID NO: 752221 - DNA, 83 bp, Homo sapiens
ccgctgccctgtgtctctgtagcctcctgctgtggccgacccgcctgcgacgctgtccagctgggagctccccgacctccagg

SEQ ID NO: 752222 - DNA, 97 bp, Homo sapiens
caagaatgcctgcataaattttccacccgggattatatcatggaaccctccatcttcaacactctgaagaggctggacgagtcattcacagtcaagg

SEQ ID NO: 752223 - DNA, 75 bp, Homo sapiens
cacaggaccccagggacctcagggcaagttgctccctgagctgctccaaccttatacagaacgtgtggaacatct

SEQ ID NO: 752224 - DNA, 74 bp, Homo sapiens
caaagccccctgctctactgtgacctggagactgaggctgatgtgaatccaaaggcctatccccttgccgatgc

SEQ ID NO: 752225 - DNA, 100 bp, Homo sapiens
accggcggcgctggaggagcgaggcagctgtactaggactgggaacggtaactattggtacttcagagatgaatgcattcttggatgacccagaatttgc

SEQ ID NO: 752226 - DNA, 98 bp, Homo sapiens
ttccacaccagatgttgctgttcgaacattgtcagatgggcaattgaaggaacagactaaaaatcgtgtcctggaaggaaactacaggtactaccagg

SEQ ID NO: 752227 - DNA, 75 bp, Homo sapiens
gataagcgctttcgcttggcgctgggcagcttcgtggaggagtacaacaacaagtgcaccaccagcactgcatgc

SEQ ID NO: 752228 - DNA, 100 bp, Homo sapiens
caggagtcggcggctcagttgtccatgaccctgaaggtccaggagtacccgaccctcaagggtatcactgggatacatcagattggatgccaagcgttcc

SEQ ID NO: 752229 - DNA, 109 bp, Homo sapiens
cccagggccacctaaggagcggaccccgcatcttcgccgtctggaaagacaatgcagatcttcgtgaagactctgactggtaagaccatcaccctcgaggttgagccca

SEQ ID NO: 752230 - DNA, 90 bp, Homo sapiens
gcagtcatggatcatattacggtacccaagatcagtgtgcgtgtgaccaccatggatgcagagctggagtttgccatccagcccaacacc

SEQ ID NO: 752231 - DNA, 87 bp, Homo sapiens
atgggatgtagagacaaaaacagttgtgacagaacatgcactccatcaggccaaagcgtttgagttaagctacctcgagaaggttcc

SEQ ID NO: 752232 - DNA, 90 bp, Homo sapiens
ctcggcagaggagaaattcagacggctcccgagggtcatcaacattccataattttgtcaaaatagcactaaccaaaaacccaaaaaaaa

SEQ ID NO: 752233 - DNA, 100 bp, Homo sapiens
ttaattcctcttcataatgcggcatcttatgggccgtgttgccgcccgctgtgctatgagcagtcagagcgccgtctccacaagagtttacaaatgaaaa

SEQ ID NO: 752234 - DNA, 83 bp, Homo sapiens
gccgccccctccggcgtgttcatgcccccgggaataccctctaccatctgctttggtcagggtgccgctcgaggatttaaaag

SEQ ID NO: 752235 - DNA, 100 bp, Homo sapiens
gtcagcgctcctaaagcaaacgccaccattgaagtgaaagagccagtcttggtgctctgtgttcacctggttcatctgaggagctgcatctaccctgccc

SEQ ID NO: 752236 - DNA, 75 bp, Homo sapiens
ttgatggtctggtagaaacaccaacaggatacattgaaaggaattacatgaacgacagccttcgcaccgacgtct

SEQ ID NO: 752237 - DNA, 107 bp, Homo sapiens
agaccctggagcctcagttggaagcagccgatccagcctgcggagcctgtggggcagggcatttgcacgccaaaggcaaagaagaaaaaatgtccaaatcattaaag

SEQ ID NO: 752238 - DNA, 80 bp, Homo sapiens
ggaaattgcggcccctctttctcaacccagagcaaattgagacgtccgggaaggtgctcgggtcttcggggcactgggtc

SEQ ID NO: 752239 - DNA, 82 bp, Homo sapiens
cccaccgctgccctcagctccgagtccagggcgagatttattgctaaacatgggtgcatttttggataaacccaaaactgaa

SEQ ID NO: 752240 - DNA, 96 bp, Homo sapiens
tagaagatgaattggtgaagaaatactctctgcccagcaagttcagtgactttttacttgatccatacaaggaaaactaggaatctatgatgctga

SEQ ID NO: 752241 - DNA, 98 bp, Homo sapiens
agaactgttctcaggactcattattttaacatttgggagaaacacagccagaagtctgatgccaatgcaagttacttaagagcagctcgagctggaca

SEQ ID NO: 752242 - DNA, 98 bp, Homo sapiens
ctggaaccctggggactacgacgtccctcaaaccttgcttctaggagataaaaaggtggattgtctcattgttagtgctgaatcttcttgcctacttg

SEQ ID NO: 752243 - DNA, 74 bp, Homo sapiens
gccccttccggttcgagatcagcttcgagtgcagtgaagccctggcggacgcttctcaataggtttggcatgga

SEQ ID NO: 752244 - DNA, 117 bp, Homo sapiens
gctcccctaggagtgctgagcccgcggaaccgcagccatgtgtatccaaagtgtgtacatcagtaagatcataagcagtgatcgagatctcttggctgtggtgttctatggtaccga

SEQ ID NO: 752245 - DNA, 98 bp, Homo sapiens
tgaaacagctgcaaaggttgcattgatgaaattaaagatgcatgctgatggcgataagtcattaccacaggagtcagtggatcggtggggaaaatgct

SEQ ID NO: 752246 - DNA, 101 bp, Homo sapiens
tttcgtgagacactgagaagagaatccagccattccacgcccaacttctgacacacagaactatgaggtgtacattccaagcagagtggccctcatccttc

SEQ ID NO: 752247 - DNA, 90 bp, Homo sapiens
gccacccatcaaatcagagagaaggaatccaccttcttacgctatggcagcgcctagaagcctgcagctccggagcagtggccgcgccac

SEQ ID NO: 752248 - DNA, 75 bp, Homo sapiens
tttagtccattgactatgcagcctaatgccaagctctactccaggaagtgaaaatgtgctgcctcgagagccgct

SEQ ID NO: 752249 - DNA, 97 bp, Homo sapiens
gccgaccggcgccgggagatcctgggaactcgctttgaacgcttgcttatgagaataggacatcaatcaaagaatgccccagtggagctaaaaatta

SEQ ID NO: 752250 - DNA, 100 bp, Homo sapiens
ttcccatcctcgctcccacctgtcagccttctaccccatgagaaagaccagcgccctcacaaagccaatgctgaggagatgaccaagtaccacagcgatg

SEQ ID NO: 752251 - DNA, 75 bp, Homo sapiens
ctacaggggcctttgttcggtctcaagctgttccgtaatctcacaccaagatggcttgaccactatgctatcatc

SEQ ID NO: 752252 - DNA, 82 bp, Homo sapiens
gcagaggatcctggaggcctgggaagccaacgaccacacgcagagtgtggccatctggggccgtgtggtatttgccactcag

SEQ ID NO: 752253 - DNA, 82 bp, Homo sapiens
ctgcatcatatttgattctgactggaacccacaaaatgacttgcaggccacagccttcctcgaagacacccaggatccccaa

SEQ ID NO: 752254 - DNA, 83 bp, Homo sapiens
tggaaagaagttgcaaaacactggggaacccgagcgtcatgttagggtgaagcagaggacctcagtgctgaacatgctaagga

SEQ ID NO: 752255 - DNA, 75 bp, Homo sapiens
agctcctggtcgatgaagaggatgatgtttttggtgaaggttgagcatcctgtcacagaatgcattactggcctg

SEQ ID NO: 752256 - DNA, 54 bp, Homo sapiens
gaggctggactcggattcgttgcctgaggcattttccccaatacatctctgctc

SEQ ID NO: 752257 - DNA, 50 bp, Homo sapiens
cctgaacggagtgtgcgacggattgggagacttcccaagtaagaagcgga

SEQ ID NO: 752258 - DNA, 50 bp, Homo sapiens
agacgatggccgtgtgcaacacacaaggcgaccagccagctcctgttgga

SEQ ID NO: 752259 - DNA, 100 bp, Homo sapiens
tgatggagccagaaggggagagttatgaggacccaccccagggcgaccattgacgaggtggagacggacgtggtggagattgaggccaaactggacaagg

SEQ ID NO: 752260 - DNA, 100 bp, Homo sapiens
agaaaccagccgaacttcagggtttccaccgttcgttcaaggcggtgcgtctttctacgtgaataggattttgtggctggccagatacactgcatcatct

SEQ ID NO: 752261 - DNA, 83 bp, Homo sapiens
aggattccaagtaactcttatttggtatgagcagcagcgggacaatcttgcccaacagtcattcaacatggaacaagccaatt

SEQ ID NO: 752262 - DNA, 97 bp, Homo sapiens
gaaagtggagtccgagctgagatccatctgcaccacggtgctgcttattcagctgattctgaatcatcttacactaccagacctgtgtagattagca

SEQ ID NO: 752263 - DNA, 83 bp, Homo sapiens
atggcggaggcttcgagtgacccgggtgccgaggagcgggaagagttgctgggctgtcgcctggttgggcccggaaatgggac

SEQ ID NO: 752264 - DNA, 101 bp, Homo sapiens
ttaggtgcttttatattcatctcaaaaacaaaattctgaactcaggacttggcaagctggcagtgatggtgaaagcataggaaactgccccttttcccaga

SEQ ID NO: 752265 - DNA, 100 bp, Homo sapiens
tcaagcgaagccttgaaaaagctgccctgagacggtgtcccgccgaaagtgtcgagatggctatgaaccctgtgtaaatgaaggaatgtgtgttacctac

SEQ ID NO: 752266 - DNA, 114 bp, Homo sapiens
ccgccgccgcgcctgcgcagaaggccggggccggccagaagcgggcggcgcgggggagatgcgcccgggggctggagaaggccaggcagcagctgcaggaggagctccggcagg

SEQ ID NO: 752267 - DNA, 90 bp, Homo sapiens
ggacgttgtctaaatttcggtagccatggcacaagaatatagtatacaaaactaggatatgctggaaatacagaaccacagtttatcatc

SEQ ID NO: 752268 - DNA, 75 bp, Homo sapiens
ggcaactgaaaactgttcttggacctgcggtgctatagagcaggtgtctccagtgaaaatctgtgactttgactt

SEQ ID NO: 752269 - DNA, 74 bp, Homo sapiens
agtcagggacatttctgaagcgagcgtcttcgatgggtgtccgcaatgttgccagtgtctgtctgcagattggc

SEQ ID NO: 752270 - DNA, 83 bp, Homo sapiens
ctcgtgctctggctccccgcgtgcgtcgcggcccacgacaatgcagatcttcgtgaagactctgactggtaagaccatcaccc

SEQ ID NO: 752271 - DNA, 49 bp, Homo sapiens
cgaagcctaaattccaggaggtgtgccggtccaacaaaagcccttgggt

SEQ ID NO: 752272 - DNA, 90 bp, Homo sapiens
gccgctcacccgtggaaagtacaggtcctgacagctgaggcggggtttcaccatgttgcccagactggtcttgaactcctgagcttaagc

SEQ ID NO: 752273 - DNA, 100 bp, Homo sapiens
ggaccactcgttgctgacagtcagaaaaataatcatgggccagactgggaagaaatctgagaagggaccagtttgttggcggaagcgtgtaaaatcagag

SEQ ID NO: 752274 - DNA, 100 bp, Homo sapiens
gcacagctcagggctgctcacagtgaaggcaataccactgctggattgggcaagtagcctgcagtatgaaatgctgctgctgacggattctatctccaag

SEQ ID NO: 752275 - DNA, 75 bp, Homo sapiens
gaggactttcgctatcgatctcctcattcagctctttcgacgtgtagcagcagctttgccgggaatggaaagcac

SEQ ID NO: 752276 - DNA, 95 bp, Homo sapiens
tcggcaagatccagatcgggatttacgtggagatcaagcgcagcgatgggaacgggtatggcaatccccgaaactcaccaggtctgctggtctca

SEQ ID NO: 752277 - DNA, 100 bp, Homo sapiens
agtgagggatttcgccgcccgctttcaggcccgtgtgcctccattgctcttatggacaaagaaggattgacagccctcagctgggcttgtttgaagggcc

SEQ ID NO: 752278 - DNA, 82 bp, Homo sapiens
gcaggagcgggtccagcttcaggagtactggcggaggggctggacgttccacgccaaagacaatgcagatcttcgtgaagac

SEQ ID NO: 752279 - DNA, 76 bp, Homo sapiens
gaactcgtcatgctctttgtagcgtggtgcttctgttgctcacagatgtaaagacgaccgtggtttaccctgccac

SEQ ID NO: 752280 - DNA, 100 bp, Homo sapiens
gccggccccaacacggaccttggttcgatacaagaggctgttttcctagcgtggcttgctgcctttggtaagaacatgtcgtccatcttgccattcacgc

SEQ ID NO: 752281 - DNA, 100 bp, Homo sapiens
gagaaggccatcacccaggtcagcaagggcacctgcgagcaagtgattagagacttccaagaatatgtagagccaggagaagacttcccggcttctcccc

SEQ ID NO: 752282 - DNA, 75 bp, Homo sapiens
ggttgcctgcagcggcccggacccgagaggtgctggagaatctggtaaaagcaccattgtgaagcagatgaggat

SEQ ID NO: 752283 - DNA, 75 bp, Homo sapiens
gctgatggtgcagcaccgcatgatggtacccaaagtcagccaacaggaaggccgggtgtgcagtcacatctctgc

SEQ ID NO: 752284 - DNA, 89 bp, Homo sapiens
ccatgatttaaatatcggcgttaaggtgtaccttgaaagacttttaacatacgcagagatagatatctgtccggccaactggaagcgga

SEQ ID NO: 752285 - DNA, 51 bp, Homo sapiens
tgaatgtgcccggacctgcgccttctgggacattcatcttcaaagaaatct

SEQ ID NO: 752286 - DNA, 100 bp, Homo sapiens
ccagacgccccaaacaaacatatatttgccttccctccatgatctccaacactatccgataaagtagaagcaactgaggtaccgtgaaagagaaaggagc

SEQ ID NO: 752287 - DNA, 74 bp, Homo sapiens
cacttctccagttagttggagcccaggtttctgacgtagaagagcttacccctccagagcatctttctgatctt

SEQ ID NO: 752288 - DNA, 100 bp, Homo sapiens
gccgggacttctggcgcgtgcggaaccccacggttcagggaaacaccagacccaagtttccaggaagagttctctggtctcctgctcttgaaaatgttac

SEQ ID NO: 752289 - DNA, 146 bp, Homo sapiens
tcaatataagacaaacttgtaatctgattttcagcctgtgtcgatacaataatcgacttgcagaacatttttgcacagtaataagttgactcacacagacttaaagcctgaaaacatcttatttgtgcagtctgactacacagagg

SEQ ID NO: 752290 - DNA, 101 bp, Homo sapiens
cacccaagatggagttcctcctggggaacccgttcagcacaccagtggggcagtgcctcgcaggtggtccattatggctgacatgcaaaatctggtagaaa

SEQ ID NO: 752291 - DNA, 100 bp, Homo sapiens
cagatattggcacatatcagtgcaaagtgaaaaaagctcctggtgttgcaaataagaagattcatctggtagttcttggaattgtagtcaacggtcagct

SEQ ID NO: 752292 - DNA, 105 bp, Homo sapiens
gccgccctgagtcactgcctgcgcagctccggccgcctggctccccatactagtcgccgttaccttatcccatatcacacaactggtcctcagccataacaagct

SEQ ID NO: 752293 - DNA, 75 bp, Homo sapiens
gccgtgttcgacatcctggccgtgctgcagacgcatcttctctccagactgccgatcccagaaagccaggtgatc

SEQ ID NO: 752294 - DNA, 98 bp, Homo sapiens
aggactagtcatggcagaagacctccagttttgatgatgatggttcagaatttcatgaacatatatttctggagaaacacctggagagctttccaaaa

SEQ ID NO: 752295 - DNA, 75 bp, Homo sapiens
gtttgactacataataaggatgatgaattgtactctacaggtgggatgtgtgtgggctgaaattccgagctgcgg

SEQ ID NO: 752296 - DNA, 74 bp, Homo sapiens
tgacaaggccgtggactgcttcacagctgccctcagcgttcgtcccaatgtggacccaagtggagagattgtgg

SEQ ID NO: 752297 - DNA, 51 bp, Homo sapiens
cccccgacggagacaaggacggagccccctggtgaaggccatcttccatgc

SEQ ID NO: 752298 - DNA, 73 bp, Homo sapiens
gcgctcgccatggccgacgaaaagcccaaggaagggaaaaggccgaggcatcagcgtgtgaagaccgcaaaga

SEQ ID NO: 752299 - DNA, 96 bp, Homo sapiens
agggaatccggaaggctgagagtgcggaggacttcccgatccttttcagacaaataagaccacttttttatctgagcttctgtgacctgctcctgg

SEQ ID NO: 752300 - DNA, 98 bp, Homo sapiens
tggaaacagcgcctcgggatgcccagctgatcaaggagctggggctgcggctgctctatgctgttggagaaggaggagcagatacacagtgtggacat

SEQ ID NO: 752301 - DNA, 98 bp, Homo sapiens
ggggctgcggcctagaggtccgggcttggagttcgcctcagacgcggtggagccgccggagtctgagaagtgtgtcccggcatggatatccggaacaa

SEQ ID NO: 752302 - DNA, 50 bp, Homo sapiens
cagggatgataattgggcctccaagaatgttccatttaagcagacctctt

SEQ ID NO: 752303 - DNA, 100 bp, Homo sapiens
aaagaatttacttttaatcatctttattatctcattgaagcttggaattacatagctggaaaggatcttacaggaccacctataacacaatcaagcttga

SEQ ID NO: 752304 - DNA, 100 bp, Homo sapiens
caaagccctgggtcgcttggaagaagccaagtcggtcctcggtaacaccagcggcctgtggtccaccactccattcagcagctccatttggtccagcaac

SEQ ID NO: 752305 - DNA, 75 bp, Homo sapiens
aaaatagactaatggattaacgtccctgtcgtgtgacattttctggtggaggagttactgatggccatggagaag

SEQ ID NO: 752306 - DNA, 75 bp, Homo sapiens
atcgctgccgtctttcacacactgatagtattggatgaacgaatatacctcatccattggaattggagtttttca

SEQ ID NO: 752307 - DNA, 100 bp, Homo sapiens
tgaaagacgcctttcagaacgcctatttggagctggggggcctcggagaacgagtcctagaaagggctattgcaagacacgaagtccgagaaattgagca

SEQ ID NO: 752308 - DNA, 100 bp, Homo sapiens
gctgcaccaggtcctctgcagactggccggacagcctggccttttccagctcagggcaacatgcaggttctggtgacttacggtggcgatcccatcccta

SEQ ID NO: 752309 - DNA, 75 bp, Homo sapiens
agctggcattggagcaagccaagaaagaatccgaagatcagaaacgtctgactgacagtactccacaagcttgcc

SEQ ID NO: 752310 - DNA, 75 bp, Homo sapiens
gcatccttcttacgtcgggtggttttactggagtattggaactcagatgttttgagagattacagaagaggaggc

SEQ ID NO: 752311 - DNA, 74 bp, Homo sapiens
gcgcttgatgtgcgcggagagcaatcgccgggacagctgcaagctgagatctgtatctgtggacctgaatgttg

SEQ ID NO: 752312 - DNA, 98 bp, Homo sapiens
ctgaaatcaagtccggatgaaggcctacggaccatcggtgtcatcaccaagcttgacctgatggacgagggcaccgacgccagggacgtcttggagaa

SEQ ID NO: 752313 - DNA, 88 bp, Homo sapiens
tccgtgtcccgagaccgcaccacccgcctctgggccccagacagataaacaggggtcacatgacgacagaagccaagagggctgcaaa

SEQ ID NO: 752314 - DNA, 74 bp, Homo sapiens
aacaagtgaaattgaggtcacaccttcagtccttcgagcaagaattgcattttgtgaaaaaagaacaagaattt

SEQ ID NO: 752315 - DNA, 78 bp, Homo sapiens
tggaattacatagctggaaaggatcttacaggagagaagatgactgaggaggaggtggagaccgttctggcaggacac

SEQ ID NO: 752316 - DNA, 99 bp, Homo sapiens
ctcgccagcagccgtccggagccagccaacgagcgcccattgcagatgcaaaggctcctgagaagcgggcctcaccatccaagccagcttctgccccag

SEQ ID NO: 752317 - DNA, 75 bp, Homo sapiens
tatccttcgattaaccacatctccagtgctggagaatctggtaaaagcaccattgtgaagcagatgaggatcctg

SEQ ID NO: 752318 - DNA, 75 bp, Homo sapiens
cgctgccgcccagcacgtccaggctttgatgcggcctggaagaattgatagaatcatctatgtgcctttaccgga

SEQ ID NO: 752319 - DNA, 100 bp, Homo sapiens
caagatcgaggctgtcctctggtgagaaggtggtgaggcttcccgtcatattccaggcaccaccttccatggtcaataatgaacaacgccagcatgcaga

SEQ ID NO: 752320 - DNA, 98 bp, Homo sapiens
cagtattggccgcagagaataaagacttaattcagtgcacaaatgagatgaatgtgaacatcccacagttggcagacagtttatttgaaagaactact

SEQ ID NO: 752321 - DNA, 80 bp, Homo sapiens
gcacagcctgcccaaggacaccccctcgggcatctctaaagtgccttcaataatctggagaatcttgtctttggcaaagg

SEQ ID NO: 752322 - DNA, 82 bp, Homo sapiens
ctcagttggaagcagccgatccagcctgcggagcctgtggggcaggatgctgaaatttctggaaaagacaatggaaatcagg

SEQ ID NO: 752323 - DNA, 50 bp, Homo sapiens
cctcggcagtcctgtttccctgtaagatgtcatttgtcagagtgaaccgc

SEQ ID NO: 752324 - DNA, 75 bp, Homo sapiens
gtgacctgcaactggagaggatcaacgtgtactacaacgaggccacaggaatcctgacctctgtgaagagatcct

SEQ ID NO: 752325 - DNA, 85 bp, Homo sapiens
ctaccaatcgtgaaaactatattcacaggcagaaagtgaaactcttcactgctcacaacaatatgaccaactatgctaccgtatg

SEQ ID NO: 752326 - DNA, 98 bp, Homo sapiens
gtttctgtcctaaatagctgacattgcatcttcaagactgtatcctgaggtgcagaggcaattcccggaggactacagtgaccaggttcggaatgcgt

SEQ ID NO: 752327 - DNA, 101 bp, Homo sapiens
aactgctggcaggctgccttccctgacccccagttacgcctggaatatgaaggcttccccgtcccggactaccgaccagactcccggaaatcatgttggta

SEQ ID NO: 752328 - DNA, 88 bp, Homo sapiens
taaaggtgctaagaaagagaatgtaagacaggaaaataattaaatattcttaccgagcaccttctagccaccatggcaacctcatctg

SEQ ID NO: 752329 - DNA, 75 bp, Homo sapiens
tgggcccaaccagcgcccagccccctgctatgacccttgcgaggaaatgtttcaacgtgcgcaagcgttgcggcg

SEQ ID NO: 752330 - DNA, 123 bp, Homo sapiens
gtcctccggcagctggagatgtccgagcccaaggcaattgatcccaagttgtcgacgaccgacagggtggtgaaaggtgcctaatggataagaacttcgttaggattgggaaatggtttgtcc

SEQ ID NO: 752331 - DNA, 80 bp, Homo sapiens
ctggagcctcagttggaagcagccgatccagcctgcggagcctgtggggcaggaagaggaggctgcaaaatgggcccggg

SEQ ID NO: 752332 - DNA, 83 bp, Homo sapiens
caagaacgtgagcaagcccaggcacagccgacgccgcggggttttaaaatcaaagatgggaaaatcggagaaaattgcccttc

SEQ ID NO: 752333 - DNA, 75 bp, Homo sapiens
gtccaaccagggctacatgccttatttaaacaggttcattttggaaaaggagtctactgctaagatttcagcatg

SEQ ID NO: 752334 - DNA, 74 bp, Homo sapiens
gagccgcgaggagcgcactccgtggccccgatggagcggtacaaaggcaggtgacaaacattaccaccccagct

SEQ ID NO: 752335 - DNA, 76 bp, Homo sapiens
tttaagagcagcttattccaagctttgctagggcagagcggcttgggtaaatccaccttaatcaacaccctcttca

SEQ ID NO: 752336 - DNA, 75 bp, Homo sapiens
gagactgcagcagacccaggcccaggtggatgagggtttttaatgaccacaacaagcaagcatgcagcttactgc

SEQ ID NO: 752337 - DNA, 101 bp, Homo sapiens
caaccaaccctgatttcctgcttctccttttcatgagtgttcctgtggtctctgcacctcctttctgggcagtctgcagcaaaacgacaaggaaaatttaa

SEQ ID NO: 752338 - DNA, 74 bp, Homo sapiens
aaattatttatccaacagctcctcccagacatatctgaagagatggattaagaatgctttggattaaggattgt

SEQ ID NO: 752339 - DNA, 101 bp, Homo sapiens
gggtcgggcgtctccgccggctactgccgcttcagttctcccggtgtggccacgagtcgggtaggtgatgctctgatgctgctgcctcttatgaattgacg

SEQ ID NO: 752340 - DNA, 75 bp, Homo sapiens
tggaaaagctgttgacatctcataaacggctggttatgaaagacagtgcaaattatatccagatcgagagacaga

SEQ ID NO: 752341 - DNA, 80 bp, Homo sapiens
gattccccggaatcgtgtgctgggctggtcccccttgcaggttcaggagaagtggcacctggtggaggacctgtcgcgac

SEQ ID NO: 752342 - DNA, 96 bp, Homo sapiens
tggccgatgaggaagtactgagcctgttggaggaactggcccggaaacaggaggacgaccatgaatggcacctacaacacctgtggctccagcgac

SEQ ID NO: 752343 - DNA, 101 bp, Homo sapiens
attttgatgaacaatattgaacgctatcttaagccatgaactggacattgatgaaaacccagcttcagactttgatgacagtggttcccttctaggattca

SEQ ID NO: 752344 - DNA, 71 bp, Homo sapiens
ctgctaaaaacaagactggggctgctcccatcattgatgtggtgcgatcgatgcagagcaaagcggcagtc

SEQ ID NO: 752345 - DNA, 81 bp, Homo sapiens
cagattcgcagtggtcgcttcttctccttgggacacggccaacacggtgaaggaaaagttcgggaggaagctttatgaatc

SEQ ID NO: 752346 - DNA, 96 bp, Homo sapiens
gtctactcgcaggcgtcatgttgggaatcgggtgtctggaaatgaagtatggaaatgaaatcatgaataaagacccagttttcagaatctctccac

SEQ ID NO: 752347 - DNA, 78 bp, Homo sapiens
tcgcctttgccgatccgccgcccgtccacacccgccgccagccatcccaggcctcaggacctgagttctccgacgccc

SEQ ID NO: 752348 - DNA, 83 bp, Homo sapiens
cgagaagagcagagcggagggagccccagacacgatttgggcaaagagaaagcaaagcagctgcgctcagacctgagctcctt

SEQ ID NO: 752349 - DNA, 100 bp, Homo sapiens
gggaccttctccctgcctggacccctactattgcaacaagatcatacatctgtcggtggcctgggagacagtttttatgaatacttactgaaagcatggt

SEQ ID NO: 752350 - DNA, 101 bp, Homo sapiens
gaatttgtggctggctggatctctgagggccccattgtgctgtcccgaccccaggatggggactctccactgtccgactcacccccattctacaagcctag

SEQ ID NO: 752351 - DNA, 100 bp, Homo sapiens
ttggattacataaaccagtcacccaagtgcattgcctttggaaacgagatgccccctaaaaagggaggtgatggaattaaaccacccccaatcattggaa

SEQ ID NO: 752352 - DNA, 75 bp, Homo sapiens
gcacttaaataagggcacacctagtcaggtcaataactgggagatggacaaactagagatggaagatgcagtcac

SEQ ID NO: 752353 - DNA, 104 bp, Homo sapiens
atggatcaggcaaatgataaaaaagtggctgctattgaagccctaaatgatgggtgttgaaagcagcaggggcctagaagacattaaaccgataccacagaaat

SEQ ID NO: 752354 - DNA, 75 bp, Homo sapiens
aggccctgcaggacctgctttcggagtacatgggcaatggctcacacagtcgacaaaagaaaacgtttttcttgg

SEQ ID NO: 752355 - DNA, 112 bp, Homo sapiens
ggcgaaccgaggggcctgtgcggccgcccggcccggccgcggatcaggggcctgcgaggtcaaccgccagaaccgagccggctactcggccctcatgctggctgcactcacc

SEQ ID NO: 752356 - DNA, 75 bp, Homo sapiens
gattcagaaggagcaggattaccaaagggggtcagctgctgtgctacaacgtcggtcagaaaatgaagagtttgt

SEQ ID NO: 752357 - DNA, 90 bp, Homo sapiens
acttcaaggtcaagatggtggacgagcttaagagaggtttacatccccaccagacaccagctcctctgcccaatccaggcctctatcccc

SEQ ID NO: 752358 - DNA, 99 bp, Homo sapiens
gagccgagaggagctgagcgagcgcggaaggtcttatatccagatggccaggctcagatgattcaccccaagcctgcagacttccggaatcctggccca

SEQ ID NO: 752359 - DNA, 82 bp, Homo sapiens
gtgcccaccgtcttcgaccactacgcagattgtcactgctgttccaagggcacacgcagagggatttggaattcctggagag

SEQ ID NO: 752360 - DNA, 98 bp, Homo sapiens
gttgtagaaatgaaatgggatcaagtggaggtgctgaacagcattttttttgagcttgaagcggatgagagagagcccacagagtctacccaacagct

SEQ ID NO: 752361 - DNA, 90 bp, Homo sapiens
ttgcgaaggatccccaacggggaggccaacgtgaagaagctgaccccgcactacatctacccaccagccatcgtgcagcccagcgtggtg

SEQ ID NO: 752362 - DNA, 78 bp, Homo sapiens
aggacccgaggccaggagccaggggcccagaaggtcaacaacggttccagcctcagggatgagtgcatcacaaaccta

SEQ ID NO: 752363 - DNA, 82 bp, Homo sapiens
ccgtccgccgccaccacccactccggacacagatgtgaagttcatttccaatccgccctccatggtggcagcggggagcgtg

SEQ ID NO: 752364 - DNA, 82 bp, Homo sapiens
aggtctctggagacatcttcagcaggggctggtggcagcagcgtcgtcataggtaatattggtgccctgatgggctacgcca

SEQ ID NO: 752365 - DNA, 100 bp, Homo sapiens
acagcaatgaggtgaacccaggggccgaagcccacccagggagttgatgggacgatgatgacattaatgatgttgcatcgatggctggagtaaacttgtc

SEQ ID NO: 752366 - DNA, 75 bp, Homo sapiens
ttccgtccgagaaattctcgcagagcttacagccatccagtccaatggatcagatgggcaagatgagacctcagc

SEQ ID NO: 752367 - DNA, 96 bp, Homo sapiens
caagatctcaagaaattcatggatgcctctgctctcactggcattcctcttcccctcatcaagcctatgtgcttcccaagctgtatgtgaagctac

SEQ ID NO: 752368 - DNA, 96 bp, Homo sapiens
tgtgtacctgagtaagagcttggaaaagttgagccctcttcgagagaaattggaagaacagtttaaggttcaaaccttgtactactcagctgatca

SEQ ID NO: 752369 - DNA, 97 bp, Homo sapiens
caaatggcacttcattggccacctacagaaacaaaatgtcaacaaattgatgggttccaagaccaaagattaaattaagagaaggtaaagctggaca

SEQ ID NO: 752370 - DNA, 87 bp, Homo sapiens
tggatcagacttcgcggcaacctccgggactctgacggtgaccaacttattagaaaaggtaccttccactggaagaatctcaaacag

SEQ ID NO: 752371 - DNA, 100 bp, Homo sapiens
ggtcgagctgattctgagcgatgaggaagagctgctccctgcacaggatatcaaagctctgtttgtgtctgaggaggagaaaaagctgactcggaaggag

SEQ ID NO: 752372 - DNA, 100 bp, Homo sapiens
ggtgatggtgggtgaccttgaggatatcaacgagatgatcatcaagcagaaggaaaaagaccacatcagtgtcagatttgtaagaaagcgtttaaacaca

SEQ ID NO: 752373 - DNA, 97 bp, Homo sapiens
ggagaaagcaagtaagctgcaggtatcctgcaccccatgtaacataccaattggaaccccagtgagcggctatgctctctaccagcgacacattaaa

SEQ ID NO: 752374 - DNA, 74 bp, Homo sapiens
aaagatggggttgtcctctttaagaagatgtggcaaaatctggcaaaggcagagaccaaacttcatacctcaaa

SEQ ID NO: 752375 - DNA, 100 bp, Homo sapiens
tggcagcctagaatcttatcaaaatctaaaccctcacaagagctgttatttatctgaaaggttgagcaatgtttaaagcgtttgaaaaacatgaatttgg

SEQ ID NO: 752376 - DNA, 82 bp, Homo sapiens
caacccccccggacaggacccccttgagcttgtccctcagctgccaccatgagcgttttcagatgcttcaagtgttgtgaac

SEQ ID NO: 752377 - DNA, 98 bp, Homo sapiens
agggtttcccgttaaccccaatactttaaaagagttatagaaagttgatatctctgaaaataactgatactgatataagaccgaagatcagtttaaaa

SEQ ID NO: 752378 - DNA, 80 bp, Homo sapiens
ggagcaacagtccaagctcaaagagaaaatgcacaagctcttggaggtgtacgagcagctgggtggggaagaagacattg

SEQ ID NO: 752379 - DNA, 100 bp, Homo sapiens
gcccccaccgccgcccgccgggaggaccgagcctaagagggcagccgcctgaaggaacgcgacggcggcgcccgcagaaaaggcgacggcggattgacag

SEQ ID NO: 752380 - DNA, 100 bp, Homo sapiens
tcaggatgagagtgcgatggggaatccaacagaattctgctctccttgaggaggcggcagatgcttctgttagaaaccctgaaggtgaaacagaccattc

SEQ ID NO: 752381 - DNA, 75 bp, Homo sapiens
cagccccgggcacggcggaggcagcggagccctgggccatcggccagctacagatgcatgcatattgtgaaaacc

SEQ ID NO: 752382 - DNA, 74 bp, Homo sapiens
ggctctcgtcagcctcccgccggccgtctccttaacaccgaacacctctagagcatgtttggaaaggattcaag

SEQ ID NO: 752383 - DNA, 71 bp, Homo sapiens
ccaccggaatggagaaggaagaggagtcggtgaaaggtgtagcagtcactcggcctacacccacagcatcg

SEQ ID NO: 752384 - DNA, 75 bp, Homo sapiens
gggcacacaagaatggtcactgttatgaagacagtatggagtttccagaccatagtagacatttgctacagtgtc

SEQ ID NO: 752385 - DNA, 49 bp, Homo sapiens
gaagagggaagacacgcggaaacagccaggcccagacatgtccgtcctt

SEQ ID NO: 752386 - DNA, 100 bp, Homo sapiens
tcctagaaggtgcacagaagacattgctgttagccaatgaaaaagtagaagagttcaccacatttgtgaaggcaactactctaagagtgaggaaattaga

SEQ ID NO: 752387 - DNA, 98 bp, Homo sapiens
gaacaagaaagctcagctggtggtgattgcacacgacgtggatcccatcgagcttctaccctcctcatctttggaagttgtcccagaagcagcccaga

SEQ ID NO: 752388 - DNA, 78 bp, Homo sapiens
tcaggttcagacccgaccgttatccagtcggttcgtggagaggagaggggaggatactgaggcacacagaggggagtc

SEQ ID NO: 752389 - DNA, 98 bp, Homo sapiens
tttgggcagcttttccggcctgacaacttcatctttggtctcggcgcggaagatggccggcggcgtggacggccccatcgggatcccgttccccgacc

SEQ ID NO: 752390 - DNA, 75 bp, Homo sapiens
agcaggacatcttgaccatcttcaagcgcctccgctcggtgcccactaacaagccaaaactggacaagccaaggc

SEQ ID NO: 752391 - DNA, 75 bp, Homo sapiens
atgacagttgcaatgctcatgcaggtcttcgccttgatcgtgttctcctgcatctatggtgagggctacagcaat

SEQ ID NO: 752392 - DNA, 83 bp, Homo sapiens
ctcagctggtgaagacatgacgaccctggactccaacaacaacacagacaatgcagatcttcgtgaagactctgactggtaag

SEQ ID NO: 752393 - DNA, 82 bp, Homo sapiens
aggattactgtgttttgtgagagctcgctaggcgccctaagcaacagagcgtggtgatggtggatgaggcacacgaaaggac

SEQ ID NO: 752394 - DNA, 75 bp, Homo sapiens
attccacgaacatgagcccactgctgcacttctatggccgtaaagccagcctttcgaccccaccttcctcatcgg

SEQ ID NO: 752395 - DNA, 112 bp, Homo sapiens
ctgtgttggagctcctctttgctaaacctgtgcctgaacattgtgcctcgaccctctttcccagctgcccgctcctcagcacccgaagattcgcctgtacaacgcagagcag

SEQ ID NO: 752396 - DNA, 131 bp, Homo sapiens
ttgagctaaaattgaaagataagaacaccctttttacaaggattttaaatggacagcttcttggacacttaatgattgttggcaagaaatgtgctgctgatctgggcctgaataagggttatcgaatggtg

SEQ ID NO: 752397 - DNA, 100 bp, Homo sapiens
tctcaagatgctgcttactggtgggaaatcaagtcgtaaaaacaggtcaagtgattatctcctgctgcatactacgcccagaggatgatccagtatctct

SEQ ID NO: 752398 - DNA, 98 bp, Homo sapiens
cgccaccactgcgtcgggctggtgcagccccgggccaggccgcggccggggcaggagcgcagtggtggtgaccgcggtggcttcaaaaattttggtgg

SEQ ID NO: 752399 - DNA, 100 bp, Homo sapiens
gcggcggcggagtgtaggaagaggcactgctgagggggcgcgaggggaacggaggccagagctgcgtgctacaaggtgagctgcctggaaatccctgggc

SEQ ID NO: 752400 - DNA, 83 bp, Homo sapiens
ctcgctggccatgcactggcaactgcagcccgaggacaagcggctacaagcccacagggtatggctccagcagtcggagggcg

SEQ ID NO: 752401 - DNA, 75 bp, Homo sapiens
ctggacaagcagcagcggcagcacctaagggatcatgacaagatgtttaagatgagtgaaaagatattactcctg

SEQ ID NO: 752402 - DNA, 100 bp, Homo sapiens
atttcggctctcatgttcctccatgataaaggaatcatctatagatacaaggtctcgctgttctacctaggctgttctagaactcctaatgtcaagctat

SEQ ID NO: 752403 - DNA, 121 bp, Homo sapiens
gcacacgcagagacaggccgaggagacgcgggccttcgagcagctcatgaccgacctcaccctgtcgcgggaactttatattgctgttggaatatctggagccatccaacatttagctggg

SEQ ID NO: 752404 - DNA, 75 bp, Homo sapiens
ccgggcatggtggtctggggcaacgcggaagtgccggtggtggtgtgcacattgagccccggtatagacagttcc

SEQ ID NO: 752405 - DNA, 75 bp, Homo sapiens
ccagctttgcctgtgagaggaacaagcgtccctgatccagaaggtgtatggcttggaaagaattatgagtgagga

SEQ ID NO: 752406 - DNA, 82 bp, Homo sapiens
ggcctcgtgcccttcgccttcgtgcgcttcgaggacccccggagctggtgactgccctcatgtgtgatttgcggcggccagc

SEQ ID NO: 752407 - DNA, 75 bp, Homo sapiens
cttttgtctgcccctattgtaagtgcagatggaacacaacagatgggcagccagatatatcaaggccttttggat

SEQ ID NO: 752408 - DNA, 100 bp, Homo sapiens
gagctaatccacaatctccgcagtactaggttttgacaagcttgcatcatgcgtgagtataagctagtcgttcttggctcaggaggcgttggaaagtctg

SEQ ID NO: 752409 - DNA, 50 bp, Homo sapiens
cccagatgaccaaagtgacacagaggctgaggggatctggcggtggagcg

SEQ ID NO: 752410 - DNA, 75 bp, Homo sapiens
ctggaccaccgggcgctggtctgctcccagccgctgatcttgcatctttaatggataaaacatttgagagaaagt

SEQ ID NO: 752411 - DNA, 74 bp, Homo sapiens
acatagacatttacgcggatgtcggcgaagagttcaaccagagttgcatgctgagaatttgaaaaatgaagatg

SEQ ID NO: 752412 - DNA, 100 bp, Homo sapiens
ctttgacttggtgttgaaagtgaaatgtcatgcctctgaaaatgaagggccaatcgggatggtcactttgctcgtggccaaagcaatgggagcagctcaa

SEQ ID NO: 752413 - DNA, 98 bp, Homo sapiens
gtccgcccaggcgcagatgcgggccctgctggaccagctcatgggcacggctcgggacggaatgggatgtttctggggagctgaaaggaaattctggg

SEQ ID NO: 752414 - DNA, 98 bp, Homo sapiens
ctgccgtcttcctatccttacccgacctcagatgctcccttctgctcctggtacgcatagctgctaaattcatcactcatgcacccccaggggaattt

SEQ ID NO: 752415 - DNA, 74 bp, Homo sapiens
acctctctaagcctatggaaaagcttctggaccccaccaacaactgaacgctttggtcaggctgctacaatgga

SEQ ID NO: 752416 - DNA, 103 bp, Homo sapiens
agcgagccagcaagcggaagctgcccttcaccgcgggcgccaatggggagcagaaggactcggacacaggtgagccaccagctgggcagcatcatggacctct

SEQ ID NO: 752417 - DNA, 100 bp, Homo sapiens
tggtggagtcggacctctatgccatgaacttcaatcccatcatttccagaaaggacatcacaggtctctgcatggattcccccagccctatggaccccca

SEQ ID NO: 752418 - DNA, 75 bp, Homo sapiens
aagaaccattgaaaaatttgagaaggaggctgctgaggctgccacgcagagtgagctgcactacgcaaatctgga

SEQ ID NO: 752419 - DNA, 71 bp, Homo sapiens
catccccacggtgctggacaggacggttgctatcggctggtggactatttggaagggatccggaagaattt

SEQ ID NO: 752420 - DNA, 75 bp, Homo sapiens
ctgtgcctgaactcaaagatgcccttaaaagtgagaaagatcagtctaaagaaaaggagaagaaagtgaaaaaaa

SEQ ID NO: 752421 - DNA, 98 bp, Homo sapiens
tgtagggttttgtggaattgggagcctaattgatttcattcttatttcaatgcagatgatgaggagtctgatgaggaagctgtgaagaaaaccaacaa

SEQ ID NO: 752422 - DNA, 75 bp, Homo sapiens
cgacgaacatttctgggtgacactcaacaggattcccgggagtcgtcgcatggtggatgtcatggacgtgaacac

SEQ ID NO: 752423 - DNA, 90 bp, Homo sapiens
cgctggccctctgtctgcctgtgtccctgaccatggctccctgcagtaccctttaacgaccattcctcaagaattttgtatccaaggccc

SEQ ID NO: 752424 - DNA, 100 bp, Homo sapiens
attctctcccaggccacaagacatttcctgctcggaaccttgtttactaattgaaacctcgacctgtctcccagttggttgcacagcaggttactcagca

SEQ ID NO: 752425 - DNA, 100 bp, Homo sapiens
atgccttaacctttggagtacgacagtatttcctggacttagctttgtcatgcaaagctgtcatttgctgtcgatatttccgccaagagctggagcgttt

SEQ ID NO: 752426 - DNA, 83 bp, Homo sapiens
agctgtagagaggaccccggtacatctgaaagccgggaaatggccagcgatctgtacatgagacccaggaattatttccaaag

SEQ ID NO: 752427 - DNA, 100 bp, Homo sapiens
gaaattgcagaataatgtctcaggccaactgtgatttgagacggcagattgatgaacagcaaaagatgctagagaaatacaaggaacgattaaatagatg

SEQ ID NO: 752428 - DNA, 82 bp, Homo sapiens
ccggttcttggtgggatctgagcagggagcatttcctgaagacgtagtcatgcagcacgtcagcagctcccagagcagccag

SEQ ID NO: 752429 - DNA, 83 bp, Homo sapiens
atgccgtccgccttctctgtcagctctttccccgtcagcatcccagccgtgctcacgccttatgccagcctggaccatcttgg

SEQ ID NO: 752430 - DNA, 87 bp, Homo sapiens
ctggattcgtggcgccacaagctcattcactgtgtagggggatatgagactttctactcggaatatcctgagtgttgcgtggatgta

SEQ ID NO: 752431 - DNA, 133 bp, Homo sapiens
gcaggccaggcggatgccggggagtatagctgcgaggctgggggccagcggctctccttccatctggatgtcaaaggtctgagcgggaaagttccgaagaataggagtggctgagttagctacggagttcatt

SEQ ID NO: 752432 - DNA, 76 bp, Homo sapiens
gtggagaaactgcaggacttggatactgattatggctcaggctaccccaatggacagtcattttgtttactcattc

SEQ ID NO: 752433 - DNA, 100 bp, Homo sapiens
agactgagccttgagcagaggaacctatacaaagaagtgatgctggaaaatctcaggaatctggtctcattgggtgtgtgcagtggcctcagggatccgg

SEQ ID NO: 752434 - DNA, 82 bp, Homo sapiens
ccatgcgcctggctaacctcctgatgctcctgtcccacgtcaggcatgcgagcgtccagaggaccagaggttaatttattct

SEQ ID NO: 752435 - DNA, 75 bp, Homo sapiens
gctgatactacagacagtacaacagagaaagcttcttgctatctacctccaccatgatgaaagtgtgttaaccaa

SEQ ID NO: 752436 - DNA, 96 bp, Homo sapiens
aaagcagttcaacgagaatgaagccatccaatggatgcaggaaaactgataaaagcttcgatgatgaagaatcagtggatggaaataggccatcat

SEQ ID NO: 752437 - DNA, 100 bp, Homo sapiens
ggatcccagctttgtggctgccgtcatcaccatcaccttcaatccgctctactggaatgtggtgtcacagatttatcagagcattgagttttctcgtttg

SEQ ID NO: 752438 - DNA, 76 bp, Homo sapiens
gctactccctggtggcctgcgccgtctccgtccactcggcagcgccgtgaagaacctggtggacagcagcgtctac

SEQ ID NO: 752439 - DNA, 82 bp, Homo sapiens
tggagattgacgcagagtgggcggcggtggtggaactgtggctgcaccatctgtcttcatcttcccgccatctgatgagcag

SEQ ID NO: 752440 - DNA, 100 bp, Homo sapiens
cgactctgggcggcgaggaaggcgtctcccggttctgggaggtgatcagtgatgaacatggcatcgaccccaccggcacctaccacggggacagcgacct

SEQ ID NO: 752441 - DNA, 100 bp, Homo sapiens
ttccatgctctccatcacctatcacagcagcatccgctctctggagcagaagatgactcaagaccggcctctgcttgccgtgcaggaggcgctgaagaag

SEQ ID NO: 752442 - DNA, 95 bp, Homo sapiens
tacaaccttcgatctcctgacgaatcttggcatatacagaagggctgcatggaaaatggctgttcacagagatacgatcaatcttttctcgtcgt

SEQ ID NO: 752443 - DNA, 74 bp, Homo sapiens
attggaagctccaccacccaccccaggacagctgagatatggtggtcttcaagctgacagagaagctgacggaa

SEQ ID NO: 752444 - DNA, 100 bp, Homo sapiens
ttgaagtatatgttgaagtggcctatcccaggacaggtggcactctttcagcccctaaagacaatgaagagcgtgtgttcagggaacgcatgcggccgag

SEQ ID NO: 752445 - DNA, 49 bp, Homo sapiens
ggccgagcaggctgagcgatacgacgatgcgtctgttactagagtggag

SEQ ID NO: 752446 - DNA, 75 bp, Homo sapiens
ctgcctagaagctgtgccgcccccgccaggtgaaaggtgtagcagtcactcggcctacacccacagcatcgacct

SEQ ID NO: 752447 - DNA, 74 bp, Homo sapiens
agaaatataaacttctgccagaattgctgcagcaaaaccaactccaccaaaaagccaggtaacattaacaaaag

SEQ ID NO: 752448 - DNA, 74 bp, Homo sapiens
ctggtttctctggaaacctctgtcaggccttcaataatctggagaatcttgtctttggcaaaggattccaagca

SEQ ID NO: 752449 - DNA, 75 bp, Homo sapiens
atgttacgtggccggaatcattcccttggctgttaatttctcagagagcatgaataatctttcatttagtgagct

SEQ ID NO: 752450 - DNA, 75 bp, Homo sapiens
gccgcggcccggactccgcggtgggcgagcgccctgtgagcaatggtacaacagctccatgaacgtgatctgcac

SEQ ID NO: 752451 - DNA, 98 bp, Homo sapiens
ggcgggagaaggatgctgccgagatgctgggcgccaagatcaagctagaaagacttgagttagacaagcagcagcacacgcctccctacctcatggcg

SEQ ID NO: 752452 - DNA, 82 bp, Homo sapiens
gatccgccgcccgtccacacccgccgccaggtctcctccgggctggggctgagcaagccctcggagtgaccgtgggtgacag

SEQ ID NO: 752453 - DNA, 100 bp, Homo sapiens
tggaagagcagctgtcactcatcagtggttgtcccaatatccaagaagcagtagagggtgccatgcacattcaggggtcggcgctttgcctgatgaccct

SEQ ID NO: 752454 - DNA, 82 bp, Homo sapiens
tgatcagagaagcagatattgatggagacggacaagtcaactatgaagaccatgggggctcagctaagcggcggccgcggcg

SEQ ID NO: 752455 - DNA, 50 bp, Homo sapiens
cgtcccctggactctctcaagatgttgcttcagagtgtgaagtcaaatgc

SEQ ID NO: 752456 - DNA, 104 bp, Homo sapiens
caggcccgggagcgcgatgtggagcgcttctttaagggctacgggaagatcctggaggtggatctgaagaacggacaggccgacggtcgcaaggtcctacggtc

SEQ ID NO: 752457 - DNA, 85 bp, Homo sapiens
aacaatgccaagaacagatagttgcccagcaggagcagttccacaaccaaattcaatgttggccataggaggcaaaggagcaagt

SEQ ID NO: 752458 - DNA, 83 bp, Homo sapiens
aaggattccaagtaactcttatttgatgaaatacctgtcacaaagagaacattaaaaataaaacaagagtcttctgaagaagc

SEQ ID NO: 752459 - DNA, 75 bp, Homo sapiens
tgtgccgccagtgtttccgtcagtacgcgaaggatatcggtttcattaagccaccaattaccctagttatgggcc

SEQ ID NO: 752460 - DNA, 75 bp, Homo sapiens
ggcaggagtagctgatcaaaccaaggatgggttgactttggcagaatatcatgaacaggaagaaattttcaaact

SEQ ID NO: 752461 - DNA, 82 bp, Homo sapiens
tccttcggcagtccacccaccgccgccgcctcccagcctttgacgacccctatgccctggtggtgctggctgaggaggagct

SEQ ID NO: 752462 - DNA, 50 bp, Homo sapiens
agagattgctcaggaagcaatggaggcatagaatgtcaagctaaccaggc

SEQ ID NO: 752463 - DNA, 83 bp, Homo sapiens
ccaggcccgcgaccgtccgccagtcgtcccgaggtgaaaggtgtagcagtcactcggcctacacccacagcatcgaccttgtg

SEQ ID NO: 752464 - DNA, 98 bp, Homo sapiens
cctcgggaccggctgtatgattaggccacaatcttcaatgagtaaacatattcctcgtccgtctccaagagagtatgaagagagtgcgtctgtagggc

SEQ ID NO: 752465 - DNA, 74 bp, Homo sapiens
ggaaaatcgcttggttaaaacctgacacttttaacaggatttctatgatgactggattttgaattttgtggaac

SEQ ID NO: 752466 - DNA, 74 bp, Homo sapiens
ctccgggtccacaagaccttcaagtttgtcgtcgtcggggtcctgctgcagggaggcagcgtccatggagcaaa

SEQ ID NO: 752467 - DNA, 100 bp, Homo sapiens
cgtgagggtccggcccatgaatcgcagatccaggatgagaagactgataaaagaagaagctagctgaacagctgtaaaatgcccaaatctgggttcacaa

SEQ ID NO: 752468 - DNA, 50 bp, Homo sapiens
cttctactcatctgccggcagggccagagatcctgaaggagctagacgag

SEQ ID NO: 752469 - DNA, 83 bp, Homo sapiens
accgtcctttcctttctccctcgcgttagcaagagtgagccatggagctacgtgtggggaacaagtaccgcctgggacggaag

SEQ ID NO: 752470 - DNA, 82 bp, Homo sapiens
tgagagaaacccactgaagacgtctgcgtgagaatagagaccaccgaggctgcctgctgtttcccggggagatcatgaaacg

SEQ ID NO: 752471 - DNA, 83 bp, Homo sapiens
tcaagacatttcttcggcattctgcaacaggtttccacttgagcggcacagtgacagaacctgcaatacaatcggagccagaa

SEQ ID NO: 752472 - DNA, 51 bp, Homo sapiens
ctccactccccagctgtgaaagggtttagcgacaccagtagacttgaagct

SEQ ID NO: 752473 - DNA, 75 bp, Homo sapiens
caggggggcggcagcgctggacacccagcctccagcacaagtgcatacaccttgatagcaccaaatataaaccgg

SEQ ID NO: 752474 - DNA, 80 bp, Homo sapiens
caggccctggagtgcatgcgcagtaaaggcatgacttcctggcaccacagggaaaatcgggtgcaagcccagaaactatt

SEQ ID NO: 752475 - DNA, 82 bp, Homo sapiens
aactgaacttgaaacacttcaaagtttggtgcacctcgatttggaggaagtagggcagggcccttatctggaaagaagtttg

SEQ ID NO: 752476 - DNA, 97 bp, Homo sapiens
gaagaacttaagaaacacaacaaaaaagatgattgttggatatgcataagaggaaccagggaaaatgtgtagagggcatggtggagatcttcgacat

SEQ ID NO: 752477 - DNA, 75 bp, Homo sapiens
ggagtatgtaggagacttgtggaactgctgatgctggctacagcaaacatcattcaagatgtccagcaaagggag

SEQ ID NO: 752478 - DNA, 82 bp, Homo sapiens
caacttccagtcctgaaggctctattcatgacgtccttctatggccgcttcaggcacttcttggatatcatcgaccctcgca

SEQ ID NO: 752479 - DNA, 75 bp, Homo sapiens
atggcatttcagtcactggtttgcagagtccagatggtggatgcttccaaaagcatcgaagctgtccatgaggac

SEQ ID NO: 752480 - DNA, 97 bp, Homo sapiens
acatgtccagcatgaatcccgaatagtgatggaaaaccccagcccggccgccgccctgggcaaggccctctgcgctctcctcctggccactctcggc

SEQ ID NO: 752481 - DNA, 115 bp, Homo sapiens
ggagtcggggacccaggagtttcctgtgtccagcgctgccggagccgcctgagccgagaccgacccgcccgcccgcggccccgcagcagctccaagaaggaaccaagagaccgag

SEQ ID NO: 752482 - DNA, 83 bp, Homo sapiens
cgagaacccgctggtttattgcgacgggcacggctgcagcgtcgcggtgcatcaagacaatgcagatcttcgtgaagactctg

SEQ ID NO: 752483 - DNA, 100 bp, Homo sapiens
aagccgtggaccccgacattggtgacttctgggggaacagaaagcatactgatggcctgcaaagcatatcgggatctggcctttgagaaggggatcaaaa

SEQ ID NO: 752484 - DNA, 50 bp, Homo sapiens
caaaacagttcattcatattcagcggcagagcttgggatatggctttgtg

SEQ ID NO: 752485 - DNA, 51 bp, Homo sapiens
gctgcggcatcgccggcctcgctatggtgaggaagatcttctcagtcctcc

SEQ ID NO: 752486 - DNA, 95 bp, Homo sapiens
tccaggatattatgaagttataaggttccccatgggtctgccatcatggatgttctcgcagaagcaaatggcacctttgccttaaaccttttgaa

SEQ ID NO: 752487 - DNA, 82 bp, Homo sapiens
cctggctccggaggccagcggccgggatagccccggcggagcccgcagcttccctgccggtgagaagccctaccactgcaac

SEQ ID NO: 752488 - DNA, 99 bp, Homo sapiens
gccggaatcattcccttggctgttaatttctcagagacattcacggcatggtgtaactcccacctccggaaggcggggacacagatcgagaacatcgaa

SEQ ID NO: 752489 - DNA, 100 bp, Homo sapiens
ccgggacctggaggggacgctggggccgaagcagcatgtgacaccgaccaggtgtggatgaggtcaccattgtcaacattttgaccaaccgcagcaatgc

SEQ ID NO: 752490 - DNA, 100 bp, Homo sapiens
gagctttgtgcaaaaggggagctggctacttctcgctctgcttcatcccactattattttggcacaacaggaaggatgagaacaagttgagcagtgccaa

SEQ ID NO: 752491 - DNA, 51 bp, Homo sapiens
tgaaaatggaactccaggtcaaacaaaactaatctggattcactccctctg

SEQ ID NO: 752492 - DNA, 75 bp, Homo sapiens
acaagcaagctgaatggaggccagatagtaccatgatagctgtatcaaactcttcatcttggcttatacctatac

SEQ ID NO: 752493 - DNA, 100 bp, Homo sapiens
caatggacctccagggctgtagtgccccccatctcactgtccaccacgttcaagcaaggggcgcctggccagcactcgtctccaaaaaaagttggtgatg

SEQ ID NO: 752494 - DNA, 136 bp, Homo sapiens
tatgggatgctggaggacatctgggggccacaaatgctccttctcctggagacgcaactcaagaccaagatcactccatggatgaaatgacagctgtggtgaaaattgaaaaaggagttggtggcaataatggggg

SEQ ID NO: 752495 - DNA, 87 bp, Homo sapiens
ctgactggggttctgagactccctgtcccggaccgcagatgtgttcagagcaacattgttttgttgacacaagcatttagaagaaag

SEQ ID NO: 752496 - DNA, 97 bp, Homo sapiens
ttgctgctttcaattactggcatccagaaattgtgtattcaggaggagctgcagcatcgacaggtctccgggcgctggctcactgggctccccggcc

SEQ ID NO: 752497 - DNA, 75 bp, Homo sapiens
ccctgaaggcctcgctggagatcgagtaccaaatacactgcctctaggactgggacagatagccactgagtacct

SEQ ID NO: 752498 - DNA, 76 bp, Homo sapiens
accacaagaaaatcaaaagaaacttttgcccttatcagtaacacctgagccttgggacaataatgcagtctgtgca

SEQ ID NO: 752499 - DNA, 100 bp, Homo sapiens
cgcgagtccagcgtcgccgcagccccccaatgcggccgcgagaagcagcgggggggcaggcgatcgaagacagaatgttgctgcgggatgtaaaagctct

SEQ ID NO: 752500 - DNA, 74 bp, Homo sapiens
aagagcacgtcggtttccttaagtttgggtacccagaccccacctacctgacccgggtgcaagaggagctgaga

SEQ ID NO: 752501 - DNA, 100 bp, Homo sapiens
cttgagaagagagaaccactaaagggcagagcaaagactccagtaacactcaagcaaagaagagttgagcacaatcaggatgagaacaagttgagcagtg

SEQ ID NO: 752502 - DNA, 101 bp, Homo sapiens
aatgttcttaacccagaagtagctgaatgtgttactccattgctgaggagtgggtgtgtttgaccatcgaatgaagtgctggcagaaatgggaagatgctc

SEQ ID NO: 752503 - DNA, 110 bp, Homo sapiens
ttcaaactgccaaaaagaaggatgaagccaaaattgccaagggggccgaaggccagagaccaggatttggctacggaggcagagcgtccgactataaatcggctcacaag

SEQ ID NO: 752504 - DNA, 100 bp, Homo sapiens
tgatctctctcgctgtgagacatgtctgagactcctgctcagtgtagcattaagactcagcccacctgcacccaggtgaaataaacagctttattgctca

SEQ ID NO: 752505 - DNA, 88 bp, Homo sapiens
ttccctcggtctgggcttctctgaggcggcgagagatggtcaggtctggagctcgaccgggccaggttgaattgctggaaatggaaaa

SEQ ID NO: 752506 - DNA, 96 bp, Homo sapiens
ctagtaacccgcgaaatgatgggatagcgttgcaaatccttaaaagagtcttaacggagccaaaaacctgtatatcatctccgtgaaggggatcaa

SEQ ID NO: 752507 - DNA, 100 bp, Homo sapiens
gcaaggcagaaccaccccagtgcacctccctggcctggtctgctgatggccagctaagcttgggctgggctgcttggggcttggcatagggtggaaaggg

SEQ ID NO: 752508 - DNA, 100 bp, Homo sapiens
aaattacggtggtgccgtccgccaagcttattgcaggagtgaccaggacactacctcctagaagtaatgcccacagaaagcgcaagttgttcgactgctc

SEQ ID NO: 752509 - DNA, 75 bp, Homo sapiens
gcttagcgcactggaggagcggcgggcttcagacagggcacaagagactatagtccccggcagatggcagttcgc

SEQ ID NO: 752510 - DNA, 98 bp, Homo sapiens
cgtggatgaggctctgcggctggtccaggccttccagtacacagacgagcatggggaagatgatgaggagtctgatgaggaagctgtgaagaaaacca

SEQ ID NO: 752511 - DNA, 50 bp, Homo sapiens
caactattcgcagtccgagcggaacaagatcactcaaggtgaaggataat

SEQ ID NO: 752512 - DNA, 88 bp, Homo sapiens
agagtggatttgattttaggagacagccattcggagctacatccagtgaataaggcctagccgcccgtgactctcacactgtctcctg

SEQ ID NO: 752513 - DNA, 75 bp, Homo sapiens
atcgcaggctccctgcctactcccccaccggggatttcagaaacctgtttccctccaatcttgtggttgcagctt

SEQ ID NO: 752514 - DNA, 95 bp, Homo sapiens
agaagaaaaactacctgtggtaggaattggaaagcatctgtgtggtatggcaacaggaatctgattgcaatattaagttacttgacagtcaaagt

SEQ ID NO: 752515 - DNA, 74 bp, Homo sapiens
gaaactcgctcgccttcagaagacaggtgctgaccttaaggaaagagccaaaatgagttccagtgaagttggtc

SEQ ID NO: 752516 - DNA, 75 bp, Homo sapiens
cccctctccgccccccaggaggggcgagagggagccgcagctgatgtcaggaactgactcagcacaagaagacag

SEQ ID NO: 752517 - DNA, 100 bp, Homo sapiens
actgcaacctggctgtacagctcctcaagtgcaacaagtcccacttccgaaaccacaagtttgccgatgttgcaaaagcttctcatttcagagagatgcc

SEQ ID NO: 752518 - DNA, 100 bp, Homo sapiens
aggtacagggtggagccctcgagattccaaatcctttatttgatctggctggaataacgtgtggacactttctggtacctttttggaccttctttggtgc

SEQ ID NO: 752519 - DNA, 100 bp, Homo sapiens
cgggcaacctcggagcttatactcctcccagtgacgggtctggagtgcgtgggggaccggctgttggcggccactgaggcggctcccagctgcgttggcg

SEQ ID NO: 752520 - DNA, 98 bp, Homo sapiens
ccggctccatcgacctcaaggacatcaacttccggccgcagatgtcccaggtccgcgggagagctgtggggcttggtgagtgtttcgtggcctctcgg

SEQ ID NO: 752521 - DNA, 97 bp, Homo sapiens
ggccgcgtcccactcctcaggccggggcgcacgtcggctcccacgcttagccagctcccgtggtgggggaaaagtagctccagctcaaccatctgag

SEQ ID NO: 752522 - DNA, 75 bp, Homo sapiens
ctaatgacagtctccaaattcgcctccatctgtaccatgttggaatcgaagcctcttaaaatggcagatgacttg

SEQ ID NO: 752523 - DNA, 90 bp, Homo sapiens
caaggacatcaggacaccgggagtgggagagattggactgggagactcagcagttagcagacttgaagaaagagaagcagaactgaagaa

SEQ ID NO: 752524 - DNA, 83 bp, Homo sapiens
gtgttgcccgccaccatgagctacacagagtgaagacatttccacctggacacctgaccatgtgcctgccctgagcagcgagg

SEQ ID NO: 752525 - DNA, 98 bp, Homo sapiens
gtggaccccaagaagaccattcagatgggatctttccggatcaatccagatggcagccagtcagtggtggaggtgggagacctacctgatgcagatat

SEQ ID NO: 752526 - DNA, 83 bp, Homo sapiens
cgcagttcttgtttgtggatcgctgtgatcgtcacttggcatccgtgggctctgagaagctctttgcgccgggaaccgataaa

SEQ ID NO: 752527 - DNA, 90 bp, Homo sapiens
attcgatccttggcacccagcctcctggacagaaataaaactgggtgtccaccccccagggttcctgacccctgcccctggacagcgacc

SEQ ID NO: 752528 - DNA, 75 bp, Homo sapiens
ccggcaacatggtgcggtcggggaataagggtgtggatgaatggaacatagctcgcctcaatacagtcttggatg

SEQ ID NO: 752529 - DNA, 90 bp, Homo sapiens
tctacagagaagtgatgttagagaattatgggaacgtggtctcactggaaactgcttatcaataacagctgtagcactgtggcttttctc

SEQ ID NO: 752530 - DNA, 100 bp, Homo sapiens
tgaagatataaaagctgcttttgcaccatttggaagaatatctgattcgcctttgccagtctcatctcgtgtctgctttgttaagttccatgatccagac

SEQ ID NO: 752531 - DNA, 90 bp, Homo sapiens
ctaaaaatcacgagttcaggcgtctgagacttggtgggaacggaccttcctcttaggaggtagatgacttctttgagcaagagaagaact

SEQ ID NO: 752532 - DNA, 51 bp, Homo sapiens
caaagctgttgtcggagagactgataggaagatgtcttcaggaaatgctaa

SEQ ID NO: 752533 - DNA, 99 bp, Homo sapiens
gacatccagattttctattgtgccagacctgacgaagagccttttgtgaagtcttcaggcagtgacagtggtgggagcagcagcagcagcagcagcagc

SEQ ID NO: 752534 - DNA, 75 bp, Homo sapiens
gtaactcgagatttgaccctgaaacctggatatgtgctacagttcaaggacacagcttgggctatggctttgtga

SEQ ID NO: 752535 - DNA, 50 bp, Homo sapiens
attgtcaatgaattttatgaacaggaattgaatgatctggcacgggaccc

SEQ ID NO: 752536 - DNA, 75 bp, Homo sapiens
tggacgtggatttggggatggctataatgggtatggaggaggacctggagaactttgaaagtgatgaagtagaac

SEQ ID NO: 752537 - DNA, 99 bp, Homo sapiens
gggagtgcagattctctcagcaatggcaaaatcctgacagatgactttgcagacaaggagggtctggaaatgggtgatgagtactttgcaaatctggac

SEQ ID NO: 752538 - DNA, 75 bp, Homo sapiens
tttgatcttccatatggataagagttctatctctggggtgactgccgcatataaccgagaacagctgtggctggc

SEQ ID NO: 752539 - DNA, 100 bp, Homo sapiens
cctgtctggagcaaataaaagagccctgcaatttgaagatacatgagacagcagccaaacccccagagagtgactcagacatctcctctacaagtaccta

SEQ ID NO: 752540 - DNA, 75 bp, Homo sapiens
gctggctgaagatggctactctggagttgaggtagactcctacgggaaatgcctgcagaatcgggagctgcctac

SEQ ID NO: 752541 - DNA, 82 bp, Homo sapiens
aagaagctgattgattctttagagcagtagaaactgatgaaggaattgaagaggagataccggattcaccaggaatagaaaa

SEQ ID NO: 752542 - DNA, 71 bp, Homo sapiens
gagtccggaccggagactttggggcctaactagacctccaatggaagtccgggcacatggcggagagcctc

SEQ ID NO: 752543 - DNA, 100 bp, Homo sapiens
cttgttttccaacatcatccccattagattagtagcaaggaagtttgtaggagcagcaaattatcgggagaagattcatagtactttgactccatgtggg

SEQ ID NO: 752544 - DNA, 100 bp, Homo sapiens
ctggtgggcccagtcctcggtgcggcgcggccagggcgaactttctgaccaagtatacaactacccagagggcctaggagaagtgctgtatagagagcag

SEQ ID NO: 752545 - DNA, 82 bp, Homo sapiens
ccggtgccggcctagcgtcctggaattacttcaatcaatctgaacaggaattaagaataactcaaagtgaatttgatcgtca

SEQ ID NO: 752546 - DNA, 100 bp, Homo sapiens
gagtgaaatcaggaacatctctttcaatgacaaaaagtttgtcattaaacccatcgacaagaaggcacctcgccaagaaccagaaccagaacagccaccc

SEQ ID NO: 752547 - DNA, 100 bp, Homo sapiens
tggtaacaaagactgtagaatgttgttggtactgcagtgagaggcatgcttccttagaccaggtaagaatgattgatgttggctgatattggagtgctca

SEQ ID NO: 752548 - DNA, 90 bp, Homo sapiens
gcggaggtggcagaagcaagtacgccaaaatctgctttgaggataaccttgaagctgtggtctaccaatctagacaactcagtggcaagc

SEQ ID NO: 752549 - DNA, 97 bp, Homo sapiens
gcgggaggcagagggaggaacctggacgccggaagccgggaaatgacctgcctagagctggaacgttacctccagagcgagccctgctatgtttcag

SEQ ID NO: 752550 - DNA, 142 bp, Homo sapiens
ggcgcctgaaggcgaggagacggagttctacgtgtcccccgaggatctggaggcacagctgcagtctgacgagagggaagctatgtggaagcagtgacctgaatgcttctatgacatctcaacattttgaagaacaatctgt

SEQ ID NO: 752551 - DNA, 74 bp, Homo sapiens
cactgcagagtgctgaagacggggtagccacgagaattaaatgtgagggagtctgacgtaagagtttgtgatga

SEQ ID NO: 752552 - DNA, 116 bp, Homo sapiens
agctaccagtgtgcatgccctgagcagggctacaccatgacggccaacgggaggtcctgcaagggaaaagtgggcaagttttgagttcaacgtgaggcctcaaggatgtgtgcaac

SEQ ID NO: 752553 - DNA, 82 bp, Homo sapiens
caaggacagcgcgaggtccgcgcagcccagcgcagccatgatgatcggctgaatgtaacagaggaactaacgtccaacgaca

SEQ ID NO: 752554 - DNA, 76 bp, Homo sapiens
ccaagatggctgcgctgttgctgaggtattctgcaagtactgtagatgttatagaaatgatggaggatgataaagt

SEQ ID NO: 752555 - DNA, 82 bp, Homo sapiens
caatatctagaaaaggaagcaagagtatgtgtagtctgctatgaaactattagtaaagatctcataggaaatgttcaacaat

SEQ ID NO: 752556 - DNA, 99 bp, Homo sapiens
gtgggacccagactgacttgttcacatgtggcaaatgtaaaaagaagaattgcacttacacacagggcgacctgaggtctggagtgtatcctctcaagg

SEQ ID NO: 752557 - DNA, 100 bp, Homo sapiens
acctgagtgacctcggccagctgcagtccagctccagctaccaggctgaagccgacgtagcttctctgaacagacgcatccagctggttgaggaagagtt

SEQ ID NO: 752558 - DNA, 90 bp, Homo sapiens
cccaagtgcattgcctttggaaacgagatgctggccctggctctacttgatagaattgtctccgtggataaacagcagcagtggcttttg

SEQ ID NO: 752559 - DNA, 100 bp, Homo sapiens
ctcggcctccccttggattcagacgccgattcgcccaggttaccatggggaagaaagtggccatcattggagctggtgtgagtggcttggcctccatcag

SEQ ID NO: 752560 - DNA, 97 bp, Homo sapiens
cgacaagggtgttcccgaactagagtgggccctgaagcgccagagctcgttgggcctttccttctttaacagcatcttggcccatggggacctacgc

SEQ ID NO: 752561 - DNA, 82 bp, Homo sapiens
ccccgcgctgacaggggggcctggccgcgcagccgggcgtctctggccgagcctctttttgtggaaaacgacagcagcagca

SEQ ID NO: 752562 - DNA, 82 bp, Homo sapiens
atgacccaccaatggaagcagctggcttcactgctcagatgtgaagttcatttccaatccgccctccatggtggcagcgggg

SEQ ID NO: 752563 - DNA, 75 bp, Homo sapiens
cactggccaacaaccagtgcatggctacagagagcgtggaccatgaagcctctgtgtcctttgtcccaatagtaa

SEQ ID NO: 752564 - DNA, 50 bp, Homo sapiens
cgtggaggcagaggtggcatggggtgaccctggcaaagatgagagtgcac

SEQ ID NO: 752565 - DNA, 100 bp, Homo sapiens
cctacccgggatacggaggagggctttccccagacatggccaacaagggtccttcctatggcatgagccgcgaagtgcagtccaaaatcgagaagaagta

SEQ ID NO: 752566 - DNA, 50 bp, Homo sapiens
ggacaaggcccagggaagttaaaaaagatgtgcgggacatcctcacccca

SEQ ID NO: 752567 - DNA, 101 bp, Homo sapiens
atctccatcacccaccaacaacaccacaataatccacagccaagaccgaccaagaccatcactatgaccgatggagactatgattatctgatcaaactcct

SEQ ID NO: 752568 - DNA, 101 bp, Homo sapiens
ccgccccgcgagcacagagcctcgcctttgccgatccgccgcccgtccacacccgccgccagtaaccccgacctcaggaggagcgaccctggctgggaacg

SEQ ID NO: 752569 - DNA, 95 bp, Homo sapiens
gcacctcatcccctggatgggggaccacaagatcctcatcgacagcggagcgtgctttggacaccatgaattttgatgttataaagggcaagcca

SEQ ID NO: 752570 - DNA, 100 bp, Homo sapiens
ctcctggcctcagcaacctgacaattctgtcgtgtcccggacattatctttctggggacccagtttgccttcatgaagaaaagacaccagcaggaagaat

SEQ ID NO: 752571 - DNA, 98 bp, Homo sapiens
gtgcaaagacaccctgtccttacggattctctaaccatggcacaggtagagaaacgtggaggtttgctccggaaatcttcagcctccaaaaaaccact

SEQ ID NO: 752572 - DNA, 100 bp, Homo sapiens
ctttgaccgcgctaagatggcgactcccatgcatcggctaatagcccggagacaagctatctggagtccatctttcaccatcttctcctgagattgtact

SEQ ID NO: 752573 - DNA, 139 bp, Homo sapiens
tccggagagctcaagctcatcgacttcggttcgggtgcgctgctcaaggacacggtctacaccgacttcgacgacaatgcagatcttcgtgaagactctgactggtaagaccatcaccctcgaggttgagcccagtgac

SEQ ID NO: 752574 - DNA, 83 bp, Homo sapiens
ccgcgcacttcgtcatgttcttcgcgccctgggagaagtggtgccacatgacccaggaggagcgcgacgacagcctccggttc

SEQ ID NO: 752575 - DNA, 110 bp, Homo sapiens
caacatgtttgggaacctgcgctccacgttaatggccctcatgattggctcttacgcctcttctgccattacgttcccaggaatcaaggggacggtattcagaattcgag

SEQ ID NO: 752576 - DNA, 95 bp, Homo sapiens
cttcgagccaggcccggcaaccattgcctgcggaaagatcgtgtcgcacacgcacctcggagtattgttgttataatgagaggattacctggcag

SEQ ID NO: 752577 - DNA, 99 bp, Homo sapiens
gtggcctttttccatctgcaggactatgaccaggcccgccactacctcctggctgccgtgaataggcagcctaaaggatacttttgtggaactctatgg

SEQ ID NO: 752578 - DNA, 50 bp, Homo sapiens
gtttgagattatccacgtgtgtaaggctgctgtgcggtcagagaagaaac

SEQ ID NO: 752579 - DNA, 110 bp, Homo sapiens
ctttgtggaggtccctgagaaggaggggtatgagccacacatccccgaccacttgcggcctgagtatggcattgccgtctgcaacgtgcccgcggcgtctgtggaggaga

SEQ ID NO: 752580 - DNA, 76 bp, Homo sapiens
cggggggccagcgggtcatcgggcactacgctggagaagatgcaacggatgccggctccaggagcagcagtggagg

SEQ ID NO: 752581 - DNA, 100 bp, Homo sapiens
tggcgcgatctcggctcactgaaggtgctcgggtcttcggggcactgggtcccatcggtccctcctcacctgggctcaccctcgggggtctggccgtgag

SEQ ID NO: 752582 - DNA, 75 bp, Homo sapiens
tggcttctcgactcggtcctgtttcgacagcgaacatgtcgcggcctgtcaggactccctggaggaaaagcggaa

SEQ ID NO: 752583 - DNA, 100 bp, Homo sapiens
gcaggacatcgtgtataagctggtgcctggcttgcaagacagcacgttgcccctggcctcgcaggagtcggccgtggtggaggacctgctgtacgtgctg

SEQ ID NO: 752584 - DNA, 51 bp, Homo sapiens
aagagtgtaataactttctaagaacgaaggacctctacagtggattaattg

SEQ ID NO: 752585 - DNA, 100 bp, Homo sapiens
gtgctggaggaaattcaacaggagctgatcaaccaagaggatctgaagaggcaaaatgcagtattacaagctgcacaagatgatttgggacaccttcgaa

SEQ ID NO: 752586 - DNA, 100 bp, Homo sapiens
ctcgctgggagagaggtacctctccttttccctctccctttccctaaggacagaactgtaccgctctctttttggccagctccaccctcccgacgaaggc

SEQ ID NO: 752587 - DNA, 107 bp, Homo sapiens
ccctggagcagtgccagcacagattttgggggtttcacgactgcacccaccaggaagatgtggctgtcatctgctcaggaagacgttcagccagggatccactcagg

SEQ ID NO: 752588 - DNA, 82 bp, Homo sapiens
cccgcatcttcgccgtctggaaagacagccctcagcgcctttttccaggagaccaacatcccctacagccaccatcaccacc

SEQ ID NO: 752589 - DNA, 100 bp, Homo sapiens
cagcgctctggggctcgccttgtatctcaacaccctgagtgcggatttctgctatgatgacagagagaaatctcatcatctgtgcagccttcttaaagca

SEQ ID NO: 752590 - DNA, 100 bp, Homo sapiens
tgcttttgcttcagcgttctgtggttgtcaacaggtgcaggctgccccatggatgccacacgtggcagcggggagaaaagaagtgattcggtccctgccg

SEQ ID NO: 752591 - DNA, 83 bp, Homo sapiens
cctgagccggccgagcggcgacggaccgcgagttccagggtctccctccactgctgtagtaacccgggtccggggcctcggtg

SEQ ID NO: 752592 - DNA, 74 bp, Homo sapiens
ctcaggccttactgggctcctcaagtgccatctccctcttctacgagctctcggagaatgacttgaacttcatc

SEQ ID NO: 752593 - DNA, 83 bp, Homo sapiens
ttggcggagaaaaccggcatctgcaaaattcggccgcccaaggcatcaagcatgatggaaccatgtgtgatacctgccgccag

SEQ ID NO: 752594 - DNA, 74 bp, Homo sapiens
acccgtcagagccgacggaggaggaggagccttccaaacagagagttcttggccaggctgactgagagatttgt

SEQ ID NO: 752595 - DNA, 75 bp, Homo sapiens
tattctttacctgcttcccaatcccactgatgaggatcagcccatggaaagattctgaagcttggcggagagggg

SEQ ID NO: 752596 - DNA, 100 bp, Homo sapiens
gtgaactttcacggacaacctcagaggacaacgaagtgttcggagctattgtgacaatcttggttaccatccattaagtgctgctgattttggaaagatc

SEQ ID NO: 752597 - DNA, 75 bp, Homo sapiens
tgcgtacccactgcagagtgctgaagacggggtagccacgaggagtcaaattgactttatcagctttaatcgatg

SEQ ID NO: 752598 - DNA, 51 bp, Homo sapiens
ctccctgcagtaccctttaacgggacagaatgatgctgctgaaattggaac

SEQ ID NO: 752599 - DNA, 100 bp, Homo sapiens
attttgatgacatcaagcacacgactcttggtgagcgaggagctctccgagaagcaatgagcattgatgttgatgggacaatgacagtggactggaatga

SEQ ID NO: 752600 - DNA, 115 bp, Homo sapiens
attgctatctgtctagattgtttacgaaataatgggcaatcaggggacaatgtagtaaaggacttggtgaaatgtgaaaataagaagaatgctacacccagaactaatttgaaat

SEQ ID NO: 752601 - DNA, 146 bp, Homo sapiens
tggagcccagctgaaatggactggcccccttgagcctgtcccaagccctggtgccaggtgtccatccccgtgctgagatctcctccctggttcgaagggctgccctcacacacaacgacaaccacttcaattatgagaagacacac

SEQ ID NO: 752602 - DNA, 152 bp, Homo sapiens
cgcagtgacagcgcctcaccgccaccagctcctggaccaccatggccaagaaccgcagggacagaaacagttggggtgcaatggatgagcttcatagtctggatccaagaaggcaagagttattggaagctagatttactggagttgcaagt

SEQ ID NO: 752603 - DNA, 75 bp, Homo sapiens
tggcggttccagcagcagcagtagctatggcagtggcagaagattttaattagcctacgaggacaagcagaaact

SEQ ID NO: 752604 - DNA, 101 bp, Homo sapiens
gcgaatatcgtcatcgttagaagcattggggacatcatagatcactatcgaaaagaacagattgttgaaggatattatcttaaggaacctgtaccaatgca

SEQ ID NO: 752605 - DNA, 83 bp, Homo sapiens
ccggaccgcagtgccccaagagagagctgcctgagaactggacagacacgcgggagacgctgctggaggggatgctgttcagc

SEQ ID NO: 752606 - DNA, 100 bp, Homo sapiens
gccgcctgtccgtcgatgcaccgaaaagatccagtttgctgaccagaagcaagaattcaacaaacgtcccaccaaaattggacgtcgctctttgtctcgt

SEQ ID NO: 752607 - DNA, 88 bp, Homo sapiens
aagttagatgccgattacccacttcgagtcctttattgtggagcccgattactgaggctgcaagaaagttcacaaggggaacatcctc

SEQ ID NO: 752608 - DNA, 75 bp, Homo sapiens
ggatgatttcatgtgcgatgatgaggaggactacgacctggacaggcgacactaacaggtgaagatctcgggaga

SEQ ID NO: 752609 - DNA, 97 bp, Homo sapiens
cccctaccttggtctttcaggactacatgaggaaataattgacttttataacttcatgtccccttgtcctgaagaagcagctatgagaagagaggtg

SEQ ID NO: 752610 - DNA, 83 bp, Homo sapiens
ggaggaaggagggcgagcgaggaggatggcggagtcggggctcctgacgggcggcaccttcctacttctgcccagccacagcc

SEQ ID NO: 752611 - DNA, 75 bp, Homo sapiens
aacctaaaatccctctcagcccagaagtgacacacaccaaacctggtgggtttggaggatttgggacaacatcta

SEQ ID NO: 752612 - DNA, 82 bp, Homo sapiens
ggctggaaggaaccgctctcgcttcgtcctacacttgcgcaaatgtctccgaggtcctgctgtactagccaccaaagcagct

SEQ ID NO: 752613 - DNA, 90 bp, Homo sapiens
caccattcggctgtacatcgatagctatgagaaggacgttgccaagattaaccaggacccccaggtattgaagcccctgggtgataattt

SEQ ID NO: 752614 - DNA, 50 bp, Homo sapiens
agattgtatacccccaaaaaatgaccactgagcagtttacaggagatcat

SEQ ID NO: 752615 - DNA, 50 bp, Homo sapiens
caccgaatggccacagcttgtaaaaggatacagcagttaaaacagttact

SEQ ID NO: 752616 - DNA, 83 bp, Homo sapiens
tcctattgaaacttgcccagatgttctcagatatggtcttaaaagtgtctcgactgcattgtgagagtgaatctttcaagatg

SEQ ID NO: 752617 - DNA, 75 bp, Homo sapiens
taattgataacaccctgtaacagctgattacctagaaaagtacgagaaagttcatcattttggggaggatgatga

SEQ ID NO: 752618 - DNA, 82 bp, Homo sapiens
cggagacgagtggtgggagaaccagccgactggagcaggcagcagcccaggtatgtagaatttaatctgctgtatgatcggg

SEQ ID NO: 752619 - DNA, 100 bp, Homo sapiens
aaatagcacacttttactctacgcaactgttgctttttcatgaggtccagttccggccgtaccgcacagacgacttcatcacgcgcctgtactatgagac

SEQ ID NO: 752620 - DNA, 83 bp, Homo sapiens
gccagagtcacacacggtcctaagagctgggcaccaggaagcgaaggctggccaagactaaggggctgcagagcggggtggac

SEQ ID NO: 752621 - DNA, 87 bp, Homo sapiens
aagaggaaaactctaccggtgcagggtcatggaggacgctggcggcggcgaggagaccccggccccggaggccccgcacccccctca

SEQ ID NO: 752622 - DNA, 100 bp, Homo sapiens
caaggttgaagcagaagaataaggagaaggataagtcgaaggggaaggcgcctgaagaggacgaagggaagaaggagaaagggccaacccctgaagaagc

SEQ ID NO: 752623 - DNA, 100 bp, Homo sapiens
agcggcagcagcaggctgcaacggagaaggggctctctagaggacaaaatcccagtccttggcacaaactcaggaaatggaagccggagtctgttttttg

SEQ ID NO: 752624 - DNA, 100 bp, Homo sapiens
tcaagactggtccacggagtgtatgaccacaaacagccatcaaggtctcggcgcggaagatggccggcggcgtggacggccccatcgggatcccgttccc

SEQ ID NO: 752625 - DNA, 100 bp, Homo sapiens
gaaaagaagaaatactacgataaaaatgccatagctattacaaatgatcaccccttctgtgtcattctctgaggaaaacaagttcttctcaaggaggaaa

SEQ ID NO: 752626 - DNA, 75 bp, Homo sapiens
agcctgcccagacggctcacctgtgcgggatggaacaaaagttgctgatcatctgggctgtgatccacaaacccg

SEQ ID NO: 752627 - DNA, 100 bp, Homo sapiens
gaaaaacctgacttttatcatcatattgataatctcaggagaactctatgcagaagtgaaaccttgtgattatccagacattaaacatggaggtctatat

SEQ ID NO: 752628 - DNA, 74 bp, Homo sapiens
ccaactttgagctggatcttggcaagaaagtcctaaacctgctgaagaatggagatttacagacagtcatctgg

SEQ ID NO: 752629 - DNA, 80 bp, Homo sapiens
taccagtccccagtgagggtgtacaaatacccctttgaattaattatggctgctgcccccaagtgtaactccagcactgt

SEQ ID NO: 752630 - DNA, 100 bp, Homo sapiens
ttcaatgtaaggaacggatatggtttcatcaacaggcagtgagctctgcagccccagcccaggttctggcagcttcggggaggaaccacctgccccccag

SEQ ID NO: 752631 - DNA, 90 bp, Homo sapiens
tattgcacttcctgtgaagcaggagcctccacaaattggtaatgctatgggctatgtacgaatgataagatctggtggtcttcattgtag

SEQ ID NO: 752632 - DNA, 100 bp, Homo sapiens
ctggtctccgaagtcttcgagcagcacctgggaggtcacatcttgcagatatcatggaaatcaggacagtggcagttggaattgtggcaatcaaaggggt

SEQ ID NO: 752633 - DNA, 100 bp, Homo sapiens
ccttgatcctcctcctaattgcaggactatctcagcaaaaactcatcatcaggctgttaacttcaacattttcgagggcatggtttgccacggggtgccc

SEQ ID NO: 752634 - DNA, 75 bp, Homo sapiens
ggaaaatcacacctcttatgtcagcatttcgcaagatcaaagccatcggccagacagagttgaatgcaagcaatc

SEQ ID NO: 752635 - DNA, 100 bp, Homo sapiens
cctattctgattgctacagatgtggcctccagagggctaggtggcaattctcggactgcaatggttgctgctctgagccccgcggatatcaactacgatg

SEQ ID NO: 752636 - DNA, 100 bp, Homo sapiens
gattgaagaaggggagcttatcctatctgtgaatatcttgtaccctgttatatttcataagagctctcagcatggcggctcctctacgtcacttgcgtcc

SEQ ID NO: 752637 - DNA, 75 bp, Homo sapiens
aacaagtgcaagtgtcatcctggttatgctggaaaaacctgtaatcaagttgacattttgctaaaggctgtggga

SEQ ID NO: 752638 - DNA, 100 bp, Homo sapiens
actgcctgcgcagctccggccgcctggctccccatactagtcgccggtacagcagggaagaactggaaactcagagaaagaaactgcccttccatctaca

SEQ ID NO: 752639 - DNA, 100 bp, Homo sapiens
tatggtgacagactatggggcctttatcaaaatcccaggctgtcggaagcaaggaaagtacacaggaagatgctatgaaatttccatcttcccaatcttc

SEQ ID NO: 752640 - DNA, 82 bp, Homo sapiens
ccaaagtgaaagtggcggtgcggatacgacccatgaaccggcgaggttctgggccggagaaggggcgacgttcgggcacccc

SEQ ID NO: 752641 - DNA, 82 bp, Homo sapiens
cagttttgaaatcgacacacaaagaatagagttgagcctgtgggacacttcggggtggcccagttgaaatccttcccttcct

SEQ ID NO: 752642 - DNA, 96 bp, Homo sapiens
atttttcaggcctctggtgccaaatacattgtcttaacttccaaacatcatgaagctgtcacgggaagtctttttaggataaacgtaggcctgcgt

SEQ ID NO: 752643 - DNA, 75 bp, Homo sapiens
ggtccctgtgacctgtggagacacggccagatctgccctccacttcagaatggcagaagatgatccatatttggg

SEQ ID NO: 752644 - DNA, 83 bp, Homo sapiens
accttctttcttcagccgaggccgccgccgcctctccttgctgcagccatggagaaggtgctcgggtcttcggggcactgggt

SEQ ID NO: 752645 - DNA, 100 bp, Homo sapiens
gttccatggtcaaaaaatggcaggacttgaaagaggagattgatattcgactctccagggttcaggatatcaagtatgagccccagctccttgcagatga

SEQ ID NO: 752646 - DNA, 75 bp, Homo sapiens
aacatcagcgacagctttgagatgacctatagatatccttgccagcacattacagaatatttttgttgaaccttc

SEQ ID NO: 752647 - DNA, 99 bp, Homo sapiens
cttctcatggcaatcgagttgagtacttggatagacttatacctcagggaaatcctcattgacgattcaatttgttgaaggccaatttgtggactccta

SEQ ID NO: 752648 - DNA, 100 bp, Homo sapiens
aaggagcagccctggtgtcacctatcagtaaaagccgctcctgacatcactggccataaacggagtgagaacaagaatgaagggcaggatgccactatgt

SEQ ID NO: 752649 - DNA, 100 bp, Homo sapiens
ctgtttataaaatgggacagatgttcatgtatgatctttatcaggaacctgaggatcagctttactatgtgaaatttttgtcactcccagaggtgagaca

SEQ ID NO: 752650 - DNA, 153 bp, Homo sapiens
cagccctgtggcccagatgaccttaaccctcaagccgaagccttcagtgggactcccccagcagatacattctcaatgctgggctcttgcactgtttggtggaaatggtgagacaggatttgagcaaaattctacttattcagtgttcagcat

SEQ ID NO: 752651 - DNA, 100 bp, Homo sapiens
tgccgggaagcaagaggcaaagagaatcggttggactatgatgccttctttgaagccagagaaaataatgcagtgtatgccttcttaggcttgacagccc

SEQ ID NO: 752652 - DNA, 90 bp, Homo sapiens
cagcaccaaaaggagccaccaaagcagaagaaacagagtttaggtgaagaccatgtgattctagttaaacatgaagtttctggagagaca

SEQ ID NO: 752653 - DNA, 91 bp, Homo sapiens
acccgcggcgccccttccgcaagctcaacgcgtttggcaacgctttcctcaacaggttgtgaccgagattcccgacgagagagactgaggg

SEQ ID NO: 752654 - DNA, 100 bp, Homo sapiens
aacatcagaaaggtgcgaaaaaaggtgaaaggtattcttgtggatattgggcttgacagctgcaaggagttactgaagacacgatgaggcgagtggtacg

SEQ ID NO: 752655 - DNA, 74 bp, Homo sapiens
gagcgttctcaacttggttattgtaaaaaaaggaaacaaagcttagcaggagaggagagccagagaagtgacag

SEQ ID NO: 752656 - DNA, 100 bp, Homo sapiens
tgtcaccccaggatgatgaagcagaagagggtgacacgctgttgcaggccctggacttactgcccttgctcatccagacagtggagaaggcagcctccca

SEQ ID NO: 752657 - DNA, 75 bp, Homo sapiens
caaactcagctcgcccggtttctcggcgaatgacagcacagagtttatgtggccgaggcagacaagtggaattag

SEQ ID NO: 752658 - DNA, 100 bp, Homo sapiens
cataatttggggttcaagattccaggtccgccgggatcttcacgtatcaaccggtgaatttacagacttaaagcagcagttggaaagagactcagttgtc

SEQ ID NO: 752659 - DNA, 80 bp, Homo sapiens
attctctgagaacagcacttccctgcagtgtaccacatgaaggaagatggttgggtgaaagtagaaagtacagatgtcag

SEQ ID NO: 752660 - DNA, 100 bp, Homo sapiens
aatatgatgctggagttttacaaaaaggatggaacaaaatccagtctcatagcagaggagaatataatgtttacagcaccttccagagccatgaaccaga

SEQ ID NO: 752661 - DNA, 75 bp, Homo sapiens
agaagaccgcagtgggataaatctcaaagatctcgtacaagatccttctttctgtcaaagctcgaaaaacagcag

SEQ ID NO: 752662 - DNA, 100 bp, Homo sapiens
tccgagaacgccgcgctgcgcatctccaacagcgacctgagcgatatggctcgtggacagcagaaaattcagtctcagcagaaaaatgccaaaaagcaag

SEQ ID NO: 752663 - DNA, 100 bp, Homo sapiens
ctgtggccattattaatctaaaagaatatgatccagatgatcatctgatagaagaggtactccaaagattcaggtttactcacgtcatccagcagagaat

SEQ ID NO: 752664 - DNA, 90 bp, Homo sapiens
ggaaagacgctcgtcaccaggacccaaggaaccactgtatgttgatgtctcatcttgaggaaccaaaagtaacagaagatgaagaaccac

SEQ ID NO: 752665 - DNA, 100 bp, Homo sapiens
agtgggagtcgaagcgagggtctgaagttcacgactactagaaggggaggggagtggaaaggctctcagtgaaaaaggtgtcatggagaaactccagctg

SEQ ID NO: 752666 - DNA, 95 bp, Homo sapiens
tagtaagcttcgaaatttgctacatgacaatgagctgtcagacaggcaaatgtacactggggaccaccatgttcacgtgacatcaagaggaagcg

SEQ ID NO: 752667 - DNA, 100 bp, Homo sapiens
cacctccggaccgagggacgcggaacatccagtcatggataaaaatgagctggttcagaaggccaaactggccgagcaggctgagcgatatgatgacatg

SEQ ID NO: 752668 - DNA, 82 bp, Homo sapiens
attacgatccatctccgattcctccattgcatatgtactggtatcttgggcctctaaaaatcaaagcagcccactttttcag

SEQ ID NO: 752669 - DNA, 80 bp, Homo sapiens
ggaatctcactctgttaaagctggtctgttctaactgagaaattgtatgctgctatgcatgaacctgatggagtggccgg

SEQ ID NO: 752670 - DNA, 50 bp, Homo sapiens
ctacaaccttcgatctcctgacgaaaaggagcgagtgggactgtgctgct

SEQ ID NO: 752671 - DNA, 85 bp, Homo sapiens
gtggccaaggaattcgaccaactcaccccagaggaaagccaggcccgtctgggtccttcagtgaatctacagacctattttctca

SEQ ID NO: 752672 - DNA, 75 bp, Homo sapiens
ggaaatccagctctttaaagagaagacaaatgagtccctggaacgccagatgcgtgaaatggaagagaactttgc

SEQ ID NO: 752673 - DNA, 96 bp, Homo sapiens
aagaaccacttcccaagacccacagtgcctggagaggacatggggaagatcatggaagggaagtggttgctgtgtatgttactggtgcttggaact

SEQ ID NO: 752674 - DNA, 50 bp, Homo sapiens
tcgatgccatcgtgatggcggatgagagctatttccttcgtgctaccatc

SEQ ID NO: 752675 - DNA, 100 bp, Homo sapiens
aaatacaacaattgaggatgaagatgtgaaaggtcagatgtaccaacagtaccagcaacaggccggctatggtgcacagcagccgcaggctccacctcag

SEQ ID NO: 752676 - DNA, 75 bp, Homo sapiens
agagacaacaccgagtatgagaacttccccgggcgctgcctggacaggcctgcctgcgtgctgggacatgtctgg

SEQ ID NO: 752677 - DNA, 100 bp, Homo sapiens
ccccttcccggagccccgaggggccggagctcctggcggtgccggatcctgacggcggccttcccccgggatgaagttcctgatggaattaaatctgcga

SEQ ID NO: 752678 - DNA, 75 bp, Homo sapiens
aaaggggatccagacccatttgatgatcgacatcctggatcaagattataggaccggcccaagtgaggagaaacc

SEQ ID NO: 752679 - DNA, 98 bp, Homo sapiens
gccatcgagggcaagtactgcttcaccatgtaataataacataaatgcagctacagctgtggctctacaggtaatatctcagtaagctcaagcacttc

SEQ ID NO: 752680 - DNA, 100 bp, Homo sapiens
aacagcagtttatgactacccaagatgcctctaaagatggtcgcattcggatgaaagagccttcaggctctacacacagatgatcctctcacttgggatt

SEQ ID NO: 752681 - DNA, 100 bp, Homo sapiens
tagcagagtacgatactcaggtcaaaggagtcgatggatggagatgaaaaggaactagagagcagcgaagagggaggctcagccgaggagcggagactcg

SEQ ID NO: 752682 - DNA, 75 bp, Homo sapiens
gaaagtcctcgctcgtcaccagcaagcttgcggggtttgggccccatggtatccctgtgacagtatttcccaaaa

SEQ ID NO: 752683 - DNA, 50 bp, Homo sapiens
gttgacaaggcactgctttttcatgacggcttctcacggcattcagcagc

SEQ ID NO: 752684 - DNA, 101 bp, Homo sapiens
agacagagggttttcttttgaggtgctgtaacacctgtgaagatgtgcgggaggcatatcgccgtagaggctgggccttcaagaacccagatactattgag

SEQ ID NO: 752685 - DNA, 90 bp, Homo sapiens
agcgacttggagagagaccatcgccctcatattccctcccaggctgtccctcgccgccttgctacagcccccaagactgaaaaacctccc

SEQ ID NO: 752686 - DNA, 100 bp, Homo sapiens
gataagaagcacctggatgagacatttgctacagcatcccacattaagtcaacgacaagttggatggcttgaggactggtactaaaaggaaacgtgactg

SEQ ID NO: 752687 - DNA, 51 bp, Homo sapiens
ctttatgaaacagcttgcttcctacagtggtggacttgctttgtgaagaga

SEQ ID NO: 752688 - DNA, 74 bp, Homo sapiens
ttctagtcatgaccaggaccagggcagcactcctcctgttcacaggaagaggatcacctagcccgggtagaaga

SEQ ID NO: 752689 - DNA, 90 bp, Homo sapiens
cagtggtgggttccatgtgatggtggagtaggaggcaggtctccgcgggtaatactgaacaacctgtccaaactagcaagattggacttg

SEQ ID NO: 752690 - DNA, 75 bp, Homo sapiens
gccgctgccctccggctccgcgggcggcccacggcgagagtctgtagaagaggcgacaccagggcttccaaatga

SEQ ID NO: 752691 - DNA, 100 bp, Homo sapiens
caaagcagcgcccgtctgcttcgggcctctggaatttagcgctcgcccagctagccgcaggctggcgcccatgcggctctacacgctctccaagcgccac

SEQ ID NO: 752692 - DNA, 75 bp, Homo sapiens
gtccccagagaacacatttgtcttctgagctgctggcagttttgagctgtccaggcagccatcttgtctggagac

SEQ ID NO: 752693 - DNA, 97 bp, Homo sapiens
tcaaggaaagtcttaaatgttgcttattgcatctctttggagccattgtagccggtgggcagattgccagtagaaagccaacagacggtgcttcctc

SEQ ID NO: 752694 - DNA, 122 bp, Homo sapiens
gacgaccagagccccgctgaaaagaagggactgcgctgtcagaaccccgcctgcatggacaaggggcgggcggccaaggatcatgcggccagatgatgccaacgtggccggcaatgtccacg

SEQ ID NO: 752695 - DNA, 75 bp, Homo sapiens
taacctgacacagaaaatccttgtgcaaataaatgcttagtgacaaacagcatgtttggtgcttcaagaaagaag

SEQ ID NO: 752696 - DNA, 75 bp, Homo sapiens
agctgcctcagttcttagcgcagaaatgtgtgttctgcgaatgactcgagctagacgttcccaggtagaacagca

SEQ ID NO: 752697 - DNA, 100 bp, Homo sapiens
ccgaaggcggcgacccgcggcggaagggggacagccgagcccggagcccggagcccgggcaagagctgggtcatgttccttggggaactggaagaaatat

SEQ ID NO: 752698 - DNA, 100 bp, Homo sapiens
ataacacaacaagtttagggagtccatggccagaaaacttttgggattcatgatgttgctatcaaaagttgagaaattgtcagaagaaatcatggagata

SEQ ID NO: 752699 - DNA, 97 bp, Homo sapiens
ccggacccaggatgaagaggttggagatgggaccacatcagtaattattcttgtcactcaagactgcttgcaactgattgcagacagtgaaacacca

SEQ ID NO: 752700 - DNA, 50 bp, Homo sapiens
cctgcaggaaggacggacttcaggggcagagcattggggagtcagcaatg

SEQ ID NO: 752701 - DNA, 101 bp, Homo sapiens
gtggagctccagagatgattactctcgggatgattataggcgtgatgatagagctccccccacccgctgcctgcggttttgtttctgttaaaacgtcacct

SEQ ID NO: 752702 - DNA, 95 bp, Homo sapiens
agacgctgcagttggagcaacagtccaagctcaaactcgcaaaggatctccttcatccctctccagaagaggagaagaggaaacacaagaagaaa

SEQ ID NO: 752703 - DNA, 142 bp, Homo sapiens
gggatgtcttcttcggcttcgaggagaataagtgcagtatgagctacatgtttgagtacccggagtatcaggaagaggcagaaatccaggcagaacttgaacgtttggaaagagtcagaaatcttcacatacgtgagctgaa

SEQ ID NO: 752704 - DNA, 75 bp, Homo sapiens
ggagatccgagagcagggggatggggcagaggacgaggagtggtatccatatattcctgcacatattacaaagcc

SEQ ID NO: 752705 - DNA, 100 bp, Homo sapiens
cggctcccagagaaaaatcggcagatgttacagctgctcatgaaccacttggcaaacaaggacacccaggcccattattttcctccagcctccatggacc

SEQ ID NO: 752706 - DNA, 90 bp, Homo sapiens
atagatgactttgagaagagagtgactccatcctttgttcgcaaagtacagatggaacagatttggagttgaggctggtcaatggagacg

SEQ ID NO: 752707 - DNA, 100 bp, Homo sapiens
cgagatccgcgctctctacaacgtgctggccaaagtgaagcgggagcgggacgagtacaagcggaggatactcgatactccaagctattatggaaaaagc

SEQ ID NO: 752708 - DNA, 123 bp, Homo sapiens
tgtggaatatgagtgatgacaaaccctttctatgtactgcgcctggatgtggccaggtgcttttgaagatgatgatatcacgcacgttgaaggaagtgtagatcctattcgagatatagaaat

SEQ ID NO: 752709 - DNA, 98 bp, Homo sapiens
tcttccaaggaaccaaggcggccctggctgggggaaccactatgatcacgcctttccttcgaggagctcaaggcatttttcaaaatctgacagttttt

SEQ ID NO: 752710 - DNA, 51 bp, Homo sapiens
catgcctcaccaagtcacatgacaagcagctttggtatcaggatgatgctg

SEQ ID NO: 752711 - DNA, 90 bp, Homo sapiens
gagggaatgatccttactaaccacgaccatcaaatccgtgtcggagtccttacagacgttccatcctcagagcagcctgaactgttccta

SEQ ID NO: 752712 - DNA, 100 bp, Homo sapiens
ggattttttaactgaagatagtgcctttcagccctaccaggttcgagactataagaggcttacccccatttctgtgctggaccatgcactagaatcttta

SEQ ID NO: 752713 - DNA, 50 bp, Homo sapiens
gtttcacagacaaggattgctggtggaacctaacttcttgtggaacaagt

SEQ ID NO: 752714 - DNA, 75 bp, Homo sapiens
cctaccacagagccatcaaaatcacagtggatgggccccgagaacctcgaacaaaatgatgcttcaacacccagg

SEQ ID NO: 752715 - DNA, 82 bp, Homo sapiens
atgtctctggtgggaaacctgggatcaaccagacatatagttcgatatctcaatgcctatactggaatagtgctacttcgat

SEQ ID NO: 752716 - DNA, 74 bp, Homo sapiens
ccgagagcgcgaatatcgtcatcgttagaaggctttttagaccccgagaagaagcttttttctcaccgaatatt

SEQ ID NO: 752717 - DNA, 100 bp, Homo sapiens
cctcctggccatgggggacgtgctgtccacgcacctggacgacgcccggcgccagcacatcgcaggaaagatgaatgggagggctgattttcgagagccg

SEQ ID NO: 752718 - DNA, 50 bp, Homo sapiens
ctcctggaattgttccagatgcattggattcaaaggctaacaatttgtcc

SEQ ID NO: 752719 - DNA, 97 bp, Homo sapiens
tgacccctttgacctcttcgatgtgcgagactttggaaaggttggctcaaaaacagaagttgctgagtgcaaggagaaattcgccgcctccaaggac

SEQ ID NO: 752720 - DNA, 95 bp, Homo sapiens
tatcgtcgagaagcctatcatcgtttctcttcagcaacgggtagcagaattggaaaaaattaatgcagaatttttacgtgcacaacagcagcttg

SEQ ID NO: 752721 - DNA, 100 bp, Homo sapiens
ctccttcctggtcaagaagcatttcaacgcctccaaaaagccaaactacagcgaactggacacacatacagaacgctttggataaacaagaagaattgac

SEQ ID NO: 752722 - DNA, 100 bp, Homo sapiens
ctggggccagggaaccctggtcaccgtctcctcaggaccaagaatcgccttcagccctgtctggtgcatccttggcagaaagtgaggaggaaaacacccc

SEQ ID NO: 752723 - DNA, 75 bp, Homo sapiens
tgtgctcaaaatgtgaagcaatttgggacgctgctgatgaagaagcatttgaagataattctgaggagtacataa

SEQ ID NO: 752724 - DNA, 100 bp, Homo sapiens
atgttccgcagccaggccgggggcgcctgcgactgcggggacagcaacgtgatgcgggagagcggcattcctctgaatattgatttgctgaatagcccag

SEQ ID NO: 752725 - DNA, 51 bp, Homo sapiens
acttaatccacagcaagctcccttatatgctttggtatcaggatgatgctg

SEQ ID NO: 752726 - DNA, 74 bp, Homo sapiens
gtagcagagttaacacgaaagataggatttgacccagagccggtaaatgaattggtggatgccagagatgtcgg

SEQ ID NO: 752727 - DNA, 50 bp, Homo sapiens
agctatatttgcccatgttattcaagggagaaaatccccttcaacattcc

SEQ ID NO: 752728 - DNA, 82 bp, Homo sapiens
cggatgagtacgataccgaagcgggctgtgtgccccttctccacccagagtgttgaatatgaaacattcgatatattggagg

SEQ ID NO: 752729 - DNA, 75 bp, Homo sapiens
gcgaatatcgtcatcgttagaagatcccaggatcaccttcaaattcctccattctctctggctccttagactaca

SEQ ID NO: 752730 - DNA, 75 bp, Homo sapiens
tgcactttctcaaaccaaggctgctactctcaaaaggatttggaaaatgatccatcagtaaattctcaggcgcag

SEQ ID NO: 752731 - DNA, 85 bp, Homo sapiens
gcagcagcagccaggtgtggcagtgacagggaggtcacccctggttcgacttgtgctgtctttggcctaggaggtgtgggtcttt

SEQ ID NO: 752732 - DNA, 75 bp, Homo sapiens
ggaggacgccaaagaaggctacaggattacatcccagtagaccaagaagagttaagagattatgtcaaagctagg

SEQ ID NO: 752733 - DNA, 75 bp, Homo sapiens
gtcaggcagcttatgatgccaatttgtcccatgggaccagttactctccacaagaaaattcacacaaccacagtg

SEQ ID NO: 752734 - DNA, 50 bp, Homo sapiens
caactggacggaggacatggaaggagggggggccctcagcctcttggcct

SEQ ID NO: 752735 - DNA, 90 bp, Homo sapiens
gttgttgcctaatccgtatattatggctccagggctgttacatgcctacccgttgaaggagaagagccaggcgtgcggagggaacttggg

SEQ ID NO: 752736 - DNA, 100 bp, Homo sapiens
cttcgtcaagggcaagatacacgtgatgaaacttatcaggacatatttcgtgatttttcccaaatggcatccaataatccagagaaactaaatcgtttcc

SEQ ID NO: 752737 - DNA, 87 bp, Homo sapiens
cacggtccacagctcatcatgatggacttggagctgccgccgccgggactcccgtcccagcaggttcagccgtctgtatatctcccc

SEQ ID NO: 752738 - DNA, 100 bp, Homo sapiens
gcacttgcaggccgggcagtgcggcaaccaaatcggcgccaaggtctggctctgggagaggagtggacagcagctggttgagatacatccccatctggag

SEQ ID NO: 752739 - DNA, 80 bp, Homo sapiens
caccagcaggacccgaggccaggagccaggggcccagaagggggatatgagactttctactcggaatatcctgagtgttg

SEQ ID NO: 752740 - DNA, 100 bp, Homo sapiens
ggcggcggcggcgctgctcccgggggcgacgggatagctagcggccaggagaaatacagtggaaaatgcaaaacaacgaaattataaagcctgccaaata

SEQ ID NO: 752741 - DNA, 100 bp, Homo sapiens
ccagctgtgggcaggcgggcagtcagagcatcgggagcaacgtcacgctcatcaccctgaactcggaagtgctgctcacggccgtgaactgctacagcgt

SEQ ID NO: 752742 - DNA, 96 bp, Homo sapiens
gaggtggcggagctccccgaggtcgctatggccccccatccaggcggtctgaaaacagagtggttgtctctgcgggctacattgagagacctcagc

SEQ ID NO: 752743 - DNA, 114 bp, Homo sapiens
gccatcctcggcgcgactcgcttctttcggttctacctgggagaatccaccgccatccgccaccatgggtgagaactctgtctcagtcgacgggaagtgcagtgactccacgct

SEQ ID NO: 752744 - DNA, 75 bp, Homo sapiens
cttttgcagaccgcggtcctgcaggggcgcttgctgcgccacagacctccaccagcacgaagtggacatcgttgt

SEQ ID NO: 752745 - DNA, 83 bp, Homo sapiens
gcacatggtggagaggcaagcacggattccagtccctgcttcccgaggttgtggtattggtaggggtaacaggccaatcggtg

SEQ ID NO: 752746 - DNA, 75 bp, Homo sapiens
aagaaggaaaattagagaagatccagaccaaggcaggtgccaagtcctgccctgccaacttcttggcagctgccg

SEQ ID NO: 752747 - DNA, 101 bp, Homo sapiens
cgcccagtggcggtgtgaactgtgaggagttcgccgagttccagtttgaatcagcttgggtactgacaaatattgcttcaggaaattctcttcagacccga

SEQ ID NO: 752748 - DNA, 75 bp, Homo sapiens
agagggagaggacgaggaagagctgagtgggacaaaggtatcgaaggatgatcgcagtgatgtggagagcagctc

SEQ ID NO: 752749 - DNA, 75 bp, Homo sapiens
aggcctgtgtgctgcagaacccccagaccatcatgtgatggtaatgcccgaaggagcagacacggtgtccaggcc

SEQ ID NO: 752750 - DNA, 74 bp, Homo sapiens
cctgaccatcttcgttgggatcagagatttgtaagactccagggcctcccagccgtgaataatctgatggttcc

SEQ ID NO: 752751 - DNA, 73 bp, Homo sapiens
gctgaccacaggaattggatctactagtgcagactttgccttcaaaagaaacagcatttttaaacactacaca

SEQ ID NO: 752752 - DNA, 98 bp, Homo sapiens
aggtgaggaagttggcgaaggaacggctctcctttgtttgcagttacagaatgtctgaaggggacagtgtgggagaatccgtccatgggaaaccttcg

SEQ ID NO: 752753 - DNA, 71 bp, Homo sapiens
gaaatctggctacttcctgtgccttagttctctgggcagcctagagggagagtcccgtattctcagagtaa

SEQ ID NO: 752754 - DNA, 100 bp, Homo sapiens
cgcatcactcccagctgcgcaaagcttgcgaggtggcgttagagacaaagcatggaggacacaagaatgggaggaaaggcggactctcaggaacttcatt

SEQ ID NO: 752755 - DNA, 100 bp, Homo sapiens
tcctgcatggcccagaggacagatgcagcggtggtgacgctgattgaagacgggaagaatgactccctgccgtctgagtccacgtcgcacaggtggcggg

SEQ ID NO: 752756 - DNA, 83 bp, Homo sapiens
gccaacttctgcctcgggccctgcccctacatttggagcctggacacgcagtacagcaaggaaagggataaagtgatgcctct

SEQ ID NO: 752757 - DNA, 100 bp, Homo sapiens
cattcaaccaggttgtgttgaagaggttaacgtccctaaaacccgccggactttctgtaagaagtgtggcaagcaccaaccccataaagtgacacagtac

SEQ ID NO: 752758 - DNA, 100 bp, Homo sapiens
ttgatctggagaaaaactggatgttggtagaaaaagcaagagtttgttatatagcagtgaccaagaatatggcccaggtgaccaaagccctggacaaggc

SEQ ID NO: 752759 - DNA, 75 bp, Homo sapiens
agttcgccaaagcgacaggagctgtgtttcccattaaacactaccaggacaaaatcaggccttacatccagctgc

SEQ ID NO: 752760 - DNA, 75 bp, Homo sapiens
attttggagaagttaaccacagcttcacagactaactctgtgacttcctggagactcacttcctagatgaggaag

SEQ ID NO: 752761 - DNA, 90 bp, Homo sapiens
cgccgaggcccagatgcgccaggaacctagaaagattgtacaatgaatggtgattctcgtgctgcggtggtgacctcaccacccccgacc

SEQ ID NO: 752762 - DNA, 83 bp, Homo sapiens
cgaggacataaggaactagtcacagtgttgctgcaacatagagctgacattaactgtcagacatatctgaagagatggattaa

SEQ ID NO: 752763 - DNA, 75 bp, Homo sapiens
tcatgctgaccaccaatcagatccgtaagctcctcaatcagtttgaaaacacaggccccccaccggcagataaag

SEQ ID NO: 752764 - DNA, 51 bp, Homo sapiens
gaagtgcagaggtttttttctgaaatgctgtgtttgcaagaaaaatggtgc

SEQ ID NO: 752765 - DNA, 100 bp, Homo sapiens
ctctccagcaacatcatcatggacacctccaccttcctgctcagggtatgcggccccctacctgacagtgttcagcgagaactccatcgatgtgtttgac

SEQ ID NO: 752766 - DNA, 96 bp, Homo sapiens
cccagatgtgcaacaaagtgcgatgaaggtgttgagctggcgagttcgcggaggctactattcaggaaatcttatccagatgagtacactggaagc

SEQ ID NO: 752767 - DNA, 74 bp, Homo sapiens
acattatgaagacattcgggaaaatggatggtgccatgacaatggtgtgaactacaagattggagagaagtggg

SEQ ID NO: 752768 - DNA, 100 bp, Homo sapiens
gcctgaagaaggtcagtgtgcttgcttggagatcaggacgcaaaggacttaatgactgacctgaagtctgagatctctggagacctggcaaggctgattc

SEQ ID NO: 752769 - DNA, 83 bp, Homo sapiens
ctggcccggaaacaggaggacgctatgcccactggaagggccaagtgctgaattcagatgagctccaggagttgtacgaaggc

SEQ ID NO: 752770 - DNA, 82 bp, Homo sapiens
aacagggacagcacctcatcccctggatgggggaccacaagatcctcatcgacagaaaactttagaaactgttcctttggag

SEQ ID NO: 752771 - DNA, 75 bp, Homo sapiens
gtacaatgaggcagccagcggatcttggctagagttgggaagacatcactgattatgtctctggtcagtgaagaa

SEQ ID NO: 752772 - DNA, 100 bp, Homo sapiens
gctctgaaggacttactgaaagatatgaatcagagttcattggccaaggagtgccccctttcacaggagggagcctgcgagcaaacgaggtggaaactgg

SEQ ID NO: 752773 - DNA, 51 bp, Homo sapiens
cccagatcccgcagtatctctttgaggagcttcccaagctcttccttcagt

SEQ ID NO: 752774 - DNA, 83 bp, Homo sapiens
ccaagaaaaaaagacgaaagaagaagaagagcaaagggccttctgcaggcccgatgagagaaagggaaagttaaggatgctgg

SEQ ID NO: 752775 - DNA, 100 bp, Homo sapiens
gtttttgagaatcccaccatggtgcagtttgatcaccggattctggtctcactatgttgcctggggtggtattgaagttctggcctcaagcaaacctcct

SEQ ID NO: 752776 - DNA, 97 bp, Homo sapiens
ggctccggaggcggcgggacagagcgcctgcgaccccagtcggtgctccggggaggtcacctgacgaggaggtgtcatggagaaactccagctgggc

SEQ ID NO: 752777 - DNA, 100 bp, Homo sapiens
ctcagttggaagcagccgatccagcctgcggagcctgtggggcaggtgcccagtcccctggaaggcagtgaaggggacggagacactgactgaggcgatg

SEQ ID NO: 752778 - DNA, 100 bp, Homo sapiens
ccgggagatcccaggcggtgacagagtggagccatggctagaggcatccagggcattgtggatgcctaccgccaagccctgccccaagttcgcctctatg

SEQ ID NO: 752779 - DNA, 95 bp, Homo sapiens
tcgagggcagccggcgggaggaacgctcactgtcagcgcctggaaacttgctcacaggctgggaggcggcagaatgcagccagaggagggcacag

SEQ ID NO: 752780 - DNA, 75 bp, Homo sapiens
gttctgatgttccactgaaatcacaatggaaagtcttgacttgactgtgccagcacttcaaatattgctagaata

SEQ ID NO: 752781 - DNA, 98 bp, Homo sapiens
aagcagcgtgagcagccggaggatcgcggagtcccaatgaaacgggcagccatggccctccacagcccgcagctatttcttttagaagagatgagaga

SEQ ID NO: 752782 - DNA, 90 bp, Homo sapiens
ttgctaaattatacaaacagcttgatgacaagaatcggctacagtctcaaagggcaatgcttctgcagggcactgaaagcctgaaccggg

SEQ ID NO: 752783 - DNA, 50 bp, Homo sapiens
gcatttcatggctatcatctacacgaagtgtttggattgtgagctatttc

SEQ ID NO: 752784 - DNA, 125 bp, Homo sapiens
ggctgttgttgcggttgttttccttctctccgtgcaacgctggcaagtctcaaagtcgccacagctgataggaagatgtcttcaggaaatgctaaaattgggcaccctgcccccaacttcaaagc

SEQ ID NO: 752785 - DNA, 75 bp, Homo sapiens
ggcgaacgcggagagcacgccatgaaggcctcgggcacggacacattcagctaacgtattttagcaggtggagtg

SEQ ID NO: 752786 - DNA, 75 bp, Homo sapiens
tctggttatgttcataaatttcgccgcacgtcagtcagtggctgaatccacagaggagcctgctggttctaatcg

SEQ ID NO: 752787 - DNA, 100 bp, Homo sapiens
ggcgactggagccatggcggagtcggcgcctgctcggacaatgcagatcttcgtgaagactctgactggtaagaccatcaccctcgaggttgagcccagt

SEQ ID NO: 752788 - DNA, 95 bp, Homo sapiens
ctctgctgcatcttccaatcttccaggaggaaatactatgtgaagtatgccggaaaacatttaaacgcaaagattaccttaagcaacacatgaaa

SEQ ID NO: 752789 - DNA, 75 bp, Homo sapiens
tggaaggaccagagcccagtcagctcaaaccactagttatacaggttttacgtaccctgggaagcaagtgtggtg

SEQ ID NO: 752790 - DNA, 100 bp, Homo sapiens
caagctggaagaggaaattaaccggagaatggcagacgacaataagctcttcagggaggaattcaacattcccacctcgggttgggagaggaccacggtg

SEQ ID NO: 752791 - DNA, 98 bp, Homo sapiens
gaatcttctcctgcctttaagccttccatgatccgctcccactttacacctatacacagaatgggattttacatatgctggacagaaataagagaatc

SEQ ID NO: 752792 - DNA, 97 bp, Homo sapiens
cccgacccggcccggtcaggccccatactcagggtggaaggaataggagaggcactgggtcctgaggagctgaggctgacaggctgggaacctgggg

SEQ ID NO: 752793 - DNA, 98 bp, Homo sapiens
gagcgtgctcacaaaccacacttggaagtcttgggagaggaaaaatgcactcggtgatggaaagagagccactattctgaagaacacttggccaaagg

SEQ ID NO: 752794 - DNA, 101 bp, Homo sapiens
gctgctgccgctgccgccctgagtcactgcctgcgcagctccggccgcctggctccccatactagtcgccgtttggacccaattaaatcctttgaagctcc

SEQ ID NO: 752795 - DNA, 76 bp, Homo sapiens
caggccagagcccaggtccccaggacagtgcagatctcacattcttgaaggtggcattgaagagcactaagatcgg

SEQ ID NO: 752796 - DNA, 88 bp, Homo sapiens
ggccagctgccgcgactgggaggagcgccggaacgccgaggcccagggtcctgggcccagtctgccctgactcagcctgcctccgtgt

SEQ ID NO: 752797 - DNA, 98 bp, Homo sapiens
aggaagtgctcttggggagcccaggccaagccatccattcttgggtcctttggaggttattcagcttctcaaggctggaaaagcgaaggaagtttcct

SEQ ID NO: 752798 - DNA, 98 bp, Homo sapiens
ctcggctacaacatttggcagaggaagatgagaatgtgcctactgctcctgatcctccaagtcaacatttacgtgggcatgggacaggcttttgcttt

SEQ ID NO: 752799 - DNA, 51 bp, Homo sapiens
ggggaaacgatccgctcccaaaacggtgctgagctgtgaggagagcatcag

SEQ ID NO: 752800 - DNA, 99 bp, Homo sapiens
aggggacaaaggagaaccaggtctcaaaggctacagaagaagtttccaaaaatctggttgccatgaaagaaattctgtatggcacaaatgaaaaagagc

SEQ ID NO: 752801 - DNA, 75 bp, Homo sapiens
atctgccaaaaataccagccaccctggttcaggaacaaagggcaagtgtccagagaatggctgggatgaaagtac

SEQ ID NO: 752802 - DNA, 76 bp, Homo sapiens
ctgcaaggctgagggacgagaacgaggagacccggtgagcctccattgataaaaggttggcttccttatcttggag

SEQ ID NO: 752803 - DNA, 100 bp, Homo sapiens
gtttgcccagatccatgagatgcaggaccttggggacaagctgcgcatgatcgtcatgggacacagaagggaactgcagcccggagttaaagccgtgcag

SEQ ID NO: 752804 - DNA, 97 bp, Homo sapiens
atgcgacctcaggaaggagatgagatgggatggaggtggataccacaccaacagttgctggacagtttgaggatgcagatgttgatcactgaaaatg

SEQ ID NO: 752805 - DNA, 50 bp, Homo sapiens
tcagagtccaaaatggtgatcaggaaatttgaaagaagccaacactaaac

SEQ ID NO: 752806 - DNA, 50 bp, Homo sapiens
cgaggctgctaagagactaagaaggtgggagtcaatcattttgacaagtc

SEQ ID NO: 752807 - DNA, 51 bp, Homo sapiens
aggatttggacggtttctcattgatttcaattctgcttctcagaagatgca

SEQ ID NO: 752808 - DNA, 89 bp, Homo sapiens
aaggcactaccaatatgttatctccagatgccgcgcaactgtctgatctcagttcatgggaagaggaagaacgtctgagaaataaaatt

SEQ ID NO: 752809 - DNA, 82 bp, Homo sapiens
tttagccatgtggatacctacggagcacgagaaatacggcgtgggtatggcacagtcacaagggtgggtgaaaagatacatc

SEQ ID NO: 752810 - DNA, 50 bp, Homo sapiens
ggggaatctgctgctgcatcgtgggttcagctatgtggacctagtggaag

SEQ ID NO: 752811 - DNA, 95 bp, Homo sapiens
ccccgtacttctggacaagtaccctgaggccggctgcagagctggactatgtggattaatccctcacctcctgggcgatgtggttttcttgtggg

SEQ ID NO: 752812 - DNA, 100 bp, Homo sapiens
agcgaagccttgaaaaagctgccctgagacggtgtcccgccgaaagagggtcctccgcggaagggcagctgaatggactccagagcagccttaaccctgc

SEQ ID NO: 752813 - DNA, 132 bp, Homo sapiens
agcgtgaacatggtgcaaagataccagtctcctgtccgagtctacaagtacccgtttgagctggtcatggcggtactaggttttgacaagcttgcatcatgcgtgagtataagctagtcgttcttggctcag

SEQ ID NO: 752814 - DNA, 50 bp, Homo sapiens
aacaatagagctcgaccttatctctgaatcagagatcattgatttcttcc

SEQ ID NO: 752815 - DNA, 101 bp, Homo sapiens
gggcgccctccccgccaaggcccgtgcgaggtttttcgttggaatatacgttgcacatttatggcgattctgagtgtgagggcagacttctgccaggctca

SEQ ID NO: 752816 - DNA, 100 bp, Homo sapiens
gccaggagaacagatgatccctacagcagatatgccaaagtcacccttcaaaagacgacggatgcctggtgtgcaggagtatatacaacagcctattctc

SEQ ID NO: 752817 - DNA, 88 bp, Homo sapiens
gcagatccttcccagtttgaacttttaaaagtattagggcagggatcatttggaaagtaagcactatcctttgtactccctcaacgtg

SEQ ID NO: 752818 - DNA, 100 bp, Homo sapiens
tggagcacgcgctgggctccggcctggtgaccgatgggaccatggccaccgaccagaggaaagtcaaggttcagattctggagatgccctccaagacgtc

SEQ ID NO: 752819 - DNA, 96 bp, Homo sapiens
cccttcctaggagaggaagaactttaaattcatccttcagagaagctcgagaagagataccatgtttgtgtggaagtgccccgtgtttgctatgcc

SEQ ID NO: 752820 - DNA, 75 bp, Homo sapiens
ggccacgaggacgtcaccatgctgggctcaaaatgcagagaactcaaagatattcatttcggccagtgttacaag

SEQ ID NO: 752821 - DNA, 87 bp, Homo sapiens
gcaatcctaccatgtcagccttcccagtagctggaactacagcccctgaatcctatgaggaactgagatctctgttgttaggaagat

SEQ ID NO: 752822 - DNA, 83 bp, Homo sapiens
gttggaagcagccgatccagcctgcggagcctgtggggcagatgaggaaaatgaggcccaaagaagtgatgccacttggttaa

SEQ ID NO: 752823 - DNA, 100 bp, Homo sapiens
ccatcatggacgaggactactacgggagcgcggccgagtggggcgacgaggctgacggcggccagccacccgtgggaaactgttacaacagctgcaatgc

SEQ ID NO: 752824 - DNA, 80 bp, Homo sapiens
cttgctgctgctcaaagctgctgccgccccttgggctaaaagctcaccatggatgatgatatcgccgcgctcgtcgtcga

SEQ ID NO: 752825 - DNA, 75 bp, Homo sapiens
gaggggagcacttcctggacccaggaagggagagtcttcttccaaggtgtttcttatggacaaagcagtagtgac

SEQ ID NO: 752826 - DNA, 138 bp, Homo sapiens
ccagagtgtcttgggccctgtgaacctgggaccagtgtgaatttggaagggatcgtgtggcatgaaacagaagaaggtttccaatacttatctacaggaatcgccatgaccccagctctgagggaggcaacagcaaag

SEQ ID NO: 752827 - DNA, 49 bp, Homo sapiens
tcttcctcctccgccgttgacagttgctctggctatatcaaataaaagt

SEQ ID NO: 752828 - DNA, 90 bp, Homo sapiens
ggggagctagtggaagttactgccgcgccaccgagtccggaccggagactttggggcctaactaggtatgatctcgtgaaatcttgagag

SEQ ID NO: 752829 - DNA, 50 bp, Homo sapiens
cgacgaggaggaggaggaggaggaaaaagatgcctgaggaagtgcaccat

SEQ ID NO: 752830 - DNA, 100 bp, Homo sapiens
catctttctgacagcgctgtcccggccaggaaccactcgagatgctgctgtgcagaagattgagactattatcaaagaacagtttgctcttgaaatgaag

SEQ ID NO: 752831 - DNA, 82 bp, Homo sapiens
ctgctcttccctgagagtgaactttccatccggataggtagagctgggcttctttcagttaaaggcattaggatttcctgaa

SEQ ID NO: 752832 - DNA, 98 bp, Homo sapiens
tttcagatactctgactccacctttacttttacctacgttggcggccccagaagagcaaacatgaacgttggagttgcccacagtgaagtgaatccaa

SEQ ID NO: 752833 - DNA, 75 bp, Homo sapiens
gtgaaagtgtataactacaatcacctaatgcccacaagctatcagttgagggatttgcagttgataaaatggctg

SEQ ID NO: 752834 - DNA, 100 bp, Homo sapiens
cttctttggagaatgatatcaaaccacttaacagagcgttccaaaaagaggactctccagctactttttattgcatcagtatgcagtggtttagagaatg

SEQ ID NO: 752835 - DNA, 82 bp, Homo sapiens
agattcgcagtggtcgcttcttctccttggtccactggtgtgtcctccccttccgagtgctgctggtactcacctcacatcg

SEQ ID NO: 752836 - DNA, 74 bp, Homo sapiens
gcttagcgcactggaggagcggcgggcttcagacaggtgccttatgcccgctcagaggcccacctcacagagct

SEQ ID NO: 752837 - DNA, 133 bp, Homo sapiens
cgctcctgggctgcgcgcgcttttgggctgcgccaccgacagagacatctggaagccggagctagtggaagataaaggcatgacttcctggcaccacagggaaaatcgggtgcaagcccagaaactatttccc

SEQ ID NO: 752838 - DNA, 74 bp, Homo sapiens
attgacatttaattttagggtcctttatatagaagggagagtagagccaatggccaaaggccctgccaagaatt

SEQ ID NO: 752839 - DNA, 90 bp, Homo sapiens
ccatcctcggcgcgactcgcttctttcggttctacctgggagaatccaccgccatccgccaccatgctggagcagatccgcagggacatc

SEQ ID NO: 752840 - DNA, 82 bp, Homo sapiens
ctatggatctgctctaaaccttatagcctgcttatgggggaagtgtgccccctaccaccggagccagagaatggtggctaca

SEQ ID NO: 752841 - DNA, 97 bp, Homo sapiens
tgctcgcgctactctctctttctggcctggaggctatccagctgctgctcacggccgtgaactgctacagcgtgaaggccgccacccgggtccagga

SEQ ID NO: 752842 - DNA, 75 bp, Homo sapiens
tggttcagcggagaataacatatcttcagacaatgactgatgtggtgggtaacccagaggaggagcgccgagctg

SEQ ID NO: 752843 - DNA, 90 bp, Homo sapiens
gcaatattgcaatataggggaaaagcaggattttttatcaagcagaaatgcatcgaacaacgagaatcaagatcactgagctaaatcccc

SEQ ID NO: 752844 - DNA, 75 bp, Homo sapiens
gactgtattattccaggtcctatctccaagaatatcaaacaggatcccattgaagataccacgctgcatgtgtcc

SEQ ID NO: 752845 - DNA, 85 bp, Homo sapiens
atccattacgcacatttaaagataccatctaccttactcagagcgaaaagctgttgctatatgatacagtccagagtgaactaga

SEQ ID NO: 752846 - DNA, 98 bp, Homo sapiens
ggacaagtacctttatgaaccagtgtatcccaagttcagcagactgtacaggatctttttggcagagccccaagtaaagctgtcaatcctgatgaggc

SEQ ID NO: 752847 - DNA, 90 bp, Homo sapiens
agtaatcagtctttgacaagtgatgagaagctgtcggagcttcccaaggtcctgggaactccaacaagggagcaaatcagagaaatgaac

SEQ ID NO: 752848 - DNA, 101 bp, Homo sapiens
gaggttttcaggaaacttgcagcaaagccattcgggttggagtaattgccaaggccacctttgatgccatttctaagacctacagctacctgacccccgac

SEQ ID NO: 752849 - DNA, 82 bp, Homo sapiens
gcggctcttcccgcccgccttccgccgtctcttcgagttcttcgtgctgctcaagcgggctgacgcacgaggcacacaggaa

SEQ ID NO: 752850 - DNA, 75 bp, Homo sapiens
gtgtttgtgaaacagagaaagataggcggccatggtccaaccttgaagctcctttagcggcagagttttccgagt

SEQ ID NO: 752851 - DNA, 100 bp, Homo sapiens
acctcgagctgcggtagcagcgactcatgagagcgcggccggaggacagacaagttggatggcttgaggactggtactaaaaggaaacgtgactgggagg

SEQ ID NO: 752852 - DNA, 100 bp, Homo sapiens
ggagctgttcgacatccagatgcccggccacgcgcccggcagggccaggaggacgccaatgccgcaggcttctccagggaaagtgaccgaggcagtgaaa

SEQ ID NO: 752853 - DNA, 75 bp, Homo sapiens
tcagcagaagaaacacttcctataaatctcgcccaaacaggaaagtttggaaattttagcattcaggtgccagga

SEQ ID NO: 752854 - DNA, 90 bp, Homo sapiens
tcattttccagattgatgaagtctgcctcagagaaggggaggtcctgtaataaagagggatccgaacaagctcagaaagaaaatgaattt

SEQ ID NO: 752855 - DNA, 90 bp, Homo sapiens
cagcctcctacctgctgattcctgcagcctcctatgtgctcccagagtaatcagttcaagaagttccctcagatgacctcatatcaccgg

SEQ ID NO: 752856 - DNA, 99 bp, Homo sapiens
gccagatgcagatctgaagacctattttactgataagaaaacacatctttacacactaagagccagatgaccaggatgccccagatgagcatgagccct

SEQ ID NO: 752857 - DNA, 111 bp, Homo sapiens
gcagtacgggaagaacttcttcagaattagaaaggagctgcttcccaataaggaaacaattcgacggaggcgccttgcacgacttgctggtggacagacctctcagccaac

SEQ ID NO: 752858 - DNA, 90 bp, Homo sapiens
cagataatgaaggaagaaaacacaggagccggagcagaagcaaagagagttattgatttaggagtcatgactccatgtgataagatactg

SEQ ID NO: 752859 - DNA, 100 bp, Homo sapiens
ggagctggagcgaccgagagaggcctcgtgggctgtgcggctatcctggagacagatgacagctctcccttggatggctttgctggttccgcaccagcca

SEQ ID NO: 752860 - DNA, 101 bp, Homo sapiens
cgagccagccgctgttttgccggaggagcccctcaggccgtgtgcctacaggggttgtggaaggagacgctgcccccggtctatgccctggaattgctgac

SEQ ID NO: 752861 - DNA, 97 bp, Homo sapiens
tctcttcggctgccccaatccccggcagctctctcaggtgctggagaatctggtaaaagcaccattgtgaagcagatgaggatcctgcatgttaatg

SEQ ID NO: 752862 - DNA, 98 bp, Homo sapiens
atacatccaggaaagacatggagattctcttaaaaagtattcacaggcctccactgggctctcagtaggtgggatttgtcagcagttctcattgcctg

SEQ ID NO: 752863 - DNA, 74 bp, Homo sapiens
aagggaaagctccagatactaaggctggaagtcatccacaacaaacacaaaaattggaagaaattaaagagaat

SEQ ID NO: 752864 - DNA, 100 bp, Homo sapiens
aagtcagcgaggcctacgtgagcctcctaggaaggccagaactatcccgacctccacctgccctgctcggagctggagtgctggatccctggcacctgcc

SEQ ID NO: 752865 - DNA, 90 bp, Homo sapiens
tatctgagactggataagatgaccttcagtgtgctgctcaaaaacaggaaatgtggctttagataatctacagataaaagaaaatgccct

SEQ ID NO: 752866 - DNA, 75 bp, Homo sapiens
atcgccacatccggtcctcggttactatgcctggtccgacccccagtggcactaacgtgggatcctcagggcgct

SEQ ID NO: 752867 - DNA, 100 bp, Homo sapiens
ttgtcatcgtggggcatgtggcaaaacacacagctgagcgcccgattgaccgccagcgatacgacgagaacgaggacttgtcggacgtggaggagatcgt

SEQ ID NO: 752868 - DNA, 100 bp, Homo sapiens
ttctgtggagaataacggctgcacctggagattgacgcagagtgggcggcggtggtgaacattaaccaggtggtatttgttggaaatttcttgagaatta

SEQ ID NO: 752869 - DNA, 75 bp, Homo sapiens
cagcttctgcacgacgcactggcccaggacctgcacaagtctctggcatctctatcccctatgaggcaccacgta

SEQ ID NO: 752870 - DNA, 100 bp, Homo sapiens
ctgctgccatgtgaggtgtgcctttcaccttctgccatgattgtgaagcctccccaccacatggaacggcttgcattgatgacaatgttgatatggtgaa

SEQ ID NO: 752871 - DNA, 109 bp, Homo sapiens
ttttgtgaagcggcagctgaggagactccggcgctcgccatggccgacgaaaagcccaagatgaaggatttgggggcagagcacttggcaggtcatgaaggggtccaac

SEQ ID NO: 752872 - DNA, 82 bp, Homo sapiens
tccggggcgcggagaagctgcatcccagaggagcgcgtccaggagcggacccgggaacggcaggagcagctgatgggatatc

SEQ ID NO: 752873 - DNA, 98 bp, Homo sapiens
gcggagactgcatcaggctctcggtcacccgtgtgaacagaaagtgagaggttgtagcacattgccaccgtccagatctcgggtcatctcaaacgatg

SEQ ID NO: 752874 - DNA, 87 bp, Homo sapiens
gagcagtgcttgctgctttttctaactatttcaagatgatatttattcaccaaacaagaactacagttcctgaggaagaactaaatc

SEQ ID NO: 752875 - DNA, 74 bp, Homo sapiens
tttggctgtgataggagtatttttaaagatgcgtctgttactagagtggagagtctaccttcgtctcacatgtg

SEQ ID NO: 752876 - DNA, 100 bp, Homo sapiens
atgtgaccaatgctttccacccacaaagattgaacgacatgccatgtactgcaatggtctgatggaggaagatacagctgtgcggtcagagaagaaacgc

SEQ ID NO: 752877 - DNA, 90 bp, Homo sapiens
gcagccggagcccgggaggggccgcgccgccaccgtctgaactaggatgtcccgacatgaagtgtgaaatggccaccagtggtgacagac

SEQ ID NO: 752878 - DNA, 100 bp, Homo sapiens
gaaacacagtcgaaaagaatactgtgaattatgcaagcacagatttgcttttacaccaagggcggatgtccacgcgagggacccccgccgtgggatgtcg

SEQ ID NO: 752879 - DNA, 97 bp, Homo sapiens
gattcctcctccttggtcgccgcgtccttggctggcgtgacactcatgaggaccatgatacttccactgagaatacagacgagtccaaccatgaccc

SEQ ID NO: 752880 - DNA, 82 bp, Homo sapiens
ccgaagcgttcgtatctggaagctcctgacccctgaggattaccagcgatttctagacctgggcatctccattgctgaaaac

SEQ ID NO: 752881 - DNA, 75 bp, Homo sapiens
tggtctacaagactctcttcgctctttgcatcttaactgcaggtaaagtgaacagagttatctgtgacattccat

SEQ ID NO: 752882 - DNA, 82 bp, Homo sapiens
atgatcgacttcctcacccgcgcctgcgacctcggtgtcctgtggccaggcggaaagcagtgagaagcccaacgctgaggac

SEQ ID NO: 752883 - DNA, 109 bp, Homo sapiens
cgctctgctgtgggcgctgctggcgctctggctgtgctgcgcgacccccgcgcatgcccttgtattttcacacatccctaaaccaccctcatatcgtggctgtggtgga

SEQ ID NO: 752884 - DNA, 75 bp, Homo sapiens
ctcagttggaagcagccgatccagcctgcggagcctgtggggcaggcctccggtgtggctgtctctgatggtgtc

SEQ ID NO: 752885 - DNA, 75 bp, Homo sapiens
ctccccgccccgccgcggccatggaggacgagcggaaaaacggagcctacgcaggaggccactgtctgcagctcc

SEQ ID NO: 752886 - DNA, 75 bp, Homo sapiens
aaggggagttttacttacgtaaatggatgtagaccagactcaagcatctccgcagacgctccctgacggcccatt

SEQ ID NO: 752887 - DNA, 90 bp, Homo sapiens
ggggctcagtctgttcttgtgaggctgagggtctgggggtcttacaggagaggggaccgtcctgggctggcctggaccatggtgctgctc

SEQ ID NO: 752888 - DNA, 96 bp, Homo sapiens
ggggcgcagggagcgggagccgccgccgccgccgccgccgccggagctaacctcggggaccgagatgcagtgtccacaggatgaaatgtccgagtc

SEQ ID NO: 752889 - DNA, 75 bp, Homo sapiens
gctgctaccccactcctgggccgtccctgaagtctgaaatggttgtgacaaataatctcttggatctgccgcccc

SEQ ID NO: 752890 - DNA, 50 bp, Homo sapiens
caaagggtggtgaagaactaagctaccggaagatttctggggacacttgt

SEQ ID NO: 752891 - DNA, 75 bp, Homo sapiens
attctgatgaagaagttattcaagatggaatagggtttggtggtctggaagcaatgaatagcatgggaggatttg

SEQ ID NO: 752892 - DNA, 74 bp, Homo sapiens
ttgggaaacgctccgagacaaatgtgaaagatgttgcagaagtgttccagaagtggctgaagatagaaggaaaa

SEQ ID NO: 752893 - DNA, 74 bp, Homo sapiens
ccctcgtcgaaaggattggattggcatctttagaagctccgaccagccagcctggtggtcctgcccaggtccct

SEQ ID NO: 752894 - DNA, 74 bp, Homo sapiens
ggacctcgagggcctccaccagcagggcttctgcactgactcctgagactattttaactaggattggttatcac

SEQ ID NO: 752895 - DNA, 74 bp, Homo sapiens
agagaaatataaagaagctttagctaaagacagagtctcgttctgtcacccagcctggtgtgcagtggttcaag

SEQ ID NO: 752896 - DNA, 76 bp, Homo sapiens
tacaaggtcgcctacgtgcagctgaagatggctgtgccacccacgtatgccgatcttggcaaatctgccagggatg

SEQ ID NO: 752897 - DNA, 74 bp, Homo sapiens
tctatattcaaaaattctaggaccaaaacctcagaataactgaagtgaagtgatggactccgatttggagagta

SEQ ID NO: 752898 - DNA, 50 bp, Homo sapiens
ccttgaagaggtccttcacatcccttccttgcatcccagggatgaagccc

SEQ ID NO: 752899 - DNA, 124 bp, Homo sapiens
ggaatatgccaaggaaaaactggagagcttcatcaaaaatagtgatagctttgataaagaaactccagaaaatcttgccaaacttctgaccaggatgtatttaaaatcagaagtcataggtgat

SEQ ID NO: 752900 - DNA, 100 bp, Homo sapiens
ctgggttctcaatacctatttgggaaaatatgtcaataacctgaacactgaccagctctcagttgcacttctcaaagtgatgagctactcctgggtcatg

SEQ ID NO: 752901 - DNA, 100 bp, Homo sapiens
tattacccctatctcagcagtgatggggagagccatagcgcaacttgagttggtggaaccaagtggctggattcatgttcccttaactgacaatcataag

SEQ ID NO: 752902 - DNA, 50 bp, Homo sapiens
caatgacatccttcacgagatgttgtcggccctgggccgggagctggagt

SEQ ID NO: 752903 - DNA, 75 bp, Homo sapiens
gagagggattacagaaaggagaacaccttatttcaggttttcctttggaatatggataaatacaccatgatacgg

SEQ ID NO: 752904 - DNA, 75 bp, Homo sapiens
gttcgtcccctttgtgaggcccgggatgggaggtacgaagatgccctggtgctcctgctcacagaggtgttgaat

SEQ ID NO: 752905 - DNA, 97 bp, Homo sapiens
gacatggtggtgtcccacctttttgggaaggctttgataaaattcaagagttatttgtattttgaggaaaaagactttgtggataaagcagagaaga

SEQ ID NO: 752906 - DNA, 74 bp, Homo sapiens
caagcagccaaccatgctcaacttcggtgcctctctccagcagactgcgaacactctgctccagccaaggtggt

SEQ ID NO: 752907 - DNA, 121 bp, Homo sapiens
cggaatctgcagagtgaagtgaaaatagcaaacaatccaggtggcagggagtgcatcaaaggtgtgaacgcaggagttggggacttttcccagccagacacctctccggacaccaatggtg

SEQ ID NO: 752908 - DNA, 98 bp, Homo sapiens
tgaagagttgtcccagctcggcccgcgggggagccccgggagccgcacggaccagaggagcgagagcagcaagaaccacacccagcagcaatgtcagc

SEQ ID NO: 752909 - DNA, 100 bp, Homo sapiens
gaaattcctgacgttcattgatctggccgagtacagatgctgccccaggcggtgtgcctgctgcatgcgctgctggagaagggacacatcgtgtacgtgc

SEQ ID NO: 752910 - DNA, 83 bp, Homo sapiens
atgaagttcgagcactaatatttaagaaagaagatgttaactttcaggtataatgggtctctcccaaatggcgatagaggaag

SEQ ID NO: 752911 - DNA, 98 bp, Homo sapiens
gcccgtgagtggaggtgctgccctgggcactcaggagtgagctgcgaggaagacggcgatctcgatgtcgtgtttgcctcttcctctaagtgcggaaa

SEQ ID NO: 752912 - DNA, 83 bp, Homo sapiens
tggagcctcagttggaagcagccgatccagcctgcggagcctgtggggcagtgagtgacctgcaggaagaaggcaagaatgcc

SEQ ID NO: 752913 - DNA, 75 bp, Homo sapiens
tggatattcctggaatggaggaatgcttgaatatagccagttccattgagatgattcctccccggggctgtgctt

SEQ ID NO: 752914 - DNA, 90 bp, Homo sapiens
aggggcaagcatggcgtgggccgtattgacatcgtggagaaccgcttcattggaatgaagtcccgaggatcccttggttccagtacccca

SEQ ID NO: 752915 - DNA, 100 bp, Homo sapiens
ccccactccccggggagcactactccgagaagtcttcagccagggttgacgagcccatgaccatgttcctctggacactttgtactagcccctctgtcct

SEQ ID NO: 752916 - DNA, 50 bp, Homo sapiens
tgctgtggggcttgtgaagccaaaagcagtagagacggggtttcgccatg

SEQ ID NO: 752917 - DNA, 82 bp, Homo sapiens
ggaagaagagccagggcagcaagaatcctcagaagtactcggacaaggagctgcagtccctgaagaggaaggagaaggaata

SEQ ID NO: 752918 - DNA, 74 bp, Homo sapiens
ctgaaaacaacatcatgcagtggaatgcagttatatttggcctgctcaacctgctgatgaacctgcagaaaagg

SEQ ID NO: 752919 - DNA, 97 bp, Homo sapiens
tgccaagagacatgttagaaggacaactgaagaaaaggtgactggtctcatgagccctgaagaatgaactcagaggaggttgtttacatgaggttct

SEQ ID NO: 752920 - DNA, 50 bp, Homo sapiens
attcccaagccagagctttccaggccctcgggaccaaggatcacgtcatg

SEQ ID NO: 752921 - DNA, 75 bp, Homo sapiens
tggggccatttagtaacttctttgcaaggtgctgactgggttacttttttaaacactaggaatggtaatttctac

SEQ ID NO: 752922 - DNA, 50 bp, Homo sapiens
ctcatggagaagccccggagtattgagaaagctctgggtgtgcggcagta

SEQ ID NO: 752923 - DNA, 100 bp, Homo sapiens
ctgggatgttggcagccacttcaaaatcagacctctgtggcagcattttttccagaacacaaaaggagccaaaaacctgtatatcatctccgtgaagggg

SEQ ID NO: 752924 - DNA, 83 bp, Homo sapiens
ctggttcctcaaacgatacctcagcagcagagttaccaacaggtaccgaggagaaggcattgtatatgggacactagaggagg

SEQ ID NO: 752925 - DNA, 100 bp, Homo sapiens
aaaacttgccaggttccagactctatgacatctgctgcctgctcggggagtacagacagtgaggaaagtacagactctgaagaagaagatggagcaaagc

SEQ ID NO: 752926 - DNA, 101 bp, Homo sapiens
cctcgtggctgcgtcaccgccgcccccccagacaagatggacaccgcggaggaaggacttgtcttacaaggaccggcactggcatgaagcctgtttccact

SEQ ID NO: 752927 - DNA, 98 bp, Homo sapiens
ggaaagttgactgaaaatggggcggaagaaaatacaaatcacacgcataatggatgaaaggaaccgacaggcggctgctgcagatgggcatttataac

SEQ ID NO: 752928 - DNA, 48 bp, Homo sapiens
caagaaagaccatcaagtttaccagttttgctgttactgctcagtgta

SEQ ID NO: 752929 - DNA, 74 bp, Homo sapiens
ccgcctcatttgcgccttgcagcactgctggaccagatcctttttactgggcctggttgccccaggcgaaagtc

SEQ ID NO: 752930 - DNA, 99 bp, Homo sapiens
cgatcctgaccagtgcaaccacgggatggtcaactttgtagtgtgccaactctttgccttgctagcagccatttggtttcgaacttatctacattcaag

SEQ ID NO: 752931 - DNA, 50 bp, Homo sapiens
ttctccttctggtgtggggcccgagacgaagcttcacaaaagatgtctaa

SEQ ID NO: 752932 - DNA, 100 bp, Homo sapiens
ggacgagagctccgtgcgggtggctgtcaggtatgaaattgaaggctgtgaagtgatttgggccattaaagataaagctatagggaatactttcttcgat

SEQ ID NO: 752933 - DNA, 100 bp, Homo sapiens
cttcgaaataaggccatcatggagagtttgagtaaaggtggaaacataatggaacagaattttgagattgcttatgcccgtatagagggggatatgatag

SEQ ID NO: 752934 - DNA, 90 bp, Homo sapiens
cctgcggccagcgcgtcccccgactcgccgcccggagaccccgaggctccaacgaggaatccctgcagcagcagcagcaggaacaagagg

SEQ ID NO: 752935 - DNA, 90 bp, Homo sapiens
gttctaatgaggtcctatctattactgctatgttgtcaggtaaaatcccagaggaatccaaagccctctctttattggctcctgctccaa

SEQ ID NO: 752936 - DNA, 97 bp, Homo sapiens
gctcggagatgatccagcgcaaagaggccatgtggaagtgttacatcaccttttgcttggaaagatttactaagaagtcaaatagtgggttccttag

SEQ ID NO: 752937 - DNA, 83 bp, Homo sapiens
gcttggaaaaacgtgtgggtacgaccttggaaaggacttagaagccttacaaatacatctgtgcattcttgcttcagacttta

SEQ ID NO: 752938 - DNA, 82 bp, Homo sapiens
agggattctttgactcagaaactacaggtgcctcgagtctttattggtaaagattgtataggcggatgcagtgatctagtct

SEQ ID NO: 752939 - DNA, 75 bp, Homo sapiens
tctagactttttggacgatgtgcggcggatgaacaagcggcagaacggaaagatgctgaaggatgggagaccgtt

SEQ ID NO: 752940 - DNA, 99 bp, Homo sapiens
cttatactcctcccagtgacgggtctggagtgcgtgggggaccggctgttggcgggagcaggccgggctctcgccatgggtcactgtcgcctctgccac

SEQ ID NO: 752941 - DNA, 80 bp, Homo sapiens
tcaccacactggccaacaaccagtgcatggctacagagagcgtggaccatgaagtactccaaagattcaggtttactcac

SEQ ID NO: 752942 - DNA, 96 bp, Homo sapiens
ctgacatacatttttgggaaggtagaagcatttggcacagaagtgctgccaggagaaactaagttgctgaacggggccgtgggtctggatttccag

SEQ ID NO: 752943 - DNA, 75 bp, Homo sapiens
acgcacaataatatggctccgatgggctcaaaggtatgctggtatcctcctgggcatcacaaatacatttgccac

SEQ ID NO: 752944 - DNA, 101 bp, Homo sapiens
tccggggcggccgcggctccatggggctcctggggctcctgagcctgctgcactcggccttcttcggggaccagcttcggaaccaaaaagaagcttcccag

SEQ ID NO: 752945 - DNA, 78 bp, Homo sapiens
gcgtcgcagcccccgccgtagccgcctccgagcccgccgccacatcctctgaggtctccgtgaggccgggtgacgctc

SEQ ID NO: 752946 - DNA, 100 bp, Homo sapiens
agtgttgctgcaacatagagctgacattaactgtcaggctggagatataataacagagctggaatctgtagatgatgactggatgagtggagaacttatg

SEQ ID NO: 752947 - DNA, 102 bp, Homo sapiens
gctggatcgcagcgctgcctttccttatgaagaagacacaaatgaaagctcaagaagtggagctggctttggaagaagtagaaaaagctggagaagaacaag

SEQ ID NO: 752948 - DNA, 75 bp, Homo sapiens
gagaccccgaaaacggaagcgcagggagaaggaagaggtgtttgaaaagtgtcgagttatagcagtgctggattg

SEQ ID NO: 752949 - DNA, 82 bp, Homo sapiens
ccgcccgccttccgccgtctcttcgagttcttcgtgctgctcaaggagccttcacgtaaatgggtccagtcatgcctcccag

SEQ ID NO: 752950 - DNA, 100 bp, Homo sapiens
cgactgacactcgcagccccctcgggaggcccgacgcgactgggcccctcagacatatctgaagagatggattaagaatgctttggattaaggattgtgg

SEQ ID NO: 752951 - DNA, 116 bp, Homo sapiens
ggactctggccgcggctactacctggagatgctgatcgggacccccccgcagaaggtacccactgatggtaatgctggcctgctggctgaaccccagattgccatgttctgtggca

SEQ ID NO: 752952 - DNA, 74 bp, Homo sapiens
acggccggcgcttacctctgctacaggccaggcccagacatgtccgtccttgtaagttaaaagcttccatggga

SEQ ID NO: 752953 - DNA, 98 bp, Homo sapiens
attgaggcagatcacagataatattttcctcactactgctgaggagccagcaccgctctttgaccttgccatgcttgccttagatagtccagagagtg

SEQ ID NO: 752954 - DNA, 100 bp, Homo sapiens
ctggggcgtcttgcagccctatgagcatctcatctgcggcaagaacgccaatggaaaatcctgccttgcttcgttgggcctatgcaagaacaataaatgt

SEQ ID NO: 752955 - DNA, 71 bp, Homo sapiens
tgatttcatgtgcgatgatgaggaggactacgacctgtatgaaatgcttcatgtcacacctccaatgagcc

SEQ ID NO: 752956 - DNA, 75 bp, Homo sapiens
gagatcccaaacccgctgaaggacggggattgcgtcaacagctacaacctcctgttctttgcgtctggaggaggc

SEQ ID NO: 752957 - DNA, 82 bp, Homo sapiens
tggaggaaggagttcaccaccatcaagcggagctggagtttgttcagatcatcatcatcgtggtggtgatgatggtgatggt

SEQ ID NO: 752958 - DNA, 95 bp, Homo sapiens
aacatttcagtggaaggaaacttacatggttacattatctgtgtacagtttcagaagaggagccccgccgaggcatgagggccgtgctcccccca

SEQ ID NO: 752959 - DNA, 74 bp, Homo sapiens
cagctgcccggtgcccgaggaggcagccaagctcatggcctgccactgcgtgccctagtgtgttaattgtaacc

SEQ ID NO: 752960 - DNA, 90 bp, Homo sapiens
tccagaaaggaagcaaagccacagatttgtcaactggtagctacagcaagctgggtagcaggcagatccaaaggatatcatgaagtttcc

SEQ ID NO: 752961 - DNA, 75 bp, Homo sapiens
gcaccgaggaccagctcaatgacaggaatggaagttggatacactttgtgacttgtacgagacactgaccattac

SEQ ID NO: 752962 - DNA, 100 bp, Homo sapiens
accatgccagagccagtttattttcactgtgcagctgttacaccagtcctctcagggtgcgccatcattgtccgaggtcagcctcgtggtgggcctcctc

SEQ ID NO: 752963 - DNA, 101 bp, Homo sapiens
acccgcaccccatctggaccgcatcgctgaatgtgcccggacctgcgccttctggcttagaccatgctcagcctccaagcagccttgtcatcgacaaagaa

SEQ ID NO: 752964 - DNA, 106 bp, Homo sapiens
tccgccttctctgtcagctctttccccgtcagcatcccagccgtgctcacgttacagaatgtctgaaggggacagtgtgggagaatccgtccatgggaaaccttcg

SEQ ID NO: 752965 - DNA, 90 bp, Homo sapiens
ggccccgggcagcggacaccctgaaggtcccggtgctcacttggacatggttccagcaacagatagaaatgctttaagttcactctgggg

SEQ ID NO: 752966 - DNA, 98 bp, Homo sapiens
cgctgacgggcacgctgactggaggctggcggacaggcgacagcgacctgcggcagacactctgacctggtcacagccagagacacttggaaatcctc

SEQ ID NO: 752967 - DNA, 75 bp, Homo sapiens
ctgttatgacgtagttttggatagcaaacttgatgagtggatgccaacaaaagctcctctggacccttcccgctg

SEQ ID NO: 752968 - DNA, 83 bp, Homo sapiens
ggaaattaattgctatcaatgcgaatgatcctgaagcctcaaagtttcatgttcaggcccatgaagttcatcagaaaattctg

SEQ ID NO: 752969 - DNA, 82 bp, Homo sapiens
gagatcttccgcaacctggagaacgccaagcgcttcgccatcgacataggaaatctggcattttttaaagtttgcgccccac

SEQ ID NO: 752970 - DNA, 100 bp, Homo sapiens
cgccagcacctccgccacccctccgcagagcaacgggggcgggggcggcaagcagaggctgacccgcggctgattgagtccctctcccagatgctgtcca

SEQ ID NO: 752971 - DNA, 75 bp, Homo sapiens
gttcttcaacacctacagcgacctgggcatgtacatgtcccagagcaagcacacggaggcccgggagctcatgta

SEQ ID NO: 752972 - DNA, 97 bp, Homo sapiens
ctgggccctgaggctgcaccaagtggcgaaggagccggctccaagtcgtttccacttgttccatgtgacacagaccagcctcaagacaagcccccag

SEQ ID NO: 752973 - DNA, 75 bp, Homo sapiens
gagggcacaaaataaccacttaccccttctcaccgaggaagagcgggagaaaggactgttggcaagagtagcaag

SEQ ID NO: 752974 - DNA, 100 bp, Homo sapiens
cagagagcacagcttcttggaggagcacaggcgcggcaattgcaaaaaagcaagcttggggctagtttgtgaaataggtcttcgttgccgtacatattat

SEQ ID NO: 752975 - DNA, 73 bp, Homo sapiens
gacaagtacatcgccaagtttcagggagaagacacggtcgtgatcgcgtctgatgccaatgcaagttacttaa

SEQ ID NO: 752976 - DNA, 74 bp, Homo sapiens
ccgcgcttctgtccgcctgcagtatgtgccaagagttgtaacctctgcacaacagaaagcaggaagaactatta

SEQ ID NO: 752977 - DNA, 129 bp, Homo sapiens
cgggacccgaaatccttcctgtaccgcttatgccaggccgatcccgacctggactcagacaagtgtgcaggagaagagaattgggtggacagcaggaccatctacgtgggacacagggagccacctccg

SEQ ID NO: 752978 - DNA, 50 bp, Homo sapiens
ccgagaaggtgtccgaggcccgcaaaacgctcctttaccctcatcgtgga

SEQ ID NO: 752979 - DNA, 76 bp, Homo sapiens
tgccattgtgatgatgaagaaccgcagatccaccttcgttcagaaaaacctggtctatggcacaactaaaaaggtt

SEQ ID NO: 752980 - DNA, 75 bp, Homo sapiens
ctggacggcgagcgcgagcggcgcgagaaaggaaggtgctgagctactggtgcttcagtcccggccacagcatgc

SEQ ID NO: 752981 - DNA, 83 bp, Homo sapiens
gagcagcgcgtcgtggggcgagcggcaggctgtctgtccccagaccccagagcacgtccggcaccaccatgactgggctgttg

SEQ ID NO: 752982 - DNA, 75 bp, Homo sapiens
caaacgcagaaggactgcctcactgagcaaccaagagggttgcagatggtgtaggaggctggagagactatggag

SEQ ID NO: 752983 - DNA, 100 bp, Homo sapiens
gactttcttccaagtgaccctcttcgctgtgaatgagttcattctccttaacctgctaaaggatggttcgtggagacccaagggccattgtggaatatcg

SEQ ID NO: 752984 - DNA, 100 bp, Homo sapiens
aggcaggttaccatcactggatctgctgccagcattagcctggctcaatatctaatcaatgtcaggctactaaggcaggtgcagcatcaatgattcacta

SEQ ID NO: 752985 - DNA, 75 bp, Homo sapiens
atggagaagctctaagtacactcgtcttgaataggaaggacacgtctgccacatcccagtcagttaatggatcac

SEQ ID NO: 752986 - DNA, 75 bp, Homo sapiens
atgcaagcgaagaaccttttccctaatacgtacctcattgtgggaggtggggctcctgtacgaagagggtgttcg

SEQ ID NO: 752987 - DNA, 96 bp, Homo sapiens
gcgaaactcttcagtttaaagctcaagaagagtcaagtaccattggccaggatcaaacgcttatggaacgtgatacagagggtggtgcagcagaaa

SEQ ID NO: 752988 - DNA, 100 bp, Homo sapiens
gcaggccgcttggttctgacccagctgaggtgcccgtggttgacacgagctgtgtccccagctgttcccgtctacaatggcatcatcttcctctttgtcc

SEQ ID NO: 752989 - DNA, 83 bp, Homo sapiens
ccacagggtccccaactaccggcggctggagacgcagagagtccagggccaaggcttgtgttcaatcgtgtgaatggccggcg

SEQ ID NO: 752990 - DNA, 82 bp, Homo sapiens
ttttgcagatcttcaacaagaggacccaggagaaattcgccctcaaagactgacagctccttcagtttcatggcattcttct

SEQ ID NO: 752991 - DNA, 100 bp, Homo sapiens
gaactggattccaaagttgaagttttgacctataaaaaggcagatactgatctgtgtggcaaaggagcagagaactttgacaagttcttcacacgaggac

SEQ ID NO: 752992 - DNA, 82 bp, Homo sapiens
cggccgtcgcccaggagtcatcggacgccagaatctggtatttctggtggtcgcattcatatgtcagttttaggaaggcttg

SEQ ID NO: 752993 - DNA, 90 bp, Homo sapiens
ctggttccgaggcctcagacccgatacccaaacattcatgatgttgctatcaaaagttgagaaattgtcagaagaaatcatggagataat

SEQ ID NO: 752994 - DNA, 100 bp, Homo sapiens
tcaccctggagccttccctcctcttcccagcaggccagatgaggatgggtggcgtgcggaacagagagatggctctgaagcatctctcgagtggtcctct

SEQ ID NO: 752995 - DNA, 100 bp, Homo sapiens
atgagaggatgtggtggtctactctgatgtcaatcttgagggctaggagttagaagccgctcttcacagagatgacgtggagtttatcagtgacctgatt

SEQ ID NO: 752996 - DNA, 75 bp, Homo sapiens
aggacgatgactgcttagaccacagcgacgaggacgactgccgagctggtcaggctcaccatcgagaagcaggga

SEQ ID NO: 752997 - DNA, 75 bp, Homo sapiens
gaccttaataagaaagaaagaagagtaggaactcctcaaactccaaaaggaattcttcatttgtctcctgatgtt

SEQ ID NO: 752998 - DNA, 83 bp, Homo sapiens
cataaagacatcttaattgggcacgaaagagatacgatgaatggattaaagcagataaaatagtaagacctgctgataaaaat

SEQ ID NO: 752999 - DNA, 101 bp, Homo sapiens
tagaaagaaatgagcagctttggataatgacgacagcaacccgaagacagggaaatttagctggatctaccatgaaagacttgtgaatccaggaagagaga

SEQ ID NO: 753000 - DNA, 100 bp, Homo sapiens
gggggacactgcagccggagcccgggaggggccgcgccgccaccgtctgaactaggatgtcccgacatgaaggaggcaggtggaagtcatcataaagttt

SEQ ID NO: 753001 - DNA, 100 bp, Homo sapiens
agctatctagggacgagatctagaatcaactgagagagatgcttaaaaatcaccagttactttaatgagtttccatggatctcaatagtgccagcactgt

SEQ ID NO: 753002 - DNA, 98 bp, Homo sapiens
gcacaagtacagatcttgaagctgctgttgctgatgctttggcatgttatttgaaagcaattgagacgcaaccgaactttgcagtagcttggagtaat

SEQ ID NO: 753003 - DNA, 95 bp, Homo sapiens
gggtcgtcttctcggcgacaactgccctgctcttcatcccagaactctactacgatcgcgggaaccaccatgagtttgtgtccctggtgaaggac

SEQ ID NO: 753004 - DNA, 89 bp, Homo sapiens
aaagttggcccctgagccagagctccagcagccttgttagggcgtggcctgaggcttggataagtgggcgatgccctcctagctagccg

SEQ ID NO: 753005 - DNA, 80 bp, Homo sapiens
agagaggaccagcaacagcagcatcagcagcgtgatgttatcggctgggacatctcgtcgctgaacctggccgaggcgat

SEQ ID NO: 753006 - DNA, 100 bp, Homo sapiens
aagagatccgtccagtctgccgcaagttcatgcaagatattctgaaaaagagttccacgtcctcccttatcgagtctttgttccccttcctggatccact

SEQ ID NO: 753007 - DNA, 83 bp, Homo sapiens
gcttcctgtggaacgttttccagagatgtacggagcgcaagaggacggcagcgtcggcgaaggtgacctgtcctgcatcctca

SEQ ID NO: 753008 - DNA, 100 bp, Homo sapiens
ctggaggattgtcactccaacctcttttcgctgagggaagtctcaggttgccctgaagatcatccgcaacgtgggcaagtaccgggaggctgcccggcta

SEQ ID NO: 753009 - DNA, 100 bp, Homo sapiens
ctcaagtgatcctcccacctcagcttcctgatttttcagtactaccagctctccaatactggtcaagacaccatttctcaaatggaagaaagattaggaa

SEQ ID NO: 753010 - DNA, 75 bp, Homo sapiens
tcgctggccatttaggagctctgctcaaagccagacggttcttgattattacagacctctttctgaaaagcccgg

SEQ ID NO: 753011 - DNA, 75 bp, Homo sapiens
ggacttccccgttagaactcgcgtttccacttcagagatctgatgatgccaccagtccccatttctcaacacgtc

SEQ ID NO: 753012 - DNA, 83 bp, Homo sapiens
ggcgagcagaactacggcgagcggggactttgaacatgtcggggatcgccctcagcagactcgcccaggagaggaaagcatgg

SEQ ID NO: 753013 - DNA, 75 bp, Homo sapiens
gctgcgggaaatcgggctgaagcgactgagtccgcgatggaggactacgttgatgccccattgagcatccccgac

SEQ ID NO: 753014 - DNA, 100 bp, Homo sapiens
ttgcctgctggaacctgctgtatctactcaagagtggaagttttcacaggtaaaatttggtaataccacctttaaaacagatgtgtaccttaagtcactc

SEQ ID NO: 753015 - DNA, 90 bp, Homo sapiens
aactttgcgacggaaatgtgtcatcgaaagccagcttcacctgaacctaaaatggtgagcgagagtcaccatgaggccctggcagccccg

SEQ ID NO: 753016 - DNA, 100 bp, Homo sapiens
cttggtgtgccacttgtggagggagatcatcagtgacccgctggtagaatgtcatccttacctcaaccagagcaaactgctggatttctgcaagtcaaaa

SEQ ID NO: 753017 - DNA, 50 bp, Homo sapiens
cggagcgcgagagcttcgagcggactcagagagagtctacaaggagattg

SEQ ID NO: 753018 - DNA, 100 bp, Homo sapiens
ccatggggacacggcactgcatgctgctgcccgccagggcccagatgagccccacagtcttcgttacaacctcatggtgctgtcccaggatggatctgtg

SEQ ID NO: 753019 - DNA, 101 bp, Homo sapiens
cttggcagtttgagaggaagctcaacgactccattgccgaggagctgaacaagaagttggccaacaagctccgccgcatgcaagagatgattgcaaggatg

SEQ ID NO: 753020 - DNA, 83 bp, Homo sapiens
cgggcagcggaagcggcgcggcggtcggagaagtggcctaaaacttcggcgttgggggccatggcacctgcaaggtgtttctc

SEQ ID NO: 753021 - DNA, 97 bp, Homo sapiens
ttgccggagccgcggggcgcgggcggcggacagattgaccttcagagcgaggtgctggagaatctggtaaaagcaccattgtgaagcagatgaggat

SEQ ID NO: 753022 - DNA, 100 bp, Homo sapiens
caccaagcatcactggatgttaacaatcctcgggactttatcgattgcttcctgatcaaaatggagcaggaggaaatagccctgtccaggagttcactgt

SEQ ID NO: 753023 - DNA, 75 bp, Homo sapiens
ggaccacaaaccgctgccagaaaagatcaccccttctgtgtcattctctgaggaaaacaagttcttctcaaggag

SEQ ID NO: 753024 - DNA, 101 bp, Homo sapiens
agaagaagaaggtgtactcctttctattttaaagagccaagcctcagagagtgaccaagaatatggcccaggtgaccaaagccctggacaaggccctgagc

SEQ ID NO: 753025 - DNA, 100 bp, Homo sapiens
cggggtggtcctcttccctttgtcgatcagaacactgaggctcagagaagttaactactccaaagtcatatagccagtattttctggagctgtaattcaa

SEQ ID NO: 753026 - DNA, 89 bp, Homo sapiens
tgccgaagatggcggaggtgcaggaggagctggagttctgtgaaaagctgctacagacctgtttctccagcccagcggacgacagcatg

SEQ ID NO: 753027 - DNA, 101 bp, Homo sapiens
aaacggagcccgcggccaaacggtgcctgcggtgcctgagctgagtgaggccgaggccgggaggccgtgcccggaggggatatcattttcaatgcccaata

SEQ ID NO: 753028 - DNA, 100 bp, Homo sapiens
aacctggtgcggctgctatcccgctgcgaggcgatggcagcggagaaacgggacccggacgagtggcgcctggagaagactgtgccctgtccacggtgcc

SEQ ID NO: 753029 - DNA, 50 bp, Homo sapiens
gacatcggagaggagctggggagggggctagagagctgaaggagagccag

SEQ ID NO: 753030 - DNA, 100 bp, Homo sapiens
aaacaaaaaatggacaaattgcttggagaacttcatacacttcgagatcagcatcttaacaattcatcatgtggatctaggatccggcttccaacatgtg

SEQ ID NO: 753031 - DNA, 96 bp, Homo sapiens
ctggcattggctgaaaagtatggccgatctccagctcagatcttgctcagcacacagaggccctcctctacggcttccaatccatcgcagagacca

SEQ ID NO: 753032 - DNA, 75 bp, Homo sapiens
ccgggaccctcgcgcgcgaccgccgaatcgctcctgcagcagagccggtggctgctggcagcggaatcccccaga

SEQ ID NO: 753033 - DNA, 87 bp, Homo sapiens
tccatgtacagccagggtaccccggaaacgcccaccttcaaagaccactccttctttgtggggtggaagacaacccgtgagtattac

SEQ ID NO: 753034 - DNA, 74 bp, Homo sapiens
tcctcctggcctcagcaacctgacaattctgtcgtgtcccgacgccccgaccagtgcgcccagcgcccctccca

SEQ ID NO: 753035 - DNA, 75 bp, Homo sapiens
tggcacaaagttctctcgatcagggcatacatctttcttcgacaaagggtgagaagccctaccactgcaactggg

SEQ ID NO: 753036 - DNA, 83 bp, Homo sapiens
caggattccacagtgtcctctggaaaatgcattttgaaagcgaagcagaagccgtagaatcagcggcgagcctgttgaaagaa

SEQ ID NO: 753037 - DNA, 75 bp, Homo sapiens
ctggccagaaaaggcaaggagaagagaccttctataactcagttccaagattatcccctaaaactcatagaccca

SEQ ID NO: 753038 - DNA, 96 bp, Homo sapiens
cagtctggatgctggtgccactaatattgattttgactaaaggagaagttcaagtatcagataaagacacacacaactggagcagatgtttaggga

SEQ ID NO: 753039 - DNA, 75 bp, Homo sapiens
tgatccagcaaggtcggcagagcaaggggcttacgcagaaggacctggccacgcgggctgacgcacgaggcacac

SEQ ID NO: 753040 - DNA, 98 bp, Homo sapiens
gttggatgaggcagacagacttctggacatggggtttgaggcaagcaatgccctgccctaaggaagacactcccaattctgtttgggagcctgcgaag

SEQ ID NO: 753041 - DNA, 97 bp, Homo sapiens
ctgtcagctagcaagaagaaacgaattagtaaacagtgcaagttgatgcgtcttccatttgcaagaagaagaggagtttacttcaaacagaacctgg

SEQ ID NO: 753042 - DNA, 117 bp, Homo sapiens
gccgctcgcgcctctcgatgggcagctcgcacttgctcaacaagggcctgccgcttgggggggccctcagcctcttggccttgaacgggctgttcatcttgattcacaaacacaacc

SEQ ID NO: 753043 - DNA, 82 bp, Homo sapiens
cggaggccgcctggggtagcggcggcgggagtcctggcgctctgcaggtctgcaaatgaagagtccagaaaagaagcgaagg

SEQ ID NO: 753044 - DNA, 75 bp, Homo sapiens
accagagcctgaacacactgggaaatgccgtgtcagtggggttgttttgggtgtcgtgaaaactacccctaaaag

SEQ ID NO: 753045 - DNA, 100 bp, Homo sapiens
gtttcaatcgtccatccaagatacaagagaacgcattgccactgatgcttgctgagccttatgcaatgccaaccaaaaccatagaagtgttgcagttgca

SEQ ID NO: 753046 - DNA, 101 bp, Homo sapiens
tagaaggtgacgaggagggagaagacgaggatgatgcggaaattaaccccaagacatatctgaagagatggattaagaatgctttggattaaggattgtgg

SEQ ID NO: 753047 - DNA, 89 bp, Homo sapiens
attatatgctggaatggttccttgtcacagagatgcggcggaccctgacgcctgccagctccccagtgtcctcgcccagcaagcacgga

SEQ ID NO: 753048 - DNA, 101 bp, Homo sapiens
tcccggacagagcccgtggtcgcgcagcttcaaagaacccccgctcttgcttggtgttctgcatccaaatacgaagctgcgacaggcagaaaggctgtttg

SEQ ID NO: 753049 - DNA, 83 bp, Homo sapiens
cacagaggcaacaaatggcaactttctgagagtctcgctctcagtcaaaatctccaacgggaactcctgctcgtgtaaaatcg

SEQ ID NO: 753050 - DNA, 83 bp, Homo sapiens
cgagtccttgcaagaagtgaattacccgaccctgacctgcctagagctggaacgttacctccagagcgagccctgctatgttt

SEQ ID NO: 753051 - DNA, 75 bp, Homo sapiens
gccaagttcatatcctgctggtttaacagtctctgctggatgaaccgaatcctaacagtccagccaatagccagg

SEQ ID NO: 753052 - DNA, 100 bp, Homo sapiens
ctgaagtcgcaccacggagagcacgagagacccgagttcatcgcctacccccatctccgcatcaggaccaaggtggacgacgccatgctgatgtttgaca

SEQ ID NO: 753053 - DNA, 100 bp, Homo sapiens
gctagcaagcgaagctaccagttctgggatacgcagcccgtccccaagctgggagatacaactcgtcaacgaatcaaattcagtgatgacagagtatgca

SEQ ID NO: 753054 - DNA, 82 bp, Homo sapiens
tggcgtgcactccgcacctcggggacattattgcgcgtggaacggctgcttttggaaggcagcaatgaatgtggatcacgag

SEQ ID NO: 753055 - DNA, 100 bp, Homo sapiens
cgtccatccatttcgtggttcacccgctgccgggcaccgaggaccagctcaatgacaggctggaagtgatggagagagtattggaaactgtcccttttgc

SEQ ID NO: 753056 - DNA, 83 bp, Homo sapiens
gagaaggcccagccaatgaagatgaagacataggaggtatctcgggggagctttgtgccttgatggatcaagttcatcatatg

SEQ ID NO: 753057 - DNA, 83 bp, Homo sapiens
ccgcgatgtcggaagaaacccgacagagcaaattggccgcagcgaagaaaaaggccagctttgctccaatggaggacaaactc

SEQ ID NO: 753058 - DNA, 90 bp, Homo sapiens
cagaaatctgttctacaggaagatgctgagaaactgcggaaagaattgcatgaaggctcttaaacctgatctacaatggaaaaaattctt

SEQ ID NO: 753059 - DNA, 90 bp, Homo sapiens
atttttcctggtatgctctactttgacacatgtggctttctcaggggtacttcggtccttggtggaagcatctagctcaggtgtgtcggt

SEQ ID NO: 753060 - DNA, 83 bp, Homo sapiens
ggctgctgtttctcttcgccgacgaagctgaacatggttatgcctccatgttaccatacaataacaaggacagagatgcctta

SEQ ID NO: 753061 - DNA, 82 bp, Homo sapiens
tagcaggagaggatggcagaatgattgctggccaggttttagtcgtagtcgagatcgggatcggtatagacggagaaatagt

SEQ ID NO: 753062 - DNA, 100 bp, Homo sapiens
ggacaacggttgtttacaacccttatgctgccctttccatagagcagcagaggcagaagctgccggtattcaaggcaccatcatgggagcagcattgctg

SEQ ID NO: 753063 - DNA, 83 bp, Homo sapiens
ctgcccccaccgtcacctctagtgagcgcctagtcccagacccgccgaatgacctccgggatcgtgggactttaccagatcgg

SEQ ID NO: 753064 - DNA, 74 bp, Homo sapiens
tatgagtccacctccaggcaatgatgatggtgtgagcatccccggggagtacacttcctttctggctcccatct

SEQ ID NO: 753065 - DNA, 75 bp, Homo sapiens
aagcagaccttgtggaggccttgcaggagtttggacccatcagctatcagttgagggatttgcagttgataaaat

SEQ ID NO: 753066 - DNA, 83 bp, Homo sapiens
gctggctgcggccgccctgggccgggccccaccggacgaggctgaggggatctggcggtggagcgctaggatcagacgccccc

SEQ ID NO: 753067 - DNA, 82 bp, Homo sapiens
gcctttccagcatgcaggggctgctcagaacactctgctccagccaaggtggtgagggcagctgttcctaaacagcgcaaag

SEQ ID NO: 753068 - DNA, 101 bp, Homo sapiens
attttgaggacacttgtggagagctcgaattccagaatgatgaaattgtgacacattcagctaacgtattttagcaggtggagtgaggttgaagattcctg

SEQ ID NO: 753069 - DNA, 50 bp, Homo sapiens
actgtgagctctacttcatggtgacatcgatgagtgtgcttcgaacccgt

SEQ ID NO: 753070 - DNA, 75 bp, Homo sapiens
gaacccagaagcctacaatgaagaactgaagaagctggagttgctcagacaggaaagtttatatggactataatg

SEQ ID NO: 753071 - DNA, 88 bp, Homo sapiens
aggatgaagttgattgactatggtctctccggctaccagaaacctgtttggaggttatggatgataaacccaatcctgaagccctaag

SEQ ID NO: 753072 - DNA, 76 bp, Homo sapiens
gaggagtgtgaccgcctgggccctggcatggccgacatagttgactatagtcaatggggccaatggagccaagtgt

SEQ ID NO: 753073 - DNA, 100 bp, Homo sapiens
gcgggaggtggtgaagcacccctccgtggagtccgtggtccagtgtgagatcgacgaggaattacatgaatgacagtcttcgaaccaatgtgtttgttcg

SEQ ID NO: 753074 - DNA, 96 bp, Homo sapiens
gatcttcaggaattttactgggataattatccaaataaattgcaagcattctatccaaatgtacaaaattggacagctgtacatgatcagcaaaca

SEQ ID NO: 753075 - DNA, 90 bp, Homo sapiens
ccactgctggggtggtggttccaatgagacagggcacaccaaactccatctgcgtccgtctccaagagagtatgaagagagtgcgtctgt

SEQ ID NO: 753076 - DNA, 100 bp, Homo sapiens
catcatcgcagggaactttgagcttgcagaggttatcaagacccacaaagactcggatgttgagagcctacgactagatttgcatctttacgtcctgcgc

SEQ ID NO: 753077 - DNA, 90 bp, Homo sapiens
agtcctcgccggcgagttcagctttcagctcaggctccaaactctgccatcacagctcagactggtgttggggtagcgtctaccgtccac

SEQ ID NO: 753078 - DNA, 100 bp, Homo sapiens
ccgcgtggctggaagacatggccactccagtcggtgttgagcacggcgagcagtctcaggcctttagtgatgatggccctgtctctgcccctggtggtca

SEQ ID NO: 753079 - DNA, 82 bp, Homo sapiens
ccggagtgcgggcgcgccccaccaccgccctcaccatggacctccacaaaaagtactcgtacatccgcaagaccaggcctga

SEQ ID NO: 753080 - DNA, 90 bp, Homo sapiens
gaggaggaggaagaggaggagaaggctaaagaattacctccaaagccattgtcaagaccacagcagtcatctgcaccagtccagctgaac

SEQ ID NO: 753081 - DNA, 100 bp, Homo sapiens
caatcgctgctgtgccatatactccaaatcttttaccaacttcaagcacatggtccttatgtcgtcagaagatcgagaagctcaggaggatgaattgctg

SEQ ID NO: 753082 - DNA, 83 bp, Homo sapiens
ctgcagaacaaatcaagcacatccttgctaatttcaaaaactaccaggagatacaactcgtcaacgaatcaaattcagtgatg

SEQ ID NO: 753083 - DNA, 97 bp, Homo sapiens
gctggcgacatcagacagacagaaccaagacatctgaggggcaaccaggaggtgcgtgtggctgcagagcacacagatactttctgagtgcctacta

SEQ ID NO: 753084 - DNA, 100 bp, Homo sapiens
aaatacaacgtatactggaccagaagtttcagctgagaatcaggctgaaagccgggcagcagtggaggggacagtggaggctggagctacagttgaaagc

SEQ ID NO: 753085 - DNA, 90 bp, Homo sapiens
ctcattctgcacgacgatgaggtgacagtcacggagacatcggacaagagtgtgattgagctgcagcagtatgccaagaagaacaagccc

SEQ ID NO: 753086 - DNA, 98 bp, Homo sapiens
caaaaggcagctcggagacaggccaagcaggaggagcttaagcggctgcatcgagcccaggatccacctctgatgttcagtgaagactaccagaaaag

SEQ ID NO: 753087 - DNA, 75 bp, Homo sapiens
caacacctgatgaatggtggagagttacgcaggtgtgcaagcatttcctggaagctattgaaaacaacaagtatg

SEQ ID NO: 753088 - DNA, 76 bp, Homo sapiens
cacagacatgactgagtcctccatgaagaatgagcgggatcgtgtgcagaagaaaaccttcaccaagtgggtcaac

SEQ ID NO: 753089 - DNA, 51 bp, Homo sapiens
ccatcaccgaagcgggagcgggccggaaggtggtggtcgtacgctgtgaag

SEQ ID NO: 753090 - DNA, 75 bp, Homo sapiens
aagggagcacctaatgcagatctaatctttaagactggtgggaggctaattcacctaaataagattgatcctcat

SEQ ID NO: 753091 - DNA, 101 bp, Homo sapiens
atttgtgaccagtgggaccgactgggaacgcttactcagaagaggagagaagccctagaggtgatgctgggaggttcctggttacagacactggaggctag

SEQ ID NO: 753092 - DNA, 75 bp, Homo sapiens
gcagccgaggtcttcgggaattccagcgaggcaacctgcggcagatcttccagtccctgccgcccttcatggaca

SEQ ID NO: 753093 - DNA, 100 bp, Homo sapiens
gtaatcaagcagcagccagagaatgggagttgcctgtgtccctggagtgttacacagtgcctcctgaagacaacctggccctccttcagctctacttccg

SEQ ID NO: 753094 - DNA, 75 bp, Homo sapiens
gccactggacatcagaaccacattttgggtttgaagaatcttctacatggaacgtcaaggtcgtgggaaataaaa

SEQ ID NO: 753095 - DNA, 74 bp, Homo sapiens
atctcactctgttaaagctggtctgttctaactgaggacctcagcagccatgtcgaagccccatagtgaagccg

SEQ ID NO: 753096 - DNA, 60 bp, Homo sapiens
cagggagagcgggcagccttccaggtggacagggccgttgctccagggagaactgcaaat

SEQ ID NO: 753097 - DNA, 100 bp, Homo sapiens
caaagactggcaaaagcacaaggattctcgctgtgacagagacaacaccgagtatgagaagggacaagcaggccttcgcactatcacgtcctctgggacg

SEQ ID NO: 753098 - DNA, 100 bp, Homo sapiens
cgaagacaagaagttttcagcctcagccaaccagctgagtcagtgctgattctctcaaatagagcttgaaggataaatcttcatttttgtttcaacaaaa

SEQ ID NO: 753099 - DNA, 75 bp, Homo sapiens
catggggctgcctcgccgggcaggggacgcggcggagctgcgcaagggcgccctgcgtccggcagaggaggcgag

SEQ ID NO: 753100 - DNA, 100 bp, Homo sapiens
caaagagttatggatattctggtggggagatgaacccaacctagtgggtgtaatacatcatgaactgcagggtgatgggcagaatctgtttacgaaagac

SEQ ID NO: 753101 - DNA, 100 bp, Homo sapiens
cgagtgtatgcttgttctgtatccagagggcattcagactaaaatctacaaccttctcattcagacacacgatcccacatctggtagctgtaaaatccca

SEQ ID NO: 753102 - DNA, 90 bp, Homo sapiens
ggttaacggcagcttcaaatgtcttggttctcctcagcacatcaaaaataggctggtccctgcagacggcttcccatttttatgaccgga

SEQ ID NO: 753103 - DNA, 75 bp, Homo sapiens
actgtgtccagcaagttgtggaacttctacaggaacggcaccagaaaagtaccactgtaagtcatgagatgtctg

SEQ ID NO: 753104 - DNA, 80 bp, Homo sapiens
gcagcagctgctttgattgacttggatctttatataggatttaatggttggtataatttgggcgactacaatggagagat

SEQ ID NO: 753105 - DNA, 98 bp, Homo sapiens
cggagcctccgggacggcgagcggcgggcggcggaggaggagacggcaggtcggggatcaaggtggtcggacattgtgtggtgtaatgaggattggcc

SEQ ID NO: 753106 - DNA, 75 bp, Homo sapiens
taattcagtgtgacaattgtggcattacagtccatgaaggattttgacacttcatgacatgtcattatttagagc

SEQ ID NO: 753107 - DNA, 98 bp, Homo sapiens
agaaaatggatttaacatctacgtcagtgataaaatctccttgaatcgctctctcccagatatccggcacccaaaggggaagtccagccaagcagacg

SEQ ID NO: 753108 - DNA, 93 bp, Homo sapiens
atctggtgtaccaggcgaagctggccgagcaggctgagcgatacgacggtgtcgtgaaaactacccctaaaagccaaaatgggaaaggaaaag

SEQ ID NO: 753109 - DNA, 98 bp, Homo sapiens
cggcgagccgctggtcatcaccaaggactggcagccaccctttgctgtggaagtggacaacttcaggtttaccccccgaatccagaggctgaatgagc

SEQ ID NO: 753110 - DNA, 90 bp, Homo sapiens
tagaacagctccaagaagaaacattcagattctgctcctaagtgtaggagagaacttggtgcctcttccactctggagtgaagttaatga

SEQ ID NO: 753111 - DNA, 75 bp, Homo sapiens
cgttttgatgatggagggctactacaggatgtgataggccaggttctgcctgaagcaacaactacagcatttgaa

SEQ ID NO: 753112 - DNA, 100 bp, Homo sapiens
gacagctgctctggcccctggagctgccaactctcctaccaccaacccggatgatcacggacgtgcagctcgccatcttcgccaacatgctgggcgtgtc

SEQ ID NO: 753113 - DNA, 83 bp, Homo sapiens
tgtgtggctgtaacttacgtgtactttaccaacgagctgaagcagggctacttctacaagtccgaacagccagtccagcaaaa

SEQ ID NO: 753114 - DNA, 100 bp, Homo sapiens
ccattttggatacacttggggatgatgacttcttcaacataattgctgtgcttcctgggtgagttggggtttagtcaaaggtgctgagattactggtaag

SEQ ID NO: 753115 - DNA, 100 bp, Homo sapiens
agatttaacattccaacacataaaaattatttatccaacagctcctcccaggattgtgcagactggtgcttaaaatggaagtcgatattaatggagagtc

SEQ ID NO: 753116 - DNA, 82 bp, Homo sapiens
cggggtgctctacgtcacggagaaaatgtggccccgtcccagagcaccacccgagacatcaggagcccatcgtgggctaggg

SEQ ID NO: 753117 - DNA, 96 bp, Homo sapiens
gggggatcaggaagtggagaagtcaagaggacactgaagatcacagactaatttttccgagagctcctggagaatgcagaaaagtcactaaatgat

SEQ ID NO: 753118 - DNA, 100 bp, Homo sapiens
aggggcgccggggcagcagcgaccccacagtgcagcgctccgtgtttgcatcggtggacaaggtgccaggtctacatccggataaaagacgatgaatgga

SEQ ID NO: 753119 - DNA, 75 bp, Homo sapiens
cacaagaacgcactttcctcccagtgcctccggagccagcgtggtggccatagacaacaagatcgaacaggccat

SEQ ID NO: 753120 - DNA, 50 bp, Homo sapiens
tcaccgttatgtgggaagcgaatccagaactgcaagcacatgttgaccag

SEQ ID NO: 753121 - DNA, 89 bp, Homo sapiens
gcacagcctgcggtttccggctgcaccgcggcatgaatgtgcccttcaagcgcctgtctgagaggattccggtcactgtgctgccacct

SEQ ID NO: 753122 - DNA, 90 bp, Homo sapiens
cctactgcagccacgcgggcgagcggctgtgtggatgtcggcgaagccgcgggcgagaaaactgtcgctgaaaagcaggagaagagaaat

SEQ ID NO: 753123 - DNA, 97 bp, Homo sapiens
gtctggttgtgagcagggtctgcacgaaataaagctcctgggcaaggggacgtctgcagctgaggtttcatcaccttaaatggttttgaaccaatga

SEQ ID NO: 753124 - DNA, 75 bp, Homo sapiens
agaagatcaagactagtgtgagcaacaaagtgatctttgcagagctgtttcaacttccagcaccccctcacattg

SEQ ID NO: 753125 - DNA, 100 bp, Homo sapiens
cctaactccaccgaacgatacacacgttggatcaaccagctgacgccggagcagctcctaacccaggagtgtggccatctggggccgtgtggtatttgcc

SEQ ID NO: 753126 - DNA, 98 bp, Homo sapiens
cgccgtgctggatgctgtgatcgccagcgccggcctcctccgtgcggagaagaagctgcggccgcacctggccaaggcacagctttggtcccctatgg

SEQ ID NO: 753127 - DNA, 87 bp, Homo sapiens
aaaacggcaacgtgtaatcagaaggcacagattagaggaaggaagaggttgtgcattatgtgtgactcttccaatgagtttattaaa

SEQ ID NO: 753128 - DNA, 100 bp, Homo sapiens
gctaagtccgtgagcggtggcagtcgcgaccgcgggtgcatccagtttctgcgcccaggttggtgttcgaggaagagacattgttgttcttggtgtggag

SEQ ID NO: 753129 - DNA, 98 bp, Homo sapiens
ccggagtcagcgatggtgcccggcgaggagaaccaactggtcccgaaagaggtttattttcttgaaaaggctccaggcttcggcttggaaaatcccac

SEQ ID NO: 753130 - DNA, 100 bp, Homo sapiens
agcagccgtgcgggcaccgggcgaggcaggcccactcctcccggccgccatggcatcagatgaaggcaaactttttgttggagggctgagttttgacacc

SEQ ID NO: 753131 - DNA, 76 bp, Homo sapiens
tttcggctagcagccgtgtggctagaactacctctgatcatctttgatattgatgatgttaagaagttcaaaccgg

SEQ ID NO: 753132 - DNA, 100 bp, Homo sapiens
gaggctgtggctctggtagaacacttgcagagggaatctggtcaaacatggaatggggattttatggaagaccttgggttatggaacagagaaaagaact

SEQ ID NO: 753133 - DNA, 95 bp, Homo sapiens
ggggtgtcgttcggccggcgtgacgcagccggatcggcgccagacggaaacctagcggtgtgagcatctatggtgagacatttccagatgagaac

SEQ ID NO: 753134 - DNA, 75 bp, Homo sapiens
cccacgtctgtctggtgataccaggggcagagggaccactctgacagtcccagctatctgacttcatgtgaaaga

SEQ ID NO: 753135 - DNA, 114 bp, Homo sapiens
gcagcgtgggtgagcggcgcagcggcggcagcggagagcgagagaggggagcagatctgggttggaatttgcccctgacaaataataaaatgatgagtgatgcaagtgacatgt

SEQ ID NO: 753136 - DNA, 80 bp, Homo sapiens
ttctttgtagcagacactgcaaatgaagctctcgaggctgctaagagactaacatatagcactttctacattgtgggttt

SEQ ID NO: 753137 - DNA, 100 bp, Homo sapiens
ggacgacgtgtacctggacatcaccgatttaatgtgtgccgaccatttccttcagtgctggacaggctgctgtgaagggacatcaccttttcgctttttc

SEQ ID NO: 753138 - DNA, 100 bp, Homo sapiens
gctgactgcacttcttttttgagaaaggaaggaatatatcctgactgattgctctttggtgtaacgggaaactgcgctgcctgtagtaagctcatccctg

SEQ ID NO: 753139 - DNA, 87 bp, Homo sapiens
attgcccaggcagagtctctgcgttacaaactcctaggagggcttgctgtgcggaggagatcgggcgcatctccattgagatgaacg

SEQ ID NO: 753140 - DNA, 75 bp, Homo sapiens
ttcaaggtggggttggcatcccccacatacgttggctgattgcaattctggcccaactcaaccctctctttggac

SEQ ID NO: 753141 - DNA, 100 bp, Homo sapiens
ctcggggacattattgcgcgtggaacggctgcttttggaagctggaacagtgaaccatggagctgtatttcggtgaatatcaacatgtgcagcaggaata

SEQ ID NO: 753142 - DNA, 75 bp, Homo sapiens
cagggacccctccatccactcggtgaatgttttccagggacacacggacatttatgacattaacagagaacagga

SEQ ID NO: 753143 - DNA, 100 bp, Homo sapiens
tttagggtcctttatatagaagggagagtaggactcaggtacttctgccctccctttggtctccctgttcttctatgtggtgacagatggcaaggaagtc

SEQ ID NO: 753144 - DNA, 74 bp, Homo sapiens
catcaagcagcaggtccttaagcaagccctcgcagggagcctggtagcaggggccggaagcacagtagagacgg

SEQ ID NO: 753145 - DNA, 88 bp, Homo sapiens
agctgcagcacgtggacgctgactcggaagtgcaggagcgggacggtatgcgggccatcctggggtcctacgacagcgagctgacccc

SEQ ID NO: 753146 - DNA, 98 bp, Homo sapiens
ctcgcacactctttgtcactgaggatgtacagttacccagcacgtgtacctcctcctcctcctattgctcgggctgtagtgccctcgaaacgtcagcg

SEQ ID NO: 753147 - DNA, 83 bp, Homo sapiens
tgagagcaagagtggatgaggccatggaactcattattgcacatggacggttccaagaccaaagattaaattaagagaaggta

SEQ ID NO: 753148 - DNA, 100 bp, Homo sapiens
ttttacgtgagcacattgataaaatgaaaattccaccagaaaaaatgagggagctggaacggaagtgtctgttgcggttctcccacttttccataagcag

SEQ ID NO: 753149 - DNA, 50 bp, Homo sapiens
cgatattcaccaagcgcttcgctacaagctggccctgaaggaccctgttc

SEQ ID NO: 753150 - DNA, 83 bp, Homo sapiens
ggccgcctggctccccatactagtcgccgatgaagaggaagatgatgatgtagtggctcctaaaccacctattgaacctgaag

SEQ ID NO: 753151 - DNA, 100 bp, Homo sapiens
gaagatcctagggcccatcccatcacacatgatccaccgtaccagcggctccagcaggagaaccatgagctccggcgaggcctggcagcccgaggagccg

SEQ ID NO: 753152 - DNA, 101 bp, Homo sapiens
cgcaaacggaggcgtgaggaggacgccaggtggacacgcccatccttggacttcctgaaaatgacccagtaagactttgaccccgacgcaggcttcagtga

SEQ ID NO: 753153 - DNA, 101 bp, Homo sapiens
ggaatctatctctgagaatgacccgttctggaatcagcttctctcattttctttccctgcaccaactagcagactatagaatctaactggcggtgtggacg

SEQ ID NO: 753154 - DNA, 100 bp, Homo sapiens
gtgcttccagcgaggcggcctcttccgaggcctccagctcccccggggcctccgtttctgggaaagggttagacacagaccttatgtttgatcatcggcc

SEQ ID NO: 753155 - DNA, 74 bp, Homo sapiens
gaggacatcgacatccaggcgaactcggcctatcgctaccctccgaagtccgccccacaggaagccccaagtca

SEQ ID NO: 753156 - DNA, 50 bp, Homo sapiens
aggtctctggagacatcttcagcagctcttccgccctctctggatgaggg

SEQ ID NO: 753157 - DNA, 90 bp, Homo sapiens
ggaggtggaggggctggcgtctgcccccatcgaggaggtcaaaatgcagatcttcgtgaaaacccttaccggcaagaccatcacccttga

SEQ ID NO: 753158 - DNA, 48 bp, Homo sapiens
ccggagcagccggggtcggagcggtttttggtgttgagccagacttga

SEQ ID NO: 753159 - DNA, 100 bp, Homo sapiens
aaataaggaattgcagtgtgattttctttccccctttaacttagaggaacgaggattatacagaaatttgaagtcctacaacgtgactttaaaaagacag

SEQ ID NO: 753160 - DNA, 95 bp, Homo sapiens
cttacttcaggaggtggagcaccagttccagaaagctgagtctgatctggattacattcaatacaggctggaatatgaaatcaagactaatcatc

SEQ ID NO: 753161 - DNA, 88 bp, Homo sapiens
atgacaatgactttgagccctaccttactggacagtcaaatcaggaggatcccttttcccccagaaattactcaatgctgaaacctct

SEQ ID NO: 753162 - DNA, 90 bp, Homo sapiens
ggcaaccgaaatgagactccctcagatccagtgataattgacaggtatctagaagagcagaagacagagaatggaaaagataaggaacag

SEQ ID NO: 753163 - DNA, 90 bp, Homo sapiens
cctcccctattccgacgaggatggtggaccccaggaccaacttaaaaaggtgagaaaattcatgaagacatctttgacatcatagaccga

SEQ ID NO: 753164 - DNA, 108 bp, Homo sapiens
cattgacgccatgtcgggttattcgagtgaccgagaccgcggccgggaccgaggcaagagtgagccatggagctacgtgtggggaacaagtaccgcctgggacggaag

SEQ ID NO: 753165 - DNA, 83 bp, Homo sapiens
atcgacatccaggcgaactcggcctatcgctaccctccgaagtccgacctgcctagagctggaacgttacctccagagcgagc

SEQ ID NO: 753166 - DNA, 100 bp, Homo sapiens
actggcaggagcagattccaaaggcacaggaagaagcttgcagggggagtggccacagcaggtcctatctggtggtgagtggctgtcatgatctctacag

SEQ ID NO: 753167 - DNA, 73 bp, Homo sapiens
gatgttgtcctgtgctggggctgacaggacagaagttgttatttatgttgttgagcgttcgccaaatggtact

SEQ ID NO: 753168 - DNA, 100 bp, Homo sapiens
gagatgcgcaggctcaacatacccgtactacaggatgatggctttctcttcctctgggtcacaggcagtcatctggggacctggagaatgatgagcaggc

SEQ ID NO: 753169 - DNA, 98 bp, Homo sapiens
gcctcagttggaagcagccgatccagcctgcggagcctgtggggcagatattgatgatgttaagaagttcaaaccgggttacctggaagctactctta

SEQ ID NO: 753170 - DNA, 100 bp, Homo sapiens
tggcaaccgcctacgagacactcaaggtttgtcctggttgtggtcaagactggatgatgtaactggctctctaggaagcctcacttggccgtaacctcag

SEQ ID NO: 753171 - DNA, 75 bp, Homo sapiens
catgccgctcctaagcctgcacagccgcggcggcagcagcagtgagagttgatattcactgatggactccaaaga

SEQ ID NO: 753172 - DNA, 75 bp, Homo sapiens
ggggctggggcgctcattgatgcagtgatcacaccacctgtggaatcctctcaagaggaacagtcattgtgtgaa

SEQ ID NO: 753173 - DNA, 98 bp, Homo sapiens
cttccattgaacttcccagcactcgaaagggaccgaaatggagagcaaaggatgccttccgcgccttccaccctgacctggaattcgtgggcaagttc

SEQ ID NO: 753174 - DNA, 78 bp, Homo sapiens
ttcaatgtccgcatcgcaaccaccgccctggccatctaccatgtgaagctccaccatgaggcgaggtggatggaggaa

SEQ ID NO: 753175 - DNA, 101 bp, Homo sapiens
ccaccagacctgggccagatactttgtgaaaccaccaaatcccattgaatttctagcatcttatcttttaaaaaacaaggcacagtttgaagatcgaaact

SEQ ID NO: 753176 - DNA, 96 bp, Homo sapiens
gggattttaatccaacagccacagtcaagatgttgccaacattcgtaaggtccattcctgatggctctggaagcagtcaattatagatttcttcaa

SEQ ID NO: 753177 - DNA, 50 bp, Homo sapiens
ccggaatgtcatccagcgagtgattagatatgaatatcactgggcagatg

SEQ ID NO: 753178 - DNA, 87 bp, Homo sapiens
cttgctgtgctacaaccggggctgcggtcagcgcttcgatcctgagaccaattccgacgagactctccaacatgtgccttctgacca

SEQ ID NO: 753179 - DNA, 76 bp, Homo sapiens
agcatcatccgcaaggtggtggaccctgagacggggcgcaccaggtgtggaccttgtcaccgcctgtgacatccgg

SEQ ID NO: 753180 - DNA, 50 bp, Homo sapiens
cgaatcgttaaacatcttaggtcagacatttgtcttcaccgacagcccag

SEQ ID NO: 753181 - DNA, 90 bp, Homo sapiens
cctggagcctcagttggaagcagccgatccagcctgcggagcctgtggggcaggaacggagctttgactgtaagatctgtgggaagagct

SEQ ID NO: 753182 - DNA, 88 bp, Homo sapiens
ggccgcgggcgcgaccggaggcaggtaatgggaaacccaggaactttcaaaagaggccttttactctcagctttgtcgtatttgggtt

SEQ ID NO: 753183 - DNA, 75 bp, Homo sapiens
ggaggagtagtggtttgcgagcaggttctcggagggaccgggatagtcgaggggagctgcagcgggagtcagact

SEQ ID NO: 753184 - DNA, 90 bp, Homo sapiens
agccgtggccccgagggcggatccgaggtaagccgcgtagcagatacgctgccagcaacacgggcgaccatgctgatgagcaggacggcg

SEQ ID NO: 753185 - DNA, 112 bp, Homo sapiens
catgcatccaagttccagtttgtggcctcctaccaggagctcatggttgagtgtacgaagaaatggtactaggttttgacaagcttgcatcatgcgtgagtataagctagtc

SEQ ID NO: 753186 - DNA, 76 bp, Homo sapiens
gctcatctcagatctggagcatcggctgcaggggtcagtgatggagctgcttcagatgaagtctcactctgttgcc

SEQ ID NO: 753187 - DNA, 101 bp, Homo sapiens
ccatatgttgagattctacttattcatcagtttgttgtgcttgtcaagatcaggcatagaatgtcaagctaaccaggcgtccgctacttcagaagagtgta

SEQ ID NO: 753188 - DNA, 97 bp, Homo sapiens
ttcacttatctcttctttaacttatcgtggaaataaaacagctgttttgcagattggactacaaggtgaccaagaatatggcccaggtgaccaaagc

SEQ ID NO: 753189 - DNA, 51 bp, Homo sapiens
ccttccccgggcggagagcccctctccagccagacgaggacagccggctgc

SEQ ID NO: 753190 - DNA, 100 bp, Homo sapiens
agattaaaacttgaagcaacccttaatgtgcatgatggttgtagactctccaacatgtgccttctgaccatacaaatgaaacttccaacagtactgtgaa

SEQ ID NO: 753191 - DNA, 83 bp, Homo sapiens
ctgcagccctggatctattaaagggagcattccgatcatctgaggaacagcaggagaggaagaagcggggagagaccaacaat

SEQ ID NO: 753192 - DNA, 82 bp, Homo sapiens
aataaattcttttgaactagatcgagctgatagagaccctagtaacatgggagactcatgcatctgtatgccgtgtgcgtgg

SEQ ID NO: 753193 - DNA, 74 bp, Homo sapiens
gatattgtggaacggtgaaaagaaatctgttgcttcttgcatggaaaaatatgtcgtaactgcaagtgtggcca

SEQ ID NO: 753194 - DNA, 50 bp, Homo sapiens
gccaagctcatggcctgccactgcgtgcactatcaagatctccacttagg

SEQ ID NO: 753195 - DNA, 100 bp, Homo sapiens
cacaggcctgctgaactgggtgctttatataggaaacacagtgctctgtgcctatacagtgtacggataaaacagataaacaagaagcgctgtttaagcc

SEQ ID NO: 753196 - DNA, 113 bp, Homo sapiens
gccgctgctgggagatgggcctactcgcccgccaccctgcgctgccgccgctctgaggagttaaagggtcatgatcagagttcgactcttgcccaacactctgttgaactgac

SEQ ID NO: 753197 - DNA, 100 bp, Homo sapiens
aacgccttatgatgaatctaagtctaccccgagccccggagcgagagcgagtgcctgagcaacatccgcgagttcctgcgcggctgcggggcttccctgc

SEQ ID NO: 753198 - DNA, 75 bp, Homo sapiens
tattgccgctgttactgatatacctttagcctcaccagcaaacagacatatagaccagtggagcagaacagagac

SEQ ID NO: 753199 - DNA, 83 bp, Homo sapiens
cgaaggtactcgcagcacttggagcgcagaaccggccgcgcccggtgcccaaggaccaagtccttgacactgtctacctgttc

SEQ ID NO: 753200 - DNA, 51 bp, Homo sapiens
gaccgagaccgcggccgggaccgaggggtgaatctgtaaaatatttcctgg

SEQ ID NO: 753201 - DNA, 97 bp, Homo sapiens
ctgcccctacagtcactttcctgtgggggctgccctgctcacccaggaggggagaatcttcaaagctatccctgtaccctgcgccagtacctttgtg

SEQ ID NO: 753202 - DNA, 101 bp, Homo sapiens
ccggaaggggtcccgaagccccctgcaggaactctacaacccaatccaggataaaagaatcagagtgtctcaacccttgacaagaggaccaagtgccttta

SEQ ID NO: 753203 - DNA, 100 bp, Homo sapiens
caaggagacccaagcactagtattggcccccaccagagaactggctcaacagcctgtcagagttgttcagtataatatcaatacagaagaattatattcc

SEQ ID NO: 753204 - DNA, 100 bp, Homo sapiens
ggctctgatccccccctgccggggagggcccagcgcatccgacaggtctcctctgagcctccggcctccataagacccaaaacagatgacacctcttccc

SEQ ID NO: 753205 - DNA, 90 bp, Homo sapiens
caggcgctgggcgagccgtgcgatctggacgcggcgctgctgaccgacatcgaagaaggaagaggcccagcagaagggactcgctgagcc

SEQ ID NO: 753206 - DNA, 97 bp, Homo sapiens
tggaggacagaagaatccgccatgggctactcagtttacagccactgcagtatcacagccagagttgatcaagaacttaatggaaaacaagatgaac

SEQ ID NO: 753207 - DNA, 96 bp, Homo sapiens
gcgacatactacctctggccccgagatcagaatgccgttcctacaacagcagccagtacccctgatgccgttgacaagtatctcgagacacctggg

SEQ ID NO: 753208 - DNA, 50 bp, Homo sapiens
ccataattgagtgagccaattccctggaaagaccacagcaagattctttc

SEQ ID NO: 753209 - DNA, 100 bp, Homo sapiens
cagaaagatggcgtcctcggagcaggcagagcagccgagccagagatcctacagtaaggaattgtttgaagaagttatttcaaagatgcggaaggcaggg

SEQ ID NO: 753210 - DNA, 100 bp, Homo sapiens
cgctcccctcgcccgcccgggccgccaggagaaggatacatccctgtatcgaccagcgctggaggaattgcgaaggcagattcgttcttctacaacttcc

SEQ ID NO: 753211 - DNA, 100 bp, Homo sapiens
acaaaagactcagagactatataagtagcttaaagatgacaccttgcattccctatttagaacattctagtatgccagtagaaaaaaatatcactttaga

SEQ ID NO: 753212 - DNA, 75 bp, Homo sapiens
aggcgattccgcagtccccccgttccctggaggtcctgtggaatgctcgagcccagaaaactatcctctaagacc

SEQ ID NO: 753213 - DNA, 83 bp, Homo sapiens
agcctgcggagcctgtggggcagccgggtgggcttggactgggcgtgctccatggcagagatcctgcggtcactcaacagtgc

SEQ ID NO: 753214 - DNA, 75 bp, Homo sapiens
ccagtgacagtgggacgggctgcccttgtactatgaggggctgcaggacaagctggcacagatccgcgatgcccg

SEQ ID NO: 753215 - DNA, 82 bp, Homo sapiens
tgcaaatgcagaggaagaatttttctatgagagtgttgcggagataggaacatgggagagaaacaatctgggtaacatgaaa

SEQ ID NO: 753216 - DNA, 101 bp, Homo sapiens
aaccgacaaaaacagcagctgatgactcactccaacaacgcacagcaccagaaggtactggtgtggcatactcggacagagaagcccaagatgaagcagga

SEQ ID NO: 753217 - DNA, 100 bp, Homo sapiens
cgagggggcatcatgaagcgggctggcggcgctgccgctcccgggcggccgcgggcggccaaactgaaatcggtaaaggaggttttacacttttctggac

SEQ ID NO: 753218 - DNA, 100 bp, Homo sapiens
ccgagagcgtgaccgagagcgcgaatatcgtcatcgttagaaggaatagcgggttttgcagcaattgttgcatatggattatataaactgaagagcaggg

SEQ ID NO: 753219 - DNA, 100 bp, Homo sapiens
cctgacactctacggaagtacgcaagcccacggggagcagagcagcaactcacccagcacacaaaatggatctcttacgagttccgttctggaaaggcac

SEQ ID NO: 753220 - DNA, 110 bp, Homo sapiens
ctgcaactatgccagcaaaggaacagcccggcttattgaacacatcagaatccacacagctccctgtgctgtcaggaatctacaggacttggctcgtatttacattcgac

SEQ ID NO: 753221 - DNA, 82 bp, Homo sapiens
ggaacaaaggcgacccaagacacccagagagggacaggctgaccccgcactacatctacccaccagccatcgtgcagcccag

SEQ ID NO: 753222 - DNA, 90 bp, Homo sapiens
ctgcctcctccacccctgtatttcacttggctctccaaattgactcaactccaggttatcctgaatacatgtctaacaattttccttgca

SEQ ID NO: 753223 - DNA, 83 bp, Homo sapiens
cgcagtggtcgcttcttctccttgcatggggtcctgtcccagcaattcgtggagctcatcaacaagtgcaattcaatgcagtc

SEQ ID NO: 753224 - DNA, 48 bp, Homo sapiens
tcctctttgcctacagcatgagacagattgagctccttgatttcaaag

SEQ ID NO: 753225 - DNA, 101 bp, Homo sapiens
aggaaaaagcggaagaaaacatgaagatggcggtggagataagagaatactcccccagttgcaagaggcgcaggaccgtggaagacttcaacaaattctgc

SEQ ID NO: 753226 - DNA, 90 bp, Homo sapiens
cttttctgtattttactatgagattcttaataacccagagcttgcctgcacgctggctaaaacgagaagcttgattctttgctctcagac

SEQ ID NO: 753227 - DNA, 100 bp, Homo sapiens
gccggattgtactgtatggggactccaattgcttggatgacagtcaccgacagaagggccccttcacagatgtagtcactacaaatcttaaattgcgaaa

SEQ ID NO: 753228 - DNA, 100 bp, Homo sapiens
tattcggcagagtacatcattcagcaaggtggctgggcaaaactgaagctccacgatggcccaaatgatgttgtgtttagtattacaacccagtatcaag

SEQ ID NO: 753229 - DNA, 100 bp, Homo sapiens
ggaggtgtcctgcatggagtcttgtgaaatcgcgtggactgcaacacccagcagcgcgggtgcatctgagaaagacatcgtgcactctggcttggcatac

SEQ ID NO: 753230 - DNA, 100 bp, Homo sapiens
gaaaaggagttcgagcagatcgacaagtccgggagctgggcggccatttaccaggtcacacagcggcagtgataaagagcacagggatgtggagagatct

SEQ ID NO: 753231 - DNA, 75 bp, Homo sapiens
gacccggtgtctgctcctgtcgccttcgcctcctaatccctagccactatgggaatgctggcagactttgtgtcc

SEQ ID NO: 753232 - DNA, 98 bp, Homo sapiens
cacttagagagagtctcaaaggagctgcaggtactttgatggaaacctggagaagctctttgctgagtgtcatgtaattaatccaagtaaaaagtctc

SEQ ID NO: 753233 - DNA, 83 bp, Homo sapiens
ctggcctgggccgcgtccatcacctggcactcaaggtgcagattcactttataggaacagcttcagcttcagtgatgaaaaac

SEQ ID NO: 753234 - DNA, 74 bp, Homo sapiens
gtctcgccgagcgcacgccttgccgccgccccgcagatagcagaccccacgttagctgaaatgggaaaaaactt

SEQ ID NO: 753235 - DNA, 75 bp, Homo sapiens
gctgtgatggacttcatcaaggatttacccattagaaagctcatagtcggaagccggcaccctcaaatgagcccg

SEQ ID NO: 753236 - DNA, 100 bp, Homo sapiens
gttgggactggtgatggccgtggtgttttccaccttggtgtgtctcagcaggctctacactgggatgcatacggtcctgtgcaatacagttgacccttgg

SEQ ID NO: 753237 - DNA, 50 bp, Homo sapiens
agcagctccactgaacagataagggaagctgaatatggtgggcatgatca

SEQ ID NO: 753238 - DNA, 101 bp, Homo sapiens
ctggcgctaccatggcgtttggcaagagtcaccgggatccctacgcgacctccgtgggccacctcatagattttcgacaatgaagccaaagacgtggagag

SEQ ID NO: 753239 - DNA, 100 bp, Homo sapiens
gacatgatccaggaagagcagtaagggactgagctgctggattttctgccgtctcttggcaaaaatggcaaataatgatgctgttctgaagagactggag

SEQ ID NO: 753240 - DNA, 97 bp, Homo sapiens
ctgttgcagccatggtgcattgcagttgcgtgttgttcagaaagagagaactcgatgccaccgcaacggtattggcgaaccggcaggatgaaagtga

SEQ ID NO: 753241 - DNA, 100 bp, Homo sapiens
gcggctccgtggtgaagctactcaatacgcgccacaacgtccgactgcactcacacgacgtgcgctatgggtcagtggactttggagtgcttgcagtaag

SEQ ID NO: 753242 - DNA, 100 bp, Homo sapiens
agcaacatccccaaacagcggcgtttcacggtggcacatacatgtcgtgagatggagaataaagaaactctcaaagggttgcacaagatggatgatcgtc

SEQ ID NO: 753243 - DNA, 90 bp, Homo sapiens
ctccaccttcatgatcgacctcaaccaggtgggcgactcaaggatttgattttctacaagcaattgaacctgcctttatttcagctttac

SEQ ID NO: 753244 - DNA, 98 bp, Homo sapiens
tcggtttgtaggtcgtcagaaagagggatgatggcgccacttcctcagtttcggcactcaagcgcctggaacggagtcagtggacggataagatggat

SEQ ID NO: 753245 - DNA, 100 bp, Homo sapiens
gaaccaattattacattgaatctctgctctggaaagttcttgtcaataccaagaatcctcagagccagaaagaaaacgccagaaatcagtttctgatcca

SEQ ID NO: 753246 - DNA, 100 bp, Homo sapiens
gacaagtgcaaccttctggaggggcaatttgaatcaacccatagaagtgacagcgctgtattcatttgaaggacagcagcctggggatttgaattttcaa

SEQ ID NO: 753247 - DNA, 98 bp, Homo sapiens
cggtgctccggggaggtcacctgacgaggagggaagatggagagttggaagaaggtgaattggaagatgatggggcagaggagacccaggatacctcc

SEQ ID NO: 753248 - DNA, 51 bp, Homo sapiens
tgttctttgctgaattgccacacacagctctcgtggcattatccttcagtg

SEQ ID NO: 753249 - DNA, 82 bp, Homo sapiens
cctggaacaacgtcaagtacgacttcccaagtaagaagcggaagaggagccgctggaaccaagacacaatggaacagaagac

SEQ ID NO: 753250 - DNA, 100 bp, Homo sapiens
gcagaggcatggagccagtcctgagttacagaaacagattcgacaactggagagccacctgagccttggaagaaagcgttatcaagttatacccaaccag

SEQ ID NO: 753251 - DNA, 100 bp, Homo sapiens
ggcgcccaggttcaccgcgctctcagcgcgcacttccgggcacggtcagggcgtgacgtcgggaggagggcagggcagcatctcatcacggcagttgctg

SEQ ID NO: 753252 - DNA, 100 bp, Homo sapiens
ggatgatgcagatgtacagacacaagcgggccaacaaatagatgcttctgatgagcagaattcacagtcctcgatggaacattcgatgaacagctcagag

SEQ ID NO: 753253 - DNA, 100 bp, Homo sapiens
atgactctgggggagcacggatccaagaaggagtggagtctttggctggctatgcagacatctttctggtactgtgagaatagagatgtttcgaaatatg

SEQ ID NO: 753254 - DNA, 101 bp, Homo sapiens
gagcagccggggtcggagcgggaagctgttttaggttatgtgaaagagatgtttcctcatctctaaggcttaccagaagctctgatttgaagagaataaat

SEQ ID NO: 753255 - DNA, 96 bp, Homo sapiens
acacgcagagacaggccgaggagacgcgggccttcgagcagctcatgaccgacctcaccctgtcgcggggggcagctggcattttatgctatgtgg

SEQ ID NO: 753256 - DNA, 90 bp, Homo sapiens
gcaggatgtcgtggctgagcttctgaggaccgtcccctgggagcagccggccactaaggcctccaagactgcagagaatgccaccagtgg

SEQ ID NO: 753257 - DNA, 101 bp, Homo sapiens
ttcacacaagaaaatcccttttgccgatttaagagagcaacttcttcaagggcccggctctatgatgttgttgcagtttttccaaagacagaaaagctttt

SEQ ID NO: 753258 - DNA, 96 bp, Homo sapiens
ctgatcggcaactcaatggagaattctggtcactcagtgacacacacaactcgggcctccccagcgacagacccagatgatgtggtaccagttggc

SEQ ID NO: 753259 - DNA, 101 bp, Homo sapiens
cgaaggtgaagccacggaagataagaaatctatgacaagttcaagcagagtacacacagcatatatatgttcttcaacacatcagagctccgagaagcggt

SEQ ID NO: 753260 - DNA, 75 bp, Homo sapiens
aactgaactcctccagcctccagaaagccatccgggatggtgtcattgaggccagcatcaaccacgagaagggct

SEQ ID NO: 753261 - DNA, 75 bp, Homo sapiens
ctcctgccagccccagcccctggagaggatgcagaaaacccgctacgagacctacgtgcagctgctggtggcccg

SEQ ID NO: 753262 - DNA, 90 bp, Homo sapiens
gtctcttacgtctgcggaagtgcagctgcctcagttcttagcgcagctgccccagagcacatcagctatgtgccccagctctcaaacgac

SEQ ID NO: 753263 - DNA, 101 bp, Homo sapiens
cgattacatgcagccagaagaggactgggaccgggacctgctcctggacccggcctgggagaagcagcagagaaaggttgatgtgatcgtgacactgggag

SEQ ID NO: 753264 - DNA, 100 bp, Homo sapiens
tcgtgatgtcagcagcagccgagacgggcgtgttaaaggccggttgctagggctgggggaactcaggtacctgcacatgttgttctttgtcagtgctgtc

SEQ ID NO: 753265 - DNA, 74 bp, Homo sapiens
tacgcctatctcttcaagtacatcataatcggcgacacaggcccaagaggatgctgagaaacttcggtccgttg

SEQ ID NO: 753266 - DNA, 100 bp, Homo sapiens
gacactaaagcatatggagatagaatagaaagaatgcttcgcctcagtttgaacattgaccctgatgcaaagggccagatattcgaagcttacaacatgg

SEQ ID NO: 753267 - DNA, 100 bp, Homo sapiens
gagcccggaggaacattccaaaggaaaaatttcaggtgatgcaactgtgacaatagctcacagatacacccccaaagagcaactgaagattcatacgcag

SEQ ID NO: 753268 - DNA, 97 bp, Homo sapiens
ctggagcaattgttgtgacttcactaataaagaccaaagagagtctacagtatgcattagaaaccttgactatgaatggctgctcagttgaagatct

SEQ ID NO: 753269 - DNA, 82 bp, Homo sapiens
acagctcacgggagcaagaacggctccctggggaagggaatgcagggttgctggggctgggcccagaagcagcagcaccagg

SEQ ID NO: 753270 - DNA, 74 bp, Homo sapiens
aggactcagaattcatgattgaagaaatgcagaccgcaaaccaagggccaaaatttaaagaccgtcggctacag

SEQ ID NO: 753271 - DNA, 85 bp, Homo sapiens
ttctcgctgtgacagagacaacaccgagtatgagaagaatcccgttctgcttccagaagtggaagtgctcacggatcggggaaat

SEQ ID NO: 753272 - DNA, 71 bp, Homo sapiens
gaagtgacctcagcagggcatccaggagcgagaacccgagcagcgccatgagcaacactaccgtcgtcccc

SEQ ID NO: 753273 - DNA, 100 bp, Homo sapiens
cgccgcccggcgcgagactgcggccgaagcgtggggcgcgcgtgcggaggaccaggcgcggcgcggctgcggctgagatgccagcacgagccgccgcttc

SEQ ID NO: 753274 - DNA, 82 bp, Homo sapiens
gaagaagccaaaaacattctgggtgacttaagagattaaaattaatttggttgctgttggttctgaacaaataatgagttct

SEQ ID NO: 753275 - DNA, 100 bp, Homo sapiens
tttggcgtgcaacatggggcttgagaaaggagctgccaaacggaggcccgaagaaaaagaacctgaaaaagtaaatccacagatttctgatgaaaaagac

SEQ ID NO: 753276 - DNA, 100 bp, Homo sapiens
tgctcttcaggatagtatcttggccagggaactcaaacagcagatgcagcagatatctggggaagatgaagtagagtgctctgacaaggacgagcccgac

SEQ ID NO: 753277 - DNA, 137 bp, Homo sapiens
atcgcgatgttggtgagcgtggggaatctggaagaggctggggagtctgtgtccttccagctgcagatacggaggttggatggcaagcatgtggtgtttggcaaagtgaaagaaggcatgaatattgtggaggccat

SEQ ID NO: 753278 - DNA, 75 bp, Homo sapiens
ctcgttcaagatggcggagctcgaccagttgcctgacgagagttccatgtatgatggcttggctgacaattacaa

SEQ ID NO: 753279 - DNA, 83 bp, Homo sapiens
catgatgttcgacattaccaagcagtggtggaaagcggtgacacgccaaaggaccctgcggtgatctccaagtccccatccat

SEQ ID NO: 753280 - DNA, 100 bp, Homo sapiens
ctcatgaaaaggaaaggagtgcctcacaaatctgggatgcagaccaaacggtatcactaccattaaagttaacattcgtaatgccaattccctgggagga

SEQ ID NO: 753281 - DNA, 83 bp, Homo sapiens
cgcccctggtgcacacaccctcgtattctcctgcccttccccaggcggacctggtgaatgacctggggaacaaaggctacctg

SEQ ID NO: 753282 - DNA, 100 bp, Homo sapiens
cctggagactgtgctcaacaagcagttccccagcagcccccaggatgtgcttgcactattcctgatcagagaactccagttgcttcaacacacagtatca

SEQ ID NO: 753283 - DNA, 100 bp, Homo sapiens
cctgacccagtccctcatcatgatccagcccattctctactcttactcctttcatgggccaccagagggtcagttggatctcttaaggagcaatacgggc

SEQ ID NO: 753284 - DNA, 100 bp, Homo sapiens
gctcttacggccacagctaatcccagggtacagaaggacatcctgactcagctgaagattctcagacctcaggtagacggagtttcgccatgttgcccag

SEQ ID NO: 753285 - DNA, 75 bp, Homo sapiens
aacattgatggtgaggcttgggtagcaaatgagagcttctatccaggaatatattaaaggaatctgtgaacctga

SEQ ID NO: 753286 - DNA, 100 bp, Homo sapiens
cccaggactgtgcaggggactctgtcacaaaaaatatgtcgtaactgcaagtgtggccaagaagagcatgatgtcctcttgagcaatgaagaggatcgaa

SEQ ID NO: 753287 - DNA, 75 bp, Homo sapiens
gagaaagcaaaagtcgctgctgccaatgtgggtttttaatgaccacaacaagcaagcatgcagcttactgcttga

SEQ ID NO: 753288 - DNA, 101 bp, Homo sapiens
gtctaggagagcatttgtatgttatggtgaatgccaaatttgaagggcttcgtgggacacatatgcaacatgcctatgatttttacaagcctgatatgcta

SEQ ID NO: 753289 - DNA, 100 bp, Homo sapiens
ccctgagcctgacgctgcagaaagaaggtgtgattggagtgacagaggaggagttctgtttgctcagccgccggcccccacgccaacctctgctcccaac

SEQ ID NO: 753290 - DNA, 50 bp, Homo sapiens
gtccagcgagttgcagatctacacttggtctctaattaacagaagatggc

SEQ ID NO: 753291 - DNA, 90 bp, Homo sapiens
ggccgccctgggagcgagcggaggagcaggcgccggaggaacattttagtggacaaaccaaatgaccaatcttcaagatggtcttcagag

SEQ ID NO: 753292 - DNA, 75 bp, Homo sapiens
cccggagccagcgtgggaggccgctgccgtcgcgcgccttggtacactgaggaggggacggctccgtcttcacat

SEQ ID NO: 753293 - DNA, 100 bp, Homo sapiens
ggaagcaaaaactgccaaccaactgatggaaaaagctgagcttctgacatctctggaggtttcagcaagaaaagattgtgtaggttccaaagagtctgct

SEQ ID NO: 753294 - DNA, 75 bp, Homo sapiens
ctgcgggcctgtttgctgtgttcgctggtcaaggtatggaacctggctaactgcaagctgaagaccaaccacatt

SEQ ID NO: 753295 - DNA, 100 bp, Homo sapiens
aattgggcaatatagaatacatgctggaaaaacagtgccgattgtgaaaggaggggaggcaacaagaatggagatggctgcggctctgcattcaatccaa

SEQ ID NO: 753296 - DNA, 75 bp, Homo sapiens
cacgcatccatccagatgaacgtggccgagagtctgtagaagaggcgacaccagggcttccaaatgaacaaccga

SEQ ID NO: 753297 - DNA, 100 bp, Homo sapiens
agcaggcgatagcaatgcacagccaatttcatgctccactatagtataattttaataaccggggaagcctgacctttgaacctctaacattggttccaat

SEQ ID NO: 753298 - DNA, 74 bp, Homo sapiens
tctttgtctagccccagtgcagaagagtcaagtaccattggccaggatcaaacgcttatggaacgtgatacaga

SEQ ID NO: 753299 - DNA, 83 bp, Homo sapiens
ccctgccccgggcaaagcccatctggtccgccgagcagggggatatgagactttctactcggaatatcctgagtgttgcgtgg

SEQ ID NO: 753300 - DNA, 98 bp, Homo sapiens
taacattcaaaaactatattaaaaggaactggagaatttgtccaagacaaagattttggccacaggaggagcatctcacaatagagaaatcttacagg

SEQ ID NO: 753301 - DNA, 82 bp, Homo sapiens
aagaagctggtgtgcggagatgaagttgatcatggccttgccaggttggtgacagtatattgtgagcatggtcataaagctg

SEQ ID NO: 753302 - DNA, 100 bp, Homo sapiens
tgtaagaaacagtgctttctgaaacaacaaagccaaacttccattggtcaggatgattgtcttttgaaagtgtggtatcctatgactggttggaagtctt

SEQ ID NO: 753303 - DNA, 50 bp, Homo sapiens
ggcgagcagaactacggcgagcgggagaaggaagccaacatccttttgga

SEQ ID NO: 753304 - DNA, 125 bp, Homo sapiens
ctcctctatcagctcagcgggggaccccctcgcttcctgctcgacctgcggcagtacttggtgtttgaaagatgtatggtgatcttgaaacctccagacacaagaaaacttctagcaaattcagg

SEQ ID NO: 753305 - DNA, 100 bp, Homo sapiens
ctgtggatcaagcctccccaaccccaccatcccaccaaagggggctgctgaccgagagagctcactcagccagttgtcctgggaccaagacaaattcgcc

SEQ ID NO: 753306 - DNA, 123 bp, Homo sapiens
atgtagcatatatcctaaaggagatggaagtgatgtaccatcatgggtagcctttgataaacagattgccacactgaaggtcaaaatattttattcactgatggagaatatattaatcagata

SEQ ID NO: 753307 - DNA, 75 bp, Homo sapiens
gtttggtttggaggatcaatgctggcttccacggttgacctgacagttcaagaaaaggagaaatatcttaatgtg

SEQ ID NO: 753308 - DNA, 99 bp, Homo sapiens
gactgtcccagaagtgaatcgcagcaaatgcagccctgaggatttggctactgcatataacaacagggggcaaatcaagtacttcagggttgattttta

SEQ ID NO: 753309 - DNA, 90 bp, Homo sapiens
cttgaaagacaagacgctgattgaggtttggaattcacccagttgcaggccgaatgcctggtcagcttaatgtgctgctggctgaggctg

SEQ ID NO: 753310 - DNA, 98 bp, Homo sapiens
ttaccctcattggcgcttctctcctgcagtccgcctctgggccctgccggatgtggttctgagacagtccctgtccctgatggcccacggagcgactc

SEQ ID NO: 753311 - DNA, 100 bp, Homo sapiens
accagaaactcatcccagagttcattaagaagatttccttgatagctgccgtgccagtactctattggctgagctcgatgatgatgaggacttacctgag

SEQ ID NO: 753312 - DNA, 51 bp, Homo sapiens
acgcatccatccagatgaacgtggccgaggcgggatgtagctcattttggg

SEQ ID NO: 753313 - DNA, 100 bp, Homo sapiens
gtcaccagtttccatatgtaatgcaaggcggcacccgacctgacagcgttcagcgacccgcgccagttccccgcgctgccctccatctccgacccccgca

SEQ ID NO: 753314 - DNA, 82 bp, Homo sapiens
cctatcaggacatggagtatgaaagacgaaccaaaaacttttgctagaaaatcagcttttacgagagaaaactcatggcctt

SEQ ID NO: 753315 - DNA, 75 bp, Homo sapiens
ctcacagacccagccatcgttaagtggctagaagtgaccccaggatttttttattatcaagagagactagaagaa

SEQ ID NO: 753316 - DNA, 87 bp, Homo sapiens
gaccggcggcgctggaggagcgaggcagctgtactaggactgggaacggttatagctgaggtggtaccagtttaagaagtgagaact

SEQ ID NO: 753317 - DNA, 74 bp, Homo sapiens
tatcctgtccgagcaaagattacctattaccagaacacactgacaagtgtcaatccatatctacaaggacagag

SEQ ID NO: 753318 - DNA, 81 bp, Homo sapiens
acagaagaagctggaggccggcaaagccaaggggagtaggttgcatctttgttgaaatgatccaaggagttgctgcttttc

SEQ ID NO: 753319 - DNA, 100 bp, Homo sapiens
caccgttttcaccaccttgcactccatgtggctctcctttcccctaattcacagggtgaagccagatttggctcttaaagactctgaccaagtagcacag

SEQ ID NO: 753320 - DNA, 90 bp, Homo sapiens
tcatgatttttatctcacctggtgtggatgaggtcaccattgtcaacattttgaccaaccgcagcaatgcacagagacaggatattgcct

SEQ ID NO: 753321 - DNA, 82 bp, Homo sapiens
cgaggatgcgtgttcgcgggtgtgtgctgcgttcacaggtgtttctgcggcagaccttgatgaaggttgcggcccaaaactt

SEQ ID NO: 753322 - DNA, 95 bp, Homo sapiens
ctgcggctgtttgtggcaggaggcccccacccacagcactggaccaaggttttgacacaagggcgcatatcttcaaagcacctagtacctcctac

SEQ ID NO: 753323 - DNA, 75 bp, Homo sapiens
cttcgagatggctgcggggatgtatttggaacattatctggacaaatcacccaggacattttccagcagttgctg

SEQ ID NO: 753324 - DNA, 100 bp, Homo sapiens
ggaggagcagttgtctgatgaagagaagtggttttcccggattgtgtgtaggtgtgagatcaaccatgagttccgttgcagttttgacccaagagagttt

SEQ ID NO: 753325 - DNA, 82 bp, Homo sapiens
tctgtccccagagcctcagtttgtgcaggacaccgacatggaacagggactcactgggggctcagcaacagcctcaccaagg

SEQ ID NO: 753326 - DNA, 51 bp, Homo sapiens
accctggtcaccgtctcctcaggggccaactcaccctatgcagcacagccc

SEQ ID NO: 753327 - DNA, 103 bp, Homo sapiens
gctgcccagaaagcagttaacagtgccaccggtgttccaactgtttaaatttttggagctggcccgggaggtacggcactatggatacctgcagctggatcct

SEQ ID NO: 753328 - DNA, 75 bp, Homo sapiens
ctactaagcaccgttggtatcctcatggacggaagggcctgtcccagtcggctttaccctatcgacgcagcgtcc

SEQ ID NO: 753329 - DNA, 100 bp, Homo sapiens
ccggagacttcactgcccaaacaggaagtctatgatgagtacaaattgtgaaagtgttgaatttgtatactccagttaatgagtttgaagaaagagtctc

SEQ ID NO: 753330 - DNA, 90 bp, Homo sapiens
tgggcaagagtttccacacctatgacggggcagtacccaaaggaaacgctacgaaagaatacatggagagcttgcagctgaagcccgggg

SEQ ID NO: 753331 - DNA, 50 bp, Homo sapiens
ccagaggctggcagcgactatgtgaagaaaaagatgttgctggtccattt

SEQ ID NO: 753332 - DNA, 75 bp, Homo sapiens
ccgagatccgaggcaacggtggctcctcgaggtccacggtcccggaattcagtactgtacacaggaaattactgt

SEQ ID NO: 753333 - DNA, 75 bp, Homo sapiens
cgtgtggtgatgatcgaaaacaacaatcttgatgatgggccgctacgtggagcccatcgaggatgtgccttgtgg

SEQ ID NO: 753334 - DNA, 75 bp, Homo sapiens
cacaaaccagggctcgccatgaagccagtctgatgatttgaagaagagaagagagcctcacatctccactttaag

SEQ ID NO: 753335 - DNA, 50 bp, Homo sapiens
gccagccagcagcggcagcagcagcaggacagaaggcaattgcagctaag

SEQ ID NO: 753336 - DNA, 75 bp, Homo sapiens
aaggattccaagtaactcttatttggtgttcttcaacggtgccaacgtccggcaggtggacgtgcccacgctgac

SEQ ID NO: 753337 - DNA, 83 bp, Homo sapiens
cgccccttcgcgtcccctgcaccatgagctggggcaccgagctctggatcttgatgtggaagaaatggaggactcagaaccaa

SEQ ID NO: 753338 - DNA, 83 bp, Homo sapiens
ttccactcggctcctgtcgtccgttctctcaggctcccgttcagtgtggacgaatgtggaacctcgctctgtggctgtgttcc

SEQ ID NO: 753339 - DNA, 100 bp, Homo sapiens
actctatacagggacgtgatgctggagaattataggaacctggtctccctggaattagactttcttgtacctaaggctggattcttctgtccaatttgtt

SEQ ID NO: 753340 - DNA, 96 bp, Homo sapiens
gctgcccgcccgctgcctgcctgcctggcatctctctctcccgggagcgtaaccacgctgaaagcactgaacctaagacactgccctctggaattc

SEQ ID NO: 753341 - DNA, 74 bp, Homo sapiens
tggtgtgatgtctggggctgtccctgctgcagcagcccaggaggcggagcagcggagagcctacctggagggcg

SEQ ID NO: 753342 - DNA, 75 bp, Homo sapiens
tcagagacagctgcaccgacttggagctctttggcgctgagatgcgtctggagagccagagggcctgcctgaagg

SEQ ID NO: 753343 - DNA, 90 bp, Homo sapiens
aaggattccaagtaactcttatttggctgtgtggttccggtgctggtgccgtggaagtggcaatggcagaagccctgaataaatataagc

SEQ ID NO: 753344 - DNA, 100 bp, Homo sapiens
aaagtggaagcgaagccgaaaaaggcagcagcgaaggtaaacagtatgtccgggtggctggtcaccgacttgatcagtcccaggaagatcccgtctcagc

SEQ ID NO: 753345 - DNA, 75 bp, Homo sapiens
cacttagcacagcgcctggcgcaaggtatttgacctgtccaaagacgacttgatacctctataatgtaacagaaa

SEQ ID NO: 753346 - DNA, 98 bp, Homo sapiens
atattccatgacttggatatgctgacgactgtgcaggaagaaaacgagccagtgatttacaatagagcaagcaaagtgtgggatgctgtctcaggaga

SEQ ID NO: 753347 - DNA, 50 bp, Homo sapiens
ggattttgtcagcttgtcgtcaagagtggagcctttcaggctggcatgga

SEQ ID NO: 753348 - DNA, 98 bp, Homo sapiens
ctgagtttcctggtagagccggccgagctgaggcggtcgcggccatgaagacgataacagcaaccagagctccatcgcagatgcctcccccatcaaac

SEQ ID NO: 753349 - DNA, 75 bp, Homo sapiens
agagggacacgcagtgacgagcggccgaagcagctttgcggactctgccaccctccctcaggatgcctgagggcc

SEQ ID NO: 753350 - DNA, 96 bp, Homo sapiens
cttagctccttcgcatggggtccgaccgcaacacgtgcgctggataaacgcttgttaactggaattaaacaaccaccatgtcgagcaaaaaggcaa

SEQ ID NO: 753351 - DNA, 50 bp, Homo sapiens
gagcttgaggagagcaggaaaggtatgatgccgggcgggacggcttcatc

SEQ ID NO: 753352 - DNA, 95 bp, Homo sapiens
aaggtggcaagatggtgttggaaagcactatggtgtggccaagcatggggatcagcacgagggtcagcactacaacatctccccccaggatttgg

SEQ ID NO: 753353 - DNA, 75 bp, Homo sapiens
aaacagcccgcccgaccccgtcccgaccctggccgccccgagcggagcctggagcgagggcggcactgctcacag

SEQ ID NO: 753354 - DNA, 50 bp, Homo sapiens
gggggatgtctcggcggacgcgctggtttggtgcacctcgatttggagga

SEQ ID NO: 753355 - DNA, 100 bp, Homo sapiens
gaatttgttactttttcttgtccgggtgcggataagggacccgacactgatatgagttatcaccaccttgttctgaacaacacaacagggagcaaatttt

SEQ ID NO: 753356 - DNA, 96 bp, Homo sapiens
gaagacggctctgggttttccacttttctgggagaagaggctacaaggacttagtgcatcagatgtaacagaacaaattataaaaaccatggaact

SEQ ID NO: 753357 - DNA, 100 bp, Homo sapiens
atgaaaggagggttctgacacgttctcacctcgcgggatggcagctgctgatttgtcccatggccgccatggcatcagatgaaggcaaactttttgttgg

SEQ ID NO: 753358 - DNA, 82 bp, Homo sapiens
cacatgcccgctcacctgcgctgtgatgcctgcagagctgtggcttaccagactgctctggcccatttagagtctcttgcag

SEQ ID NO: 753359 - DNA, 82 bp, Homo sapiens
aatagtgatcacattcattttaattttgccggaatatttcaagacaccgaaaggtttatttcaatctacagaggacccagcc

SEQ ID NO: 753360 - DNA, 101 bp, Homo sapiens
acagctgctgcaatcgcttgggagagctcctgggccacccctcctttcaggtcaaggtgagcatgggtttatgcgtcttaggcattattgtgatggcgagc

SEQ ID NO: 753361 - DNA, 100 bp, Homo sapiens
agaagctaaaaatgaaagaacgggaagaagcatgggttaaaatagaaaatctagccaaagccaatccccagctacatcccggaccgtgtgcggaaggctg

SEQ ID NO: 753362 - DNA, 83 bp, Homo sapiens
ctggtgtccagggtctcagcgcgggggacgactcagggcagctgcaatgactctccgcacggtattattgtcattgcaagcac

SEQ ID NO: 753363 - DNA, 75 bp, Homo sapiens
acactctccaacctcatctccctggggcccagggccggaaccaggaggagcgcctgctcgcagacctgatgcaaa

SEQ ID NO: 753364 - DNA, 75 bp, Homo sapiens
gtgcggatcctgctggtgggagaacgtatcctggatacagccatcgttgatcgggggaggaatgtggtgtctgct

SEQ ID NO: 753365 - DNA, 101 bp, Homo sapiens
aagtgtatatcaagccacaatttccatcaaaaagtgattaagcagagaatggagaagaaggttgattccaggatgatcacggacgtgcagctcgccatctt

SEQ ID NO: 753366 - DNA, 117 bp, Homo sapiens
gaaaactccttccagacactattttggagaagttaaccacagcttcacagactaattctttcgggaggaccattgcctcaagggcatgaatttgaactgtacgaagtgagatttcac

SEQ ID NO: 753367 - DNA, 49 bp, Homo sapiens
gctaatccagtggaaatcaggagagcacacacatgccctcttggttctg

SEQ ID NO: 753368 - DNA, 75 bp, Homo sapiens
ataatccaaagtcgtctggatcagagtatggaggagaatcaggacttaaaggatccttactttagaatgacaagg

SEQ ID NO: 753369 - DNA, 100 bp, Homo sapiens
ggcttctctgaggcggcgagagatggtcaggtctggagctcgaccgggccagattgaagataaaactttccaagtccttggtaatctttacagcgaggga

SEQ ID NO: 753370 - DNA, 50 bp, Homo sapiens
gaaaggttatcttctgaaaaaggtggatgatgccttctcacagacagtaa

SEQ ID NO: 753371 - DNA, 75 bp, Homo sapiens
gcgggtacagcttttcgctgactacattcaggaactctaactccttgccactcaagaaatgtcctccctttcaga

SEQ ID NO: 753372 - DNA, 103 bp, Homo sapiens
cacgatctccaggcctcttatatgccgctttggataccagatggatgaaagcaaccaatgtgtggtccggttccagttgttggcaaaggagaggaagaggaag

SEQ ID NO: 753373 - DNA, 83 bp, Homo sapiens
caccccgcgggatacgcctcagcgcgagatcctgaaggagctagacgagtgctacgagcgcttcagtcgcgagacagacgggg

SEQ ID NO: 753374 - DNA, 105 bp, Homo sapiens
cgggggctttcgcccgggtcctcctagaaattccccccgaagaagactcccccacatctggctcaccatggatgatgatatcgccgcgctcgtcgtcgacaacgg

SEQ ID NO: 753375 - DNA, 87 bp, Homo sapiens
agcagtgaaggagtgcagaggcatcacctgaaagattctctaaccatggcacaggtagagaaacgtggaggtttgctccggaaatct

SEQ ID NO: 753376 - DNA, 101 bp, Homo sapiens
cggctgccgagaaggagggaggggaaacacaaagccggctacgcgctgcgaggctttcaacagacctcacatctttcttcttatgaaattataactccttg

SEQ ID NO: 753377 - DNA, 100 bp, Homo sapiens
ccctggacagcgtggaacggaagctgctgatgtccagcaccaaggggctctactcagacactgagtccagttacaacacagggatcacaacaaacacaac

SEQ ID NO: 753378 - DNA, 100 bp, Homo sapiens
aagtaattcagctacagggtgaccaacgcaagaacatatgccagttcctcgtagagcaatggctgccatccggaagaaactggtgattgttggtgatgga

SEQ ID NO: 753379 - DNA, 75 bp, Homo sapiens
cagcctgggggccacagctgcttcaatggtcttgctgcattcagggcttttttaaagtcggaattctgtgaagaa

SEQ ID NO: 753380 - DNA, 74 bp, Homo sapiens
attatttacccctatgaaatgtttcagtctggagccaaccatgtggtgaatgaaaactttgccattgatttgat

SEQ ID NO: 753381 - DNA, 83 bp, Homo sapiens
agccgaggccgccgccgcctctccttgctgcagccatggaatataattggtgattacaactttcctctataaattaactcttg

SEQ ID NO: 753382 - DNA, 100 bp, Homo sapiens
gagcagccacgatgatgattctagcaggttcctgagtcctcgagcgcgggaagaaagtgggccccatgctgattgagtttaacatgcctgtggacctgga

SEQ ID NO: 753383 - DNA, 83 bp, Homo sapiens
cccagctctctctgggcatctggaaagcacttctcagaacttctggatgagttttcccagaacgtcttgggtcagctcctgaa

SEQ ID NO: 753384 - DNA, 100 bp, Homo sapiens
caagccctccttcgtgtcgtacgtacgccctgagtaggtgtgcactcttcccgggggtgctcaggaagagggctgctcccgtggactgcctcaggccgag

SEQ ID NO: 753385 - DNA, 51 bp, Homo sapiens
atttggagcacggcatgcatgacagagtctcgttctgtcacccagcctggt

SEQ ID NO: 753386 - DNA, 82 bp, Homo sapiens
ctccatagtcaccacttcacttcacctctttctggaaaccagatgcctgaaaacttcatgcctcctgttcccatcacatcac

SEQ ID NO: 753387 - DNA, 140 bp, Homo sapiens
ttggggtccccaacgtgggcaagtcctccctcatcaactccctccggaggcagcacctcaggaaaggtcccaggtgtgacaccttcagcaggtctcagggaagatggcagccctaggggacattcaggagtccccttctg

SEQ ID NO: 753388 - DNA, 90 bp, Homo sapiens
cccacccctcctgtaacccagcctgtttcacttcttggttttgggcggaaagacgtagttgaatatttgcttcagaatggtgcaaatgtc

SEQ ID NO: 753389 - DNA, 98 bp, Homo sapiens
cagcgcagtgacagtgcagaaccccggcgcggcccttggattttgatgtagattcccaaatccgtgctgagatgcacagaaaaacagctttcaaaatt

SEQ ID NO: 753390 - DNA, 83 bp, Homo sapiens
cttggactgagtcctgcaggacacaggatgaggaagatggagagaatgcccacccatatagaaacagtgaccctgtgattggg

SEQ ID NO: 753391 - DNA, 74 bp, Homo sapiens
ctgggatgctttggacctgggcgatcgtggtgtgccactgaagatcctggtgtcgccatgggccgccgccccgc

SEQ ID NO: 753392 - DNA, 51 bp, Homo sapiens
actggggtccccaaagaagtcaaggggggaccttccttggagcagaggttt

SEQ ID NO: 753393 - DNA, 100 bp, Homo sapiens
ctgggtccttagcactattttacagaaagccctctctgggagatggttcaggatggcattgacctcaagagcatcaagtggacccaacactagaagaata

SEQ ID NO: 753394 - DNA, 100 bp, Homo sapiens
ccccgccggccgccgcgccgcccggcagcctcggcaggtggtagctgagcacccagatgcttcaggtgaggagattgaagagctgctcaggtcacagtgg

SEQ ID NO: 753395 - DNA, 100 bp, Homo sapiens
ggagaactacaggaacatggtcttgctggtgatggaatggggagaagatattaaagcagtttcaaaagatgaagcagtgatgttggtgaatcatcaggca

SEQ ID NO: 753396 - DNA, 101 bp, Homo sapiens
aacagtctcatctaccacagcaagaaagccagtcacaagagctgctaatggccaaagaccgggttccagatgtggttagaagaaaatagaagtaatatttt

SEQ ID NO: 753397 - DNA, 101 bp, Homo sapiens
ccccctggggatccagcgagcgcgggagatgcagttaaagacttgatgcttcgctttctgggtgaaaaagctgcagcaaagagacaagtcctaaatgccga

SEQ ID NO: 753398 - DNA, 100 bp, Homo sapiens
gtccgagtctccgccgctgcgggcccgctccgacgcggaagatcctgggaagactctgcctgaagcccttgattattgcactgtttggctacagacagtg

SEQ ID NO: 753399 - DNA, 100 bp, Homo sapiens
ggaagaggggctggagcccacctgctttgagaagagcaatgacattgggggcctgtggaaattttcaaggcatttcatccttcatgaagccattcaggat

SEQ ID NO: 753400 - DNA, 98 bp, Homo sapiens
ctcggactgtgccggcgccgcacccgaggctctcgccagcccggcgccccggtgctgagtcaggtcaattcagtgaagatatgatacccacagtgggc

SEQ ID NO: 753401 - DNA, 100 bp, Homo sapiens
aaaatatttgtaggcgggttatctgcgaacacagtagtggaagatgtaaagcaatatttcgagcagtttggcaaggttccagcaacagatagaaatgctt

SEQ ID NO: 753402 - DNA, 90 bp, Homo sapiens
ggaagacacaaaagatggcatctggctggttcagaattttgattctgacattagcagtgtgggaatagatggctgctggcaggcagacag

SEQ ID NO: 753403 - DNA, 97 bp, Homo sapiens
attacagatgtctgtgaggcaagcaaaaattccatggaaaatgggagaccacctgatcctgcagactgggccgtgatggatgtcgtcaattatttcc

SEQ ID NO: 753404 - DNA, 75 bp, Homo sapiens
tcaagcaggccaactggctgagcgtctccaacatcatccagctggacgccaggaaagcatgtgcagatgcaactc

SEQ ID NO: 753405 - DNA, 101 bp, Homo sapiens
atgttcatgtcactataggagacattaaaacgggagcaccacagtatgggtatcgaaggatgatcgcagtgatgtggagagcagctcagaggaagaagatg

SEQ ID NO: 753406 - DNA, 100 bp, Homo sapiens
aaatatgctggggaccatcaccatcacaggagtgggaatagctttgcgaaaaatgggcgcaatggccaagccagattgtatcatcacttgtgatggtaaa

SEQ ID NO: 753407 - DNA, 115 bp, Homo sapiens
tatgagacaagaagacattagtgagatatggtttgaatatgaaggcacaccactgaaatgattttctaccctagcaaggatggtacgaagattccaatgttcattgtgcataaaa

SEQ ID NO: 753408 - DNA, 80 bp, Homo sapiens
tttgtcaccctcaaagctatagctcttgctaattcaggtcctaggcctacttacaagcctccagtctcaaattatccagg

SEQ ID NO: 753409 - DNA, 100 bp, Homo sapiens
gagatttgtttggcgtgccaagcttctctgtgaaagagcacaggagcaatttacagcaatgagggatttatacatgaaaaatggacaaggatttgcatta

SEQ ID NO: 753410 - DNA, 100 bp, Homo sapiens
actgcgcgtcttgcagggcgcgaccgcacagcgacttctgcctgggctcccccagtggatccggcctccctaagcctgctgactgcctcctggcccaaga

SEQ ID NO: 753411 - DNA, 49 bp, Homo sapiens
gacaagcttaccctcttctgcgagcatcagcgagagctttctaactgtc

SEQ ID NO: 753412 - DNA, 99 bp, Homo sapiens
agctgggtcagtccgccgctcaccccgcggccgcaccttcccgccttctcagacaccattcgcttttcacccaagatgatttgatgtcttataaaactc

SEQ ID NO: 753413 - DNA, 100 bp, Homo sapiens
gacgcccatccagctgaacccggcccccgacggctctgcagttaacgggaccagctctgcggaatctgacaactggctggcttcccaccttggactgcct

SEQ ID NO: 753414 - DNA, 100 bp, Homo sapiens
gcacatcacctacactaccacggccacactcaccactccatggccacacagctccatcaagtatgatggtgaaggatgaatatgtgcatgactttgaggg

SEQ ID NO: 753415 - DNA, 100 bp, Homo sapiens
gctgatcgctcattactatgccacgcgctctgcagcccagagtgtcaaacagctgttcctgagactggcccagacgctgcggcactatggctacttgcgc

SEQ ID NO: 753416 - DNA, 107 bp, Homo sapiens
cttcgaggtggagagagcccagtgggaggtggagcgggcggagctgcagcaaattgtggctactaatttgccccctgaagatcaagatggctctggggatgactctg

SEQ ID NO: 753417 - DNA, 75 bp, Homo sapiens
gagccaaggaataaacatgcaatgaacccaaaaggaggtctgcggggtttccgagaggctcgccgggatttctgg

SEQ ID NO: 753418 - DNA, 75 bp, Homo sapiens
tgtcgtccgttctctcaggctcccgttcagggctcagggaggactgacaggactagagttgacaaccattcatcc

SEQ ID NO: 753419 - DNA, 52 bp, Homo sapiens
tgctcgacgaagcttaaattttggttcctggactattgtaggggttgctgcc

SEQ ID NO: 753420 - DNA, 75 bp, Homo sapiens
ctgctcacacttcagaatagagaaggcgttcgtggcattcagggatgtggctgtgtacttcacccaggaggagtg

SEQ ID NO: 753421 - DNA, 82 bp, Homo sapiens
gaaagtggatggcagcgagccgaaactgagcaagaagttgctgatcagctctgtgccaagtatagcaaggaatatggcaagc

SEQ ID NO: 753422 - DNA, 98 bp, Homo sapiens
ttaaggattccaagtaactcttatttgatcatatctgaagatattagtgagctacaaaagaatcaaactacatctgtagccaaaattgcacaatacaa

SEQ ID NO: 753423 - DNA, 74 bp, Homo sapiens
ccggagccgcagtctcagcatgaacttgggaatgttttcttaaaattcgactccaagccccctgatccttgatc

SEQ ID NO: 753424 - DNA, 75 bp, Homo sapiens
gctgagcgcccagcacttggagcgtgaggaagtccggaagatcggggtgtttagctgtggcccccctggcatgac

SEQ ID NO: 753425 - DNA, 80 bp, Homo sapiens
gacgccatgtcgggttattcgagtgaccgagaccgcggccgggaccgagggagacgatcctccctggccggcgggattca

SEQ ID NO: 753426 - DNA, 75 bp, Homo sapiens
aaagacagtcctcgtcagcactgactttcagctatggaatcgttcacggcgaagcagctggagaagctggccaag

SEQ ID NO: 753427 - DNA, 113 bp, Homo sapiens
ccagcaagcggaagctgcccttcaccgcgggcgccaatggggagcagaaggactcggacacaggctgaaggtgatgtggccgccctcaaccgacgcatccagctcgttgagga

SEQ ID NO: 753428 - DNA, 83 bp, Homo sapiens
aggacgagggccagctgacggagatggtgcagaagatggaggaggaaataatgcaaaaggtgtcccaaggctcctgaccagtg

SEQ ID NO: 753429 - DNA, 98 bp, Homo sapiens
agaagcaagaaggccctggacacagcaatatctctgggctttcacagaaaaagcttgtggtgaaggggggcaaaaaaaagaagcaagttctgaagttc

SEQ ID NO: 753430 - DNA, 90 bp, Homo sapiens
tttaagtacaatggtgggcttaattttagagtggccacgacccagcacaggatgcagagcttcctgactctgctgaaggagcatgaggac

SEQ ID NO: 753431 - DNA, 90 bp, Homo sapiens
cagagatagagaagacccccaaggtcatacaccgatttaagcggcagaggaggaagtttgagtccaggcctctgagcttttccagttttg

SEQ ID NO: 753432 - DNA, 100 bp, Homo sapiens
ggcaggggtctcggaaaccatgggttattgcagtggcaggtgcacgcttatctttatctgtggcatgcaactgggttacgactcactgattaaaaagagg

SEQ ID NO: 753433 - DNA, 97 bp, Homo sapiens
cgtggcggccaagccggggggaccagaggcccccgaaactgaagctccacagggcattccagagctcattgaggttatcaatactctggctgaccat

SEQ ID NO: 753434 - DNA, 98 bp, Homo sapiens
aacaacctcttgaggatcgaatcttcactcccgctgtctcagcagtctacagcacggataagttctgaacgtcgaaaagaaaagtctcgagatgcagc

SEQ ID NO: 753435 - DNA, 98 bp, Homo sapiens
acgctggcagtccttggggctcgcttctccagggaaagtgaccgaggcagtgaaagaggccattgacgcagggtaccggcacttcgactgtgcttact

SEQ ID NO: 753436 - DNA, 75 bp, Homo sapiens
cctaccatgagctcttggaggcgagcctgctgcgggagtggccgcaagaggaagaggacgtggaatgggacgtgg

SEQ ID NO: 753437 - DNA, 100 bp, Homo sapiens
catgcaaaccaatgagggagaagtatcggaagaaagcagttccaagggcagatgattctggaccagatgaagcctgaggagccttccagctctaagatag

SEQ ID NO: 753438 - DNA, 100 bp, Homo sapiens
gggaggaggcaggcgcggctgccggcggctgggactgaagagggacgggtcccgcggcgagcgagctcctgagtgacaaccatgagtggaaaaaactaat

SEQ ID NO: 753439 - DNA, 82 bp, Homo sapiens
gagaaggacagcttcagggcccggagtactagtctcaacgagagacccaagagctgaataccactagaaacatacctgtaac

SEQ ID NO: 753440 - DNA, 100 bp, Homo sapiens
ggcccgccgtgacccacggccgcctccggagcccgacgcggtccagtggcattgcagagcacggatggttgcaggagccaacttttacattgttggacga

SEQ ID NO: 753441 - DNA, 75 bp, Homo sapiens
catggctgcttaaaatggtctatggtctgtctctgttctgcggggagtgtctccagccctgcctgcaggtgccat

SEQ ID NO: 753442 - DNA, 95 bp, Homo sapiens
ccctcgccgctgccgttctcagccggctctggagtgcgggcgggggcgacagggccgattccggagtggacaactgggcggagttaatggaagtc

SEQ ID NO: 753443 - DNA, 74 bp, Homo sapiens
cccaccgtggcctcccaaagtgctgagattaaagaaatacccgcagcccaaagggcagaagaagaagaagatcg

SEQ ID NO: 753444 - DNA, 100 bp, Homo sapiens
cggaccgagcccctggagggaagttgccgcagccgcccgggccgccggccctcctgtcccgcgccagatcttcataaacaatgaatggcatgattcagtg

SEQ ID NO: 753445 - DNA, 75 bp, Homo sapiens
ttcgtcaagaccgtgacggagggtggtgcggcccatcgggatggcagctggaagatctggaagttactgtagctg

SEQ ID NO: 753446 - DNA, 100 bp, Homo sapiens
tgtgtctcttcatctccgtgagaaaggtgcccccgaagtgaaagagatggcctggtggaaagcctggcatgccaatgaagatgtggaaagaatgttacta

SEQ ID NO: 753447 - DNA, 75 bp, Homo sapiens
ctcaactttggtctcctgggaccactcgttgctgacagtcagaaatgagtgatggattggaactgagaccgaaat

SEQ ID NO: 753448 - DNA, 90 bp, Homo sapiens
tccagccgcattttcacagctgactgaaccactccagatgccccccacctagcagtccaggtgtctgagatgctgccaccgcagaagaag

SEQ ID NO: 753449 - DNA, 100 bp, Homo sapiens
cttccacctcgacctctggttctacttcacactgcagaactgggttctggactttgggcgtcccattgccatggttacaagcctgatgaagggaaacgag

SEQ ID NO: 753450 - DNA, 82 bp, Homo sapiens
taattaatgaccgaacagaaacccctcctcccctagcttcactcaatgttagtaaggtggcacaagaatggctcaactctcc

SEQ ID NO: 753451 - DNA, 83 bp, Homo sapiens
ggggggcaagggttcggccgtgccctccgacagccaggcccgcgagaaggtggtgaaggaggagatctttgatgacaatgcca

SEQ ID NO: 753452 - DNA, 101 bp, Homo sapiens
ccagcccagaacagagaatcaggaaacagatattgatgacagatatggagatttggattccagaacagattctgatattccggaaattccaccatcctcag

SEQ ID NO: 753453 - DNA, 74 bp, Homo sapiens
ccacgacaagcgcttcgtcatggaggtatgactgggtcacatcatacaaggtccagttcagcaatgacagtcgg

SEQ ID NO: 753454 - DNA, 75 bp, Homo sapiens
gccttctgcctcagaacggcgtgactcggaggacctgcgctgccgagaggaccagtggtaccccctggaaccccg

SEQ ID NO: 753455 - DNA, 76 bp, Homo sapiens
ctctcccaacatggcggcctcagctgtcgacttgctggagaagatgcttgtattggactcagataagagaattaca

SEQ ID NO: 753456 - DNA, 78 bp, Homo sapiens
cacggcgcagacgcgggcgagctgcggctcggacgccagcggacacgcgggcgagtgagaaagatcagtctaaagaaa

SEQ ID NO: 753457 - DNA, 51 bp, Homo sapiens
gagaagggcaaaaacttggaagggatagctgggagtatggccaccctgctc

SEQ ID NO: 753458 - DNA, 75 bp, Homo sapiens
aggtcaaagaaaaagttcaaaaactgaaggactctgaagctgagagattcagttgtggaaattctttttgaacaa

SEQ ID NO: 753459 - DNA, 100 bp, Homo sapiens
tgacctgtggagacacggccagatctgccctccatactatactggcaattgctggagaagattttgcaattgttgcttctgatactcgattgagtgaagg

SEQ ID NO: 753460 - DNA, 101 bp, Homo sapiens
gatggaacaaaggcggttaaacttgatatggtggaggacacagaagacatttgaagacagtgatttgttccatttgattggtgttatctgtggcttagcaa

SEQ ID NO: 753461 - DNA, 101 bp, Homo sapiens
gcggaagggccacgcgtcccccagtaggagaatgactccgattcgtgaccctcagcgccggtgcatgtcgatgagcagccctgggccccctgctggctggg

SEQ ID NO: 753462 - DNA, 100 bp, Homo sapiens
attctatgtcaaacattccaagtactctttgagagaatgtgatcaatgggcaggactacgaagtgatgatgcagattgactgtcaggtgatggacaccag

SEQ ID NO: 753463 - DNA, 100 bp, Homo sapiens
agtctcatgcttccagcctggataatgattgagccacctgtccaggtattgttgcagcatctggcagtgagactgaggatgaggacagcatggacattcc

SEQ ID NO: 753464 - DNA, 76 bp, Homo sapiens
ggagggacttcttggcttctcccagcatagccccaggttcgtgtaaattcattagtgtgcttaggaaagattttgg

SEQ ID NO: 753465 - DNA, 101 bp, Homo sapiens
cgcggcggccgcgcagggagctctcgaggcaacgccggggcgcccgaggtctggaaggcgcagttggatatgtcaagtgaccagatagctgccaatctgca

SEQ ID NO: 753466 - DNA, 102 bp, Homo sapiens
cttcataccagctgaagagcgacaagccgctggcagccgcggatctcaccgccgctcagggtatcgagaaccttccctgcgaacttcagaggaacttccagc

SEQ ID NO: 753467 - DNA, 97 bp, Homo sapiens
cagcctagcagtcgggaccgtactgaggccccttcacagatgtagtcactacaaatcttaaattgcgaaatccatcggatagaaaagtgtgtttcaa

SEQ ID NO: 753468 - DNA, 50 bp, Homo sapiens
caacgccccggtggagaagctgagacaacagcagttctgtagagagttta

SEQ ID NO: 753469 - DNA, 75 bp, Homo sapiens
gctgagccaagtgccaatggatggcaggaatgagacgagttgtactgctgtcacaggaaatggacgctggattac

SEQ ID NO: 753470 - DNA, 75 bp, Homo sapiens
gtttccgtcagtacgcgaaggatatcggtttcattaaggcattttttacacttgcacgagatataatgacaaaac

SEQ ID NO: 753471 - DNA, 101 bp, Homo sapiens
ctgtggccgtgaagatgcgcgccttccaggtactccaaagattcaggtttactcacgtcatccagcagagaatggaaagtcaaatttcctgaattgctatg

SEQ ID NO: 753472 - DNA, 82 bp, Homo sapiens
gatgttcttctaatactcctcctctaacatgtcagcgttattgtaatgcaagtgccttgtccacattttgcgagagacaaca

SEQ ID NO: 753473 - DNA, 82 bp, Homo sapiens
ctggatcatggctgccgcgccgccgctacgggaccgcctgagctttctacaccgggagccttcacgtaaatgggtccagtca

SEQ ID NO: 753474 - DNA, 98 bp, Homo sapiens
gcgggaggcagggggacgacaaggagggcatgatcaacctcgtcatgtcctacgcggtgagaagccctaccactgcaactgggacggctgcggctgga

SEQ ID NO: 753475 - DNA, 98 bp, Homo sapiens
taaatatacgctttgttggtggactactctcagcctactatctgtctggagaagaggacctgaacccagacccaatcttagaggagaatcaaggacat

SEQ ID NO: 753476 - DNA, 96 bp, Homo sapiens
ttggttctactgtgggtctggactgatctccatgtcctgttgtggggcttttacagcctttggaatccacacaggcgacagaccctacaagtgccc

SEQ ID NO: 753477 - DNA, 89 bp, Homo sapiens
aacaagcgcaagagagacgaagaccaaacctggaccacccaaaaagccgaagaccccttcaagaccatcagccttagcatattgctatc

SEQ ID NO: 753478 - DNA, 80 bp, Homo sapiens
atctcaacaccctgagtgcggatttctgctatgatgacagcctttctgagaaaagtctacagcattctttctctgcaggt

SEQ ID NO: 753479 - DNA, 50 bp, Homo sapiens
tccttgtgcaaataaatgcttaacatccacgacagcgatggcagttccag

SEQ ID NO: 753480 - DNA, 90 bp, Homo sapiens
gccgtgcgccggcctttggtcgcctccgtgggcctcaatgagttttgctcttgttgcccaggctggagtgcaatggcacgatctcagctc

SEQ ID NO: 753481 - DNA, 80 bp, Homo sapiens
ccgctgccgctgctgctgggcctcttcctccccgcgctctggcgtagagatagcaaaattactcagtgggaagacccaag

SEQ ID NO: 753482 - DNA, 100 bp, Homo sapiens
gtgctgtccacgcacctggacgacgcccggcgccagcacatcgcaggttgatggacggatggctacatggatgtgatggagatggtttactatcgggacc

SEQ ID NO: 753483 - DNA, 100 bp, Homo sapiens
gattcctaccgagagtggatacaggtgatgtacctgctcccccttcaccttctgccataattggaagcttcctgaggccctcaccagaagcagatgccgg

SEQ ID NO: 753484 - DNA, 100 bp, Homo sapiens
ggcggttttggctcccccatggacatctttgatatgttttttggaggaggaggaaggatgcagagagaaaggagagtgaacctccttggcctgggcgaag

SEQ ID NO: 753485 - DNA, 100 bp, Homo sapiens
acagatagaagaactaatagagaaacctggaggcatcattgtacgatggtgtaagcttgtcagctcatttgcagcttacatttttggtttcttccacaaa

SEQ ID NO: 753486 - DNA, 50 bp, Homo sapiens
gtccagtgcccgcaggctctgagattttatttggagagaagcaagcatct

SEQ ID NO: 753487 - DNA, 100 bp, Homo sapiens
gccatggcgttcctcaaactccgtgaccagatgaccgcacctcgagcaggagtggggatgccacgtctgcccccagcgcccggccctctgtccaccacgg

SEQ ID NO: 753488 - DNA, 75 bp, Homo sapiens
ctttgtcacagcccaagatagttaagtggggcttgtaaacatataacataaaaatggcttccaaaagagctctgg

SEQ ID NO: 753489 - DNA, 101 bp, Homo sapiens
atttgctctgagcatcagtcacggctggaaatcttccatttggttatgtatcgaaactaccagcggaagaatgacatggatgagcccccacccctggacta

SEQ ID NO: 753490 - DNA, 100 bp, Homo sapiens
atactgagcttcttcctatttgccatgggcaacagctgaagctaataatcttgctgcagtagcaggagcaagagatacctattgtaaaagtatggaacag

SEQ ID NO: 753491 - DNA, 75 bp, Homo sapiens
cgacgagggagtcgatttacctggagaaaggagtgcctggctgttatggaaagtcatgcggaggaatccctttgg

SEQ ID NO: 753492 - DNA, 75 bp, Homo sapiens
cgggacctctccgggccatgggtgttctcctacatagccactctgctctacgtggtccatgcggtgttctcttta

SEQ ID NO: 753493 - DNA, 76 bp, Homo sapiens
caaggacctggccgacatcgcggccttcttccgatccgggaaatattagtcgtcaagaagctgttagcatgatccc

SEQ ID NO: 753494 - DNA, 83 bp, Homo sapiens
cctctacctcctgcgaggcctcccgggctccgggaaaactacactggccaggggatctgccaggagagcccagcaagatgaca

SEQ ID NO: 753495 - DNA, 80 bp, Homo sapiens
tactctctctttctggcctggaggctatccagcgtcagggaagtcaaagatgcatccctgagttcttcctagcaggcaag

SEQ ID NO: 753496 - DNA, 100 bp, Homo sapiens
ggatcatggcttactgcagtctggaactcctgggctcaaaccatcctcccacctcagccttgttgtggactttagaaagaagaatattacctattacgac

SEQ ID NO: 753497 - DNA, 100 bp, Homo sapiens
cccagcgggagtcgcggaacagcaggcccgagcccaccgcgccgggccccggacgccgcgcggaaaagcttcgcttttttgcaaatgcattcactttgac

SEQ ID NO: 753498 - DNA, 100 bp, Homo sapiens
ctacaacccgttccagttcgagatcaccttcgagtgcatcgaggacctgtctgaagtttgaagaaaacaggtctgaaacaaggtcttacccccagctgct

SEQ ID NO: 753499 - DNA, 96 bp, Homo sapiens
gactactggggccagggaaccctggtcaccgtctcctcagagacacctatggctgccgatgaaggctcagcagagaaacaggcaggagaggcccac

SEQ ID NO: 753500 - DNA, 89 bp, Homo sapiens
atggaagcatatgttctagaagacattcttgaggagtccaaaactacttacctggaagaccttccaccaccccctgagtatgaattggc

SEQ ID NO: 753501 - DNA, 100 bp, Homo sapiens
cttcattcatgaaaagcatgcccatacgattaaacctgcgctttggatgaagagtatttaaaagtagatgcccaatttggaggcattgatcagagaaaga

SEQ ID NO: 753502 - DNA, 82 bp, Homo sapiens
catgcggaagatcgtcgccacctggatgctggagcaaattgtggctactaatttgccccctgaagatcaagatggctctggg

SEQ ID NO: 753503 - DNA, 100 bp, Homo sapiens
atcacaaaaccagatgtctacaagagccctgcttcagatacttacatagtttttggggaagccaagatcattaaagacttttaccttctgggacgtggag

SEQ ID NO: 753504 - DNA, 82 bp, Homo sapiens
agtaactgaagtatctgcccctgtcaaatcattccaggaactctccggagtcctttctgtattgttgtgattttgcttctgg

SEQ ID NO: 753505 - DNA, 97 bp, Homo sapiens
gctctacccagaattcaattaaagtggctcaggtctgccatcatggatgttctcgcagaagcaaatggcacctttgccttaaaccttttgaaaacgc

SEQ ID NO: 753506 - DNA, 117 bp, Homo sapiens
aaatggaaaatgaggtacttaaagtgctttccgaagctgctatttcaggtggcttcccacacttctgactcggacgttccttccggtgtcactgaggtggtcgtgaagctctttgac

SEQ ID NO: 753507 - DNA, 75 bp, Homo sapiens
gaaaaaggccaggttggagccccgggatgggtttgttgataagccggggcccttcgtgggaccctgcggtcactg

SEQ ID NO: 753508 - DNA, 100 bp, Homo sapiens
gaagacataaaatctttaacatttgacgcactggttatattctgggcactaaatgaaggcgtttctaggcaatttgattcgttcagagatggatttgaat

SEQ ID NO: 753509 - DNA, 100 bp, Homo sapiens
agaggaggacagttcgctacacagcaatgcatcgagaacttggtgagaacttgcccattgaagatagagagaccataattatgaatcaaattctgcctta

SEQ ID NO: 753510 - DNA, 75 bp, Homo sapiens
ccagttagtggtgctcaacgtgtacgacatggtccagctgggagctccccgacctccaggagggcaagatccaag

SEQ ID NO: 753511 - DNA, 89 bp, Homo sapiens
attttcattttacctttatgtatttacctacggagtcagattcctgaaaaagtttgtgaagtgtggatatgcaggctctaactttccag

SEQ ID NO: 753512 - DNA, 74 bp, Homo sapiens
gttttgctgggtgtgtcttggcccatgggaaccacatggatctgcctgaattatatccagatcgagagacagaa

SEQ ID NO: 753513 - DNA, 83 bp, Homo sapiens
gtgctttccacgacggtgacacgcttccctggattggatgtgaagttcatttccaatccgccctccatggtggcagcggggag

SEQ ID NO: 753514 - DNA, 75 bp, Homo sapiens
cagagctttacgatgtcacttgggaagagtaaccagagagcacagagaaatgctggtgaaactggccaaacagaa

SEQ ID NO: 753515 - DNA, 100 bp, Homo sapiens
ccagcagcccccggcccgcgctgcccgcactcctggtcctgctcggggctctgttcccaggtgccgtgagcgatgtggagatgcaggaacactatgatga

SEQ ID NO: 753516 - DNA, 101 bp, Homo sapiens
ccaaattcgagaccaagagcgcgcgggtcaaaggagcgagaacccgagcagcgccatgagcaacactaccgtcgtccccagcactgcaggtccgggcccca

SEQ ID NO: 753517 - DNA, 83 bp, Homo sapiens
cagcggcctggctaactcctgccaggcagtgcccttcccggagcgtgccctcgccgctgctggtcagtgagaaggtcggaggg

SEQ ID NO: 753518 - DNA, 87 bp, Homo sapiens
cgtggcagccgtgcgccgccaaggaacttgctactaccagcaccatgccctaccaatatccagcactgaccccggagcagaagaagg

SEQ ID NO: 753519 - DNA, 102 bp, Homo sapiens
gggaggaaggaacgaggcaaggagctaaagcagcgtgcgttcagccctgggcgtgagtgcatctccatccacgttggccaggctggtgtccagattggcaat

SEQ ID NO: 753520 - DNA, 90 bp, Homo sapiens
gaaacatctcaccaatttcaaatccgagtattgggaaagggtcgttgtggtgcatagacccagagtatagacaaaatctaattcaggctt

SEQ ID NO: 753521 - DNA, 157 bp, Homo sapiens
cacgaaggaagtacgaggacagcacgtggaggctccgcgctggggcactgctgctcagcccccaacacctgagctcccagattctcatggaccaactggtattcaaagagacaatctggaatgatgcgttctggcagaacccctgggaccagggggg

SEQ ID NO: 753522 - DNA, 87 bp, Homo sapiens
caagtgccaaacggaggaatacctcgtatgcaacctcaggcttcagccagctgttaaaaatgaagtgaatgttccctgtttgaaaaa

SEQ ID NO: 753523 - DNA, 87 bp, Homo sapiens
ggaagcaggactgcgccgcgtcttcctcaaggtatcatgatattagctggtttgacatcaagtcatttgtgagtcatcagatcttct

SEQ ID NO: 753524 - DNA, 75 bp, Homo sapiens
aaagtcaggtcacgattatgggcccacaccttcctccagcaagagaaggcagctgctgtggatttgactaaccac

SEQ ID NO: 753525 - DNA, 73 bp, Homo sapiens
cacgaatctgcccacccctcctgtaacccagcctgtttcacttcttggtgtgaacttcaacccggagcactgc

SEQ ID NO: 753526 - DNA, 100 bp, Homo sapiens
agcccttcagcgaggaagctacacttttcaccaaggaactggtgctgcagcgagagcaaatgatgtgcttgcttttggaacattggtcagtacttccaat

SEQ ID NO: 753527 - DNA, 75 bp, Homo sapiens
tggtgaatcccctgtttgagaaaaggcctaagaattttggcattgccccagcatgagaccagatgtaagctctcc

SEQ ID NO: 753528 - DNA, 50 bp, Homo sapiens
agcagctcagccaggatttgctcagcaaaggaaacaagtttctgactctg

SEQ ID NO: 753529 - DNA, 88 bp, Homo sapiens
ctttgtacggcttagaggacttccctttggatgtagcaaggaagaaattgttcagttcttctcagtgctccaggaaagtacctgattg

SEQ ID NO: 753530 - DNA, 74 bp, Homo sapiens
ggaagtggtttggacatgcacaccaaaccctgggttagagcaaggttgtccaagaagccctggacaaagccaga

SEQ ID NO: 753531 - DNA, 51 bp, Homo sapiens
aaagggagatgctgacagcacagaatcgtttcattgtactgacaacctcag

SEQ ID NO: 753532 - DNA, 71 bp, Homo sapiens
cgtcgggagtgatcacctaccctacaggctctgtgtgctccgggatggagcaggtgtgcagagggtgagaa

SEQ ID NO: 753533 - DNA, 100 bp, Homo sapiens
aactgcagatggaagctccccacatcatcgtgggtacccctggccgtgtgtttgatatgcttaaccggagatacctgtactttggcttcatgtttgaaag

SEQ ID NO: 753534 - DNA, 75 bp, Homo sapiens
ccacggcacctgaagccccgagccctcccagcgcaggatgccggctccaggagcagcagtggaggtcgggaacgc

SEQ ID NO: 753535 - DNA, 101 bp, Homo sapiens
agcaagatgatgataatactcagaatcaggagaaggaaatgctgcttagattaaatgcgttgttgaacattaaccaggtggtatttgttggaaatttcttg

SEQ ID NO: 753536 - DNA, 83 bp, Homo sapiens
aagatagaattcttagagaagagcttcagaaacagagactggaactttcgaaagaaggtaccacctatcataggtattaccac

SEQ ID NO: 753537 - DNA, 82 bp, Homo sapiens
cgcaggtcttcacccaggccctggagtgcatgcgcagggtggcccagttgaaatccttcccttcctctaccttggaagtgcc

SEQ ID NO: 753538 - DNA, 90 bp, Homo sapiens
cggactccgtcggcgcacatccccgtcccagcgcagaggcccttacgtcagttgtaaattacagagaacctaagtctgtttgcaaagcac

SEQ ID NO: 753539 - DNA, 73 bp, Homo sapiens
agagctagttcctctccagctcagccgcgtaggtggtggaggtggatacagcagtcggagaacatctggcaga

SEQ ID NO: 753540 - DNA, 75 bp, Homo sapiens
acttctttgctatttccacctatgtgcagagtacaaggtgaatatcttaaccagacttgccgcagaattgaacaa

SEQ ID NO: 753541 - DNA, 75 bp, Homo sapiens
cgggcggagacgtgggcgccctccccgccaaggcccgtgcgaggaggagcaatctcagaactgttatgaagacct

SEQ ID NO: 753542 - DNA, 90 bp, Homo sapiens
caaacgccctctccgccgtcatggcccggcatcggaatgttcgaggctataactacgatgaagggaaaacttgttattggacacaatatg

SEQ ID NO: 753543 - DNA, 75 bp, Homo sapiens
gccagggaagcccaagcacctgggcgtccccaacgggcgcatgcgtccgtctccaagagagtatgaagagagtgc

SEQ ID NO: 753544 - DNA, 75 bp, Homo sapiens
ctgctgggcaggtcatgagtcaccatggaagctgaagagggaactacccttttcattccgatcaattaatacgag

SEQ ID NO: 753545 - DNA, 100 bp, Homo sapiens
acaacaccaggaaactgacctcggggttgcggcgaccttttggagtggctgaattgtattcccattggagagcagcttcagtcggtgttgggcaattctg

SEQ ID NO: 753546 - DNA, 83 bp, Homo sapiens
cgcctttcagctctgcagcagctttgcctccagggtcatacgcatccttagccttatgccagcctggaccatcttggaggcag

SEQ ID NO: 753547 - DNA, 99 bp, Homo sapiens
ggcccccaccgccgcccgccgggaggaccgagcctaagagggcagccgcctgaaggaacgcgacggcggcgcccgcagaacttagccaagatgttgcat

SEQ ID NO: 753548 - DNA, 100 bp, Homo sapiens
gacgcagtggtggccctggagcagtatgccagcaagggtaagggactgttctgaagaacctttccatttagtgatcaagatatggaagctgatttctgaa

SEQ ID NO: 753549 - DNA, 98 bp, Homo sapiens
gtcttgatattctacgatcacagtggtctccagcactaactatttcaaaaggtgctcccactctttcccggcttttagaagctggtcctacacagttc

SEQ ID NO: 753550 - DNA, 100 bp, Homo sapiens
agggatatgaatggatattcattgcatggtctccagatcattctcatttggcacttggcaatgtaataagtgccttgggagacaagagcaagagggccac

SEQ ID NO: 753551 - DNA, 100 bp, Homo sapiens
acgtagcccggcgctcggcatggctctcctggtgctcgatgaatttcctgaaataaaccgagcctcaattcgacaggatcacaaggggagattctatgaa

SEQ ID NO: 753552 - DNA, 95 bp, Homo sapiens
cgaggaaacttgctcaacttcctgatagatgtacactgaaaactggacattataacattaagtctcacaagaatcttttcttatctaagttgcaa

SEQ ID NO: 753553 - DNA, 90 bp, Homo sapiens
gggtcctttatatagaagggagagtagtgtgacaaacagtggcaaaacaacactggctaagaatttgcagaaacacctcccaaattgcag

SEQ ID NO: 753554 - DNA, 83 bp, Homo sapiens
gtgctcgctggcaccccgaacgggttgcttcccccgctgcgagttacagaatgtctgaaggggacagtgtgggagaatccgtc

SEQ ID NO: 753555 - DNA, 75 bp, Homo sapiens
agtggacgtggatttggggatggctataatgggtatggaggaggacctggagtgagccaagccccccgagaggcc

SEQ ID NO: 753556 - DNA, 100 bp, Homo sapiens
ggatggtgatgaatgtcttagtcatgaagagtttcttggggtgttaaaaaacagaatgcatcgaggtttatgggagttgttcctttggccacatatatgc

SEQ ID NO: 753557 - DNA, 100 bp, Homo sapiens
gaaagcgatggaggagctgagcgctgatgagacagcccacctgaggatattgaccataaggactcatatctcattacaagaagcatcatggccgagccag

SEQ ID NO: 753558 - DNA, 74 bp, Homo sapiens
ggctctgaagagttggctgtcgcgcagcgtaacttcattcttcagaataatccagaatggctactctgatctat

SEQ ID NO: 753559 - DNA, 50 bp, Homo sapiens
caagagcctcttccttggccagaagcaactttcatcctttgaaacgtgtg

SEQ ID NO: 753560 - DNA, 95 bp, Homo sapiens
ggtgcgcgaccgggagctggacctccggggaaacctcgacctgtctcccagttggttgcacagcaggttactcagcagtttgtgcctcctacaca

SEQ ID NO: 753561 - DNA, 100 bp, Homo sapiens
tgcagaagaagctcacccgcgcgcaggagaaggtgaaaggtgtagcagtcactcggcctacacccacagcatcgaccttgtgaacccagcgacctgactg

SEQ ID NO: 753562 - DNA, 75 bp, Homo sapiens
atcactttgtgtcaaaaagaaataactcagctgaagcatcagatgccttcaattaagttgcagagttctgatgga

SEQ ID NO: 753563 - DNA, 100 bp, Homo sapiens
aagaaaaactttcgcctgagcctattttggtgaatcagtggctaacctggttagaaactgctgaagaagaagaatcagaggaagaagctgactaaagaac

SEQ ID NO: 753564 - DNA, 90 bp, Homo sapiens
cgagaccgtgaccgagagcgtgaccgagagcgcgaatatcgtcatcgttagaaggctgtgtggttccggtgctggtgccgtggaagtggc

SEQ ID NO: 753565 - DNA, 76 bp, Homo sapiens
ggaagaaattgttcagttcttctcaggtgctcgcggtgaggatcgatgacctggaccacctcccggagaccaccac

SEQ ID NO: 753566 - DNA, 100 bp, Homo sapiens
ctgcgctagaagaaaggaagacggactcgtatcggtaccccaggacaggtgccacacctccctggatgatccaagatgaagaatacattgctgggaacca

SEQ ID NO: 753567 - DNA, 110 bp, Homo sapiens
gcgtctgccgtggacagcgaagctgctgcggttcctgagccggagatcaaggatctggattttgcataactggtaaaatagaagctggttatatccaaactggtgaccga

SEQ ID NO: 753568 - DNA, 147 bp, Homo sapiens
cgagagaggcaccgggatcgtgaccgagaccgtgaccgagagcgtgaccgagagcgcgaatatcgtcatcgttagaaggaaggcgcaatggcgaggaagttatctgtaatcttgatcctgacctttgccctctctgtcacaaatccc

SEQ ID NO: 753569 - DNA, 85 bp, Homo sapiens
ggcggcgggggacaagtcggcgccccagagcggacgaggtaagaatgattgatgttggctgatattggagtgctcattcacatga

SEQ ID NO: 753570 - DNA, 97 bp, Homo sapiens
tggggtacagacattattaggtgttggtcggcagtctctgctacgggatgccaaaggacataagcagctctatgaccaatagcacagctgccagtag

SEQ ID NO: 753571 - DNA, 75 bp, Homo sapiens
tcaacttattcccttcaattcaagtaacaggttttgcatgcagaaatgtgtcagtctggtgcctggcgtcacact

SEQ ID NO: 753572 - DNA, 82 bp, Homo sapiens
cacgccctgtgcacgcttggaatgctggatcgaccctctttcccagctgcccgctcctcagcacccgaagattcgcctgtac

SEQ ID NO: 753573 - DNA, 110 bp, Homo sapiens
gtcaccacgcaccgactatgtcgcctgccaccgagccgggcccacctccccaccaaggaagacaatgcagatcttcgtgaagactctgactggtaagaccatcaccctcg

SEQ ID NO: 753574 - DNA, 75 bp, Homo sapiens
tgtgacaccaagataagtaacatgcttgtggttggtggcatcgaccgggtttatgaaattggacgccagttccgg

SEQ ID NO: 753575 - DNA, 90 bp, Homo sapiens
ctggatctttgctagaaagagagctccagggcccacaacggcagtgtcctacatgtcggtgaaatgtgtggatgcccgtaagaaccatca

SEQ ID NO: 753576 - DNA, 90 bp, Homo sapiens
cgcttgggtcggcctcgaggacaccggagaggggcgccacgccgccgtggccgcagttggatcacaaggacgagtcataagttttgaggt

SEQ ID NO: 753577 - DNA, 98 bp, Homo sapiens
atggaaccaattgttttacagtctgttccacatgatcattgtaataagcttcataaacaagcagatatgcaagaagagaaaaaccgaatcgaaagagt

SEQ ID NO: 753578 - DNA, 75 bp, Homo sapiens
cgcggatacgatgtcaccaggaaccctcatctcaacaagaaaacgggcaatgctgtgagagccattggaagactg

SEQ ID NO: 753579 - DNA, 100 bp, Homo sapiens
caaggagctggacatcgagcctgagggaggggaaaggcgcaggtaaaatgtttattggaggcttgagctgggatacaagcaaaaaagatctgacagagta

SEQ ID NO: 753580 - DNA, 98 bp, Homo sapiens
ttcggagtggacgaggaggagcgggtccgggtgctgcagggtgtccgggcatgctgaggtgatgaagaaaatcattgagactgttgcagaaggagggg

SEQ ID NO: 753581 - DNA, 98 bp, Homo sapiens
gccatgtggtgtttgatgccagcggctctcggatggcatggacgcttatcgagcagcttcagggtgctcccgccacctcggcccctgttaaccctttc

SEQ ID NO: 753582 - DNA, 50 bp, Homo sapiens
ctgggacttcccgtccgcggcgtggaggatcccactgtttggaatcatgt

SEQ ID NO: 753583 - DNA, 89 bp, Homo sapiens
agcaaccatgagtggttccatgatgggaagtgacatgcttcctgcctgacacagctcacttcaagaagtgcacaatgtcagaacgtgga

SEQ ID NO: 753584 - DNA, 83 bp, Homo sapiens
agcagccgatccagcctgcggagcctgtggggcagatgatgaagaacgagagcttcaaatggatcctgcagactatggaaagc

SEQ ID NO: 753585 - DNA, 75 bp, Homo sapiens
ggcggcttcgcggcgcgtcctccgcagaggcccccgacggagacaaggacgcccaataggggcacaaaacgtccc

SEQ ID NO: 753586 - DNA, 95 bp, Homo sapiens
cagaagatgaccgaggcggcgctggtggagggccaggtcaagctgcgggacggcaagaagtcacccacaaaagctgtatataatgccagacattg

SEQ ID NO: 753587 - DNA, 98 bp, Homo sapiens
gtgcaacgagatggagtgggctggcgcctcgggagagcgaatcgagggcggcgggattgtgcacctgtgcctgcgaaaggctgaccagaagctggtga

SEQ ID NO: 753588 - DNA, 49 bp, Homo sapiens
gcaaatatttcaataagtacccaaaagggacaatggtgacagatccagg

SEQ ID NO: 753589 - DNA, 100 bp, Homo sapiens
cgagttcctcggcggctgcaggatgggggactccaaagtgaaagtggcggtgcggatacgacccatgaaccggcgaggttaaaaagatcaagtggcatga

SEQ ID NO: 753590 - DNA, 82 bp, Homo sapiens
aggagttcgtctcttacgtctgcggaagtgcagctgcctcagttcttagcgcagagcctaatgggaggtgactggatcatgg

SEQ ID NO: 753591 - DNA, 74 bp, Homo sapiens
cagaatatgcgcccaatctcagaggcagtggtgtccatggtgggctcatgaattatatccagatcgagagacag

SEQ ID NO: 753592 - DNA, 100 bp, Homo sapiens
aggacccgcttctctgaaaggctctccttgcagctgcttagacgctggatttttttcgggtagtggaaaaccaggtgcaacacgcaggactacatctggc

SEQ ID NO: 753593 - DNA, 75 bp, Homo sapiens
gggggatggttccatcatggcgtcaatgcaggtacctaccagggccagtgggccggaggcatgcggcatggctac

SEQ ID NO: 753594 - DNA, 83 bp, Homo sapiens
ccggccggacctcgaccctgagctctatctcagtgtacacgatgatggtgtgagcatccccggggagtacacttcctttctgg

SEQ ID NO: 753595 - DNA, 90 bp, Homo sapiens
atcccagttgattgtgcagaatacactgcctgtcgcttgtcttctattcaccatggcttcttctgaatgtggccccgtcccagagcacca

SEQ ID NO: 753596 - DNA, 82 bp, Homo sapiens
cgcggcggcctttctcctgggaagacggtgattgaattactcagatatgaagatcatcatctaggttttgtgtaaaaggccc

SEQ ID NO: 753597 - DNA, 75 bp, Homo sapiens
caaagcagaagaagaccgaagggaagacttccagtagctccaaggaggttaaggatatcttaaatacgatcataa

SEQ ID NO: 753598 - DNA, 75 bp, Homo sapiens
gcgatcagatcgatctaagatggcgactgtcgaaccgctcctggagcagaatggaggctacgggagcgccacact

SEQ ID NO: 753599 - DNA, 100 bp, Homo sapiens
gaccagccagaggacgcgggctctgaggatgagctggaggaggggggaactctaatgatccaggacaaagaagttaccctggagtatgtatcaagcctgg

SEQ ID NO: 753600 - DNA, 82 bp, Homo sapiens
agcaaatccattagcatatggcatcagtcacaaggcttatcagatgacttcatcttatgcttcaggcaaagaaagcactacc

SEQ ID NO: 753601 - DNA, 75 bp, Homo sapiens
aagacagcacgtcccaactcaaaagattgtgtcatcctaaaggagtgtgaacatggctacgcctcttcattcccg

SEQ ID NO: 753602 - DNA, 90 bp, Homo sapiens
tcgggacgctgggacacctgtcgccttgccgcagaatggaattcggcattgttcctacacagcttctcggcaacatctctatgttgataa

SEQ ID NO: 753603 - DNA, 100 bp, Homo sapiens
aaagactagatgccgatccaaaaggcaggggaaatggaaggtgatgcagtcgaagccattgtggaggagtccgaaacttttattaaaggaaaggagagaa

SEQ ID NO: 753604 - DNA, 82 bp, Homo sapiens
gcagggagcccaccgggcgggcctggccaagacagagtttcactcctgttacccaggctggaggacaatgatgtgatctcgg

SEQ ID NO: 753605 - DNA, 98 bp, Homo sapiens
aggccaatgatgggagaccaccgggatgggcaggaatcagagatcattgatttcttcctgggggcctctctcaaggatgaggttttgaagattatgcc

SEQ ID NO: 753606 - DNA, 98 bp, Homo sapiens
cggcgccggcctcgcctcctcgcagcagcgccatgtcactcagcctctgaagaagcttcgggttcagactcaggcagtcagtcggaaagtgagcaggg

SEQ ID NO: 753607 - DNA, 101 bp, Homo sapiens
agggacctgcccgcctgcggctgctccggatggaatcgccacttatatatgtttcagttttgcttttgaacatatttgaattttcatcaggaatagtatat

SEQ ID NO: 753608 - DNA, 75 bp, Homo sapiens
agataggcggccatggtccaaccttgaaggtgctgaccttaaggaaagagccaaaatgagttccagtgaagttgg

SEQ ID NO: 753609 - DNA, 73 bp, Homo sapiens
ttcgcagtgatgtgaaactggcctcccaagccctgataaatcttagcaaagcaatgtctcaagatggtgcttc

SEQ ID NO: 753610 - DNA, 75 bp, Homo sapiens
ccggacatgtggtggaggagtcaagttccaggagagacactgcaataaccccaaaattgatgtgactgaagtgca

SEQ ID NO: 753611 - DNA, 100 bp, Homo sapiens
cagcaatatccccacataccttctcaagttttttgctccactcaagcctgttagaatcaccatggaatacagctccagtgggaaggccactggagaagct

SEQ ID NO: 753612 - DNA, 100 bp, Homo sapiens
caaaatactgtcatttgctcaaagcgtaatggcacaattgacttccctgaatttctgacaatgatggcaagaaaaatgaaagacacagacagtgaagaag

SEQ ID NO: 753613 - DNA, 90 bp, Homo sapiens
ctcctgtcccaaaagaccatcctgctctcaactacaacatcgtttcagggaaccacgtgaatgttgagggggcgacacacaagcaggtgg

SEQ ID NO: 753614 - DNA, 75 bp, Homo sapiens
ggcttcaagacaaagggccccttacacaccagacaggtcacggtctagatcacattctcgatccagaggaaggcg

SEQ ID NO: 753615 - DNA, 75 bp, Homo sapiens
gttagtggattaaaatctcccaagaggaatgacaaacaaccagctcttcagctctaagcgaaagacatgaggcct

SEQ ID NO: 753616 - DNA, 83 bp, Homo sapiens
ttagaaatatcttctggaaagctggccagatttgcagatggctctgctgtagtacaggcagccaatcctttctttaagttgtt

SEQ ID NO: 753617 - DNA, 83 bp, Homo sapiens
gccagctccagagccacgtacggtggtgatgatgtccagcaactctgtgaagcaggagaagaggagtttttggaaatcatggc

SEQ ID NO: 753618 - DNA, 74 bp, Homo sapiens
gcagccacgcgggcgagcggctgtgtggatgtcggcgaagccgcgggcgaggtttggtgcacctcgatttggag

SEQ ID NO: 753619 - DNA, 100 bp, Homo sapiens
agcgatctgaactatatcctgggttccagaaaaggcagaggttcttaccgaaagcagctgaagagctttgatcagttcacctgcaacctgctgtatgtga

SEQ ID NO: 753620 - DNA, 75 bp, Homo sapiens
ctccttggcagcaatggctgtatttgaagataagtttaggccagacatggaggtcctcagtttgcagaagacccc

SEQ ID NO: 753621 - DNA, 90 bp, Homo sapiens
gatgggatctttccggatcaatccagatggcagccagtcagtggtggagattgtgaagaggtctcttgaagtttggggtagtcaagaagc

SEQ ID NO: 753622 - DNA, 95 bp, Homo sapiens
cttcttcaggagagcgccccagggcaagccccgctccggccaacaagtgctggagaatctggtaaaagcaccattgtgaagcagatgaggatcct

SEQ ID NO: 753623 - DNA, 98 bp, Homo sapiens
gtccaccagctacaagaaaagttagcaatgatggaaagtggggtgagagactatagcaagcaggacttgcaccttcgagatcccctgtgtttacccag

SEQ ID NO: 753624 - DNA, 50 bp, Homo sapiens
aaatcgagcagaaagaatgtctttcaggatctgaaggtttgaatgggcca

SEQ ID NO: 753625 - DNA, 100 bp, Homo sapiens
ctgtacatccatgccatcttctccagccaccccagccagtggaaccaaggatttggtggcttttgaacatcagtggactagcttcttcgctaattttgac

SEQ ID NO: 753626 - DNA, 83 bp, Homo sapiens
tcccaaaggcgcaccaatgaccaacatttgccccccggaggaaagaactggaaccaggagggagccatggatttgctgcggga

SEQ ID NO: 753627 - DNA, 75 bp, Homo sapiens
ctaatgttgggaattggaacagaaggaccacatgtgggccttgttcaagccagaaagtctttatctcttgcaagg

SEQ ID NO: 753628 - DNA, 100 bp, Homo sapiens
agttcaaggaggccttccagctgtttgaccgaacaggccagatcagaaaagggagctcaggtaccttccagagagtgagacccagcgcccttgtctcgca

SEQ ID NO: 753629 - DNA, 50 bp, Homo sapiens
ccttctggtcttaaagccaatttagaagcaaaccagtccagctacggggg

SEQ ID NO: 753630 - DNA, 138 bp, Homo sapiens
gtgcagccggtgacccggcgagaggcggcgccgctcccaagatgtcgcagacggccatgtccgaaacctacggtgtcatggagaaactccagctgggcccagagattctgcagcgggaaaatccaaggcttatttatg

SEQ ID NO: 753631 - DNA, 89 bp, Homo sapiens
ggacgagttctcgggcagaggcgacctccccgcgttccatgcgcacagggacagggaccatgctcgacagctgaccaaggccatgatgc

SEQ ID NO: 753632 - DNA, 100 bp, Homo sapiens
cgggcagagaccatgtttgacaagacgcggctgccgtacgtggccctcgatgtgctctgcgtgttgctggggagattccaggctgctgatcgttcagagt

SEQ ID NO: 753633 - DNA, 88 bp, Homo sapiens
ccatcgcggagaggtaccttgcacagtgacctctgcatctgttaatttcacctaccagtttttgaaaaagaagttctatatatttagc

SEQ ID NO: 753634 - DNA, 100 bp, Homo sapiens
gaacaggtaccggctgggccggaagatcggcagcggctccttcggagacatctatctcgaccccccaaagacacacgtgacccaccaccccatctctgac

SEQ ID NO: 753635 - DNA, 75 bp, Homo sapiens
ccactgctgtttctcaataagcaaaaagttttcaacttgaccaacaatgtggatttggacaacaccaaaaagaaa

SEQ ID NO: 753636 - DNA, 100 bp, Homo sapiens
ccagtttagatttgactggtttatcaagtctaggactgccatgtactcagatatttatccaaacattattgctatgggatttcctgcagaaagacttgaa

SEQ ID NO: 753637 - DNA, 75 bp, Homo sapiens
gaaatgctgagagaagcattcagatgcatgacacaaggagacgaagtttccgtgcattatgaccccatgattgcg

SEQ ID NO: 753638 - DNA, 75 bp, Homo sapiens
cctccgggggacccgcggtccccaccgtgcagcggggcatcatcaagatgactgtttgtctgtgggatataaacg

SEQ ID NO: 753639 - DNA, 82 bp, Homo sapiens
aacagagtccgatgaaaggaatgggtctgggaccttaacagggagccatgctatcatggtgaacttacttcagattgtgcgg

SEQ ID NO: 753640 - DNA, 90 bp, Homo sapiens
gccggggcggcgaggcgcgaggagctagatgccagaagtgggtggagaactgtaggagagcagacttagaagataaaacacctgatcagc

SEQ ID NO: 753641 - DNA, 100 bp, Homo sapiens
tatgtcatttcatccaccacattacttaggtgcagcagtaccgcgtcgccatgactgccaaggactgctccatcatgattgcactgtctccctgtctgca

SEQ ID NO: 753642 - DNA, 83 bp, Homo sapiens
gtgtttgcctctggttcagctcatacaacagcttcttaggaatgtatcctgtcaggtataatgtcagtgaatggcaagaaagt

SEQ ID NO: 753643 - DNA, 108 bp, Homo sapiens
cgggaagcgggcggccccggccgcctccgcgagggcaccatggaggtgaatgcagcgggctgacgcacgaggcacacaggaaggaggtggagcaggtgtatctgcgct

SEQ ID NO: 753644 - DNA, 98 bp, Homo sapiens
agatgtggacttgaaagaagctgcagcggaggaaggcgaggcaacagctgaacagatgcgtctcgctcaagtgatctttgataagaatgattcagatt

SEQ ID NO: 753645 - DNA, 82 bp, Homo sapiens
ggcatttgctctgagcatcagtcacgggtttactggactcatgcgggtggtagacacgcatgtgtgtgggagtcacgttttc

SEQ ID NO: 753646 - DNA, 98 bp, Homo sapiens
tcccgcatcgcctcagtgtggtttgggcccaaagaggtgtccacagcttgtgccaccgccgtgctgggcaatcagatctcccttgagtttagaaatct

SEQ ID NO: 753647 - DNA, 100 bp, Homo sapiens
cgacctcatctccaggacagtgggaagagtggctggaggaattcagtttcttgggggaagtcctggctgagcaaggttggaagccctagttctcgcattg

SEQ ID NO: 753648 - DNA, 100 bp, Homo sapiens
gtttcatacagaagtacctgcttcagagacatgagaagattcatactgggaaatgatgtcactctgaaactcaggctggaatacactggcatggtcatac

SEQ ID NO: 753649 - DNA, 74 bp, Homo sapiens
cgctgggcctgcagcgcggagcagaaagcagaacccgcagaaattccgggtagatatgcctggctcaggcagtg

SEQ ID NO: 753650 - DNA, 100 bp, Homo sapiens
gggaccatggcctcggagaagccgctggcggcagtcacttgtacagcgccggtcaacatcgcggtcatcaagtactgaggagaaggagaagcggcgcctc

SEQ ID NO: 753651 - DNA, 120 bp, Homo sapiens
gtaagaactaccctgggtccccgtggcatggacaagcttattgtagatggcagaggcaaagcattggtagcaactcctggtaagaagggtgctgccatcccagccaagggggcaaagaat

SEQ ID NO: 753652 - DNA, 100 bp, Homo sapiens
gaggaaatcgcctcccgagaagaagttgaggcgctatcctctgaagagccaatccattcaggatgggaaaccacgcaggcaaacgagaattaaatgccga

SEQ ID NO: 753653 - DNA, 82 bp, Homo sapiens
cacaggaatctcactctgttaaagctggtctgttctaactgaggtagcatcttggacaaaatattgggcagctttgtgtggg

SEQ ID NO: 753654 - DNA, 100 bp, Homo sapiens
caacagtgaaagtaactttgcccgagcatatgcacagggtatcagccgaaccaagtactgggagggaatgggtactgttcaaaaaggaatgccccacaag

SEQ ID NO: 753655 - DNA, 100 bp, Homo sapiens
ttactctctcagatgacttcgtctcccaccgactgcctgtttaaggctgaccggttccctgatgtgttacctgcttctgctactgatccaaactgcagaa

SEQ ID NO: 753656 - DNA, 97 bp, Homo sapiens
aggtgcccaggccatgatctggactgcaggctggctgctgctgctgctgcttcgcggaggtatggagagtcggcttgactacactgtgtggagcaag

SEQ ID NO: 753657 - DNA, 95 bp, Homo sapiens
ccccctggtcctctgccctcgcgccccgctagggccaggtgctggagaatctggtaaaagcaccattgtgaagcagatgaggatcctgcatgtta

SEQ ID NO: 753658 - DNA, 93 bp, Homo sapiens
cgcctttgggaaaaaggcacctaacggcgcaggagatagaggcgggctcgagacaatgcagatcttcgtgaagactctgactggtaagaccat

SEQ ID NO: 753659 - DNA, 75 bp, Homo sapiens
ctctggaccctggagtacaccccgcagcacagccgcgacttcaagatgagcaccatgccaggactgcccacccgg

SEQ ID NO: 753660 - DNA, 50 bp, Homo sapiens
gatgaagtgcagaggtttttttctggcttgctatcagaggaagtggagaa

SEQ ID NO: 753661 - DNA, 90 bp, Homo sapiens
gcctcagcctcccgagtggctgggattacaggttatcaagttatacccaaccagcagcaaaactaccaaggaatagttggagttcagcaa

SEQ ID NO: 753662 - DNA, 100 bp, Homo sapiens
caagcttgaatgtgtcaaaaccaaacaccctcagctccacattgagagcaaaatctacaagatgatgcagggaggagtgacccaacaggagaagacccca

SEQ ID NO: 753663 - DNA, 97 bp, Homo sapiens
ccgaaaccaattttcactgagggcaagaaccagctggagattcagaatctacaggaagactgggatcactttgccccgacaatgggcaacgcgcagg

SEQ ID NO: 753664 - DNA, 98 bp, Homo sapiens
ctggcacgctctatagccaaggaaggcttcgagaagattagcaaaggtgctaatccagtggaaatcaggagagccttatgtttgatcatcggccaagg

SEQ ID NO: 753665 - DNA, 74 bp, Homo sapiens
aaccacctgggccagtattatcaggcatggagatgctactgatgtcagggtcatgatgatgggcagcgcccgag

SEQ ID NO: 753666 - DNA, 49 bp, Homo sapiens
aatttttgactggagactatagtagagcatatcatgtcccgagtgggaa

SEQ ID NO: 753667 - DNA, 90 bp, Homo sapiens
gtcgggggacacgcaggatgagccccgcgaccactggcacattcttgctgacagggatcatggcccaagttgcaatgtccaccctccccg

SEQ ID NO: 753668 - DNA, 100 bp, Homo sapiens
tacgtaggcatcagcaatatgcagctattgaacgtttgacatgtggcaagtttgaattgagatgtgctggtgataaaagaaaatgtggctgaagttaccc

SEQ ID NO: 753669 - DNA, 76 bp, Homo sapiens
gctgcgcagggcctgccaggtggcgctcgatcctggctctgcagagagaacagcccagaaaagaaagttccccagc

SEQ ID NO: 753670 - DNA, 83 bp, Homo sapiens
agccgatccagcctgcggagcctgtggggcagattgccttctctcagcacagcaattttatggacctggtacagttcttcgtg

SEQ ID NO: 753671 - DNA, 83 bp, Homo sapiens
cggcgcgatgcccttcaggaaagggtcggcactcttcaccctcccgagccctgcccgtctcggccccatgcccccaccagtca

SEQ ID NO: 753672 - DNA, 100 bp, Homo sapiens
agaggagatagcaattaccagtggtgaatgggaagttcttggccggcatggatctaatctgcttattactgtggcattcaatcaacctgttaagctttat

SEQ ID NO: 753673 - DNA, 80 bp, Homo sapiens
cgatgagctccagggcaaggcgctcaaggatgccttcgtgaagatcgtgaggcacgagggcaccaggaccctctggagcg

SEQ ID NO: 753674 - DNA, 50 bp, Homo sapiens
acttattcccttcaattcaagtaacagctaccaccatctgtgacctggac

SEQ ID NO: 753675 - DNA, 99 bp, Homo sapiens
tactgtataagtgcatcaactttacagcagttaagtttcccagttagaggttctaatagaagactgtatcccggtactgaagaggtacgccaaagaagg

SEQ ID NO: 753676 - DNA, 75 bp, Homo sapiens
cctctgcgtgggccggccgggagggcctcgggggactgactggaagctcttcgtgggcggtcttgactggagcac

SEQ ID NO: 753677 - DNA, 74 bp, Homo sapiens
ctgggataccacctcatgttgttaaagtaccagcttcacagatttcagaagaaagtggtagcttcctttccaag

SEQ ID NO: 753678 - DNA, 90 bp, Homo sapiens
cccatacctttgaatcacaacatgagattttatgctaggcagagaagaagcgtgaggctaagcagcgagctaaggaagctcaggagcggg

SEQ ID NO: 753679 - DNA, 100 bp, Homo sapiens
gaaaagaagagtagctgaggagctggcattggagcaagccaagaaagaatccgaagatcagaaacggtggttgaagatggatatgaattttttgcaaaga

SEQ ID NO: 753680 - DNA, 83 bp, Homo sapiens
ttgacgccatgtcgggttattcgagtgaccgagaccgcggccgggaccgaggtgcaagaagaaacacacgctgctgtgccccg

SEQ ID NO: 753681 - DNA, 100 bp, Homo sapiens
tgcctatgaccagcaagaggatggggccctggatgagggggaagggcctcaaagccagaagccaccacatttgctcaaagtatggggtttatcaatgaag

SEQ ID NO: 753682 - DNA, 99 bp, Homo sapiens
agctgcccttcaccgcgggcgccaatggggagcagaaggactcggacacagttgctctacaccctgaccttctggctcctgctgcgccagtttgtgaaa

SEQ ID NO: 753683 - DNA, 122 bp, Homo sapiens
ccaaggctgcgccggcgaggggaagccgcgcggccggccggccgactaggattgcagagggaatggcatacatcgagcggaagaactacattcaccgggacctgcgagcagctaatgttctg

SEQ ID NO: 753684 - DNA, 83 bp, Homo sapiens
caaggaaaaactggagagcttcatcaaaaatagtgatagctttgataacatttgacattgtgcagcaaagaaatggttatgga

SEQ ID NO: 753685 - DNA, 83 bp, Homo sapiens
tgacggccgagaagctgtgcatctacaccgacaactccatccggcccgaggagctgctggttctgtccacggtgtgtccagga

SEQ ID NO: 753686 - DNA, 100 bp, Homo sapiens
cctcagcaaccggcccgccttcatgccctccgagggcaagatggtctcggtgatgtccttgcaaatatcaatggtgtgagcacagaaggttttacctaca

SEQ ID NO: 753687 - DNA, 90 bp, Homo sapiens
gggggagcaggtggaatatgcagaaatggatgttttagaagaatgtatgtctcttcccaagctatcttcttattctggatgggtggtaga

SEQ ID NO: 753688 - DNA, 95 bp, Homo sapiens
cgcttttggatcctaccccagctgtggattggcattaactttgacagactcacacttttggccctgtttgatagataacagacgagtacctttgg

SEQ ID NO: 753689 - DNA, 80 bp, Homo sapiens
cgaatctctcaggctgcatcaggatgaatgatgacccaagtatggaaatcaagggaagtagccttggaagcacaaacttc

SEQ ID NO: 753690 - DNA, 111 bp, Homo sapiens
gaggaggcccgggagcgccgagcgtcgccgccgccgccgccatgaacaactcgggcgccgacgagatcgggttcgtgctggccgtgggcagcgccgtctttgatgccatgt

SEQ ID NO: 753691 - DNA, 100 bp, Homo sapiens
tcagcctcctgagcagctgggattacagtgcccaccagaagtatgtccgacaagcctggcagaaggcagacatcaatacaaaatgggcagccacacgatg

SEQ ID NO: 753692 - DNA, 116 bp, Homo sapiens
taaggaacatggcgaaggtggagcaggtcctgagcctcgagccgcagcacgagctcaaattccgaggtctttccatcccccccagtcccacagaccacccagggcttcatcggctg

SEQ ID NO: 753693 - DNA, 48 bp, Homo sapiens
cccttaccgggagtttcactgaaggtggtccattatggctgacatgca

SEQ ID NO: 753694 - DNA, 96 bp, Homo sapiens
tggaggagggcaaacactccagccacgaagtcaaggctctgggggccatgtggaaactacataaggtctctaattaacagaagatggcaaagccca

SEQ ID NO: 753695 - DNA, 92 bp, Homo sapiens
gtgaacttggagaaatcctgtgtttcagtggaatgggcagaaggaggtgccacaaagggcaaagaggcaatctgaaggcaaatcctgtttag

SEQ ID NO: 753696 - DNA, 101 bp, Homo sapiens
tgaaagctctgaagaagctaaggattgaggctgatgagaggagaaggcagagcccccccaggctatgaatgccctgatgcggttgaaccagctgaagccag

SEQ ID NO: 753697 - DNA, 100 bp, Homo sapiens
atctgatagcaatatttctgagtgtgaaaaaaacaaaagcagcccaatttttgcattccaggagaaagaatcttcaagagggagacatagggaaaaggaa

SEQ ID NO: 753698 - DNA, 76 bp, Homo sapiens
ggaggatgaactggagccgtccttacggcctcggacgcagcaaatggaactctgatttaaacagctggggatgaaa

SEQ ID NO: 753699 - DNA, 97 bp, Homo sapiens
gtacttctcagggctaatatattgtggtggaaaaggaagagagagctgaggcagacgatgtaagatctgctgttacttcttgctgtgtgaccttggg

SEQ ID NO: 753700 - DNA, 51 bp, Homo sapiens
agaaaagcttgcagaatatatttgttccaattgtggtggtgccatgcagca

SEQ ID NO: 753701 - DNA, 90 bp, Homo sapiens
ctgggggccacaaatgctccttctcctggagacgcaactcaagagtttcagattgccaaaagacaaaacgggtaccacaaggattggtga

SEQ ID NO: 753702 - DNA, 80 bp, Homo sapiens
agaaaagatgaaacggaccctatccttcatgatgagagatttggggacacttctctctcctgtgtgtagttgatagtttg

SEQ ID NO: 753703 - DNA, 100 bp, Homo sapiens
cacttcattggccacctacagaaacaaaatgtcaacaaattgatggatatgcacccaatgtccagggagcgtgcaaaatttgtcaaaagtggccttttat

SEQ ID NO: 753704 - DNA, 101 bp, Homo sapiens
gttcgcctcagacgcggtggagccgccggagtctgagaagggccaagaccagcttcaagtctccatggtaccagaaaacaacaacctcacagcacctgaac

SEQ ID NO: 753705 - DNA, 98 bp, Homo sapiens
gcccctgctaatgctcatctgaaggacttggatgaagaaatctttgatgatgatgacttttaccaccagaggttggaaagaaccatgactgtattcag

SEQ ID NO: 753706 - DNA, 100 bp, Homo sapiens
cagcctcaggcgtgcgcggacggtgtgcggacggaaatggagagctggatttctccacttttctgaccattatgcacatgcaaataaaacaagaagaccc

SEQ ID NO: 753707 - DNA, 100 bp, Homo sapiens
ctgtcctgggatttggcacctatgcgcctgcagaggtgctactgaaagggagcggtggaggggatgccctggagttcctggggtactgccctcaggagaa

SEQ ID NO: 753708 - DNA, 100 bp, Homo sapiens
cataaaaattatttatccaacagctcctcccagatcctctgccttgtcaatgttagtcacaatggtgtgagtgaatcagaactgatggaactctatcctg

SEQ ID NO: 753709 - DNA, 95 bp, Homo sapiens
gcgagtgtcggttttctctctccaacagacatcgctattgcggttccgaggcggtggaagaagatatccccatagcgaaagaacggacacatttc

SEQ ID NO: 753710 - DNA, 100 bp, Homo sapiens
gaagaagaagactgttattgaaatagaattttctacagaagtcaaggcagtcaagctgcggcgagatagtgtttggtgtataaaacagaccaagctcaag

SEQ ID NO: 753711 - DNA, 101 bp, Homo sapiens
tcaggtgcccagatgctcagtcgctcacacaggccatacagtcaggtggttccaaggaagaaagaaagcacagagagaagaagctgcgtaaggagtctgag

SEQ ID NO: 753712 - DNA, 95 bp, Homo sapiens
gtttgtctgatgagttcaggcttagagacagcagtagtccctggcagtgcccagtttgcagggcccacggatgacagtaaccagcccccgggccg

SEQ ID NO: 753713 - DNA, 112 bp, Homo sapiens
gatggcgtgcttgttggagaccccaatccgcatgagcgtcctttcggaattactcaaggtgatgaggacaattgatgacagaatagtacatgaattaaacactacggttcca

SEQ ID NO: 753714 - DNA, 98 bp, Homo sapiens
ggaacatgacgcaggtgcaggtgtctcttctcgccctggcggggaagggcacggccgagcagatgaggactgtgtggacgaccgggccagacaccggg

SEQ ID NO: 753715 - DNA, 82 bp, Homo sapiens
aagctggccgagcaggctgagcgatacgacgagaggaagcagtgcattggtgaaggcaacgttaggtgtgatttccattcct

SEQ ID NO: 753716 - DNA, 100 bp, Homo sapiens
ccaagaggaggacagttcgctacacagcaatgcatcgagggaagatcagttttcctgccatccaggctgctccctccttcagcaactcattcccacagat

SEQ ID NO: 753717 - DNA, 100 bp, Homo sapiens
atcatgaggcccagctcaagaacggcagccttgactccccagggaagcaggttgacttccccagaaatctggccaagtctgtaactgtggaatgaggctg

SEQ ID NO: 753718 - DNA, 75 bp, Homo sapiens
acctgcccggtgcccgaggaggcagccaagctcgtggcctgcctctgcgtgcgaaagaccacagcaagattcttt

SEQ ID NO: 753719 - DNA, 98 bp, Homo sapiens
actggtgtcttcagaaggtcgcgatggttttcttgggaacacgatagacagcatattctggcagttatctgaaaaactgcaagacacagagaatgaag

SEQ ID NO: 753720 - DNA, 100 bp, Homo sapiens
ctggggcccccagaagtgatcgctcagctggagaacgcggctaaagttctgatgatggtcatcatgggccagtgctactacaacgagaccatcggcttct

SEQ ID NO: 753721 - DNA, 109 bp, Homo sapiens
aatcaagaggaatgcacatctgtgaagatgctgtaaaaagattgaaagctgaatccgagcggctggaactcatgaacgcagagctgaagacccagattgaggagctgaa

SEQ ID NO: 753722 - DNA, 100 bp, Homo sapiens
aaagtggtgaatcccctgtttgagaaaaggcctaagaattttggcattgcccatttcaatggaaaatccttataaagaacctcttaagaaatgtatcttg

SEQ ID NO: 753723 - DNA, 83 bp, Homo sapiens
gtacagcaccggcaagaccaccttcatcaggccatgggtgccttcttctccggcatcttttggagcagctttgtcggtggggg

SEQ ID NO: 753724 - DNA, 98 bp, Homo sapiens
tcttcggcaccatcggcatgcggcccaacgccaagaacaacggcgtcatggtgggcatgggccagaaggactcctacgtgggcgacgaggcccagagc

SEQ ID NO: 753725 - DNA, 100 bp, Homo sapiens
ctctgaaaagacctttgaaacactttgcaccgttcgagaacttgtcttggacaattgcaaatcaaatgatggaaaaattgagggcttaacagctgaattt

SEQ ID NO: 753726 - DNA, 95 bp, Homo sapiens
acaagttggtcaaaaacttggactctcaaatgggggacagttcttcaccaaaggacatggatgaaaatgaaagcaaccagtctctgatgacaagc

SEQ ID NO: 753727 - DNA, 76 bp, Homo sapiens
gctattattacaagaataaaggcaggaatcaatccattcaatgtcggaccctttcctggggatgattatgggcctc

SEQ ID NO: 753728 - DNA, 88 bp, Homo sapiens
gccgcccggatgggaccaccagagtgcttatccagcgagcagcattggtggtcctagaaaattactacaaagatttcaccatctataa

SEQ ID NO: 753729 - DNA, 80 bp, Homo sapiens
tggcctaccaggaggccaggggtgtcgccatggtagctttggatatgttaaatcctcatgttactttgcctgttttttac

SEQ ID NO: 753730 - DNA, 83 bp, Homo sapiens
ggaattcaccctgttcgtctatggaaactcattatctgcaatattagagggagaagcacggttaactttcttgaatagaggtg

SEQ ID NO: 753731 - DNA, 100 bp, Homo sapiens
aggtgatgctggagagccaggacttccaggccgaacaagtacaggggctcaggtccaggtggcaggggatatgctacccaactcaactgagcgggccatc

SEQ ID NO: 753732 - DNA, 75 bp, Homo sapiens
gttccccgcgctgcggcctggcggcttccaggcgcactaccgcgagacgtctcccacaacctgctccgggcgctg

SEQ ID NO: 753733 - DNA, 75 bp, Homo sapiens
gctggctggcggagcatgagcgccccagcaggaacgaatgcaggaatttgggaactgagctgtgcaagtgctgaa

SEQ ID NO: 753734 - DNA, 100 bp, Homo sapiens
gggaatgatattcagtggtgtttttctcaggtgaaaggagcagtagatgatgatgtagcagaagggaactgctcgcagaaagaagaaggtggttcataga

SEQ ID NO: 753735 - DNA, 75 bp, Homo sapiens
cgacgctgctgggtccgctgagcggggcgacccgaggcgcagtgagcctgcaggccgacctcactcgtggcacac

SEQ ID NO: 753736 - DNA, 112 bp, Homo sapiens
tcccccatctcattgccacggctgaaccctccttctcaatcttggaacagcacccccttctttaagatatgctatgactgtctggtactttgatgctgaagaaagggcagaa

SEQ ID NO: 753737 - DNA, 83 bp, Homo sapiens
gggagcccagtcccaacttcgggccccggccccgcgcgccccggcccggccccgcgagggctgggttacgacccctacaaccc

SEQ ID NO: 753738 - DNA, 101 bp, Homo sapiens
cggagacacggtggaaacgcttatgcttcctaatgaagatcctgagatttttgatgtttcatccaagtgcctgtctatactggttcagctgtatggagggg

SEQ ID NO: 753739 - DNA, 100 bp, Homo sapiens
cagcctccaggttggcgggctcatctgcgctggggttctgtgcgccatgggcatcatcatcgtcatgagtgacttcatggtcatgacgattttcttcaat

SEQ ID NO: 753740 - DNA, 90 bp, Homo sapiens
cccagcaccacagtccttctgcagtccctcgtccagccacccccaggacatccggccacagatctgcccacggaggaggactttgaggcc

SEQ ID NO: 753741 - DNA, 100 bp, Homo sapiens
tgcaaaggcaatgcgcactcaggcaccagagggcagaggggcagtgatcggtgatggacagtctgctgtggccagtaacattgccaatactacctaccgg

SEQ ID NO: 753742 - DNA, 82 bp, Homo sapiens
ttcgccgttaccttcttgctggcgttggtgggagccgtgctctacctctatccgaatcacggtcactttcaacattaacaac

SEQ ID NO: 753743 - DNA, 82 bp, Homo sapiens
ccaaataccaggctaccatggtctacaagactctcttcgctctttgcatcttaactgcagggaaggtgctgagctactggtg

SEQ ID NO: 753744 - DNA, 100 bp, Homo sapiens
aaaacaaggcagtggcatagtctcctgtcctatgtccttggcatgcagggagtagaaaatgtatatacacagcatcaacctttcctacatgaaaccctgg

SEQ ID NO: 753745 - DNA, 90 bp, Homo sapiens
cccctagtggttatcgtttagttagtgaaacagaatggaatctcttgcagaaagaggcgcagttgtgtagcagttgagtaatgctggtta

SEQ ID NO: 753746 - DNA, 100 bp, Homo sapiens
cgcaggagaccaacgcctgccatgctgttccggctctcagagcactcctcaccaggtcagcagatccggaagctcatcaaagatgggctgatcatccgca

SEQ ID NO: 753747 - DNA, 100 bp, Homo sapiens
ggaagagaagagggtggctaatgattaagagttacactgttagaccttatgatagccaagataacgagtgatgagccactcaccaaggatgacatccctg

SEQ ID NO: 753748 - DNA, 75 bp, Homo sapiens
aagacttgttccatgaaagtacattggggcacgtcctcgatgggcttcctggaatattggtgtgtttatttgcat

SEQ ID NO: 753749 - DNA, 75 bp, Homo sapiens
tcgcggtagacccgggcagcgcttccattccgcggagctggtgcacaagcttctcatcgtggtggagctgttgct

SEQ ID NO: 753750 - DNA, 98 bp, Homo sapiens
cgggccgccgccgccgccatgaaccccgaataaatgcaagtgcggccccatcgacctcctgttcgtgctggacagctcagagagcattggcctgcaga

SEQ ID NO: 753751 - DNA, 83 bp, Homo sapiens
tcccagtgcatggcgctcaagtctgtgcgccgcccaggatgttttggtgcaggagatggaagtggttaaacaaggaatgagcc

SEQ ID NO: 753752 - DNA, 87 bp, Homo sapiens
ctcaaggacatgttggatgtgaaggagcggaaggttaatgttcttcagaagaagccgtgctatcaagactaatcaggaccttctccc

SEQ ID NO: 753753 - DNA, 100 bp, Homo sapiens
gggagccagcgggtgctggtggagccggacgcgggcgcagatctgggcacgaaagcttctctctgtcccttggcttctgtgtggtcccagaagatatgcc

SEQ ID NO: 753754 - DNA, 131 bp, Homo sapiens
gttgtttcctccactcccagacttaccacatctgagagaaacctgacatgtgggcatacctcagtgatccttaatagtgccatcagacaagatcagttgatcagaacagaaagctagctcggaaaatccta

SEQ ID NO: 753755 - DNA, 83 bp, Homo sapiens
atcagatttctccaccaaattctcagcctgataaggagtccctgtgaagcaggaagagtgagggcaggttcactgcagctcag

SEQ ID NO: 753756 - DNA, 101 bp, Homo sapiens
ctgccttcgtaacaaccagtgtgactacgtcagagctcctcatgttcttgcatggcccaagcccttctgcaggtctgcggggccaagtgtcccggcggcgc

SEQ ID NO: 753757 - DNA, 87 bp, Homo sapiens
ctggatccacccagtgaccggacttctcacccccaggatgtcatcgaggcactattcatggccgaattgatcaagtcaaccaactcc

SEQ ID NO: 753758 - DNA, 100 bp, Homo sapiens
ccgcgccgcagtcggtcgtccgctggacaagcacgagggcgcgctcgagacgctcctgagttcacgtgcaactccagggacctgctgggctgcttggcac

SEQ ID NO: 753759 - DNA, 75 bp, Homo sapiens
gacaatgccggtggaggaatttgtggctggctggatctctggcagctgaaaaagttggatgaagatagtttaacc

SEQ ID NO: 753760 - DNA, 83 bp, Homo sapiens
cgacaagccgctggcagccgcggatctcaccgccgctcaggaattggctgtgaaaggactgaggcagccatctgggggtagcg

SEQ ID NO: 753761 - DNA, 75 bp, Homo sapiens
caacgagatcttccgccactacgatttggtgccctggttgtcagatgttggaaagcagtaggacggaacatactc

SEQ ID NO: 753762 - DNA, 75 bp, Homo sapiens
ggaggaagagccgggcagtccctggagcgggccagggtttccaggcctgaggtgcccgccctggccccaggagaa

SEQ ID NO: 753763 - DNA, 96 bp, Homo sapiens
gaagaaactccgtgtagacaaagccccactgactcccactgggtctatgctccatcagcaagcactgccgactacaatagggactcgccaggctat

SEQ ID NO: 753764 - DNA, 75 bp, Homo sapiens
gcgagctgtttgacccctttgacctcttcgatgtgcgagactttggaaagtgtcggagatgtatgcagtgtgacg

SEQ ID NO: 753765 - DNA, 51 bp, Homo sapiens
cagttcgctacacagcaatgcatcgagattcgggaactggagcctctcctc

SEQ ID NO: 753766 - DNA, 101 bp, Homo sapiens
gcccgacctgcgagcgccgcccgggcatgcgaagccgtccctccccgggttaatttggagtggcccctggagtcagtttcctacaccatccgaggccccac

SEQ ID NO: 753767 - DNA, 98 bp, Homo sapiens
tggacactccaggaagagcggccccgcggggggcgatgaccgtgcgctgaccctgactcactccagcaattaccagctctggctgggtcgccacaact

SEQ ID NO: 753768 - DNA, 50 bp, Homo sapiens
gtctatgggggctactcgaaacaggccaagactaaggggctgcagagcgg

SEQ ID NO: 753769 - DNA, 100 bp, Homo sapiens
aagaaaagtacaatcaagctaaggagaaactgcagcgagctgcaattgcccagaaaaagcacgaaagcaagagattatcaaagtcactgaacaactgatc

SEQ ID NO: 753770 - DNA, 96 bp, Homo sapiens
cagtagaagccgaagtagggggcgcagcaaagaccgggatccaaataggaatgttggttaatttggagtggcccctggagtcagtttcctacacca

SEQ ID NO: 753771 - DNA, 100 bp, Homo sapiens
cgcaagcacaccctaccgaattacaagatcagatacgtaggtaacctttccagagatgtgacagaagtccttatacttcagttgttcagtcagattggac

SEQ ID NO: 753772 - DNA, 50 bp, Homo sapiens
attcaagttaatcatcagactgtggtctccaaggagatctctgagtccac

SEQ ID NO: 753773 - DNA, 100 bp, Homo sapiens
aacaatgtccagcagctgttgaagttcttaacctagtagcccaggaatgtagtgctggcccgacaacaagctcaaatacgtcaccaaatggcagaggaca

SEQ ID NO: 753774 - DNA, 88 bp, Homo sapiens
ggagagaaagatgtcacagggtcactgtgcaggttcaaatggttgtcctgatcctgatttagtattgaagttcggtcctgtggacagc

SEQ ID NO: 753775 - DNA, 75 bp, Homo sapiens
gggggcggttctcgaagcccccagaagatgtccagaccaagatagaacctgtctctccatgttcttccgtcaact

SEQ ID NO: 753776 - DNA, 82 bp, Homo sapiens
tcgatcttgggacccaccgctgccctcagctccgagtccagggcgagaaacgcttcgttaagggactcaggcagtacgggaa

SEQ ID NO: 753777 - DNA, 101 bp, Homo sapiens
atttgaaacttttatctcatctggcttggcgcctgaggttctcccattaggtttttagaacttcagccataaaaatgggcagaattttccttgatcatatc

SEQ ID NO: 753778 - DNA, 100 bp, Homo sapiens
cgcgtggctcccagcccgggaccccacccccgctggacagtgggggaaactgaggcctgagcggacaggggcaagtgtccgagtggtgaatcagctactt

SEQ ID NO: 753779 - DNA, 75 bp, Homo sapiens
gaaagccagtgttgtggaccctagcacagaggtgttgtagaatatttgagcacaggtggagtagaaacaaatcac

SEQ ID NO: 753780 - DNA, 78 bp, Homo sapiens
tccagcgaccggtgcagctggaaggggagggttgagtaaggagccaaataccttgcgggccccccgtgtccgcacagc

SEQ ID NO: 753781 - DNA, 74 bp, Homo sapiens
tttgttaaggattccaagtaactcttatttggccctgcctctgggctcacctcgctgtgacctgaaggagaatc

SEQ ID NO: 753782 - DNA, 75 bp, Homo sapiens
tggagagaggagaacgaacatcttctggacctttgtccagagtacccaaaggcaagtggaacagctctaatgggg

SEQ ID NO: 753783 - DNA, 100 bp, Homo sapiens
aaagaaagctgcgttaatgtttgcaaatgcagaggaagaatttttctatgagatggccgccctgctcccccaatgaaaggccagcttcgaagaaaagctg

SEQ ID NO: 753784 - DNA, 87 bp, Homo sapiens
ggagacctggtggaaaaggttgatctcatagacaagtttgtacatccaaatgagacggtttaagcggaagcatcttactgccattga

SEQ ID NO: 753785 - DNA, 100 bp, Homo sapiens
cgcccggtttctcggcgaatgacagcacagggctttcaccgctactccacagaccgccagtggcacgtccctcactttgagaagatgctctatgaccagg

SEQ ID NO: 753786 - DNA, 97 bp, Homo sapiens
tggcttcggatggcgtcccgcgtagacgcagtggcctccaaggtgcagacagctgtgactatgaaggggcggccagcacgcctgcacaccaagccgt

SEQ ID NO: 753787 - DNA, 90 bp, Homo sapiens
ccagtgacgaggaattgacaatggccatgtcctacgtgaaggatgacatcttccgaatctacattaaagatcatggaagggaagtggttg

SEQ ID NO: 753788 - DNA, 80 bp, Homo sapiens
tgcgtgagtgtggtctacgagctgtttctcatctttatactcttccagaagtccattggaatattaagcccaggagttgc

SEQ ID NO: 753789 - DNA, 89 bp, Homo sapiens
aaaggattgtgacatatcgttggacccagaattgaggaaatgctgtctatgatttcttcattggccgtgaattaaaccctcgaattggt

SEQ ID NO: 753790 - DNA, 98 bp, Homo sapiens
cagtactctgccgagtgcggcgaagagccgaatgcacataaggtcgccagcccaccctccggacccgcataccccgatgatgtcctggactatggcct

SEQ ID NO: 753791 - DNA, 99 bp, Homo sapiens
aggtacctgaaacaagaaggcagagatacaaccgctggcgctacgtacatctttgggaaaagtggtgggcttatcctctacacctggccagccaatgac

SEQ ID NO: 753792 - DNA, 97 bp, Homo sapiens
ctcctggtcagtacatggattcttcacttgttaagggaagtgtgacctttgaagatgtggccgtgtacttctcctgggaggaatgggatctccttga

SEQ ID NO: 753793 - DNA, 50 bp, Homo sapiens
ccggaccgcagtgccccaagagaggaactttatattgctgttggaatatc

SEQ ID NO: 753794 - DNA, 74 bp, Homo sapiens
gacggatcaccgtacggccgaacgcgacccgaggaggcggaagagcggcgccggctggagtgcagtggcatgat

SEQ ID NO: 753795 - DNA, 100 bp, Homo sapiens
acctggtgcaggtgaagcccatggcaggagctgacatggacccaaatcctcgggccgccctggagcgccagcagctccgccttcgggagcggcaaaaatt

SEQ ID NO: 753796 - DNA, 75 bp, Homo sapiens
tccttcgtggagatgacctctcaatttcagatgcagaactccaggaagttgtaaaagtaggccaagcgagtgaaa

SEQ ID NO: 753797 - DNA, 81 bp, Homo sapiens
gcagcggacgccggtctctgttccgcaggatgtgttctaagaacggaagcatctgggctggatggaatttagcatcaagca

SEQ ID NO: 753798 - DNA, 82 bp, Homo sapiens
cagaacctgtccaggagctggcatgacgtgcaggtctctagcgctttcaggtttagctgtgcctcccagtgactataatgac

SEQ ID NO: 753799 - DNA, 101 bp, Homo sapiens
tgcccggagttccgctcctgcgggcttagcaggaaagggtgcctaaggtaagccaagatgggtgcatacaagtacatccaggagctatggagaaagaagca

SEQ ID NO: 753800 - DNA, 100 bp, Homo sapiens
gttgaggagggagtcagagaagagaggggcccggggccgcgcagaggcgcagagggactgctgtgcgccactgtgatgagcacagggggtggctcccccc

SEQ ID NO: 753801 - DNA, 100 bp, Homo sapiens
gtttctaaggctctaaaatcacatctacttctgagaagaagtacccttagaaagaggccctcagaagagtcttctcttaagaagataaagaaggtagtgg

SEQ ID NO: 753802 - DNA, 76 bp, Homo sapiens
aaatacgaagaggctatttcttgtcacaaaaaggctgcaggacgacatagacagcctaaacccagttctcagggac

SEQ ID NO: 753803 - DNA, 87 bp, Homo sapiens
cagcccacatgcccgctcacctgcgctgtgatgcctgcagagctgtggcttaccagggagtttgaggacatcaccaatgcgagcttt

SEQ ID NO: 753804 - DNA, 100 bp, Homo sapiens
aagaggtctgagcagtgggccaccatcgagcagctgtgcaacaatgcagatcttcgtgaagactctgactggtaagaccatcaccctcgaggttgagccc

SEQ ID NO: 753805 - DNA, 74 bp, Homo sapiens
gcagacctgggtgctggctactaccgcaaatacttctatggcaaaggaaaacaagttgaagtttgctgcctacc

SEQ ID NO: 753806 - DNA, 75 bp, Homo sapiens
gaagaggagaggaaaaaggaagagagcactgcagccagtgaaaccactgaggtcatgttctctttcgaggccggc

SEQ ID NO: 753807 - DNA, 50 bp, Homo sapiens
gtcccagcgctttgggaggccgagggaagacgcttccctcctggggccag

SEQ ID NO: 753808 - DNA, 74 bp, Homo sapiens
agaagcagtggtcgaatccagtagaaaactggtcaaggaagctgagaagggagcactggctttgctttcatcag

SEQ ID NO: 753809 - DNA, 101 bp, Homo sapiens
ctagcagatgctggcgacctatccagaatgatcaagatactggtagacacagtctgggccctctcttaccttactgatgctggcaatgaacaaatacagat

SEQ ID NO: 753810 - DNA, 75 bp, Homo sapiens
tcacatccagcagaggaggcgggggcagccgctgagacggtttttcacaaggactcagtggtctttgaggatgtg

SEQ ID NO: 753811 - DNA, 100 bp, Homo sapiens
tggtggtgaagaagcaccaggccatggaggccatgctgctgtacctgggtgcttgccttcccaagctctggcttcactgacttggcagagattgtgtccc

SEQ ID NO: 753812 - DNA, 94 bp, Homo sapiens
tatgattaggccacaatcttcaatgagtaaacatattcctatctctggaaacatggctacagaacatgttaatggaaatggtactgaagagccc

SEQ ID NO: 753813 - DNA, 82 bp, Homo sapiens
gcagaaacttcataaatatatgcaggcacctgaatggacagaagaggacctcagccaactgacaagaagtatggttaagttc

SEQ ID NO: 753814 - DNA, 73 bp, Homo sapiens
atgcccaccggaatggagaaggaagaggagtcggagtgagctgttgccgcagaatgggctgctggctcctgcc

SEQ ID NO: 753815 - DNA, 50 bp, Homo sapiens
aatgctttataaaagattcatcgctgattactttctatgaagacaaaaat

SEQ ID NO: 753816 - DNA, 82 bp, Homo sapiens
cggtttccggtgcaggtggggaaaatggcggtgtctacagtgttctcgacttcgtcgctggcctgcactgcccaaagtcttg

SEQ ID NO: 753817 - DNA, 97 bp, Homo sapiens
caagctgagagcagccacacagagctcttccccgcagctctgggagacgtggaggcctctgaagctgaagaccacttcttcaacccacgcctgagta

SEQ ID NO: 753818 - DNA, 83 bp, Homo sapiens
gctcctgctggtgtacctgactcagccaggtggcagtagagaagagcatcacagaagttgctcaggagctgacagagctggtg

SEQ ID NO: 753819 - DNA, 75 bp, Homo sapiens
tttgtctacaacagcatgagcaccatcaaccaccaggccctggagcagctgcacacggatgataccatcggggac

SEQ ID NO: 753820 - DNA, 100 bp, Homo sapiens
attttgcctgctggtgttcctacaaggttccagtccttgtcaaggatcaggacactctccagaaggtggtgagtgccccaggaacaacacttcctcctgt

SEQ ID NO: 753821 - DNA, 83 bp, Homo sapiens
aacttagccaatattttgatgctgtcaagcactgccagtgaaagatgtagaagataaacctgaacaacaaaccagaacaagag

SEQ ID NO: 753822 - DNA, 82 bp, Homo sapiens
cggagagtgctagttcttatggcctcgaagcatgctttcttggcattatgtttggataaatacctcggacattattttggtt

SEQ ID NO: 753823 - DNA, 83 bp, Homo sapiens
gtctgaagttcacgactactagaaggggaggggagtggaaaggctctcagtgaaaaagtccacaagaatcggaatgtcagtta

SEQ ID NO: 753824 - DNA, 100 bp, Homo sapiens
atctcctcctgcggcaagaagacgctccacgaagtcctggaaaaagtcttcaagtctttcagacctcaattttgcaggcagtaatagctggtgatcttat

SEQ ID NO: 753825 - DNA, 82 bp, Homo sapiens
catctcaaaaacaaaattctgaactcaggacttggcaactgtccagactaccctcaagtttacatacagtgaaaaataccca

SEQ ID NO: 753826 - DNA, 78 bp, Homo sapiens
cctccgggcttgccctggagccctcagggtgtccgcaatgttgccagtgtctgtctgcagattggctacccaactgtt

SEQ ID NO: 753827 - DNA, 50 bp, Homo sapiens
cctcgctcgtcaccagcaagcttgcgggcccacaatgattctgagctaaa

SEQ ID NO: 753828 - DNA, 100 bp, Homo sapiens
gggcagtttgtcgaacgatgttggactcatagtcactgccagaaaggtacaccaggggttggaaaaaccacactaggcaaagaacttgcgtcaaaatcag

SEQ ID NO: 753829 - DNA, 100 bp, Homo sapiens
gaagagctggctcggatgctgatggggctggacctgctggtgttcgcccacgaccatggcagcttcggtcacctctctgtccaacctggcatgcatgcac

SEQ ID NO: 753830 - DNA, 74 bp, Homo sapiens
ggacgggccggagggaggatgttaaagccccgcggacttaaagagagatctacttcagagccagcagtcccgcc

SEQ ID NO: 753831 - DNA, 90 bp, Homo sapiens
ttcggaacccgcaccaagctctgctccacactgccaaccggccagaggacgagtgtggctgtaccttcacagtcctggtgcacacgagag

SEQ ID NO: 753832 - DNA, 82 bp, Homo sapiens
aggtggtgggactcaccgctctggccagggtgcttttggaaacacgtcaacagtaatgaaggcaagcagaaaaagcgaggag

SEQ ID NO: 753833 - DNA, 90 bp, Homo sapiens
atgagctgcagctggagcaaatgcataaacgttttgaacaggaaatcaacgtacaggggcccgtgctggttgaggacacttgtctgtgct

SEQ ID NO: 753834 - DNA, 80 bp, Homo sapiens
ctgggctgccggcacttcgcggcaggtattgttgcagcatctggcagtgagactgaggatgaggacagcatggacattcc

SEQ ID NO: 753835 - DNA, 50 bp, Homo sapiens
ctgggtccctgggcagtgagcctgcccttcagatatttcaacactcctct

SEQ ID NO: 753836 - DNA, 75 bp, Homo sapiens
gtaatgctggtggtctgcatcaccaccggatcaacttcgacaaatatccacagccaagaagatagacatcatcaa

SEQ ID NO: 753837 - DNA, 51 bp, Homo sapiens
ggcgacggcggcaaatctaagaaatttgtgtctgcttttggggcagagttt

SEQ ID NO: 753838 - DNA, 75 bp, Homo sapiens
cccgcttcaagaagcctgctgagttcaccacaggttgaaggggcccggccaggactcggggaagggtggcctgag

SEQ ID NO: 753839 - DNA, 82 bp, Homo sapiens
cggtcggactcccgcggcgggaggagcctgttcccctgaggaatcttgtcgattggcctggctgctgcctactacagcggag

SEQ ID NO: 753840 - DNA, 76 bp, Homo sapiens
gactgtttattttttggttcactgatgtctgctacagatccagactcctgtttcctcaaggccaatgatttgactc

SEQ ID NO: 753841 - DNA, 75 bp, Homo sapiens
cagcctcccgaatagctgcgattacagataacgaaggaggcccaacttcattcaataaggagcctgacggattta

SEQ ID NO: 753842 - DNA, 97 bp, Homo sapiens
agaaaacaaaggtagaacatggaggatcgtcaggctctaaacaaaattctgtgggaatgtaagacggacttagatattgcatacaaatttggaaaaa

SEQ ID NO: 753843 - DNA, 74 bp, Homo sapiens
ctagtatcatgacagcagcttcagaaccagagctggcttccagcacgtagaaaatctaattgtgtgaaagaagt

SEQ ID NO: 753844 - DNA, 98 bp, Homo sapiens
ccgggcagcccaatgtctcctgcacgtgcaactgcaaacgctctttgttccagagcatggagatcagcctccggtgtggctgtctctgatggtgtcat

SEQ ID NO: 753845 - DNA, 74 bp, Homo sapiens
agcgcgccggaccaagcgggcccagaagcgggatctgcatttactgctcaaccacatctaatttgatgtcctct

SEQ ID NO: 753846 - DNA, 99 bp, Homo sapiens
cgctgctgggatggcgcgggccgggccggcgtggctgctgctggcaatctgggagacaaggacggcagcaaggtgacaacagtggtggcaactcctggg

SEQ ID NO: 753847 - DNA, 75 bp, Homo sapiens
aatatggagagagccctttgcaggatgcagaagaagccaaaaacattctgggtcagcccaaggccaaccccactg

SEQ ID NO: 753848 - DNA, 101 bp, Homo sapiens
atttcaggagtacctggaggctcaacggcagaagcttcaccacaaaagcgaaatgggcacaccacaggaatctgtctgctattcaggatagagaaatttgc

SEQ ID NO: 753849 - DNA, 74 bp, Homo sapiens
cttggcttgattcagtctgccttgtaacaggcagccctgaagcagcttcctaggaacaaggtccccaacatggc

SEQ ID NO: 753850 - DNA, 74 bp, Homo sapiens
tcagctatgccattaagaacatccatggagtcagatctttgtggagttcacctctgtgtttgactgccagaaag

SEQ ID NO: 753851 - DNA, 99 bp, Homo sapiens
atacagaagaatgaaggctgcaatcacatgcagtgtgctaagctctatagcatcgccgcaccagctcgaagcttccgagatttcaaagttcagtttgtg

SEQ ID NO: 753852 - DNA, 50 bp, Homo sapiens
gtaaatcagaatgggaagctacaatcaagttcatccgagaagtaacacca

SEQ ID NO: 753853 - DNA, 101 bp, Homo sapiens
gcctttgttgctgctgcacattaggttgcagtatgtggccagttatttgcctcagtaaaagagaaatgtagtctttggtgagcccatcactgccagcctcg

SEQ ID NO: 753854 - DNA, 105 bp, Homo sapiens
caactcacagcctgaaaatgaaaaggaagcttcaggtggagacagcccgaagtctattatcctcccagtccacaacgctgaaccgtggctggacgaatgtttgag

SEQ ID NO: 753855 - DNA, 82 bp, Homo sapiens
ctggagcgggcggagctgtgcgagagcctcctcacttggcgttacagtgtttctgccacctctgtacaaaagacaattttac

SEQ ID NO: 753856 - DNA, 98 bp, Homo sapiens
gtcaagtcgctgtctgtcttccatgcccaggaatagccaggtctggctgggtcggcacaacctgtttgagcctgaagacacaggccagagggtccctg

SEQ ID NO: 753857 - DNA, 75 bp, Homo sapiens
cagaaccgtcccaaaatatggcaaagaaacctattctgaggctttactgcagatggtgcgtgacgagagccacca

SEQ ID NO: 753858 - DNA, 75 bp, Homo sapiens
gagggaacgcagctgaaagcgtgaactgttatggcatgcagctgtaccagaattatatgcatccatatcaaggta

SEQ ID NO: 753859 - DNA, 100 bp, Homo sapiens
ctggatggtgtgaaagcagcatgcccctgcccacagagcagccccccagaacagaaagagatgatgagctagttgtgaaccccaaagtgttccctcacat

SEQ ID NO: 753860 - DNA, 100 bp, Homo sapiens
ttgctacacatgctaaaagatgacagacttggacaacatgtcccaacattacatcccagttggatggcaagcatgtggtgtttggcaaagtgaaagaagg

SEQ ID NO: 753861 - DNA, 100 bp, Homo sapiens
caatgaccttccctcgggaattccacctctgcgtttttccctccagcgcatggatttaggagaatgtaccaaaatccacgacttggccctccgagcagat

SEQ ID NO: 753862 - DNA, 107 bp, Homo sapiens
tcagcctcccgagtggctgggattacaggcggggcctaatgggaacgtatggccaatcagcggcggcgtttcttttgcggctccacgtcggcaccagctgcggggca

SEQ ID NO: 753863 - DNA, 101 bp, Homo sapiens
gaaatcaatgctgaagaagagcctgagaaaaaaaggaaacaccgcaaacggtcccgggatcggaagaaaaaggtaaagctccagatggctctggaacttat

SEQ ID NO: 753864 - DNA, 98 bp, Homo sapiens
ctggcttttaaggaggacacccggacacctggaagctgggaaatggatggtgccatgacaatggtgtgaactacaagattggagagaagtgggaccgt

SEQ ID NO: 753865 - DNA, 74 bp, Homo sapiens
aaacatcgacgccatcgacaagcgcctgtggacatctctacagcaatgagtgaacgggcacttgctcagaaaag

SEQ ID NO: 753866 - DNA, 88 bp, Homo sapiens
ctgaagatgctgccaaaagcataaccaatggcagtgatgatggagctcagccctccacctccacaggagcccatggaggagaggcacc

SEQ ID NO: 753867 - DNA, 100 bp, Homo sapiens
tcccagtgggttaaaccagcacacaaggaaccgtcaagggcagtcatcagatccaccatctgcttcaacggcagcagaagaggatgaaacacaaaaccag

SEQ ID NO: 753868 - DNA, 78 bp, Homo sapiens
gtcttcctgcccaacaaacagaggacagtggctatggagttactagtagagaaagcaatcagcagtgcttctagccct

SEQ ID NO: 753869 - DNA, 50 bp, Homo sapiens
cattttcgccttacattcttacgagatacgtggttgcagtaggattggag

SEQ ID NO: 753870 - DNA, 51 bp, Homo sapiens
gtccggcaagatcgagaaagcaggtaagaatgattgatgttggctgatatt

SEQ ID NO: 753871 - DNA, 116 bp, Homo sapiens
tgcaggaaagaattaccactaccaagaagggatctatcacctctgtacaggctatgtccaaactgggtcttcggcaggttacaggagttactagagtcactatccggaaatctaag

SEQ ID NO: 753872 - DNA, 90 bp, Homo sapiens
aagaaagtgaaccagtagtttggagaggccttatggtaatgtcggccattgagaaattgttgaggcagatggagtctcgcaccgtcgccc

SEQ ID NO: 753873 - DNA, 100 bp, Homo sapiens
acgaattccaacttgtttcacgctatatcaggatgagataactgaaagggaagcagaaccatactatttactccacaggatccgctgaacataggatgtt

SEQ ID NO: 753874 - DNA, 75 bp, Homo sapiens
tttgcaagggaaggaaatgtgcccaacatcatcattgcgttggagctgatcacaacccaggccacaaaggcaggc

SEQ ID NO: 753875 - DNA, 100 bp, Homo sapiens
tgaaaatagataccaaagaaaagaaagagaaaaagcagaaagtagatgaagatgagattcagaagatgcaatttccatgaggacaacttacaaggacctg

SEQ ID NO: 753876 - DNA, 50 bp, Homo sapiens
tgggaagccagtgaggtagtcagaccaggatgaaagagcagctgagctca

SEQ ID NO: 753877 - DNA, 75 bp, Homo sapiens
actttgagccagtccagaccctgctgctgtcttcaaagaaggcttgctatcagaggaagtggagaatgtgccttc

SEQ ID NO: 753878 - DNA, 82 bp, Homo sapiens
ctagacttgattcattgcctccagtaatcaagccaagacccatgttcttgacattgagcagcgactacaaggtgtaatcaag

SEQ ID NO: 753879 - DNA, 73 bp, Homo sapiens
ttggcgatagttccctttctagaaagatacgtaggtaacctttccagagatgtgacagaagtccttatacttc

SEQ ID NO: 753880 - DNA, 90 bp, Homo sapiens
acaaagatgatgatgaggtttttgagaagaagcaaaaagagatggatgaagctgctacgacacctgaaagaccccgccgtggcatcccag

SEQ ID NO: 753881 - DNA, 100 bp, Homo sapiens
tgtgctttggacctgtgtacccacccaaggctaaaggcagagccaggtaaagagtgtgtacaacagttagctgaaaacaccaggtatttcaggagacgcc

SEQ ID NO: 753882 - DNA, 98 bp, Homo sapiens
taatcgtcaagcacgtgacggtcatcggcggcgggctgatgggcgccggcattgcccaggatcctggtgcacctgagccgtggaggggctgaagtcca

SEQ ID NO: 753883 - DNA, 95 bp, Homo sapiens
ggccgatgaagtgcagaggtttttttctgaagatgaatggtcatctccggttattgaatattgcctgtgctgcaaaggctaagtggagacaggtt

SEQ ID NO: 753884 - DNA, 73 bp, Homo sapiens
tcttggacagatgatgccagttaattactttgaatgtggatccataaagaacccagccaacccgcagagggag

SEQ ID NO: 753885 - DNA, 100 bp, Homo sapiens
ttcggtggtttcttgtgaggacgcggcagcccgtggagtcggctgagggaaaagcgaggcaaggcaggcgggtttaaccaccaaggactctgagagctgg

SEQ ID NO: 753886 - DNA, 100 bp, Homo sapiens
agagactgaggacttaaatgaagccactgattagcaatttaaagatcctctccaaggtttttcttcccccagtccctcagctgctgctgctgctcaggag

SEQ ID NO: 753887 - DNA, 98 bp, Homo sapiens
ttccctcagcacacagaggatgatgctgactttgatgaagattgggaaaatgaggtacgttagtgttcgcgattttaaaggcaaagtgctaattgata

SEQ ID NO: 753888 - DNA, 73 bp, Homo sapiens
cgtggatttggggatggctataatgggtatggaggaggacctggaggtggaccggtatcggttgaagaatggg

SEQ ID NO: 753889 - DNA, 100 bp, Homo sapiens
gcattgcctcgaccacactcacctctctctgctcatgcaggaacgaatgcaggaatttgggaactgagctgtgcaagtgctgaagaaggagatttgtttg

SEQ ID NO: 753890 - DNA, 98 bp, Homo sapiens
gtgaaatggaagatgcctatcatgaacatcaggcaaatcttttgcgccaagctgtgagtaccagagtgcccactggttccaacagttcttctcagacc

SEQ ID NO: 753891 - DNA, 82 bp, Homo sapiens
ctcagagaaggaggaggtgaccacgcgcgagaagtccattggaatattaagcccaggagttgctttggggatggctggaagt

SEQ ID NO: 753892 - DNA, 98 bp, Homo sapiens
ggaggagctggagaggaaggcgagatatgtgcagcgggggctacagcgagtggggctagatccccagctgccactgaatctggctgcccttcaggccc

SEQ ID NO: 753893 - DNA, 50 bp, Homo sapiens
tcggggaaccatggctgccccgagagatcctattaggaatacaggaactt

SEQ ID NO: 753894 - DNA, 97 bp, Homo sapiens
agcagttcaaccgcatgaagcagctggctaaccagaccgtgggcagtgccagaacagataaagcccagtgtaagccagcctcagcctgccaactcta

SEQ ID NO: 753895 - DNA, 90 bp, Homo sapiens
ggagaaggagactgcaaggataggcccaggttgcaatgaggtgtcgctgcagcagcatgcacttcttggtagcagaatggaatgaaccat

SEQ ID NO: 753896 - DNA, 83 bp, Homo sapiens
gtgtcatccagccttagcaaaccagagagtaaaatagtgagagtactaaacttatggcagaagaataatgtatttaagagtga

SEQ ID NO: 753897 - DNA, 98 bp, Homo sapiens
gagtcaccttctggactgctgcccccatgacatcctggctgggacgaaaagtacgaagatctgagctcttctgacgagtcctgccctgctcctcagag

SEQ ID NO: 753898 - DNA, 82 bp, Homo sapiens
gcgttatgggatcgagatcctgccgttgcctgtcatgggagggcagattgatgccaagaaggaacagctagcagatgcccgg

SEQ ID NO: 753899 - DNA, 49 bp, Homo sapiens
gccgaggcaggtggatcacgagtggagatggggtttcaccatgttggcc

SEQ ID NO: 753900 - DNA, 82 bp, Homo sapiens
gagttgaccagtcaattctcacagggtgtccgcaatgttgccagtgtctgtctgcagattggctacccaactgttgcatcag

SEQ ID NO: 753901 - DNA, 97 bp, Homo sapiens
gagagtgagagaaaggctggaagacgagaatttcccatgtcctactttgcaatgtaacccagagggtatcattctggtttgtggttacagacccttc

SEQ ID NO: 753902 - DNA, 82 bp, Homo sapiens
ccgctatccagaacctccactctttcgtgcccatgacgcttccggagacaaccctggaaacactgaagcataaaatcaaccc

SEQ ID NO: 753903 - DNA, 100 bp, Homo sapiens
ttcatcttctgatataaaagaccagtgtcttaagtaccaggacttggacaacttcattgccaactttggggatgcagggtttgtccttgtggcctttggc

SEQ ID NO: 753904 - DNA, 95 bp, Homo sapiens
aaccttctctctttcgctctttggactaatgggagttgcttttggaatgaatttggaatcttcccttgaagagggatttcagtcataatcggttg

SEQ ID NO: 753905 - DNA, 74 bp, Homo sapiens
ctgatgctgtggaacttgcaaatcgaaggtccagaggtgtccttctaaagctggtagaggtttcacgagtcatc

SEQ ID NO: 753906 - DNA, 98 bp, Homo sapiens
tgggacactgagctttgtggaagcatttggcggcataccaccctgcactgtgaggttgcattggagttttcgaaagacttatctttctgcaggctcgc

SEQ ID NO: 753907 - DNA, 98 bp, Homo sapiens
atgagtgcagctgctgcctcccgagatatcactctgggctattcacgaaaagcagcagctctagagttcttaaaccgctttgaagaagccaagcgaac

SEQ ID NO: 753908 - DNA, 75 bp, Homo sapiens
ctagtgggtgtaatacatcatgaactgcaggaaagacttccgagtgcaggaactcccactggctcgtattaagaa

SEQ ID NO: 753909 - DNA, 100 bp, Homo sapiens
cgattatggattggcaacctggaccccaaaattaccgagtggagccgccaccaaaatgcagattttcgtgaaaacccttacggggaagaccatcaccctc

SEQ ID NO: 753910 - DNA, 75 bp, Homo sapiens
tcgcagtggtcgcttcttctccttggaactgcaagcacatgttgaccagataactgaaatggcagcagtaatgag

SEQ ID NO: 753911 - DNA, 82 bp, Homo sapiens
tcatctgccccaggcccaactcatgttgacgggcagccagctagctgggcaattctgtggtgttcttggtcacacatttatg

SEQ ID NO: 753912 - DNA, 83 bp, Homo sapiens
tcttcctgtcatggttccccttctactacatgctgaaggaattctatgagcatgccaaggctctgtgggaggatgaaggagtg

SEQ ID NO: 753913 - DNA, 82 bp, Homo sapiens
caagttccggcacaccgaggctcggccgccccgccgcgaggcgccatgtcagaaccggctggggatgtccgtcagaacccat

SEQ ID NO: 753914 - DNA, 82 bp, Homo sapiens
ccatcattgatgtggtgcgatcggtttggttttcctaaacaaatcctttcacagggaccgacggcacttgataatgtgacaa

SEQ ID NO: 753915 - DNA, 83 bp, Homo sapiens
gaaaaccaagttacaagtggcgcccggagctcgttggaatcgaagcctcttaaaatggcagatgacttggacttcgagacagg

SEQ ID NO: 753916 - DNA, 88 bp, Homo sapiens
gatcttgagagtgaagatctcgaaggatttcataggtacctaccagggccagtgggccggaggcatgcggcatggctacggcgtgcgc

SEQ ID NO: 753917 - DNA, 82 bp, Homo sapiens
caggcaactggagagcaaagtgaggctgctggagggtgacaagctcctcgcacagatgcctgaggaaacccagacccaagac

SEQ ID NO: 753918 - DNA, 100 bp, Homo sapiens
ctctcagagacaacgtgaagacggataagcaggcatcaggagcagagtggcctctcaggtgttacagcacatgaaggccgtgcaggcagatcaggagcgg

SEQ ID NO: 753919 - DNA, 101 bp, Homo sapiens
ccctcatcgagctcttcgtcaaggttcttcacacacccccattcggcgtagtacccagagagctcaagatgtgtggcagttttcggatggaagctcgagag

SEQ ID NO: 753920 - DNA, 90 bp, Homo sapiens
tggggttcagcgatggcctgtatgaaggggagttcaccctggccaaccatgacatttgttagctttaggactgaagcattttgaagggac

SEQ ID NO: 753921 - DNA, 51 bp, Homo sapiens
tgatgattggcagagacccactgtctgtaagctgtgctagaacaaaaatgc

SEQ ID NO: 753922 - DNA, 90 bp, Homo sapiens
ccaggactgaccgctgccgcccagcacgtccaggttcctaaaagtaaagctttagaggccaccaaattggcaattgaagctggcttccgc

SEQ ID NO: 753923 - DNA, 101 bp, Homo sapiens
gcggacgaggcggaagaccgcgcgcagggcctgcagcgggagctggacggcgagcgcgagcggcgcgagaaaatatttggagttcttacaacatggcagac

SEQ ID NO: 753924 - DNA, 83 bp, Homo sapiens
catgccgctcctaagcctgcacagccgcggcggcagcagcagtgagagatatggctcgtggacagcagaaaattcagtctcag

SEQ ID NO: 753925 - DNA, 96 bp, Homo sapiens
gatttcagccccagtgagaaaggtcaccgcaagtacagagagtacagccccccatatgcgccgcagtacttcatcctcctcatcatcacggacggg

SEQ ID NO: 753926 - DNA, 98 bp, Homo sapiens
agtgacacaggtcaggaagcagaatattccttatatgatcgttaactgaagacaatatgcaaaattctcacatggatgaatacagaaattctagtaat

SEQ ID NO: 753927 - DNA, 98 bp, Homo sapiens
gcagtggtcgcttcttctccttgatataaagatgaagcgcagctgtataaagaagagcacctgaggaatcggcagcaccctcactgctacgttcagta

SEQ ID NO: 753928 - DNA, 123 bp, Homo sapiens
aaaaattgacaagtgggatggatcagctgtgaaaaactctttggatgattctgccaaaaagcttcttggacacttaatgattgttggcaagaaatgtgctgctgatctgggcctgaataaggg

SEQ ID NO: 753929 - DNA, 100 bp, Homo sapiens
caacccctgagccatggagccgcaaggagccacacagcaggaggtggtttgtgatgaaaatggttccaagggctatggatttgtacactttgagacgcag

SEQ ID NO: 753930 - DNA, 101 bp, Homo sapiens
agtccatctcactgttgtttactttgggaaagaagaaataaatgaagtcaaaggaatacttgaaaacacttccaagagtcagaaataccatcagaggaggg

SEQ ID NO: 753931 - DNA, 100 bp, Homo sapiens
ctgaggagctccacaacctagaaccaggaagcgcctacagaatccgtgatatttctgctacgaggtggaccccatgctgaccctggaggagcagcagctc

SEQ ID NO: 753932 - DNA, 76 bp, Homo sapiens
ccggggaggtcacctgacgaggaggaccctgatgctcccataagacagaaaatgccccttgatgatctggatagag

SEQ ID NO: 753933 - DNA, 83 bp, Homo sapiens
gtgcgaacagcagctggtaccgaaggcggaggtggagcccgagagggaaattcaactactgaggaggttacggcacaaaaatg

SEQ ID NO: 753934 - DNA, 104 bp, Homo sapiens
acaggaagatcatccctctcaaaatgtgctttgctgctagaaacctaagcatgccggatctggaaaacagtgaattttgaagattgcaccggtcgacaaaggac

SEQ ID NO: 753935 - DNA, 83 bp, Homo sapiens
ggctttgccgacttcagccagatgtccaagctccccgcagccaccgccacccattggaatggccaacaggggacctgcatatg

SEQ ID NO: 753936 - DNA, 97 bp, Homo sapiens
agaactgttctcaggactcattattttaacatttgggagaaacacagccagaaggtcctcagaatggttggaatgaccctccagctttgaacagagt

SEQ ID NO: 753937 - DNA, 75 bp, Homo sapiens
aaaaaaacaggcgtattctggtaatttcgaggaggaattgaacaacacatgtgaacccgttgtaacacaaccgaa

SEQ ID NO: 753938 - DNA, 51 bp, Homo sapiens
atgcacacccttcctgggtgatgggccatggagttggggagagaatgtcta

SEQ ID NO: 753939 - DNA, 75 bp, Homo sapiens
caccttcatggaccaacataactttagtccaagatgtcagcttttgccaactgttttcaaatcacatgcatgggg

SEQ ID NO: 753940 - DNA, 83 bp, Homo sapiens
tccatctgtggaaggacctaccaaccaggaggatacgaagcgttttcggcttcctgcccggagctgtgcagcaaacagtcgac

SEQ ID NO: 753941 - DNA, 96 bp, Homo sapiens
cttggcggcgcccggagccggcgtggcgctcatcgagggacgcccggcccaagtggaattgaatgatctggcacgggaccctccagcacagtgttc

SEQ ID NO: 753942 - DNA, 98 bp, Homo sapiens
tcgaggagagccggagtcggggacccaggagtttcctgtgtccagcgctgccggagccgcctgaggcatgctcagtccctggctgcgctgcaggctta

SEQ ID NO: 753943 - DNA, 108 bp, Homo sapiens
ccaggtctccgtgcagcccaacttccagcaggacaaggcccagaaggatgtggatgctgtggacaaggtgatgaaggagctagacgagaatggagacggggaggtgga

SEQ ID NO: 753944 - DNA, 82 bp, Homo sapiens
acaaaaagtttgtcattaaacccatcgacaagaaggcacctaagctccaccatgaggcgaggtggatggaggaagcgagctg

SEQ ID NO: 753945 - DNA, 96 bp, Homo sapiens
tgtctggagatgaccacccacgggccttcgttttggacgagtgccagaaaattggcagagggggtcgatttgggaggaaaggtgtggctataaact

SEQ ID NO: 753946 - DNA, 83 bp, Homo sapiens
tgcagcgggagctggacggcgagcgcgagcggcgcgagaaagccctgacatccttcaagcgccagcaagaggagagcttccag

SEQ ID NO: 753947 - DNA, 100 bp, Homo sapiens
cttggagtagggacaaaatatcttggctcacgtatttaagagcctgaatattccagttggttgaatctggcgatgtggaacccatggatatggagggctg

SEQ ID NO: 753948 - DNA, 100 bp, Homo sapiens
aaattaactgcctccattacactgctgagtcacacacaacgcttgttatgttttcatcacttctctccagaagactcgagaacaggaagaactggaagaa

SEQ ID NO: 753949 - DNA, 98 bp, Homo sapiens
caattcctgtgtttggaccattgagcagcagattggaaaagtgaatggtgtgcatcacattaaggggatagggtctccctctgtctcccaggctggag

SEQ ID NO: 753950 - DNA, 80 bp, Homo sapiens
tactctgaattaccatcagctgaagggaaaatgaaggttcggaacctcacttacatggtgacccgcagggaaaagattaa

SEQ ID NO: 753951 - DNA, 90 bp, Homo sapiens
gctgcccggtttggcactgctcctgctggccgcctggacggctcgggcgctggagcccacgacccttcctcagggcaccatcaacatgaa

SEQ ID NO: 753952 - DNA, 100 bp, Homo sapiens
gtctcgctccgtggccttagctgtgctcgcgctactctctctttctggcctggaggctatccagcgtaacagagattcaaaggtaccttcagaaggaaag

SEQ ID NO: 753953 - DNA, 100 bp, Homo sapiens
ccataaacaaaagctattacaatgtggaaggacgtttcctactcacccttacttttcagtacagcttgggccaggacagctgtcactgtttaacctcctg

SEQ ID NO: 753954 - DNA, 76 bp, Homo sapiens
gattttgcatctagaggaattgaaagaatctggaaaaccaggggctcatgtaactgtgaagaagctgtttgttggc

SEQ ID NO: 753955 - DNA, 75 bp, Homo sapiens
aatttgttactttttcttgtccgggtgcggataagggacccgacactgatgtggcatctccacagaaagcgactg

SEQ ID NO: 753956 - DNA, 86 bp, Homo sapiens
acctccgagcgcaaggacagcgcgaggtccgcgcagcccagcgcagccatgcttgggcactgtttaaaggaaagttccgagaaggc

SEQ ID NO: 753957 - DNA, 82 bp, Homo sapiens
agccgcggatctcaccgccgctcaggctgggaatggtgaggaagaaattctgccccactgtaacttgcaggtttttacctac

SEQ ID NO: 753958 - DNA, 83 bp, Homo sapiens
ctctggaaggctgcgcagtattggaggggacagaatgaccttccggccttgagtccctgtgtcttctcagaaacaaccagctg

SEQ ID NO: 753959 - DNA, 83 bp, Homo sapiens
cggcttggatatcttcggggacctgaagaagatgaacaagcgccagcttcccgtggaggatgacattgacctcagtgatgtgg

SEQ ID NO: 753960 - DNA, 51 bp, Homo sapiens
aaaggaaagatggatccagacaaggctcgggttatgtatgattttgctgct

SEQ ID NO: 753961 - DNA, 100 bp, Homo sapiens
tatctgctcacttcttacagactgtaatcctggtatcgagaactaacagagatgtcagaccccaatgcacttccccctcagtgcacacccaacatcgatg

SEQ ID NO: 753962 - DNA, 100 bp, Homo sapiens
gacgccctggagggcggcctcggccatgcagttcttcaccaagggctaccaggagaccatctcaggaagttctccagcagctgattgtaatgaatttgcc

SEQ ID NO: 753963 - DNA, 90 bp, Homo sapiens
tctcttcaatgatcccatgtggaatcagcaatggtacttggtgtcagcttcctctggtgcaaccagcaagtcttccagtatgaatcccac

SEQ ID NO: 753964 - DNA, 98 bp, Homo sapiens
atgaaatccatgctcagagatgccaagaagaatctagacagacaggcctttctagatcaatgaactgagccatgttcaaatccctgttatgttgatgc

SEQ ID NO: 753965 - DNA, 82 bp, Homo sapiens
ctcggagaagatgtggtggcttccgtttgttggtggaggaggtggcaggcctcggcgccgtgctatcaagactaatcaggac

SEQ ID NO: 753966 - DNA, 100 bp, Homo sapiens
acgtcaccgaggagaagtaccaggaggcgttggccaaggaaggtcagtgcaccagatattctgaaacctctcaatcaagaggatcccaaatgctctacta

SEQ ID NO: 753967 - DNA, 100 bp, Homo sapiens
gccatcaagaagtttctggaatcagaagatgaccctgtcataaagaaaattgcccttcgggaaatccgaatgctcaagttgtggacatcggatacccaag

SEQ ID NO: 753968 - DNA, 87 bp, Homo sapiens
agagcttaaaattgctgttttacagaagatatggctcgtggacagcagaaaattcagtctcagcagaaaaatgccaaaaagcaagct

SEQ ID NO: 753969 - DNA, 100 bp, Homo sapiens
gatgacaccttagaattagagggtggagatgaagctgaagatcttacaaagaaacttcttgatgaacaaggataaaagaatcagagtgtctcaacccttg

SEQ ID NO: 753970 - DNA, 97 bp, Homo sapiens
ccgctgcccgacgagcaggacttcatccaggcctacgaggaggtgcgcgagaagtacaaagattcttggtgccaccattgagaactccaggattgtc

SEQ ID NO: 753971 - DNA, 100 bp, Homo sapiens
gcggagaagcggagactgcgcgcctcgcctcacagcgaaacgccgcgcactcggagccggcacggctcggcgcagttggaattgatcacaccttttcagt

SEQ ID NO: 753972 - DNA, 50 bp, Homo sapiens
cccacagatgttcatagacaagttgctccttgagggcaggacagttctta

SEQ ID NO: 753973 - DNA, 101 bp, Homo sapiens
gtctaccagagcatggtgctcttcttcttcgagaattacaccggggtccagctctaagcgaaagacatgaggcctcagcctgaaatgaggttgttttgagg

SEQ ID NO: 753974 - DNA, 50 bp, Homo sapiens
gggcatacatctttcttcgacaaagggaaggagcgccccacctccctgaa

SEQ ID NO: 753975 - DNA, 105 bp, Homo sapiens
tgggagccttgtctgctcccagtcggcgttgggaaaccagaacgctcaggaacgcattttgaaagcgaagcagaagccgtagaatcagcggcgagcctgttgaaa

SEQ ID NO: 753976 - DNA, 100 bp, Homo sapiens
accagccttcatggagcctatattctgtaaggttttacacacgctggaaagattgggaatcatggtattctcagagctttggtttacatttttccttgag

SEQ ID NO: 753977 - DNA, 120 bp, Homo sapiens
ccggcccggattatagtctctcgccacagcggcctcggcctccccttggattcagacgccgattcgcccaggtggttttttggcaaaatccccagagccaaggcagaagaaatgcttagc

SEQ ID NO: 753978 - DNA, 83 bp, Homo sapiens
agacgacaaaatgcaaaaaaggaggccaaagactttgtgatttgtggagctatgatttcttcagtggtgaatttgtggtgtca

SEQ ID NO: 753979 - DNA, 90 bp, Homo sapiens
gtctactctgtcgctcttgtgccctagcaccccgagaaccgtcagtttgagccagatggcgcattggagtgactgtctggcatcaccaag

SEQ ID NO: 753980 - DNA, 73 bp, Homo sapiens
gacggcccggacttcctctcagaagaggaccgcggagtcccagactactatgacatcatcaaaaagcccattg

SEQ ID NO: 753981 - DNA, 98 bp, Homo sapiens
gcagtagaattccttgtagataagcaactggattttttaactgaagatagtgcctttcagccctaccaggagttggcatcctttggaagagttcgtga

SEQ ID NO: 753982 - DNA, 53 bp, Homo sapiens
gtcgttttcccgtccccgagagcaagagtttcactcttgttgcccaggctgga

SEQ ID NO: 753983 - DNA, 82 bp, Homo sapiens
ggccacggcgctggtcaccggggtctgcctgggaggcagtggagaaggtgacacagcacatccacggcctgtctgggaagaa

SEQ ID NO: 753984 - DNA, 74 bp, Homo sapiens
ctcaaactgcatgctcacatccactcggctttcctgctctgggaccctaccaaggtgcccccacgactgcaggc

SEQ ID NO: 753985 - DNA, 98 bp, Homo sapiens
tcgtgggcgccgcagcctcccggggccctacggccgcccgccaccagacgttaaccctctgggcgaagcattgatgaaagctttgataagccaaagtg

SEQ ID NO: 753986 - DNA, 90 bp, Homo sapiens
ttttaagagtgctggggcctggaggctgtaatacaaaagctgcgcgtcccttaatttcctcggcggcatcaacctgtgggaaatggcgga

SEQ ID NO: 753987 - DNA, 108 bp, Homo sapiens
catctccctggacgaactcatcaggaagcgcggggcggcggcgaaaggacgggaaatcctcattgacgattcaatttgttgaaggccaatttgtggactcctacgatc

SEQ ID NO: 753988 - DNA, 82 bp, Homo sapiens
ccacacatgatcatcagtatttgcctcctgtgtcccaaccggcctgagtcaagtacaatgactcttcttgcttttcacctaa

SEQ ID NO: 753989 - DNA, 87 bp, Homo sapiens
ctaatggagcccctgccatcacactgctaatacgagaaaagctgtgcttgaggaacttgttaatagcggacgcttacgaggcactgt

SEQ ID NO: 753990 - DNA, 100 bp, Homo sapiens
caaaaactggagcagaaattggaggctcagcatagaaaaatgtccattccacaaggtttgtgacatatttctgtgagcaggttctccctaacctcggtac

SEQ ID NO: 753991 - DNA, 100 bp, Homo sapiens
gcgaagcacgagcagatcctggtcctcgatccgcccacagacctcaaattcaaagaagaaagaatttgactgatgggcgtaaggaagaaaaagagaccga

SEQ ID NO: 753992 - DNA, 100 bp, Homo sapiens
aataacaggcggagggtcggcgtaggactctgtctactagtgacgatgtcgaagacagggaaaatgaaaagggtcgccttgaagaagcctacgagaaatg

SEQ ID NO: 753993 - DNA, 98 bp, Homo sapiens
cattgcaaggcatgctgcctggcttgctggcacctctcaggaccctctctggaacccctgaagctgtgggaatcactttaaccctgatggagcatctc

SEQ ID NO: 753994 - DNA, 98 bp, Homo sapiens
gaggaaattggggataaagtgttggtgatgtagtagaagtacaggcagatgaaacctttccctgtgatcttattcttctatcatcttgcaccactgat

SEQ ID NO: 753995 - DNA, 100 bp, Homo sapiens
gctcgccgcaagtcatactagtgagccacacgccacagtcagcgtctgctgcttgtgaagaaatagcctaccaggttaatgttgaagaaggaaaatgcgg

SEQ ID NO: 753996 - DNA, 100 bp, Homo sapiens
gcagccacagaccaccaagctgaagggcaaaatgcagagcaggaacttgatactaaatttgggactctttgctgcgggagtttggctggccaggaacttg

SEQ ID NO: 753997 - DNA, 50 bp, Homo sapiens
gccgggagcccgccgcgctggtagcggaggagagacttcagcatgcaaac

SEQ ID NO: 753998 - DNA, 75 bp, Homo sapiens
caccgacagtgccctgagggccttcgagagctaccgcgccagacagattcttctgctgatcgacattgagcagtc

SEQ ID NO: 753999 - DNA, 82 bp, Homo sapiens
ggaggtgttcgagaacgaccccgagacggaagcttgctgtcttcgatacgtggagctccttggcggtccacattgcaatgga

SEQ ID NO: 754000 - DNA, 50 bp, Homo sapiens
caaaaagtcatagtggtgtgacaagagcgagctggacgccactgtggggc

SEQ ID NO: 754001 - DNA, 85 bp, Homo sapiens
aattgataacctgtggatttccagcaaactccttagccatgatcttccggtggttgagtttgcctcttatggtgacttaaagaat

SEQ ID NO: 754002 - DNA, 51 bp, Homo sapiens
gacaacacctgcagtgtactggaaaggccatcatgcagaagggggatacaa

SEQ ID NO: 754003 - DNA, 100 bp, Homo sapiens
ttcattagccctactcaaaaatggcggcaacgaaggatctgagtctctccctgcggagacagccctgaagaactcctgtaacgtcaagctggcaatttcc

SEQ ID NO: 754004 - DNA, 75 bp, Homo sapiens
cccagccgcgttctcctccgccgctcctccgggcttgccctggagccctcagtgcgatgtatgatgtatggcttt

SEQ ID NO: 754005 - DNA, 99 bp, Homo sapiens
ccaacggctacgcctgcccagtattctaccaggcctggtgctggcctcctgtgatgggccttcgcactcccagttacaggcccaaaaactgcgactggc

SEQ ID NO: 754006 - DNA, 96 bp, Homo sapiens
cacaggaatatccatgtcggcttgtagagagattgcagtgcaaagttccccatcaagtggacggcccccgaggcagccctgtacgggaggttcaca

SEQ ID NO: 754007 - DNA, 100 bp, Homo sapiens
acagatttcctgcccggggccctcatggacggttggatcagggccgaaggtttgtgaatttcccagaccagccggtggtgtggagagaaatcagcattat

SEQ ID NO: 754008 - DNA, 100 bp, Homo sapiens
gtggctatgaacccagaggtcgtggaggtggccgtggaggcagaggtggcatggggttatcaatactctggctgaccatcatcatcgtgggactgacttt

SEQ ID NO: 754009 - DNA, 74 bp, Homo sapiens
cctcctccacaggggagacagagcccacggccgccaatcccactctcgctcctgctgacagaagaggaagcagc

SEQ ID NO: 754010 - DNA, 75 bp, Homo sapiens
cgcctacttctataaagtcatccagagtacccaagtggccttggaccatctggagtctgtgcctgagaaactgag

SEQ ID NO: 754011 - DNA, 127 bp, Homo sapiens
ctttgagcatacaccgagagagtgaggagccagacgacaagcacacactatggcgctgaaacggattaataaggtcagttgctgataaagaggccattgcaaatttcacaaatcagaagaacatcag

SEQ ID NO: 754012 - DNA, 75 bp, Homo sapiens
gacctcattcagacagaatctattaccttggtcgaatgcaattcccgcctgaaccctataaatacaactttgcta

SEQ ID NO: 754013 - DNA, 100 bp, Homo sapiens
gcaacagacatgtacagataatactggtgattctgatgatagtgcttcaggaattgaagacgtatcggacgatttaagccctgagcctgtgcaattattt

SEQ ID NO: 754014 - DNA, 51 bp, Homo sapiens
gttaaaactgtgaaatactttaaagtgacagaaatgttggtaaatgttctg

SEQ ID NO: 754015 - DNA, 100 bp, Homo sapiens
ggggccgccgccacccgcctcccaccatggctctgaagagaatccacaagagtgaagacatttccacctggacacctgaccatgtgcctgccctgagcag

SEQ ID NO: 754016 - DNA, 90 bp, Homo sapiens
gtggaagcaggactgcgccgcgtcttcctcaaggattttttatcaagcagaaatgcatcgaacaacgagaatcaagatcactgagctaaa

SEQ ID NO: 754017 - DNA, 99 bp, Homo sapiens
ggagattctccggggacccttccgtatctgcctaggcattttgctgtctcctcctaatacgctgcatgaaagcggttacgatgctggcaaagccctgca

SEQ ID NO: 754018 - DNA, 82 bp, Homo sapiens
aaaatgaaagaaaccgctgaggcttatttgggaaagaagaccatgcatggaattttggagagaagcaaattttgcaaagata

SEQ ID NO: 754019 - DNA, 80 bp, Homo sapiens
gagctatagagaaaggagatgaggtcccagccctacctgtcctgatgcctgaccagcaggatgcaagcccaggaggccat

SEQ ID NO: 754020 - DNA, 90 bp, Homo sapiens
caccacgataatgcagttcttattactagccaaaagaatgcaatggtgtaaagattccagttgatgccagtaaacctaatccaaatgatg

SEQ ID NO: 754021 - DNA, 100 bp, Homo sapiens
cagatgctgctgaattctggagaaagttttttggagacaaacaagccaaacggctcctgggacagattgtggaccgctgtcgaaatggacctggctttca

SEQ ID NO: 754022 - DNA, 114 bp, Homo sapiens
tcgtgctgctgggattcgcgctgctgggcacccacggagcctccggggctgtgtactaatggtcacttgatgtgcgctggctgttttatccacctactagcagatgcccggctg

SEQ ID NO: 754023 - DNA, 50 bp, Homo sapiens
gactttacttcagagccccggcttattggaaacctatgagaatatcccag

SEQ ID NO: 754024 - DNA, 50 bp, Homo sapiens
ctgacctgtaaatcatcctttagaattggcagagggggtcgatttgggag

SEQ ID NO: 754025 - DNA, 100 bp, Homo sapiens
caggattagggaaagtcaatggtcaaggtcagcatctcctcgacgatcaagatctatctctcttcgtagatcaagatcagcttcactcagaagatctagg

SEQ ID NO: 754026 - DNA, 73 bp, Homo sapiens
cctcctccactgccactacagggaagtgcatcacatgtcagtgctgacttgctcatcagttttgcacagtggc

SEQ ID NO: 754027 - DNA, 100 bp, Homo sapiens
attttgcaccactggatgttgtttactggtgctatggtctttagaattgggtcactggatttctgaggagccgttcgaactgtctcaccacttccctgca

SEQ ID NO: 754028 - DNA, 83 bp, Homo sapiens
gcgggggagccccgggagccgcacggagccttcacgtaaatgggtccagtcatgcctcccagtaagaagccagaaagctcagg

SEQ ID NO: 754029 - DNA, 75 bp, Homo sapiens
gccgcggggaaggggcccttggctcttcctaaggaatggaagcccagactgcctgggaggcaggagacctcgttt

SEQ ID NO: 754030 - DNA, 74 bp, Homo sapiens
ggcagcagctgctgtggaagggctccttcaagcccagcgagcatggttggatggcaagcatgtggtgtttggca

SEQ ID NO: 754031 - DNA, 100 bp, Homo sapiens
acctaggccgggagagggagaacacagttggagaaaatcggcagctgagacggccttggccgacatgtcatgctgcccaaggacatagccaagctggtcc

SEQ ID NO: 754032 - DNA, 87 bp, Homo sapiens
gaatacggtggttccaagcgcaatgctctactgaaatggtgccagaagaagacacaaggttatgcgctccttcgagaactcatagaa

SEQ ID NO: 754033 - DNA, 51 bp, Homo sapiens
cagcaatggttgtatcaactatgaagaccgagaagatcaatccatcttgtg

SEQ ID NO: 754034 - DNA, 75 bp, Homo sapiens
gcgaaggaaatctggccgccgccgccgcgagcgctcccgtctctcagcaaacctgctgggcgacagcggactcag

SEQ ID NO: 754035 - DNA, 75 bp, Homo sapiens
aagcctgtcattcctgctgctgccctagctggctacacaggatcgaatcatcaatttagttgttggcagcttaac

SEQ ID NO: 754036 - DNA, 100 bp, Homo sapiens
ggcccaaggcgtgaggcgccgcccgggtgtccccgcggcgcaggaggcggtggagcgcagagcgggcgagcgcggattgacttggcctctacttcttgtt

SEQ ID NO: 754037 - DNA, 100 bp, Homo sapiens
gcgatggctacagaaggagggaaaacctctgagccagagaataacaataaaaaacccaaaacctcaggctcccagaaagatgtagcacttaagcctcagg

SEQ ID NO: 754038 - DNA, 101 bp, Homo sapiens
ttggcctgtccctcacatccgatgcaccctttttgtcagattatcaggatgaggggtgataaaagaaaatgtggctgaagttacccgaagttcagcttgca

SEQ ID NO: 754039 - DNA, 88 bp, Homo sapiens
cattccgacgttacaatggtggagttggcaggtgtgcgcagagtgcctggtgaagaatgtgatgggatcactagcatgtctgcggaga

SEQ ID NO: 754040 - DNA, 106 bp, Homo sapiens
caggcgaagctggccgagcaggctgagcgatacgacgtggaatgcagtagccctctgggcctgggatattgtggttgataactgtgccatctgcaggaaccacatt

SEQ ID NO: 754041 - DNA, 90 bp, Homo sapiens
cattcttccatcctcagaacgcagtgaaatcaactgtgcagaccatcactgttggaggagtgagcacatcacagtttaagacaattattc

SEQ ID NO: 754042 - DNA, 85 bp, Homo sapiens
ccgacagcaagctaccaagagcaaaggtcccatgatcattcactgcagaaaacgcccactcctggatcttcacattgaactcaat

SEQ ID NO: 754043 - DNA, 100 bp, Homo sapiens
agcgtggcatctttcccaaagtagccacaaatatcatgagggcgtggctgttccagcatctaacaggaaatgaggcaagttatcctttggaaatgtgctc

SEQ ID NO: 754044 - DNA, 94 bp, Homo sapiens
atctgtcttcggtggactccttcggcagtccacccaccgccgccgcctcccagacccctctgccatgaaccagtccatcccagtggctcccacc

SEQ ID NO: 754045 - DNA, 75 bp, Homo sapiens
cttatggcaaccctaagaacatggcctacacgggtggtccgggactacaatcttcagctgtttttgcaagaaaac

SEQ ID NO: 754046 - DNA, 97 bp, Homo sapiens
cctcagcttttaggaatccctgtcatcgggaccctggaggaggtccacatgccacagaatgggatcaaccaccctggcatcactgccctggcccagg

SEQ ID NO: 754047 - DNA, 89 bp, Homo sapiens
cagaacgtgctgcagcagagcgcggcgcagaaggcccgccatgttcatagaggataaagcagtagacaccctggcttacctcagtgacg

SEQ ID NO: 754048 - DNA, 90 bp, Homo sapiens
gttcctggtgatattgtagaaattgctgatctttcattcgtacgtgcctttgagtttacctatgttaatgtttatggcactcacgttttg

SEQ ID NO: 754049 - DNA, 82 bp, Homo sapiens
cctccccgccccatcggttgttgtctgggcggggcgaacctttcctacacacccatacttctctgcccagcttggagcagga

SEQ ID NO: 754050 - DNA, 100 bp, Homo sapiens
tgaacatgccaggagagcaatgcaaaaggtgattaggaagaagcttgttcgtaaaacgctggacatgatcaagaagattgctgatgataaatacaatgat

SEQ ID NO: 754051 - DNA, 101 bp, Homo sapiens
ccctgccctgggttcgctacatcacccagagtggcgagcatgtcctttgcaacctgatcacacaaatgatgaaaaagaatagaactttctcattcatcttt

SEQ ID NO: 754052 - DNA, 100 bp, Homo sapiens
ttctggggttccctatgcaaatgccaaaggaattggttatccagaaccccacggacatatcgtatgtgtacagtgggtatgccccgctcagtgtgcggct

SEQ ID NO: 754053 - DNA, 100 bp, Homo sapiens
aagaattagtgtctccatcgtcatcagaaactgaaggcaactttgtctatcgcacagagctggactggccattatggaggaggagctgcagcattcccat

SEQ ID NO: 754054 - DNA, 118 bp, Homo sapiens
ttctctgcattttgtccacatgagaggattacctttccaagccaatgcccaagacattataaacgcagttccggcgaggggggagcctcagcaggattgctgtgtgaaaaccgagctg

SEQ ID NO: 754055 - DNA, 88 bp, Homo sapiens
aggaagtaaaatggcggacctggcgaacgaaggtcttgactccactaacggggacttctcatacggctttgaacttggaccttggtgc

SEQ ID NO: 754056 - DNA, 74 bp, Homo sapiens
aaaatgttttgccacgtggatgtgaagatttcctctaaaagagcagcccgacggccatggaggctgaagagacg

SEQ ID NO: 754057 - DNA, 97 bp, Homo sapiens
gcaggcgtacgaggatgtgctggagcggtacaaagatggaggagatgtataagaaagctcatgctgctatacgagagaatccagtctatgaaaagaa

SEQ ID NO: 754058 - DNA, 100 bp, Homo sapiens
cattcaacagcccctactacccaggccactacccacccaacattgactgcacatggaacattgaggacaagctgaacaaccagagctttgggactgacct

SEQ ID NO: 754059 - DNA, 100 bp, Homo sapiens
aaaaacaatagctcaaggaaacctttccaacacagatgtccaagctgccaaaagaaggaggtcttcgaggggagaagaggaaacgagatgctgaagacga

SEQ ID NO: 754060 - DNA, 82 bp, Homo sapiens
gacacgtcgggccagggccggttctgcaccatcttcaggtcctactccaggggcgctcagaagctggcagggcggagatgct

SEQ ID NO: 754061 - DNA, 75 bp, Homo sapiens
gtcatgatcttgctgtaaccttcccaggaccaggagaagatgggctgctgccactgcagagccccgccatggaag

SEQ ID NO: 754062 - DNA, 82 bp, Homo sapiens
cattcctccatgtcctcacggctggatttctctctggaaaggattttcattcatcatgatgtggacgagtgctcactagcag

SEQ ID NO: 754063 - DNA, 74 bp, Homo sapiens
ggggcccaacatggcggagagagaggtggagtccggcccccgaaagaggctggagaatgctggaggagacctta

SEQ ID NO: 754064 - DNA, 51 bp, Homo sapiens
aggaagccgcgggcaaactcagactcgaagcggcctcccagccaacatcca

SEQ ID NO: 754065 - DNA, 51 bp, Homo sapiens
ttgtagaagaggagcatctgctccaggtgtggcagagaagacacagcttct

SEQ ID NO: 754066 - DNA, 51 bp, Homo sapiens
caaaaagtgacgctttacctgcgaccagaggaggagtttggccagctctat

SEQ ID NO: 754067 - DNA, 101 bp, Homo sapiens
accaaggatctggggatcttcgcactatcccaagatcgcccaggaccacaccgcagcgtaactgcaggcctctcagcgaaaaagggggaaagcaaagaccc

SEQ ID NO: 754068 - DNA, 75 bp, Homo sapiens
ctctggatagcaccttatggacaggcgttcccacagctgtgcagaacttagcgccacgcgctgctgttgctgctg

SEQ ID NO: 754069 - DNA, 98 bp, Homo sapiens
taggatcagacgaggccatgctcgtttggcattatctcaaaaccagcagtcttctgggctgctggatcagtgcctggcaccagacacttctggggatg

SEQ ID NO: 754070 - DNA, 90 bp, Homo sapiens
ccagggtcggatcaaagaagggcattaagaagaaatgcactcaccatgagcaccaacttctgcatctgcctgatcatatttaaaggaaca

SEQ ID NO: 754071 - DNA, 74 bp, Homo sapiens
aagacctattttactgataagaaaacacatctttacacactaagtgaccaagaatatggcccaggtgaccaaag

SEQ ID NO: 754072 - DNA, 100 bp, Homo sapiens
tccagggtgtctggtccacgacctatcctaggcgccatgtactatactggcaattgctggagaagattttgcaattgttgcttctgatactcgattgagt

SEQ ID NO: 754073 - DNA, 127 bp, Homo sapiens
ccgcgcgcatctggctgcagctctgcggggcgcaggaggcggtgcacagcgccaagtgaagaaacaactggtgacatcagtgattccatggattttgtactgctcaactttgcagaaatgaacaagc

SEQ ID NO: 754074 - DNA, 83 bp, Homo sapiens
ttgagagtgggaacatgacgcaggtgcaggtgtctcttctcgccctggcggggaaggacacctgctccacttcaccttttgcc

SEQ ID NO: 754075 - DNA, 96 bp, Homo sapiens
acaggccacgtagaacgtgcccttgagactcggcacgagcaggaaccacggatgataccatcggggaccttaagaagctgattgcagcccaaactg

SEQ ID NO: 754076 - DNA, 82 bp, Homo sapiens
tgcaaatgaagagtccagaaaagaagcgaaggaagtcaaatactcaggcctgagacctgggaggaagctggagaaaagatgc

SEQ ID NO: 754077 - DNA, 98 bp, Homo sapiens
tgcggagaaggtggcctcactgctcggcaagaagggggccagtgccaccaaacacgacagtgagggcaagaccgcggacctgatgcccagaaccctgg

SEQ ID NO: 754078 - DNA, 100 bp, Homo sapiens
gcaagaaagatttaacacagactgcttcaagcaccgcaaggaaacactttgtgctactctgtggggctttggaaaagcatgttaaatgtgatattaggga

SEQ ID NO: 754079 - DNA, 75 bp, Homo sapiens
atccagatttcatgtatgaactggtggcctccatgaaccagcgccgtgtggatttctaccttgcctccatcgaag

SEQ ID NO: 754080 - DNA, 75 bp, Homo sapiens
gtcacaaaggaaaacgaggaaagtcccaggatgactactgtgtcaagtgcaatggatgagcttcatagtctggat

SEQ ID NO: 754081 - DNA, 100 bp, Homo sapiens
gatcctcaccgatgtcgggaaggtcactgaacctaattcaaagaagctttttcactatttgacaaagatggtgatggaactataacaacaaaggaattgg

SEQ ID NO: 754082 - DNA, 75 bp, Homo sapiens
cccccgggagcgggcgcccagaggcctcgccgacccagcccctaatgttcctcccaaagagtcagctgggaacag

SEQ ID NO: 754083 - DNA, 100 bp, Homo sapiens
gttattactgtcccgtttgattttggagaaaagcaaaaaaatgctcttggcaaagccttctagacaagctcagtggaatctgaagggcccaccccatgga

SEQ ID NO: 754084 - DNA, 139 bp, Homo sapiens
cctgaagattttgtggtttatacttacaacaaggaagggactttaatcactgaccatcccaatatacaggtgaccaagaatatggcccaggtgaccaaagccctggacaaggccctgagcaccatggacctgcagaagg

SEQ ID NO: 754085 - DNA, 74 bp, Homo sapiens
gaggagctgctggcaccgcctgctccaggcttcttggacacttaatgattgttggcaagaaatgtgctgctgat

SEQ ID NO: 754086 - DNA, 100 bp, Homo sapiens
gccgcgtcctcagctggtcctagacatgcgtggcgtcggggctgtggcacggtcgggtccgggagattgctttgcataaatccacccctgtttgaaatct

SEQ ID NO: 754087 - DNA, 101 bp, Homo sapiens
ccgctgtctccagtgccgcagcagcaggctactgcagcactggggtgtcagttgttggtccgacccagaacgcttcagttctgctctgcaaggatatataa

SEQ ID NO: 754088 - DNA, 83 bp, Homo sapiens
gcttcataccagctgaagagcgacaagccgctggcagccgcggatctcaccgccgctcaggcgggaatgcatatcagtccacg

SEQ ID NO: 754089 - DNA, 50 bp, Homo sapiens
gttgatatactttttggaaatgagacatgtacaagtccccagagtatgag

SEQ ID NO: 754090 - DNA, 80 bp, Homo sapiens
gcgcctggcgtcaccgaccggtgcggacaggaagaggctctgggctggcacatgtgttttttattggcacctcagtctca

SEQ ID NO: 754091 - DNA, 97 bp, Homo sapiens
atctggagaagtctgatcttgtgcagataatgtagttggaaaaaggaggagtattctgatcttttcagttagggcctagtcaaaattttgaagctga

SEQ ID NO: 754092 - DNA, 90 bp, Homo sapiens
gggaattatgctgtctctgacatcaagaagtcgccggtggaggagaaccgccagtaccgcatgcacagcctgcagcacaaggccgccagc

SEQ ID NO: 754093 - DNA, 82 bp, Homo sapiens
cgcgggaagacgcggcggcggcggcggaggatgagcctgcagagcgcgcagtacctccgcaaaccaagatggagtatgagtg

SEQ ID NO: 754094 - DNA, 75 bp, Homo sapiens
cgtctcttacgtctgcggaagtgcagctgcctcagttcttagcgcaggtggtcttcaagctgacagagaagctga

SEQ ID NO: 754095 - DNA, 75 bp, Homo sapiens
tggatatcatcgaccctcgcacactctttgtcactgagtttgtgaagtgtggatatgcaggctctaactttccag

SEQ ID NO: 754096 - DNA, 100 bp, Homo sapiens
aggaaagattccgaacaatcacgacagcgtactacagaggagccatgtttgttttgacaccgattgaagttgccattgaagacatgaagaagaagaccct

SEQ ID NO: 754097 - DNA, 100 bp, Homo sapiens
gttcagcgtagagtcgctggagcgggcggagctgtgcgagagcctcctcacttggaacaccttccaccatgaccacctcagcaagttcccacttaaataa

SEQ ID NO: 754098 - DNA, 100 bp, Homo sapiens
caggagagatagaggcagcagaagccagggcagctgaaagacagagaccttcagactgagaactatgagcagagaatacgtgaacaacaggaacagctgt

SEQ ID NO: 754099 - DNA, 82 bp, Homo sapiens
gcgtgtgttttggggttgccatcggcccgtagtatgtgaaaaatgccttatctctggatagttttacagcagttccaaccct

SEQ ID NO: 754100 - DNA, 100 bp, Homo sapiens
ataactcggtgtcaaagccaagacataaactcaaccccttctcttccaaaagggttctcatgtatcagccatcttctgtaagggtgcccagtgtgacttc

SEQ ID NO: 754101 - DNA, 98 bp, Homo sapiens
gccatgcagaactgcacactcagtccctctgtgctccaggactccctcaataatagacgagttgtactgctgtcacaggaaatggacgctggattaca

SEQ ID NO: 754102 - DNA, 100 bp, Homo sapiens
gcatctttgtctagccccagtgcaggaaccttagtcatttctgctttatattttgagctatcagcatttgggaccaattcaggttacattttcctttttc

SEQ ID NO: 754103 - DNA, 101 bp, Homo sapiens
tgctggccaagaagatcatcattaaggacggaggcacggctgtattcatcaccaaagaaaaaacttacaccaatgcagaaatcggttagtccattagtttg

SEQ ID NO: 754104 - DNA, 100 bp, Homo sapiens
cgcagcccacgctcatgatcgacttcctcacccgcgcctgcgacctcgctacgagttccagggagctctgtcctggtgaccgtgcccgggttatgacgac

SEQ ID NO: 754105 - DNA, 75 bp, Homo sapiens
ggccggcccgcctccctggccggggcgcagttcggaggttcagagagtcacaccccaaagcctctttattctttt

SEQ ID NO: 754106 - DNA, 98 bp, Homo sapiens
aagaagtggctgtagggagcatagctgctacactgaagatgaagcaaggcccaatgacccaggcggatgcattcagtctactagcatattcagatccc

SEQ ID NO: 754107 - DNA, 90 bp, Homo sapiens
gggagagaacacgtggagttctttgcccttttgagaggagtcccagagaaagaagttggcaaggtggccgaggggcaggaattgaaggac

SEQ ID NO: 754108 - DNA, 74 bp, Homo sapiens
aacgtggacagcctcatcacccggctgctggaggaaaaatggctacaaacttcctagcacatgagaagatctgg

SEQ ID NO: 754109 - DNA, 100 bp, Homo sapiens
gtacgggaagaacttcttcagaattagaaaggagctgcttcccaataaggaaacagtgaaaggtgtagcagtcactcggcctacacccacagcatcgacc

SEQ ID NO: 754110 - DNA, 75 bp, Homo sapiens
accctagcatcatggagcccacagcatcctcaggtgacttcatggtcatgacgattttcttcaatgtgagcaggc

SEQ ID NO: 754111 - DNA, 75 bp, Homo sapiens
gagcgcgaatatcgtcatcgttagaagctatggaagagagagcaattcaacgagctgaatgtaggcggatcttgg

SEQ ID NO: 754112 - DNA, 100 bp, Homo sapiens
ttttcagaggggaatgctaagagatgatgattattctccaccgtctaagagaccaaaggccaatgagctaccgcagccaccagtcccggaacccgccaat

SEQ ID NO: 754113 - DNA, 90 bp, Homo sapiens
taagtgtaaggatcttcatgatgaaatttctgtaaatgtatacctgaggtgcaccggaggtgaagtcggtgccacttctgccctggcccc

SEQ ID NO: 754114 - DNA, 87 bp, Homo sapiens
ggactagagagccagcaatgcctccatgaacaatctcacccaattactctgctcaggtcatttcttcagatagctccccagctgtgg

SEQ ID NO: 754115 - DNA, 90 bp, Homo sapiens
catctattgtgaaaaacctaaaggataccttagatcattatgtagaagttctggaatgcaaaatacagtgtgaagagaacctcaccccag

SEQ ID NO: 754116 - DNA, 83 bp, Homo sapiens
cgccgccctgcgccgcgcgccgcagctgctgctgctgctgctggccgcggagtgcgcgcttgagatcctgaaggagctagacg

SEQ ID NO: 754117 - DNA, 100 bp, Homo sapiens
aagagcaaacagattcagtggcctgcattgtacaaaactttttaccaacaaaaaaaagcaagtagttatactcaggaagaacttcaagacacttacgggt

SEQ ID NO: 754118 - DNA, 100 bp, Homo sapiens
caggaaggcaagaagcagtataagatgatctgccatgtgttcgagtcggaggattcccgcagcgtggacaagcagcatgccgtcatcaactacgaccagg

SEQ ID NO: 754119 - DNA, 51 bp, Homo sapiens
gccctcagctccgagtccagggcgagatcctgcccggcctgtacatcggca

SEQ ID NO: 754120 - DNA, 100 bp, Homo sapiens
tgttcacacagtgagatgcattctgaattaaatgtgagggagtctgacgtaagagtttgtgatgagtcatcatgtaaatatggaggagtctgtaaagaag

SEQ ID NO: 754121 - DNA, 74 bp, Homo sapiens
tggccctgagtctttgggggcagcctgcagaggctgcggtggaagatggatgcctgaagtgtagactgctgcta

SEQ ID NO: 754122 - DNA, 83 bp, Homo sapiens
gggcttacgcagaaggacctggccacggtctgtgcagacttttgcagacaaatcaaaacaagaagctctgaagaatgacctgg

SEQ ID NO: 754123 - DNA, 75 bp, Homo sapiens
cgggagtgatcacctaccctacagggctacaccaagtccattgatatttggtctgtaggctgcattctggcagaa

SEQ ID NO: 754124 - DNA, 82 bp, Homo sapiens
agagcagggtttggagactcaggtgtatgcaacagcgttattgcaacaggctaacgaaaacagacaaaattcaactggaaaa

SEQ ID NO: 754125 - DNA, 100 bp, Homo sapiens
tgcatgtaccggctccccaacgtgcacggcaggagctacggcccagcgccgggcgctggccacgtgcagtatgttcatgcggatgctcctaccaataaaa

SEQ ID NO: 754126 - DNA, 100 bp, Homo sapiens
gctgctggattgaactcagagaagccggggccccttcccagctgcctgcctgccctagccagctcccaggtgaagagactctcggcttccaggcggaaac

SEQ ID NO: 754127 - DNA, 98 bp, Homo sapiens
atcaaagaactggatctttatctggcttactttgtccacactccgggtgctggagaatctggtaaaagcaccattgtgaagcagatgaggatcctgca

SEQ ID NO: 754128 - DNA, 155 bp, Homo sapiens
gagagaggcaccgggatcgtgaccgagaccgtgaccgagagcgtgaccgagagcgcgaatatcgtcatcgttagaagggaggtggggaagacagggctccagctaccacaggacgggctctgggtatagccgttccagtcagggacagccgtgga

SEQ ID NO: 754129 - DNA, 83 bp, Homo sapiens
cctgatcatttgcatttcgttagctttctggattatatcaatgactgcaagcacctattatgatggcgtcccatgtagagtgc

SEQ ID NO: 754130 - DNA, 75 bp, Homo sapiens
ggagggaaggggaagcggcggacagatgtgctggtgctgagctgtgatctgataacagacgttgccttacatgag

SEQ ID NO: 754131 - DNA, 98 bp, Homo sapiens
ctccgggtgtttccacgaggcaggcatggaatcttccctggacaagcgacataccgtggagagacagacttggtcaggtactttcagggcctgggccc

SEQ ID NO: 754132 - DNA, 50 bp, Homo sapiens
tttggcctaccctccaaagaaaagtttttcccaaatggatatgccttcgc

SEQ ID NO: 754133 - DNA, 50 bp, Homo sapiens
ggaaactgtacattgaagcagaggcagagcttggacgtgagatccacgcc

SEQ ID NO: 754134 - DNA, 75 bp, Homo sapiens
ctaagtgatgatggccgctttgaggtgtggaatgcgatgactcggttgcccccaagtttcctggcagtgtgtgat

SEQ ID NO: 754135 - DNA, 101 bp, Homo sapiens
agctgcccggagttccgctcctgcgggcttagcaggaaagggtgcctaagacatcccagttaccagtgtccttgaattgatagtggcttctgtttgtcagt

SEQ ID NO: 754136 - DNA, 100 bp, Homo sapiens
gcatctgccaacaagactggaagcaggcacctgaatggacagaagaggacctcagccaactgacaagaagtatggttaagttcccaggagggactccagg

SEQ ID NO: 754137 - DNA, 83 bp, Homo sapiens
ccaagggttgtatcgaggctataaaagcacagttttaagagagaccagcatctcagacatgtcgaaaaagatgttttgatccc

SEQ ID NO: 754138 - DNA, 75 bp, Homo sapiens
gccaacagtgttaagtataatgagctaaagttgcagacaagatccagctcatcaataatatgctggacaaagtca

SEQ ID NO: 754139 - DNA, 83 bp, Homo sapiens
ggccgccctgttccccgcgctgcggcctggcggcttccaggcgcactaccgcgatgctgtgtgctgtggacccacctggggtt

SEQ ID NO: 754140 - DNA, 90 bp, Homo sapiens
cagaattcctggtgtttcatcatatatacgactaagatatcagtccactcatgcctgctgagcgtgcgggccggcaaagatggctggttc

SEQ ID NO: 754141 - DNA, 75 bp, Homo sapiens
aatgcctgaaccaactgttttgaggtcgaggtcaaggagacattctcatagacgttacactcgatccagatccca

SEQ ID NO: 754142 - DNA, 100 bp, Homo sapiens
cggacggtcgcgcggcggcaggcacagccagagactgctgctactttgaaacgtacgatagaggccctgatggacagaggagcaatagtgagggacttgg

SEQ ID NO: 754143 - DNA, 82 bp, Homo sapiens
caggactgcctgagacaagccacaagctgagctcaggccccggggcctccagcggcaccagcggagaccacggtgagctcgt

SEQ ID NO: 754144 - DNA, 74 bp, Homo sapiens
agaggacgagggggccaaggcttcctccgggacaatgcagatcttcgtgaagactctgactggtaagaccatca

SEQ ID NO: 754145 - DNA, 100 bp, Homo sapiens
gagaataagatggtttttcgaagatgtagtgtggcaggatttgattactgccatgaagaaaatggtaacttgaaaagctcagacagaaatcctccactca

SEQ ID NO: 754146 - DNA, 76 bp, Homo sapiens
tgcctgacccaggcctgctcggccctcacagggtactccaaagattcaggtttactcacgtcatccagcagagaat

SEQ ID NO: 754147 - DNA, 76 bp, Homo sapiens
ggcgcctctactacaaactgggccggaagctctgccggagagactatctcaggggataaaaacattcagatggcag

SEQ ID NO: 754148 - DNA, 49 bp, Homo sapiens
cgccgccatgacagcgagcgaggcggagtgaatatcacctctgccaggc

SEQ ID NO: 754149 - DNA, 101 bp, Homo sapiens
tctggactgagaaaggggcatgaaaatgaagagtccgcatactactcagacttgtttgcaatgattggtggcttcttctcaacctgtatcttctgagatgt

SEQ ID NO: 754150 - DNA, 98 bp, Homo sapiens
cgacactgttcctgctgagtctgctcttcctggtccaagcttactaccagcccagtctgactgcggagtatgatgaagacagcccaggaggggacttt

SEQ ID NO: 754151 - DNA, 90 bp, Homo sapiens
gggaggctttcagccggagaagcgagtttcagctgtgggaggcgaaagtgcaacaaggggaaagagattttgaacagatatctaaaacga

SEQ ID NO: 754152 - DNA, 75 bp, Homo sapiens
ctgggatctttcagtagaactgcaaacaaggtctcgctgtgttgcccaggctgatcttgaactcctggcctcagg

SEQ ID NO: 754153 - DNA, 50 bp, Homo sapiens
ctggacaggacggagcgcaggcagattggctctaccagtgcacctggaca

SEQ ID NO: 754154 - DNA, 75 bp, Homo sapiens
caaagatttcgcaggtggtgagtctcaaaggcgaagctgaatgaattatatccagatcgagagacagaagattct

SEQ ID NO: 754155 - DNA, 90 bp, Homo sapiens
atccacaccttcccctgcctcaaggagctgtgcaccagcccccgtggtcgtaacccacaaaatccttcggaaggccagaggaaacctgga

SEQ ID NO: 754156 - DNA, 100 bp, Homo sapiens
tgaccgagaccgtgaccgagagcgtgaccgagagcgcgaatatcgtcatcgttagaagaggcggggtttcaccatgttgcccagactggtcttgaactcc

SEQ ID NO: 754157 - DNA, 100 bp, Homo sapiens
gtcccggccttcatcgacatcagtgaagaagatcagcaccctggaggagaagaggttctgctggaacaagctggtgtagatgcaagtgaaagctttgaag

SEQ ID NO: 754158 - DNA, 97 bp, Homo sapiens
cacaaatggctgccaaactggaacgtttgcgagagaaggtggacgccctgcttcatctggcccgccagaatcgggctgtggcccgcacagcccagaa

SEQ ID NO: 754159 - DNA, 75 bp, Homo sapiens
agacattacttcaggacaacctcttgggcaggttttttgaagggaaggagctaagattgaagcaggaatactttg

SEQ ID NO: 754160 - DNA, 100 bp, Homo sapiens
ctgcctggcatctctctctcccgtgttgacctaaccaatgaagaaacaactgattccaccacttctaaaatcagcccatctgaagatactcagcaagaaa

SEQ ID NO: 754161 - DNA, 90 bp, Homo sapiens
cagattcgcagtggtcgcttcttctccttgggacgtccagatcggtgacatcgtcacagtgggcgagtgccggcctctgagcaagacagt

SEQ ID NO: 754162 - DNA, 83 bp, Homo sapiens
gggaaaggctagaaatggcagagaattacttccagctctcagtagactggccagaaagaaagacgagaatccaggacttgaat

SEQ ID NO: 754163 - DNA, 82 bp, Homo sapiens
tgccagaggttccctccgagccccttcctgagaagatcccagccctgggcgctgcctatggcacagccaagagcggtaccgg

SEQ ID NO: 754164 - DNA, 98 bp, Homo sapiens
gagctcgcgctcttcctgacccccgagcctggggccgagtgtgcaccggcacagacatgaagctgcggctccctgccagtcccgagacccacctggac

SEQ ID NO: 754165 - DNA, 98 bp, Homo sapiens
aaagatttactttcccatccgtgactcctggaatgcagctgtcctgcagggtgagtacctggggcaaaaggtggccgtgaagaatatcaagtgtgatg

SEQ ID NO: 754166 - DNA, 102 bp, Homo sapiens
caaaaactatattaaaaggaactggagaattgctgaccccgcactacatctacccaccagccatcgtgcagcccagcgtggtgatcccagccgcccctgtcc

SEQ ID NO: 754167 - DNA, 100 bp, Homo sapiens
tggatctttacctttccccagtggcccagagccaggagttctctggccgctctctggacagacagagatttgggattagaatctaccttaatatcgtcaa

SEQ ID NO: 754168 - DNA, 87 bp, Homo sapiens
ttgaaaaagctgccctgagacggtgtcccgccgaaaggtttggtgcacctcgatttggaggaagtagggcagggcccttatctggaa

SEQ ID NO: 754169 - DNA, 102 bp, Homo sapiens
ccgctgtggtacttctcgcagtccccgcgcgtggtcatccagcccgtggaccgggagcccgtggaccgggagccggtggtgtgccaccccgacctggaggag

SEQ ID NO: 754170 - DNA, 89 bp, Homo sapiens
gatggtcttccgtaacctgcgggagaggtttggaattgatgatcaagatttccagcttggtgtaaaaattgccaaagcagttgcctgcc

SEQ ID NO: 754171 - DNA, 75 bp, Homo sapiens
tcacagaggcagaccctgcagccagggttgtgtccactgtggtccccgactctgcccacaagctgttcatcgggg

SEQ ID NO: 754172 - DNA, 100 bp, Homo sapiens
gaagaaggcggtggtggcgggtggaggttcgagcgctgttctcgctccggagccgctgcacatttcggagaagccccgatatccaagcaaaagaagagtt

SEQ ID NO: 754173 - DNA, 100 bp, Homo sapiens
cgggcggcgcgggcgcgggcgctgcggcgggacagctcgacgcgcagggtaacaagatgctcaactatagtgctcccagtgcagggggttgcctgctgga

SEQ ID NO: 754174 - DNA, 100 bp, Homo sapiens
ggcgtggatgtctgcttttttggaatgcacgtccaagaatacggctctgattgcccccctccaaacacgaggtattttgattccgttcaagctaaagaac

SEQ ID NO: 754175 - DNA, 96 bp, Homo sapiens
gctgctactactaccactttgggctgatggcaactgatatggctcgtggacagcagaaaattcagtctcagcagaaaaatgccaaaaagcaagctg

SEQ ID NO: 754176 - DNA, 83 bp, Homo sapiens
gtttaagccagcaatgccaagatctgttgtggatttttagactctgaggagcagttggagctaatccacattatggaaatgga

SEQ ID NO: 754177 - DNA, 97 bp, Homo sapiens
aacattaaagcagctaccaatcatgtgactccagaagagaaagagcagctccgggccaacgtgaacgctcgcacctttgcgggaaacacacccctgc

SEQ ID NO: 754178 - DNA, 117 bp, Homo sapiens
tcaatatggccattcctggaggccccaaatttgaacctcttgttcgagacatcaacctacaagggaacaccctgaagaacatagagaaggagtgcaatgccaagattatgatccggg

SEQ ID NO: 754179 - DNA, 51 bp, Homo sapiens
catggattcccagcgcgggacagccagtacaaagtggttgtccccaaaatt

SEQ ID NO: 754180 - DNA, 75 bp, Homo sapiens
aacccgttccagttcgagatcaccttcgagtgcatcgaggacctgtctgaaggagacccggtgagcctccattga

SEQ ID NO: 754181 - DNA, 75 bp, Homo sapiens
ggcggggccacgctgcgggcccgggccatggccgccgccgatgccgagtattaagggacatcagcgagagaggca

SEQ ID NO: 754182 - DNA, 100 bp, Homo sapiens
cctgccccgccgaggcttgacccgacagagcgggatgccaccagcttgtccaaagggaagttccaggagctcctggtgggcatcgttgtggagaatgacg

SEQ ID NO: 754183 - DNA, 90 bp, Homo sapiens
caggtattgggagatgcacagctaagatgccaggaccacctggaagcctagaaatgttggtcgcattatgtttcagctcttctcagacat

SEQ ID NO: 754184 - DNA, 108 bp, Homo sapiens
cgcgtccgccgattcctcctccttggtcgccgcgtccttggctggcgtggccgagaactactggtggcgtggccagaacacacggacgctgtgtgtggggcccttccc

SEQ ID NO: 754185 - DNA, 102 bp, Homo sapiens
acagaatggacaagcttaataaaataaccgtccccgccagtcagaagttgagatgatgtgatgccagccacttactgtgaaattgatttagataaagaaaag

SEQ ID NO: 754186 - DNA, 90 bp, Homo sapiens
cacattccagtggggccatgccaggcagctctcttgggagtcctcctaccatccccggagtggagtcaacatatcaatggagcaagtcac

SEQ ID NO: 754187 - DNA, 90 bp, Homo sapiens
gtcggtgaccgcgcgactcggcgcccgcccgcggtgattttacaacgagatgctgctctccatagggatgctcatgctgtcagccacaca

SEQ ID NO: 754188 - DNA, 51 bp, Homo sapiens
ccgccggcgaaggaggaggcgttgccggcaattctgtggtgttcttggtca

SEQ ID NO: 754189 - DNA, 82 bp, Homo sapiens
tcaaaaggcaaattgcaaaccataaggatgtttcgttccctgttttctggatatgccgcagaaggatccgtgccagaagcaa

SEQ ID NO: 754190 - DNA, 96 bp, Homo sapiens
ttgaccagaagttctcaaaggtgcctaccaaggtcaaaggctatgacaacctctttgctatggaagccaaattggcagagaatgcttgtaccctgg

SEQ ID NO: 754191 - DNA, 100 bp, Homo sapiens
agacaggaggcagtagccaaacacccaggtgagaattatgaagatgatgacctagtaaattctgatgaggttatgaagaaaccatgtccagtacagattg

SEQ ID NO: 754192 - DNA, 71 bp, Homo sapiens
gttccgcatggagaagttgaaccagctgtgggagaaggcccagcgacctgattacatcaaccccagagccg

SEQ ID NO: 754193 - DNA, 100 bp, Homo sapiens
aggaagaggaagaagaggaagaggacgagccttcaggagccaccacaagatccaccaccagatcagaggctcagaggtcccgcagcccccggaagccaat

SEQ ID NO: 754194 - DNA, 100 bp, Homo sapiens
gagggaggcgggcagcgtgactgccctggtgcagtgtgtcctgcgggccaccaaggtgaaaggtgtagcagtcactcggcctacacccacagcatcgacc

SEQ ID NO: 754195 - DNA, 90 bp, Homo sapiens
ggaatgtacacgataattaaagagtaaagttgtgctcaacggaaacctcgacctgtctcccagttggttgcacagcaggttactcagcag

SEQ ID NO: 754196 - DNA, 83 bp, Homo sapiens
gtcctggacccagctgagcgggcggtcattcgcatcgcaggtatcgagaaccttccctgcgaacttcagaggaacttccagct

SEQ ID NO: 754197 - DNA, 98 bp, Homo sapiens
cctggcactgagcggccgcggccatggcgtacgcctatctcttcaagtacatcataatcggcgacacaggtgatggcaagatcctgtacagccagtgt

SEQ ID NO: 754198 - DNA, 73 bp, Homo sapiens
cctatcatcgtctcctgtggctgggacaagctggtcaaggttggcaaaagcagcttttgatgatgcaattgca

SEQ ID NO: 754199 - DNA, 74 bp, Homo sapiens
aaaccagaaactttaaatcttgagaaaagaagattgtctatcatgaaggaggatgatgatgctgaagctatcct

SEQ ID NO: 754200 - DNA, 83 bp, Homo sapiens
gacaaagcggctctccagcaagaaggtggcaaggagcgagcccagggcgtggtgctgaaagtgctcacaaacttcaagagcag

SEQ ID NO: 754201 - DNA, 82 bp, Homo sapiens
aagcagcgtgcgttcagccctgggacctcgaagtagggggaaaactgcagtggaagatgaggacagcatggatgggctggag

SEQ ID NO: 754202 - DNA, 98 bp, Homo sapiens
cggcgcagccagagccaccagcgcagcgctgccatggagcccagcagcaaggctgtgggtgagcgtggaggatgctcagatgcacaccgtcaccatct

SEQ ID NO: 754203 - DNA, 83 bp, Homo sapiens
gccacagcggcagctccagcccggcccggcagcgacatggaagagggaggaatcagcagcttggaaattcaagcacgtgatct

SEQ ID NO: 754204 - DNA, 90 bp, Homo sapiens
gctgctcaaagctgctgccgccccttgggctaaaaggactaccgaccagactcccggaaatcatgttggtaggatcccagtctttttcgc

SEQ ID NO: 754205 - DNA, 80 bp, Homo sapiens
agacaaaagaaacgggccccgactggaagaggatcacctagcccgggtagaagaggcaatcacccgtatgcttgtgtgtg

SEQ ID NO: 754206 - DNA, 83 bp, Homo sapiens
ctggaaattgcgctggaccgtcgccttgctcctcgccgcggcggggactgcagcttccccgggcgctgcctggacaggcctgc

SEQ ID NO: 754207 - DNA, 50 bp, Homo sapiens
ccaagacctcatcaacaattaaggttgatggacggatggctacatggatg

SEQ ID NO: 754208 - DNA, 75 bp, Homo sapiens
cagcaagagcatttcgtgggaatcctgctgctgtttgcctcctagaaaatgttatggaattccactgaaagacgg

SEQ ID NO: 754209 - DNA, 87 bp, Homo sapiens
ttcttatccgagagagtgagagcgctcctggggacttctccctctctgtcaacttcagcatgagcgcctgtctcgcagtgaccccag

SEQ ID NO: 754210 - DNA, 80 bp, Homo sapiens
agccatttcctgacttctgctgcatgtgcctggggacttgccggagcagccttacttgcagcctccactcagcatcttgg

SEQ ID NO: 754211 - DNA, 82 bp, Homo sapiens
caaacaacttggaaatcgatcacaaccaggcattaagttcacacaattctgtggtgttcttggtcacacatttatggagttt

SEQ ID NO: 754212 - DNA, 98 bp, Homo sapiens
atgaccaccatggcagatggcaacagaggatgtcaacaattttttggaggtcagaatgaaggaacgatttccgtagttgaaggagaaacattgtatgt

SEQ ID NO: 754213 - DNA, 75 bp, Homo sapiens
atttctgcttcctgcttccacttccgtgaccgttagggacaagacaggtcacagtgctgtcgatatcaccaaggt

SEQ ID NO: 754214 - DNA, 100 bp, Homo sapiens
cttgacccaatctgtgctactggggaacaccacctccccacccctcaaccagtctcaggcccagatgtatctacggctgtcggaaaaggtaacagaagat

SEQ ID NO: 754215 - DNA, 100 bp, Homo sapiens
gacatgaacgcttgggtcagggccatgaaccaggctgcacaggtgctgtctcgatcgtcactgaagaggtgaatctggattgggaaagtcgacattaatc

SEQ ID NO: 754216 - DNA, 76 bp, Homo sapiens
ggcagatcctgccccgtggccgcggccgtctcgtaggtgagccaccagctgggcagcatcatggacctcttcacca

SEQ ID NO: 754217 - DNA, 99 bp, Homo sapiens
ctcaagtaaaggaagcacgaagaagagggatgtcgttgaaacccaaggtcgacaaagatgctgaattagtggcccaatggaactattgtactctaagtc

SEQ ID NO: 754218 - DNA, 88 bp, Homo sapiens
ctgaagaaagtccacgagaccgtggagcgtggtgggaaggtgggtccgatggctcccggctctatgactgcgtgtggaggtacaactc

SEQ ID NO: 754219 - DNA, 102 bp, Homo sapiens
ggacgaagagcgggacccgagccctgaaactcccatcaagactgaagcagacgttttggcagaaaaccaggttcttgatagcagtgctcctaagagtccaag

SEQ ID NO: 754220 - DNA, 90 bp, Homo sapiens
tccccagcggctgggagagacgctgaatgaagaagagggaaggacggttagtcaggcataagatgcacatttttctgctctggagccggg

SEQ ID NO: 754221 - DNA, 75 bp, Homo sapiens
tgccttcagaaggacagccggccttggtggaggtccacagcatggaggttgacatcatggacatatgtgagtcca

SEQ ID NO: 754222 - DNA, 100 bp, Homo sapiens
gttataagaaaggtgcagaagtcattttaaactatggacgactccgaggaacattgagcccatgactgaagagttgctgaaacaacaaaagctgaattca

SEQ ID NO: 754223 - DNA, 83 bp, Homo sapiens
gcatgcggtcccagtggccctcggcgcggcagcgctccagctcgctctccaccttcaggaaatctggcattttttaaagtttg

SEQ ID NO: 754224 - DNA, 100 bp, Homo sapiens
catgcctttattttcttttttggatcctatttactaatagggaaagatacatctctgcttggaaatggccagatcactctccgggcgcattgttggaggg

SEQ ID NO: 754225 - DNA, 78 bp, Homo sapiens
ggactcctcaagaagcgcctcctgcccgcagagcactgtatcacgaaaagtcagagtggtgctgggaacaactgggcc

SEQ ID NO: 754226 - DNA, 96 bp, Homo sapiens
ggctgtggctgcgccgccggccatcgactttcccgccgagggcccggaccccgaatatgacggtggtcctggctctgccatatgacacccccgtgc

SEQ ID NO: 754227 - DNA, 74 bp, Homo sapiens
agattattgaagtagatcctgacactaaggaaatgctgaagcttttggagcgagaacccgagcagcgccatgag

SEQ ID NO: 754228 - DNA, 75 bp, Homo sapiens
ccgccatctggcatcaccagccaagcagttacagatcccacagcagcatacctccagataatctctctattcaag

SEQ ID NO: 754229 - DNA, 90 bp, Homo sapiens
agagccacggcagcaggaacgggcactgctgccaccgggccgacgggtggatggaagcatgcctaggggaagatctgcctcccaccacag

SEQ ID NO: 754230 - DNA, 75 bp, Homo sapiens
cgctgtgccgagtgccgggcgcccatctctctgctgcttccaggggatccacgttcagaagctgactctgcaggc

SEQ ID NO: 754231 - DNA, 98 bp, Homo sapiens
ttcagtggaaccatcacacaaaagcacacaaagacctcctcctccacaggggagacagagggtatatttcagaaatcgctgggtaaagactgtccacc

SEQ ID NO: 754232 - DNA, 83 bp, Homo sapiens
cagcagtggagttcagcccactactctgaaccagcaattctgtggtgttcttggtcacacatttatggagtttctgaagggca

SEQ ID NO: 754233 - DNA, 98 bp, Homo sapiens
gaactttgttcacaccaacttgcgcaaaaacaacagacagccctatgctgtcagtgaattagcaggcatatcatggagcatctagaaggtgtcatcaa

SEQ ID NO: 754234 - DNA, 75 bp, Homo sapiens
agctccactgccgtcaactcctgttctcctcagagcctggagccagcaccgctctttgaccttgccatgcttgcc

SEQ ID NO: 754235 - DNA, 100 bp, Homo sapiens
aatttgccagctgggactaccatccttcaaatagaggtggcaaatcttgcttgttccatgtcaacaaatgaagatggaattaaaattgtcaaaattgcag

SEQ ID NO: 754236 - DNA, 120 bp, Homo sapiens
ggagcttatactcctcccagtgacgggtctggagtgcgtgggggaccggctgttggcggaacatccagtcatggataaaaatgagctggttcagaaggccaaactggccgagcaggctga

SEQ ID NO: 754237 - DNA, 95 bp, Homo sapiens
gacctttaggtgcttttatattcatctcaaaaacaaaattctgaactcaggacttggcaagataacaaagccattgacctttgccgattgtgttg

SEQ ID NO: 754238 - DNA, 74 bp, Homo sapiens
ttccgacaagtactggagaactttaaactaaaggggacgacttagcttctgtattattgttgcttcctcagggg

SEQ ID NO: 754239 - DNA, 75 bp, Homo sapiens
tgagtacttccatttagatatgatgaaacttcgtagatttttaggatgtacagttacccagcacgtgtacctcct

SEQ ID NO: 754240 - DNA, 75 bp, Homo sapiens
gggtgctgagtgatgccaggaccatcctggaagagaacatccaggaccaaggaatactcccccagttgcaagagg

SEQ ID NO: 754241 - DNA, 90 bp, Homo sapiens
tggactctcagaataaaggaaagacctcagagtgttctcagtcagtaacagatccaagagatggaaagagagtagcgctcaaaaagatgc

SEQ ID NO: 754242 - DNA, 75 bp, Homo sapiens
gtggacagatctgagagatactgagggaacgtgatgttctcttcccggggtacacccatttgcagagggcccagc

SEQ ID NO: 754243 - DNA, 133 bp, Homo sapiens
tgcaaaggttttttcgggcctgactgcacgcagtgtcctgggggcttctccaacccctgctatggcaaaggcaatatacagcatcatgcaggcctgctgggccttggagcccacccacagacccaccttccag

SEQ ID NO: 754244 - DNA, 107 bp, Homo sapiens
ggggattctcgacctgctaacagaactggaccttttcggaaccctaaggactctgcaatatgaataattccctagagaacaccatctcctttgaagagtacatccga

SEQ ID NO: 754245 - DNA, 101 bp, Homo sapiens
ctcttgcttttcctcgctggggtgtacgtcgcagatatggccagtacactatgaaccaggaaagcaccaccatcaaagttatggagaagcctccatttgat

SEQ ID NO: 754246 - DNA, 98 bp, Homo sapiens
ggatacaaccaaatgatggaatgcctaccgggttataagcgggttaacaacaccttttgccaagcggtcttgcgagtggctggttccctgcagaagag

SEQ ID NO: 754247 - DNA, 100 bp, Homo sapiens
gatgctgatagtctccagcgggcctggactgtgggctggtgtgtggaactgggtaaaggagctggaagtgcgaaaattgatgcatgtgagaggagatgga

SEQ ID NO: 754248 - DNA, 76 bp, Homo sapiens
tggctgataaaattgccctgaaactggttggtgaagaaggatttgtagctcgccatggccaaacagctgcaggccc

SEQ ID NO: 754249 - DNA, 100 bp, Homo sapiens
gcctgaatgttggtgtggaccctcccgatgtggtgaagaccacgccctgtgcacgcttggaatgctggatcgacgaacaggaggcattgaactcaatcat

SEQ ID NO: 754250 - DNA, 96 bp, Homo sapiens
caatgggagaaaacacgatgaaaacagaaccgacttctccccttgtggaattacaagagatttcgactgtggaagcggccctccaggcactgaagc

SEQ ID NO: 754251 - DNA, 90 bp, Homo sapiens
ttaaggattccaagtaactcttatttggacaatcctccaaacacagactgtttgacttagaatcttcccttttttactccattcaagagc

SEQ ID NO: 754252 - DNA, 75 bp, Homo sapiens
gcacccgtgggcccccaaggggtgggccaggtggggagctgccccgtgggccggagcatattaatgaaaagtgcc

SEQ ID NO: 754253 - DNA, 82 bp, Homo sapiens
ggctggacgcagcaagcggggcgctgtgtccccaagctccccgtcctcgggtcaacgtattgaaacttactgttgaagactt

SEQ ID NO: 754254 - DNA, 100 bp, Homo sapiens
cgcgagctatatctgcgcgtggagctgagtgacgtacaggttgtcctggtgacagacggctgtcttggcattggtagagggtcactgcgacattccctag

SEQ ID NO: 754255 - DNA, 97 bp, Homo sapiens
cctgaaaccactcaagagtcataggattagatgatccaagtcaccaagaaattactgtctcaagtgatacggtgaatctggattgggaaagtcgaca

SEQ ID NO: 754256 - DNA, 50 bp, Homo sapiens
agccagaagctacatgacccctaaacgaattctctggtggttgagatccc

SEQ ID NO: 754257 - DNA, 100 bp, Homo sapiens
cgcgcacaggccggtggaatgggtccaggccgtggtcagccgcttcgacgagcaggaatttttggcccatggcctcagcaatatagtttcttcatttttc

SEQ ID NO: 754258 - DNA, 100 bp, Homo sapiens
aaatttgatgacctagatggaacacatgctctgatggcaccacctgccctggtcagctccagccagtccctgctggagtggtgccaggaagtcaccactg

SEQ ID NO: 754259 - DNA, 50 bp, Homo sapiens
gcgagagcgcgcgggcgcggccgacagatatcaatgatgtcaaacggctg

SEQ ID NO: 754260 - DNA, 100 bp, Homo sapiens
gcagaacattcggtacaagacatgcagcaatcatattgatgaactcccagagggcgctgtgaagcctccagcaaacaagtatcctatcttcttttttggc

SEQ ID NO: 754261 - DNA, 100 bp, Homo sapiens
tatgactctctgcctgaaaatagcgagacagaccaccgccagtcctcccaccacatccatcacccactgtccacccacctgcctccggatgcacgccgcc

SEQ ID NO: 754262 - DNA, 59 bp, Homo sapiens
tagaggatgacttctctaatcagttacgtccatctcggtcctcttggtggcttgtaata

SEQ ID NO: 754263 - DNA, 51 bp, Homo sapiens
gcgcgagtgaggaaaggaggtactgtagcatcccagccatcactcttccac

SEQ ID NO: 754264 - DNA, 100 bp, Homo sapiens
attgaaaaatgacttggagaaaggatagttttttacctgtttcattgtactgacaacctcagctggcatcatggaccatgaagaagcaagacgaaaacac

SEQ ID NO: 754265 - DNA, 83 bp, Homo sapiens
atcactgccaaaattactgctgtcaatcaagtggaataaacttgaggatgttgctcagataatgatctacgtactacttcgac

SEQ ID NO: 754266 - DNA, 74 bp, Homo sapiens
cttgtttgtggatcgctgtgatcgtcacttgatgcagcagcttttttatgagaattacgagcagaacaaaaagg

SEQ ID NO: 754267 - DNA, 90 bp, Homo sapiens
gatttgtggtgcgttctgagccgtctgtcctgcgccaagccctgggcgctgcctatggcacagccaagagcggtaccggcattgcggcca

SEQ ID NO: 754268 - DNA, 74 bp, Homo sapiens
cataatcttacttatcctctaggtcccaggaatgaagtgctgcttttgacacaaaaacggggttacgtgtggca

SEQ ID NO: 754269 - DNA, 73 bp, Homo sapiens
tggtgctggcctcctgtgatgggccttcgcactcccagcagtgttgtactgctacttctataaacggacagcc

SEQ ID NO: 754270 - DNA, 87 bp, Homo sapiens
cgggctggtggcctcgtgctggagcccggacgggcgccacattctcaacaccacggaattccatgttcgatacaagaggctgttttc

SEQ ID NO: 754271 - DNA, 82 bp, Homo sapiens
cacgggctcagaaggccagggcgacagccgggcacgatggtctataacttgacccaggagttcttccggcacgataaaccag

SEQ ID NO: 754272 - DNA, 83 bp, Homo sapiens
agaaggtcaaggtggaggtgaagaagtttgtgaagatcggccgcccgggctacaaagagactctgcgcagctacttttcccaa

SEQ ID NO: 754273 - DNA, 79 bp, Homo sapiens
aaggattccaagtaactcttatttgagagagatcatcattgcctgaatttagctttgtgactgcaagagcaagaccagt

SEQ ID NO: 754274 - DNA, 51 bp, Homo sapiens
tcgagccgcagcacgagctcaaattccgagcatgtacagaagcatattccc

SEQ ID NO: 754275 - DNA, 96 bp, Homo sapiens
gtaaaaaggctacaagaaaaattggtttgcaagatgaaaggagaaggggttgaaattgttgatagaggtaaagctttccagtttgaatttagatga

SEQ ID NO: 754276 - DNA, 100 bp, Homo sapiens
tcttgttggtgcttcctcatgtattgaagaattccaatcccagttcatttttaaatgcactcggtgatggaaagagagccactattctgaagaacacttg

SEQ ID NO: 754277 - DNA, 75 bp, Homo sapiens
aacaaccccctaccattggaacagcgaatagatattcatctgttgcagtctccttcaagcattctgtcgaccctg

SEQ ID NO: 754278 - DNA, 100 bp, Homo sapiens
acttgtgattggcggtgaccggatattcagttgcacatccccacatcaatgcactgccaatggcagtcgatgatgtgaagaaaggttacatcaaagcaga

SEQ ID NO: 754279 - DNA, 90 bp, Homo sapiens
tcgtgcaccggggcggtccgttgccaaagccaggaaagctatttttgatacaccagatgaggatccaaattacaatccactacctgagga

SEQ ID NO: 754280 - DNA, 50 bp, Homo sapiens
catcaccggagcgtcccagctgcgaggagatgaaggatttgggggcagag

SEQ ID NO: 754281 - DNA, 100 bp, Homo sapiens
ctcagatagggtccacagaatggtcagaaaccctccataacctgaagggaggtggggaagacagggctccagctaccacaggacgggctctgggtatagc

SEQ ID NO: 754282 - DNA, 100 bp, Homo sapiens
accatgccagaccgtggaagatttaacgaatggggttgtgatggcccaggttcttcaaaagatggacagagcagaatgggctgatatagatccggtgccg

SEQ ID NO: 754283 - DNA, 95 bp, Homo sapiens
tgctgctgcttcaatgtccgcatcgcaaccaccgccctggccatctaccatgtgtgtggacgaatgtggaacctcgctctgtggctgtgttccct

SEQ ID NO: 754284 - DNA, 100 bp, Homo sapiens
gcggtgctggtgtccgtggcgtgcctggctcctcagagaaattttgaaattgccttcaagatgtttgatttgaatggagatggagaagtagatatggaag

SEQ ID NO: 754285 - DNA, 82 bp, Homo sapiens
ggatcgcaggctccctgcctactcccccaccggggatttcagtgcctccggagccagcgtggtggccatagacaacaagatc

SEQ ID NO: 754286 - DNA, 83 bp, Homo sapiens
tccttctttgataatatttcttgtgatgacaataggtggtcgtcggttttctgagggtacttcagctgacagagagattcaga

SEQ ID NO: 754287 - DNA, 100 bp, Homo sapiens
catggcgtacgcctatctcttcaagtacatcataatcggcgacacagctctgcctgcagttgaacacaaagacctggaggagactcccacctccttcagg

SEQ ID NO: 754288 - DNA, 100 bp, Homo sapiens
ccatgtccaccaaagcggagcagtgagagcaagccctggaggttcactctttcaagaagtcgtgtgctgaggtgtaatgctacacaagtcagaggaagga

SEQ ID NO: 754289 - DNA, 75 bp, Homo sapiens
caatgaagcaagggactatgaaggtcctactgctctgttggctcatgaaataggttttggaagtaaagttacaac

SEQ ID NO: 754290 - DNA, 88 bp, Homo sapiens
aaaaaagaaagaatgaagaaatgcaaaatgttcgaacatctttgattgcggaacaacaggagtggagtcaacatatcaatggagcaag

SEQ ID NO: 754291 - DNA, 75 bp, Homo sapiens
cccatccctgcagcatgaacaaggttcagtaccttgaaatagttccagaaaccagaaggtaccctgtggcagtag

SEQ ID NO: 754292 - DNA, 100 bp, Homo sapiens
cgggaaaggagaggatcccggagccgaccaagatcactccatggatgaaatgacagctgtggtgaaaattgaaaaaggagttggtggcaataatgggggc

SEQ ID NO: 754293 - DNA, 100 bp, Homo sapiens
acctcgaggatgccatggtgttctggatcaacaaggcctcaggagtgcaagtagctgatgaagtatgtcgcattttttatgacatgaaagttcgtaaatg

SEQ ID NO: 754294 - DNA, 75 bp, Homo sapiens
attgtttattgaaaatggtactttaaagaatcattattggaggtactaagaagtgaagacctgcaaactaacatg

SEQ ID NO: 754295 - DNA, 75 bp, Homo sapiens
atcgacgatctccatatttcattgcaagaattaaacaaccaccatgtcgagcaaaaaggcaaagaccaagaccac

SEQ ID NO: 754296 - DNA, 82 bp, Homo sapiens
attcaacagttcaccaccattaccggttctcagagtttttatcaggaacataatgatgatattctgtgcctcacagtaaacc

SEQ ID NO: 754297 - DNA, 123 bp, Homo sapiens
cgtctgtctccgccccacagtccacgaggtgagaccctggcggagacatggaccagagatggagatgggtgtcgtgagctggtggtgggctacacagaccgtgtggtgcgagctttccgctgg

SEQ ID NO: 754298 - DNA, 83 bp, Homo sapiens
ctgcagaaggtctctggagacatcttcagcagatagcctgggctggaagctcttctacgtcacaggctgcctgtttgtggctg

SEQ ID NO: 754299 - DNA, 100 bp, Homo sapiens
tatgctgtggaggaagaacatgcatatttgggtccaactgtgaagccagatgataagcggacaaacataaattgcagagattcctgactgctgacatggc

SEQ ID NO: 754300 - DNA, 83 bp, Homo sapiens
caggccgtgttccgtgtctctggattcaagtcccaggagtcctgaccagagagcaggtgtgagttcttgatacgaatgaaagg

SEQ ID NO: 754301 - DNA, 89 bp, Homo sapiens
aggaaagtactgtccaaatgaattatgtcagcaacgtatccaagctgggctcaaaatgcagagaactcaaagatattcatttcggccag

SEQ ID NO: 754302 - DNA, 99 bp, Homo sapiens
gagctttgcagctgacctacatctcgaagaggccccacagtatcaaatatccgcctggctggattagagtatgttctgcacttcactgcactgaatggg

SEQ ID NO: 754303 - DNA, 100 bp, Homo sapiens
catgcctcactgtcctaggcaaggcggtaaatgactcgtgctaccagaatgatgattctgtcctaaaatccctcgttgagattgcagatactgttccaaa

SEQ ID NO: 754304 - DNA, 83 bp, Homo sapiens
cctgtctcagcttcctgaatagctgggactccaggtgatctgaaagtagagatgatggcaggggggactcagatcacacccct

SEQ ID NO: 754305 - DNA, 100 bp, Homo sapiens
caaatcccacagaggcatctgagttgcatttgctggtctggcctttgcgtccttctacctggcagggaagttacactgcttcacaccacaaggccgtggg

SEQ ID NO: 754306 - DNA, 100 bp, Homo sapiens
agccgtccttttggatttctttttaataatgtgtgacccttcacctttgatcccctgacctgcattaccttgagagtgaatctgtccttcgattttccat

SEQ ID NO: 754307 - DNA, 100 bp, Homo sapiens
ctgcccgcagctgccaggcggcggcgcccaggccttgcacactcagatgctcactgcagtccaagagatctcccatctcattgagccgctggccaatgct

SEQ ID NO: 754308 - DNA, 109 bp, Homo sapiens
cctctccaacctgcacgtgcagcagcaagagcagcggcagtgcctgcggcgactccagcagccagagactgctgctactttgaaacgtacgatagaggccctgatggac

SEQ ID NO: 754309 - DNA, 98 bp, Homo sapiens
agcggcgggtcgtgggcacctccagccactgaggcggctcccagctgcgttggcgacatggccgacacccccagagatgccgggctcaagcaggcgcc

SEQ ID NO: 754310 - DNA, 82 bp, Homo sapiens
gtcctcaaagaggaacaaagtcatcaagctagtggacatcacggacatccagaaggtgagaagccctaccactgcaactggg

SEQ ID NO: 754311 - DNA, 100 bp, Homo sapiens
cggcagcagcggcctcgccgccgcccgtctcctgtcgcgcagcttcctccctgaagaataagttcatgaaaaaattgccacgtgatgcagaagcttccaa

SEQ ID NO: 754312 - DNA, 100 bp, Homo sapiens
tttgctacttgaaaactaccagccatggctagacctgaaaatttcttccaaggttgatgcatctctctcagagttagttgaatccatggacatgaaaccc

SEQ ID NO: 754313 - DNA, 90 bp, Homo sapiens
cttcaatgagtaccgcaagaggtttggcatgaaaccctacacctccttccaggagctcgtaggtctggttccagaacgcccgagccaagt

SEQ ID NO: 754314 - DNA, 82 bp, Homo sapiens
gatagtttgtggcttgtagaattctatgctccatgatctccagatcacactaagtttgtgggaagcttcaaaaccaaacaag

SEQ ID NO: 754315 - DNA, 75 bp, Homo sapiens
gacttgtgcattcaaacatagcaactgagggactttaactgcacttcgaatgtgttaccaaggttatggttaccc

SEQ ID NO: 754316 - DNA, 83 bp, Homo sapiens
cagatttgcaaattcagaaaatgtgaggaactcaaaaagaagccttccgctgctctggagattaactgctgaagtactgatcg

SEQ ID NO: 754317 - DNA, 80 bp, Homo sapiens
aaagataaagcccttaaggacaaggctgctgcagagaagttggtgcaagccttaatggaaagaaattcagaattacaggc

SEQ ID NO: 754318 - DNA, 80 bp, Homo sapiens
ctcagacctgccaatttaccagagataattgataacaccctgtaacagctgagtatcattggaacatttcaagatcatca

SEQ ID NO: 754319 - DNA, 100 bp, Homo sapiens
agggagtgccagacagtgggcgcaggtgcctaatggataagaacttcgttaggattgggaaatggtttgtccgaccctacgaaaaggatgaaaagccagt

SEQ ID NO: 754320 - DNA, 75 bp, Homo sapiens
catcgccggctcggtggaggcggtggccagcaccctggaggagaagaggttctgctggaacaagctggtgtagat

SEQ ID NO: 754321 - DNA, 83 bp, Homo sapiens
gaggccgtgcgggacgcgggcgccaggaccggccgaacgcagaggttagctttatacgtctacgaatatttactgcacgtagg

SEQ ID NO: 754322 - DNA, 75 bp, Homo sapiens
atcgccacctctgtccgaaagtgatgctacccgtggtttttagaacttcagccataaaaatgggcagaattttcc

SEQ ID NO: 754323 - DNA, 100 bp, Homo sapiens
gcgggctgtggggcctccgcgccgcggccgttagtcatgtcggcccagaagaatcagtgcggtttctgtggcagagcgagttgcatttgaaagaggagaa

SEQ ID NO: 754324 - DNA, 100 bp, Homo sapiens
cgccgcctccgctgggagccgcagatcagtccaagttgacggacaggaggcgaaatgtgcaaatgtttatggggatcagcagtgagtcacagaagtgcat

SEQ ID NO: 754325 - DNA, 100 bp, Homo sapiens
gcatttcacattcctcatggttggttcaaaggctggtccattcaggtccaggaaagggatcaccccaggctggtgtggatctgtcctttgcaacgcgaac

SEQ ID NO: 754326 - DNA, 100 bp, Homo sapiens
cctcccgggggacgtgaccaaccagggcgagaaccctttcaccgacagccccgaggaggagaaggagcaggaggaggctgagggcggtgccctggacgag

SEQ ID NO: 754327 - DNA, 100 bp, Homo sapiens
cgctcgtctacttcctcagcagcaccttcaagcagatccagacaaagacggtagctcagtgcgttgagtattattacatctggaaaaaaatgatcaagtt

SEQ ID NO: 754328 - DNA, 88 bp, Homo sapiens
tctcttcctcagggctcccgtgtctgctcgccctccgacgctgctcagatggagcagctatcagatgaagaaattgatcatggtgctg

SEQ ID NO: 754329 - DNA, 100 bp, Homo sapiens
ggaacttccgtgccccccaccctcaccaaggttcttgggtgtctctggggagtccctgggccagaccttcctccagactccagcccacctcttcggagca

SEQ ID NO: 754330 - DNA, 75 bp, Homo sapiens
ccaacatcttccaaactcctgcttgcaaaccatactgggtacatcaaagttgactggcaacgagtggagaaggac

SEQ ID NO: 754331 - DNA, 82 bp, Homo sapiens
cagtcggagcttggcgttgaaaagcgtcgagggcgaggcccccagcagtgagactggcacatccctggacagcccctcagcc

SEQ ID NO: 754332 - DNA, 83 bp, Homo sapiens
ctgctgctcttctccaggctctgtggattttttatcaagcagaaatgcatcgaacaacgagaatcaagatcactgagctaaat

SEQ ID NO: 754333 - DNA, 101 bp, Homo sapiens
cttcttgcaaaccacatacacagcacaaagaatgtcagacagaactgttcgtcaggtggcacaggagcagttctttttaatgtgcaccagatgttgcatgg

SEQ ID NO: 754334 - DNA, 96 bp, Homo sapiens
ctgggtgctggcacggggctggtgggcatagtggctgccctgctggccatgaagatggacctacagctaaaaaattaaagactgagcaagggggag

SEQ ID NO: 754335 - DNA, 100 bp, Homo sapiens
cgagcgtgggtcgtagagatttgggggttagccagcacgcgtcgtgcgggccatctgggggagcatctttccttgaagaagtacattattgacattgtgg

SEQ ID NO: 754336 - DNA, 83 bp, Homo sapiens
ccaaccctgccagcacctggaccttggacattcagacttcagaatggtatataatgtttacatggcagggaggcagctgtgtt

SEQ ID NO: 754337 - DNA, 75 bp, Homo sapiens
cgcaggaggcggtggagcgcagagcgggcgagcgcggctaatgatgccaaaggaggaaaaacaaatggacttgaa

SEQ ID NO: 754338 - DNA, 80 bp, Homo sapiens
gtggaagcaggactgcgccgcgtcttcctcaagattttcagctgaactctcatctctcaacactggcaaatattcataag

SEQ ID NO: 754339 - DNA, 90 bp, Homo sapiens
ttcagcatgaaagcagtaatcagatgtttgccatgaaagaaataaggcttcccaagattttgtgtgggagacaaattcttcctgaagaac

SEQ ID NO: 754340 - DNA, 88 bp, Homo sapiens
atgttcaagtttaccaaaagagaggcaccgctggaacactaatgaggttgatatctgtgcagaagaattggggaataatgtaaagccc

SEQ ID NO: 754341 - DNA, 78 bp, Homo sapiens
ccctgtgtggcaaacctttcttgagctcagggcgcaaaccagaagaagagggtgtggaagataacgggctggaggaaa

SEQ ID NO: 754342 - DNA, 96 bp, Homo sapiens
cacagataaaagagaaagatagatgccctctctcttcatcttcacttgaaataccggatgattttggagctcctgttcgacacagtggagaccatg

SEQ ID NO: 754343 - DNA, 100 bp, Homo sapiens
cgctgcagggggctgcgcctgcctgctccgccccagacctgtcggcgaaagggtcacaccgacaaatctgaagcgggtttgccaggggagtgtacccgtc

SEQ ID NO: 754344 - DNA, 100 bp, Homo sapiens
gaaataccgtgccctgaggttggacgtggggaatttctcctggggctcagagtgtggatactttaatactgataagccacaccccaggggtgaaattctt

SEQ ID NO: 754345 - DNA, 99 bp, Homo sapiens
tgcaatcataagagccatgggacggctaaagattgactttggggaagctgccagggcacaaatccagtttgctgatgacatgcaggagttcaccaaatt

SEQ ID NO: 754346 - DNA, 90 bp, Homo sapiens
gcagcggcggcggcggcgggagccccaccggggtctgggactggggaactgcctccggcttcacgatgatactctccaagctgtaaggaa

SEQ ID NO: 754347 - DNA, 75 bp, Homo sapiens
agctgtaatcaattgtgctgacaacacagtccaggacatcgtgttccagctgcagcgcctcgtgtccaccatgtc

SEQ ID NO: 754348 - DNA, 50 bp, Homo sapiens
atggatgtagccgactcattattgcggtacatcaggaacgtctctatcaa

SEQ ID NO: 754349 - DNA, 75 bp, Homo sapiens
tgatatatatgctgacgaggagttcaaccaggttttgcactgattgcaaaaataaagtcctccgagcatacaata

SEQ ID NO: 754350 - DNA, 75 bp, Homo sapiens
caagatttaacctgtcatcaagacctgggattttggtgcttgtaacacttcaagaagcaaaactgctgctaaacg

SEQ ID NO: 754351 - DNA, 75 bp, Homo sapiens
ggcaagacaagctcagaactgagaagctgtcaccacagaggagaacgaggagcgcacgatgattgaccccacttc

SEQ ID NO: 754352 - DNA, 50 bp, Homo sapiens
tgtggagcctattccacgccctccctgataaactcatcctgaaagtcgct

SEQ ID NO: 754353 - DNA, 100 bp, Homo sapiens
ccacattgtcatatgctagtgatctctataatggttccagtatagtctctagatttgtcccatcagatgaaaagaagaaacaaggttgtcaacgagaaaa

SEQ ID NO: 754354 - DNA, 100 bp, Homo sapiens
cggccctccttcagtttagttgaggataccacattagagccagaaggaggactggaatgaaattgaccccattaaaaagaaagaccttcatcacagcaat

SEQ ID NO: 754355 - DNA, 97 bp, Homo sapiens
aacagctgaaagaacagcagatggtaatgaggggccaccgagatacctctatggttcatgagcttaataggcggccttctgatctgtttaccacgtg

SEQ ID NO: 754356 - DNA, 80 bp, Homo sapiens
tgcaatgagctcggcctcggggctccgcagggggcacccggcaggaaggtgggagtcaatcattttgacaagtctcctga

SEQ ID NO: 754357 - DNA, 85 bp, Homo sapiens
tgcacactgccttaatggaggcctgcatggatgctaaagagcaggtaagccctttggaaacaacattggaaaagttccagcaaga

SEQ ID NO: 754358 - DNA, 100 bp, Homo sapiens
taccaagcatgtggctcctggtcagtgtaattctaatctcacggatatcctctgttgggggagaaggtcagcttttgccaactgttttcaaatcacatgc

SEQ ID NO: 754359 - DNA, 51 bp, Homo sapiens
attccaagtaactcttatttgcctgtcaaccagggtcgccactatcagaaa

SEQ ID NO: 754360 - DNA, 100 bp, Homo sapiens
atagaaccaaatctgtttgctgatgaagattcacctgtgcatgacctcgaagtagggggaaaactgcagtggaagatgaggacagcatggatgggctgga

SEQ ID NO: 754361 - DNA, 80 bp, Homo sapiens
gctggtcgtcagcgccgaggctgggctgaggcgccgcggtaccatgaggcgccgcttcatcactggtccagctgtaatac

SEQ ID NO: 754362 - DNA, 100 bp, Homo sapiens
ggcggcggccgcggcggtcgctgggggccacggagcctgaggtactaggttttgacaagcttgcatcatgcgtgagtataagctagtcgttcttggctca

SEQ ID NO: 754363 - DNA, 100 bp, Homo sapiens
ggcctctcctgggatcggcccaaggccagttctccgcagacaatgcagatcttcgtgaagactctgactggtaagaccatcaccctcgaggttgagccca

SEQ ID NO: 754364 - DNA, 90 bp, Homo sapiens
ttccctcaggcctattggagcctcctgccgggatgattctgagtgtatcacaaggctatgcagagtgcctggtgaagaatgtgatgggat

SEQ ID NO: 754365 - DNA, 83 bp, Homo sapiens
cttcagaaaaagcatccccgaggaggaagacgaatcgttaaacatcttaggtcaggcagctgaaaaagttggatgaagatagt

SEQ ID NO: 754366 - DNA, 82 bp, Homo sapiens
caggacttcatccaggcctacgaggaggtgcgcgagaagtacaaaggccctgggaggagcggggacactgaggacctctctc

SEQ ID NO: 754367 - DNA, 75 bp, Homo sapiens
aataaaagagacctctacttagctcagcaattcttaccttcagctaccaggaggcagcctgaacgtgtcagggcc

SEQ ID NO: 754368 - DNA, 100 bp, Homo sapiens
aagataggcaacaagatgatgagggcgcggcagtatccttggggcactgtgcaggactgacatcaatttgccctatcttacaatggattcttctggaccc

SEQ ID NO: 754369 - DNA, 51 bp, Homo sapiens
agcagtgatggggagagccatagcggggcccatcctgatggagctgcagac

SEQ ID NO: 754370 - DNA, 83 bp, Homo sapiens
attgaactcatccggcagaataagagactggacgctgtgagatgaaccaaggatcgggatagcagtataaaattagaatcaag

SEQ ID NO: 754371 - DNA, 76 bp, Homo sapiens
acttaccagctaggtcttacgaagtcgaaaagaggaacaggaaatatagtggtcattatgattagctatccaaaag

SEQ ID NO: 754372 - DNA, 90 bp, Homo sapiens
ctccgagacctccgaaaagcgtttccgcagacagaagtggggagaagcggaggaatcttgtcgattggcctggctgctgcctactacagc

SEQ ID NO: 754373 - DNA, 100 bp, Homo sapiens
ctcaattccagcatgtgtctagaggacagcagatacaactggtctttcattcactgtccagcttatgaactctggtttaagcaaatcctctgggagttgg

SEQ ID NO: 754374 - DNA, 100 bp, Homo sapiens
gaaaagaaccattgaagcttgagagaaaagcccccaaaagcagctattcagtttctccacagacactacccaaagcagtccttcactacagtggcagaca

SEQ ID NO: 754375 - DNA, 100 bp, Homo sapiens
attcctttaaatccggagggggaaaaaatcccaaggtctgcaaaggctctgacgcccgctctgcggcttcggtgtttgaacaggccacagtccaggagcg

SEQ ID NO: 754376 - DNA, 90 bp, Homo sapiens
tgaaggaggccggtgactttcacttccagccagctgtgaagaagccctgggcgctgcctatggcacagccaagagcggtaccggcattgc

SEQ ID NO: 754377 - DNA, 100 bp, Homo sapiens
cttcgagaagattagcaaaggtgctaatccagtggaaatcaggagagccacctgataaccaaaaacttggcttgttggaagccttattaaagattggtga

SEQ ID NO: 754378 - DNA, 90 bp, Homo sapiens
tttccacttcagaaaatgccctgacagaaccatatttatttagagtcagaatggagcgatttgtagtaacagcaccacctgctcgaaacc

SEQ ID NO: 754379 - DNA, 83 bp, Homo sapiens
cttcctcaacgacgcggacatggtcatgagctttgtgaacctggcccatgactgaagagttgctgaaacaacaaaagctgaat

SEQ ID NO: 754380 - DNA, 90 bp, Homo sapiens
gagagagagagggggactctgtgtgagggaaagaaaacaatttctcctgctctgcagcttctgttcaggaaacctatgagaatatcccag

SEQ ID NO: 754381 - DNA, 98 bp, Homo sapiens
atactggaaagtatgcaccagctgtcatcgtttgtcagaagaaagcagctggctcagaaaacaggatgcagagaatcaaatattaaagacaagtgtat

SEQ ID NO: 754382 - DNA, 100 bp, Homo sapiens
gaagtcacagggctactgttttccaatcctcagtatttggtatgctgttaggagacaccattattttggataatctggatgcggccaatcattatagaaa

SEQ ID NO: 754383 - DNA, 91 bp, Homo sapiens
aattcggtggaacgaggacgcggactgcgaaggcagtaagactttgaccccgacgcaggcttcagtgattgccgcggatcagaagcctgag

SEQ ID NO: 754384 - DNA, 100 bp, Homo sapiens
aacccgggaggcagaggttgcagccaagatcaaggctcgagatcttcgcgggaagaagaaggaggagctgctgaaacagctggacgacctgaaggtggag

SEQ ID NO: 754385 - DNA, 75 bp, Homo sapiens
ctcgtccccagcggtcccgcccaacgcccgactctgttacactcctggcacaccttacaaagtgtcctgttcccc

SEQ ID NO: 754386 - DNA, 98 bp, Homo sapiens
tggcagttcctcaaggagttgctactcaagccccacagctatggccgcttcattaggtggctcaacaaggagaaggtctcgcccaagaacttcaaggt

SEQ ID NO: 754387 - DNA, 100 bp, Homo sapiens
actgcgctgggaaacatggcgaccgagggaatgatccttactaaccacgaccatcaaatccgtgtcggagtccttacagacggttacctggcacgctggc

SEQ ID NO: 754388 - DNA, 100 bp, Homo sapiens
cacaaagccggctacgcgctgcgagatccccttatccaggccacctttggaaaccagcccacctgctacaccaaccttttcccaacaccgtggtcccacc

SEQ ID NO: 754389 - DNA, 75 bp, Homo sapiens
cgcctccggaggcggcgaggagcggcggaaagaagatgctgatatgctacaacacggatgaacctggaggacgtg

SEQ ID NO: 754390 - DNA, 100 bp, Homo sapiens
ctgcctgggacctggccaagggctccacacaccaagaccaagtgcgaaaatccaaagcagctgatgagaagagacgctccttggctaaacaagcacgaga

SEQ ID NO: 754391 - DNA, 75 bp, Homo sapiens
gcttcgcggagacggcggaagcggagagcaacagcgcgccgctattcaggattatgaaactgctcaggaacacaa

SEQ ID NO: 754392 - DNA, 98 bp, Homo sapiens
cgcgctggctggccgcggccttcgggctgacgctgctgctcgccgcgctgcgcccttcggccgcctacttcgggtaccccctgtaccggctgggtggc

SEQ ID NO: 754393 - DNA, 87 bp, Homo sapiens
cgagctgagaggagcaggtagaggggcagaggcgggactgtcgtctgggggtgccaagtcctgccctgccaacttcttggcagctgc

SEQ ID NO: 754394 - DNA, 75 bp, Homo sapiens
agtcacctactgtaccagagtttcagggtactagatggaaacttgagaaaggactgcttattgataacagctaag

SEQ ID NO: 754395 - DNA, 90 bp, Homo sapiens
taaattatttgtggcaatagtgatcacattcattttaattttgccggaatatttcaagacaccgaaagtaccttctccaggcaaattccg

SEQ ID NO: 754396 - DNA, 100 bp, Homo sapiens
tgaagttatggattcttacaaagctgccaggagaaatggaaaaacaaaaatgaatgaatcaagagtgatttgttaatgctggagcgcaatggcgcgatct

SEQ ID NO: 754397 - DNA, 129 bp, Homo sapiens
tacagattttatacaccaccaaactttgttcttgctcttgttttgccctcaattgtaattctgggtgaccaagaatatggcccaggtgaccaaagccctggacaaggccctgagcaccatggacctgca

SEQ ID NO: 754398 - DNA, 80 bp, Homo sapiens
ccctgtctgtgccggccgtgagctgcggcaggacggctggagcttccccgggcgctgcctggacaggcctgcctgcgtgc

SEQ ID NO: 754399 - DNA, 97 bp, Homo sapiens
gaaagaaggaggccagtatggcttagtggctgcgtgtgcagctggagggcaggcggcaaagatctgcaacaacatgctgttagctattagtatgatt

SEQ ID NO: 754400 - DNA, 97 bp, Homo sapiens
ctctcaaggctggttatttcaacttcacctcggcaacaattacttacctggcccaggaggatgggcccgttgtgagtctcgctctgtcgcccaggct

SEQ ID NO: 754401 - DNA, 88 bp, Homo sapiens
acgacagaaggcgtctcatggcgttggaataccggctctcagcggctgaattgaatgatctggcacgggaccctccagcacagtgttc

SEQ ID NO: 754402 - DNA, 83 bp, Homo sapiens
cccagagactgctgagcccgtccgtccgccgccaccacccactccggacacaggccggctggatcctgcaggcagctgtagcc

SEQ ID NO: 754403 - DNA, 83 bp, Homo sapiens
ggtgccggtgcctgtccccgggggcgccatggcgaccggagcgaacgccacgccgttggacctcctgccccccgaggtctgca

SEQ ID NO: 754404 - DNA, 100 bp, Homo sapiens
agggtccgagccagccgctgttttgccggaggagcccctcaggccgagagacagcgtctggagaccatcctcagtctctgtgctgaatacacaaagcctg

SEQ ID NO: 754405 - DNA, 100 bp, Homo sapiens
gctgctgcggaggcgttggagcgcggaaatctggaaccgggatggcgacgtctacactgagtcggaggcgaaggtgtgcaactgaggaacatggctcaag

SEQ ID NO: 754406 - DNA, 100 bp, Homo sapiens
ggcgccgggcggggagcggcggacggtctaggcggggctggaggcggtggctgcggttgcgggaccgtcggatttctgtggcctcacacacctggtgaag

SEQ ID NO: 754407 - DNA, 88 bp, Homo sapiens
tgggatcccccagttccaaagtgtcttaaagtgctgactggtcacttgaagctttactctacaaatgggatatgaaatgtgtccacat

SEQ ID NO: 754408 - DNA, 100 bp, Homo sapiens
attctgttgcgaaggcagccatctttagttcgtctttcctagagagctgatgaacttattagtcctaaagacattgatcctgtccagcgctatgtcccac

SEQ ID NO: 754409 - DNA, 75 bp, Homo sapiens
aaaaacaatagctcaaggaaacctttccaacacagatgtccaagctgccaagcaaatcctgatcctaactgttgt

SEQ ID NO: 754410 - DNA, 96 bp, Homo sapiens
ctgagacacttatatgccaaagatgactatgagcttattgacaatttaagggacgctgtgaagcaatcatggatgcaatgaagagagggctctgct

SEQ ID NO: 754411 - DNA, 139 bp, Homo sapiens
cccccgcgctgccatctgagacccggtagtaccgcccatgctgcagcgggaaagagaacagagagtcctggggacaggattttttatcaagcagaaatgcatcgaacaacgagaatcaagatcactgagctaaatcccc

SEQ ID NO: 754412 - DNA, 100 bp, Homo sapiens
gaaggaacgaggcaaggagctaaagcagcgtgcgttcagccctggggccaaagatgaagaggaagcctttctggattggagtgatgatgatgatgatgat

SEQ ID NO: 754413 - DNA, 100 bp, Homo sapiens
caccctgtcatctggactcctatggttgtaacttggtattccaggtacaaggaagtatgtccgtggttcagaccctgtattaaagcttttggacgacaat

SEQ ID NO: 754414 - DNA, 74 bp, Homo sapiens
tgattatggtggcccacttttcctcctgccagaactggtcatgctgctggagtggtggtcctgcacggagtgta

SEQ ID NO: 754415 - DNA, 76 bp, Homo sapiens
cttgaagcaagggaccttgttatagaagccttaaagaataacattgctatggctttggaagttacttaccgggaac

SEQ ID NO: 754416 - DNA, 100 bp, Homo sapiens
ccgcagggcgctgacggtcccgcacgtctgccgctgccaccggcgcgcccgaacatccacgacagcgatggcagttccagcagcagccaccagagcctca

SEQ ID NO: 754417 - DNA, 75 bp, Homo sapiens
cgcggttgctacgcgcaccatggctggaggacttgaaagaggagattgatattcgactctccagggttcaggata

SEQ ID NO: 754418 - DNA, 80 bp, Homo sapiens
aatccaacagcccagtgcttctgtctcgactgcactttgagaaggtcaaaatgcagatcttcgtgaaaacccttaccggc

SEQ ID NO: 754419 - DNA, 98 bp, Homo sapiens
ggcagccctggatgagcggagcaccttgctggacatgtcctccattttccaccagaaggccgaaaagtgggagaactgaagtccaatcagttcagtat

SEQ ID NO: 754420 - DNA, 75 bp, Homo sapiens
cggggagagcactggggaccgagacccggcaccacctcccggtccgccctccagaccagattacagaggggtatt

SEQ ID NO: 754421 - DNA, 100 bp, Homo sapiens
cgcattttggcattgacatttaattttagggtcctttatatagaagggagagtaggtttttcgttggaatatacgttgcacatttatggcgattctgagt

SEQ ID NO: 754422 - DNA, 73 bp, Homo sapiens
gcgctgatgcttcgggatggacgtgtggacaacagtgagtatatgcggaatggagacttcttacccaccaggc

SEQ ID NO: 754423 - DNA, 99 bp, Homo sapiens
gtactctggtttccagcagtcggctgacaggtgttttctttgtggacatctgatcatggacatggtctgggataaaagtgaaagtggtgattggcattg

SEQ ID NO: 754424 - DNA, 76 bp, Homo sapiens
gaaggaagtgcggagccagcctgagttgggagaagagctccagagagtgaggaaaatagcagctgaatactatgac

SEQ ID NO: 754425 - DNA, 98 bp, Homo sapiens
ggagttttatgagcaggagagcatcaccccgccgcagcagggttatgacaacaccgaaagtagtgtgcgtaaggccagcgtgttttgcttagtggcaa

SEQ ID NO: 754426 - DNA, 82 bp, Homo sapiens
ccaggccgggcacctccgagcgcaaggacagcgcgaggtccgcgcagcccagcgcagccatatgcggcattccaaaagaact

SEQ ID NO: 754427 - DNA, 88 bp, Homo sapiens
cctggagctgctgatccagacgtatgctgggagcggtgaagatggaagggcacgagccgtccgactggagcagctactatgcagagcc

SEQ ID NO: 754428 - DNA, 74 bp, Homo sapiens
ccactgaagacgtctgcgtgagaatagagaccaccgagggtgtgaaggaagccggtgagaagcctcggggagca

SEQ ID NO: 754429 - DNA, 100 bp, Homo sapiens
ggccaatcagagggacggccccagaatggcatggtcacaagctacctaactaagaagtttgctgaactacgcagccccaatgagttcaaggtgtacatgg

SEQ ID NO: 754430 - DNA, 80 bp, Homo sapiens
tgtactgcttgtggcacaaggggagatggctttggaagaatttttgaagcagatcctccaagtggggagtgaagacgcac

SEQ ID NO: 754431 - DNA, 82 bp, Homo sapiens
cgctcaccatctatggcatccggtgtgacttaagagattaaaattaatttggttgctgttggttctgaacaaataatgagtt

SEQ ID NO: 754432 - DNA, 80 bp, Homo sapiens
ctgcgagccggcggcccggagtggggcggcgggagcccagcagccggggccgccctattacaccgacccaggaggaccgg

SEQ ID NO: 754433 - DNA, 96 bp, Homo sapiens
tgcctacctccctgaaacacatcatcagcaatgcagaatactatggcccatcactcttcctcctagcggagctggagtttgttcagatcatcatca

SEQ ID NO: 754434 - DNA, 100 bp, Homo sapiens
acagcacccgccacaccacgctgagcctcctgaagcgggccaaggtgcacatcaagggccgccttcaacaacaacgtgagcgtggcctacgagtgcctga

SEQ ID NO: 754435 - DNA, 74 bp, Homo sapiens
taccaccaatgggaacatgcacagatataaagatgaagcgcagctgtataaagaagagcacctgaggaatcggc

SEQ ID NO: 754436 - DNA, 75 bp, Homo sapiens
cggcgaggccctcatgtaccacacgattccacctgctcctacgaagcccgactttgatggtcctcgagagaagat

SEQ ID NO: 754437 - DNA, 75 bp, Homo sapiens
gctgcgggaaatcgggctgaagcgactgagtccgcgatggaggccctcgggaccaaggatcacgtcatgactccg

SEQ ID NO: 754438 - DNA, 75 bp, Homo sapiens
cgactgcaactgctggattgctgcaaggctgagggacgagaacgaggtgctgtacttctttgcagtatacaagga

SEQ ID NO: 754439 - DNA, 95 bp, Homo sapiens
attcacaacgttcccttcccttccccacagagaccccgcatcctagtgcagacatctccatgattgggcagtttggtgttggcttttattctgcc

SEQ ID NO: 754440 - DNA, 100 bp, Homo sapiens
tgtgtagctctggagtcccaactcatgaaatttagagttcaagcaagcaagatacgagagcttttagcagagaaggttttagctaaagaagatactgagg

SEQ ID NO: 754441 - DNA, 100 bp, Homo sapiens
tgtatatactactgaaatgaatggcaaaaacacattctgggatgtggatggaagcatggtgcctcctgaatggttatccagactactactcagattgcca

SEQ ID NO: 754442 - DNA, 96 bp, Homo sapiens
ctgggggagctgctgggcgaagcacgctactacctggtgcagggcctgattgaggactgccagctggcgctgcagttaattggccttggtcctcac

SEQ ID NO: 754443 - DNA, 75 bp, Homo sapiens
agacagagcgctactcctggcagtgcgtcaatcagagcgtcctgtgcgttctccaaggagaagtacatcctggac

SEQ ID NO: 754444 - DNA, 50 bp, Homo sapiens
ccatgtctgctccaggaaacctactggtggagatgaataagcgtctaaca

SEQ ID NO: 754445 - DNA, 96 bp, Homo sapiens
aaaatcacgagttcaggcgtctgagacttggtgggaacggaccttcctcttagggtataaatggttttgaggttcagaaacaaaactgttgctggc

SEQ ID NO: 754446 - DNA, 98 bp, Homo sapiens
accacacactgggaaacatcattaaatcgatgagccggagccagccatccgaaagagctaccaggcggtagagcggcatggggagacaatccgagtcc

SEQ ID NO: 754447 - DNA, 74 bp, Homo sapiens
tcaccagggtgaatcctgtgacactagagacaggtcctggtccgcgccagagcccagcgcgcctcgtcgccatg

SEQ ID NO: 754448 - DNA, 80 bp, Homo sapiens
ctctccttttccctctccctttccctaagaagctgcacacatacatgtaagagaagcaaaaatgtcagatgatatcagga

SEQ ID NO: 754449 - DNA, 100 bp, Homo sapiens
attgtacatttgcccattctcaggaagagcttgaaaaatgactgtccaagtgcctccaaagtgtacaaagcatcagattcagcagaagcaattgaggctt

SEQ ID NO: 754450 - DNA, 86 bp, Homo sapiens
atcagagatcggcggagaccctcgaagtgcgcaaacttgacactcaccctgaccgaaggggaccatctggaccaagatttggacct

SEQ ID NO: 754451 - DNA, 98 bp, Homo sapiens
tcagacctgccaatttaccagagataattgataacaccctgtaacagctgaatatctcccggggccaattcagcatctctacctggccatcctaacaa

SEQ ID NO: 754452 - DNA, 98 bp, Homo sapiens
gtaaatacgaatctttccaaaggagatgcccgtttcagtgcctgtgtaatagaagggtctgtattgtaaaagaagtcaaaagcagccttgaataatcg

SEQ ID NO: 754453 - DNA, 75 bp, Homo sapiens
cgagcctgcaggatggcgcggccgagtccccgtacggccacccggcggactgtgccctgtccacggtgcctcctg

SEQ ID NO: 754454 - DNA, 88 bp, Homo sapiens
ccagcggttcagaggactgcacggtcatgtgcagggacttcacagcccacacgggctacgaggtgctgctgcagcggcttctggatgg

SEQ ID NO: 754455 - DNA, 74 bp, Homo sapiens
tcgcccggcaccagatcgtggaggtggcagaccattactgggacttccacccccaccacgtgcacagcgagttc

SEQ ID NO: 754456 - DNA, 83 bp, Homo sapiens
actggccctggtggggattgacagccacgggaagagacgtctcccacaacctgctccgggcgctggacgttgggctcctggcg

SEQ ID NO: 754457 - DNA, 100 bp, Homo sapiens
cttgcagcaaagccattcgggttggagtaattggttttgattcccaccatggccatcacccagtttcggttatttaaattttgtacctgcctagcaacag

SEQ ID NO: 754458 - DNA, 100 bp, Homo sapiens
gggagaatatttaatggaaaatcgcttggttaaaacctgacacttttaacagcaggaggatgcattagcacaacaggcctttgaagaggctcggagaagg

SEQ ID NO: 754459 - DNA, 100 bp, Homo sapiens
ctctgagaaaccttggacagcagattttggtttaatatctgattgggacaacattcagacccatttccagtcatgagtgctggagaatctggtaaaagca

SEQ ID NO: 754460 - DNA, 50 bp, Homo sapiens
tgaacaggcagggccagacccaggggacctgttgatcatcatggcccaga

SEQ ID NO: 754461 - DNA, 149 bp, Homo sapiens
cggggaccgagcctgggaggccggccggtgccagcacctttcggcttctgagacggcggcagcagcggcattcagacaattgtggcaattaataaagacccagaagctccaattttccaagtggcagattatggaatagttgcagattt

SEQ ID NO: 754462 - DNA, 82 bp, Homo sapiens
ggggagcgtccggagctagctggatcctctaggcaggacatggatttgattgacatactttggaggcaagatatagatcttg

SEQ ID NO: 754463 - DNA, 78 bp, Homo sapiens
gtttgggtcctctgaggccccttgaccaggtgaccaagtcagccatcggggtgctctaactgggggttattatgacac

SEQ ID NO: 754464 - DNA, 90 bp, Homo sapiens
gagatcatggggcccaagaaaaagcacctggactgtgaagatggagctggaaaaacaagcttaataagaaaaattcagggaatagaggag

SEQ ID NO: 754465 - DNA, 97 bp, Homo sapiens
ggctagggaggacctcacttccccggggtgtaataatgttaactgaggtactccaaagattcaggtttactcacgtcatccagcagagaatggaaag

SEQ ID NO: 754466 - DNA, 82 bp, Homo sapiens
gccggcacctgacggcgtgaccgacccgagccggtgtccctggccagtgtccttccacctgtccacaagcatggggaacatc

SEQ ID NO: 754467 - DNA, 99 bp, Homo sapiens
cgagaagcctgaaaagtcgcagcgagctggagccgccggagaaaaagatgttgctggtccatttgacgaagaagtccagagcggcttgtgacttcagtc

SEQ ID NO: 754468 - DNA, 75 bp, Homo sapiens
acgggaccccggcgcccccaccccatccccgggagtgctgggcctaaaggagataacatttatgaatggagatca

SEQ ID NO: 754469 - DNA, 96 bp, Homo sapiens
ttggatccgcgggacaagaaaattcatgcggaagtgtttggattgtgagctatttcagaactgttctcaggactcattattttaacatttgggaga

SEQ ID NO: 754470 - DNA, 76 bp, Homo sapiens
gaaccaggctgcacaggtgctgtctcgatcgtcactgaagagaagctaaaccagccccagaaatatttgaaaatga

SEQ ID NO: 754471 - DNA, 75 bp, Homo sapiens
gccactctaatggtatatgaagatgtcgtccaaatagtatcaggattccaaggctttacaggaagtatggtgctg

SEQ ID NO: 754472 - DNA, 82 bp, Homo sapiens
cgtatcgtatgtccgctatccagaacctccactctttcggaaaaccaattctgtgtcctcggaggaccacagcccagttggg

SEQ ID NO: 754473 - DNA, 100 bp, Homo sapiens
acaactgtgaagttagaaaagccctgtcaaagcaagagatggctagtgcttcatccagccaaagagggatgagtgccacctctcgtaaacggaaagaaga

SEQ ID NO: 754474 - DNA, 83 bp, Homo sapiens
gtcagaatggctgtatcctgggagatgagatgggcctggggaagacctgccagatacccagaaagcggtactctagaaatgaa

SEQ ID NO: 754475 - DNA, 75 bp, Homo sapiens
gaattctgaagatcactcacttaggaaacaaatctgatcttgtggatcaaagtatatttaattttatcccagaag

SEQ ID NO: 754476 - DNA, 98 bp, Homo sapiens
gtgatttgctgattaaacccttggaaaatttccggaaggaacaaataggcttcaccaaggtcagtcaccacgaacaggggcactcggcatgctgcccc

SEQ ID NO: 754477 - DNA, 99 bp, Homo sapiens
ccgccacccgatggaagattcgatggacatggacatgagccccctgaggccccagaactatcttttcgccgcttacaaacacgcagatggcaagaagat

SEQ ID NO: 754478 - DNA, 83 bp, Homo sapiens
tctttctggcctggaggctatccagcagacactatggacagcgtgaagcagagcgcggccctgtgcttgctgcgcctgtacag

SEQ ID NO: 754479 - DNA, 97 bp, Homo sapiens
tgcctgccgggcggccgggcgcggcgagcccaggatcatgcggccagatgatgccaacgtggccggcaatgtccacggggggaccatcctgaagatg

SEQ ID NO: 754480 - DNA, 100 bp, Homo sapiens
attctgaaagctccggtattattctttgatagaaatccaatagctcaaatctaatccaagtgaaaatgaagaaaaggaagcacagtctcaacttataaaa

SEQ ID NO: 754481 - DNA, 74 bp, Homo sapiens
ggcggcagctgtagctgcagcagcaggataccatacttgcagagctccttcagatacataaagaacacattgta

SEQ ID NO: 754482 - DNA, 83 bp, Homo sapiens
ctttacagataccagttcctttgtcaagagcatactttggaccctgttttcagaaagcagccagcaatacaggaatgcacagg

SEQ ID NO: 754483 - DNA, 75 bp, Homo sapiens
cagttggagagggaagaaaagctttggatgaaggagcttcaaacccaaagagagggagcactatgtctgcggaag

SEQ ID NO: 754484 - DNA, 75 bp, Homo sapiens
ttgaatttgctagtaacgtcatggaggatgaacgacagctactctccagagagaccggatcttcaaacattttac

SEQ ID NO: 754485 - DNA, 100 bp, Homo sapiens
ctgtgctcgcgctactctctctttctggcctggaggctatccagcgctccctggggaagggaatgcagggttgctggggctgggcccagaagcagcagca

SEQ ID NO: 754486 - DNA, 59 bp, Homo sapiens
acaccgacaggctggagcgcgagaaagtttccaagggtcacttgtgtctcgtccgtggg

SEQ ID NO: 754487 - DNA, 74 bp, Homo sapiens
ctggtttcaggaactctggcataacggtgggaaagagaggaaaaactatgttgcctggaattgtctcgccattt

SEQ ID NO: 754488 - DNA, 98 bp, Homo sapiens
tgaggagagaggcgcctcctcgctcccgccaccgccggacttcaatgcccagtccccagctcgccagcacggagtcttgctctgtctcccaggctgga

SEQ ID NO: 754489 - DNA, 100 bp, Homo sapiens
gacagtttctggaagttataacgctacacgaagaactaagaatattattagcacaagagcaccatactttgagggaagcaagaggctactatgagcagac

SEQ ID NO: 754490 - DNA, 101 bp, Homo sapiens
caagaaacctcaggacttgagtaacagcaacatggtagcctttccagtaaatatatgactcagggaaaagcctcagcgaagaggacccagcaggaatcatg

SEQ ID NO: 754491 - DNA, 100 bp, Homo sapiens
ctctgcttatcttttttgccaaatactgatgatgaactctttgccagcagagaggatccaggaaatacagaaggccattgagctgttctcagtgggtcag

SEQ ID NO: 754492 - DNA, 50 bp, Homo sapiens
ggaactctttccagcttgtgtctggcatgtcgggccccaggcctgtggtg

SEQ ID NO: 754493 - DNA, 73 bp, Homo sapiens
agcttatggttctccattgtgatgaaagcacatggtacagaccagaagcccctggtccctctgtctccctttc

SEQ ID NO: 754494 - DNA, 89 bp, Homo sapiens
tttcttctttgagaaactatcccagatatcatcatagagtcttctgctcttcctcaactaccaaagagttgtggaaagtaaaaatgtag

SEQ ID NO: 754495 - DNA, 75 bp, Homo sapiens
ctcgcggcgagcggacggggtcgagtcagtgcgttcgcgcgagcggggatctgacgagcttttctctacttgtgt

SEQ ID NO: 754496 - DNA, 100 bp, Homo sapiens
ggcgagtccggcccaagctccatgtgtttggtggaatccatgaagggtgttttgaatgctgtatcaaatgcctggggggcattccctatgcctctctgat

SEQ ID NO: 754497 - DNA, 78 bp, Homo sapiens
cctgggtccacgccgagggcaggacgaacttcaccagccgcaggtggctgcgatgggacggaagccatgaatggtgcc

SEQ ID NO: 754498 - DNA, 83 bp, Homo sapiens
ggccaagggaccaaggtggaaatcaaacgctctttggtgtaacgggaaactgcgctgcctgtagtaagctcatccctgccttt

SEQ ID NO: 754499 - DNA, 74 bp, Homo sapiens
tcctaccctaaagtcaccacctgctgcttttctggagcgcttaccaggcgttggagaccagggccagccctggc

SEQ ID NO: 754500 - DNA, 113 bp, Homo sapiens
actccttccctcaagtgattcttctgcctaatcctcccaaagttcttagattacagcaaaagtactttgactcaggagactacaacatggccaaagccaagatgaagaataag

SEQ ID NO: 754501 - DNA, 96 bp, Homo sapiens
ggcgtggggcccgaacctctggctgactttggcagggcccatctggcacggcctccgcggcgcgcagaaaatggacccaagtggggtcaaagtgct

SEQ ID NO: 754502 - DNA, 75 bp, Homo sapiens
gttagctgatgccatagctgttatcaaaggaatgtaccaggaattgaatgatctggcacgggaccctccagcaca

SEQ ID NO: 754503 - DNA, 100 bp, Homo sapiens
ttcacgatgtttcccttggtcaaaagcgcactaaatcgtctccaaggttggatggcaagcatgtggtgtttggcaaagtgaaagaaggcatgaatattgt

SEQ ID NO: 754504 - DNA, 100 bp, Homo sapiens
cggcacacgggtgagaagcccttcgcctgcacctggccaggctgcggctggagaaatgaaatgggaggaccagaacattggagatcagtgccaaaatgcc

SEQ ID NO: 754505 - DNA, 75 bp, Homo sapiens
ggcgggatggaggcggcggccggagcatcagatccatgctgctgctgactcggagccccacagcttggcacaggc

SEQ ID NO: 754506 - DNA, 74 bp, Homo sapiens
acatgacaagatgctggcacaacccctcaaagacagtgatgttgaggatgcagactcatctgagcgtatcattg

SEQ ID NO: 754507 - DNA, 101 bp, Homo sapiens
aaaagagatccgattggaacatgaagaaggtgcaccctgcacagctataagagaaggtgaaccagtgtgttattggtactgctcaggccaacaggaagtga

SEQ ID NO: 754508 - DNA, 74 bp, Homo sapiens
agcactgtgcatattgcttgtactcctcaggctgcaaagtttgtgaagtgtggatatgcaggctctaactttcc

SEQ ID NO: 754509 - DNA, 99 bp, Homo sapiens
atgagcatttggactttatccagtcacacctgcggaggttctgccttcagtcctgctataactgcggtagaggtggccacattgccaaggactgcaagg

SEQ ID NO: 754510 - DNA, 100 bp, Homo sapiens
agtgaactttctgccaagatgcggaatggaagttggatacactttgtgacttgtacgagacactgaccattacacaggctgttatttttctcaatacgag

SEQ ID NO: 754511 - DNA, 100 bp, Homo sapiens
ttctggatttccagatctctatgaacctattctggaggcaataaagtctcttgcatggcaccaagaatgttaccaattcaagcagtttaagattgccaag

SEQ ID NO: 754512 - DNA, 82 bp, Homo sapiens
tgtccaaacatggatagagctactcactggttctgccatcttgaaacccccattctgtttccagcccagaagaaatgctgcc

SEQ ID NO: 754513 - DNA, 100 bp, Homo sapiens
attataccttcacccagcatttcatccctcgtcgaaaggattggattggcatctttagagtgctgctctccctgcgcattttgctactgatgaagcccag

SEQ ID NO: 754514 - DNA, 51 bp, Homo sapiens
ggattccaagtaactcttatttgttgtgattccaaagaatccctatcctgc

SEQ ID NO: 754515 - DNA, 100 bp, Homo sapiens
ctcattatagcctcaaactcccaggctcaagcaatcctaccatgtcagccttcccagtagctggaactacaggattgagcagtactacgaagccatcttg

SEQ ID NO: 754516 - DNA, 109 bp, Homo sapiens
gcaccatctccttctttgagattgatggacgtaagaacaaggcagcctggcatcctcgctacaacctcattgttgtgggccgatacccagatcctaatttcaaaagttg

SEQ ID NO: 754517 - DNA, 90 bp, Homo sapiens
actagttctgcaccatgaggaagaagcagctgaagacggaggcagctccacactgtgaactaatattctaccttgtaaatactgttattt

SEQ ID NO: 754518 - DNA, 50 bp, Homo sapiens
catttttctccctgaggacaacctgaggctggggtgcagtggcgtgatct

SEQ ID NO: 754519 - DNA, 75 bp, Homo sapiens
ggggccgacccgcagcgtccctggtctctccagccctcactcggaaccgcaccaattctcagtgaaggagttcta

SEQ ID NO: 754520 - DNA, 82 bp, Homo sapiens
gtggagttcgggaaccagctggagggctgaagaagatgcagagcagcctgaagctggtggactgtatcatcgaggtccacga

SEQ ID NO: 754521 - DNA, 82 bp, Homo sapiens
tcttgaaagtgggcgagttgcagagaaaaggaacagttccgtaagctctttattggtggcttaagctttgaaaccacagaag

SEQ ID NO: 754522 - DNA, 76 bp, Homo sapiens
ctcccatgtactctgggacctttgactgtttccggaagactctttttagagagactcaagttgcagaatataaaca

SEQ ID NO: 754523 - DNA, 75 bp, Homo sapiens
aagcgcaggctgcggggcgcggagtcgggagggttgtgagtcccggcccagcccctccacccccctgcccccccg

SEQ ID NO: 754524 - DNA, 83 bp, Homo sapiens
aattctgttcggtgtttaagccagcaatgccaagatctgttgtggtgctttgcaagatatcaccttgtcacagcagaccccct

SEQ ID NO: 754525 - DNA, 75 bp, Homo sapiens
gaaagatgcaagacatgtagtaaaagtggtgactgcccaggatgtgcggaaggaaagccccctgctctttaagtt

SEQ ID NO: 754526 - DNA, 95 bp, Homo sapiens
tgacacacatgaacttaggggcacttctgttttcctgagggctacaccgttttcttttgaaagagaactttaccttttgaccagttggtccagag

SEQ ID NO: 754527 - DNA, 75 bp, Homo sapiens
cttatgttatgggctatttgtgtagcagaagagaatgtaactggtcactacatttccccctttcatgatattcct

SEQ ID NO: 754528 - DNA, 76 bp, Homo sapiens
gtgaagaggagagaagccggaaaatccagggagaactggagaagttaaatcagtccacggatgatatcaacagacg

SEQ ID NO: 754529 - DNA, 90 bp, Homo sapiens
caccacgcctggcctcactcaaacagtaaacgagtggcctgattccaccaagagaaggcccaggaggaagaagagaaaaagatgctgtgg

SEQ ID NO: 754530 - DNA, 82 bp, Homo sapiens
agacaattgaagctcaagcagagcttacagtgcaaggatttgtacacacagatatgacgaaagacttgaaagaagaacattt

SEQ ID NO: 754531 - DNA, 82 bp, Homo sapiens
aggaactcaaagtggatgaggaaagcctgccttgctctgccaggaaccatgagtgaggcccgcagggacagcacgagcagcc

SEQ ID NO: 754532 - DNA, 75 bp, Homo sapiens
tattcatctcaaaaacaaaattctgaactcaggacttggcaagccgagacgcatccagagctttcgtgaccgggg

SEQ ID NO: 754533 - DNA, 75 bp, Homo sapiens
ggggatgcaccctccacgtccgtcagcctgacgacagggtgtccgcaatgttgccagtgtctgtctgcagattgg

SEQ ID NO: 754534 - DNA, 76 bp, Homo sapiens
gatgcaggagcagacgctgcagttggagcaacagtccaagctcaaagatgtcatccaagtctccaagaagttcctg

SEQ ID NO: 754535 - DNA, 117 bp, Homo sapiens
cgctgcccgacgagcaggacttcatccaggcctacgaggaggtgcgcgagaagtacaaaggggacggcaaaacagaacagaaaggcggagataaaaagaggggtgttaaaagaccac

SEQ ID NO: 754536 - DNA, 83 bp, Homo sapiens
gtggaggagctgtgcagccgcgaggaggcgcgggaggtgttcgagaacgaccccgagacgagcactacaaacaccactggttt

SEQ ID NO: 754537 - DNA, 51 bp, Homo sapiens
taaggattccaagtaactcttatttggaactcgaatcatttatgacagaaa

SEQ ID NO: 754538 - DNA, 98 bp, Homo sapiens
tgagttccggcttgccgcggcctgccgcaatggaaacatctatattctgagaagggttccccactgaaggacttggtccagctgtctggcagggagga

SEQ ID NO: 754539 - DNA, 139 bp, Homo sapiens
tcgccctgtggatgactgagtacctgaaccggcacctgcacacctggatccaggataacggaggctgggaaaacctcacagcacgggtagctctgaacggattcagctctcaggaatgtataatgtccgtaaaggcaag

SEQ ID NO: 754540 - DNA, 117 bp, Homo sapiens
ttttgcgagtactcaacaccaacatcgatgggcggcggaaaatagcctttgccatcactgccattaaggtgctgccagaccgcgacggaaagcgctgcatgttctgtgtgaagacag

SEQ ID NO: 754541 - DNA, 80 bp, Homo sapiens
attatgaaatttttgggaaggtgcaaggggtgtttttccgtaagcatactcaggttccagatgcgacatccagatgaccc

SEQ ID NO: 754542 - DNA, 100 bp, Homo sapiens
atgcccattttgctgtgtgttacaggactactgttcgaagatttttggaagaatactgagaacggcataaagtgaagatcgacatttaaaaaatgaggtg

SEQ ID NO: 754543 - DNA, 75 bp, Homo sapiens
gaacgagtgcaagcagctgtccgagtcccaggtcaagagcctctgcgagaagtctcacagaaagttctccgctcc

SEQ ID NO: 754544 - DNA, 50 bp, Homo sapiens
gagaaccgcagggactggccgaggctatggagttactagtagagaaagca

SEQ ID NO: 754545 - DNA, 101 bp, Homo sapiens
tgttcgccgccgtggccgcagtgttcaccttcaccctgcccccttcggtaccggggggagactccgtaactattggtacttcagagatgaatgcattcttg

SEQ ID NO: 754546 - DNA, 75 bp, Homo sapiens
gttgctttactttttgcttcaccgacatagtcattatgccgaagagaaagggcgtctctggccgagcctcttttt

SEQ ID NO: 754547 - DNA, 82 bp, Homo sapiens
agcccagccaccatgagcaccaagcagatcacttgcaggtacaccaggggttggaaaaaccacactaggcaaagaacttgcg

SEQ ID NO: 754548 - DNA, 82 bp, Homo sapiens
ggaagagaggagaatattggctgcagccaacatgcctgtccaggagccatgtgttcacatgtcatgtggaccagtatttaac

SEQ ID NO: 754549 - DNA, 75 bp, Homo sapiens
tcgacttcatgctcggcgccaaagacatggatgggtgcaaaaaagagctgccccgcttgcaagagccggaggagg

SEQ ID NO: 754550 - DNA, 100 bp, Homo sapiens
tgtcgttccaggaaaaacagatttgaaagtgtgaaccagagtttgttatttgatcaactagtaaataggacagtactgcttttaaagagacagtgttagg

SEQ ID NO: 754551 - DNA, 96 bp, Homo sapiens
gaacatgatcaagggtgttacactggtgccttatgcccgctcagaggcccacctcacagagctgctggaggagatatgtgaccggatgaaggagta

SEQ ID NO: 754552 - DNA, 80 bp, Homo sapiens
cttagatcgccttgcagtgatatttaggcatcacgaaagagccaagttttatttcaaaaagaagagtcccttaccatgac

SEQ ID NO: 754553 - DNA, 51 bp, Homo sapiens
aatattccattaatgaggcaaagggctgatggagttatgagaacaatgaac

SEQ ID NO: 754554 - DNA, 100 bp, Homo sapiens
cgcggccacaagccttgagtggcagcagtgttgtctggatgatgcagtttgcttggcagagctataagcgttatgcaatggggaaaaacgaactccgtcc

SEQ ID NO: 754555 - DNA, 98 bp, Homo sapiens
cttcacttccctcggtctgggcttctctgaggcggcgagagatggtcaggtctggagctcgaccgggccagattactcttgtctctgctgctcctggg

SEQ ID NO: 754556 - DNA, 100 bp, Homo sapiens
aaggggacacaagcaaagctgcccaggtcctgaaaatccttggttggttcaagcttatgtttcagcagctaaacacccttttgcttctgtggtggctcag

SEQ ID NO: 754557 - DNA, 90 bp, Homo sapiens
agcagccttggtgctcaggtgccagatgcaaagctgactcaggtgttgacaccttggcagtgtttatggccagcagcggaactacagacg

SEQ ID NO: 754558 - DNA, 100 bp, Homo sapiens
tttcggcaagaactggattcgtggcgccacaagctcattcactgtgtagctggtgctgccagaatactccatccatagcctcttctgcattatgttcctg

SEQ ID NO: 754559 - DNA, 83 bp, Homo sapiens
cagaagtccagagctgaggactgcctgtttgcagatgttccaggtcatccagccagagcgtgcgctgtacatccaggccaaca

SEQ ID NO: 754560 - DNA, 90 bp, Homo sapiens
ctctttgaggacactgagtcaccatgctagcactgtgcaggtacatttccaattgatttaaccaagacacggctccagattcaaggccag

SEQ ID NO: 754561 - DNA, 82 bp, Homo sapiens
gccgccccggccggacctcgaccctgagctctatctcagtgtacacgatcttagcaaagcaatgtctcaagatggtgcttct

SEQ ID NO: 754562 - DNA, 97 bp, Homo sapiens
aagttgtttcctccaacattgatgttcctccagcaagatgagctcacagtgcctgcactttaccccagtagccctgaagtgtgggccccgtaccctc

SEQ ID NO: 754563 - DNA, 100 bp, Homo sapiens
aaatgtacacacaggagagctggctgcagtaaaaatcattaaattggagcctgactcccaggaaggaaattacaagtcagaagtcaacagcaaacccagg

SEQ ID NO: 754564 - DNA, 100 bp, Homo sapiens
aaactccagctttgcctgtgagaggaacaagcgtccctgatccagaaggtggactctcaggcttttatcctagatcaccactggattgctgacagataga

SEQ ID NO: 754565 - DNA, 75 bp, Homo sapiens
gacgagtgctgtgactgtgttggttctaggtcccaattctactgcaaatagtatcatggcatcttatcagcaaca

SEQ ID NO: 754566 - DNA, 100 bp, Homo sapiens
cggccttggcatttacatcactggcgtggacccaggctctgaagcagaaggcagcgggctcaaggaaaaatgaggaagctgtgagtaccagtggaaggaa

SEQ ID NO: 754567 - DNA, 129 bp, Homo sapiens
tggcactgcagtgaaagatagcccagagatcgaacgagtgaagaaaaatcagcagaatattagttcagacttggatgttgtgggtgatggtatgcagtgtcctccttcacctttgctttttgatccttc

SEQ ID NO: 754568 - DNA, 100 bp, Homo sapiens
caagccttggaaatggaggaagaagaaaagcgaaaagttcaaacacacgtcagcagcatcgagagtaaacatgaggttacgatcctgggaggacttaatg

SEQ ID NO: 754569 - DNA, 50 bp, Homo sapiens
gaacagatgagaaacccggcaatgaaagctggagtgcagtggcacaatct

SEQ ID NO: 754570 - DNA, 75 bp, Homo sapiens
tggctataccagggactctgttctgattagcaatgttcacagcatctttaccgggagcagattccatctcaagaa

SEQ ID NO: 754571 - DNA, 100 bp, Homo sapiens
tccagcagatggcggatgccctgcagtacctgcagaaggtctctggagacatcttcagcaggctaagtcctatcagccatggaaacaccattgctctctt

SEQ ID NO: 754572 - DNA, 74 bp, Homo sapiens
gagccggagccgcctgggatgttcatctgcgctcctcagaccaccggcaggtgaacagcctgatgcagaccgag

SEQ ID NO: 754573 - DNA, 100 bp, Homo sapiens
aaggtacatcaaggcactggcagaagaaaacaggaatgtggtggatgggccatacgctggagtcatgacagcttatggttatcaagttatacccaaccag

SEQ ID NO: 754574 - DNA, 75 bp, Homo sapiens
cggacacagaggacagcggcagcgacgagaacctggatcaggtcaaaatgcagatcttcgtgaaaacccttaccg

SEQ ID NO: 754575 - DNA, 100 bp, Homo sapiens
cgatctgcccgttgtgtttgtgaaacagagaaagataggcggccatggtccaaccttgaagatccaagaagatcccagcctatgcggagacaaaccctcc

SEQ ID NO: 754576 - DNA, 95 bp, Homo sapiens
atcctcaagtggtgtataaaagccagcaaggctggctggaggtttcagtggcattgataagtctgtttgaaacaatattacttggttatcttagt

SEQ ID NO: 754577 - DNA, 100 bp, Homo sapiens
gcgggagaactcactgaggatgaggagtcgtaagaaagcagtgggagttgaagtcattgtcaagtgcttgcgatcttttacaagaaaatctcactgaatg

SEQ ID NO: 754578 - DNA, 75 bp, Homo sapiens
gagaggaagccgaaaacaccctgcaatctttcagacagaacccagcttagactagaaagtctagaagacacacac

SEQ ID NO: 754579 - DNA, 82 bp, Homo sapiens
cctaagcctgcacagccgcggcggcagcagcagtgagaggggtcgggccccggctcagtggtcccaggcagctcgggtgtcg

SEQ ID NO: 754580 - DNA, 74 bp, Homo sapiens
aaaacgctttttgcatacaagcaggaaaatgagatgttatccagagatgtacggcttttaatcttggaatatgc

SEQ ID NO: 754581 - DNA, 90 bp, Homo sapiens
cggggatgaagcatttcgagaactttctaagatggatccagagggaagcaaattgttggatgatatgcaagtgctgctggaccaggcggg

SEQ ID NO: 754582 - DNA, 50 bp, Homo sapiens
aactcctaaacaggtggatccagcgaatgtctgcgacaacgagctcctgc

SEQ ID NO: 754583 - DNA, 97 bp, Homo sapiens
tgcggcgaaaggaacggctgaaggccctacgggagaaaaccgggcgcaagactgcagccgaaccctggtccctcctccacaatgtggcttctcctca

SEQ ID NO: 754584 - DNA, 83 bp, Homo sapiens
cccacctggggacccccgaatctttcagctggtaggtgagtgctgtcctcggctcactttcctcaagctctccggctgccacg

SEQ ID NO: 754585 - DNA, 98 bp, Homo sapiens
gtttattcctccaaagcaaaccaactgagaatgcaggatggttggtcctgatgttattcccctgccacacatctacggagctcgaatcaaaggtgtgg

SEQ ID NO: 754586 - DNA, 48 bp, Homo sapiens
gcctcctttccaagcgcgacccgttgagagtacccaaaggcaagtgga

SEQ ID NO: 754587 - DNA, 100 bp, Homo sapiens
acctttgatagcctttcactaagtattccagccgccacatggaatggcccggagttgctgcctcgcgtggccatgctgcgtcttctgacttgggtgatcg

SEQ ID NO: 754588 - DNA, 100 bp, Homo sapiens
gtctgactcagttcctgcggggaacttcaccagtgacccagtcagtgcccttcagttaaagaccaccaggagcacactttacaagccagctgccatgttg

SEQ ID NO: 754589 - DNA, 51 bp, Homo sapiens
agcatgcccatacgattaaacctgcgtgatgatgaacagtctacacagatg

SEQ ID NO: 754590 - DNA, 90 bp, Homo sapiens
cgctttagcctcaggaggcagctatccaaggattactacagcatcccatttcccacacccactactccgctgactgggagggatggtagc

SEQ ID NO: 754591 - DNA, 51 bp, Homo sapiens
atggaactcattattgcacatggacggccattggctgtggtattgtagaaa

SEQ ID NO: 754592 - DNA, 78 bp, Homo sapiens
tggcaactgggctctaatctcctaaagatagacagctcaaatgaattggcttatttgcaacaagttcaagatctggtc

SEQ ID NO: 754593 - DNA, 100 bp, Homo sapiens
tgtattgtgcacatcagaagtggcatcgaatatggcaagatttgatgggctacaatatgggtgttgaaagcagcaggggcctagaagacattaaaccgat

SEQ ID NO: 754594 - DNA, 100 bp, Homo sapiens
tggaaatccaatcttccgtaacccctgcacagagcagattctgaaacttcttgacaatttgcttgcgcttataaggagcgagaacccgagcagcgccatg

SEQ ID NO: 754595 - DNA, 80 bp, Homo sapiens
ctccgaaaagcgtttccgcagacagaagtggggagaagcggaggtgtctgacttccagcaactgctggcctgtgccaggg

SEQ ID NO: 754596 - DNA, 82 bp, Homo sapiens
ggagaggctgcttcttgtagagcggaaggagagttttacatggaagtggcttacagaaacttggcgctgaggtgcagggaag

SEQ ID NO: 754597 - DNA, 100 bp, Homo sapiens
tccgtggtctcagcccaggacctccaggggaacaatgaggcctacgcagagctcatcgtccttggaggaatgccccccacgccgcaggccgcgcagctcg

SEQ ID NO: 754598 - DNA, 90 bp, Homo sapiens
ggccaataagttcgccaaagcgacaggagctgtgtgatccctcacatccacaaatctctgattggaaagaagggacagcagaaaactgct

SEQ ID NO: 754599 - DNA, 75 bp, Homo sapiens
gtgagaattcctcaatgactgccctctaaaggaagagtttggtgaggattcatcaacctccagtatgatgtctgt

SEQ ID NO: 754600 - DNA, 76 bp, Homo sapiens
aaaactatttcaaaacctcgagcatctagaaaagaaaatggacctgttgtaggaacatttacctggtaaatcattt

SEQ ID NO: 754601 - DNA, 90 bp, Homo sapiens
agatgctgatcgggacccccccgcagaagtgttatagttttgccgctggactcttccctcccttcccccaccccatcaggatgatatgag

SEQ ID NO: 754602 - DNA, 97 bp, Homo sapiens
ggactatggcatctatgttatcaaccaggtgctgctgttttttcaaacgaaggaaaaggaaaaccatacagcgccacaaatgactctggacacagac

SEQ ID NO: 754603 - DNA, 83 bp, Homo sapiens
aactgctgctgcctgtcatcattgactgctggattgacaatatcagtgacctagagtcccgcagggatgtgaagagagaagaa

SEQ ID NO: 754604 - DNA, 75 bp, Homo sapiens
ggacggcgagcgcgagcggcgcgagaaactccaggacacgcgcgccccgagcctgggaggcatgctgaagccagg

SEQ ID NO: 754605 - DNA, 100 bp, Homo sapiens
aaagatgagatttacctgtgagatgtttcatcccaacaatcataaggcctatgggttttctgccccaaaagaccaacaagtagtcacagcagtagagtac

SEQ ID NO: 754606 - DNA, 100 bp, Homo sapiens
tttgtgtatgaagctcaagatgtggggagtggcagagagtatgcattaaaggcgtccgacctccgatcatgaacgggcccctgcacccgcggcccctggt

SEQ ID NO: 754607 - DNA, 83 bp, Homo sapiens
ctcatacagagattgaaatgttccttagaaaggagcagcaggtgtttggagaagagggattgaccctgaatcttgaagacgtt

SEQ ID NO: 754608 - DNA, 50 bp, Homo sapiens
accagggctcctgtggctcctgctggggactttgaggaggaagatgacaa

SEQ ID NO: 754609 - DNA, 48 bp, Homo sapiens
caagttgtccctccagctggtggccccccaaagatggcggacaaggtg

SEQ ID NO: 754610 - DNA, 100 bp, Homo sapiens
gctcaagggactgtgtccaccctcaggaaaagaccagtgccctcagtctgagcaacgttgctggagtattctacatccttgtcgggggccttggtttggc

SEQ ID NO: 754611 - DNA, 75 bp, Homo sapiens
gaaccggtcgaaaaccgtgtatgagggattcatctcggctcagggaaatgaggcaagttatcctttggaaatgtg

SEQ ID NO: 754612 - DNA, 100 bp, Homo sapiens
tctaagagatgcctgcagcctgccatgggacgtggggtccaccggtacagtagagacggggtttcaccatgttagccaggatggtctcaatctcctgacc

SEQ ID NO: 754613 - DNA, 100 bp, Homo sapiens
gacactttgcgttcgggctgggagcgtgctttccacgacggtgacacgcttccctggattgggtctacaggtccaactgctgccactggcagtaatcgaa

SEQ ID NO: 754614 - DNA, 100 bp, Homo sapiens
cgagacggagccgacgctggggcatttgcgctcgcacctgaggcagtccctgctgtgcacctgggggtacagaaaacttggaatataacgtggagcctca

SEQ ID NO: 754615 - DNA, 100 bp, Homo sapiens
gctgcacaaggcggaggacagcctcctggccgccgaagaggccgccgccaagcttcgagagctgtgcccaggagtgaacaaccagccctacctctgtgag

SEQ ID NO: 754616 - DNA, 50 bp, Homo sapiens
cttttcaagggcagaacagtccaagctggacatccgtggcaaactttacc

SEQ ID NO: 754617 - DNA, 83 bp, Homo sapiens
agaacgtgtagccgcgtcccctccagtccgctccgggcagcacacgtcacatggagatgggcgtcaagaagttacctctcgta

SEQ ID NO: 754618 - DNA, 100 bp, Homo sapiens
gaagattccaacaggatgatgctcacatattctgtgccatggagcagagccagcccctgggcaacaaagtggaaatggagattgtgagcatgttggaaaa

SEQ ID NO: 754619 - DNA, 51 bp, Homo sapiens
gtgtgcccacagctcctggagccccacagggagtgcatccgccccaaccct

SEQ ID NO: 754620 - DNA, 98 bp, Homo sapiens
aaaatgtccattcatctgatccacatgcgtgtggcagcccaaggctttgttgtaggagcaatgactgttggcctctgtgtcctttgtcccaatagtaa

SEQ ID NO: 754621 - DNA, 100 bp, Homo sapiens
gcgagcgcggcgcggggccaccatgggggcccagctcagcacggagccgaggaggtgctgctgctggcccggcggacggacctacggaggatctcgctgg

SEQ ID NO: 754622 - DNA, 102 bp, Homo sapiens
gatctgcctcttctccaagaaactcaaccactagtgacaatgaccagcctcctgactactccttctccaagagggtctcgctctgtcacccagactggagtg

SEQ ID NO: 754623 - DNA, 73 bp, Homo sapiens
gacaagcacgagggcgcgctcgagacgctcctgaggtttacccagggttgatgataaccgctggccttattca

SEQ ID NO: 754624 - DNA, 75 bp, Homo sapiens
aaagcacggggtgaaactgaccacagtgctcaccacccaccaccactgtggctgtcgctgggcgcggactccaac

SEQ ID NO: 754625 - DNA, 99 bp, Homo sapiens
caaacggcaagatgtccagtaatgtcccggcggatatgcacaaccagtgtctctgaagaagatgtctcaagtagatattctcgaacagatagaagtggg

SEQ ID NO: 754626 - DNA, 101 bp, Homo sapiens
ccctgacacaaataaggatgatcccaaagccaaggagaagttctcccagctggcagaagcctatgaggttcctggtagagttacacagttgtgccgccagt

SEQ ID NO: 754627 - DNA, 100 bp, Homo sapiens
cacagtcaccgctgtcattgtgggcctggagctgctgaagactgctattgggaaagctggctacactgataaggtggtcatcggcatggacgtagcggcc

SEQ ID NO: 754628 - DNA, 82 bp, Homo sapiens
cccagctggaagaggcggtggcggcgggtcggggcgagacaatgcagatcttcgtgaagactctgactggtaagaccatcac

SEQ ID NO: 754629 - DNA, 90 bp, Homo sapiens
ccgagaccgtgaccgagagcgtgaccgagagcgcgaatatcgtcatcgttagaagctgtcaataccagcaaatatgcagaaagctatcgg

SEQ ID NO: 754630 - DNA, 97 bp, Homo sapiens
agcctggcgcacaaccggctccgggtcggcgacatcgggccaggcacctggcatgagctccaagccctccagatttctcaaggggaagataaaatga

SEQ ID NO: 754631 - DNA, 100 bp, Homo sapiens
ggaggaggggtgtttctggccacgtgcttcaacgctctgctgcccgctgtgagggaaaagaaattagaggagctgctcatcaaaactaagaaggagaagc

SEQ ID NO: 754632 - DNA, 90 bp, Homo sapiens
ccccgaggatctggaggcacagctgcagtctgacgagagggaatcatattctaagaactcagccactcaggtatccaccatggtgctggg

SEQ ID NO: 754633 - DNA, 101 bp, Homo sapiens
ttcgccgagaggtaccgggggtgacagctccgggaccggccgaaaggcgaggaaccggtgtggccgacgacgatgccctcgctgaggagcgcatgcggaga

SEQ ID NO: 754634 - DNA, 90 bp, Homo sapiens
gacagacttgccaaattgaatcattatttagaagcaaggtccttgaatgagcgagattatcgggaccggagatacgttgacgaatacagg

SEQ ID NO: 754635 - DNA, 75 bp, Homo sapiens
cggaagtgcagctgcctcagttcttagcgcaggctgtattcatctgcggtttttggtgacttcgagcagtttcct

SEQ ID NO: 754636 - DNA, 110 bp, Homo sapiens
gggaggtcatcgaaggctaccgggcccagcacagccagcaccgcacgccctgcaagggaggtactccaaagattcaggtttactcacgtcatccagcagagaatggaaag

SEQ ID NO: 754637 - DNA, 82 bp, Homo sapiens
catgaaggtggcattttttggcagtatgccgagattttgctgtcctggaggaccacaccctggctcacagcctgcaggaaca

SEQ ID NO: 754638 - DNA, 80 bp, Homo sapiens
caccccccactcgcagtccccaaggagaaggccatcagcatttgggagtcaaagaatttcttttttgaacttgagcctct

SEQ ID NO: 754639 - DNA, 90 bp, Homo sapiens
gccacctcgtgtatgcagagaccatgtgtgtctgatctgctgggatcctagagctggaacagtttttggctttcacccccaaccagtgac

SEQ ID NO: 754640 - DNA, 75 bp, Homo sapiens
ggtgaagatggcggcagccgaggccgcgaactgcatcatggagtaaaatgtttattggaggcttgagctgggata

SEQ ID NO: 754641 - DNA, 100 bp, Homo sapiens
gtgtcagaaaggcaggcgctgcgagacggagacggcaatcgcacctggggccgcctaacagatgtgaagttcatttccaatccgccctccatggtggcag

SEQ ID NO: 754642 - DNA, 90 bp, Homo sapiens
atacttgctgaaaaggaagttttctggaatgggttctctcaagtagtgctgccagtagtaccatcacagcactgtcacctggaggggcac

SEQ ID NO: 754643 - DNA, 100 bp, Homo sapiens
gagcagcagactcggacgtggacgcctttttccggacagtgtcaaaaacggtatttcgctgcctggcacaagctgattcttgatcataggattaagctgg

SEQ ID NO: 754644 - DNA, 100 bp, Homo sapiens
gttacatttttggagggaagctctgccttgaatgttctgagcctaaatggtaaagaggcttcctgtttgatgaagatagcaacggaaaactcaaaatggt

SEQ ID NO: 754645 - DNA, 82 bp, Homo sapiens
aatgggacctcgagtcactgtggtgacttaagagattaaaattaatttggttgctgttggttctgaacaaataatgagttct

SEQ ID NO: 754646 - DNA, 87 bp, Homo sapiens
gtttctggacgcggatttttggcctcatactctgttatagataaacaaggaaccaacgtccaagaggcccagaagatactcaacaac

SEQ ID NO: 754647 - DNA, 75 bp, Homo sapiens
ggcggagctgcgcctcggcccgctcttctccctgcttaacgagaaccatagatcatgctaaagaggaaaggacag

SEQ ID NO: 754648 - DNA, 83 bp, Homo sapiens
agaggatccagtgttcaccatcctggccccggaagacacgcagcccaagaaggtccggaaggtcccgccgggtcttccatcct

SEQ ID NO: 754649 - DNA, 50 bp, Homo sapiens
ttctggaaactgtacattgaagcagagtcctattttgtaacggattatga

SEQ ID NO: 754650 - DNA, 76 bp, Homo sapiens
tgaaattaatgaagctgtacctcaggtgaagttttatgaagaggatttaagtgccctgtatgctcaaaatttgtat

SEQ ID NO: 754651 - DNA, 100 bp, Homo sapiens
aagttattgaacggctgggccagagcgtggttgctgaccagttgaaagggagagtcccgtattctcagagtaaaagttgtttctggaattgatctcgcca

SEQ ID NO: 754652 - DNA, 73 bp, Homo sapiens
tgtgacagctcatatgtaacaaaatactatgggtcatatttaaagtctcaaaccatgaattatgtgggacagc

SEQ ID NO: 754653 - DNA, 96 bp, Homo sapiens
gggcttcattgatgagacccccaacttcatcatcccagcacaaaggaaagttgcagacgttggcagtgctgttgcggcagctcaaggcagagggcc

SEQ ID NO: 754654 - DNA, 90 bp, Homo sapiens
gaacaaacgagctgctccagataattggaaaatgctgtctcaacaagactgtgccctgtccacggtgcctcctgcatgtcctgctgccct

SEQ ID NO: 754655 - DNA, 90 bp, Homo sapiens
agcagcactgtcaaaactgaaggagcagaggcaactcctggagctcaggaacttagtgatttggcccgtgaccctccagcacaatgttct

SEQ ID NO: 754656 - DNA, 87 bp, Homo sapiens
cctttgcagtctcgacataagtgtggtgaagaaggtgaagtccatgcagatgttccacatgcccatcacttcagccatgcaaggaga

SEQ ID NO: 754657 - DNA, 100 bp, Homo sapiens
cttatttagccggagtgagaagcaagaaggccctggacacagcaatatctctgggctttcacagaatttggaatgatgggagatcatacaattaaaagtc

SEQ ID NO: 754658 - DNA, 100 bp, Homo sapiens
agttcaccatcactccaggttccgagcagatccgcgccaccattgagcgggacggctatgcgccaagcccatctttgtgtgcttgcatccaactgtgatg

SEQ ID NO: 754659 - DNA, 75 bp, Homo sapiens
gtctgggagcccttccttgacagcccgggccgagaaggtttggtgcacctcgatttggaggaagtagggcagggc

SEQ ID NO: 754660 - DNA, 75 bp, Homo sapiens
gagcgtcacggcgtacgccctcatggggaaaatctccccggtgactttcaggaagtgagtgcttttggtgaggaa

SEQ ID NO: 754661 - DNA, 131 bp, Homo sapiens
agaggccctattggacaaatttggtggggagcataatccaccatcaatatatctggaggctggacgtaaagaaagaagtgatgcactcaattctgcaatagataaaatgaccaagaagaccagggacttgc

SEQ ID NO: 754662 - DNA, 100 bp, Homo sapiens
gggcggcagcgatgttcggccaggtggctccaaggagaggaagcagtgatgcattgagagcacaaagttatcattgttgggctggataatgcagggaaaa

SEQ ID NO: 754663 - DNA, 100 bp, Homo sapiens
caacaacatcatccagtaccagtttgatgtgaattccaaggcagaagtcaggttccatttggcaactgccgagtggatcgcggagcccgtgcggcagaag

SEQ ID NO: 754664 - DNA, 90 bp, Homo sapiens
tcatgatacagttgataaaattgttgaactgataaatttcaaacggaagagagtggcagcatttagaaagaatctaattgaaatgtctga

SEQ ID NO: 754665 - DNA, 75 bp, Homo sapiens
gactggtagcttcaaacagctcacagttaaggtcagaatggcggcagtggagcatcgtcattcttcaggattgcc

SEQ ID NO: 754666 - DNA, 74 bp, Homo sapiens
tgtacaaaggagagtttaaacagccaaaacagttcattcatattcagcatgcttgctttaaatcgagtaacagc

SEQ ID NO: 754667 - DNA, 83 bp, Homo sapiens
cacccataccttttgggcttcagaatgcagtgttttcggtggtccgggggctgagtgcaggtgcccgggtctttgagtacatg

SEQ ID NO: 754668 - DNA, 75 bp, Homo sapiens
acacttctccgagccagcgagccagcgagccgccgacccgccgagcaaaatgcacccttacccttctgaagaaca

SEQ ID NO: 754669 - DNA, 100 bp, Homo sapiens
tgtttcttatatgtgatgccattccagcactggactcatggaggctgagcatttattcaggttcttctttgcggtccagttggtccaaagctacatgagc

SEQ ID NO: 754670 - DNA, 90 bp, Homo sapiens
aagcatgtgtcttccccagctctgcagccacatactatccgtttgttcaggaaccaccagtgacagactttggggccatttggatcacac

SEQ ID NO: 754671 - DNA, 50 bp, Homo sapiens
ggcgaacccgcggcgcaataacgtgagtgtgtccgcttgaaaccaactga

SEQ ID NO: 754672 - DNA, 100 bp, Homo sapiens
caagtgagaacatatttaacagcgacaagactctgggacgatgaagaagccgcacaccactgaagagattggtgtgcccatatccaggaatggctccacc

SEQ ID NO: 754673 - DNA, 83 bp, Homo sapiens
gcagtacctgcagaaggtctctggagacatcttcagcaggagtacgaccccagcaaagcgacctttgtgaaggtggtgccaac

SEQ ID NO: 754674 - DNA, 74 bp, Homo sapiens
caaccttggagcccagagccacgtcaaagtatattacagctaatactgacacagaagaacagagttttccagtc

SEQ ID NO: 754675 - DNA, 85 bp, Homo sapiens
aaaggggcctcgtcggagagtagagctacctctacccagatggaaagacccacaacccagacctgactgagctcggccaggcaga

SEQ ID NO: 754676 - DNA, 90 bp, Homo sapiens
caagacaaggtggatgaggttcctggcttatcagggcagtccgatgatgtccctgcagggaaggaagtgtttggattgtgagctatttca

SEQ ID NO: 754677 - DNA, 90 bp, Homo sapiens
caaaaaggagaagaaatctctagactcagatgagagtgaggatgaagaagatgactaccagtgtctgctgcacagagctttacatccccg

SEQ ID NO: 754678 - DNA, 99 bp, Homo sapiens
agaaggaacttgcagaaatcacattggaccctcctcccaactgtaggtgaaggaaatactcatgaccagccagatgtcttaaggaatgcttttgaaaag

SEQ ID NO: 754679 - DNA, 74 bp, Homo sapiens
gtggctgctggcatggtgttggacatcgtgcagtgaggactcagaagacaaagatgtgaagaccaagaaggatg

SEQ ID NO: 754680 - DNA, 82 bp, Homo sapiens
cttccagaaaaagtgctcctgggactccaggataccagctgatcttgcatctttaatggataaaacatttgagagaaagttg

SEQ ID NO: 754681 - DNA, 80 bp, Homo sapiens
atcaactgaaaaaatgctgcaggacaaagtgaacaagacttccaagtattacagcgtgaaataaattcccagtatttttc

SEQ ID NO: 754682 - DNA, 106 bp, Homo sapiens
cgacttcggttcgggtgcgctgctcaaggacacggtctacaccgacttcgacggtcaaaatgcagatcttcgtgaaaacccttaccggcaagaccatcacccttga

SEQ ID NO: 754683 - DNA, 100 bp, Homo sapiens
gacggcggcggctgtagcggcgtgacagtctatccttcactggagtctgatgatgatgaccctgctttgaaatctcgacccaagaaaaagaagaattcag

SEQ ID NO: 754684 - DNA, 75 bp, Homo sapiens
accatgagtggttccatgatgggaagtgacatgtctaagaaggccaccagctgtttcccacgccccatgactccc

SEQ ID NO: 754685 - DNA, 82 bp, Homo sapiens
ccaaaaattacttggagcaaagggcagtcggcggagcttcgccaaggctggcgcagtcggagcatcagatccatgctgctgc

SEQ ID NO: 754686 - DNA, 50 bp, Homo sapiens
atgcaatcatcatttatcaaacacacaagttgtggtcagaaatgagaaga

SEQ ID NO: 754687 - DNA, 76 bp, Homo sapiens
tgcaatcattcattttgtgccttgcagtgttaagacagtcttcaaagaactttccaaagaggtctaaggagatagc

SEQ ID NO: 754688 - DNA, 90 bp, Homo sapiens
aatgaaatcactttgtgtcaaaaagaaataactcagctgaagcatcaggtaaagagaaatgtgtatgaccttacaagtatccccgttcgc

SEQ ID NO: 754689 - DNA, 75 bp, Homo sapiens
ggggcattgctgtggaagtgcaggacacggccttcaacgtgatcaatggtggctctcatgctggcaacaagctgg

SEQ ID NO: 754690 - DNA, 50 bp, Homo sapiens
accactggcacattcttgctgacaggtgtcagcagttgagtctttggagg

SEQ ID NO: 754691 - DNA, 51 bp, Homo sapiens
ctactacaaccagagcgaggccgcctgcaccctagcctgcctctcctggcc

SEQ ID NO: 754692 - DNA, 100 bp, Homo sapiens
tccattaaggggattgcggtcatggacaaggaaggcaatgtcctgggtcattccagaattgctgggacaaagcctcaacaagaacttgatttaaactctc

SEQ ID NO: 754693 - DNA, 90 bp, Homo sapiens
ggtctgcaaagaagtcctttcaagtctctaggactggactcttcctaagcaagtccggtgagaattatgaagatgatgacctagtaaatt

SEQ ID NO: 754694 - DNA, 75 bp, Homo sapiens
ccactccagtcggtgttgagcacggcgagcagtctcaggcctttagtgatgatgaatgagagactacaggcattg

SEQ ID NO: 754695 - DNA, 95 bp, Homo sapiens
aggaggatagcagcagaagagaagaagaagcaggatgaactgaaacggattgccagagaattggcagaagctcaacagacagtcagctaaaactg

SEQ ID NO: 754696 - DNA, 90 bp, Homo sapiens
gggctcgcggcgtctccggggaaagccgtggccccgagggcggatccgagcatgttacaccagacagctatattccatgccttgcagacc

SEQ ID NO: 754697 - DNA, 75 bp, Homo sapiens
tctaaagaacaactacccatatttaaagctcagaacccaggagtgggaatagctttgcgaaaaatgggcgcaatg

SEQ ID NO: 754698 - DNA, 100 bp, Homo sapiens
cagccaagcaggaacggtgtacctttctagacccatcctcttgcaatcttggaccctgtgatggatgtggacacactgtactaggccctgagagtggaac

SEQ ID NO: 754699 - DNA, 51 bp, Homo sapiens
tcggcctggaccttgcagccgcaatggagtgacagtgttccctattggaat

SEQ ID NO: 754700 - DNA, 74 bp, Homo sapiens
tcagagttgtttcctccatttgctaaaggaatagtgtttgtgacagctggagtatcagccttggaagtatatac

SEQ ID NO: 754701 - DNA, 98 bp, Homo sapiens
agcccgccagcccgccagctcgtcagcccgccagccagcgcttcgcgggccctgtcggtcccggcagctagtacaccactgaatcctttaagctttca

SEQ ID NO: 754702 - DNA, 90 bp, Homo sapiens
tggacagcgtgcggtctgggccttttgggcagcttttccggcctgacaacttcatctttgatgcggcccccttcctgccagccccctgcc

SEQ ID NO: 754703 - DNA, 89 bp, Homo sapiens
attcacagtctaccatgaattggaagactgcaataaggtcactgatcagtgcctgtccttcttcaaacgctgtggaaacatctgtcata

SEQ ID NO: 754704 - DNA, 100 bp, Homo sapiens
gttggagcagggagaggagctgtggataacgggaggtgaatttccatgtcaacatagtcctgctgctggctaccaatattctactttctgtctctatgaa

SEQ ID NO: 754705 - DNA, 100 bp, Homo sapiens
gaaaacgtggttgtagagttccgtgactcccaggctcttgtcaggatggtgaagctgttcatcggaaacctgccccgggaggctacagagcaggagattc

SEQ ID NO: 754706 - DNA, 101 bp, Homo sapiens
aaagaagtagccttagtaataaccctcttttccagtataagtatttggctcttaatatgcattatgtaggctggacgtaaagaaagaagtgatgcactcaa

SEQ ID NO: 754707 - DNA, 90 bp, Homo sapiens
ccaggagcaagaccaagaccgcaggaaggactggggccacgtggagctgctggagggaaggtgctcgggtcttcggggcactgggtccca

SEQ ID NO: 754708 - DNA, 104 bp, Homo sapiens
ggcttcttgtatcttcagcagcagcagacgtttggaaaggtgtctgacttccagcaactgctggcctgtgccagggtgcaagctgagcactggagtggagtttt

SEQ ID NO: 754709 - DNA, 78 bp, Homo sapiens
ggaatgaattggatgaacaaaatggagttaaagttcctcgtaattttcgcttgttggaagaacttgaagaaggacaaa

SEQ ID NO: 754710 - DNA, 101 bp, Homo sapiens
cgcggctgccgtacgtggccctcgatgtgctctgcgtgttgctgggcctcccagtagcattggatgcaggaaaaaatacattgacggtgaaaaacaagccg

SEQ ID NO: 754711 - DNA, 50 bp, Homo sapiens
gttaactatggtagcccacccagcattgccaaactcaggctctgaattgg

SEQ ID NO: 754712 - DNA, 100 bp, Homo sapiens
caggacttcatccacgcctttcagccaaatgccagactgattgtcatgctcagggaccctgtggagaggtactccaaagattcaggtttactcacgtcat

SEQ ID NO: 754713 - DNA, 103 bp, Homo sapiens
aattacggctatgggaatgatggctttgatgacagaatgagagatggaagaggatggagatgaagatgaggaagctgagtcagctacgggcaagcgggcagct

SEQ ID NO: 754714 - DNA, 100 bp, Homo sapiens
gagctggacagtgagacagccatgttttctgtctacgatggacatggaggtgtaatcctgagagattcacatggtgttgcacaagtacgttttgtgacag

SEQ ID NO: 754715 - DNA, 150 bp, Homo sapiens
ggacgtagacaagtttggcaacgagatcacccagctggcccggcccctgcctgtggagtatctcatcatagacgtggcaggatcccattttctcactggcgactcccctgcgtgctggtgaagaaggcagccacagtcggaagtcgctgt

SEQ ID NO: 754716 - DNA, 130 bp, Homo sapiens
cgccgccgctcggtgcggctctcggactctgctcctcactcaccgcgtggacacgatcgatcaacaaactccatttatgtaaacccctaattagagcaattgacagctcaaacctgaaagacgattacag

SEQ ID NO: 754717 - DNA, 74 bp, Homo sapiens
ctgaaaaagggagtcaaagggaccaccaaatcccattgaatttctagcatcttatcttttaaaaaacaaggcac

SEQ ID NO: 754718 - DNA, 75 bp, Homo sapiens
gatactaatgaagatgggtttttcagaaactgttcaggttccattatcaaaacgagcaaaatttgttggacctgg

SEQ ID NO: 754719 - DNA, 100 bp, Homo sapiens
gtaaccacatccctctttaaaaattccgccgaaaaagagaagacgctttacccgactctttgggccgttatctcacgtcagatgtaccaacagtaccagc

SEQ ID NO: 754720 - DNA, 101 bp, Homo sapiens
cggcggtagcgcaggggagattacttttctggaagtgctccagctgaggctgcaacaaaggaggacgagagaacaactagtggaccagggcatcatgccac

SEQ ID NO: 754721 - DNA, 94 bp, Homo sapiens
cctggggactctgcctcgtgccgctgagcctggcgcagatcgacaacacttccttcagaaaacgggaaacttccatttgtcacacgtcttggtc

SEQ ID NO: 754722 - DNA, 90 bp, Homo sapiens
gcacggtactggagaacacggatggctttcatgagaaggacaagaagccatattgccgaaaggatttcttagccatgttctcacccaagt

SEQ ID NO: 754723 - DNA, 100 bp, Homo sapiens
gctccagaaattctgcttggtgatgagtatgatgcacctgcagtagatgacgggcgccgggccaccatctcactgagcgacagtgacctgctgcggctgg

SEQ ID NO: 754724 - DNA, 99 bp, Homo sapiens
cttcaagcttaggaccacccaccatgcctatccaggtctccatgtagtggaggtgacatatgatgacgtgcctatcccaaacagtcccttcaaggtggc

SEQ ID NO: 754725 - DNA, 85 bp, Homo sapiens
catcttgatctggagaaaaactggatgttggtagaaaaagcaagagtttgttatatagcagcatcacgttgggtggtttccattt

SEQ ID NO: 754726 - DNA, 83 bp, Homo sapiens
ctaaaagtcaaagcacctccaagtgttcctcgaagggactacgcttcaggttggaagtacaagcagatgtacagaaagaacgg

SEQ ID NO: 754727 - DNA, 100 bp, Homo sapiens
gagcgcctgcgaccccagtcggtgctccggggaggtcacctgacgaggagttttaacagtgtatgccagggaacacacattctctttcgagaattcagct

SEQ ID NO: 754728 - DNA, 75 bp, Homo sapiens
cgcatcacaggccgcgtctttgacggaagattatgataaatatggaattcgaattagagtcaaatttcgaagtag

SEQ ID NO: 754729 - DNA, 114 bp, Homo sapiens
gtggttgcaacggagataaattcccggaaccgcgattcggcgtgtcagttttccaagagataacttcaccaagatgtccagtgataggcaaaggtccgatgatgagagccccag

SEQ ID NO: 754730 - DNA, 100 bp, Homo sapiens
agttttggacaagcctccccaaatgtggcagcttgcagatcagttttgtaatgccattggagtattgcagcaatgtggtcctcctgcctctttcaataat

SEQ ID NO: 754731 - DNA, 75 bp, Homo sapiens
tgccgtcgccgccgccaccatgcccaagagaaagggaggagagagcgatggcttttttcacccagaaggccagcc

SEQ ID NO: 754732 - DNA, 100 bp, Homo sapiens
ggcaggacgtgaaggggaagaggcccaccctggagtaaccctcactggagaatccagagggctccaacaaaagaatcctctgaagaggagtatgactctg

SEQ ID NO: 754733 - DNA, 90 bp, Homo sapiens
cagactgtggcggtttatagtgaggctgacagaaattccatgcatgtagatatggaactaagcgtcttgtagaaggaactattaatccag

SEQ ID NO: 754734 - DNA, 50 bp, Homo sapiens
tctacaggaagactgggatcactttggaattgaatgatctggcacgggac

SEQ ID NO: 754735 - DNA, 89 bp, Homo sapiens
gcaaagattacaccaagatctgtgctgaccacaggaattggatctactagtgcaggttcttcaaaaacagcttgatgatgccaaggagg

SEQ ID NO: 754736 - DNA, 75 bp, Homo sapiens
gttctgccagacccagttgaggagaccagacaccatgcaggttatggaggttttgatgactatggtggctataat

SEQ ID NO: 754737 - DNA, 82 bp, Homo sapiens
actgcctcctgatttctcccaaaaggacttgcatgggtattaggagatgctgaagaactgccctttgatgatgacaagtttg

SEQ ID NO: 754738 - DNA, 98 bp, Homo sapiens
gacttcagagacactgccaagcagccttagccctagtgtagaggcacattgcaagcaacccgtgccttgatggtggttggcatcctcctgggagtgat

SEQ ID NO: 754739 - DNA, 75 bp, Homo sapiens
ggaagcaacaacataatgcccagagttggagccaattaaaccagagttacactgttagaccttatgatagccaag

SEQ ID NO: 754740 - DNA, 50 bp, Homo sapiens
gtcccagggatattctgtgctgaaaatcccgttttgtcaacctaatgaag

SEQ ID NO: 754741 - DNA, 83 bp, Homo sapiens
ctcgttggagcttgaacccattgtcacccctccggaagatgatccctatgatcttgaagatgtttctgcacagaaatgaggga

SEQ ID NO: 754742 - DNA, 82 bp, Homo sapiens
tgccacagaaagtggtggacaagcgtgtgaaggcaaagaagaatgctgctccattcagaagtgaagtctgctttgggaaaga

SEQ ID NO: 754743 - DNA, 51 bp, Homo sapiens
cggagctttcgcagctggagaagaaagtgttgtgaagagcgaagacttttc

SEQ ID NO: 754744 - DNA, 75 bp, Homo sapiens
atcagagtgtggtcgaatgtaaggtagttcctgaaatgactgagatattgaagaaaaaatgaatcaggatcatgc

SEQ ID NO: 754745 - DNA, 75 bp, Homo sapiens
ccagacgtggtcagcaacgcacagctatcttgacccacccttggacagtctcatcgaactcaaggaatcttcagc

SEQ ID NO: 754746 - DNA, 83 bp, Homo sapiens
tttcaacttccggctggattccaagtccgtcgtggagtaagactttgaccccgacgcaggcttcagtgattgccgcggatcag

SEQ ID NO: 754747 - DNA, 51 bp, Homo sapiens
atttacagaaacaaactacatctcaggatggagtctcgctctgttgcccag

SEQ ID NO: 754748 - DNA, 82 bp, Homo sapiens
ctttaatttcctcgaaaacgcctgtaactcggctgaagggatcatagacggtatttctatgtaaacgaacagtcgggcgagt

SEQ ID NO: 754749 - DNA, 100 bp, Homo sapiens
tccccttgtggccccctgtggtgtgacatgtactccctctccggggatcccaccaaggatgacattgatcttgatgccttggctgcagaaatagaaggag

SEQ ID NO: 754750 - DNA, 83 bp, Homo sapiens
cgccaatggggagcagaaggactcggacacagtgcaggcctgagtgttccttccagcatgtcggagggggagtcccagacagt

SEQ ID NO: 754751 - DNA, 85 bp, Homo sapiens
ggcgcggattcgccgaggcaccgaggcactcagaggagagttttgcggcctccaggtggtggatccaatttttcattaggttttg

SEQ ID NO: 754752 - DNA, 96 bp, Homo sapiens
aagagacccggtttctaatccctgctctgtcactaacaagctgcgtgatcttcggttcaaaccttgtactactcagctgatcacaagctgcttgat

SEQ ID NO: 754753 - DNA, 82 bp, Homo sapiens
gtttgtactatcctcggtgctgtggtgcagagctagttcctctccagctcagccgcagtgaagacatttccacctggacacc

SEQ ID NO: 754754 - DNA, 83 bp, Homo sapiens
gtgaagtgctccgccgcccttgcctccagggtaaatgggaagttggtagctctgaaggtgatcaggctgcaggaagaagaagg

SEQ ID NO: 754755 - DNA, 75 bp, Homo sapiens
atgtaaaggccaagatccaggataaggaagggaagaaggagaaagggccaacccctgaagaagcaatacagaaac

SEQ ID NO: 754756 - DNA, 90 bp, Homo sapiens
ctgggacccccaggaggtgaccctgcaggcatccaggctggagaagcagaacagcacacctgagagtgactacgacaacactcccaacga

SEQ ID NO: 754757 - DNA, 90 bp, Homo sapiens
caataatgaaagctcttcagaggaaacccagcgtttgctggcagaaccagttcctggcatcaaagccgaaccagatgagagcaacgcccg

SEQ ID NO: 754758 - DNA, 82 bp, Homo sapiens
ggatttctgcccctccaagcttcctttccaggctacgagttccagggagctctgtcctggtgaccgtgcccgggttatgacg

SEQ ID NO: 754759 - DNA, 74 bp, Homo sapiens
gacgctgctgggtccgctgagcggggcgacccgagggatcatggcccaagttgcaatgtccaccctccccgttg

SEQ ID NO: 754760 - DNA, 50 bp, Homo sapiens
gtggagtgtaggtcatatcgccgcgacattgatgaatgcagaacctcaag

SEQ ID NO: 754761 - DNA, 75 bp, Homo sapiens
caagagccttcattgcatgataccaggttgctccttgagggcaggacagttcttatggctttatccgttgcgtaa

SEQ ID NO: 754762 - DNA, 74 bp, Homo sapiens
gcgactagcaaccaaggaacaagagatgcaagagtgtactgtccctttctagagataggagaagagagagatcg

SEQ ID NO: 754763 - DNA, 101 bp, Homo sapiens
tctactcgcgcatcaggcatgaagaagaatatctatggcaatatcgaggacctgtatgctatgaacactcacctctccaaatgaataatgtaaacgattta

SEQ ID NO: 754764 - DNA, 100 bp, Homo sapiens
atctgatcggcaactcaatggagaattctggtcactcagtgacacacacaactcgggcctccccagcgacagaatgctgtctctgcaatttgagaggagg

SEQ ID NO: 754765 - DNA, 108 bp, Homo sapiens
agaaaagcagaaagccgcctcttggtttgcgtcctgcactgaaaggaaatgacggattttgattttcttactggagtgcaatgtgagagaagtacgagttgctgtggc

SEQ ID NO: 754766 - DNA, 90 bp, Homo sapiens
tgacctgcgggtattggatgattcgtagctaagactctacgacatccctgaagccgggaaatgggtgataaaagaaaatgtggctgaagt

SEQ ID NO: 754767 - DNA, 97 bp, Homo sapiens
cgggagctgggcggccatttaccaggcatccgcatgctggacggcgatgtcacagatgtggtcgaggcaaagtcgctgggcatcagacccaactaca

SEQ ID NO: 754768 - DNA, 82 bp, Homo sapiens
caagggatggcgatggcgtacttggcttggagactggcgcggcgttcgtgtccgagtaagactttgaccccgacgcaggctt

SEQ ID NO: 754769 - DNA, 99 bp, Homo sapiens
ggccgtacattctataatcaggcaattatgtcttctaaaaatattgcacagctgatcttgcatctttaatggataaaacatttgagagaaagttgcctg

SEQ ID NO: 754770 - DNA, 96 bp, Homo sapiens
gccgcagctgcgatggccgtggccgtggggagaccgtctttacagaatgtctgaaggggacagtgtgggagaatccgtccatgggaaaccttcggt

SEQ ID NO: 754771 - DNA, 78 bp, Homo sapiens
gtatgttcacaacctctgcaactctctctccattaaagtcgaggaaaggtaatggtaactcgggatttgaaggacaga

SEQ ID NO: 754772 - DNA, 98 bp, Homo sapiens
ggagaagtaccaggaggcgttggccaaggggaagatcagttttcctgccatccaggctgctccctccttcagcaactcattcccacagatcttccgag

SEQ ID NO: 754773 - DNA, 100 bp, Homo sapiens
agcgttgtggaggggcgggccggacgctgagcggagcagctgcgccacgaaagtggtggagagagagctggatgctcttttggaacagcaaaacaccatt

SEQ ID NO: 754774 - DNA, 50 bp, Homo sapiens
cagcgtgcgttcagccctggggctgctctttggcgtaaattgcaatcgat

SEQ ID NO: 754775 - DNA, 118 bp, Homo sapiens
ccttgctgctgctcaaagctgctgccgccccttgggctaaaagtactatactggcaattgctggagaagattttgcaattgttgcttctgatactcgattgagtgaagggttttcaat

SEQ ID NO: 754776 - DNA, 98 bp, Homo sapiens
cgggctggagcctctggaagaaggagtgatttggagaacaatgcatgtaagtctgacatcatgatgtccatccggcaaagaagagaaataagagccac

SEQ ID NO: 754777 - DNA, 100 bp, Homo sapiens
ccgagatgtctcgctccgtggccttagctgtgctcgcgctactctctctttctggcctggaggctatccagctttgcctgagaatacagatcaacccaca

SEQ ID NO: 754778 - DNA, 101 bp, Homo sapiens
atcagtggggatgagtttgaacttggaaggagaatggcattatctatagaggctgatgcaggagaggagtgtggccatctggggccgtgtggtatttgcca

SEQ ID NO: 754779 - DNA, 83 bp, Homo sapiens
cctgccaatttaccagagataattgataacaccctgtaacagctgagtaactataactacccaatattgcagccatggagtcc

SEQ ID NO: 754780 - DNA, 50 bp, Homo sapiens
cagcacttggccaagctagatgtcaagaattcaattcgtcataatctgtc

SEQ ID NO: 754781 - DNA, 96 bp, Homo sapiens
gcgaatggggctcacgtcgataccaaacgattccctggttatgattctgaaagcaaggaatttaatgcagaagtacatcggaagcacatcatgggc

SEQ ID NO: 754782 - DNA, 87 bp, Homo sapiens
gcctcatctgccccaggcccaactcatgttgacgggcagccagctagctgggtgtctgagcccttcctacctgcccctgcgatgtat

SEQ ID NO: 754783 - DNA, 82 bp, Homo sapiens
tttggggcaccacagagatgcggggactttgaacatgtcggggatcgccctcagcagactcgcccaggagaggaaagcatgg

SEQ ID NO: 754784 - DNA, 83 bp, Homo sapiens
ggcggtccctggctgcgtgcacagcgccttgttccagcagggcctgatccaggacctgaaggagaagaaggagaaggtggagg

SEQ ID NO: 754785 - DNA, 100 bp, Homo sapiens
acacctggatccaggataacggaggctggtgagacggtttaagcggaagcatcttactgccattgactgccagcatttggctcggagtcacttggctgtg

SEQ ID NO: 754786 - DNA, 50 bp, Homo sapiens
cttgaaacacaaatggtttttgtattctaccttgtaaatactgttatttg

SEQ ID NO: 754787 - DNA, 98 bp, Homo sapiens
aaacgcagaaaatacgtggttggagagctcatttggaattttgccgatttcatgactgaacagtatggggtcgaggatttggtcttttgggttccatt

SEQ ID NO: 754788 - DNA, 82 bp, Homo sapiens
aacagcgaggtggacgagaaagtgggccgagaactactggtggcgtggccagaacacacggacgctgtgtgtggggcccttc

SEQ ID NO: 754789 - DNA, 100 bp, Homo sapiens
cccagttccctgcatcctaagactcgaaggcagcacaggacctggaaaaattacatgtggatattccatctattataaccaagaaactattaaaagcagc

SEQ ID NO: 754790 - DNA, 75 bp, Homo sapiens
ccgttggccgcgcggcgccgcgctcggcggccgccattgcagggctggaccccaatggagaacaggtggtgtggc

SEQ ID NO: 754791 - DNA, 49 bp, Homo sapiens
gaagaactcgtgagccggattgatgttgttacaggatcttgcttgttct

SEQ ID NO: 754792 - DNA, 83 bp, Homo sapiens
cgaggaaaaggaatcgtatcgtatgtccgctatccagaacctccactctttcgatttaatccagagactgacttcactataga

SEQ ID NO: 754793 - DNA, 82 bp, Homo sapiens
ctgcatgctgcgttccatgaaggcttcctgtcacttcgtgtcacatcccactcctgtccttcactccctctcagtctatcca

SEQ ID NO: 754794 - DNA, 82 bp, Homo sapiens
cgtcccggcccggccccgggctctgagcgcgccgcggcacaggtgctggagaatctggtaaaagcaccattgtgaagcagat

SEQ ID NO: 754795 - DNA, 132 bp, Homo sapiens
agaaagcatttaaccagcatggctacttcatattttggaaagcagtttttaagacaataacaaatgtggcaattattttggatctatcacctgtcatcataactggcttctgcttgtcatccacacaacacc

SEQ ID NO: 754796 - DNA, 82 bp, Homo sapiens
ggtcaccacgcctgccccagggaaccgcacaggaacagattatcagtctggtcaatcagatctgcggcaaagtgtctggtaa

SEQ ID NO: 754797 - DNA, 75 bp, Homo sapiens
gagcctcagttggaagcagccgatccagcctgcggagcctgtggggcaggtttgctggggctttcactctgcggc

SEQ ID NO: 754798 - DNA, 96 bp, Homo sapiens
caggacatgatgatggcagggatgttaagtgggcagaccaacatccacctcagcaaaaacttcttcctgacgaatcgcgccagggagcgctcagac

SEQ ID NO: 754799 - DNA, 82 bp, Homo sapiens
tacaccaagatctgtgctgaccacaggaattggatctactagtgcagacagttgaatttctgaatgaaaagctggaaaaaag

SEQ ID NO: 754800 - DNA, 97 bp, Homo sapiens
gcctgcctcgcgctagcaggaagctttcagaagaattattagataaatggctctcctacccagagacccagcacgtgcccctcagccagcatatgct

SEQ ID NO: 754801 - DNA, 50 bp, Homo sapiens
agctctccgtgttccggtgtgatggtgaggtctacagctttgggactctt

SEQ ID NO: 754802 - DNA, 99 bp, Homo sapiens
cgcacgtcctcctgaggaagcgggagtggaccatcgggcggagacgaggcgagaaccactgtctctgatcaacgtgcggaagaggaacgtggaatctgg

SEQ ID NO: 754803 - DNA, 100 bp, Homo sapiens
cacagatggaggagagagctgcagacagaggaatgccattttcaattagcatgcgacatgcctttgtgcctttcccagtgcacctatgatatgtgtttta

SEQ ID NO: 754804 - DNA, 100 bp, Homo sapiens
tatttgactttctcctcattgaagctatgcagtatttctttggcatcactgcagctagtaatttgccttctggattggattaatgaaaatcaagttccat

SEQ ID NO: 754805 - DNA, 101 bp, Homo sapiens
gaacctaccacccttcttcagaggctccgaggtaccatttcggtggttctcttcccaaagtggaagccaaattcatcaattatgtgaagaattgcttccgg

SEQ ID NO: 754806 - DNA, 108 bp, Homo sapiens
gaaatgcctggaccctgcccagcagaatttgtatagagatgtgatgttggagaactacagaaacctggtctccctaggctcctgtaaccgccaggcagcggccccgcc

SEQ ID NO: 754807 - DNA, 50 bp, Homo sapiens
aaaaagttgaaagttttgcagttacagtttttcagttatgggacaaaaat

SEQ ID NO: 754808 - DNA, 71 bp, Homo sapiens
cgacttaagttcggattcggcttccaccgcttcttagtgcctttctgaagggcctgagtgacaagcagcgg

SEQ ID NO: 754809 - DNA, 90 bp, Homo sapiens
agcaaagctacttccattccagaaagatggcatcatttttgccctcaaaagaaatggcagggctactacaaagttctgggaaagggaaag

SEQ ID NO: 754810 - DNA, 95 bp, Homo sapiens
ccaacatggcggagctgacggtggaggttcgcggctctaacggggctttctacaagccacataaagaagatccctaatagtcatttctcaacaat

SEQ ID NO: 754811 - DNA, 83 bp, Homo sapiens
ccctaatggaggtctccagtttcggaagcctgagaagggagtccagtacctcatcgagcgtggctttgtgcccgacacgcccg

SEQ ID NO: 754812 - DNA, 50 bp, Homo sapiens
tgggagccgtgctctacctctatccggagccttcacgtaaatgggtccag

SEQ ID NO: 754813 - DNA, 82 bp, Homo sapiens
ggagttggacatcgggcagcactgccaggtgtctgatgatttgtgagcctcaagtgactactctgtggaatcatctgtcctt

SEQ ID NO: 754814 - DNA, 100 bp, Homo sapiens
ggaaagactgtgcagtaattgtcacacagaagaaagtacctaaatgtgcctgtggctgccttgcctgtaactcagcaaatgacagaaatgagcatttcaa

SEQ ID NO: 754815 - DNA, 82 bp, Homo sapiens
cgcagatgcccaccggaatggagaaggaagaggagtcggtgtcgtgaaaactacccctaaaagccaaaatgggaaaggaaaa

SEQ ID NO: 754816 - DNA, 75 bp, Homo sapiens
tgcgccgcgccagctcctactcctccctcaactccctcatcgttcacacaaaagatgttggacaatttctacaat

SEQ ID NO: 754817 - DNA, 87 bp, Homo sapiens
tgggtttcaagagagactactacctaataagggcacagaaaactgaatctgtagataacgagggagaatgaattgtcatgaaaaatt

SEQ ID NO: 754818 - DNA, 83 bp, Homo sapiens
aattatctggcccctggggggctttcaggaagcggggagaggtggtgagagatgacccctgttgaggatttcattggtgtctg

SEQ ID NO: 754819 - DNA, 74 bp, Homo sapiens
tggtgtggaagtagtgacggagaattctcataccctctatgacctggacagggtacggtatatcttgaatgtca

SEQ ID NO: 754820 - DNA, 82 bp, Homo sapiens
gaagcgcctggccggggagtacggccgaggagacctcgtcggcgtgcaaacggggattcagcgtccgatcctttggaacagg

SEQ ID NO: 754821 - DNA, 100 bp, Homo sapiens
ctcctgggagatgctttcctgcacctcattcctcatgctcttgttgcccagaagattgttgccacaaggaagaagcagcagctgtccataggaccctgca

SEQ ID NO: 754822 - DNA, 94 bp, Homo sapiens
cgccggtcctgaccaccgtgaacggacagtcccccccagggaaagcaggcaggatgggagagtcgccgatagaaccacctcttccctgcctcct

SEQ ID NO: 754823 - DNA, 127 bp, Homo sapiens
tttctatgacagaactaaagcgggcaaagttagaccttccagaacctgtgagatggaagattttcgaggtatagcagaagaatcatttccaagctttctcaccaattcattatttggtaacagtggg

SEQ ID NO: 754824 - DNA, 98 bp, Homo sapiens
cgggatcgtgaccgagaccgtgaccgagagcgtgaccgagagcgcgaatatcgtcatcgttagaaggtgcataaggcaaatccaatacgcaagtacca

SEQ ID NO: 754825 - DNA, 100 bp, Homo sapiens
tattcttctgcatcttcattgtgcagattctcgtgctgccaaagtgcttaatttacccatttctgatgcgaggaggaaagcctatgccactgttggcgtg

SEQ ID NO: 754826 - DNA, 95 bp, Homo sapiens
atgggatctttccggatcaatccagatggcagccagtcagtggtggagtttaattggttggggtcagataagaagaggagtgacaatcaagccaa

SEQ ID NO: 754827 - DNA, 124 bp, Homo sapiens
cgccgcccggtccgctgtcgcagcgctcatccgcgccgggagcccttggctgcgtcgcccggcagccgcgggagtaccctgacttctaccggaagctctacggcctcttggacccctctgtctt

SEQ ID NO: 754828 - DNA, 75 bp, Homo sapiens
ttctccgggagccgtccgtgtcaccgccggaacctggcgcagatcgaccttcagaagatgcccttggggaagctg

SEQ ID NO: 754829 - DNA, 100 bp, Homo sapiens
gcagaaaaagaaaacacttcttcatggtatgaggttgactcatttacaccatttcgcaaagactatggaaatgatattagacaaaaagcaacttcaagtg

SEQ ID NO: 754830 - DNA, 100 bp, Homo sapiens
catggagcccatcgtgctgcagtacgtgcctcatgatcgcttcaacaagatggtggatgcttccaaaagcatcgaagctgtccatgaggacatccgcgtg

SEQ ID NO: 754831 - DNA, 101 bp, Homo sapiens
tgctgtgttgagaggcgatgcagaagcagtgaagggcataggatccggcaaagtcctgaagagtttccagaacctgggaatccagtgtgtgaagaagcggg

SEQ ID NO: 754832 - DNA, 74 bp, Homo sapiens
atactggtgatagctgtggtcctgggtaccatgggtactttggaagttcgtcttatgggctgccaagatatcct

SEQ ID NO: 754833 - DNA, 76 bp, Homo sapiens
gacagtttagcagaacagcctccgcggctccggggagaaggtcctgtacatgggattgtcaccaggacctagactg

SEQ ID NO: 754834 - DNA, 100 bp, Homo sapiens
ccggctgtggtttggctgcgggcggcttgggcagcccgcgggcgcctcagggggggccctcagcctcttggccttgaacgggctgttcatcttgattcac

SEQ ID NO: 754835 - DNA, 80 bp, Homo sapiens
attcctccgtggggcgaaagtacccatgggctggacttagatcagatcaattaggtcctaggcctacttacaagcctcca

SEQ ID NO: 754836 - DNA, 100 bp, Homo sapiens
aagtctgtatctttagtaaggatgggaccttgtttgcctggggcaatggagaaaagaaagtggagaatgaggacatgaataaagaccagatcttgctgga

SEQ ID NO: 754837 - DNA, 96 bp, Homo sapiens
catcagtgtgggaagccaagcagatacaatatttgattttcatcaagcagctgatggtatccaggaacaacagagacaagaacaagcaggaaaaaa

SEQ ID NO: 754838 - DNA, 100 bp, Homo sapiens
aaaagctcacctgaggactcacactgttcaatttcaccatttagtattgagagcacaagacgccagagacggtctgaatccccagactccagaaaacggc

SEQ ID NO: 754839 - DNA, 80 bp, Homo sapiens
tggacacactggcagtaatacggactcttgtagataagtctcgctctcgaagcagacattcccgtaagagcagaagccga

SEQ ID NO: 754840 - DNA, 50 bp, Homo sapiens
ctttgcctagaggctatcacacggatctccaaagatgggtaaatggtgct

SEQ ID NO: 754841 - DNA, 90 bp, Homo sapiens
gaaaaacctcaaaatatgatggtggttggacagtcagcatttgcagactttgatgacttcctgctgtacctggaccctcactactgccag

SEQ ID NO: 754842 - DNA, 75 bp, Homo sapiens
cgtgaaggtgatccagagtttgccgaagaatggttgttaaaaaagcagacatgatcaacaaaaatatgactcatc

SEQ ID NO: 754843 - DNA, 100 bp, Homo sapiens
cctgcaccacggggacttctcagcagaggatatcagcattgcttatggggagcacctgatgcaggagcacatgtatgagccagcggggctcatgtttgcc

SEQ ID NO: 754844 - DNA, 85 bp, Homo sapiens
ccaattcaaggcctgccgttggctatagcaaatgccccagatacttggcatatcgaaattttatgattgacacgtatcgtctaaa

SEQ ID NO: 754845 - DNA, 80 bp, Homo sapiens
gtgggactggtttgaatccttccttgatgatgaagagacccaaacctttattgttcaaaggagatcacagatatccctcg

SEQ ID NO: 754846 - DNA, 100 bp, Homo sapiens
caggtacccctgtccctggtccctgggcccagagggtggtatggtcaggaaaaagactacaatgtactagtcatggatcttctgggacctagcctcgaag

SEQ ID NO: 754847 - DNA, 100 bp, Homo sapiens
atccagatggcagccagtcagtggtggagagccaggactgtctccagtttggtcctcctgctgaaggggaagtggtccaagtgagatggacagacggcca

SEQ ID NO: 754848 - DNA, 89 bp, Homo sapiens
tgaagctgtgcaccgaggtccgtgtggccaacgagctcaacgccaggcgccgctcctttacaggcacgttgcccctggcctcgcaggag

SEQ ID NO: 754849 - DNA, 100 bp, Homo sapiens
agcaggactcggggcacttggggagttcccattagacttgaagttgggccacgtgatatgaagagctgtcagtttgtagccgtcagacgagatactggag

SEQ ID NO: 754850 - DNA, 90 bp, Homo sapiens
gatctggacttcggagcacgtctttgaggactgctgagatgtcctctattcttgaagagcgtattcttggagctgatacctctgttgatc

SEQ ID NO: 754851 - DNA, 100 bp, Homo sapiens
ggtttgctgcatactatgttgccacagggtcatcacactgaaacggtgttcaaccgggttttgccagggcctattgcaccagagagcagcaagaagcggg

SEQ ID NO: 754852 - DNA, 100 bp, Homo sapiens
tccacaaattcgtcattggccacttaaaggtaacaaccagatggcttcactgaaacctgcttttgtaaattacttttttttactgttgctggaagtgtcc

SEQ ID NO: 754853 - DNA, 96 bp, Homo sapiens
gggatatgagtgaagaaaacacagagccaccctggaaaggaccaagaatcgccttcagccctgtctggtgcatccttggcagaaagtgaggaggaa

SEQ ID NO: 754854 - DNA, 100 bp, Homo sapiens
tagccgctactttgtaatccggatccaggatggtactggtttgggccccatggtatccctgtgacagtatttcccaaaagggaatataaggataaaccag

SEQ ID NO: 754855 - DNA, 48 bp, Homo sapiens
gaaatctgttgcttcttgcatgggaattgaatgatctggcacgggacc

SEQ ID NO: 754856 - DNA, 100 bp, Homo sapiens
tttcctgaggcctccccagccacgctttctgtacagcctgcagaactattgcctcggtctggcatggtaccctctcgaagctgctgggaagcctgtatgc

SEQ ID NO: 754857 - DNA, 75 bp, Homo sapiens
ctggagcaattgaagctgactactaaggagaataaggtcacatatcctggagcaggaaaacttccacacatcatt

SEQ ID NO: 754858 - DNA, 73 bp, Homo sapiens
ggcggctcgggacggaggacgcgctagtgtctgccatcatggatgttctcgcagaagcaaatggcacctttgc

SEQ ID NO: 754859 - DNA, 133 bp, Homo sapiens
ttcatgtgtctcttctaagctgaataaagctgttttggaactgtcaggtacctcaaagctgaactgcttgaagtggaccacatcagaacaatatatcacatgtttattgccctcctcattctctttatcctca

SEQ ID NO: 754860 - DNA, 83 bp, Homo sapiens
tcgtatgtccgctatccagaacctccactctttcgattgttaaaggaaatgggctggcaggaagacagtgaaaatgatgaaac

SEQ ID NO: 754861 - DNA, 51 bp, Homo sapiens
gcaggcacagccttttacattgatcagaccagtattaaagagggacagcta

SEQ ID NO: 754862 - DNA, 100 bp, Homo sapiens
tcacttttgagtgcaactgccttccagtttcttatctcagtcatcactatggtgcttctgacgttgatgactgtcacactggatcctcctcagaaactac

SEQ ID NO: 754863 - DNA, 75 bp, Homo sapiens
tgtacctcaggtgaagttttatgaagaggaactttatattgctgttggaatatctggagccatccaacatttagc

SEQ ID NO: 754864 - DNA, 98 bp, Homo sapiens
gctttcaaagtcatgaacgaattaagaagagatttaccgcattgtttctcagaagcaaatgtcagacagacgcgaaaatgacatgtctccaagcaaca

SEQ ID NO: 754865 - DNA, 75 bp, Homo sapiens
gagttgcttcacttagctctacaatcaacccatgtgtgatctcggaagctgaaaaggcaaaacagaagatagctc

SEQ ID NO: 754866 - DNA, 75 bp, Homo sapiens
ctgggactaccgggctgtcaaatttacattaactatgagaattaagcagaagtccattggaatattaagcccagg

SEQ ID NO: 754867 - DNA, 50 bp, Homo sapiens
acctagaagactatctggaaaaactgctttctccaggggttaaaaataag

SEQ ID NO: 754868 - DNA, 74 bp, Homo sapiens
gaacttagcagcagctccactgaacagataaggtgtacccgtgtaatgtggacaccacctctccgtgaaagctt

SEQ ID NO: 754869 - DNA, 90 bp, Homo sapiens
tcagagcaacaaccagcagcttcgggatttagggattctctccgttcagattgaagggtgttcctgaaaagaaggtacttccaatcaccg

SEQ ID NO: 754870 - DNA, 51 bp, Homo sapiens
tggatctgaagtacaaaatattttccaggctgcttctgatgcttggaagat

SEQ ID NO: 754871 - DNA, 75 bp, Homo sapiens
ctcgacaacatgtcacccgcgctccaagacctgtcgcaacccgaacacagatatgtagaactcttcttgaattct

SEQ ID NO: 754872 - DNA, 97 bp, Homo sapiens
aggcagaaggaatgtggggcctccccagacttctcggcctttgccttaggtggagctggagacctggtctctctagggcctaccctgagctcaccat

SEQ ID NO: 754873 - DNA, 53 bp, Homo sapiens
ggtgaaggaggcgaattttcagttgatagattactgacagccctgtcctagga

SEQ ID NO: 754874 - DNA, 74 bp, Homo sapiens
gtggatgaggcccaggctgatgggaaggagcacccaggagctgaagtgaaacaaagagtcctcttcgtggaaaa

SEQ ID NO: 754875 - DNA, 51 bp, Homo sapiens
ttttggaaagcagtttttaagacaaattaccaaagttccagagaacctgct

SEQ ID NO: 754876 - DNA, 137 bp, Homo sapiens
gaaaatccagcagtatgacaaggcactggatgatgcaatcaaagctcgacttctcaatcccaagtggccaaaggttctcctgcgctgcccaacagcatggtgtattttggaagctctcaggatgaggaggaagtcga

SEQ ID NO: 754877 - DNA, 50 bp, Homo sapiens
ggtgcaaagggatgtgcccaagtcagcagaagctgctgaacaattgggaa

SEQ ID NO: 754878 - DNA, 89 bp, Homo sapiens
taaaggtgctaagaaagagaatgtaagacaggaaaataattaaatattcttaccgagagagaagtggagatcctgatgtttctcagtgc

SEQ ID NO: 754879 - DNA, 75 bp, Homo sapiens
ctatgaagatcctaattgtgagattggcctgattgcaggacttcaactaaccaactaaagaactgttccccagag

SEQ ID NO: 754880 - DNA, 103 bp, Homo sapiens
tgcccaggctcgcctcgactccaaatggttgaaaacagatatacaggccataggaaaaggatacagagtagagtttcatgaacctgaaacttggtggaaattt

SEQ ID NO: 754881 - DNA, 75 bp, Homo sapiens
ttatccaattgatgaactagtagatagagccaaacaatcttttcaagggaccagttactctccacaagaaaattc

SEQ ID NO: 754882 - DNA, 76 bp, Homo sapiens
gcaatgttcaaagtactcaagatgaatttgagcatttgacattgtgcagcaaagaaatggttatggagaagcccag

SEQ ID NO: 754883 - DNA, 100 bp, Homo sapiens
cctgcctcggtggcctcttccagtagcacaccttcctccaagaccaaagaccttggtcattttgcagatgctgaaggttactttgctgcttgcacaacag

SEQ ID NO: 754884 - DNA, 93 bp, Homo sapiens
taaaaggacagatgcaaatgaaagctcttcttcccctgaaatcaggaaattcagttcatgaagataagaagtttcttgacaaatacatgcccc

SEQ ID NO: 754885 - DNA, 82 bp, Homo sapiens
gggaacctcaacaccctgagcagcctccacccaatgggaggctctttgtcccttaagagatgtgccttctcacagtaaccat

SEQ ID NO: 754886 - DNA, 100 bp, Homo sapiens
gctggacaagaccaacaaattcatcaaggagctcatcaaggacgggaagtcactcataagcgcgctcaagactgacattatctctacggtagaattcaac

SEQ ID NO: 754887 - DNA, 82 bp, Homo sapiens
tccctgcaggtccttcccacagaagacattcctaaggacggtctgaagagccaagagctatttgatgaaattagaatgacct

SEQ ID NO: 754888 - DNA, 49 bp, Homo sapiens
caaccagcaggccatggaccaacttcatacggctgatcctctcaagcag

SEQ ID NO: 754889 - DNA, 75 bp, Homo sapiens
ggggctaatgccacaagtgatatgttctattttgcagttgaagatggtggttgttatggagttgatggagagagt

SEQ ID NO: 754890 - DNA, 96 bp, Homo sapiens
tgttgcccaaaactacagttctgtcactcacttacacagtattgggaaatctgtgaaagacaaaactgtgtggagttttatcctatattcataatt

SEQ ID NO: 754891 - DNA, 75 bp, Homo sapiens
cgggtcctcaagcagcacgtgggtgaaagaaacttccacgccttctaccaaggctgtgcctgcgcccagaagcag

SEQ ID NO: 754892 - DNA, 75 bp, Homo sapiens
aagagattccaaccttccagccccttttgaaaggtgggtttgctgagttctctcgttgtttccctggcctctgtg

SEQ ID NO: 754893 - DNA, 101 bp, Homo sapiens
gtagaagaagatgaatacaaagctttctacaaatcattttcaaagctctgctatgttatgccatcatccagtgcaagatgtgctcagtttcctcgagccca

SEQ ID NO: 754894 - DNA, 100 bp, Homo sapiens
ggccagcaaaacactcagctgcaagtccaaagccacaaggtgcaattgctggtatagttgatcagccgatgcagaacttccagaaaacatctgaggcaca

SEQ ID NO: 754895 - DNA, 75 bp, Homo sapiens
attcagatcatccaagtggaggttcctacagagattcatatgagagttatgctgccactgcagagccccgccatg

SEQ ID NO: 754896 - DNA, 121 bp, Homo sapiens
ccagcaactaccccagtgccggggagggttctgctgcttcgaaagctgatcagcctctgtggactcggtgcttctcctggcaagtaaaccccaaggaggactgaccagttcttgaatttct

SEQ ID NO: 754897 - DNA, 100 bp, Homo sapiens
attatgcactgctgttctagagcagggatcagcaaacttgctgtaaagagccaggtgaccattgtgaggtagatattttgttctaattttccagatgagg

SEQ ID NO: 754898 - DNA, 100 bp, Homo sapiens
cgagacgcccattctgcccccggccccgcgcggaggggcgggggaggcgccgggaagtcgacggcgccggcggctcctgtgccacatgcttgttggagag

SEQ ID NO: 754899 - DNA, 90 bp, Homo sapiens
ccaagacctcatcaacaattaaggagtgtgaggaagaggctgtctgtgtcattatgtgtgcgtcggtcaagtataatatccggggtcctg

SEQ ID NO: 754900 - DNA, 83 bp, Homo sapiens
accccctggaaatgggagagctcagaattcaggtttctcagtttgggtgcagatcatttgctttgctttttgatgatatagac

SEQ ID NO: 754901 - DNA, 95 bp, Homo sapiens
gccagttcgttggatggctcttgaaagtctggttaataacgagttctctagcgctagtgatgtgggctgccaggcgcccagctgtgcccagatgg

SEQ ID NO: 754902 - DNA, 100 bp, Homo sapiens
gggaggtggaggagctgagaagcagcctgcgagggcttgcgggggagattgttggggaggtccggggcactgccactgtggggggcatggccatcctcca

SEQ ID NO: 754903 - DNA, 90 bp, Homo sapiens
aattgagcaagggagtgatgccggttatctctgtgaatctcagatgctattaacattctgaaggagatgaaagagaaggatgttcttatc

SEQ ID NO: 754904 - DNA, 100 bp, Homo sapiens
cggagtgggaagtacatgtgtcgtatcatagttcattttatgtgggaggatgttcagcagcgcggcagagtcatggggcaatgttcacagcatctttacc

SEQ ID NO: 754905 - DNA, 100 bp, Homo sapiens
gtagaagcttccactccctcctgcccagatccggccaaggacctcagcagatctattaatgagatgaagcggttggaagaaatgtcaaatatgtttcaga

SEQ ID NO: 754906 - DNA, 100 bp, Homo sapiens
cagaaattctggaacacctatatggctgttcggctcttgaatcccagcgatgaaaccaggaactcactttcccgggatgccgagtctccattcctccatt

SEQ ID NO: 754907 - DNA, 96 bp, Homo sapiens
agagacagatcaaagcagctcactcctgaaacagactactctttgcctttttgctgcagttggagaagaaactgaatttgaaaaatgtctgttatg

SEQ ID NO: 754908 - DNA, 50 bp, Homo sapiens
attgtcgctcggcggcgggagtcggatttgtactgtgttcgcagtgacct

SEQ ID NO: 754909 - DNA, 90 bp, Homo sapiens
actgtgccgtggagggcctcgccatgtcctgctgcccgatctgttacctaaagcaataaaaaatggccagaggatcagtgtccgatgagg

SEQ ID NO: 754910 - DNA, 101 bp, Homo sapiens
cgaaccgcagtatcatgctggccaagaagatcatcattaaggacggaggcacgggcgtgatggtgggcatgggtcagaaggattcctatgtgggcgacgag

SEQ ID NO: 754911 - DNA, 51 bp, Homo sapiens
atgctcttgtgctcagtgacatcattcagggagaccagtgtaaatttgatc

SEQ ID NO: 754912 - DNA, 100 bp, Homo sapiens
aaatgaaaccagcagacagaatttgtcaggaggaatgccagctcctgagcaggcctcattggtggaggaggggcaaccacagacccgccaggaagctgcc

SEQ ID NO: 754913 - DNA, 50 bp, Homo sapiens
tggagattggtcccctttagagacgtgaatggctatgtggtgaacctttt

SEQ ID NO: 754914 - DNA, 82 bp, Homo sapiens
ctccacatcgccttttgccacctttccctttatttccggagagtgaagacatttccacctggacacctgaccatgtgcctgc

SEQ ID NO: 754915 - DNA, 100 bp, Homo sapiens
accatattaatgcagatgaggcgttctttggctgaagccgacgtagcttctctgaacagacgcatccagctggttgaggaagagttggatcgtgcccagg

SEQ ID NO: 754916 - DNA, 83 bp, Homo sapiens
cgtggggctcggccgcgcggactgaaggagactgaaggattggccatttgatgatggagctccaccccctaatcagatagtag

SEQ ID NO: 754917 - DNA, 89 bp, Homo sapiens
cctcactgcagaggtgctggagctggcaggttcgagaacttgtcttggacaattgcaaatcaaatgatggaaaaattgagggcttaaca

SEQ ID NO: 754918 - DNA, 75 bp, Homo sapiens
aaggattccaagtaactcttatttggctcgtttctggcgctggagacatcaaacttactaaagacggcaatgtgc

SEQ ID NO: 754919 - DNA, 75 bp, Homo sapiens
gctgattctggggctggtcaggaaaccaaggctttaccgccagcacctgttcagaatcacacaaataagcatcag

SEQ ID NO: 754920 - DNA, 80 bp, Homo sapiens
gcatgctgtgtcttggggccctttgggacgagtgctgtgactgtgttgatggagaacatcattgcaacagtaagagattc

SEQ ID NO: 754921 - DNA, 88 bp, Homo sapiens
aagtagcacgatttaatctgatgcagcggccctgggagagcctcagctctgctatatcctggatgccatcctgtttctgtatggaatt

SEQ ID NO: 754922 - DNA, 86 bp, Homo sapiens
gagcgacaagccgctggcagccgcggatctcaccgccgctcagggtgagaattatgaagatgatgacctagtaaattctgatgagg

SEQ ID NO: 754923 - DNA, 50 bp, Homo sapiens
aagaaattgttcagttcttctcagtggaaattgatgacttgaaaaaaatt

SEQ ID NO: 754924 - DNA, 87 bp, Homo sapiens
tcccggcgaaagtgagcgaggtttgcccggagcgcgcacgaggtctctgtgccttgcggagaatcctgaaaaaacagcctaacctcc

SEQ ID NO: 754925 - DNA, 90 bp, Homo sapiens
gcttccccatggggctggcctgcggcgcctgggcgctctgagatgtccgtaggagaattgaacttattcaggactttgaaatgcctactg

SEQ ID NO: 754926 - DNA, 75 bp, Homo sapiens
gctgcacattaggttgcagtatgtggccagttatttgcctcagtaaaagaacattccactgcccttctcccaaaa

SEQ ID NO: 754927 - DNA, 75 bp, Homo sapiens
cggcgagtggtgtgagagggcagcacgcgctgtgggtagtagattccatggatgcattagataaagttgtccagg

SEQ ID NO: 754928 - DNA, 96 bp, Homo sapiens
gcgaggagcgcggagccggagctggacgccgccgccgccaccgccacctgcgcggcagtcatcaagcgtcgttttccagggagtatggaaggtttt

SEQ ID NO: 754929 - DNA, 106 bp, Homo sapiens
gccttagctgtgctcgcgctactctctctttctggcctggaggctatccagcgccgactcgcgggccgctgcacccaccgccaaggacaaaaggagcccagcgcta

SEQ ID NO: 754930 - DNA, 74 bp, Homo sapiens
tgcgatggcggcggaagaggaggctgcggcgggaggtctcttaaccttcattaactgtgcctatgtcaaatggg

SEQ ID NO: 754931 - DNA, 82 bp, Homo sapiens
cctgaggcggcggcgggggtggctccgcgcgcggtggtctcgggttcagaatgaccgaagaagcatgccgaacacggagtca

SEQ ID NO: 754932 - DNA, 82 bp, Homo sapiens
aaacttcaaagagccggatcgcaggctccctgcctactcccccaccggggatttcaggagaagatggggagccccgaggatg

SEQ ID NO: 754933 - DNA, 100 bp, Homo sapiens
tccaaacattattgctatgggatttcctgcagaaagacttgaaggcgtatacaggaacaatattgatgatgtagtaagaatatcaacacctttgagaaca

SEQ ID NO: 754934 - DNA, 100 bp, Homo sapiens
ctatgaggctcggcggctggctaaggaggtgttggggatgtcctttgcactgaccctgaactgccagattgacaaaaccagccagaccatagggctatga

SEQ ID NO: 754935 - DNA, 100 bp, Homo sapiens
acatggtgaaccactgcaacagtaatgtgtttgttcgtctgctgagactcggctccaaggtcacagctcgtaacactggatctagtgaaaagccatttga

SEQ ID NO: 754936 - DNA, 83 bp, Homo sapiens
agtgcccagaccaaggaaaaatccaagtgatggagcagcattttcagatataagagttcggaccgcccagcacacaaggtcag

SEQ ID NO: 754937 - DNA, 71 bp, Homo sapiens
agtaggaggcaggtctccgcggattattgcatcgagcttttagtgtcttcttattcaacaccgaaaataag

SEQ ID NO: 754938 - DNA, 75 bp, Homo sapiens
gggtagggtcgcgctcgcccgggcggcagagtaatacaagaaacccgattaaaacagatttatacagcagaagaa

SEQ ID NO: 754939 - DNA, 98 bp, Homo sapiens
tctgtcttcggtggactccttcggcagtccacccaccgccgccgcctcccaggttaatttggagtggcccctggagtcagtttcctacaccatccgag

SEQ ID NO: 754940 - DNA, 100 bp, Homo sapiens
ttcgggagaggatatgtagcgaggaggaacgcgctaaggcaaagcacctgagaatggatcttggagaatgtctgaaagtccatgacctggctttaagagc

SEQ ID NO: 754941 - DNA, 98 bp, Homo sapiens
gaacaatcacgacagcgtactacagaggagccatgcacccccccaggcagcagcagcagttttcatctctggatgacaagccccagttcccaggggcc

SEQ ID NO: 754942 - DNA, 83 bp, Homo sapiens
gggacttcaagacggccgagagccactgcggtctcttgcctgctgtgtactgcttttactgccagaaatgttctcctcacctg

SEQ ID NO: 754943 - DNA, 75 bp, Homo sapiens
gggcccttgatttgttttctgataacgccccacctcctgagctgcttgagacagccagctaaaggtgtggatgag

SEQ ID NO: 754944 - DNA, 98 bp, Homo sapiens
ggagctgtccacacagtcatctttgctggcttcagtgcagagtccttggctgggaggatcaatgatggtgtcatggagaaactccagctgggcccaga

SEQ ID NO: 754945 - DNA, 90 bp, Homo sapiens
gtactacagccagtcttctatgtttccacatcggtcagaaaaagataaacatgggctgaggcttcatcttcgaaacccctactccttcac

SEQ ID NO: 754946 - DNA, 75 bp, Homo sapiens
actcttctgacctccgcgcgacgtacccgccgccgccgttggctggagtgtcggagatgtatgcagtgtgacgcc

SEQ ID NO: 754947 - DNA, 98 bp, Homo sapiens
tgccattccaggcacttctgcgtctgccagcccatctgctccatgcccagcttcggaaccaaaaagaagcttcccagagccggggccaggagccccaa

SEQ ID NO: 754948 - DNA, 87 bp, Homo sapiens
aggctgagtgctaaactgtgtggggcgcggatgggatccagctgttagtcggccctccagaatacccatcatatagcccctgaggtg

SEQ ID NO: 754949 - DNA, 97 bp, Homo sapiens
gattatgatggcaataatttgcttgatggcttagaactctccacagccatcactcatgtccataaggaggttggcaaaagcagcttttgatgatgca

SEQ ID NO: 754950 - DNA, 50 bp, Homo sapiens
gtgccctaaacacactatgaccggctgaccccgcactacatctacccacc

SEQ ID NO: 754951 - DNA, 100 bp, Homo sapiens
agacatgtctgagactcctgctcagtgtagcattaagggggatatgagactttctactcggaatatcctgagtgttgcgtggatgtaaaacccatttcac

SEQ ID NO: 754952 - DNA, 90 bp, Homo sapiens
gccgggggagcccagcccagccagcctccagttacagaatgtctgaaggggacagtgtgggagaatccgtccatgggaaaccttcggtgg

SEQ ID NO: 754953 - DNA, 96 bp, Homo sapiens
gacaatttggaggtggcaaacagcttcgcagtcactaatgcttgtatagtagttgaagattgtttgattttgctccaaaacttattaaaaaacaac

SEQ ID NO: 754954 - DNA, 75 bp, Homo sapiens
gaggaggacaaagagcccctcatcgagctcttcgtcaaggcctgggcagtttttaaagggaagtttaaagaaggg

SEQ ID NO: 754955 - DNA, 75 bp, Homo sapiens
ctccatatttactggacagagtgctgtgctttccttaaagtttcccatgtctcaatggactcctgaatataacga

SEQ ID NO: 754956 - DNA, 87 bp, Homo sapiens
ggatctctggtgagacatttttcttccttctgtcacatcacacccaatgttcttctcaccactaaatccaatacgagttcatattga

SEQ ID NO: 754957 - DNA, 75 bp, Homo sapiens
ccctcaagtcgacaggggatgggaccctaggaaggcgtggaagtgcgagtggccagaatcttcaacacctttggg

SEQ ID NO: 754958 - DNA, 100 bp, Homo sapiens
aggaaccgtagagatggcttctgccggaaaaggaggacagaaataattcagtggcatctcatgtagatgtaccactttcttattgcaactcagagtgcaa

SEQ ID NO: 754959 - DNA, 100 bp, Homo sapiens
caggacacggcctacaacaccaagaggactttccttatcccagttgattgtgcagaatacactgcctgtcgcttgtcttctattcaccatggcttcttct

SEQ ID NO: 754960 - DNA, 100 bp, Homo sapiens
gcactacaaggagaaaaacgatattatagtgatcctcgatttctcaatctctggcttaaattatacaaaattggacagctgtacatgatcagcaaacaca

SEQ ID NO: 754961 - DNA, 90 bp, Homo sapiens
ctggggttgatctatttggaactacagatgcagtggtgaagcatgtactagagatggagatacacgtgaattagagcgaacaaaacaata

SEQ ID NO: 754962 - DNA, 51 bp, Homo sapiens
ttccatgtcaacatagtcctggagttggtggtgaccccgcccagttggccc

SEQ ID NO: 754963 - DNA, 75 bp, Homo sapiens
agccttcaaaagcagtgcaactggctcagtattcacagggaaagctgtgaggttctctcctgcgctatggtggaa

SEQ ID NO: 754964 - DNA, 98 bp, Homo sapiens
tgcaacagatcgcttcttcaaatgctggcacaacgcccagagctcgatgaggctttccttaaagtttcccatgtctcaatggactcctgaatataacg

SEQ ID NO: 754965 - DNA, 75 bp, Homo sapiens
gtgctgtaaccacctcacagattccagcttcggaacaagagaccctgggatctgaaacttgcccacccttcggga

SEQ ID NO: 754966 - DNA, 75 bp, Homo sapiens
gtcggcgccgcggccgctgcggacggacgctcgcctgccggctgaggccatttcataattctgaatcatgtctga

SEQ ID NO: 754967 - DNA, 90 bp, Homo sapiens
ggatgaataaaattggactcagagtttccattgacactgatatgatactagagtaaaaggatggtttcttctggacaattatatacccac

SEQ ID NO: 754968 - DNA, 74 bp, Homo sapiens
gcacgtgaccaagcgggccatcagcacccccgagagagctgctctcgtttgaggatgtggcgatgtacttcacc

SEQ ID NO: 754969 - DNA, 100 bp, Homo sapiens
cgaagagcagcaaaaaagactgcaggcgatcataaagaaaatcgacttggactcagatggctttctcactgaaagagcatctttccttgaagaagtacat

SEQ ID NO: 754970 - DNA, 82 bp, Homo sapiens
agcgaactgaagaggttctacacaattggtgatgttggaccaaatggacaacctggaccaatgggacctcctgggctgccag

SEQ ID NO: 754971 - DNA, 96 bp, Homo sapiens
tttttcgttgctcacagctatggaggacttgcttttgttgaactggtgtggcagaaaaaacacagcttctgaaattgaatgtacctgctaccttta

SEQ ID NO: 754972 - DNA, 99 bp, Homo sapiens
agcgggacccggcgaagacgcgaccgcggcgcgagtcaccatggttgtccttctattcaggccactcttcgttttccatgtactgcatgctgtttgtgg

SEQ ID NO: 754973 - DNA, 100 bp, Homo sapiens
cgttaagggactcaggcagtacgggaagaacttcttcagaattagaaaggagctgcttcccaataaggaaacagaagacctccgtgtggatggccgtggc

SEQ ID NO: 754974 - DNA, 100 bp, Homo sapiens
agaagcaagaaggccctggacacagcaatatctctgggctttcacaggatctagtgaaaagccatttgatgtatgcggtcagagaagaagtggaggtcct

SEQ ID NO: 754975 - DNA, 119 bp, Homo sapiens
ggagaagaggattggaggtgtcagtgttaaaggaacctctacaacgaaggtgaagccacggaagataaggaaagatgaatgggagggctgattttcgagagccgaatgcagaggttcca

SEQ ID NO: 754976 - DNA, 75 bp, Homo sapiens
agcggttccatcctacacttgggtggtatcacggaaaacttgacagaacgatagcagaagaacgcctcaggcagg

SEQ ID NO: 754977 - DNA, 89 bp, Homo sapiens
tcgaagtgcgcaaacttgacactcaccctgaccggttgatgaccaaatgaagctgcttcagaactgctggagtgagctcttaatcctcg

SEQ ID NO: 754978 - DNA, 74 bp, Homo sapiens
gcgggagatgagggaagatgagaagcccctggtgctggagatgctgaaggtaatggcacaattgacttccctga

SEQ ID NO: 754979 - DNA, 75 bp, Homo sapiens
ccccccgattcaccaacgagccctaagagacaagagagacacctccaacttcgacaaagagttcaccagacagcc

SEQ ID NO: 754980 - DNA, 100 bp, Homo sapiens
acatgaatacatttcccaccttcaaatttgaagttggagaatattggcaactttattaaagctattcaggcttatggtatgaagccacatgacatattcg

SEQ ID NO: 754981 - DNA, 145 bp, Homo sapiens
gaggaggagggaaggaggatgatgatgaggaagggaggatgatggtgaggcaggagaggaggacgaagaggtgaatgaaaactttgccattgatttgatagcagagcagcccgtgagcgaggtggagactcgggtgatagcgtgc

SEQ ID NO: 754982 - DNA, 96 bp, Homo sapiens
gcgcccggagcaagcggagctcccccaagagccggaaaggctggcagtgatggtgaaagcataggaaactgccccttttcccagaggctcttcatg

SEQ ID NO: 754983 - DNA, 99 bp, Homo sapiens
ctatatttggctcctggttcttcttcttcacaagcacagatttgcctgaagacctggataatctccatttttgtcatggactgttaaaacgtttgaagt

SEQ ID NO: 754984 - DNA, 96 bp, Homo sapiens
ctcccgtttctggctccgggctgagcttcctggagaagaggaaggaaagtctctgtacgtgaagaggttgcacgacaaaatgaagatgcagttaaa

SEQ ID NO: 754985 - DNA, 125 bp, Homo sapiens
tttgttggggagaagaggattggaggtgtcagtgttaaaggaacctctacaacgaaggtgaagccacggaagataagcttgccttgcgccatggactggcagccagacgagcagggcctgcagca

SEQ ID NO: 754986 - DNA, 99 bp, Homo sapiens
tgagcacttggtggcgtctgatgctgaactggatgctaaacttgagattcaagatggaaaaggtgatgtaaccattacaaatgatggtgctaccattct

SEQ ID NO: 754987 - DNA, 97 bp, Homo sapiens
gttaagtcccccaaagatgagatttacctgtgagatgtttcatcccaacagtgatgatcctgcaggaagtgcaggagagacccccgggtggctttcg

SEQ ID NO: 754988 - DNA, 96 bp, Homo sapiens
ccgccgtctgctgttacctcttcagctgcagctactggaggttctgttctcaatgttgctgccctgttggcatcaggaacacaagtaacacctcag

SEQ ID NO: 754989 - DNA, 90 bp, Homo sapiens
taagagcctcgccaagctcaagaacaagcatgaggcaatgatcactgacttggaagattctcaggggctgctagattcatccctgatggc

SEQ ID NO: 754990 - DNA, 101 bp, Homo sapiens
gacagcgatgctgaggatcgaggaacgttgtctggtcaccgacgatgagggcgcacctgctgtcctggagcttccgatctctgttcggggaccctgtgagc

SEQ ID NO: 754991 - DNA, 100 bp, Homo sapiens
atctggacagctgtccctccactacagaaacctcacagaacacagcaaagactccaaccgggaagactttgacccagcacctgtaaagagcaaatttgat

SEQ ID NO: 754992 - DNA, 87 bp, Homo sapiens
gtggcttacagacgctgccagcatcgccgccgccagcacagacgcagtcttcagcaaggaagtgctgggaacgccctggagtgaacc

SEQ ID NO: 754993 - DNA, 100 bp, Homo sapiens
cgccctggatcttcacccaggaggccccggaggaggggaccgggggcttcgtctcggcagacacctgagggtgagttccttccccttgaccaacttgaac

SEQ ID NO: 754994 - DNA, 101 bp, Homo sapiens
acccggatttccagccagagctgagcggcgcgggctccagactcgccgtggtcaagttcaccatgagaggggagattcggctgattcttttttcattgtag

SEQ ID NO: 754995 - DNA, 100 bp, Homo sapiens
gagtgaggagccagacgacaagcacacactatggcgctgaaacggattaataagttcgatcctttggtacagaagacagaccgacagatcgtccaatacc

SEQ ID NO: 754996 - DNA, 98 bp, Homo sapiens
gaaatcacagcttcagatcactggcagtgctttcctcagtgctatttttcttgccttagcgacataccagtctctgtacccactcaccttgtttgtcc

SEQ ID NO: 754997 - DNA, 75 bp, Homo sapiens
ctgcgcagggccaagttcaagtttcctggccgccagaagccaatggagatcttcgtggatgatgagacgaagttg

SEQ ID NO: 754998 - DNA, 90 bp, Homo sapiens
ttacacacagcaagttcctgcttctgggacagctctactgacgacttaattcagtgcacaaatgagatgaatgtgaacatcccacagttg

SEQ ID NO: 754999 - DNA, 98 bp, Homo sapiens
cagcccgcagagagttaacttctgtttacatggaactcagacatctgcaaatcatggcattgggatcccgtggcagttgcagcactgaagtggagaag

SEQ ID NO: 755000 - DNA, 73 bp, Homo sapiens
gtgcctgccacagaggaggaggccgaggtggatgagtttcccaccgatgggatgggctatctgaagaggaacg

SEQ ID NO: 755001 - DNA, 100 bp, Homo sapiens
cggcggccaagcagccaaccatgctcaacttcggtgcctctctccagcagactgcggtgtaggtaagagctttggctgagatggagaaattcatcgcggg

SEQ ID NO: 755002 - DNA, 50 bp, Homo sapiens
gaggaacagggcaatagtatgatggaatggaagttggatacactttgtga

SEQ ID NO: 755003 - DNA, 75 bp, Homo sapiens
cacagctaagacaccgggacctcctggaagccaaaaatgcctttctgagaaaagtctacagcattctttctctgc

SEQ ID NO: 755004 - DNA, 75 bp, Homo sapiens
gcgccgccaccgtctgaactaggatgtcccgacatgaagacatctgaagagctgccatgtctggggcatcttcct

SEQ ID NO: 755005 - DNA, 83 bp, Homo sapiens
gtgtggactcgcatcttgcccgaagccgggcggaggagagctcaagctaagacagttttaatggaccagtctcgcttccacga

SEQ ID NO: 755006 - DNA, 85 bp, Homo sapiens
tttgcagaaggatgaaaaggctttattgccaaactattgtaaaccatggctgtgtggatacaagctcagcagctccaaggagaag

SEQ ID NO: 755007 - DNA, 75 bp, Homo sapiens
ggaagccttcgtctcccagattgcagtttcttggcagtacagaagtggaacagccaaaaggaacagaagttgtga

SEQ ID NO: 755008 - DNA, 101 bp, Homo sapiens
cagtactctatatgaacaatccgtctggatcacggatgtaggaagtgtccagatgtcagagcattccttcaaatggacagtccaaaacaccagtcagatcc

SEQ ID NO: 755009 - DNA, 96 bp, Homo sapiens
ctagcggcggcgggagcggcgccgagaggccgtgcgggacgcgggcgccaggaccggccgaacgcagaggttgatctttgctgggaaacagctgga

SEQ ID NO: 755010 - DNA, 82 bp, Homo sapiens
gagaactccatcctgcgggatgccttgaaccaggccacgagccaggtggagagcaacagcccctgtcaaagggaacaggaag

SEQ ID NO: 755011 - DNA, 75 bp, Homo sapiens
cgtaggcggagtcgccgagtcgacctacaacggccagagcgagaacaacgaagactatgagatccccccgataac

SEQ ID NO: 755012 - DNA, 50 bp, Homo sapiens
tgagatggtagccaacccctcaggaatgatgagaagacagcagctgatta

SEQ ID NO: 755013 - DNA, 60 bp, Homo sapiens
ctatggaaacctggtctccttggaataatctccgtagaactaccaggtgatgcaaagcag

SEQ ID NO: 755014 - DNA, 85 bp, Homo sapiens
gccgaagataccagcagacgatggggagcttgcagcccctttgccactcagctgtggccagaagagctccgaagagacaggcgag

SEQ ID NO: 755015 - DNA, 100 bp, Homo sapiens
taacaactatgataaatccaaaccagtcacctccccacccccaccgccaagcagccacgagaaagaattaacactgaatcctccggaaggaattgtagca

SEQ ID NO: 755016 - DNA, 100 bp, Homo sapiens
caagaagatggttcagttgactattgcaaagattctgcttctcagaagatgcactattatagatactctaacgccaaggtcagctgctggtacaagtacc

SEQ ID NO: 755017 - DNA, 49 bp, Homo sapiens
gtcgacggctatgacagttctggggataaaaacattcagatggcagatc

SEQ ID NO: 755018 - DNA, 146 bp, Homo sapiens
cagcgcctagatggctttggtcacggtccagcggtcacctacccccagcaccacctccagcccctgcgcctcgattaacgtgacagtgtcaggtggacccacagccatcccacctccccctctggggagtgctgagagtgaggcag

SEQ ID NO: 755019 - DNA, 125 bp, Homo sapiens
tggcctgtcgctggagcacaaaagagtctccgcggtggaggtctgcgttgctcttgcttttcctcgctggggtgtacgcacaatcctggaggaagagaaggctcagcaagaagagcgcatgagga

SEQ ID NO: 755020 - DNA, 75 bp, Homo sapiens
tgaaacatttggatttgaaattcagagtgcctggaagagctgggatgtctggttgagtcctatggcatgaatgtt

SEQ ID NO: 755021 - DNA, 51 bp, Homo sapiens
tgctcaatttctggagtctgttaagagaggatctgcaccacaacttaaaaa

SEQ ID NO: 755022 - DNA, 83 bp, Homo sapiens
ctagtggccacgctgcagagcctcgagagctatttgtccaagaactctgaagatgatgagctagctaaagaatcaaagcggtc

SEQ ID NO: 755023 - DNA, 82 bp, Homo sapiens
tccttccttgagatgatgtggaggatttgccctgccctggctgtgggcgtccgagctgggccacagcctgaacgagaacgtc

SEQ ID NO: 755024 - DNA, 100 bp, Homo sapiens
aggagcatgatgagctgagcttcaaggctggggatcctcttggtgtatgacatcaccaaccgctggtcctttgacggcatcgaccgctggatcaaggaga

SEQ ID NO: 755025 - DNA, 80 bp, Homo sapiens
gcccgagatcagaccaagtcaattgttgaaaagtagcaatgaagtgatgaggatactgatctctagaagcctgcttcagg

SEQ ID NO: 755026 - DNA, 98 bp, Homo sapiens
ggacatctgatcatggacatgtttttgaatcagagccgacaggcacttgaattgaaaatggaaaaccctactgctggtggtgctgcggtgatgaggcc

SEQ ID NO: 755027 - DNA, 90 bp, Homo sapiens
gtgctgaagtcccaaggagccgccctgcaggacacaactcagatgggaagttcatcgcccgggcacagcggatagagtacgactgtgaac

SEQ ID NO: 755028 - DNA, 108 bp, Homo sapiens
cggatctggaggagcagttgtctgatgaagagaaggattactacagcatcccatttcccacacccactactccgctgactgggagggatggtagcctggccagcaacc

SEQ ID NO: 755029 - DNA, 76 bp, Homo sapiens
gggagatagacgctgctgcctgtgtgctgggcatcaaggtgaagatcatgctgccctgggacccaactggtaagat

SEQ ID NO: 755030 - DNA, 99 bp, Homo sapiens
tggcagcggcgggcgagggcaccccgagctcccgcgggccgcgtcgggacccgcctaggcggccgccccggaacggtgtcttggctgggcatgacaacc

SEQ ID NO: 755031 - DNA, 95 bp, Homo sapiens
tgccacctgtgccatccaaactgcacctacgggacccttgaacatctgtgaagaaatgactattctgcatggaggcttcttgctggccgagcagc

SEQ ID NO: 755032 - DNA, 82 bp, Homo sapiens
actaatgctcctccggatgatgatgatcggttatttgttatcaaagcgtgaaggccaagcagggtctccagagaaaccgtta

SEQ ID NO: 755033 - DNA, 75 bp, Homo sapiens
gtcgccatgggccgccgccccgcccgttgagtgagtgtcgtggttggggtgctggacccagagtgcctaccctcg

SEQ ID NO: 755034 - DNA, 109 bp, Homo sapiens
cgcaagagcgagccgcctgccccggtgcgcagacagagctattccagcaccagcagagttcagtgcattcagaacaagcccctgtattttgctgatcggctgtatgact

SEQ ID NO: 755035 - DNA, 82 bp, Homo sapiens
aagcgcttagaagccgggatgttggaccctcccttcgttccagacgtgaggcggaaccaaccctcctggccatgggaggggc

SEQ ID NO: 755036 - DNA, 78 bp, Homo sapiens
ccaaatttacataattggagtggtgactggagcttttgggatccactgaaagatggtgaggcaaagatcaaaagcgac

SEQ ID NO: 755037 - DNA, 75 bp, Homo sapiens
ttccaagtctgaaggcgaaagtgtgtataagctcctttatgcttcccgtctggcagattatggcctcgtgtccca

SEQ ID NO: 755038 - DNA, 100 bp, Homo sapiens
ggaagatggcggatctggaggagcagttgtctgatgaagagaaggagtggagtcaacatatcaatggagcaagtcacagtcgtcgatgccagcttcttct

SEQ ID NO: 755039 - DNA, 100 bp, Homo sapiens
ggagagattcctgttgttgctatcagaactgctaaaggagagaagtttgtcatgcaggaggagttctctgtcgcctctatgacctgcgggcagataggga

SEQ ID NO: 755040 - DNA, 136 bp, Homo sapiens
tgtggggcaccaagagcagccccggtctctcggacaccattttctgccgctggacgcaagcctctacggcagacacatgcaggccaacccagaaccaccgaagaagaataatgacaaatcgaaaaagatcagccgg

SEQ ID NO: 755041 - DNA, 73 bp, Homo sapiens
agtaagaggggttggctgtgaatgttgaggaacaggttagcaccactgagagagtgtttcaggatagacaata

SEQ ID NO: 755042 - DNA, 100 bp, Homo sapiens
tccgagctgaagcagctcatccaccagcagctgagcaagctcctgggcaacgtgctggtctgtgtgctggcccatcactttggcaaagaattcaccccac

SEQ ID NO: 755043 - DNA, 75 bp, Homo sapiens
gatactcagtttgtaaaaacatggcggatccagaattctggttaatgactccagagagtaagatcagattcgtcc

SEQ ID NO: 755044 - DNA, 100 bp, Homo sapiens
ctccagccccagctgcgtgcccagtatgcaaccgaggatggacttatacacacaaatgaccaggccaggactctacccaaagaatgggtttgtatttaag

SEQ ID NO: 755045 - DNA, 98 bp, Homo sapiens
cgcctggccctggagaactacatcaccgctctgcaggctgttcctcctcggcaaattcaacacccaacagcttccttaatagcaaaggtagcaacagc

SEQ ID NO: 755046 - DNA, 75 bp, Homo sapiens
agacgagcgactgacacgcatgtacaacgtgcgcataatgcggccatgcccggacgtgtactggttcccactgct

SEQ ID NO: 755047 - DNA, 75 bp, Homo sapiens
cgtgttgaaacaaggaattgccccatagccttcacagatttctcgaatgctggcagccaaaaccgttttggctat

SEQ ID NO: 755048 - DNA, 100 bp, Homo sapiens
agagatatctgcaatgatgtactgaaactgttgctaaaactggaatgatccttcttgctggggaaattacatccagagctgctgttgactaccagaaagt

SEQ ID NO: 755049 - DNA, 75 bp, Homo sapiens
gaaaccatgtgctgaaatgtttgacgacactgatggtttgatttgtcttcagcgaagcggaagtttgcagattcc

SEQ ID NO: 755050 - DNA, 82 bp, Homo sapiens
catagttcctggtgatattgtagaaattgctggatttgatggaacaacttgaaaaacaggataagacggtccgtaaactgaa

SEQ ID NO: 755051 - DNA, 90 bp, Homo sapiens
ctctctccgctcgattttgtcaccgttatgtgggaagcgaatccatgcccaccgcgcccccgcagaacgtgcagacggaagccgtgaact

SEQ ID NO: 755052 - DNA, 96 bp, Homo sapiens
tccagagtctgctggacgcccaggcggacgaggccgtgttaggccaaagaactgccaactctgaaagataatgatttcattaatgagggccaaaag

SEQ ID NO: 755053 - DNA, 82 bp, Homo sapiens
agcacgtcatctccatcgagggaaggtgctcgggtcttcggggcactgggtcccatcggtccctcctcacctgggctcaccc

SEQ ID NO: 755054 - DNA, 75 bp, Homo sapiens
ggaataatgggtactctttcctcgtggaatttgaagattctacagataaatcagttcacacaaaagatgttggac

SEQ ID NO: 755055 - DNA, 85 bp, Homo sapiens
aggaacgagagaaggaaattagtgatgatgaggcaaatgggagagaccctttgaagtcaaggacaccgaggaagaggacttccac

SEQ ID NO: 755056 - DNA, 83 bp, Homo sapiens
tttcctgcttctccttttcatgagtgttcctgtggtctctgcacctcctttcttttttcagaagaagtgaagtcaagatgaag

SEQ ID NO: 755057 - DNA, 76 bp, Homo sapiens
tgccgtcttttgaagcaccctaatattggtttgatattaaactgctctcagaattttcctcttgcctagcagatca

SEQ ID NO: 755058 - DNA, 100 bp, Homo sapiens
cacgttcggatgagctacagaggcacaaacgtacacacacaggccaatataaaccaggtattgcccaccgagatctgagcagccagaatgtgctcattcg

SEQ ID NO: 755059 - DNA, 90 bp, Homo sapiens
tttggcggcctttctgctcctcgcggcccaggttcgtgctggccgtgggcagcgccgtctttgatgccatgttcaacgggggaatggcca

SEQ ID NO: 755060 - DNA, 75 bp, Homo sapiens
cctgtctcaacgatacctattttctagtgctgagatcctgagacaatgagctgacatcgcgctgatcggattggc

SEQ ID NO: 755061 - DNA, 100 bp, Homo sapiens
tccataaagaatggcccttgtggataagcacaaagtcaagagacagcgattggacagaatttgtgaaggttgtactcagactatctctactttgcaagtt

SEQ ID NO: 755062 - DNA, 87 bp, Homo sapiens
agaataccttgtctcagctgctgaagctggttgctccttgagggcaggacagttcttatggctttatccgttgcgtaagcacagaga

SEQ ID NO: 755063 - DNA, 75 bp, Homo sapiens
ctagaccccacggcgacaccgccaagaagcccatcatcgagcaccatgtggcggagcacactgctgagagctaca

SEQ ID NO: 755064 - DNA, 99 bp, Homo sapiens
cctgctaagccaaacagagaaggtgaaatatcacctacggttcagttacacacggagaaattacatgtggacccaaacaggctcctttttcctgaaaga

SEQ ID NO: 755065 - DNA, 101 bp, Homo sapiens
ttttggcccttttaacgctgacaagttctgcatttctgctgtttcagttgtactactacaagcactatttatcaacaaagcgaccacatgctgcttttgta

SEQ ID NO: 755066 - DNA, 98 bp, Homo sapiens
ttgtgagctgtatggagcagttgacacgtagtcactgggaaggatttgcctctggagtgaaacacaaatcttttctaacggctgaggactgctttgag

SEQ ID NO: 755067 - DNA, 100 bp, Homo sapiens
aagatgctgcttactggtgggaaatcaagtcgtaaaaacaggtcaagtgatcgtcagtatttaaacagatcacatcatgcgtgagtacaagctagtggtc

SEQ ID NO: 755068 - DNA, 100 bp, Homo sapiens
aagacagagaaaggcatagacggctttcaccaacaatcaccagtggtttacacaacattgcaaggagcattgaaactcgaaactactcagaaggattgac

SEQ ID NO: 755069 - DNA, 85 bp, Homo sapiens
cctgcagcgggagctggacggcgagcgcgagcggcgcgagaaagtgctcttacagcctgttccaagtgtggcttaatccgtctcc

SEQ ID NO: 755070 - DNA, 87 bp, Homo sapiens
agaagaagttgcgaaggatccccaacggggaggccaacgtgaagaaggctgaaggcctttcggcagcagctgaggaagaccacgcgg

SEQ ID NO: 755071 - DNA, 88 bp, Homo sapiens
caaaggcaggggaggaagccacctcgaggtgctggagaatctggtaaaagcaccattgtgaagcagatgaggatcctgcatgttaatg

SEQ ID NO: 755072 - DNA, 75 bp, Homo sapiens
ctggaaggaaccgctctcgcttcgtcctacacttgcgcaaatgtctccgatgatcatgacgcagtcctgaggttt

SEQ ID NO: 755073 - DNA, 90 bp, Homo sapiens
gaactacagaaacctggtctccctagactgggctggcttagatgaagatgaagatgcacatgtctgggaggataattgggatgatgacaa

SEQ ID NO: 755074 - DNA, 75 bp, Homo sapiens
ctgatcgagtccctccggaactcacactccagccatccgatactgtgacagatgccaacttataaaaccagatcg

SEQ ID NO: 755075 - DNA, 75 bp, Homo sapiens
agatccaccattgcaagacatttgctcagcgtgcagttccgtactactcccatggacagtactggtgttcctcac

SEQ ID NO: 755076 - DNA, 101 bp, Homo sapiens
gaagatgttcaaaagaaaacattcacaaaatgggtaaatgcacaattttctaagatcttcatgcagaaaaagttacttgttccttagtactgccagctgtg

SEQ ID NO: 755077 - DNA, 100 bp, Homo sapiens
gcaacatccccaaacagcggcgtttcacggtggcacatacatgccgataacagtagaactctgaacgtggattccactgcaatgacactacctatgtctg

SEQ ID NO: 755078 - DNA, 100 bp, Homo sapiens
gggcgccgcgtccctgcacagcccgccgcagaggtaatccatcagctgaggctctcagagaatgaaagtgtggccctgcaggaactcttggactggagga

SEQ ID NO: 755079 - DNA, 51 bp, Homo sapiens
gacggaggagcttgtaccaccgctgagtcagtgctgattctctcaaataga

SEQ ID NO: 755080 - DNA, 100 bp, Homo sapiens
gagaacagagtgctgttttagagctggcagcagcatctcagcccaagagaaggtacggttcctggagcagcagaacaagatgctggagaccaagtggagc

SEQ ID NO: 755081 - DNA, 75 bp, Homo sapiens
gcctttgattttgaagatgaccactttggaaatggtgaaaaggagaacagcttgaagacagatgattatggccga

SEQ ID NO: 755082 - DNA, 85 bp, Homo sapiens
ccggggacccttccgtatctgcctaggcattttgctgtctcctcctaatacgatacaggtttgacccccgtctcatgttcagcaa

SEQ ID NO: 755083 - DNA, 100 bp, Homo sapiens
gcgcctgcgaccccagtcggtgctccggggaggtcacctgacgaggaggaggagaacatttgcctgcactgggcggcgttctccggctgcgtggacatag

SEQ ID NO: 755084 - DNA, 100 bp, Homo sapiens
gcgggtaaggcgccggccctgggccgccctcccgggaatcgggagccgccgctgcagggtttcatcaccttaaatggttttgaaccaatgaaggtgtatt

SEQ ID NO: 755085 - DNA, 90 bp, Homo sapiens
gtttgattccagtcatgatagaaatgaaccatttgtctttagtcttggcaaagagctgaactagagaaacatggttataagatggagact

SEQ ID NO: 755086 - DNA, 100 bp, Homo sapiens
cgcttcaaccccaggggaccagaggaactcagccctgattgcgtatgccgagattttgctgtcctggaggaccacaccctggctcacagcctgcaggaac

SEQ ID NO: 755087 - DNA, 100 bp, Homo sapiens
cgacccccaggcagctcgccgctccctagcaccttctccagtcgacactctcgcgcccggagattgcagcaaaaattggaggtgatgcagggacatcact

SEQ ID NO: 755088 - DNA, 100 bp, Homo sapiens
gcagctggagctgcagaagctggtcctctggcttctgtccctgctcagtcggccaagaagccctgcccagagcagcccgacggccatggaggctgaagag

SEQ ID NO: 755089 - DNA, 74 bp, Homo sapiens
tgggactatggccctgacctcggtcccctccgctttcacttgacagggccactgggcaaggaactgagggtggc

SEQ ID NO: 755090 - DNA, 101 bp, Homo sapiens
gtatctttaagagcagcttattccaagctttgctagggatattttgcaccatttccctctgtacttatgccgccagtatctcgtatgatttgaaccggctc

SEQ ID NO: 755091 - DNA, 100 bp, Homo sapiens
gccgtccagcagatggcggatgccctgcagtacctgcagaaggtctctggagacatcttcagcaggacccggctgcccagtccctcatgatcatgaacaa

SEQ ID NO: 755092 - DNA, 89 bp, Homo sapiens
gatcaaccctctgcatacagtaaaatgcctgtgaggagccaccaacatttgaagctatggagctcattggtaaaccaaaaccctactat

SEQ ID NO: 755093 - DNA, 99 bp, Homo sapiens
gcggcctcacagtcatggatctggaagctgagggcacgtgtttgcggttcagccctttgatgaccgcagcaggtctccaccagctcctggccgggttcg

SEQ ID NO: 755094 - DNA, 51 bp, Homo sapiens
cacgagtgggaggtgctgagccgctcagctcttgaggatgacgattgccaa

SEQ ID NO: 755095 - DNA, 100 bp, Homo sapiens
tagagatcgttttgatggatatatcttccttgacagcaaagcactgaagataaaataccctcatcaacttgatcagaaagtcctggagaaacaactgccg

SEQ ID NO: 755096 - DNA, 100 bp, Homo sapiens
agggccggcggattcgggaactgactgctgtagttcagaagaggtttggctttccagagggcagtgtagaggataaaagaatcagagtgtctcaaccctt

SEQ ID NO: 755097 - DNA, 99 bp, Homo sapiens
agggcaaactatgaaaagatcctcaccagaaatcagatagagacggtgctctcaacaaggatccagtctcggaagggtgctgacctggaccgggagaag

SEQ ID NO: 755098 - DNA, 100 bp, Homo sapiens
gatccccatctctgaccactggagccagaacctctcccagttcttccctgaggccatcagcttcattggcgcttgaagaggctcagaaagctatccaaca

SEQ ID NO: 755099 - DNA, 100 bp, Homo sapiens
cagggaggttatgaggcttaataaagaaggtgactattatatggttaaaaagattttggaggaaaacagttcaggtgacttgaacataaattgcgtagat

SEQ ID NO: 755100 - DNA, 75 bp, Homo sapiens
ttccgctagtgatcctttgcaccctgcttggagacggacttgcttccggttcaggaacaagtgcatcccactctc

SEQ ID NO: 755101 - DNA, 75 bp, Homo sapiens
cattattttaacatttgggagaaacacagccagaagataaacctctcataatgaaggcccccgctgtgcttgcac

SEQ ID NO: 755102 - DNA, 95 bp, Homo sapiens
cctcctccagcaaattctactgaccctgcagcatctaccgctcactgtagaccatctcaagcaggaaaatcctgccttgcttcgttgggcctatg

SEQ ID NO: 755103 - DNA, 74 bp, Homo sapiens
ggccgacggtggcggcgggatgcagattcatgatgttgctatcaaaagttgagaaattgtcagaagaaatcatg

SEQ ID NO: 755104 - DNA, 90 bp, Homo sapiens
gagatgtacagaatgggccaagctccactgttcagatgcaaagatacttggcatatcgaaattttatgattgacacgtatcgtctaaacc

SEQ ID NO: 755105 - DNA, 117 bp, Homo sapiens
ttgagctccaggagttcgtctcttacgtctgcggaagtgcagctgcctcagttcttagcgcagatgatcaagttccagatgatcctcagtgagggataccatcctttcaatattcaa

SEQ ID NO: 755106 - DNA, 75 bp, Homo sapiens
gctggactgcagtgactatgttctagggaggagatatcaccaaacatgatggaacaggcggacagtccatttatg

SEQ ID NO: 755107 - DNA, 75 bp, Homo sapiens
ctcagcctcccaagtagctgggactccaagtgggtgccactacagccagcacagaaaactgaatctgtagataac

SEQ ID NO: 755108 - DNA, 75 bp, Homo sapiens
gcctgcagatcccggctagggcacggaccgcctaggccgagatatcagttttagagaatgtggcgtggagaaatt

SEQ ID NO: 755109 - DNA, 50 bp, Homo sapiens
ggggattttgtcagcttgtcgtcaaggaatcagagatcattgatttcttc

SEQ ID NO: 755110 - DNA, 74 bp, Homo sapiens
gatacgaccccgaacggcccccaaggggcgggcgctgtgccaatcccactaatcctgatgaggctgacaaagtt

SEQ ID NO: 755111 - DNA, 98 bp, Homo sapiens
attgttccactggacgctcatcagagggaagatctttttcctcaattgggtgtccggtggagagctgtttgaccggatagtggagaaggggttttata

SEQ ID NO: 755112 - DNA, 98 bp, Homo sapiens
agtcggggcagccgctcgcccctcttttccatgtatccgtccagagtccggcagcgtcttctcttgagggagcaatttggagaagagctggaacccag

SEQ ID NO: 755113 - DNA, 82 bp, Homo sapiens
ccaggaatgtggtcgacgagaagccccaacagcacggcgtggcctctcagcctcggacatggatttgattgacatactttgg

SEQ ID NO: 755114 - DNA, 80 bp, Homo sapiens
gaagaagctgtatcttatctatggaagataaagcatggagttggctaatggatgctggcagctgagattctactacaaaa

SEQ ID NO: 755115 - DNA, 98 bp, Homo sapiens
cgcagtggcgtcctggagccctcctcagatgccttcaattaagttgcagagttctgatggagagatatttgaagttgatgtggaaattgccaaacaat

SEQ ID NO: 755116 - DNA, 120 bp, Homo sapiens
cgcccctcgccgctgctgcctgggctgggacttcagcacgcagcagtcactattccaggtcctcaggatatagccgtgacctaaacacagaaatctaccctggcggagctgatcttctag

SEQ ID NO: 755117 - DNA, 75 bp, Homo sapiens
gcggctgtgaagccctagtcgggactttgaacatgtcggggatcgccctcagcagactcgcccaggagaggaaag

SEQ ID NO: 755118 - DNA, 83 bp, Homo sapiens
ctgcatccaagctctttggggttgtatgcgctcatgtgggagaaactcaaaggtaaacactacacgtgaagagtggtgaaagg

SEQ ID NO: 755119 - DNA, 75 bp, Homo sapiens
cggcgccgcaactttaaagtcatgatctaccaggtgaacttcacggtagaccagatccgcgccatcatggacaag

SEQ ID NO: 755120 - DNA, 83 bp, Homo sapiens
cgaaggaaaaggaggaattcgccgtgcccgagaatagctccgtccagcaggagcgtgaggatcatccccggagaggacgggag

SEQ ID NO: 755121 - DNA, 75 bp, Homo sapiens
acacaggtgaatttaaaggagcagccctggtgtcacctatcagtaaaagaaatgggcaagttcatgaaacctggg

SEQ ID NO: 755122 - DNA, 75 bp, Homo sapiens
ctgatgagcgctcaggaatcatgggctatcaaaggactatttaagaaacaactgaggcatcagaccaactttccc

SEQ ID NO: 755123 - DNA, 75 bp, Homo sapiens
atatttggcctagaaatacctttatgatgattgcacttcctaacatgggcaattgaaggaacagactaaaaatcg

SEQ ID NO: 755124 - DNA, 98 bp, Homo sapiens
ggacacgtcattctgagaggcagctggatacacagtatcgtcgctcatgtgcagttgagtatcctcatcaggcccgacctggcaggggatctgcaggt

SEQ ID NO: 755125 - DNA, 102 bp, Homo sapiens
gtttgacgacactgatggtttggtcagcccaaggccaaccccactgtcactctgttcccgccctcctctgaggagctccaagccaacaaggccacactagtg

SEQ ID NO: 755126 - DNA, 97 bp, Homo sapiens
aggcggcggagcgcgagagcttcgagcggactcagctctatcgtccgagctttgtgcacccaggggctgccacagtccccaccatgtcagccgcatt

SEQ ID NO: 755127 - DNA, 100 bp, Homo sapiens
ctgctgcagtttggcgtgacatacctggaggactattcggcagagtacatcattcagcaaggtggctgggtcaaagagttagtggaagcagagttatttg

SEQ ID NO: 755128 - DNA, 50 bp, Homo sapiens
cttggaagtccttagctaccaggatgcgaccctgtgtgagcagcttcgga

SEQ ID NO: 755129 - DNA, 98 bp, Homo sapiens
aaacgaggagaatgagcagacggaggaggggcggccaagcgctgttgaaggtgtgttccggggtggtcatgacatcctggtgcgctcccggctgctgc

SEQ ID NO: 755130 - DNA, 100 bp, Homo sapiens
ggactccactgatgactcctatgatgaggactttgctgggggaatggacacagtgaagctttgccctttttcctacttttgattgacctttccagagcaa

SEQ ID NO: 755131 - DNA, 74 bp, Homo sapiens
cacaacatgcacagcctggcgacggctgcgaactcccccactggaaaggattctgaaagaaatgaagtcagccc

SEQ ID NO: 755132 - DNA, 83 bp, Homo sapiens
ccaagatgcagcaggtcggaggaaacagccagaccgagagcagcctgccggggcggagagcctggaaacctggccggcgtcag

SEQ ID NO: 755133 - DNA, 112 bp, Homo sapiens
atttttgtattattctgcgtggaagctacacttactccagtgggaggaggactccaggtcttactgaagtaacacaaagcttaaaaatggaaaatgaagagtttaagaagag

SEQ ID NO: 755134 - DNA, 96 bp, Homo sapiens
tcatgcggctcctcggctggtggcaagtattgctgtgggtgctgggacttcccgtccgcggcgtggaggtggactcccgaaaaattgaccaggaag

SEQ ID NO: 755135 - DNA, 87 bp, Homo sapiens
ggagtgggcgatgccagcgtgccaggtatatttgaaggctcccatgattctgaatggagtctgtgttatctggaaaggctggattga

SEQ ID NO: 755136 - DNA, 100 bp, Homo sapiens
accttgagggatatctttcttcactcctcttcacttcttcagctcccagccaacctctgataaaccctcccagcggccatcagagagcacaaattgtagc

SEQ ID NO: 755137 - DNA, 98 bp, Homo sapiens
gagagggagaacacagttggagaaaatcggcagctgagacggccttggccgtttgcagagcagtctctgatgaagaatgccataaaaacatcggagga

SEQ ID NO: 755138 - DNA, 74 bp, Homo sapiens
ggtgattctgaagagggtctggaggagccttctcaagaacagagcaattaccagctctggctgggtcgccacaa

SEQ ID NO: 755139 - DNA, 118 bp, Homo sapiens
gcaggaacttcggggggccctggctcttctcctcctttgctttttcacatctgccagtcaggatctgcagggtatttgagtacagcatcccagacaaacagtatacagattggagccg

SEQ ID NO: 755140 - DNA, 80 bp, Homo sapiens
cggcagtatccttggggcactgtgcagggtaatggtaactcgggatttgaaggacagagtcgctatgtaccatcctctgg

SEQ ID NO: 755141 - DNA, 83 bp, Homo sapiens
cgcgcctcgctcagctccaacatggctaaggcagctggataagcacagccaggccacagcccagcagctggtgcagctcctca

SEQ ID NO: 755142 - DNA, 75 bp, Homo sapiens
gtcagcactgactttcagctatggaatcgcacccaccaaggctccggatgtgttccccatcatatcagggtgcag

SEQ ID NO: 755143 - DNA, 82 bp, Homo sapiens
gaagccacaggatggaggagggggatcccagcaaaggttttaaaatcaaagatgggaaaatcggagaaaattgcccttcccc

SEQ ID NO: 755144 - DNA, 105 bp, Homo sapiens
agagattcagccagcacactcctcgcgagcaagaccatggtgaatccgggcagcagctcgcagccgcccccggtgacggccggctccctctcctggaagcggtgc

SEQ ID NO: 755145 - DNA, 80 bp, Homo sapiens
ggacatggtcatgagctttgtgaacctgggagcatcagatccatgctgctgctgactcggagccccacagcttggcacag

SEQ ID NO: 755146 - DNA, 127 bp, Homo sapiens
aggagcggccggagtcagcgatggtgcccggcgaggagaaccaactggtcccgaaagaggttatcctacctacaaagaaaaagtaaagaaaaggcctggaggccgcccagaagtgatctacaactat

SEQ ID NO: 755147 - DNA, 126 bp, Homo sapiens
gggcgaggttcgggctggttgttccgttgcgagctgcagctgcgatctctgtggtaggcccagggtgcggaggcagcaaatgttacaggtcctggtggtgttccagttcaaggcagtaaatatgca

SEQ ID NO: 755148 - DNA, 100 bp, Homo sapiens
cccgagaacatccagtttgatgtttactacaagctggtgtccgaatgatctacccagcatgctttgttctagtccctcagtcagacattcctactcctag

SEQ ID NO: 755149 - DNA, 76 bp, Homo sapiens
actgctcacgttcatcatggtgcctggctgccaggcagggtactcctgccatgcgtcgctcccttgtcccccagct

SEQ ID NO: 755150 - DNA, 82 bp, Homo sapiens
actagcggggcaggcctctaattcaccgcaggatttccgatatcaacctatgaattgcctctaccaaaaagcctacaatatt

SEQ ID NO: 755151 - DNA, 100 bp, Homo sapiens
gtatatgagtctgaggcagaccaactgttgggaaatacaatgaaaggtactaacttggttaagaaagctatatatgccatggttgagggagactgtgatg

SEQ ID NO: 755152 - DNA, 75 bp, Homo sapiens
gcagaagtcagccaaaatatagagaaactgcgagtagagacccagaaatttgagaatctacctgttactcgtatt

SEQ ID NO: 755153 - DNA, 100 bp, Homo sapiens
cggcccctgctgctactggccctgctgggctggctgctgctggccgaagcgaagggcgacgccaagccggaggccgaggcctgcctggagccccagatca

SEQ ID NO: 755154 - DNA, 73 bp, Homo sapiens
cagaatgcaatgatgaaagcttctggttcagatataaagaactatatgcttggatgaagtgtgtgaagggaca

SEQ ID NO: 755155 - DNA, 51 bp, Homo sapiens
tacgcctcctacgtttacctgtccatgcgggacgaccctgggacagtctcc

SEQ ID NO: 755156 - DNA, 88 bp, Homo sapiens
atgctcttcttggaaaaccagatccagaaactggaggagtcccgctcgaagctaggtacgcatagctgctaaattcatcactcatgca

SEQ ID NO: 755157 - DNA, 90 bp, Homo sapiens
cgctatcagcggccagcgcgggcgcggccggagaccgtggggcccccggttgccgccccctcgggccatggagaagtgtaaggatgcagg

SEQ ID NO: 755158 - DNA, 82 bp, Homo sapiens
gactgttcggcccgccgtgctcccaggtgcccccggcctgcgctcccatccacacgctcggagcaggccgggctctcgccat

SEQ ID NO: 755159 - DNA, 75 bp, Homo sapiens
ggaaatttggtgagcggcctccacctaaacgacttactagggattttttaacctggccctgctaatcgaggaagg

SEQ ID NO: 755160 - DNA, 80 bp, Homo sapiens
ccgaaccctcagcctcaagccgctgctcttcggtcttgccccagaagctgcgggcacatccacgcctgaaatgcggcgct

SEQ ID NO: 755161 - DNA, 100 bp, Homo sapiens
gcccagaaatttcagctgcagttatgaagatttttgatgctgccaaatgctggagaaagacgatcattacctctccagagtctttgaatctccctagaag

SEQ ID NO: 755162 - DNA, 90 bp, Homo sapiens
tgctgttctgtgactgttcgcggcacctcatcacccctggactttgtctcacaagatgaaatgttgacgcccctggggagattggacaag

SEQ ID NO: 755163 - DNA, 90 bp, Homo sapiens
cgtccatccatttcgtggttcacccgctgccgggcaccgaggaccagctcaatgacagtccaatatcagatggaaatgatgcggagcctt

SEQ ID NO: 755164 - DNA, 98 bp, Homo sapiens
cgggaagccgcctgcagaccgaacctgaggagcaaatacgacatcctcatggagaagctttcggtcatgctgagcacacggactaaccacatagagac

SEQ ID NO: 755165 - DNA, 100 bp, Homo sapiens
atcgtggacaagatcatgggcaaaggacagatccaggttggcaaaagcagcttttgatgatgcaattgcagaactggatacgctgagtgaagaaagctat

SEQ ID NO: 755166 - DNA, 101 bp, Homo sapiens
actttcgcaacatcaagggagttttccggggccctctcagcaagaacgggaacaaaactctgtttaagcggctgcagggcaagaggaaccgagggagagaa

SEQ ID NO: 755167 - DNA, 83 bp, Homo sapiens
gaggggccgtggcccctgcagcggaaccggacccagtccctgagccgcccctacacccacagtcgtgagatggagaataaaga

SEQ ID NO: 755168 - DNA, 100 bp, Homo sapiens
gtaaatgggaaggacaggcagagctaaacaaggacccagatgatgtggtaccagttggccaaagaagagcctggtgttggtgcatgtgctttggactagc

SEQ ID NO: 755169 - DNA, 82 bp, Homo sapiens
aatgatgagaggatgtggtggtctactctgatgtcaatcttgagggctaggaactgtggctgcaccatctgtcttcatcttc

SEQ ID NO: 755170 - DNA, 82 bp, Homo sapiens
cccagtgcttctgtctcgactgcactttgagaaggtgcacatgaacttgaacagatgcagctgattttagaatctattcctg

SEQ ID NO: 755171 - DNA, 74 bp, Homo sapiens
ccgctcgttctgtgcgttctcctgtcccagggatatcccagagaaggaaggaaataccctttgccaccaccctc

SEQ ID NO: 755172 - DNA, 100 bp, Homo sapiens
gacaggctgcgaaacacgatgctgctgccaaagcgttgaggatcctgcagaatgagcccctgccagagaggctggaggtaatcaacttcacaatgcctaa

SEQ ID NO: 755173 - DNA, 98 bp, Homo sapiens
aaaattgtgaagttgctgctagctcataaagcagatgttaatgcacagtcttcaacaggcactacaaatactgtggcagcatataatttaacttggaa

SEQ ID NO: 755174 - DNA, 97 bp, Homo sapiens
aggcaactaacactgcggcttcctgagctgtgtcagcgtgttatgatgccgtcccgtaccaacctggctactggaatccccagtagtaaagtgaaat

SEQ ID NO: 755175 - DNA, 98 bp, Homo sapiens
cctgcgtcctttttcgtttttcggatgatgccttcaatactacctttatttccaccataggttgcttatcaagtgtcccacaaatgaaaaaaatttct

SEQ ID NO: 755176 - DNA, 100 bp, Homo sapiens
aatcaaccttgctcctgacagctcatccgtggttgtatcaggacttatggtgccctgccagtcagcgtcgtcagcctctgccctgggcggtgtcaaagtg

SEQ ID NO: 755177 - DNA, 111 bp, Homo sapiens
ccgactgcttttggaataaaaagattcccaggatgtgagcaacacgggaccgtgtgtgctgtatttatggagtttaaagattaatcatcccaaaacattgtttctgcttcg

SEQ ID NO: 755178 - DNA, 83 bp, Homo sapiens
ctctttgacacacagcagttcttgtcagccacaagtatatggttatgatgacttgcagatgcttcagacaagatttccattgg

SEQ ID NO: 755179 - DNA, 100 bp, Homo sapiens
cttctcagctgctgacctactgccaccgactgcgctctctcccgtgggtcggctttttgctcgctgggagtgtccactcgccttccaccagcatggcaac

SEQ ID NO: 755180 - DNA, 96 bp, Homo sapiens
gtgctcaacctacttacagtcacgttactacagaaacaaagggtcatcctttctagaaagagaaccgctgtgctatcaggagggaaataatccaag

SEQ ID NO: 755181 - DNA, 100 bp, Homo sapiens
ccatggtgcatctccagggccgtctatcaggtcctcttcctgatggatgggaacaagccatgactcaggatggagaaatttactatataaaccataagaa

SEQ ID NO: 755182 - DNA, 51 bp, Homo sapiens
cggagtcagaaccctccgcagagtaaagttactgtaaaatggggaaaggag

SEQ ID NO: 755183 - DNA, 100 bp, Homo sapiens
cacactggaggtcccagagcacgacgagcgcggaggaccgggaggctcccgggcttgcgtggttatacatgggaagctgttgataccaaaaataatgtac

SEQ ID NO: 755184 - DNA, 75 bp, Homo sapiens
ggccactccttacatcgctgtctgaagatgcgagatattgctgggcaggccctggcttttgttcaggatcttgtg

SEQ ID NO: 755185 - DNA, 90 bp, Homo sapiens
ggtcgatgaggagctgaaggtgtggctcattgaggtcaacggtgcccctgcatgtgctcagcttttgaacacttgcagcaattagaatta

SEQ ID NO: 755186 - DNA, 90 bp, Homo sapiens
aacggggcaacagaagaagatggggttccttccaaagtgcagcgctgtgcagtgatgacacctttgaggccctgtgcatcgagccgtttt

SEQ ID NO: 755187 - DNA, 101 bp, Homo sapiens
gccacaactatttatgccaacaccatcaatacttttcggattaaatctggaaatgaaaatggagagttctacctacgaacttcctcatcccacaaagccac

SEQ ID NO: 755188 - DNA, 96 bp, Homo sapiens
gaacgagcgacggcggaacccgtgggcctgtggactgcagcctcggcggtcagcagactactgtcagaggatgtaggaatggacatcccctttgaa

SEQ ID NO: 755189 - DNA, 102 bp, Homo sapiens
gcaatggagaagagaaagcacaaagcatggagaccctccctccaggtttcccaggcagctgcagacttgaaacagttctgtctgcagaatgctcaacatgac

SEQ ID NO: 755190 - DNA, 76 bp, Homo sapiens
ggcccaatagacaactctgggctattttcagatttctcggctggagcagacatgggtgaccctgcggcagcgacac

SEQ ID NO: 755191 - DNA, 75 bp, Homo sapiens
ttcttcgaggtggagtcggagctgggacgggctcggatgctactagatcagtaccgaaagaagtcaaagcttttt

SEQ ID NO: 755192 - DNA, 75 bp, Homo sapiens
agactacggtgtgctgttagaaggttctggtcttgcactaagcagcagccgctcttctaaaacattcaaaccaaa

SEQ ID NO: 755193 - DNA, 83 bp, Homo sapiens
ggcctgcagcgggagctggacggcgagcgcgagcggcgcgagaaaggctgggttacgacccctacaaccctgagctgcccaag

SEQ ID NO: 755194 - DNA, 75 bp, Homo sapiens
ttccagctggacccccacacgaaggcctgcaaggctgtggcctcggccaccttcgaggacttccagatccgcccg

SEQ ID NO: 755195 - DNA, 100 bp, Homo sapiens
gcgtgctgaagagtgtggctgtgaagctggggaagacgcagaaggtgaaggtgctcacgggcacgggtatgaacgctgccgtccgtgccgtggtgcgcat

SEQ ID NO: 755196 - DNA, 90 bp, Homo sapiens
atcccaaagagaaagattatttctccacgatctatagaagatgaactgctttctccaggggttaaaaataagaattttaaatgccaccga

SEQ ID NO: 755197 - DNA, 75 bp, Homo sapiens
accgaaaactccaccgtagcccttgccaaagaattgccattgccttcagaaagtgttgatattattatttctgac

SEQ ID NO: 755198 - DNA, 50 bp, Homo sapiens
aggcagggaatggctcatggggatatccgcatccctgggttcaatggcag

SEQ ID NO: 755199 - DNA, 100 bp, Homo sapiens
gccgcctccggagcccgacgcgtggatggatgaaaaggcaagaggaaaaacaaagcagccgaaacacacccagacgcacacttctgccaagcatagccac

SEQ ID NO: 755200 - DNA, 75 bp, Homo sapiens
aaggagctgagcctgctggtgctgctgcctgacgacggcgtggagctcagcacgaatgaggagaaacctgtgcaa

SEQ ID NO: 755201 - DNA, 75 bp, Homo sapiens
tcatggagatcgagaggaaataatgagtaatctatgccagcaattatgacaatgttagcagaccatgcagctcgt

SEQ ID NO: 755202 - DNA, 75 bp, Homo sapiens
tttcgggccagcgacccgctgctcagcgtcctcatgtggggggtaaaccactcggcagatcgggagcggtgccga

SEQ ID NO: 755203 - DNA, 76 bp, Homo sapiens
ctcctgagtagctgggactgcaggttatttggacaagaggcacattgacccaatttggagacgtattttggaagga

SEQ ID NO: 755204 - DNA, 100 bp, Homo sapiens
gcccgaggggagacgccgtgacaactttcgtttccctctgagggaattgggaggtcggcggccccaaaatttcaccagtgatcattaaagaatgggcagc

SEQ ID NO: 755205 - DNA, 82 bp, Homo sapiens
gagttttctagaagcctgtcgaaaaatgggggtgcctgaggccgagacgcatccagagctttcgtgaccggggactgttctg

SEQ ID NO: 755206 - DNA, 74 bp, Homo sapiens
gctaagcagaattgcaagggacaagtggccacactccctcaggctgttcggctcttgaatcccagcgatgaaac

SEQ ID NO: 755207 - DNA, 100 bp, Homo sapiens
cctggatatggcaaccagggtgggggctacggaggtggttatgacaactatggaggagaagaggtgtggtggaaaggtcttccagaaccagaggctaagc

SEQ ID NO: 755208 - DNA, 75 bp, Homo sapiens
gaccttgatcccaacaatgttatcattgagacttgaggtgggacatggaagaacagggacccctcctggtttgtc

SEQ ID NO: 755209 - DNA, 100 bp, Homo sapiens
cctttacagaggatttaagaatgctggcagtgatggtgaaagcataggaaactgccccttttcccagaggctcttcatgattctttggctcaaaggagtt

SEQ ID NO: 755210 - DNA, 75 bp, Homo sapiens
gccagcccggacctctggagtgcccccagcccagagcccggattttttatcaagcagaaatgcatcgaacaacga

SEQ ID NO: 755211 - DNA, 82 bp, Homo sapiens
tcgacttcggttcgggtgcgctgctcaaggacacggtctacaccgacttcgacggttgtgcagcctgactctgaagaagctg

SEQ ID NO: 755212 - DNA, 100 bp, Homo sapiens
ctggatatccaagcctctcagcttcggagaatggagtcttccatcaatcatatctcacaggtgcgtatagcagcaaaattcatcattcatgcccctcctg

SEQ ID NO: 755213 - DNA, 83 bp, Homo sapiens
cgcgcagggcctgcagcgggagctggacggcgagcgcgagcggcgcgagaaacattggcatcaacaaaagtcagaattcccgg

SEQ ID NO: 755214 - DNA, 100 bp, Homo sapiens
acgctagctcttggtgttatgagaatggtgaagaaaagggccattgtgaaaaagctgcctattgttgaaactctggagatcccagaagacccacttgtgg

SEQ ID NO: 755215 - DNA, 82 bp, Homo sapiens
gggactgtctatgatgtcatgtttgtcagcacaggaaaccagggtgacagaggagacaaaggcgcggcaggagcagggctgg

SEQ ID NO: 755216 - DNA, 101 bp, Homo sapiens
acccgtactgggcctactctgcaactgaacgaggaagggatgctgttggcttcagagatcaaacacctgccccgaagactcctaataggtcaagagagaga

SEQ ID NO: 755217 - DNA, 76 bp, Homo sapiens
cgccagtgagggagatggagaccaatcacccacccagtgtgcgacaatgcagatcttcgtgaagactctgactggt

SEQ ID NO: 755218 - DNA, 100 bp, Homo sapiens
gggaagccttctcctgagtttttcaagtctgccctgcaagcgataggagtggaagcccaccagatggagaacatcattgcaacagtaagagattccaacc

SEQ ID NO: 755219 - DNA, 82 bp, Homo sapiens
cgactctgtgcctcgctgaggggcgtgatggtgggcatgggtcagaaggattcctatgtgggcgacgaggcccagagcaaga

SEQ ID NO: 755220 - DNA, 100 bp, Homo sapiens
gcttcttgctgctgctggccctggctgcgctgctggcctttgtgagcctcagcctgcagttcttgggccggatgtatcccccgcgttctcccaagtctgc

SEQ ID NO: 755221 - DNA, 119 bp, Homo sapiens
ggcggcgtctccagcgagcggcgcggagctggacgccgcgatcgtggggcccgcgaggcgggcagccggggcgtccagaaatggtggagtcaatgaagaaagtagcagggatggatgtg

SEQ ID NO: 755222 - DNA, 88 bp, Homo sapiens
gagatgcagggcttgcaactccaatgcctaccccgtcagttcagcagaggagaaggcagagcccccccaggctatgaatgccctgatg

SEQ ID NO: 755223 - DNA, 100 bp, Homo sapiens
cagagatggggccctatgtacaaggtcctcatgctgataccgccagtggatgccagaatttgcagtgtggttttcgagcctgctgccgctctggcgaatg

SEQ ID NO: 755224 - DNA, 80 bp, Homo sapiens
ggttcttggtgggatctgagcagatcgcaccccctccctccctggcggagcccctgaaggagctgttcaggcagcaggag

SEQ ID NO: 755225 - DNA, 98 bp, Homo sapiens
catgtccctgggactcctgtctacagagaaaaagaagatatgtatgacgagattattgagttaaagaaggtgctggagaatctggtaaaagcaccatt

SEQ ID NO: 755226 - DNA, 75 bp, Homo sapiens
ggctgctgttgcttctgggccagaggaagagaatgagttggctgattgcaattctggcccaactcaaccctctct

SEQ ID NO: 755227 - DNA, 100 bp, Homo sapiens
agtcagggcagcctgaaggatgcaaattctgcttggtcagaatcgtgatggcattgtgttcagcactgatgactattttcaccatcaagatgggtacagg

SEQ ID NO: 755228 - DNA, 80 bp, Homo sapiens
agttcgtctcttacgtctgcggaagtgcagctgcctcagttcttagcgcagatcacctctgcagcctgcacagccgggcc

SEQ ID NO: 755229 - DNA, 83 bp, Homo sapiens
gcacgggccacctccgcacagggcgccacggagagaggccacaagaggaagctgaatgaagaggacgccgccagcgagtccag

SEQ ID NO: 755230 - DNA, 96 bp, Homo sapiens
cagcctccggagtagctgggattacagagtctctggtaagaagagtgaaagcaaagaagccaagaagtctgaagaaccaagaattcggaagaagcc

SEQ ID NO: 755231 - DNA, 90 bp, Homo sapiens
aaacaactttagatatggatcaggaaagatacaaaattcttgtgtgcagcctcttttggactccagctcttgttctctcgctgaatccca

SEQ ID NO: 755232 - DNA, 101 bp, Homo sapiens
ctagtatcggacatgatcctcatcttttatacactcttagtgctgtccagatccccgtcgaggtcaagatcaagatccaggtctatttcacgaccaagaag

SEQ ID NO: 755233 - DNA, 98 bp, Homo sapiens
aggaatgggacctcgagtcactgtggtgcatacattcagagggccacactggtgtgaatactgtgccaactttatgtggggtctcattgctcagggag

SEQ ID NO: 755234 - DNA, 75 bp, Homo sapiens
gttgattatgccagccagatgcagatggtctgtcttctgctgatcccaactctgattggaatgcaccagcagaag

SEQ ID NO: 755235 - DNA, 98 bp, Homo sapiens
ttggatggccgggtggcgcttctgcacgttcctgcaggcacggtggtgtcaaggcagggagaccaggtgtgtgcagtggcctcagggatccggaaagt

SEQ ID NO: 755236 - DNA, 50 bp, Homo sapiens
ggccgagcaggctgagcgatacgacgttgtcatttacgtgctgaagcata

SEQ ID NO: 755237 - DNA, 97 bp, Homo sapiens
ccttctggagagctgaccaaacactaaggaagtcaaatccttcctgggaggatgaagatctgccagctctgaggattctggctgggaagaaaaagag

SEQ ID NO: 755238 - DNA, 96 bp, Homo sapiens
ctgctgccagcacctgccactcagagcgcctctgtcgctgggacccttcagtctgcagatctccaggggagcccaccagcctagtcaacatggcct

SEQ ID NO: 755239 - DNA, 96 bp, Homo sapiens
ttgggagatccacagctaagacaccgggacctcctggaagccaaaaatggagatcaaagacgctggccttcagacctgatcagactcccaggggca

SEQ ID NO: 755240 - DNA, 74 bp, Homo sapiens
ggagcgatgtcattctgctgagcttgcacttaacgtaatcacatattctgcctccatggtggcctctctccatc

SEQ ID NO: 755241 - DNA, 83 bp, Homo sapiens
tcaacagtggacgctgacaccgtcactgagctggcccaggacagagcgggatgccaccagcttgtccaaagggaagttccagg

SEQ ID NO: 755242 - DNA, 98 bp, Homo sapiens
cgggcggaaggcgagcggagcgcggccgcgcgggcagcagacggcagacggtgcccggcgcccacggggagagtagatctggagaaaccaacagctgt

SEQ ID NO: 755243 - DNA, 102 bp, Homo sapiens
ccccagaagtgatcgctcagctggagaacgcggctaaagttctgatggtgaatccgccatactacatcccgctggttgagctggtcccccacccggagacgg

SEQ ID NO: 755244 - DNA, 75 bp, Homo sapiens
cgcctatctcttcaagtacatcataatcggcgacacagaagtcaatgaaaggattctattttgcaaagctgtatt

SEQ ID NO: 755245 - DNA, 100 bp, Homo sapiens
ctttatgcacaggccagagcaaaaggcaagacggctggcttggtgagtgatcaccagcagcttgcaaaacttatccaggagtcgccaaccgttgaactga

SEQ ID NO: 755246 - DNA, 82 bp, Homo sapiens
tgactgtgagctcatgttgcaggaggaactctctggaatgaaaaataaaatacaagtagttgtgcttgaaaacgaagggctc

SEQ ID NO: 755247 - DNA, 80 bp, Homo sapiens
cgggtacaagcaattctcctgcctcagcctcccgagtagttgagaatacagcttggaagctcgaagtctggctgtggcca

SEQ ID NO: 755248 - DNA, 78 bp, Homo sapiens
cgcgggaggtgttcgagaacgaccccgagacggttgggagccacgtgtaccagtgtgtgttgatcttggcttgattca

SEQ ID NO: 755249 - DNA, 75 bp, Homo sapiens
gccgcgcacttcgtcatgttcttcgcgccctgcagggtttccaggcctgaggtgcccgccctggccccaggagaa

SEQ ID NO: 755250 - DNA, 50 bp, Homo sapiens
gctcccgggctggactcaggcttctcagcgtgagtgcatctccatccacg

SEQ ID NO: 755251 - DNA, 100 bp, Homo sapiens
cggaagcccaagtggcacaaatgcagaaactccctctggtgatgatttcaggtgtcagttgtacccgaggcgttctcagcagcagcaagtacctgtggtg

SEQ ID NO: 755252 - DNA, 75 bp, Homo sapiens
gcttcaacaccctgcgcaccaaggagcagttggctctcaaaggtctatggccctgtgttcactctgtattttggc

SEQ ID NO: 755253 - DNA, 75 bp, Homo sapiens
atgctgacacagacaagtgggctgcagagctctcgggtgagaatgagatggtgatcatgagacctggaaacaaat

SEQ ID NO: 755254 - DNA, 83 bp, Homo sapiens
cttcgactctcaaagcaataccaggatagctgttgtttcagagaaaggggtcttgctcctcagaacaaaccagaattgcagaa

SEQ ID NO: 755255 - DNA, 82 bp, Homo sapiens
ctgatgcacgttccatccggcgctcagctgggcttgagtttccaacatggctagatccatcagaaactgaagccgtggagaa

SEQ ID NO: 755256 - DNA, 100 bp, Homo sapiens
tgctgcaggacgccatcagcaagatggaccccaccgagaaccaaacctcaaggtaccagggaatgtcacggctgtgctgggagagactctcaaggtcccc

SEQ ID NO: 755257 - DNA, 75 bp, Homo sapiens
gttgtgaagaataacatgggagagaagcatctttttgtagatctcggtaggagcattgcttttcgtggtgaaaga

SEQ ID NO: 755258 - DNA, 74 bp, Homo sapiens
cgggaccgggaccgccgccgccgccgccaccatgcctcagttttatgaccctgtggagccagtggactttgaag

SEQ ID NO: 755259 - DNA, 100 bp, Homo sapiens
ccgggctgtggtcactaatgtacaggcagaaaacgagaggctcaccgcagtcgtgcaggatctgaaggaggtgctgaatgtggagtaaatgcagatgttg

SEQ ID NO: 755260 - DNA, 90 bp, Homo sapiens
ccactcacctcatggtgctctgctgcgtcttacgaggccccacagtatcaaatatccgcctggctggattagagtatgttctgcacttca

SEQ ID NO: 755261 - DNA, 105 bp, Homo sapiens
tgaacttgagcttatgacatacattaatgaaaactgggatagattgcaccctggagagagctgaacgacaaaggaatgaagcactatataatgccgaagagctga

SEQ ID NO: 755262 - DNA, 98 bp, Homo sapiens
aatgatttctccagtgctcatcttgttctcgagttttctctgccatgttgctattgcaggacggaggtgttcagacttacatctcttggatatgttga

SEQ ID NO: 755263 - DNA, 100 bp, Homo sapiens
ctccaccctcacctccgtctcctcccacggaactgatgactcggttgtttctgaagatcgacttaatgaaactgaactgacagatttagaaggccaacaa

SEQ ID NO: 755264 - DNA, 50 bp, Homo sapiens
gtggaccacaggccctcgttgcccagatatttctttctccaggaagaaaa

SEQ ID NO: 755265 - DNA, 75 bp, Homo sapiens
aggaaagagttcctggatgacctcttcgtctttatgcagaagaggggtcaaaatgcagatcttcgtgaaaaccct

SEQ ID NO: 755266 - DNA, 75 bp, Homo sapiens
acactgagattataagggagccagcttcctgcctgacacagctcacttcaagaagtgcacaatgtcagaacgtgg

SEQ ID NO: 755267 - DNA, 101 bp, Homo sapiens
tggaaaatgatcttagggaagaaaacagcttgataactatggacagcaagaacttgcggatctttttgtgaactataatgtaaaatctcccattactggaa

SEQ ID NO: 755268 - DNA, 75 bp, Homo sapiens
tgccattgagctcaccaaaatgctctgtgaaatcctgcaggttggggaactacgcattgagcctccacgggagtc

SEQ ID NO: 755269 - DNA, 74 bp, Homo sapiens
gcaggacagccgaactggaatctggatgagcagctcaagcaggtggatgaaaatactaggaaaagtttatttaa

SEQ ID NO: 755270 - DNA, 100 bp, Homo sapiens
caggactgaccgctgccgcccagcacgtccagaccttagctggatctccaaaatacaagtgaatcacccggcagttctgaggcgtgcggaacaaatccag

SEQ ID NO: 755271 - DNA, 82 bp, Homo sapiens
atttcaggagcagcttctttactgtaaaatcccagaggaatccaaagccctctctttattggctcctgctccaaccatgaca

SEQ ID NO: 755272 - DNA, 95 bp, Homo sapiens
gttagccccgcgcagccgccggcgtcgccgccatggacctagcctacaacacagcagtcccctcaggatgagcaggaaaagctcttggatgaagc

SEQ ID NO: 755273 - DNA, 100 bp, Homo sapiens
tcaccctgacacaaataaggatgatcccaaagccaaggagaagttctcccagctggcagaagcctatgagatgactcctgaggactacgaaaagcttggc

SEQ ID NO: 755274 - DNA, 100 bp, Homo sapiens
gggggggtcagccccccgcccggccagccgccccgtccgggaggtcctgttcgtcattgccaaattcctgacttgcctgtggatgggagcctactctttg

SEQ ID NO: 755275 - DNA, 100 bp, Homo sapiens
acagaacctattactaaagacttggatttccaactccaggaccctttccttctctacagaaatgccagatcattccaaaatatgcccggtgctatccgcc

SEQ ID NO: 755276 - DNA, 100 bp, Homo sapiens
gcttcttcagctctgagaccaccgcagcccactccctaggtatctctggagacaaagtagagatagaccctgttacgaatcagaaagccagcactaagtt

SEQ ID NO: 755277 - DNA, 100 bp, Homo sapiens
gccctgcgcagctgccccatgtgccagaaggagttcgcccccaggcagtttgaaaattgcaaggagggactttaagactacttctgatttgcaaagattg

SEQ ID NO: 755278 - DNA, 80 bp, Homo sapiens
gcggatctcaccgccgctcaggatatgcacccaatgtccagggagcgtgcaaaatttgtcaaaagtggccttttattgta

SEQ ID NO: 755279 - DNA, 90 bp, Homo sapiens
aaatttcctttcttcaatcccatccagacccaggccagagtcctggtggaggacgatgagatcatgcagggattcatcagggctttcagg

SEQ ID NO: 755280 - DNA, 101 bp, Homo sapiens
aattgagattcctgatgaagatgatgatgtcctcagtattgattcagagcatgtcctttgcaacctgatcacacaaatgatgaaaaagaatagaactttct

SEQ ID NO: 755281 - DNA, 89 bp, Homo sapiens
gaccctacccagggttctagaaatccaggcaggcatctatcttgaaggtactgctataaccagaatttggtagaaaaaggatttacttg

SEQ ID NO: 755282 - DNA, 97 bp, Homo sapiens
cgcgggcaaggccatcggcgtcctgaccagcggcggcgacgcgcaaggtgagaagccctaccactgcaactgggacggctgcggctggaagtttgcg

SEQ ID NO: 755283 - DNA, 75 bp, Homo sapiens
ggaagtgagaagcccaactaaagccccacatttgcagctcattgaaggaaaggttgttgaagattggaaattcat

SEQ ID NO: 755284 - DNA, 80 bp, Homo sapiens
actacaaggtcgcctacgtgcagctggtcatcatcagatttgaaatatttaaagtggatacaaaactatttcagcaatgc

SEQ ID NO: 755285 - DNA, 100 bp, Homo sapiens
agcagttctacaaggcgagccaggtctggagcccggcactgtggtcataacagagcaggcagtggatacctgcttcaaggcagagtttgagcagattgtc

SEQ ID NO: 755286 - DNA, 90 bp, Homo sapiens
gtgcgtctgccgcagagtcggcacctgaaggacatggagagtgatcagcagctggactgtgccttggacctaatgaggcgcctgcctccc

SEQ ID NO: 755287 - DNA, 98 bp, Homo sapiens
aaaaccacaaatgtttttctgttttgcctgaatacatgatttaaacaagagatttccacagaagacctgtcatttactccatcctttatagtgatgct

SEQ ID NO: 755288 - DNA, 75 bp, Homo sapiens
tctgctattgggagcttcacacagaggatgagagagagcggatggtgcaccatcatccattgctttggtccaggc

SEQ ID NO: 755289 - DNA, 50 bp, Homo sapiens
cacactggctatcattgatccaggttttgatgatgatggttcagaatttc

SEQ ID NO: 755290 - DNA, 55 bp, Homo sapiens
gaggcctccccagccacatggaactccttgcatcccagggatgaagcccacttga

SEQ ID NO: 755291 - DNA, 82 bp, Homo sapiens
tatcagccactgctggctgttggtcacgctcccgggatcggcgtcggaggcggtcaagatctacctcccgagagcgacggaa

SEQ ID NO: 755292 - DNA, 75 bp, Homo sapiens
tgagatggtggatgaacccccaggattcaggtccgttcctctgaagaatgggtacagcgaggacatagagctggc

SEQ ID NO: 755293 - DNA, 100 bp, Homo sapiens
tttctagcccaggacttggatcaacacctttaacttcaagaagacaggccttgcttatccaagagtcaaaatggaaattaccacacctactacagttgcc

SEQ ID NO: 755294 - DNA, 90 bp, Homo sapiens
ccgcgttcccagcccgggtccccgcgttcacagccccagcgcaggccgagtgatagctactttcacatgttcaggagaaaaggaagtaaa

SEQ ID NO: 755295 - DNA, 75 bp, Homo sapiens
ctactctttcccctgttaatcatagcttggaattactctatgtctgtatatcttgtacggcagcttacatcagcc

SEQ ID NO: 755296 - DNA, 96 bp, Homo sapiens
gcaggatggtggtggatgcggccaactccaatgggcctttccagcccgtggtccttctccatattcgagggctgccaggcgcccagctgtgcccag

SEQ ID NO: 755297 - DNA, 96 bp, Homo sapiens
aaaggcaaaactcacacttactatcaggtgctgattgatgctcgtgactgcccacatatattaccaccaccctgtgaatctgcctgcacagtacca

SEQ ID NO: 755298 - DNA, 100 bp, Homo sapiens
catgaggaactttcagaagggccaggtgacccgagacggcttcaagtacctcgcctccctgggaatacagtcccttgttcaacagagagcttttgctggg

SEQ ID NO: 755299 - DNA, 75 bp, Homo sapiens
ggctgacctcctgatgcctcacttgtgtaaacaggaacatcgataagtagtgtaaaaacttgcacaatgaaatcc

SEQ ID NO: 755300 - DNA, 83 bp, Homo sapiens
ggcgggaacaccttcatggcccctttatagctgcgctggccgcgcgccgaacccgagtccggcggcaccgacgacgacctcaa

SEQ ID NO: 755301 - DNA, 90 bp, Homo sapiens
gaaagacatggagattctcttaaaaaggaatcggggctgtctgtatggattggtgggcagctgcaccccctggagaatgtgccccccgcc

SEQ ID NO: 755302 - DNA, 83 bp, Homo sapiens
ctagagatgcagattaattccaaccaaatcccggggctcatctggattaataaaggtcagcagcctctggacccgtgaaagag

SEQ ID NO: 755303 - DNA, 100 bp, Homo sapiens
agcttttccatcctggagatctacaggatttatcaaatcgagtcactgtcaaggcgaactttctgaccaagtatacaactacccagagggcctaggagaa

SEQ ID NO: 755304 - DNA, 75 bp, Homo sapiens
ttctcctctcctaaccgttaagtgcgctaagatgccatggacaatattaccaggcagaaccaattctacgatacc

SEQ ID NO: 755305 - DNA, 100 bp, Homo sapiens
tcagaggggagtcatcatgagcgatgttaccattgtgaaagaaggttgggttcagaagaggggtctatgctccatcagcaagcactgccgactacaatag

SEQ ID NO: 755306 - DNA, 82 bp, Homo sapiens
gcgccagcggccgagcgggcggcttcctggcctgggcgctccggtggcggcggagagtgcctggtgaagaatgtgatgggat

SEQ ID NO: 755307 - DNA, 100 bp, Homo sapiens
gagcccggacgggcgccacattctcaacaccacggaattccatagttgtctgctggttctcagcttgaagaagattctgcagtccttattgatccttttt

SEQ ID NO: 755308 - DNA, 100 bp, Homo sapiens
aactagtgcaggcgtttggaggacataggacactctggccatgtcaatccaattacagttgattcttgaacaacagaggtttgaactgtgtgggtcaacc

SEQ ID NO: 755309 - DNA, 100 bp, Homo sapiens
gcccaaatcccggaaactccagcgtgtctccagccgtggagtatgctgctgctgttccgctttgcgtcctcgctacaaacgcctggtggacaacatattc

SEQ ID NO: 755310 - DNA, 101 bp, Homo sapiens
agcggcgagatcgtccaactgaacgtaggggggaccaggtgggagagttcagagcacacgctgctgagtggacagccaacgtcacagccgaattcaaagaa

SEQ ID NO: 755311 - DNA, 107 bp, Homo sapiens
ctacagccaaacatgcaggactctagtaacccgcgaaatgatgggatagcgttgcaaatccttaaaagagtcttaacgtgccagaaatcacatccaaagtcagttcc

SEQ ID NO: 755312 - DNA, 103 bp, Homo sapiens
ggacagcgaagctgctgcggttcctgagccggagtaagactttgaccccgacgcaggcttcagtgattgccgcggatcagaagcctgagcactttggctcgag

SEQ ID NO: 755313 - DNA, 98 bp, Homo sapiens
ccgacgatctactatgtgatgtcagggcctgcgtggtaatagcctgcagctggtgttttgagaagccctactgctgaaaacttaacaattttgtgtaa

SEQ ID NO: 755314 - DNA, 109 bp, Homo sapiens
gcttcgtcaccccagaccttgccagagacctggcaaatgacatcatgacactgtgtactaatggtcacttgatgtgcgctggctgttttatccacctactagcagatgc

SEQ ID NO: 755315 - DNA, 90 bp, Homo sapiens
cccagcatcatcttccccacacaatatatggtgagcaaggcaaaagatgtgattgaagagcatggtccttcagaaaaggcaataaacggc

SEQ ID NO: 755316 - DNA, 100 bp, Homo sapiens
cagctaatctgcctccttctccacccccatcacctgcctcagaacagactgtcacagtggaggaagatcaccctctacgaggaccggggcttccagggcc

SEQ ID NO: 755317 - DNA, 95 bp, Homo sapiens
ctcatcccggtggccgccgcgcaggagcctcccggagctgaggcctgtgggagcaaatctgtgtatgacggcccggagcaggaggagtattcgac

SEQ ID NO: 755318 - DNA, 100 bp, Homo sapiens
ccagatgcctggacccagagtgtgggggaaatatctctggagaagccctcactccaaaggctgtccaggcgcaatggcaatttttccaccccatcggttt

SEQ ID NO: 755319 - DNA, 83 bp, Homo sapiens
ccgcgccgcatggaggccggctgaggagcgccgctgcctcgcctcggattttttatcaagcagaaatgcatcgaacaacgaga

SEQ ID NO: 755320 - DNA, 80 bp, Homo sapiens
ctccactctcttcaactgcaactctgagtaaacatcagtctccaaagataactacatcccttcttcccatcaacaatggc

SEQ ID NO: 755321 - DNA, 100 bp, Homo sapiens
acaaaatatcttggctcacgtatttaagagcctgaatattccagaaatatgttggtgaagtctttaacatcgtcagtcaacaatcaacagccaggccagg

SEQ ID NO: 755322 - DNA, 100 bp, Homo sapiens
caccaaagggggctgctgaccgagagagctcactcagccagagcccccctccatgcgcctgaaggcccgacccagcagccctggcttttccgtgcttacc

SEQ ID NO: 755323 - DNA, 123 bp, Homo sapiens
gatgctgatggtgatggagattttgatgtggatgatgccaaagttttattagatatgaaaaacagtagctccgtatcgaatacattgacaaatggatgtgtcatcaatggacatttggacttc

SEQ ID NO: 755324 - DNA, 74 bp, Homo sapiens
gttggctgcctctgctggagaagtggtgtcagttgtacccgaggcgttctcagcagcagcaagtacctgtggtg

SEQ ID NO: 755325 - DNA, 83 bp, Homo sapiens
caattcccgaccgaaccaaacggagccccctggtgaaggccatcttccatgcctgcagagccatgcatgcctcactccctggg

SEQ ID NO: 755326 - DNA, 100 bp, Homo sapiens
ctggacgaagagctctcctccttcttcctcaactatctcgctgacacgcagggcgaagctgtgctcaggcccgggctggacgcagagccagagctgtccc

SEQ ID NO: 755327 - DNA, 48 bp, Homo sapiens
cccagccacctctggaagaacaaagtcaacgaaggcttgaaccaacct

SEQ ID NO: 755328 - DNA, 100 bp, Homo sapiens
gacccaagcccgctgagcaggatgagggtgagcatgggtttatgcgtcttaggcattattgtgatggcgagcaccaattctctgatgtggaccttcttta

SEQ ID NO: 755329 - DNA, 73 bp, Homo sapiens
ccaacgccgaggtgctcaaggtcctggggaaccccaagagtgatggtgaggaagaggatggagatgaagatga

SEQ ID NO: 755330 - DNA, 100 bp, Homo sapiens
gatgagaagaagcacagaagtcaacccaaagatctatcctgaccaagatgaagcagcagggtcatgagacagccgcctgtccggagactgaagagatacc

SEQ ID NO: 755331 - DNA, 100 bp, Homo sapiens
ctaactttgcccaatggagagcgcctcagtcttccacccaatctcattcttggaatcccagaacaggccttaagtcttctccacatggccatcgagccca

SEQ ID NO: 755332 - DNA, 75 bp, Homo sapiens
gctgtttcatgtgcaggaagaaagtgggacttactgttcgatcctttggtacagaagacagaccgacagatcgtc

SEQ ID NO: 755333 - DNA, 75 bp, Homo sapiens
cggacgggttcctctccgagctcacccagcagctggcgcaggccaccggcaaggcccgaggcttcttcaagaagg

SEQ ID NO: 755334 - DNA, 80 bp, Homo sapiens
gccgattcctcctccttggtcgccgcgtccttggctggcgtgaaccacgaaggcggaggaccggggcatgctgctgaaaa

SEQ ID NO: 755335 - DNA, 96 bp, Homo sapiens
gcacaccatcaacatctccctcagtctgcacctttacaatatcatgaaggaagggctgttgaattgtagcacaaacctgaacctggtcactgactg

SEQ ID NO: 755336 - DNA, 100 bp, Homo sapiens
tggatgctttatgtcctcgaagatcagaccgagagaatcaaagaatcttcaggatggcagcaagtgtttacgagcccatatttggattggactatcgaac

SEQ ID NO: 755337 - DNA, 100 bp, Homo sapiens
tcttattcattttccagtgtctgtaaagggaagtcgagataacatgagtattgtactagtttgcttttcaaatgctcccaaggtctcagatgaagcggtg

SEQ ID NO: 755338 - DNA, 100 bp, Homo sapiens
cctttctccacgcactgcgcttacactgaacattgatgatggcacctcagatcgcccctacagccatgctctggtggctggaattgaccgctacccccgc

SEQ ID NO: 755339 - DNA, 100 bp, Homo sapiens
tggtgcccagccgggaactccccatcgcgttttgccagcgataatacgcctcaggttttttgcatgtctgacacccatgactccacctggaccttatggc

SEQ ID NO: 755340 - DNA, 87 bp, Homo sapiens
ctggataagcagtgtgacttggaaattatggaaatcaagcaacttcaacaggaacttcagtgggaatgtaagacggacttagatatt

SEQ ID NO: 755341 - DNA, 83 bp, Homo sapiens
ttcaggcactacaccgtgggctcctatgacagcttcgacacttccagggaaagcaggcaggatgggagagtcgccgatagaac

SEQ ID NO: 755342 - DNA, 82 bp, Homo sapiens
caggaactcgactcagacgtggataaagataatcccggtcatcaagagagagggcacaggtacagagatgcccatgattggg

SEQ ID NO: 755343 - DNA, 89 bp, Homo sapiens
agttacttcatcgtctccatcctctacctcaagtatgagccaggttatgatgtgattgctcaagcccaatctgggactgggaaaacggc

SEQ ID NO: 755344 - DNA, 83 bp, Homo sapiens
gtctgggattactgcacggggtcgcgccgtggcggagcagacaatgcagatcttcgtgaagactctgactggtaagaccatca

SEQ ID NO: 755345 - DNA, 119 bp, Homo sapiens
tgggaacctaaattattctgcaagacaaagggaagaaataaaattttcccatactgacatttatgacattaacagagaacaggactatgtcaagaattctgagggtatacttggtgaaa

SEQ ID NO: 755346 - DNA, 101 bp, Homo sapiens
accatggggactgtgcacgcccggccggtgatgaacaatgacaagcactgctttgaatgctatggctacgacatcatcatcgacgacaagctgaagccctg

SEQ ID NO: 755347 - DNA, 101 bp, Homo sapiens
aaagaggaggaaggagggacttcttggcttctcccagcatagccccagggaatggatttgtaaactcaagagcttctccaaatttgattggagctactggt

SEQ ID NO: 755348 - DNA, 82 bp, Homo sapiens
aaactctttggatgattctgccaaaaaggacttctgcacggacctggccgtctccagtgccaacttcattcccacggtcact

SEQ ID NO: 755349 - DNA, 90 bp, Homo sapiens
cctgtgacctgtggagacacggccagatctgccctccagagcctcacagtctactcagagaaaaataaaagaaggcaaaatgagtcctcc

SEQ ID NO: 755350 - DNA, 102 bp, Homo sapiens
aacattcaagtgaagcaaaagcctttcatgattatgtcaaaatgcagatcttcgtgaaaacccttaccggcaagaccatcacccttgaggtggagcccagtg

SEQ ID NO: 755351 - DNA, 74 bp, Homo sapiens
atatcgtgtctggagcagtggagcccaaagacccctggagacatggttgaggcctctggtgtctacgcagccag

SEQ ID NO: 755352 - DNA, 82 bp, Homo sapiens
gggtctctgggggatccagtgacgtgcccaaccacagagaccagttccagggtctccctccactgctgtagtaacccgggtc

SEQ ID NO: 755353 - DNA, 75 bp, Homo sapiens
ccagcctcaggcgtgcgcggacggtgtgcgggaggactgacaaatggtagtggtcgatatatctctgcagcacct

SEQ ID NO: 755354 - DNA, 101 bp, Homo sapiens
acccggcacactgtgagttcctggacatcaagggctgagctacagagacttctgaagtggagagtctgcgacctcctcggttcttcaatgaagatggagtt

SEQ ID NO: 755355 - DNA, 50 bp, Homo sapiens
ggatagataccgaattcttatcacaaagcgtgagtgcatctccatccacg

SEQ ID NO: 755356 - DNA, 83 bp, Homo sapiens
cagtgccctgagggccttcgagagctaccgcgccagacaggttggcgctgtacgtttatgagtacctgctgcacatcggtgcc

SEQ ID NO: 755357 - DNA, 96 bp, Homo sapiens
tgccagccaagtgctggtgtccatattgtgatgcctggttattacagacccaacatgagtgaagtttcctgcaagaaacgggacgactatttggaa

SEQ ID NO: 755358 - DNA, 98 bp, Homo sapiens
ctggagtttacacaggcaaactgtcagaaaagagtagcctgggctgtctggaaatctgagatggcttcagtgacagatggtaaaactggagtcaaaga

SEQ ID NO: 755359 - DNA, 85 bp, Homo sapiens
gatccagcaaggtcggcagagcaaggggcttacgcagaaggacctggccacggaggctactcacagtcgaactacaactccccgg

SEQ ID NO: 755360 - DNA, 95 bp, Homo sapiens
cacctctgagcttgctctggaactcattgaccgctatgaaccttcagacagtgctcgagagctagccttgcagcaggaggaagggaagaccgtga

SEQ ID NO: 755361 - DNA, 50 bp, Homo sapiens
gtctttgttccctgcagccctcccacggactttgtgttttatgccccacg

SEQ ID NO: 755362 - DNA, 82 bp, Homo sapiens
agtgtgacaagtgtggcaagctcatcaatgctgtcgagcttaagaagcagctgcctgtaccctgttgaaacttcatggccac

SEQ ID NO: 755363 - DNA, 100 bp, Homo sapiens
atcaacaacatcaatgacttcctgaaaggatgtgcaaccctccaagtggaatactatactggcaattgctggagaagattttgcaattgttgcttctgat

SEQ ID NO: 755364 - DNA, 101 bp, Homo sapiens
gatggggccagaacggacaggggccgcgccgctgccgctgctgctggtgttagcgctcagtcaaggcatttaaacttccctcttagaactgcttttgtggc

SEQ ID NO: 755365 - DNA, 157 bp, Homo sapiens
aagctatttcatagatttttgcaagaaaaggggccttctgtggattggggaaaaatccagagaccccctgaagattcgaataagacctggaagtttgttgaaggtctccctattaatgatttctcacgtgagaagatggatcttactgcaaaggaac

SEQ ID NO: 755366 - DNA, 82 bp, Homo sapiens
cttcatcaaaaatagtgatagctttgataacatgattatgatatgagggtggatgatttccttcgtcgcacacaagctgttg

SEQ ID NO: 755367 - DNA, 75 bp, Homo sapiens
gttcctgctcgcgatcagcctgctcaactgctccaacgccacgcagtggtctcggaaagagggtcgtggtcccgc

SEQ ID NO: 755368 - DNA, 89 bp, Homo sapiens
tgaagctgtgggacacgcggttcttctccagcgccctggcctccctcaccttggacacctcgcttggccttgccaacattccactaacc

SEQ ID NO: 755369 - DNA, 100 bp, Homo sapiens
agcctgtatggacagggtcaagaccagaggaagagtcttcatcatcctccagtgatgaagatgaggatgataggaaacagattgatgagctactaggcaa

SEQ ID NO: 755370 - DNA, 74 bp, Homo sapiens
gccctcaaggtcgtgcgtctgaagcctacaagaaaggccactgcagaccccggaaggtcaaggctgacatccca

SEQ ID NO: 755371 - DNA, 90 bp, Homo sapiens
taaggattccaagtaactcttatttgattgtcctgggtcacataatgccagctgagcgtaaaaagccagcaagtatggaagaaaaagact

SEQ ID NO: 755372 - DNA, 75 bp, Homo sapiens
acaggaacctgctttctctcgatgaggataacatccctccagaagatggagccctctggcacaaatggaagaaga

SEQ ID NO: 755373 - DNA, 100 bp, Homo sapiens
ctttcttctggcatcattaacggaccttttaccatgaatagttctactccttctacaggtgtgtatgttaataacgacatgatagtcactgacaacaacg

SEQ ID NO: 755374 - DNA, 74 bp, Homo sapiens
gggcacgttctcatcagcatggtccttggtatagtagtgggagttctccttcaggatcatgatgttcgtcagag

SEQ ID NO: 755375 - DNA, 75 bp, Homo sapiens
tgttttaatgagtggggaaaattctgccaaaccaacgcagctttgggaaggtgatcataaacagcacaatcacac

SEQ ID NO: 755376 - DNA, 100 bp, Homo sapiens
ccaaggtcagaaggaagcaccacacagaggttatcaatactctggctgaccatcatcatcgtgggactgactttggtggaagtccttggttacatgtcat

SEQ ID NO: 755377 - DNA, 87 bp, Homo sapiens
cgcttgcagaagggaattgaatagatgtctccctattggttaatttggagtggcccctggagtcagtttcctacaccatccgaggcc

SEQ ID NO: 755378 - DNA, 100 bp, Homo sapiens
gcagaggaaccacacgctgatcatgaataactgaagtgaagtgatggactccgatttggagagtagtaagacgtgaaaggaatacacttgtgtttaagca

SEQ ID NO: 755379 - DNA, 90 bp, Homo sapiens
gctgtgccgcttcaccgacaacgagttccactcctcgcacatctccaccatcggatggtgattgctcacaccaaagccttggacccctcc

SEQ ID NO: 755380 - DNA, 90 bp, Homo sapiens
gttctgatcactactgacttgttgagcctgccagtggagacactgggcccggcatccaggatggacccagaatctgagagagccctgcag

SEQ ID NO: 755381 - DNA, 74 bp, Homo sapiens
gtttactataaactggcaagaggatggcctgaagtttgggctggaagttattaaaggtggaagaaggtccatat

SEQ ID NO: 755382 - DNA, 135 bp, Homo sapiens
cctctgccatcgagatgacgctggtggaagttctacagaagaagctgatggccttcaccctgcaggacctgattgtgttaatggtcaacttctcctcccgcaccacgtccatggatatccaaagaaatttagaag

SEQ ID NO: 755383 - DNA, 100 bp, Homo sapiens
gaagaggagcgcgtccccggggaaatgaggcaagccaaattagagctgagagttgctgtagcaaaagtggaagagttaactaatgtgactgaagatctgc

SEQ ID NO: 755384 - DNA, 75 bp, Homo sapiens
tcacatatggatactttcacagttcagggacaagaatccttcaagaaacaggaaaaaactcctaaaacaccaaaa

SEQ ID NO: 755385 - DNA, 90 bp, Homo sapiens
ctgaatcgacagtttcttttccggccctgggatgtcacggacaaagcaggacctcataaggaaatctacccctatgtcatccaggaactt

SEQ ID NO: 755386 - DNA, 90 bp, Homo sapiens
ccagcctggaggcagtggggacagcatccccatcacagctggtcctttggggtcctgctctgggagatcttcacgctggggggctccccg

SEQ ID NO: 755387 - DNA, 82 bp, Homo sapiens
gtaccgggacgtgatgttggagaactacagcaacctggtggcagtggggtatcaagccagcaaaccggatgcactcttcaag

SEQ ID NO: 755388 - DNA, 90 bp, Homo sapiens
gaagccgagttcaacatcctcctggccaccgactcctacaagcttgagagactgaaaggatttgaaggcccttcgcatctatgtgactga

SEQ ID NO: 755389 - DNA, 100 bp, Homo sapiens
agcaggaaaccatctctggtgttagaacttcaggcatcttgaaacactctgaagccgggggcaatcttttcaggctgaaggtgatgtggccgccctcaac

SEQ ID NO: 755390 - DNA, 90 bp, Homo sapiens
ggaaagaagttgcaaaacactgggaagtgcacggctgtctataacgtgctgccgggtctcaggatggaggagtgaagtctcctgtcgccg

SEQ ID NO: 755391 - DNA, 100 bp, Homo sapiens
gagccatggagaagggacagacatcaacttttggatccaagctggagtgcctgggtttcccaaactctcgattgcctcttgcaagcagatgacctgggag

SEQ ID NO: 755392 - DNA, 82 bp, Homo sapiens
ccaagccctggtgccaggtgtccatccccgtgctgaggttaatttggagtggcccctggagtcagtttcctacaccatccga

SEQ ID NO: 755393 - DNA, 74 bp, Homo sapiens
ttgtgggcatttgatgtgcacctcttgccttacggcatggcagattgtagaaggcatgaaacaaaaaatgtgga

SEQ ID NO: 755394 - DNA, 100 bp, Homo sapiens
ctacacctgcgtggccatgtccagcctgggcgtcattgaggcggttgctcagatcacggtgaaatgagcacgtgcgaaaggtcttccagaagcaggcaag

SEQ ID NO: 755395 - DNA, 82 bp, Homo sapiens
gctggttctgaagcaagaacaagaggaataccagcgggaagggatcccctggaaacatatcaaggatctggattttgcataa

SEQ ID NO: 755396 - DNA, 121 bp, Homo sapiens
gaactaagcaaattagctgagaccacagataaagtcaaacaaggcttttgggaagaatttgagattatggtgacaagctgaacatggagctgagtgagaaatacaagctggacaaagagag

SEQ ID NO: 755397 - DNA, 97 bp, Homo sapiens
gcaacttgcccagctatgagagacagagccaggatttgaaaccaggcggcttggatgtgaagtctcaggaagcagctcttcgggcagcgcctgacat

SEQ ID NO: 755398 - DNA, 90 bp, Homo sapiens
gccccgtcctccttcgccgccgcgcacaaccgcacgtgcagatattctctaagccgctttcatcatgggagaaatagagcagaggccgac

SEQ ID NO: 755399 - DNA, 100 bp, Homo sapiens
aaggatgtgatgccagaggtcaacaaggttctggacaagatgaagtctttctgccagattgtctacaacctgttgtctctgcgcttcaactcacggatcc

SEQ ID NO: 755400 - DNA, 100 bp, Homo sapiens
tctactggacttcatgcttagatacatgtataacaaggatccgagccagagacaacaacggctcctacgccctgtgcctgctgcacgaagggaaggtgct

SEQ ID NO: 755401 - DNA, 112 bp, Homo sapiens
tacttcatgcgcctgctgaaggacaaggggctactcctgcgctgctacacgcagatctcgacatggcaggagctgaggcagctgcaggagcagatccggagcctggaggaag

SEQ ID NO: 755402 - DNA, 82 bp, Homo sapiens
ccgaagggcctgattcagctgttaccccttcagacagttctgaaattgtcagtactcctgcatttgtaccaacgaaaactca

SEQ ID NO: 755403 - DNA, 90 bp, Homo sapiens
tcactaaagagaaaccagggttccttggagaaatggctgtttccagatctggggtaggaaaattacaggaacaagaatggtaagtccggc

SEQ ID NO: 755404 - DNA, 98 bp, Homo sapiens
gcattatcccctcctcggtggaggcgtacatcactgtcgtctcatgggagaaagacactgtttcacttgtctcagatatatttttgccatcatggatc

SEQ ID NO: 755405 - DNA, 50 bp, Homo sapiens
accggttcctcccaggcggcaagcttttcctccgcaaccatgtctgacaa

SEQ ID NO: 755406 - DNA, 74 bp, Homo sapiens
tgggcttcagaatgcagtgttttcggttccagcaacagatagaaatgctttaagttcactctggggaaagctgg

SEQ ID NO: 755407 - DNA, 100 bp, Homo sapiens
gggcggcgagcctcgagctgtctagaccccacggcgacaccgccaagaagcccatcatcggaaatctgaaatagagtactatgctatgttggctaaaact

SEQ ID NO: 755408 - DNA, 100 bp, Homo sapiens
ctcggggttctccgggagagggggagtgcgcggcggccgcagctgccacaaaccaggctggcagtgatggtgaaagcataggaaactgccccttttccca

SEQ ID NO: 755409 - DNA, 88 bp, Homo sapiens
tcctctttcctcacctgcgggaggagatcctcagcggcgccttgcggagggaccccagtgtcctgatggcaaatttcaagggccacgc

SEQ ID NO: 755410 - DNA, 100 bp, Homo sapiens
tgtgaggcttccccagccatgtggaactggcaagaagttgcaggaaaaatggcttctagcagtggaacttcctcatacacgtgatctgtttctgattaga

SEQ ID NO: 755411 - DNA, 100 bp, Homo sapiens
tccatcatggtgttaaccagctaaagtttgctcgaagccttcagtccgttgcagaggagtagcttgagccgagaacgaggcgagaaagctggagaccgag

SEQ ID NO: 755412 - DNA, 75 bp, Homo sapiens
agaaggtgccggtggtgcgagtcttcggagcgaccccggcaggatttggagttccatggagtgatgagattttat

SEQ ID NO: 755413 - DNA, 82 bp, Homo sapiens
ctcgggcgccccgcagccccccaacatcctgctcctgctcatggacgacatatggccgcgtggaaagtgtcaaaattcttcc

SEQ ID NO: 755414 - DNA, 75 bp, Homo sapiens
tgctcaggctgctcttggctctcaacttattcccttcaattcaagtaacaggctggagtgcagtgtctcaatctt

SEQ ID NO: 755415 - DNA, 86 bp, Homo sapiens
ctccactttcgccagcccgtgccgcgagcgcggcctgcaggagatgccatggacaatattaccaggcagaaccaattctacgatac

SEQ ID NO: 755416 - DNA, 100 bp, Homo sapiens
cccggcagacgggcgtcttctacctgacgctcgtcctcatcctggtcactagcggactcttcttcgccttcgaattcccgacagttaagcaatggggaga

SEQ ID NO: 755417 - DNA, 82 bp, Homo sapiens
cggaaatgtccgaaggccgcagtacttgaccctgtattttgggagtcgaacggaggcgaacctttcctacacacccatactt

SEQ ID NO: 755418 - DNA, 75 bp, Homo sapiens
cccgggccatggccgccgccgatgccgagcttgccgggattgctgtccttgccattggactatggctccgattcg

SEQ ID NO: 755419 - DNA, 90 bp, Homo sapiens
gccagtcgcctccaggccaagagggatccttcacccgtgtctggtaaagaagctaagtggaagagtgtttcctcctctggccgtaaagca

SEQ ID NO: 755420 - DNA, 74 bp, Homo sapiens
ctcgttcccgttccaaatctgcagaaaggttatgattcatccagatccagagagaagaccttcagcaatggcac

SEQ ID NO: 755421 - DNA, 100 bp, Homo sapiens
ttcatcaaggaaggcaagcctgcctgcttctgcatcgacagatagccgtcttcagcttgagccccatcactaggtgtggcctgaagtcactgatcctgag

SEQ ID NO: 755422 - DNA, 90 bp, Homo sapiens
ggagttcgactgcgagggcctgagacggctgcttggcaaggggtatcatcttatttcgtccttcacatctcactaacaagtttgaggaca

SEQ ID NO: 755423 - DNA, 115 bp, Homo sapiens
cgccacctacggcccgagacacaccaggccggcaggctgagaaaagcgagaccgcgtgcgaggaccgctatgtgaaaacttctgagaaacttggagagtggaatgagaaagtgac

SEQ ID NO: 755424 - DNA, 82 bp, Homo sapiens
gtgttatgtcttcggaactgggaccaaggtcaccgtcctaggcacaggcgtcttgctctgttgaagcaagtcagtatccgag

SEQ ID NO: 755425 - DNA, 101 bp, Homo sapiens
caactggccgcatttaagccaattggtggggagattgaagtaaccccttctgctctaaaactagtgagaaagatcagtctaaagaaaaggagaagaaagtg

SEQ ID NO: 755426 - DNA, 82 bp, Homo sapiens
ccggcgtctgcctcgagactgaagaccgatataacacgtgggaaccggaggagaacatcctggaccccaggctgctgatcgc

SEQ ID NO: 755427 - DNA, 74 bp, Homo sapiens
cgtggctgtgctgagggtggcggccggataggtgaatgaaaactttgccattgatttgatagcagagcagcccg

SEQ ID NO: 755428 - DNA, 75 bp, Homo sapiens
cgagaaggagatcgctcggacacagaagaacaaggtgtactaatggtcacttgatgtgcgctggctgttttatcc

SEQ ID NO: 755429 - DNA, 83 bp, Homo sapiens
tgaagaattattttgcaccactggatgttgtttactgatatattcgactttatgggagaaaatttagcaaagaagatcatgtt

SEQ ID NO: 755430 - DNA, 89 bp, Homo sapiens
atgaagctaatcctggcgttccaccagcaaccatgagtggttccatgatgggaagtgacatggacccttcaaagttgtacaagaaagca

SEQ ID NO: 755431 - DNA, 100 bp, Homo sapiens
aactatcttgaaacatttatttccagtccaaataaatgaagcatttggaagacgagagaggcttgttcttgggagtgcaagaaattcatctattagtggc

SEQ ID NO: 755432 - DNA, 100 bp, Homo sapiens
cgtgggtatcgaggcggacgacgaccggctcaacaaggtctcagccttggatcaggagattattgaagtagatcctgacactaaggaaatgctgaagctt

SEQ ID NO: 755433 - DNA, 96 bp, Homo sapiens
agagcagccagggttgcaaccccacataaaattgttcagattccattctgtggggaaattgactgtgaggactggatcaaaaagaccactgccagg

SEQ ID NO: 755434 - DNA, 80 bp, Homo sapiens
cgccttctgcctcagaacggcgtgactcggagacaatgcagatcttcgtgaagactctgactggtaagaccatcaccctc

SEQ ID NO: 755435 - DNA, 100 bp, Homo sapiens
acatcaccttgatttttaatcccacgagggaacgtccaccacctccagcaaagccaccgcccgatgaagaggaagaagaccacatagataagaagtattt

SEQ ID NO: 755436 - DNA, 74 bp, Homo sapiens
ggggtcacccgctacgggaagcaggcctcgccacagatatttggtttccaggcaggactgacgtctttggattg

SEQ ID NO: 755437 - DNA, 83 bp, Homo sapiens
ctgcagaaggtctctggagacatcttcagcaggtggggaccaaggcatactgaacacattttttagcagctgggcaacaacag

SEQ ID NO: 755438 - DNA, 76 bp, Homo sapiens
gacccgtccttcactcacgccatgcagctgctgacggcagcacttgcacctcctgcgccgccgccccccatccaag

SEQ ID NO: 755439 - DNA, 100 bp, Homo sapiens
tgcctgcacgtcgtcaccctgtacaatcgttggggtgactcagtgggaacgccatctgagcggggcatgacctatgacgcactccacgtttttgactgga

SEQ ID NO: 755440 - DNA, 90 bp, Homo sapiens
cacgctggcgttgcagctaggccagcggctcggcggtgagatcgtcagcgctgactccatgcagccacccccctttgaatgtattggaac

SEQ ID NO: 755441 - DNA, 100 bp, Homo sapiens
agaagaccacttaaaagtttggaagctacacttggcaggcttcgaagagctacagaatatgctccaaagaagagtcttataaaatctgctttaggagaca

SEQ ID NO: 755442 - DNA, 98 bp, Homo sapiens
tggtcacctttgagcccaggcgatacgggtccgcggcagctcttcccagtaacagctttacttctgatgtgtctgggaagctgaggatctgggatacc

SEQ ID NO: 755443 - DNA, 97 bp, Homo sapiens
ctgttcagcacatctactcattcaagtggaaatttatgccaactcttctctgacccataatgcctcaggggagacaatccagggtctgagggcgaat

SEQ ID NO: 755444 - DNA, 90 bp, Homo sapiens
gctctttccaacgctgtaaaaaaggacagaggctgttccctatggcaggagctgggaatcccaagtgcaaaattgcaattgttttgggaa

SEQ ID NO: 755445 - DNA, 100 bp, Homo sapiens
accagcagcagccatcatggagccacccgctgccccgacgagtcggaactataccgagatccgggagaagctccgctcgaggctgaccaggcggaaagag

SEQ ID NO: 755446 - DNA, 90 bp, Homo sapiens
agcggagccatgggggacgctcccagccctgaagagaaactgcaccttatcacccggaacctgcaggtggggtggaagacaacccgtgag

SEQ ID NO: 755447 - DNA, 73 bp, Homo sapiens
aagtataataccaagaaagccccacttggtacagtctttgcccgctgcctgatttttcctctcatcgtgacgg

SEQ ID NO: 755448 - DNA, 75 bp, Homo sapiens
aacttctgaaggatgtgaagagggatgtgacattttctggctgcaacaggattaataagaaaattccccggggac

SEQ ID NO: 755449 - DNA, 74 bp, Homo sapiens
catctggataaattctcttcttatcatgtgaaaactgccttctttcacatggagtctcactttgtcgcccaggc

SEQ ID NO: 755450 - DNA, 98 bp, Homo sapiens
cttgactggtcttacattgctgcatcaagaaacccaagctgctgagactctaaaatagagctcaagcttgagaagagagaaccactaaagggcagagc

SEQ ID NO: 755451 - DNA, 75 bp, Homo sapiens
attccgttcagtgctaccactttggattgtctcctgacctcccaatatgtaaagcttactgcagagtgggtctgg

SEQ ID NO: 755452 - DNA, 75 bp, Homo sapiens
gagaaagaagaacgaggaattgctagattgaaaatattgaacttcccatggatacaaaaacaaatgaaagaagag

SEQ ID NO: 755453 - DNA, 75 bp, Homo sapiens
tcaaagtgggacaatatcctctgtggagaacacccccccatggaggcgagcatccatgagtatgttttctgattt

SEQ ID NO: 755454 - DNA, 99 bp, Homo sapiens
gtgacatcaaaaacttctgttccgctgtgcaatatggcaacgctcaggagctgcgggcgtctttggagacacagcgtgctcagagcagtcgactctgcg

SEQ ID NO: 755455 - DNA, 83 bp, Homo sapiens
agggcagccggcgggaggaacgctcactgtcagcgcctggaaacttgctcacgcatccgtgggctctgagaagctctttgcgc

SEQ ID NO: 755456 - DNA, 100 bp, Homo sapiens
gatcccaggaaaagataatgataatgtggacttggaagatggcagaggagttgcagaaaagtatccagattttaaagtgaagtgcgccacaagcaaacca

SEQ ID NO: 755457 - DNA, 90 bp, Homo sapiens
ctgtcagacggggcagcaaccaggagattccctgggcctgcaggaagcccttccgcggaccgaaaggccggagtcctgaaagtcgagcga

SEQ ID NO: 755458 - DNA, 74 bp, Homo sapiens
accattacagataatggtgttggctatgcttttataaagtgtctcaatttaaaatggtgaattactcctatgat

SEQ ID NO: 755459 - DNA, 90 bp, Homo sapiens
gaacaacttcaaagcttcccccaacttttacagaacatccattgcttagagttgctgatcttatctgaagcagcagatcagtgggatgag

SEQ ID NO: 755460 - DNA, 82 bp, Homo sapiens
agggagtggagcttggtttcgggatctcggtgctgcagacggcgagacctcctgcacagagtccgaaattgaagttcagagg

SEQ ID NO: 755461 - DNA, 75 bp, Homo sapiens
cccctgaaggcctcgctggagatcgagtaccaaaggctaagaatattgtacacaaagattcttgatgttcttgag

SEQ ID NO: 755462 - DNA, 115 bp, Homo sapiens
ccccggtccattctcctcgcgctgcaaggatgctcctgggatttcggagaggccgcaggagtcatttcactgcttttggcttctggatgccctcctccagtacacatcgtatggg

SEQ ID NO: 755463 - DNA, 100 bp, Homo sapiens
cagatcttcatgtgtctcttctaagctgaataaagctgttttggaactgtcaggtacctcaaagcgtgtccaaagacaggaggtggtctgtaaaaggttg

SEQ ID NO: 755464 - DNA, 75 bp, Homo sapiens
aatggttcccactgccgggcgagattctggaaaccaaaatggaggaaatgatgataagactaagaatgctgagag

SEQ ID NO: 755465 - DNA, 100 bp, Homo sapiens
agcgtcttatgctgcatcggataaagtgggatgaacagacatctaacacaaagggagatgtgtgattcgtcatcgagatgttcgatcctgtcactatggt

SEQ ID NO: 755466 - DNA, 101 bp, Homo sapiens
gacctactgcagccacgcgggcgagcggctgtgtggatgtcggcgaagccgcgggcgaggtgcaatggatgagcttcatagtctggatccaagaaggcaag

SEQ ID NO: 755467 - DNA, 90 bp, Homo sapiens
ggctgcgaggagccggcgcggtcgcagtctccacggcgcaggcccacggtagcgcagccgctctgagatggcttgttcaatcagtatatc

SEQ ID NO: 755468 - DNA, 98 bp, Homo sapiens
atcctaatgacagtctccaaattcgcctccatctgtaccatgcatataggtaatctcaaagaagctgcaaagtggatggatgaagcacagtctttgga

SEQ ID NO: 755469 - DNA, 76 bp, Homo sapiens
tagaagctaccgagttaccctaagaaagtgtgaaagcagctgtagacaacaaggaagtgaatgaatgttgccgtgc

SEQ ID NO: 755470 - DNA, 82 bp, Homo sapiens
ctacagtccgggaacttctgcaggacgatcctgataacttaagtgactctctcttttccggtgatgaagaaaatgctgggac

SEQ ID NO: 755471 - DNA, 90 bp, Homo sapiens
ccacacgtcccccccgctggacagggcagctactcagcaccgacgctgacagggatggtgcctggttatgaagacagtatggagtttcca

SEQ ID NO: 755472 - DNA, 83 bp, Homo sapiens
ttgcccagtatctcatcaacgccagattcttcgctgctgctgccttaccgccgagaaccaccacccgccaggcgtcttgcggc

SEQ ID NO: 755473 - DNA, 75 bp, Homo sapiens
gacaagcacacactatggcgctgaaacggattaataagtatcgtcagtgaagcaggagcatcaatctacagtgtc

SEQ ID NO: 755474 - DNA, 100 bp, Homo sapiens
caggagttcattgcaaatctgcaaggggtaaatgagggtgttgatttctccaaggatctgctgaaagtagttgatgtcacttggcgatattcctgcaaac

SEQ ID NO: 755475 - DNA, 50 bp, Homo sapiens
gtcagagctgaggtacttcgtgaagttggtggctgaattcctgcaggacc

SEQ ID NO: 755476 - DNA, 90 bp, Homo sapiens
tgagatccataagcacgtgcatttcagcagcagcttcacctccatcgcctcggagaaagggctattgcaagacacgaagtccgagaaatt

SEQ ID NO: 755477 - DNA, 83 bp, Homo sapiens
cagccgccaccggcagcagcagcaccaccggacgagatgccctgtatccaagcccaatatgggacaccagcaccgagtccggg

SEQ ID NO: 755478 - DNA, 90 bp, Homo sapiens
ggtgaatgtgtgcggacacactctaacattcagaagattctcggccttgccccttcacgagccgccaccaagcaggcaggtggatttctt

SEQ ID NO: 755479 - DNA, 100 bp, Homo sapiens
aatcttcaaccctttcccacaaaagctaattgagtacacgttcctgttgagtacacgttcctgtttgcttttatgggaccaacgctgggtggatttctgt

SEQ ID NO: 755480 - DNA, 74 bp, Homo sapiens
ctacatttgtgaaagtcagtttctgaggaatttcatcagctctggccaggctgccgcacctctacaggaacttt

SEQ ID NO: 755481 - DNA, 100 bp, Homo sapiens
gtcagcctctggttcagactgcagtaaccaaatttgaacctcccgctccctttgtcactcgctttttgaacacaagagcaatgaaggaaacctttaagag

SEQ ID NO: 755482 - DNA, 76 bp, Homo sapiens
tgatcacgcagctggctggcttcagtggaccatttaatgatgccctgctgtatacaacaccagtgcagtctgggat

SEQ ID NO: 755483 - DNA, 100 bp, Homo sapiens
tcctcaggtgagctggagctgcccggctcggcagcgggaaggacagtggtgattatcctcttaccatgcctggacctcagtggaaaaaatttcgttcaaa

SEQ ID NO: 755484 - DNA, 100 bp, Homo sapiens
attttggggcagaatacagagatatggaatcaggtactgggtacattgacaatgtgaccctgatttcagcccgccctgtctctggagccccagcaccctg

SEQ ID NO: 755485 - DNA, 100 bp, Homo sapiens
ggtgggactcaatgttctcgatgccaatctctgcttgaaaggagaagacttggattctcaggaatctgtcttgaactatcgtttcgatcctctcggcatt

SEQ ID NO: 755486 - DNA, 75 bp, Homo sapiens
ggaaggggtcccgaagccccctgcaggaactctacaacccaatccaggggcagatttattgaaattaactagaga

SEQ ID NO: 755487 - DNA, 100 bp, Homo sapiens
tttgcgttcgggctgggagcgtgctttccacgacggtgacacgcttccctggattggggtgaggacgcttgagcggaagttagaagcaaaaatgatcaag

SEQ ID NO: 755488 - DNA, 100 bp, Homo sapiens
ttgtgaacgtagtctggaagacttgcttcgagaaaggaaacctgtgaggagagcctgacaaggagctgaatcctaagaagaagatttgggagcagatcca

SEQ ID NO: 755489 - DNA, 100 bp, Homo sapiens
tggtgatgcaagaagtttctaggaaaggccggacaccaggtctcctctgagcctccggcctccataagacccaaaacagatgacacctcttcccagtccc

SEQ ID NO: 755490 - DNA, 82 bp, Homo sapiens
cacccaaatcctcttctccaagaagcactctcgagtggaccctgaggagctcttcaccaagctcgaccgcattggcaagggc

SEQ ID NO: 755491 - DNA, 100 bp, Homo sapiens
cccggaggcgacatggggcacccggtgtaccgcggcgagaagccccagctgcactacgcgggaaactttatggtgatgttccttttatagaagaaagaca

SEQ ID NO: 755492 - DNA, 100 bp, Homo sapiens
tctagcccaggacttggatcaacacctttaacttcaagaagacagcaacagcttgcacaactacagaaagaaaaatcagagattctgaaaaatctggcat

SEQ ID NO: 755493 - DNA, 75 bp, Homo sapiens
tgtaaatgttgagcctttttggcctggcttgtttgcaaagactgacaggccaactgttatagaatacgatgatca

SEQ ID NO: 755494 - DNA, 100 bp, Homo sapiens
caagaaggagcggaacactgaccaggcgtccatgcccgacaacacagctattcctgcaccaactgacctgaagttcactcaggtcacacccacaagcctg

SEQ ID NO: 755495 - DNA, 75 bp, Homo sapiens
gcgcagacctggtggaggtgttaaatgaaaccggacctgcgcttgccaaggcaaagaccccaacacctgtggtgc

SEQ ID NO: 755496 - DNA, 98 bp, Homo sapiens
gatgagaacaactactcattgagccgggagctgctcatcaaggaacttgctactaccagcaccatgccctaccaatatccagcactgaccccggagca

SEQ ID NO: 755497 - DNA, 74 bp, Homo sapiens
tccgagctgaaacagaagatccactcgattacagaccattgtgatgaatgactgtattatccgaggggatctgg

SEQ ID NO: 755498 - DNA, 99 bp, Homo sapiens
gctctgcccggcgagtcgggctctggaggaaaagaaaggccaccagcccctcgggttccaagatgcagctactggagacagagttctcacacaccgtgg

SEQ ID NO: 755499 - DNA, 50 bp, Homo sapiens
cgcaactctcagttcgagagtaaaggtgcttttgaagatgatgatatcac

SEQ ID NO: 755500 - DNA, 82 bp, Homo sapiens
attttcccaaaacagaagtatttgtcaaagaagcttttgtctggtcctctgagccccagtgagagtttcctgaggtacctca

SEQ ID NO: 755501 - DNA, 75 bp, Homo sapiens
cccccaacccagaccacacccttgagcctgagcccgacattattcctgaggtactccaaagattcaggtttactc

SEQ ID NO: 755502 - DNA, 75 bp, Homo sapiens
tgacactagtcttgaatacaagtaacttgggtttttactcctgtaacaactgaaataacaagtcttgatacagag

SEQ ID NO: 755503 - DNA, 74 bp, Homo sapiens
ccggcggacagtgagggcgcggaatgcacggtgcagagtggtgtgcacaggagcctgactgcagagattgaagg

SEQ ID NO: 755504 - DNA, 75 bp, Homo sapiens
gcgaacgccagggaccctgtgcaggcctgctcctccgtttgcaagtggacatcctcatcatggatgatgacgacg

SEQ ID NO: 755505 - DNA, 98 bp, Homo sapiens
gaagctggccaaagcctgcccagacggctcacctgtgcgggatggaacaaaagccgactccacgggaacccactccctctacacgatgtaccaggact

SEQ ID NO: 755506 - DNA, 90 bp, Homo sapiens
catggaggctgagcatttattcagatcatggaagggaagtggttgctgtgtatgttactggtgcttggaactgctattgttgaggctcat

SEQ ID NO: 755507 - DNA, 74 bp, Homo sapiens
accgagatgacctctatgctgagcaggaaggaaaatcacctcggcagtgtttgaaggaaggatactgcaactct

SEQ ID NO: 755508 - DNA, 73 bp, Homo sapiens
ggatttgttaaggattccaagtaactcttatttgactggtcgaattgacaaatcttaccctacagtatgtggc

SEQ ID NO: 755509 - DNA, 75 bp, Homo sapiens
aagagctcggtgctcgagaacttcgtgggcagatgccagaggaacaagcattctgtgttttggtgaaaatcatgt

SEQ ID NO: 755510 - DNA, 74 bp, Homo sapiens
atagatcccagttttacttcctaacaaaatcacagaaggtctgaagaaaaccctgcgggatgagatcaatgcca

SEQ ID NO: 755511 - DNA, 75 bp, Homo sapiens
ctgactttcagctatggaatcgaggaatggaaagcccaattcattaaaacagaaaggaagaagctcctgaactac

SEQ ID NO: 755512 - DNA, 75 bp, Homo sapiens
tgtcgctctgcctttgacaggagaggctgcttcttgtagagacaccattcgcttttcacccaagatgatttgatg

SEQ ID NO: 755513 - DNA, 100 bp, Homo sapiens
tattacatgggccagcactgcttcatccgggaagtgcttggggatggagtgcctccaaaggttgctgagtaatctatgccagcaattatgacaatgttag

SEQ ID NO: 755514 - DNA, 74 bp, Homo sapiens
agagaacttcttatgaatcaaaaaaggttggttcttacttgaaatctccaaaattccctatttggattgttggc

SEQ ID NO: 755515 - DNA, 83 bp, Homo sapiens
ccgcttggggcccgcacggaccctctacttcatggctgcttcaacccccaactccactgctggtgcagccatgaactccttga

SEQ ID NO: 755516 - DNA, 97 bp, Homo sapiens
cggtgtgggagctcaggcggcggcggccgctgaggaggaggagcgagaggtggtgcgggtccgagtcaagcctgaactctttgcttccggaatccgg

SEQ ID NO: 755517 - DNA, 75 bp, Homo sapiens
aagaactcaggcttcaagcgttctcgaacccttgaggggaagttaaagctctggattaatcgaattacagctgct

SEQ ID NO: 755518 - DNA, 100 bp, Homo sapiens
gagagatcagccaaaattacaagtctgccacctcctcctccaactctttttgaggttcaaaccttgtactactcagctgatcacaagctgcttgatggga

SEQ ID NO: 755519 - DNA, 100 bp, Homo sapiens
gcaatctcctcctccactgccactacagggaagtgcatcacatgtcagaatcttatggcaagggccttatatgacaatgtcccagagtgtgccgaggaac
